United States Patent Application Publication US 2022/0090207 A1 - sequence listing, part 6

SEQ ID NO: 62861 - DNA, 98 bp, Homo sapiens
  chr2:24240163-24240261
  hypo
ggtgccctacacagcgctcaccatgctgctgactccctgcccaagggagcgggactcggccaccgcctaccgtgagtgcagccgtgggtttcgggttc

SEQ ID NO: 62862 - DNA, 30 bp, Homo sapiens
  chr2:24253625-24253655
  hypo
ctgctacacagcagcgagcctcagctcagg

SEQ ID NO: 62863 - DNA, 40 bp, Homo sapiens
  chr2:24279834-24279874
  hypo
acaggtgtaagccatggtgcccggccggttgtctttttct

SEQ ID NO: 62864 - DNA, 39 bp, Homo sapiens
  chr2:24318005-24318044
  hypo
aacagttaaaagtttaacaaccggaacagctccagtctg

SEQ ID NO: 62865 - DNA, 30 bp, Homo sapiens
  chr2:24392153-24392183
  hypo
acgctttctgctctcgtaagcccctcatcc

SEQ ID NO: 62866 - DNA, 30 bp, Homo sapiens
  chr2:24394927-24394957
  hypo
cagagatgggaccacgcaggcatctctaat

SEQ ID NO: 62867 - DNA, 31 bp, Homo sapiens; identical to SEQ ID NO: 15957
  chr2:24412760-24412791
  hypo

SEQ ID NO: 62868 - DNA, 30 bp, Homo sapiens
  chr2:24413767-24413797
  hypo
ttcttcagcgccttcgcccgggcctttgcc

SEQ ID NO: 62869 - DNA, 30 bp, Homo sapiens; identical to SEQ ID NO: 15958
  chr2:24426359-24426389
  hypo

SEQ ID NO: 62870 - DNA, 215 bp, Homo sapiens; identical to SEQ ID NO: 15959
  chr2:24443621-24443836
  hypo

SEQ ID NO: 62871 - DNA, 30 bp, Homo sapiens; identical to SEQ ID NO: 15960
  chr2:24444076-24444106
  hypo

SEQ ID NO: 62872 - DNA, 329 bp, Homo sapiens; identical to SEQ ID NO: 15961
  chr2:24584024-24584353
  hypo

SEQ ID NO: 62873 - DNA, 7 bp, Homo sapiens
  chr2:24584977-24584984
  hypo
accacgc

SEQ ID NO: 62874 - DNA, 41 bp, Homo sapiens
  chr2:24678877-24678918
  hypo
ggattacaggcttgagctactgcgcccggccgacaaaacac

SEQ ID NO: 62875 - DNA, 29 bp, Homo sapiens
  chr2:24681768-24681797
  hypo
tgagccaccgcgcccggccccatctctga

SEQ ID NO: 62876 - DNA, 30 bp, Homo sapiens; identical to SEQ ID NO: 37218
  chr2:24715079-24715109
  hypo

SEQ ID NO: 62877 - DNA, 30 bp, Homo sapiens; identical to SEQ ID NO: 37219
  chr2:24739679-24739709
  hypo

SEQ ID NO: 62878 - DNA, 31 bp, Homo sapiens; identical to SEQ ID NO: 15964
  chr2:24763332-24763363
  hypo

SEQ ID NO: 62879 - DNA, 4 bp, Homo sapiens
  chr2:24844610-24844614
  hypo
agtg

SEQ ID NO: 62880 - DNA, 517 bp, Homo sapiens
  chr2:25044264-25044781
  hypo
cgtgaacctccccacccgaattgcctcagttgtcctgagcctcatgtctctcctggtggtgggccaggcccctgcatgggaagggagcctgctgcggggcaggccagctgggggtgctcacctatgcgcagcatgaagttattgaaggactggttgttgatgttggtgagcgtatccttcatggccagcgcgaagtcggccaggtcagccaggtgctgccagcgctctctctcggacttgtcttcctgtgccaggggaccgtggagaaagtgtcaggggccgctcactgcagcagcctgctctgctgccttccctggcagtgttctgggggtggattccctacacctagatgttcaaggccttacttttcctcccacaaaggagtcgcagccacgctagctctgacttgccactgtgacaaagttcacgtagcaggtctaggcaaagactgggcaattgagcagaggagacggacctgtgagtctgaccacgaggcggaccccttcaccttggctgg

SEQ ID NO: 62881 - DNA, 206 bp, Homo sapiens; identical to SEQ ID NO: 15966
  chr2:25047256-25047462
  hypo

SEQ ID NO: 62882 - DNA, 173 bp, Homo sapiens; identical to SEQ ID NO: 15967
  chr2:25057322-25057495
  hypo

SEQ ID NO: 62883 - DNA, 30 bp, Homo sapiens
  chr2:25065535-25065565
  hypo
cgtgccacaagaagcgcagcagtcctgcgt

SEQ ID NO: 62884 - DNA, 276 bp, Homo sapiens; identical to SEQ ID NO: 15968
  chr2:25075398-25075674
  hypo

SEQ ID NO: 62885 - DNA, 30 bp, Homo sapiens
  chr2:25171477-25171507
  hypo
gtgcttctccaatccggcggttccgataaa

SEQ ID NO: 62886 - DNA, 29 bp, Homo sapiens
  chr2:25220423-25220452
  hypo
ttacaggcgtgagccactgtgcccagcct

SEQ ID NO: 62887 - DNA, 80 bp, Homo sapiens; identical to SEQ ID NO: 37222
  chr2:25265054-25265134
  hypo

SEQ ID NO: 62888 - DNA, 30 bp, Homo sapiens
  chr2:25269261-25269291
  hypo
acaaaaaaccacaccgaaaatgtgcttgac

SEQ ID NO: 62889 - DNA, 30 bp, Homo sapiens
  chr2:25342403-25342433
  hypo
gaacttgtacgtaatcgatgatcttgtgat

SEQ ID NO: 62890 - DNA, 60 bp, Homo sapiens
  chr2:25369950-25370010
  hypo
cactggtgcagctgagcgcctgtgaactgtctgttctccagcgcccggcccctgttcagt

SEQ ID NO: 62891 - DNA, 30 bp, Homo sapiens; identical to SEQ ID NO: 15971
  chr2:25383389-25383419
  hypo

SEQ ID NO: 62892 - DNA, 729 bp, Homo sapiens; identical to SEQ ID NO: 37223
  chr2:25391012-25391741
  hypo

SEQ ID NO: 62893 - DNA, 30 bp, Homo sapiens
  chr2:25426136-25426166
  hypo
cactgtgcccggcccgtgagggacttttga

SEQ ID NO: 62894 - DNA, 234 bp, Homo sapiens; identical to SEQ ID NO: 1368
  chr2:25439138-25439372
  hypo

SEQ ID NO: 62895 - DNA, 121 bp, Homo sapiens; identical to SEQ ID NO: 1369
  chr2:25440005-25440126
  hypo

SEQ ID NO: 62896 - DNA, 31 bp, Homo sapiens; identical to SEQ ID NO: 15975
  chr2:25444163-25444194
  hypo

SEQ ID NO: 62897 - DNA, 150 bp, Homo sapiens; identical to SEQ ID NO: 1370
  chr2:25457151-25457301
  hypo

SEQ ID NO: 62898 - DNA, 140 bp, Homo sapiens; identical to SEQ ID NO: 1371
  chr2:25458562-25458702
  hypo

SEQ ID NO: 62899 - DNA, 96 bp, Homo sapiens; identical to SEQ ID NO: 1372
  chr2:25459790-25459886
  hypo

SEQ ID NO: 62900 - DNA, 109 bp, Homo sapiens; identical to SEQ ID NO: 1373
  chr2:25461983-25462092
  hypo

SEQ ID NO: 62901 - DNA, 449 bp, Homo sapiens; identical to SEQ ID NO: 1374
  chr2:25463163-25463612
  hypo

SEQ ID NO: 62902 - DNA, 173 bp, Homo sapiens; identical to SEQ ID NO: 1375
  chr2:25464416-25464589
  hypo

SEQ ID NO: 62903 - DNA, 775 bp, Homo sapiens; identical to SEQ ID NO: 1376
  chr2:25466754-25467529
  hypo

SEQ ID NO: 62904 - DNA, 99 bp, Homo sapiens; identical to SEQ ID NO: 1377
  chr2:25468110-25468209
  hypo

SEQ ID NO: 62905 - DNA, 311 bp, Homo sapiens; identical to SEQ ID NO: 1378
  chr2:25468876-25469187
  hypo

SEQ ID NO: 62906 - DNA, 174 bp, Homo sapiens; identical to SEQ ID NO: 1379
  chr2:25469473-25469647
  hypo

SEQ ID NO: 62907 - DNA, 124 bp, Homo sapiens; identical to SEQ ID NO: 1380
  chr2:25469905-25470029
  hypo

SEQ ID NO: 62908 - DNA, 163 bp, Homo sapiens; identical to SEQ ID NO: 1381
  chr2:25470448-25470611
  hypo

SEQ ID NO: 62909 - DNA, 193 bp, Homo sapiens; identical to SEQ ID NO: 1382
  chr2:25470891-25471084
  hypo

SEQ ID NO: 62910 - DNA, 30 bp, Homo sapiens
  chr2:25481256-25481286
  hypo
ttagaacctgtaagcgaattgtgctttatc

SEQ ID NO: 62911 - DNA, 91 bp, Homo sapiens; identical to SEQ ID NO: 1383
  chr2:25497815-25497906
  hypo

SEQ ID NO: 62912 - DNA, 238 bp, Homo sapiens; identical to SEQ ID NO: 1384
  chr2:25505303-25505541
  hypo

SEQ ID NO: 62913 - DNA, 30 bp, Homo sapiens; identical to SEQ ID NO: 1385
  chr2:25522993-25523023
  hypo

SEQ ID NO: 62914 - DNA, 168 bp, Homo sapiens
  chr2:25536769-25536937
  hypo
cccgctgctcacctttcggtcctcctcccgctccgcagcagagctgctggtgtccccggggccgctggagggcatggcgggcatctgggcgccgggaggcaggctggggctgcgcggggctggggggctgctgggctttggggaaggaattatcgtggtctttggagg

SEQ ID NO: 62915 - DNA, 30 bp, Homo sapiens
  chr2:25537246-25537276
  hypo
ccctccgtgtcgctgcggccaatgggtgcc

SEQ ID NO: 62916 - DNA, 30 bp, Homo sapiens
  chr2:25566725-25566755
  hypo
gcttacatataacacggccccaaacagcag

SEQ ID NO: 62917 - DNA, 30 bp, Homo sapiens; identical to SEQ ID NO: 15993
  chr2:25600737-25600767
  hypo

SEQ ID NO: 62918 - DNA, 30 bp, Homo sapiens
  chr2:25623181-25623211
  hypo
tcaagatggagcaccgcactgtgcaaatgc

SEQ ID NO: 62919 - DNA, 90 bp, Homo sapiens; identical to SEQ ID NO: 15994
  chr2:25627710-25627800
  hypo

SEQ ID NO: 62920 - DNA, 86 bp, Homo sapiens
  chr2:25656705-25656791
  hypo
aaggaaaatgagaatcagatacgcacgtgataatcctggactctggaagtgggctcagcctctgcgttcttacctgtttttgtttt

SEQ ID NO: 62921 - DNA, 31 bp, Homo sapiens
  chr2:25684629-25684660
  hypo
tgaccacaccaataaacgtaaacttgcaaat

SEQ ID NO: 62922 - DNA, 210 bp, Homo sapiens
  chr2:25766959-25767169
  hypo
aaagaaacaggcacccgcagcccagcgtgggggatgtggagtaccaccctcagggctcgcgggttgggtcatgaaggtgagtcaggggtggggacacggtgtccaactgagggacagattccaaagtgggcagcaggcgactcactgcaatggtttcatgtgtgctcctgtgccagggctgagacttgttttcctcggataaccatgaac

SEQ ID NO: 62923 - DNA, 45 bp, Homo sapiens
  chr2:25924789-25924834
  hypo
gggctccccagtggcccggcagaataatgacggcttctgtggcaa

SEQ ID NO: 62924 - DNA, 38 bp, Homo sapiens
  chr2:25980219-25980257
  hypo
taccctggctgggcgcggtggctcacatctgtaatccc

SEQ ID NO: 62925 - DNA, 105 bp, Homo sapiens; identical to SEQ ID NO: 15995
  chr2:26027550-26027655
  hypo

SEQ ID NO: 62926 - DNA, 30 bp, Homo sapiens
  chr2:26105459-26105489
  hypo
tgatgtcagtgatacgagttgcagagtctt

SEQ ID NO: 62927 - DNA, 100 bp, Homo sapiens; identical to SEQ ID NO: 15996
  chr2:26153168-26153268
  hypo

SEQ ID NO: 62928 - DNA, 250 bp, Homo sapiens
  chr2:26204215-26204465
  hypo
tctccttgacattcttggtgacgaaggaggagaggtccttgatgtagacgccagtctcggggttctctttcagctctagcctcttgcccggctccttggagagcaggtctcgaatctcttcctggtagatctccaaataggaggcccggaccaggtactgttggttctgggagcgggagatgtgggtgaagatgtgctcaaaggcattcgggatgaccccgcgcagctcgggctccacccaggtcccctg

SEQ ID NO: 62929 - DNA, 31 bp, Homo sapiens
  chr2:26215604-26215635
  hypo
ctccatcctccaatgacgtctcatccctctc

SEQ ID NO: 62930 - DNA, 116 bp, Homo sapiens
  chr2:26217600-26217716
  hypo
atcctgaagtggattaggtgccgcagttgctgctcgtgttgaatccagaaccgtagccagacataggactggaggacgagcgaaagatgctgaccgagtctggagatcctaaggag

SEQ ID NO: 62931 - DNA, 38 bp, Homo sapiens
  chr2:26320143-26320181
  hypo
tttctttgtttgtttttgagacggagtctcactctgtc

SEQ ID NO: 62932 - DNA, 164 bp, Homo sapiens
  chr2:26362292-26362456
  hypo
agggtttcaataagaccgggctaaaatggcagagggaaatgcagggttgaaggcaaaggtagtgtgtgaatgggggcgcggtgtatttctggtgagcctgctaggtgcttttttggcactgctctaggtactttgggttaggtcttcaacgtccttgtgaatta

SEQ ID NO: 62933 - DNA, 31 bp, Homo sapiens
  chr2:26385183-26385214
  hypo
ccagacttgaaattcacggggcctggaattc

SEQ ID NO: 62934 - DNA, 30 bp, Homo sapiens
  chr2:26393235-26393265
  hypo
gttaggatgacacacggtcaccctaaagag

SEQ ID NO: 62935 - DNA, 161 bp, Homo sapiens; identical to SEQ ID NO: 37247
  chr2:26395432-26395593
  hypo

SEQ ID NO: 62936 - DNA, 218 bp, Homo sapiens; identical to SEQ ID NO: 37248
  chr2:26396087-26396305
  hypo

SEQ ID NO: 62937 - DNA, 32 bp, Homo sapiens
  chr2:26405759-26405791
  hypo
atgaaggctcttgggacgcaggctagactccc

SEQ ID NO: 62938 - DNA, 30 bp, Homo sapiens; identical to SEQ ID NO: 15998
  chr2:26411690-26411720
  hypo

SEQ ID NO: 62939 - DNA, 25 bp, Homo sapiens
  chr2:26493752-26493777
  hypo
ttttttttttttgagacggagtctc

SEQ ID NO: 62940 - DNA, 201 bp, Homo sapiens
  chr2:26524623-26524824
  hypo
tcatccaagccccggcgctaaggttgccagatattaaaaagccctttttttgtatgtgaataaacgaaagggaatggcagtcggagtcgtaactcagctgggctcttagcatcggccggtaacacacttatccaagagactggacttggtggccttaggttggccccactgcctcagggcgttggcagctactgcaatcct

SEQ ID NO: 62941 - DNA, 34 bp, Homo sapiens
  chr2:26528086-26528120
  hypo
aaccctttctctcggttctctactctaagccact

SEQ ID NO: 62942 - DNA, 30 bp, Homo sapiens
  chr2:26528422-26528452
  hypo
atcacagctaaaatgcgcaagttagcccat

SEQ ID NO: 62943 - DNA, 176 bp, Homo sapiens; identical to SEQ ID NO: 16001
  chr2:26534836-26535012
  hypo

SEQ ID NO: 62944 - DNA, 116 bp, Homo sapiens
  chr2:26535448-26535564
  hypo
gcccatacagagagccgatttaggtgagcccagcaaagccaagcatacttcagcgtctccatagaaacttcctgtctgtatcatagccacacgcctgcatgcgcacacacgcctcg

SEQ ID NO: 62945 - DNA, 113 bp, Homo sapiens
  chr2:26541945-26542058
  hypo
acgatgcaaatttccgcaaggaagagctggcagggcagtgtgcagatgggatgggagggaagaggggagggagccagggctgaatttacagaggaagcgctacagcctgtgac

SEQ ID NO: 62946 - DNA, 44 bp, Homo sapiens
  chr2:26566583-26566627
  hypo
tataggcgtgagccacggcgcccggcccaaataccctctttttg

SEQ ID NO: 62947 - DNA, 30 bp, Homo sapiens; identical to SEQ ID NO: 16003
  chr2:26590880-26590910
  hypo

SEQ ID NO: 62948 - DNA, 132 bp, Homo sapiens
  chr2:26706035-26706167
  hypo
tgtgtgagttggtatgcgtgcgtgtatgagtgggtgcatgtgtgtgtgcgtgcctgtgtgtggacttgtctccactcttcccacacccccagcctctcctccctctcatgccccctgcgcagctctcagtct

SEQ ID NO: 62949 - DNA, 31 bp, Homo sapiens; identical to SEQ ID NO: 1388
  chr2:26749880-26749911
  hypo

SEQ ID NO: 62950 - DNA, 93 bp, Homo sapiens
  chr2:26788280-26788373
  hypo
acaataacccagatgaggaatgagcagcttgcccaaagtcattcagcaagttgccgagcctcggctttgtgacttcaacgccccaactcaccc

SEQ ID NO: 62951 - DNA, 118 bp, Homo sapiens
  chr2:26800377-26800495
  hypo
ccatagatggtccagcagcatcggaagtactatcaagacaagacgggcacagtgcctcgagtcccctactttgcgatgcccgtgagggagccggaacggtaccccctccccaccgtcc

SEQ ID NO: 62952 - DNA, 95 bp, Homo sapiens; identical to SEQ ID NO: 16006
  chr2:26832823-26832918
  hypo

SEQ ID NO: 62953 - DNA, 188 bp, Homo sapiens
  chr2:26965248-26965436
  hypo
gtcatgccagtggcctcggtggccccagcagccctgccttcagggcagggagcaggagccgtgacgggcaggagtgtgctgaggctgggatgggccagtaccacctgtccacctggctccctcaccacttaacagcttaggagcctcggaaggcccacaacccacccctaggacgccacctcccatgg

SEQ ID NO: 62954 - DNA, 251 bp, Homo sapiens; identical to SEQ ID NO: 16007
  chr2:26986219-26986470
  hypo

SEQ ID NO: 62955 - DNA, 12 bp, Homo sapiens
  chr2:27007338-27007350
  hypo
gagacagagtct

SEQ ID NO: 62956 - DNA, 6 bp, Homo sapiens
  chr2:27007704-27007710
  hypo
tacagg

SEQ ID NO: 62957 - DNA, 1666 bp, Homo sapiens; identical to SEQ ID NO: 37260
  chr2:27070260-27071926
  hypo

SEQ ID NO: 62958 - DNA, 456 bp, Homo sapiens; identical to SEQ ID NO: 1393
  chr2:27072486-27072942
  hypo

SEQ ID NO: 62959 - DNA, 25 bp, Homo sapiens
  chr2:27090601-27090626
  hypo
cgtgagccaccgcgcccggccccca

SEQ ID NO: 62960 - DNA, 30 bp, Homo sapiens
  chr2:27196795-27196825
  hypo
gcacatgtctccctcgcttaggatgttagc

SEQ ID NO: 62961 - DNA, 31 bp, Homo sapiens
  chr2:27246589-27246620
  hypo
actgagctctgtgcaccgctcctgtgaagtt

SEQ ID NO: 62962 - DNA, 30 bp, Homo sapiens; identical to SEQ ID NO: 16011
  chr2:27247193-27247223
  hypo

SEQ ID NO: 62963 - DNA, 30 bp, Homo sapiens
  chr2:27248775-27248805
  hypo
ggctggagaaggaacgtgacttctacttca

SEQ ID NO: 62964 - DNA, 30 bp, Homo sapiens; identical to SEQ ID NO: 16012
  chr2:27249334-27249364
  hypo

SEQ ID NO: 62965 - DNA, 30 bp, Homo sapiens
  chr2:27252499-27252529
  hypo
cccaagcccacctccgtggctagtgtctaa

SEQ ID NO: 62966 - DNA, 31 bp, Homo sapiens
  chr2:27269293-27269324
  hypo
gtttttttttttttttggaaacggagtctca

SEQ ID NO: 62967 - DNA, 248 bp, Homo sapiens
  chr2:27303536-27303784
  hypo
acagggaccagggtcactgaccgtacagggaggaataaagaggcctccttctgcctctgccaggtaccgccgcttcctccgccctcgctaccgtgtggcctacaagacagtgaccgacatggagtggaggtgctgtcagggttatgggggcgatgactgtgctgagagtcccgctccagcgctggggcctgcgtcttccacaccacggcccctggcccagcctgcccgccccaacctctctggctcca

SEQ ID NO: 62968 - DNA, 250 bp, Homo sapiens; identical to SEQ ID NO: 1395
  chr2:27308892-27309142
  hypo

SEQ ID NO: 62969 - DNA, 111 bp, Homo sapiens; identical to SEQ ID NO: 1396
  chr2:27309206-27309317
  hypo

SEQ ID NO: 62970 - DNA, 30 bp, Homo sapiens
  chr2:27323812-27323842
  hypo
atgcgctctgctgccggagcaccgtgaggc

SEQ ID NO: 62971 - DNA, 98 bp, Homo sapiens
  chr2:27354485-27354583
  hypo
tttctggtcattaaacgtggggtggtgcctgcctgccctgccccaatgactcacgccgtgagggcaacagatgcagctggcaacgactgtccacagcc

SEQ ID NO: 62972 - DNA, 156 bp, Homo sapiens
  chr2:27433169-27433325
  hypo
aacaccctacattgatccaaacgctatggtctcgcatctctccagaaagagggcggccaaaagcaagagctagctgttgtttcactacaactataacatgccaaggcacaaacagcagattgtgggacccccccccctttttttttggagacggag

SEQ ID NO: 62973 - DNA, 30 bp, Homo sapiens
  chr2:27439770-27439800
  hypo
cattctgctttgggcgacccagcgccgaaa

SEQ ID NO: 62974 - DNA, 995 bp, Homo sapiens; identical to SEQ ID NO: 37270
  chr2:27484927-27485922
  hypo

SEQ ID NO: 62975 - DNA, 142 bp, Homo sapiens
  chr2:27498158-27498300
  hypo
aggcctggcagcaacgctcctacgctgccttgggccgcaggcctgctaagccctccgctctcgcttccctgcgcgcgaaataagtcccagggccaatgtggcctccccacccagtgcttccgggggcgccaaaaaacgacct

SEQ ID NO: 62976 - DNA, 30 bp, Homo sapiens; identical to SEQ ID NO: 16017
  chr2:27532710-27532740
  hypo

SEQ ID NO: 62977 - DNA, 18 bp, Homo sapiens
  chr2:27543106-27543124
  hypo
gaaaaaaaaaaagaaaaa

SEQ ID NO: 62978 - DNA, 30 bp, Homo sapiens
  chr2:27600308-27600338
  hypo
ccttatagtgcctacgttagtctgtgtgga

SEQ ID NO: 62979 - DNA, 30 bp, Homo sapiens; identical to SEQ ID NO: 16018
  chr2:27601632-27601662
  hypo

SEQ ID NO: 62980 - DNA, 19 bp, Homo sapiens
  chr2:27630896-27630915
  hypo
agagcgaaattctgtctca

SEQ ID NO: 62981 - DNA, 242 bp, Homo sapiens
  chr2:27668570-27668812
  hypo
cactggtgaggccttccggttttccaaccctgtgcccttaccggtacatgctgcttagctgggagtggcacctcaaagggaatgtctgtatcctgaaaatcagagtggtcaaggccatctagagtcccttcctcgattgcctgcagtagagtgggcaaccatgaactaggcacagctcgcgactggcaaaaacctccaccctcggggcacagcttccctactcacatcggtcaggtccaaaa

SEQ ID NO: 62982 - DNA, 58 bp, Homo sapiens; identical to SEQ ID NO: 16019
  chr2:27703954-27704012
  hypo

SEQ ID NO: 62983 - DNA, 19 bp, Homo sapiens
  chr2:27764226-27764245
  hypo
ggctcggcatcagagggag

SEQ ID NO: 62984 - DNA, 30 bp, Homo sapiens; identical to SEQ ID NO: 16020
  chr2:27805319-27805349
  hypo

SEQ ID NO: 62985 - DNA, 31 bp, Homo sapiens; identical to SEQ ID NO: 16021
  chr2:27902576-27902607
  hypo

SEQ ID NO: 62986 - DNA, 309 bp, Homo sapiens; identical to SEQ ID NO: 37282
  chr2:27938296-27938605
  hypo

SEQ ID NO: 62987 - DNA, 31 bp, Homo sapiens
  chr2:28058161-28058192
  hypo
aaaaagaattatgacacgtctgatgtagatc

SEQ ID NO: 62988 - DNA, 175 bp, Homo sapiens; identical to SEQ ID NO: 16022
  chr2:28065674-28065849
  hypo

SEQ ID NO: 62989 - DNA, 30 bp, Homo sapiens; identical to SEQ ID NO: 16023
  chr2:28442524-28442554
  hypo

SEQ ID NO: 62990 - DNA, 18 bp, Homo sapiens
  chr2:28502826-28502844
  hypo
gcccggcagaggcttttt

SEQ ID NO: 62991 - DNA, 30 bp, Homo sapiens
  chr2:28509555-28509585
  hypo
tcctagaagcccttcgatggagtatctttg

SEQ ID NO: 62992 - DNA, 30 bp, Homo sapiens
  chr2:28543283-28543313
  hypo
catgtcagcgctgtcgcacactctgagaag

SEQ ID NO: 62993 - DNA, 51 bp, Homo sapiens
  chr2:28572402-28572453
  hypo
gtgagacagtgagaagcgtgttgagcctccaggctgcgaggctgcacctag

SEQ ID NO: 62994 - DNA, 31 bp, Homo sapiens
  chr2:28577899-28577930
  hypo
aggatgagacctcactcgttcccaccttgga

SEQ ID NO: 62995 - DNA, 31 bp, Homo sapiens
  chr2:28581021-28581052
  hypo
tgtgcagtgattattccgcaccgtggtgatg

SEQ ID NO: 62996 - DNA, 150 bp, Homo sapiens; identical to SEQ ID NO: 16025
  chr2:28586479-28586629
  hypo

SEQ ID NO: 62997 - DNA, 19 bp, Homo sapiens
  chr2:28608277-28608296
  hypo
gtcttgaaaagcttaggtg

SEQ ID NO: 62998 - DNA, 119 bp, Homo sapiens
  chr2:28676947-28677066
  hypo
atctgtgccctgtgaagggcccgcttggagccatgcatgtctgggcctgagggtggcggtgcctacgtgaggccctgcggtctcttcaggagctccccgagaggggcacttggccactg

SEQ ID NO: 62999 - DNA, 64 bp, Homo sapiens
  chr2:28819804-28819868
  hypo
gtgggctggaagctaaggccacgttcttaaaatccattggcctgggccaggcgcggtggctcac

SEQ ID NO: 63000 - DNA, 30 bp, Homo sapiens; identical to SEQ ID NO: 16027
  chr2:28918637-28918667
  hypo

SEQ ID NO: 63001 - DNA, 35 bp, Homo sapiens; identical to SEQ ID NO: 16028
  chr2:28919659-28919694
  hypo

SEQ ID NO: 63002 - DNA, 18 bp, Homo sapiens
  chr2:28935037-28935055
  hypo
actctgtctcacaaaaaa

SEQ ID NO: 63003 - DNA, 30 bp, Homo sapiens
  chr2:28971670-28971700
  hypo
gctgcgtttactaaccggagtcaccaggct

SEQ ID NO: 63004 - DNA, 433 bp, Homo sapiens; identical to SEQ ID NO: 37293
  chr2:29033264-29033697
  hypo

SEQ ID NO: 63005 - DNA, 45 bp, Homo sapiens
  chr2:29062639-29062684
  hypo
ttacaggcgtgagccaccgcgcccggccaattaactttttttaac

SEQ ID NO: 63006 - DNA, 23 bp, Homo sapiens
  chr2:29091584-29091607
  hypo
aagcttcaaactagggctgggcg

SEQ ID NO: 63007 - DNA, 30 bp, Homo sapiens; identical to SEQ ID NO: 37295
  chr2:29120717-29120747
  hypo

SEQ ID NO: 63008 - DNA, 31 bp, Homo sapiens; identical to SEQ ID NO: 16031
  chr2:29225584-29225615
  hypo

SEQ ID NO: 63009 - DNA, 163 bp, Homo sapiens; identical to SEQ ID NO: 37296
  chr2:29337888-29338051
  hypo

SEQ ID NO: 63010 - DNA, 589 bp, Homo sapiens; identical to SEQ ID NO: 1403
  chr2:29338158-29338747
  hypo

SEQ ID NO: 63011 - DNA, 297 bp, Homo sapiens; identical to SEQ ID NO: 1404
  chr2:29338809-29339106
  hypo

SEQ ID NO: 63012 - DNA, 103 bp, Homo sapiens
  chr2:29469961-29470064
  hypo
tcagctgagtgcagcgcctttcccccggcctccgcggcagcgccttttaccccggcctccgcggcagcgcctttcccccggcctccgcggcagcgccttgtgg

SEQ ID NO: 63013 - DNA, 679 bp, Homo sapiens; identical to SEQ ID NO: 37302
  chr2:30144174-30144853
  hypo

SEQ ID NO: 63014 - DNA, 83 bp, Homo sapiens
  chr2:30368627-30368710
  hypo
ctcctggaaaactcacttattaaaagataactagtccttttgcctttgatgctcaggtaaacttcagacgaactaaatgaaaa

SEQ ID NO: 63015 - DNA, 30 bp, Homo sapiens; identical to SEQ ID NO: 37303
  chr2:30369440-30369470
  hypo

SEQ ID NO: 63016 - DNA, 31 bp, Homo sapiens; identical to SEQ ID NO: 1409
  chr2:30369485-30369516
  hypo

SEQ ID NO: 63017 - DNA, 30 bp, Homo sapiens; identical to SEQ ID NO: 16038
  chr2:30379567-30379597
  hypo

SEQ ID NO: 63018 - DNA, 28 bp, Homo sapiens
  chr2:30453625-30453653
  hypo
cacaccttctgcccccgctgcagaccgg

SEQ ID NO: 63019 - DNA, 2030 bp, Homo sapiens; identical to SEQ ID NO: 37306
  chr2:30453784-30455814
  hypo

SEQ ID NO: 63020 - DNA, 30 bp, Homo sapiens; identical to SEQ ID NO: 16042
  chr2:30478236-30478266
  hypo

SEQ ID NO: 63021 - DNA, 221 bp, Homo sapiens
  chr2:30482153-30482374
  hypo
gggaagccaatggtcgccggcaccccttgcttcctccctctgttgtctgcctgtgtgacacacatcaatggcaataacttcttccaactcctcgcagaagtgggagaggccggcagcctgcaccgagaggggctttcctctctcttgctccccgcttcgttctgttttggctgcagagagtggttcatccatactctcattccctcgcctccccttgtgga

SEQ ID NO: 63022 - DNA, 195 bp, Homo sapiens
  chr2:30495296-30495491
  hypo
aataacacacagctcccaagccggttttgcccatcgtcattcccttgcaggtctgttaaccagcaccaaggtgatgggtagagcaggttctctgtggcagcctgcatcactgcagctggtgccgaggaactacccgtggctctaccacattggcacagccaggcatacaagatcgctgtccttacagggccagta

SEQ ID NO: 63023 - DNA, 31 bp, Homo sapiens; identical to SEQ ID NO: 16045
  chr2:30521569-30521600
  hypo

SEQ ID NO: 63024 - DNA, 267 bp, Homo sapiens; identical to SEQ ID NO: 16046
  chr2:30525797-30526064
  hypo

SEQ ID NO: 63025 - DNA, 30 bp, Homo sapiens; identical to SEQ ID NO: 16047
  chr2:30581821-30581851
  hypo

SEQ ID NO: 63026 - DNA, 32 bp, Homo sapiens
  chr2:30634156-30634188
  hypo
gaaaaggattgttgccaggtgcggtggctcac

SEQ ID NO: 63027 - DNA, 29 bp, Homo sapiens
  chr2:30667943-30667972
  hypo
ggtgccaaaaaggtcggggactacttctc

SEQ ID NO: 63028 - DNA, 17 bp, Homo sapiens
  chr2:30668466-30668483
  hypo
gggctcagggccaggcg

SEQ ID NO: 63029 - DNA, 124 bp, Homo sapiens
  chr2:30863076-30863200
  hypo
ggaaatccactttcacgtccaccggtatccaatagacaccctccccacatccaaggaggaccttcaactctggtgccacaaacggtgggaagagaaagaagagaggctgcgttccttctatcaa

SEQ ID NO: 63030 - DNA, 31 bp, Homo sapiens
  chr2:30870559-30870590
  hypo
agggttttactacttacggtaagtagttttg

SEQ ID NO: 63031 - DNA, 319 bp, Homo sapiens; identical to SEQ ID NO: 1413
  chr2:31360270-31360589
  hypo

SEQ ID NO: 63032 - DNA, 125 bp, Homo sapiens; identical to SEQ ID NO: 1414
  chr2:31360630-31360755
  hypo

SEQ ID NO: 63033 - DNA, 890 bp, Homo sapiens; identical to SEQ ID NO: 1415
  chr2:31360816-31361706
  hypo

SEQ ID NO: 63034 - DNA, 266 bp, Homo sapiens
  chr2:31477234-31477500
  hypo
cctctgggtcttcccagactacgtgccggtacaggcacgcctgtgtgggcgctcctgtgcctgggcagagcagccgagtcctgacgcccttcaaaaggccttgccaaccatctgctcgggccgctctttgccgttacttctgggaagcatctaatgtggcatttcttccccgttgtcagccaaactcttcccacattttggaaattgatgccttgttattcctcttttgctcaaatgcctttaaatcttgacggagatttttttgg

SEQ ID NO: 63035 - DNA, 96 bp, Homo sapiens; identical to SEQ ID NO: 16052
  chr2:31550127-31550223
  hypo

SEQ ID NO: 63036 - DNA, 96 bp, Homo sapiens; identical to SEQ ID NO: 16053
  chr2:31551360-31551456
  hypo

SEQ ID NO: 63037 - DNA, 232 bp, Homo sapiens; identical to SEQ ID NO: 16054
  chr2:32142424-32142656
  hypo

SEQ ID NO: 63038 - DNA, 121 bp, Homo sapiens; identical to SEQ ID NO: 16055
  chr2:32244331-32244452
  hypo

SEQ ID NO: 63039 - DNA, 19 bp, Homo sapiens
  chr2:32275096-32275115
  hypo
gtattaaaaaaatatctgg

SEQ ID NO: 63040 - DNA, 28 bp, Homo sapiens
  chr2:32286703-32286731
  hypo
gagccaccacacccggccgaaagagggc

SEQ ID NO: 63041 - DNA, 25 bp, Homo sapiens
  chr2:32290051-32290076
  hypo
aagcaaggatactacatctttcggg

SEQ ID NO: 63042 - DNA, 24 bp, Homo sapiens
  chr2:32290375-32290399
  hypo
cgcgcctggccttaagctaacatt

SEQ ID NO: 63043 - DNA, 121 bp, Homo sapiens; identical to SEQ ID NO: 16058
  chr2:32291346-32291467
  hypo

SEQ ID NO: 63044 - DNA, 18 bp, Homo sapiens
  chr2:32360515-32360533
  hypo
tattctaaatctggtgac

SEQ ID NO: 63045 - DNA, 79 bp, Homo sapiens
  chr2:32367729-32367808
  hypo
gctgggattacaggcatgagtcaccgtgcccggccagaaatcgaaaatttctagaaacgtaaagcagatcagtgggttg

SEQ ID NO: 63046 - DNA, 31 bp, Homo sapiens
  chr2:32482237-32482268
  hypo
attaaatgtcaaaagacggtataagtgtcaa

SEQ ID NO: 63047 - DNA, 121 bp, Homo sapiens; identical to SEQ ID NO: 16059
  chr2:32504349-32504470
  hypo

SEQ ID NO: 63048 - DNA, 29 bp, Homo sapiens
  chr2:32504769-32504798
  hypo
gcccggccgaaagaacctagattttccta

SEQ ID NO: 63049 - DNA, 27 bp, Homo sapiens
  chr2:32560117-32560144
  hypo
tgtactccaacccgggcgacagcgact

SEQ ID NO: 63050 - DNA, 31 bp, Homo sapiens; identical to SEQ ID NO: 16062
  chr2:32580137-32580168
  hypo

SEQ ID NO: 63051 - DNA, 35 bp, Homo sapiens
  chr2:32580380-32580415
  hypo
caggtgagtggcctgagtggccgggcgcgggggct

SEQ ID NO: 63052 - DNA, 37 bp, Homo sapiens
  chr2:32798531-32798568
  hypo
aaattgcaggtgtgagtcaccgcgccctgccagtaaa

SEQ ID NO: 63053 - DNA, 30 bp, Homo sapiens
  chr2:32842796-32842826
  hypo
cactgctcagctccgcgaagagttgctgaa

SEQ ID NO: 63054 - DNA, 45 bp, Homo sapiens
  chr2:32980696-32980741
  hypo
ggagagggagagggagagggagccggagccattctacattctaat

SEQ ID NO: 63055 - DNA, 107 bp, Homo sapiens
  chr2:32983463-32983570
  hypo
gagttgtcccggtaccgcagtgctcgtgctcagcgctccaaagccctccttcatcttcggaacaaggagtttcaagagtgtgtagagtgcttcgaacgctcggttaa

SEQ ID NO: 63056 - DNA, 86 bp, Homo sapiens; identical to SEQ ID NO: 16063
  chr2:33281535-33281621
  hypo

SEQ ID NO: 63057 - DNA, 38 bp, Homo sapiens
  chr2:33304097-33304135
  hypo
gtattgttagtagagacggggtttcaccatgttggcca

SEQ ID NO: 63058 - DNA, 31 bp, Homo sapiens
  chr2:33313220-33313251
  hypo
tgttaaatatggacagtgagccgggcgcggt

SEQ ID NO: 63059 - DNA, 20 bp, Homo sapiens
  chr2:33374270-33374290
  hypo
gactccgtctcactcacaaa

SEQ ID NO: 63060 - DNA, 21 bp, Homo sapiens
  chr2:33530059-33530080
  hypo
acattgtagtgtgggagataa

SEQ ID NO: 63061 - DNA, 30 bp, Homo sapiens
  chr2:33533018-33533048
  hypo
cttgaaccagacagccgggcgtattagaca

SEQ ID NO: 63062 - DNA, 30 bp, Homo sapiens
  chr2:33533298-33533328
  hypo
ctgctcgcattcatgcggtgaaggggagcc

SEQ ID NO: 63063 - DNA, 30 bp, Homo sapiens
  chr2:33622285-33622315
  hypo
gaaggttacacctgcgattgctttgatggg

SEQ ID NO: 63064 - DNA, 39 bp, Homo sapiens
  chr2:33637934-33637973
  hypo
acaggtgtgagccactgcgcccagcccaagtaactctta

SEQ ID NO: 63065 - DNA, 30 bp, Homo sapiens
  chr2:33759233-33759263
  hypo
cattttccatctctgcgtgccgtcttttta

SEQ ID NO: 63066 - DNA, 17 bp, Homo sapiens
  chr2:33802101-33802118
  hypo
acacctataatcacagc

SEQ ID NO: 63067 - DNA, 30 bp, Homo sapiens
  chr2:33827700-33827730
  hypo
tgaactatttagaacgtactactgcctgac

SEQ ID NO: 63068 - DNA, 303 bp, Homo sapiens
  chr2:33952401-33952704
  hypo
gctcagcaggatagtgagggccgccaggacgaagcagagggcgtacaccgccacccaccactccagggccggccggttgtggtacacgtaggggctattgatgaacacgaagatgaggcaggccacgaaggtctccagcaccttcagcagccccagctcggaggccatgtagtcagtgatctcgccgggccgggcccgggtccaggttacttcggtggcgtaagccacacaggcgatgccagagaagacgatggcggcgatggcgtggtcgcgggaacggccgtgggacaggaactgcaagta

SEQ ID NO: 63069 - DNA, 30 bp, Homo sapiens
  chr2:33953180-33953210
  hypo
tccctcccaggacccgccaccccgtggaac

SEQ ID NO: 63070 - DNA, 76 bp, Homo sapiens
  chr2:34065552-34065628
  hypo
gctccttggatatgcagaccacgcagtctataatgcctttgtattgcttatctgcggtgacttgtttgctggcatg

SEQ ID NO: 63071 - DNA, 28 bp, Homo sapiens
  chr2:34066124-34066152
  hypo
aaacaacattcctgggccaggcgcaatg

SEQ ID NO: 63072 - DNA, 23 bp, Homo sapiens
  chr2:35620887-35620910
  hypo
gcgtctcaaaaaaaaaaaaaaaa

SEQ ID NO: 63073 - DNA, 182 bp, Homo sapiens
  chr2:36668405-36668587
  hypo
aagccagattgctccaaggcccgctgtgaagtccagttctctccacgttgtcctgaagattctgttctgatcgagggttatgctcctcctggggagtgctgtcccttacccagccgctgcgtgtgcaaccccgcaggctgtctgcgcaaagtctgccagccgggaaacctgaacatactagt

SEQ ID NO: 63074 - DNA, 202 bp, Homo sapiens
  chr2:36805564-36805766
  hypo
ttctgaagaagctgagcacagcggtattctggaataaaatcccactgggctctgattagaagtgttaacactcctgcccatgtacaacctgtcgcacctgccaccagccccaaaggctgggactaccacagaacctgtttccagtgttcgacgcctcctgcaaaacatcacttactgtgccgggcatatgacttctctcatt

SEQ ID NO: 63075 - DNA, 76 bp, Homo sapiens
  chr2:36939339-36939415
  hypo
tgagtaaacagaccaagcaagcgtagaaattgcagcggtgagaaagaaacttcacgtattctaagatactagagtg

SEQ ID NO: 63076 - DNA, 47 bp, Homo sapiens
  chr2:37076290-37076337
  hypo
agctaaacttgtattcgctcaggcctgcctagcgaattagaaccacc

SEQ ID NO: 63077 - DNA, 196 bp, Homo sapiens
  chr2:37076575-37076771
  hypo
gaaggtgaagatgatgcattgcgtcatacaaagactttagccagtgcgtcagctccagcactggctatatagcatttggatgggtggaaagctacatcatgaatcgattcttcaaacttttttcgatgagctgtgaattcttggatacacgtcttactttctagattccataaacgtattgaacagtcatgaccta

SEQ ID NO: 63078 - DNA, 39 bp, Homo sapiens; identical to SEQ ID NO: 16066
  chr2:37149991-37150030
  hypo

SEQ ID NO: 63079 - DNA, 25 bp, Homo sapiens
  chr2:37195631-37195656
  hypo
tttgggaggccgaggcgggtagatc

SEQ ID NO: 63080 - DNA, 62 bp, Homo sapiens
  chr2:37227240-37227302
  hypo
tcaaaaaactctgttttttgccgagcctggagtgcagtggtgtgatcttggctcaccgcaac

SEQ ID NO: 63081 - DNA, 30 bp, Homo sapiens
  chr2:37227751-37227781
  hypo
caagcaagcgtgctacgaatcagagctgtc

SEQ ID NO: 63082 - DNA, 88 bp, Homo sapiens; identical to SEQ ID NO: 16067
  chr2:37241580-37241668
  hypo

SEQ ID NO: 63083 - DNA, 23 bp, Homo sapiens
  chr2:37242101-37242124
  hypo
gcgagactttgtctcaaaagaaa

SEQ ID NO: 63084 - DNA, 167 bp, Homo sapiens
  chr2:37287719-37287886
  hypo
ttaccacatagagctccagcacgaccttccaaagttacctgccaggtaaaagaatcgcctcgggccttctcagcttccaattcctttaaggaacgtgggaaaacatttcgccacaataacaacatcttgggcagatggtaacgaacgacagatggtcctagccaaga

SEQ ID NO: 63085 - DNA, 30 bp, Homo sapiens; identical to SEQ ID NO: 16069
  chr2:37376052-37376082
  hypo

SEQ ID NO: 63086 - DNA, 30 bp, Homo sapiens
  chr2:37446421-37446451
  hypo
agcacaggtatgttacgcatacttgctatg

SEQ ID NO: 63087 - DNA, 595 bp, Homo sapiens; identical to SEQ ID NO: 1424
  chr2:37898933-37899528
  hypo

SEQ ID NO: 63088 - DNA, 31 bp, Homo sapiens; identical to SEQ ID NO: 1426
  chr2:37980872-37980903
  hypo

SEQ ID NO: 63089 - DNA, 120 bp, Homo sapiens; identical to SEQ ID NO: 37336
  chr2:38152926-38153046
  hypo

SEQ ID NO: 63090 - DNA, 49 bp, Homo sapiens; identical to SEQ ID NO: 16072
  chr2:38157988-38158037
  hypo

SEQ ID NO: 63091 - DNA, 28 bp, Homo sapiens
  chr2:38365727-38365755
  hypo
ctcccccgtcctgtcttaaagagaagaa

SEQ ID NO: 63092 - DNA, 222 bp, Homo sapiens
  chr2:38489623-38489845
  hypo
ctttcctgctggactgagacccgcagaccacctgcatgcccacacatacccttctgactgcaatggagcatcaaagactgagagcgaggaccgggtggccagctgaggcggaaactccgccagagctgacttattcccaggcttatctcagcaggggcctgcagaagtggggacacggaattgaggccactgtgagttttcggtgtaagcttagtcccattt

SEQ ID NO: 63093 - DNA, 24 bp, Homo sapiens
  chr2:38528398-38528422
  hypo
accgtgcctggctcatctcaactt

SEQ ID NO: 63094 - DNA, 32 bp, Homo sapiens; identical to SEQ ID NO: 16074
  chr2:38551438-38551470
  hypo

SEQ ID NO: 63095 - DNA, 22 bp, Homo sapiens
  chr2:38562883-38562905
  hypo
aataaaaaataaataataggcc

SEQ ID NO: 63096 - DNA, 21 bp, Homo sapiens
  chr2:38563144-38563165
  hypo
gagactctgtctctaaataca

SEQ ID NO: 63097 - DNA, 31 bp, Homo sapiens; identical to SEQ ID NO: 16075
  chr2:38571500-38571531
  hypo

SEQ ID NO: 63098 - DNA, 85 bp, Homo sapiens; identical to SEQ ID NO: 16076
  chr2:38585485-38585570
  hypo

SEQ ID NO: 63099 - DNA, 32 bp, Homo sapiens; identical to SEQ ID NO: 16077
  chr2:38649875-38649907
  hypo

SEQ ID NO: 63100 - DNA, 31 bp, Homo sapiens
  chr2:38709159-38709190
  hypo
caagaacaccatgatgcgcaaggccatccga

SEQ ID NO: 63101 - DNA, 316 bp, Homo sapiens
  chr2:38762338-38762654
  hypo
aagtccaagagaggccggtccaggccttggccagggaagcatccatggacttgggcgttcgttgcagaatgttcagacaggtctggatgaggggtgaggccctgccttggaggggctgccctccctctgtggcacggaagccctgctgcctgtgacaggaggcgactgcacctcacccgcggcctgtatgctgcaggacccagcgaagagcttccttagcttgcagctgtgcagacactaggaaagggagcacctaccagggagatttgccttcttggtccggtagcaaatgcagtcccgccggcccacctggtac

SEQ ID NO: 63102 - DNA, 30 bp, Homo sapiens
  chr2:38769189-38769219
  hypo
atagtaactagacccgagatttcagagcac

SEQ ID NO: 63103 - DNA, 30 bp, Homo sapiens
  chr2:38892294-38892324
  hypo
ggcacagctttggccgtcaggagagccttc

SEQ ID NO: 63104 - DNA, 26 bp, Homo sapiens
  chr2:38910053-38910079
  hypo
aatcttaaaaacgaaacaaaagacaa

SEQ ID NO: 63105 - DNA, 37 bp, Homo sapiens
  chr2:38953643-38953680
  hypo
aggcatgagccaccccgcctggccaagtctctcacat

SEQ ID NO: 63106 - DNA, 121 bp, Homo sapiens
  chr2:39016314-39016435
  hypo
cggcgacacggtgacactccttttcaaagaaaacaaaaaacaacaaaaaacaaaaaaaattctacattcataaccctctagagtcatatactttaaaacaaaacaggctgggcgcagtgga

SEQ ID NO: 63107 - DNA, 21 bp, Homo sapiens
  chr2:39034198-39034219
  hypo
ttgttttgttttttttgagac

SEQ ID NO: 63108 - DNA, 30 bp, Homo sapiens
  chr2:39104180-39104210
  hypo
ttccacccagagtacggcatggcatctgtg

SEQ ID NO: 63109 - DNA, 233 bp, Homo sapiens
  chr2:39186666-39186899
  hypo
tgaaggtgtgccttggagcaccgcaggtggtgaggagggtcagggcttccacgcggggtgatgacagtccctggcccgcaggccatttcccagaagctcagacaataccttcgggcctccgctcgacggactgccttgtccactctccgcctgggaacgggggttcgtgggagcgccttagtggaagtttgtggagctcgggaggtggcatgcacaggcgcctcggagcgcgg

SEQ ID NO: 63110 - DNA, 97 bp, Homo sapiens
  chr2:39188203-39188300
  hypo
tttcttctgtctgtgaggtgtcgtttctatgttgagaatatggaacacggtgcgccagcctactccacttcttcccggcagcattcttgcttgtagc

SEQ ID NO: 63111 - DNA, 30 bp, Homo sapiens
  chr2:39209051-39209081
  hypo
ccctgcccaaatcccgaccccaaatgctga

SEQ ID NO: 63112 - DNA, 8 bp, Homo sapiens
  chr2:39228246-39228254
  hypo
gggagtat

SEQ ID NO: 63113 - DNA, 18 bp, Homo sapiens
  chr2:39321790-39321808
  hypo
ctcaaataaataaataaa

SEQ ID NO: 63114 - DNA, 163 bp, Homo sapiens
  chr2:39406775-39406938
  hypo
tccctggactaaaaacatcagcgtcgcaggaacttcctagaaatgcgaagtcttgggtcctataccccgcctgccaaagggaatcgaggcactggaggtggggcccggcagtttgtgtttaagaagctctctgggtgattccgatgcccatatgctcaggttt

SEQ ID NO: 63115 - DNA, 30 bp, Homo sapiens; identical to SEQ ID NO: 16082
  chr2:39675195-39675225
  hypo

SEQ ID NO: 63116 - DNA, 939 bp, Homo sapiens; identical to SEQ ID NO: 1432
  chr2:39893063-39894002
  hypo

SEQ ID NO: 63117 - DNA, 30 bp, Homo sapiens; identical to SEQ ID NO: 16084
  chr2:39963839-39963869
  hypo

SEQ ID NO: 63118 - DNA, 103 bp, Homo sapiens
  chr2:40560219-40560322
  hypo
attcagcagaatggtaaattacgaaaaaaaatctcttaacgaaaatacttgttgcactcagttaaaactgtcttttaggccgggtgcggtggctcacgcctat

SEQ ID NO: 63119 - DNA, 699 bp, Homo sapiens; identical to SEQ ID NO: 1434
  chr2:40678905-40679604
  hypo

SEQ ID NO: 63120 - DNA, 30 bp, Homo sapiens; identical to SEQ ID NO: 1435
  chr2:40679688-40679718
  hypo

SEQ ID NO: 63121 - DNA, 166 bp, Homo sapiens; identical to SEQ ID NO: 16087
  chr2:41223818-41223984
  hypo

SEQ ID NO: 63122 - DNA, 30 bp, Homo sapiens; identical to SEQ ID NO: 1437
  chr2:42111963-42111993
  hypo

SEQ ID NO: 63123 - DNA, 175 bp, Homo sapiens
  chr2:42155746-42155921
  hypo
gctgttctgagttgaacagaacgggaaactgcacttttgactctgaatgtatttcaatggagcagcctctgctgaaagccgggctcagacactgaacagccgcttcagggagatgcaatggttgcaacttgtgaaccgtgctttcctttccaccgccttttctctacatttgtct

SEQ ID NO: 63124 - DNA, 162 bp, Homo sapiens
  chr2:42157838-42158000
  hypo
ggggtggggcctgagattctacgtgtctaacaattctcacaagtcccaggtgatacgatgctgctggtcttcatacaacgctttgattagtaaggtcctagatcaatgggtctcaagacgggatagacagtggaattacccggggagccttaacaactacct

SEQ ID NO: 63125 - DNA, 1333 bp, Homo sapiens; identical to SEQ ID NO: 37354
  chr2:42274595-42275928
  hypo

SEQ ID NO: 63126 - DNA, 80 bp, Homo sapiens
  chr2:42282094-42282174
  hypo
acctcctgcctcacagtgccccgccttcactgcgtcctctgctggacagcatcgtcaacgccacaggtgagctctccagg

SEQ ID NO: 63127 - DNA, 142 bp, Homo sapiens
  chr2:42282411-42282553
  hypo
actgcactctgcaggagagctcgcctggggggtggacgagaccctggcccagctggagaaggtgctgcacctgtaccggagcgggcagtatctgcagaactccacggcaagcagcagtaccggtgagtggccccaagctgat

SEQ ID NO: 63128 - DNA, 93 bp, Homo sapiens
  chr2:42403392-42403485
  hypo
ctcatcccttttcttttccaccgctatagttcaggtacttattattcgatgcgtggattattgcatggcgtcgagaatctccacctgtccagt

SEQ ID NO: 63129 - DNA, 23 bp, Homo sapiens
  chr2:42450215-42450238
  hypo
attacagacgtgagccaccgtgc

SEQ ID NO: 63130 - DNA, 95 bp, Homo sapiens
  chr2:42530713-42530808
  hypo
agggtggagataagagggtagcgtttagtcttaaagtgtgaacatgaaccgattttaaagaagtaagttaggccgggcaaggtggctcacacctg

SEQ ID NO: 63131 - DNA, 30 bp, Homo sapiens
  chr2:42565201-42565231
  hypo
gacaagagacgacccgggagcactaagaat

SEQ ID NO: 63132 - DNA, 436 bp, Homo sapiens; identical to SEQ ID NO: 1443
  chr2:42720772-42721208
  hypo

SEQ ID NO: 63133 - DNA, 30 bp, Homo sapiens
  chr2:42991760-42991790
  hypo
tcctatttgtgctccgccagcctgctgtgt

SEQ ID NO: 63134 - DNA, 44 bp, Homo sapiens; identical to SEQ ID NO: 16093
  chr2:43002055-43002099
  hypo

SEQ ID NO: 63135 - DNA, 73 bp, Homo sapiens
  chr2:43103589-43103662
  hypo
agtacaaacacatgccgattttgccgcagattaaaaccatctcctgcgctccctggatcgtaacacataacag

SEQ ID NO: 63136 - DNA, 31 bp, Homo sapiens
  chr2:43113902-43113933
  hypo
tgtaatagtcaagtggtggcccggcgcggtg

SEQ ID NO: 63137 - DNA, 36 bp, Homo sapiens; identical to SEQ ID NO: 16095
  chr2:43123918-43123954
  hypo

SEQ ID NO: 63138 - DNA, 119 bp, Homo sapiens
  chr2:43147316-43147435
  hypo
gtgaccaaaggttcttcggctgtgggctggttctgcaaatgaaaccttaggggtgatggtcggtgtataacgctaagaccagagctgcaatggctctgattctccgccatagagtgcca

SEQ ID NO: 63139 - DNA, 76 bp, Homo sapiens; identical to SEQ ID NO: 16096
  chr2:43148272-43148348
  hypo

SEQ ID NO: 63140 - DNA, 56 bp, Homo sapiens
  chr2:43159424-43159480
  hypo
caaagagcagccctgccgaatctaccctgtgctggaggtgccgagtggagcccaat

SEQ ID NO: 63141 - DNA, 102 bp, Homo sapiens; identical to SEQ ID NO: 16097
  chr2:43173212-43173314
  hypo

SEQ ID NO: 63142 - DNA, 201 bp, Homo sapiens
  chr2:43185202-43185403
  hypo
tcaggggtcctggatacggtcagcactgggggtgccactggtgccatccagcttagggacatatggattccttctctcagactcctctgcctgccccctctgctctcctttccagcgttcacaaccctgcctctccccgcggaatgcctgactccacaccacatgcattaaagctgccatctgtaccgccctcatggtgtg

SEQ ID NO: 63143 - DNA, 31 bp, Homo sapiens; identical to SEQ ID NO: 16098
  chr2:43198399-43198430
  hypo

SEQ ID NO: 63144 - DNA, 270 bp, Homo sapiens
  chr2:43227352-43227622
  hypo
actttttttcccaagaaagctcggcagccagttctgccgtttttggccaggctcttggggaaggcggcctgtttgggcacatgggctcccacgtgcgcagaagcatcacctgccctccatgtgatgcgcacactcacagacccacatgcttacgtacttgcagactcgcccaggcacacgtgtatcgccacatgcagacacgcaagcatacacttgctgcactcagacctcctggtgtgaacacacggtgtgcaccgtcggagatagcca

SEQ ID NO: 63145 - DNA, 239 bp, Homo sapiens
  chr2:43248891-43249130
  hypo
aggaaagtgctccaaccacgccgtctctctcccctgcacatgtgccctgtggcacctcaaagttcccttcaccgcggaggctgctgggtttctccgcattttcccatccagccccgccgccgcctgccatccagccctcctcccaggcttgctgcagccggcccagctgcgagggggcccgaggacggcactgcacaaaggccccattctcagctggcgggggctgttatcagcccagc

SEQ ID NO: 63146 - DNA, 31 bp, Homo sapiens
  chr2:43270310-43270341
  hypo
ggcagaggcagggctccgactctcaagcagc

SEQ ID NO: 63147 - DNA, 31 bp, Homo sapiens; identical to SEQ ID NO: 16101
  chr2:43271000-43271031
  hypo

SEQ ID NO: 63148 - DNA, 77 bp, Homo sapiens
  chr2:43296668-43296745
  hypo
gagtgccatatgggccgagatggtcaggcctgagcttttcaagagaaatacgaattccaggctgggcacggtgaatc

SEQ ID NO: 63149 - DNA, 174 bp, Homo sapiens; identical to SEQ ID NO: 16102
  chr2:43299387-43299561
  hypo

SEQ ID NO: 63150 - DNA, 31 bp, Homo sapiens
  chr2:43306146-43306177
  hypo
tctctcctcccctgggcggcctctgctccag

SEQ ID NO: 63151 - DNA, 26 bp, Homo sapiens
  chr2:43337346-43337372
  hypo
ccaccgtgcccagcctactagagcct

SEQ ID NO: 63152 - DNA, 38 bp, Homo sapiens
  chr2:43365141-43365179
  hypo
tcagtaagcatttataaagcacgattaagaaatagaag

SEQ ID NO: 63153 - DNA, 190 bp, Homo sapiens; identical to SEQ ID NO: 16103
  chr2:43373135-43373325
  hypo

SEQ ID NO: 63154 - DNA, 190 bp, Homo sapiens
  chr2:43408167-43408357
  hypo
tctgtgcctgacattacgctgggtgccgcaggtacaatggtgaacgacacagacccaatccctgccctgggagagtgaatcatctagcaacggagacaaatattcaatacacacccaacgcatagttagtgagtattgcagagagtgaagggtgcgatgggatcagatttcccagcgggcccaagagagg

SEQ ID NO: 63155 - DNA, 146 bp, Homo sapiens
  chr2:43420536-43420682
  hypo
tgggtgattcatgtgtaccctcgcgacaggctgtgttcagatagtctgcttatgtgcttgaattcaaggacacaaacatccctaggtgcaagcttgcacgcacagtcctccctacacctccacacgcaactcctaatcatccctca

SEQ ID NO: 63156 - DNA, 712 bp, Homo sapiens; identical to SEQ ID NO: 37376
  chr2:43451133-43451845
  hypo

SEQ ID NO: 63157 - DNA, 968 bp, Homo sapiens; identical to SEQ ID NO: 1453
  chr2:43451891-43452859
  hypo

SEQ ID NO: 63158 - DNA, 38 bp, Homo sapiens
  chr2:43523957-43523995
  hypo
tgctcttaaaattgtaattaacggccgcccgggaggca

SEQ ID NO: 63159 - DNA, 30 bp, Homo sapiens
  chr2:43625218-43625248
  hypo
aatgggaccaaggcacgagctgccatttca

SEQ ID NO: 63160 - DNA, 30 bp, Homo sapiens; identical to SEQ ID NO: 16107
  chr2:43654115-43654145
  hypo

SEQ ID NO: 63161 - DNA, 36 bp, Homo sapiens; identical to SEQ ID NO: 16108
  chr2:43820773-43820809
  hypo

SEQ ID NO: 63162 - DNA, 36 bp, Homo sapiens
  chr2:43821048-43821084
  hypo
ggcgtgagccaccgcgcccagccttagacttcttgt

SEQ ID NO: 63163 - DNA, 30 bp, Homo sapiens
  chr2:43863420-43863450
  hypo
gcccggcccagagacgacatttctgccagg

SEQ ID NO: 63164 - DNA, 30 bp, Homo sapiens; identical to SEQ ID NO: 16109
  chr2:43996800-43996830
  hypo

SEQ ID NO: 63165 - DNA, 158 bp, Homo sapiens
  chr2:44047672-44047830
  hypo
atgggattattgcctacgtgaaaatccctcacttcttttgtcctcgatcaggttagccctccccagccctactccattccattcttgtcttttattctaccaaccccttccactgatttgaccttcgttttcttttttgagacggagttgcactctgt

SEQ ID NO: 63166 - DNA, 31 bp, Homo sapiens; identical to SEQ ID NO: 16110
  chr2:44079072-44079103
  hypo

SEQ ID NO: 63167 - DNA, 117 bp, Homo sapiens
  chr2:44104772-44104889
  hypo
aagaacttataaaatgcctctcgggaacctcaccatcgcggtctcaggagataaagtaagcggggaaggcctcgggttctaaattattggacgtccggctttccatcctcctcatga

SEQ ID NO: 63168 - DNA, 34 bp, Homo sapiens; identical to SEQ ID NO: 16111
  chr2:44113282-44113316
  hypo

SEQ ID NO: 63169 - DNA, 180 bp, Homo sapiens; identical to SEQ ID NO: 16112
  chr2:44126056-44126236
  hypo

SEQ ID NO: 63170 - DNA, 30 bp, Homo sapiens; identical to SEQ ID NO: 16113
  chr2:44224218-44224248
  hypo

SEQ ID NO: 63171 - DNA, 17 bp, Homo sapiens
  chr2:44332906-44332923
  hypo
cccggaaagaaatatct

SEQ ID NO: 63172 - DNA, 41 bp, Homo sapiens
  chr2:44402109-44402150
  hypo
atgactgggcctggtggctcacgcctataatcctagcactt

SEQ ID NO: 63173 - DNA, 30 bp, Homo sapiens; identical to SEQ ID NO: 16115
  chr2:44428921-44428951
  hypo

SEQ ID NO: 63174 - DNA, 43 bp, Homo sapiens
  chr2:44436624-44436667
  hypo
ttttaaaatttcctggtcaggcgcagtggctcacacctgtaat

SEQ ID NO: 63175 - DNA, 33 bp, Homo sapiens; identical to SEQ ID NO: 16116
  chr2:44439161-44439194
  hypo

SEQ ID NO: 63176 - DNA, 36 bp, Homo sapiens
  chr2:44468998-44469034
  hypo
tttttttttttttttttgagacggagtctcgcactc

SEQ ID NO: 63177 - DNA, 36 bp, Homo sapiens
  chr2:44469273-44469309
  hypo
ggcgtgagccaccacgcctggccagaaaataatctt

SEQ ID NO: 63178 - DNA, 34 bp, Homo sapiens; identical to SEQ ID NO: 16117
  chr2:44505287-44505321
  hypo

SEQ ID NO: 63179 - DNA, 36 bp, Homo sapiens
  chr2:44528015-44528051
  hypo
accatgtttgagtgtgcgtctcgcttggcttgagcc

SEQ ID NO: 63180 - DNA, 663 bp, Homo sapiens
  chr2:44553758-44554421
  hypo
ccgctgtgccagcccaaaaacatttttcttagagtagcctatggcttcacacctcccccattctataaacagtagagacagagcgtactcacctccaaagtcaccgctctcaccagctctggattagaattacacaatgctcctgcaagcacccctccagcactgaaagcagtcagggttgttagacttggctgagaaaagccttggccatgaagcgtcttaatgcaagcctctaaatcagcaaggccattgagttttttagttaggcggccatcagcgtgccactggaggcctaactcaccaccacctctgaaattgaagggcaaaaaagttttagtggaaaaaaaaagttaatactgtaggctggggtcagcgaactacacctggaggcctgttttttgtgtggccctggagctaagactggtttttgctttttaaaggttgagtgaaaacaaggaatgtgcaacagaaactgtacgcggcctgcaaagcttaaaatgtgactatgtagctctttagagaaaaaggtttgccaactcctgatatagacaatccagaattgattcaacgaatatattttgagtgcctgcccatttatcagggattaagtacagaccttaaaagtagaaacaaacgaaaatcccctaccgtggagaagacagt

SEQ ID NO: 63181 - DNA, 19 bp, Homo sapiens
  chr2:45029759-45029778
  hypo
ccctccgcagactcgcggg

SEQ ID NO: 63182 - DNA, 52 bp, Homo sapiens; identical to SEQ ID NO: 37386
  chr2:45029987-45030039
  hypo

SEQ ID NO: 63183 - DNA, 30 bp, Homo sapiens; identical to SEQ ID NO: 1456
  chr2:45150461-45150491
  hypo

SEQ ID NO: 63184 - DNA, 864 bp, Homo sapiens; identical to SEQ ID NO: 37410
  chr2:45231696-45232560
  hypo

SEQ ID NO: 63185 - DNA, 62 bp, Homo sapiens; identical to SEQ ID NO: 1471
  chr2:45240364-45240426
  hypo

SEQ ID NO: 63186 - DNA, 140 bp, Homo sapiens; identical to SEQ ID NO: 1472
  chr2:45240490-45240630
  hypo

SEQ ID NO: 63187 - DNA, 405 bp, Homo sapiens; identical to SEQ ID NO: 1473
  chr2:45240763-45241168
  hypo

SEQ ID NO: 63188 - DNA, 31 bp, Homo sapiens
  chr2:45318688-45318719
  hypo
tatccttacatatgctcggatagccttagaa

SEQ ID NO: 63189 - DNA, 30 bp, Homo sapiens
  chr2:45616413-45616443
  hypo
gaaaataaaatcagcgtctggccttcgtgg

SEQ ID NO: 63190 - DNA, 206 bp, Homo sapiens; identical to SEQ ID NO: 16124
  chr2:45927197-45927403
  hypo

SEQ ID NO: 63191 - DNA, 42 bp, Homo sapiens; identical to SEQ ID NO: 16125
  chr2:45940265-45940307
  hypo

SEQ ID NO: 63192 - DNA, 23 bp, Homo sapiens
  chr2:45950744-45950767
  hypo
gttttgttttgttttttgagacg

SEQ ID NO: 63193 - DNA, 31 bp, Homo sapiens
  chr2:45997208-45997239
  hypo
gctctccttctctatgcgcatgtcttttatc

SEQ ID NO: 63194 - DNA, 31 bp, Homo sapiens; identical to SEQ ID NO: 16127
  chr2:46143761-46143792
  hypo

SEQ ID NO: 63195 - DNA, 30 bp, Homo sapiens; identical to SEQ ID NO: 16128
  chr2:46398833-46398863
  hypo

SEQ ID NO: 63196 - DNA, 509 bp, Homo sapiens; identical to SEQ ID NO: 37421
  chr2:46524184-46524693
  hypo

SEQ ID NO: 63197 - DNA, 1523 bp, Homo sapiens; identical to SEQ ID NO: 37422
  chr2:46525000-46526523
  hypo

SEQ ID NO: 63198 - DNA, 125 bp, Homo sapiens
  chr2:46707663-46707788
  hypo
aaaggccaggctggcgacggacccaaacccgcagagctgcccccgacccctgggactgagcgcaatcccgagatggagctggagaaggtgcgcatggagttcgagctcacgcggctcaagtacct

SEQ ID NO: 63199 - DNA, 82 bp, Homo sapiens
  chr2:46834765-46834847
  hypo
aagatgtggccttgatgttgacggctgctgactgatcagggtggtggttggggaggctgtggaaatttcttttctttttttt

SEQ ID NO: 63200 - DNA, 161 bp, Homo sapiens
  chr2:47102025-47102186
  hypo
aagcctgaattcccctcggtttatgaggtaaagaatagctggtctccttcacatgctttcccgaccctatcctggataaactgaggcaggaaggcatctgctttctactccagtgatgttgcggccgggatgccttctggggaactcgaatgctgcaggca

SEQ ID NO: 63201 - DNA, 31 bp, Homo sapiens; identical to SEQ ID NO: 16134
  chr2:47125492-47125523
  hypo

SEQ ID NO: 63202 - DNA, 82 bp, Homo sapiens; identical to SEQ ID NO: 1481
  chr2:47167905-47167987
  hypo

SEQ ID NO: 63203 - DNA, 17 bp, Homo sapiens
  chr2:47182013-47182030
  hypo
atttttttaaatagtgt

SEQ ID NO: 63204 - DNA, 31 bp, Homo sapiens
  chr2:47193929-47193960
  hypo
ttttttttttttttttcgaagataaattcct

SEQ ID NO: 63205 - DNA, 31 bp, Homo sapiens; identical to SEQ ID NO: 16136
  chr2:47236538-47236569
  hypo

SEQ ID NO: 63206 - DNA, 102 bp, Homo sapiens; identical to SEQ ID NO: 16137
  chr2:47247695-47247797
  hypo

SEQ ID NO: 63207 - DNA, 25 bp, Homo sapiens
  chr2:47335710-47335735
  hypo
ttccggacacattttcatgcctctg

SEQ ID NO: 63208 - DNA, 30 bp, Homo sapiens
  chr2:47419227-47419257
  hypo
ggggcaaatatttaccgagccaggactctg

SEQ ID NO: 63209 - DNA, 173 bp, Homo sapiens; identical to SEQ ID NO: 16138
  chr2:47475843-47476016
  hypo

SEQ ID NO: 63210 - DNA, 31 bp, Homo sapiens
  chr2:47536015-47536046
  hypo
tgtgagccaccatgcccggcttatcctgcca

SEQ ID NO: 63211 - DNA, 79 bp, Homo sapiens
  chr2:47574176-47574255
  hypo
tcccatgcattgttccagtgacgcttagttcaccggcatgaggctgtatctggaccgcggctcccctagccccatcaga

SEQ ID NO: 63212 - DNA, 329 bp, Homo sapiens; identical to SEQ ID NO: 1483
  chr2:47596114-47596443
  hypo

SEQ ID NO: 63213 - DNA, 27 bp, Homo sapiens
  chr2:47596455-47596482
  hypo
cgctagtccttcggcgagcgagcacct

SEQ ID NO: 63214 - DNA, 343 bp, Homo sapiens; identical to SEQ ID NO: 1485
  chr2:47596505-47596848
  hypo

SEQ ID NO: 63215 - DNA, 41 bp, Homo sapiens; identical to SEQ ID NO: 37435
  chr2:47596941-47596982
  hypo

SEQ ID NO: 63216 - DNA, 181 bp, Homo sapiens; identical to SEQ ID NO: 16142
  chr2:47598299-47598480
  hypo

SEQ ID NO: 63217 - DNA, 88 bp, Homo sapiens
  chr2:47598539-47598627
  hypo
caggcatgagccaccggtccggcatctcttggtttatttgtaagatggtgcctagaagtggagtggcgtttgccaaaggtctctggaa

SEQ ID NO: 63218 - DNA, 28 bp, Homo sapiens
  chr2:47599466-47599494
  hypo
gatttttttttgtaaaagaggcggtgac

SEQ ID NO: 63219 - DNA, 16 bp, Homo sapiens
  chr2:47612111-47612127
  hypo
ccgggattacaggcat

SEQ ID NO: 63220 - DNA, 337 bp, Homo sapiens; identical to SEQ ID NO: 37436
  chr2:47630204-47630541
  hypo

SEQ ID NO: 63221 - DNA, 156 bp, Homo sapiens; identical to SEQ ID NO: 37437
  chr2:47635538-47635694
  hypo

SEQ ID NO: 63222 - DNA, 280 bp, Homo sapiens; identical to SEQ ID NO: 37438
  chr2:47637231-47637511
  hypo

SEQ ID NO: 63223 - DNA, 148 bp, Homo sapiens; identical to SEQ ID NO: 37439
  chr2:47639551-47639699
  hypo

SEQ ID NO: 63224 - DNA, 151 bp, Homo sapiens; identical to SEQ ID NO: 37440
  chr2:47641406-47641557
  hypo

SEQ ID NO: 63225 - DNA, 135 bp, Homo sapiens; identical to SEQ ID NO: 37441
  chr2:47643433-47643568
  hypo

SEQ ID NO: 63226 - DNA, 201 bp, Homo sapiens; identical to SEQ ID NO: 37442
  chr2:47656879-47657080
  hypo

SEQ ID NO: 63227 - DNA, 111 bp, Homo sapiens; identical to SEQ ID NO: 37443
  chr2:47672685-47672796
  hypo

SEQ ID NO: 63228 - DNA, 125 bp, Homo sapiens; identical to SEQ ID NO: 37444
  chr2:47690168-47690293
  hypo

SEQ ID NO: 63229 - DNA, 152 bp, Homo sapiens; identical to SEQ ID NO: 37445
  chr2:47693795-47693947
  hypo

SEQ ID NO: 63230 - DNA, 99 bp, Homo sapiens; identical to SEQ ID NO: 37446
  chr2:47698102-47698201
  hypo

SEQ ID NO: 63231 - DNA, 247 bp, Homo sapiens; identical to SEQ ID NO: 37447
  chr2:47702162-47702409
  hypo

SEQ ID NO: 63232 - DNA, 206 bp, Homo sapiens; identical to SEQ ID NO: 37448
  chr2:47703504-47703710
  hypo

SEQ ID NO: 63233 - DNA, 249 bp, Homo sapiens; identical to SEQ ID NO: 37449
  chr2:47705409-47705658
  hypo

SEQ ID NO: 63234 - DNA, 177 bp, Homo sapiens; identical to SEQ ID NO: 37450
  chr2:47707833-47708010
  hypo

SEQ ID NO: 63235 - DNA, 451 bp, Homo sapiens; identical to SEQ ID NO: 37451
  chr2:47709916-47710367
  hypo

SEQ ID NO: 63236 - DNA, 458 bp, Homo sapiens; identical to SEQ ID NO: 37452
  chr2:47747970-47748428
  hypo

SEQ ID NO: 63237 - DNA, 2288 bp, Homo sapiens; identical to SEQ ID NO: 37453
  chr2:47796744-47799032
  hypo

SEQ ID NO: 63238 - DNA, 39 bp, Homo sapiens; identical to SEQ ID NO: 16145
  chr2:47802076-47802115
  hypo

SEQ ID NO: 63239 - DNA, 30 bp, Homo sapiens
  chr2:47863907-47863937
  hypo
gaacaatggcatagcgtgcatatttattta

SEQ ID NO: 63240 - DNA, 30 bp, Homo sapiens; identical to SEQ ID NO: 16146
  chr2:47917826-47917856
  hypo

SEQ ID NO: 63241 - DNA, 46 bp, Homo sapiens
  chr2:47918382-47918428
  hypo
catggcgtgctctccgcgttcgccgccacccgcaaaaggagacttg

SEQ ID NO: 63242 - DNA, 413 bp, Homo sapiens; identical to SEQ ID NO: 37456
  chr2:48010219-48010632
  hypo

SEQ ID NO: 63243 - DNA, 198 bp, Homo sapiens; identical to SEQ ID NO: 37458
  chr2:48018064-48018262
  hypo

SEQ ID NO: 63244 - DNA, 171 bp, Homo sapiens; identical to SEQ ID NO: 37459
  chr2:48023031-48023202
  hypo

SEQ ID NO: 63245 - DNA, 2546 bp, Homo sapiens; identical to SEQ ID NO: 37460
  chr2:48025748-48028294
  hypo

SEQ ID NO: 63246 - DNA, 267 bp, Homo sapiens; identical to SEQ ID NO: 37461
  chr2:48030557-48030824
  hypo

SEQ ID NO: 63247 - DNA, 119 bp, Homo sapiens; identical to SEQ ID NO: 37462
  chr2:48032047-48032166
  hypo

SEQ ID NO: 63248 - DNA, 91 bp, Homo sapiens; identical to SEQ ID NO: 37463
  chr2:48032755-48032846
  hypo

SEQ ID NO: 63249 - DNA, 751 bp, Homo sapiens; identical to SEQ ID NO: 37464
  chr2:48033341-48034092
  hypo

SEQ ID NO: 63250 - DNA, 31 bp, Homo sapiens; identical to SEQ ID NO: 16148
  chr2:48112329-48112360
  hypo

SEQ ID NO: 63251 - DNA, 101 bp, Homo sapiens; identical to SEQ ID NO: 16149
  chr2:48539632-48539733
  hypo

SEQ ID NO: 63252 - DNA, 87 bp, Homo sapiens
  chr2:48606933-48607020
  hypo
caaaaaaaaaaaaaaaaaaaaaaaaaaaaaaaaaagtcatcaagagctttatgccaataagttcaacaacttcggtgaattaaaatg

SEQ ID NO: 63253 - DNA, 30 bp, Homo sapiens
  chr2:48636639-48636669
  hypo
ttcttcagctgggcgcggtggctcacggct

SEQ ID NO: 63254 - DNA, 30 bp, Homo sapiens; identical to SEQ ID NO: 16150
  chr2:48925981-48926011
  hypo

SEQ ID NO: 63255 - DNA, 29 bp, Homo sapiens
  chr2:48926250-48926279
  hypo
ctgcgcccggccatattttatacatttta

SEQ ID NO: 63256 - DNA, 92 bp, Homo sapiens; identical to SEQ ID NO: 16152
  chr2:49621662-49621754
  hypo

SEQ ID NO: 63257 - DNA, 22 bp, Homo sapiens
  chr2:49832949-49832971
  hypo
aagttaactttaatgttttttc

SEQ ID NO: 63258 - DNA, 30 bp, Homo sapiens
  chr2:51467037-51467067
  hypo
cgagagtccgtctcaaaaaaaaaaaaaaaa

SEQ ID NO: 63259 - DNA, 30 bp, Homo sapiens; identical to SEQ ID NO: 37479
  chr2:53340315-53340345
  hypo

SEQ ID NO: 63260 - DNA, 22 bp, Homo sapiens
  chr2:53896666-53896688
  hypo
cggcccctttctttctttaaag

SEQ ID NO: 63261 - DNA, 37 bp, Homo sapiens; identical to SEQ ID NO: 16153
  chr2:54019054-54019091
  hypo

SEQ ID NO: 63262 - DNA, 155 bp, Homo sapiens; identical to SEQ ID NO: 16154
  chr2:54097366-54097521
  hypo

SEQ ID NO: 63263 - DNA, 160 bp, Homo sapiens
  chr2:54124938-54125098
  hypo
gaatttaaagacttcaggtcacgtacatattctcaaacccaagactgtagctaaaacaaggtatgtacctttcgaactacaattgcatcatggttgagattctcaacaaaaaaccgtatggcacgaagaggcaacactcggtcatctctcagcagtagag

SEQ ID NO: 63264 - DNA, 17 bp, Homo sapiens
  chr2:54182795-54182812
  hypo
tgtctgcaatccaagca

SEQ ID NO: 63265 - DNA, 7 bp, Homo sapiens
  chr2:54199156-54199163
  hypo
actctgg

SEQ ID NO: 63266 - DNA, 46 bp, Homo sapiens; identical to SEQ ID NO: 16156
  chr2:54312199-54312245
  hypo

SEQ ID NO: 63267 - DNA, 30 bp, Homo sapiens; identical to SEQ ID NO: 16157
  chr2:54482460-54482490
  hypo

SEQ ID NO: 63268 - DNA, 141 bp, Homo sapiens; identical to SEQ ID NO: 37485
  chr2:54683031-54683172
  hypo

SEQ ID NO: 63269 - DNA, 30 bp, Homo sapiens
  chr2:54855919-54855949
  hypo
ctccattgccttatcgcatggccctgcatt

SEQ ID NO: 63270 - DNA, 138 bp, Homo sapiens
  chr2:54880808-54880946
  hypo
gatatccagaagcgcgagaacgaggtcctggaagcctggaagtccctcctggacgcctgtgagagccgcagggtgcggctggtggacacaggggacaagttccgcttcttcagcatggtgcgcgacctcatgctctgg

SEQ ID NO: 63271 - DNA, 32 bp, Homo sapiens
  chr2:55098809-55098841
  hypo
ccgcgcatgcgcgcacgcgtgtgtgtgtattt

SEQ ID NO: 63272 - DNA, 309 bp, Homo sapiens
  chr2:55173856-55174165
  hypo
acatccagtactaagtgttcacgcagaatccacaaccgcgaagggtcaatacttaaaatccgctgaatttgccacaatgcaggtttcttccccttgctcctctcatcttcagttttgaagcaatacagctgtaaacatatgcttgcgaaatgagaaagaaacattgagattgctttacctttcggtttttttctgaaaatcaaggtgaaaaaaaaaagcatcggattgcgtctgtgtatatatatacaatctcctgtatatataaatacacggtgtttgtgcttgtacgcatactctatattcactgta

SEQ ID NO: 63273 - DNA, 241 bp, Homo sapiens; identical to SEQ ID NO: 16158
  chr2:55289045-55289286
  hypo

SEQ ID NO: 63274 - DNA, 30 bp, Homo sapiens; identical to SEQ ID NO: 16159
  chr2:55366425-55366455
  hypo

SEQ ID NO: 63275 - DNA, 103 bp, Homo sapiens
  chr2:55391616-55391719
  hypo
gtctctacctggcatctgagccgagctccttctaagcgcgtgtttacgatggctccgactcatgccttaaaaaaaaaaaatcgctacagaaaataccaagact

SEQ ID NO: 63276 - DNA, 113 bp, Homo sapiens
  chr2:55451551-55451664
  hypo
cacaaaggatcccttcacctccgacaatgtcagattcctggtccttagctggcgctgcagtttgtgcagcaggctgtgtggccagtgtactcggagtgatcctggagtctgag

SEQ ID NO: 63277 - DNA, 101 bp, Homo sapiens
  chr2:55458365-55458466
  hypo
acagagcgaaattccgtctcacgaaaaaaaaaaaaaaaagttccaggaagaataaacgactggattcttcagaaatgccaaaacacgggagggcataggtc

SEQ ID NO: 63278 - DNA, 17 bp, Homo sapiens
  chr2:55492354-55492371
  hypo
gacgacaagaacaaaac

SEQ ID NO: 63279 - DNA, 85 bp, Homo sapiens; identical to SEQ ID NO: 16162
  chr2:55499045-55499130
  hypo

SEQ ID NO: 63280 - DNA, 30 bp, Homo sapiens
  chr2:55559544-55559574
  hypo
accgcacccggctacagaactttccttaag

SEQ ID NO: 63281 - DNA, 584 bp, Homo sapiens; identical to SEQ ID NO: 37496
  chr2:55646415-55646999
  hypo

SEQ ID NO: 63282 - DNA, 30 bp, Homo sapiens
  chr2:55653106-55653136
  hypo
tgaaactgttccatctcagatcgaggtatc

SEQ ID NO: 63283 - DNA, 29 bp, Homo sapiens
  chr2:55653315-55653344
  hypo
ccagtgccggtccacagcccagggactgg

SEQ ID NO: 63284 - DNA, 41 bp, Homo sapiens; identical to SEQ ID NO: 16163
  chr2:55669239-55669280
  hypo

SEQ ID NO: 63285 - DNA, 100 bp, Homo sapiens
  chr2:55687099-55687199
  hypo
gcccccacgatttcacgtatgacccaaccaatcagcactccccaactcactgcccctcccctcccaccaaattgtcttgaaaaactttgatccccaaatg

SEQ ID NO: 63286 - DNA, 39 bp, Homo sapiens
  chr2:55687318-55687357
  hypo
gtggagtaaggtgaacccactgggcggttacaaattagg

SEQ ID NO: 63287 - DNA, 43 bp, Homo sapiens
  chr2:55825328-55825371
  hypo
ctgggcgacagaacgagactccgactcaaaaaaataaataaaa

SEQ ID NO: 63288 - DNA, 88 bp, Homo sapiens
  chr2:55874485-55874573
  hypo
atatctgtcagcaaacgataatcttctatttcacccttctcaggatcggttttggtgaccaatcctattgctacgcctgcaacagcag

SEQ ID NO: 63289 - DNA, 27 bp, Homo sapiens
  chr2:55874934-55874961
  hypo
agcgtgagccaccgcgcccagcagaca

SEQ ID NO: 63290 - DNA, 27 bp, Homo sapiens
  chr2:56347000-56347027
  hypo
caccgcgcccagcccagacttcccttt

SEQ ID NO: 63291 - DNA, 78 bp, Homo sapiens
  chr2:57645779-57645857
  hypo
tatattattcaagctaatcttcgatgtttttcgccatttgactcttcattagaaattattctggaggagggaggagcc

SEQ ID NO: 63292 - DNA, 30 bp, Homo sapiens; identical to SEQ ID NO: 16164
  chr2:57986782-57986812
  hypo

SEQ ID NO: 63293 - DNA, 30 bp, Homo sapiens; identical to SEQ ID NO: 16165
  chr2:57987077-57987107
  hypo

SEQ ID NO: 63294 - DNA, 30 bp, Homo sapiens; identical to SEQ ID NO: 16166
  chr2:57987333-57987363
  hypo

SEQ ID NO: 63295 - DNA, 31 bp, Homo sapiens; identical to SEQ ID NO: 16167
  chr2:58097324-58097355
  hypo

SEQ ID NO: 63296 - DNA, 64 bp, Homo sapiens; identical to SEQ ID NO: 37511
  chr2:58655448-58655512
  hypo

SEQ ID NO: 63297 - DNA, 345 bp, Homo sapiens; identical to SEQ ID NO: 37512
  chr2:58655775-58656120
  hypo

SEQ ID NO: 63298 - DNA, 102 bp, Homo sapiens; identical to SEQ ID NO: 1521
  chr2:58776939-58777041
  hypo

SEQ ID NO: 63299 - DNA, 35 bp, Homo sapiens
  chr2:58788930-58788965
  hypo
cccggctggaatgcgtctgatttttgtaccattta

SEQ ID NO: 63300 - DNA, 39 bp, Homo sapiens
  chr2:59382730-59382769
  hypo
ctgacgtcgtgatccgcccagcctcgatttctcaaatcg

SEQ ID NO: 63301 - DNA, 30 bp, Homo sapiens
  chr2:60598614-60598644
  hypo
cacagccacaggacacgggcttctctggtc

SEQ ID NO: 63302 - DNA, 46 bp, Homo sapiens
  chr2:60642568-60642614
  hypo
tttaaaaattatttctcaggccgggcacggtggctcacgcctgtaa

SEQ ID NO: 63303 - DNA, 30 bp, Homo sapiens
  chr2:60679644-60679674
  hypo
acagaccacgctgacgtcgactgggcggca

SEQ ID NO: 63304 - DNA, 30 bp, Homo sapiens
  chr2:60688396-60688426
  hypo
catgccctgcatgacgtcgggcagggcgcg

SEQ ID NO: 63305 - DNA, 30 bp, Homo sapiens
  chr2:60688976-60689006
  hypo
gtcgccaggaagggcggcttgctacctggc

SEQ ID NO: 63306 - DNA, 139 bp, Homo sapiens
  chr2:60704079-60704218
  hypo
tgcctttgtagttagaagggacgataaaagacactgccctgaacatatttctgtcacccgaattgtccagcttcacacaaacgtatcacaaacaccccgatgcctccctgccccactcgagaaatgaagaaaaggatgg

SEQ ID NO: 63307 - DNA, 147 bp, Homo sapiens; identical to SEQ ID NO: 16170
  chr2:60705870-60706017
  hypo

SEQ ID NO: 63308 - DNA, 451 bp, Homo sapiens
  chr2:60706375-60706826
  hypo
tctacccacctagcaggtccacgtggggactcagcctatggacacctggcctctgcgggcacagcggccacacaccacggtgggacccggagaccattttttgttttgagtctctctaagactgcttgggaaatgaggtctctcaggtctagcatttccacgcagtcccaaccatgaggctgaccagaggccaccaacgtcaagctctctcaggtctactaggaacaggaaagaataactctcccttaacaagcccctcaggctgaaatccttttgcttccagggcctcaaccttctactgctgggtagaaagccccctctgtcaccggcccacagatctcagctgccatcgcactcaaaccctgtcaggcggtggagagtgtggacggcaggctgacgcggtttcaaagaggccgaccaggcaagaaccgtcctgtactcctgccccagc

SEQ ID NO: 63309 - DNA, 64 bp, Homo sapiens
  chr2:60733547-60733611
  hypo
caggacagagctggctcaggacgccacatgggtcaacccgagcgcaccagtcctcagaccctcc

SEQ ID NO: 63310 - DNA, 786 bp, Homo sapiens; identical to SEQ ID NO: 1524
  chr2:60783807-60784593
  hypo

SEQ ID NO: 63311 - DNA, 125 bp, Homo sapiens
  chr2:60812483-60812608
  hypo
ggcaggtgacctaagagggagcggtgtgcaaattgatttggaggcgatcaatggctcggggcgcggccccggctcgctgccgtgtcactgatcctctccaaatcgattcacacaccattcctcct

SEQ ID NO: 63312 - DNA, 239 bp, Homo sapiens
  chr2:61035609-61035848
  hypo
gttaagcgggaatctcggttcctacctccccagacctgctgcaggaactccgggccgctctgggctttgccctgacaagcaggaggggtggcttacccgattggtcagcttggggagggaactaagcatgtgcggccacaccctgtggctcctcccttttacgtttttcccgccctgcgcagtggctctgctgtgtctgcgggtggccttgactgtgaagagcccgtgcttggagcaca

SEQ ID NO: 63313 - DNA, 170 bp, Homo sapiens
  chr2:61074832-61075002
  hypo
ttccctagcacttctcaccaccgaacacactcgcacacacgtgtgcacacacgcttgctgttattattaatcttgtttattgcttgttttcctcaatagaacgtacatggcatgagcgctgcagggtttttgtgatttcagttcactccgttttccccagcacctggagc

SEQ ID NO: 63314 - DNA, 86 bp, Homo sapiens
  chr2:61088704-61088790
  hypo
ctggcttctggtgggtttcatcgataggagggagttataaggggcgaagagcgagtagacaggacgatatttacctccccccacag

SEQ ID NO: 63315 - DNA, 105 bp, Homo sapiens; identical to SEQ ID NO: 16174
  chr2:61135143-61135248
  hypo

SEQ ID NO: 63316 - DNA, 21 bp, Homo sapiens
  chr2:61142250-61142271
  hypo
ccaccacgcctggccagtttg

SEQ ID NO: 63317 - DNA, 30 bp, Homo sapiens
  chr2:61149841-61149871
  hypo
aactttggacatagcgaatacaaaattgga

SEQ ID NO: 63318 - DNA, 30 bp, Homo sapiens; identical to SEQ ID NO: 16176
  chr2:61175261-61175291
  hypo

SEQ ID NO: 63319 - DNA, 457 bp, Homo sapiens; identical to SEQ ID NO: 1532
  chr2:61175642-61176099
  hypo

SEQ ID NO: 63320 - DNA, 41 bp, Homo sapiens
  chr2:61186778-61186819
  hypo
cacccagagtgctgggattgcaggtgcgcaccactgcactc

SEQ ID NO: 63321 - DNA, 35 bp, Homo sapiens
  chr2:61189412-61189447
  hypo
taaacttgattcggccgggcacggtggctcacgcc

SEQ ID NO: 63322 - DNA, 26 bp, Homo sapiens
  chr2:61247107-61247133
  hypo
tatccactttgggagactgggcgggc

SEQ ID NO: 63323 - DNA, 127 bp, Homo sapiens; identical to SEQ ID NO: 16178
  chr2:61304101-61304228
  hypo

SEQ ID NO: 63324 - DNA, 18 bp, Homo sapiens
  chr2:61320689-61320707
  hypo
attgcactccagtctggg

SEQ ID NO: 63325 - DNA, 30 bp, Homo sapiens; identical to SEQ ID NO: 16179
  chr2:61389158-61389188
  hypo

SEQ ID NO: 63326 - DNA, 30 bp, Homo sapiens
  chr2:61391159-61391189
  hypo
gcgattccctgacacgaacaactcacatac

SEQ ID NO: 63327 - DNA, 27 bp, Homo sapiens
  chr2:61403047-61403074
  hypo
ctggtccattgtccaaaagtccgtaag

SEQ ID NO: 63328 - DNA, 27 bp, Homo sapiens
  chr2:61403373-61403400
  hypo
gcgcccggccaagactgattgttctag

SEQ ID NO: 63329 - DNA, 140 bp, Homo sapiens; identical to SEQ ID NO: 16180
  chr2:61448895-61449035
  hypo

SEQ ID NO: 63330 - DNA, 41 bp, Homo sapiens; identical to SEQ ID NO: 16181
  chr2:61471723-61471764
  hypo

SEQ ID NO: 63331 - DNA, 20 bp, Homo sapiens
  chr2:61488943-61488963
  hypo
tgttaagaatttttggctgg

SEQ ID NO: 63332 - DNA, 121 bp, Homo sapiens; identical to SEQ ID NO: 16182
  chr2:61505030-61505151
  hypo

SEQ ID NO: 63333 - DNA, 36 bp, Homo sapiens; identical to SEQ ID NO: 16183
  chr2:61505210-61505246
  hypo

SEQ ID NO: 63334 - DNA, 30 bp, Homo sapiens; identical to SEQ ID NO: 16184
  chr2:61509378-61509408
  hypo

SEQ ID NO: 63335 - DNA, 33 bp, Homo sapiens; identical to SEQ ID NO: 16185
  chr2:61556156-61556189
  hypo

SEQ ID NO: 63336 - DNA, 30 bp, Homo sapiens; identical to SEQ ID NO: 16186
  chr2:61642178-61642208
  hypo

SEQ ID NO: 63337 - DNA, 30 bp, Homo sapiens
  chr2:61645589-61645619
  hypo
cactaataatcttacgaaagctttttccct

SEQ ID NO: 63338 - DNA, 121 bp, Homo sapiens
  chr2:61759937-61760058
  hypo
caggcctggtgacagagcaagactccatctgaaaaaaaaaaaagatttctgacccaactgcaaaactttttactcattcaaaaacatgtttgggccagcacgcggtggctcatgcctgtaa

SEQ ID NO: 63339 - DNA, 827 bp, Homo sapiens; identical to SEQ ID NO: 37536
  chr2:61990959-61991786
  hypo

SEQ ID NO: 63340 - DNA, 20 bp, Homo sapiens
  chr2:62092173-62092193
  hypo
gactccgtctcaaaaaaaaa

SEQ ID NO: 63341 - DNA, 28 bp, Homo sapiens
  chr2:62107144-62107172
  hypo
gagccaccacgcccggcctctaccactc

SEQ ID NO: 63342 - DNA, 93 bp, Homo sapiens; identical to SEQ ID NO: 16190
  chr2:62116628-62116721
  hypo

SEQ ID NO: 63343 - DNA, 39 bp, Homo sapiens; identical to SEQ ID NO: 16191
  chr2:62146651-62146690
  hypo

SEQ ID NO: 63344 - DNA, 31 bp, Homo sapiens; identical to SEQ ID NO: 16192
  chr2:62432139-62432170
  hypo

SEQ ID NO: 63345 - DNA, 39 bp, Homo sapiens; identical to SEQ ID NO: 16193
  chr2:62497413-62497452
  hypo

SEQ ID NO: 63346 - DNA, 38 bp, Homo sapiens; identical to SEQ ID NO: 16194
  chr2:62497691-62497729
  hypo

SEQ ID NO: 63347 - DNA, 34 bp, Homo sapiens
  chr2:62585417-62585451
  hypo
catgagccaccgcgcctggcaatctcttctattt

SEQ ID NO: 63348 - DNA, 180 bp, Homo sapiens
  chr2:62635424-62635604
  hypo
gctgtgttgtaaggatgttcacgcagccctctcagaggtcccagaggtgaggaactgacgcctcctgccaacagccatgtgaggacccatcttggacgtgaatcctcccgcctcatatcaagccctcacgtgacagcagctctgcttaatatcttgaccgcaacctcatgagagaccctg

SEQ ID NO: 63349 - DNA, 31 bp, Homo sapiens; identical to SEQ ID NO: 16195
  chr2:62679583-62679614
  hypo

SEQ ID NO: 63350 - DNA, 72 bp, Homo sapiens
  chr2:62685373-62685445
  hypo
gctgatgggcataggtgtgtccgtgaggcaagcctgctcttgatggagcacgacaggaaatgcagcctggcc

SEQ ID NO: 63351 - DNA, 30 bp, Homo sapiens; identical to SEQ ID NO: 16196
  chr2:62788798-62788828
  hypo

SEQ ID NO: 63352 - DNA, 28 bp, Homo sapiens
  chr2:62910505-62910533
  hypo
agtaagcaggccaggcgcggtgtctccg

SEQ ID NO: 63353 - DNA, 26 bp, Homo sapiens
  chr2:63118021-63118047
  hypo
ataagaagcctgggctgggcacggcg

SEQ ID NO: 63354 - DNA, 25 bp, Homo sapiens
  chr2:63118286-63118311
  hypo
gggcgacaaaaaaaaaaaaaaaagt

SEQ ID NO: 63355 - DNA, 170 bp, Homo sapiens
  chr2:63118746-63118916
  hypo
gactactgtgggacatgtaaacgcttcaatacctagattaaaagttgtaatctaaggattaatatatatattatatattggctccattagcgctattatcattaaaggtgtgttagcatcctcttcgcagacttgcatatagcgaggccgtttcactaggttttaagttt

SEQ ID NO: 63356 - DNA, 238 bp, Homo sapiens
  chr2:63123374-63123612
  hypo
ttgaagcaagtaataacttgtcgtgtttaaagaatcgaaaaaaggctatgtaactggaaaggagtgagcaaggggacagtgatgttatacaagtcagagaacgtaggcactgcctgggatgtaaaggatcttacggaccattgtaacaattttggcattaaatcatgcgtggtggaaagccagttaagttagtgtatgtatgtatttgttgagggaaaggcaacgtgatttgtaactt

SEQ ID NO: 63357 - DNA, 70 bp, Homo sapiens; identical to SEQ ID NO: 16200
  chr2:63192181-63192251
  hypo

SEQ ID NO: 63358 - DNA, 150 bp, Homo sapiens; identical to SEQ ID NO: 16201
  chr2:63272199-63272349
  hypo

SEQ ID NO: 63359 - DNA, 30 bp, Homo sapiens
  chr2:63834269-63834299
  hypo
gaatgacagtttatcgtcatgctgttagtg

SEQ ID NO: 63360 - DNA, 53 bp, Homo sapiens
  chr2:63855249-63855302
  hypo
agaaagctgaggcagccttgtcgccgaggcccgcaaaggggtcagggaaaatc

SEQ ID NO: 63361 - DNA, 31 bp, Homo sapiens
  chr2:64345228-64345259
  hypo
caccgtgcccggcccttttgtttgtttaaac

SEQ ID NO: 63362 - DNA, 191 bp, Homo sapiens; identical to SEQ ID NO: 16202
  chr2:64348215-64348406
  hypo

SEQ ID NO: 63363 - DNA, 134 bp, Homo sapiens; identical to SEQ ID NO: 16203
  chr2:64538767-64538901
  hypo

SEQ ID NO: 63364 - DNA, 94 bp, Homo sapiens
  chr2:64835556-64835650
  hypo
tgctggggatagaacacgggtggctacgccgggcatggtggtgcgcacctgcagtcctggctgctggagaagctgaggcggaaggatcgcttaa

SEQ ID NO: 63365 - DNA, 183 bp, Homo sapiens; identical to SEQ ID NO: 1554
  chr2:64836249-64836432
  hypo

SEQ ID NO: 63366 - DNA, 162 bp, Homo sapiens; identical to SEQ ID NO: 1555
  chr2:64836470-64836632
  hypo

SEQ ID NO: 63367 - DNA, 86 bp, Homo sapiens; identical to SEQ ID NO: 1556
  chr2:64836746-64836832
  hypo

SEQ ID NO: 63368 - DNA, 100 bp, Homo sapiens
  chr2:64865160-64865260
  hypo
agaaacctgtcttttggtgttcggaccaggatcgtggttcgaatgaagccaggcccatgcttgctccctcaccgtccccgcctccagctacagcactctc

SEQ ID NO: 63369 - DNA, 30 bp, Homo sapiens
  chr2:64865713-64865743
  hypo
cagatgaacaagctgcgacctatcaacatc

SEQ ID NO: 63370 - DNA, 37 bp, Homo sapiens
  chr2:65062637-65062674
  hypo
accgcagggtggggccggcttttcttagggcacatgg

SEQ ID NO: 63371 - DNA, 90 bp, Homo sapiens; identical to SEQ ID NO: 37574
  chr2:65215419-65215509
  hypo

SEQ ID NO: 63372 - DNA, 30 bp, Homo sapiens
  chr2:65246629-65246659
  hypo
acagaataatgagcacgtggtaaaacattc

SEQ ID NO: 63373 - DNA, 30 bp, Homo sapiens
  chr2:65247283-65247313
  hypo
tccgcagtaaagtagcgttgaaatgagaaa

SEQ ID NO: 63374 - DNA, 134 bp, Homo sapiens
  chr2:65251106-65251240
  hypo
ccttgctccattcatcaggcacgagcccctaagtcagggcaggcatgctcagggggcagtgctaccgccggagctgctgtcgctgatccttttgcggccacctgcttgcaactgggaagcgtcaagctgctcag

SEQ ID NO: 63375 - DNA, 31 bp, Homo sapiens
  chr2:65267111-65267142
  hypo
agaaggcaaggaagcccgcaaatctaagcca

SEQ ID NO: 63376 - DNA, 30 bp, Homo sapiens
  chr2:65299179-65299209
  hypo
agcaccttgatagccgtgtgccagctgacc

SEQ ID NO: 63377 - DNA, 17 bp, Homo sapiens
  chr2:65413492-65413509
  hypo
ggccaacaaacacttaa

SEQ ID NO: 63378 - DNA, 30 bp, Homo sapiens; identical to SEQ ID NO: 16208
  chr2:65541295-65541325
  hypo

SEQ ID NO: 63379 - DNA, 30 bp, Homo sapiens
  chr2:65655495-65655525
  hypo
atacacgttacaaacgcatttaactcgggg

SEQ ID NO: 63380 - DNA, 22 bp, Homo sapiens
  chr2:65727278-65727300
  hypo
gcaagaacgaaactttgcctca

SEQ ID NO: 63381 - DNA, 66 bp, Homo sapiens
  chr2:65740148-65740214
  hypo
gaaggcctggtgttgccggatcttccaggaaagtttcagagaagctggaaacgcataactttatgt

SEQ ID NO: 63382 - DNA, 39 bp, Homo sapiens
  chr2:65829224-65829263
  hypo
agaaaattacatacaaatggccgggtgcggtggctcatg

SEQ ID NO: 63383 - DNA, 38 bp, Homo sapiens; identical to SEQ ID NO: 16209
  chr2:65829502-65829540
  hypo

SEQ ID NO: 63384 - DNA, 93 bp, Homo sapiens; identical to SEQ ID NO: 16210
  chr2:66604302-66604395
  hypo

SEQ ID NO: 63385 - DNA, 30 bp, Homo sapiens; identical to SEQ ID NO: 37583
  chr2:66661501-66661531
  hypo

SEQ ID NO: 63386 - DNA, 31 bp, Homo sapiens; identical to SEQ ID NO: 1563
  chr2:66661598-66661629
  hypo

SEQ ID NO: 63387 - DNA, 31 bp, Homo sapiens; identical to SEQ ID NO: 16212
  chr2:66666250-66666281
  hypo

SEQ ID NO: 63388 - DNA, 22 bp, Homo sapiens
  chr2:67423077-67423099
  hypo
cggccatcttggctcctccccc

SEQ ID NO: 63389 - DNA, 30 bp, Homo sapiens; identical to SEQ ID NO: 37592
  chr2:67593787-67593817
  hypo

SEQ ID NO: 63390 - DNA, 35 bp, Homo sapiens; identical to SEQ ID NO: 16213
  chr2:67625731-67625766
  hypo

SEQ ID NO: 63391 - DNA, 32 bp, Homo sapiens; identical to SEQ ID NO: 16214
  chr2:67626110-67626142
  hypo

SEQ ID NO: 63392 - DNA, 30 bp, Homo sapiens; identical to SEQ ID NO: 37595
  chr2:67639753-67639783
  hypo

SEQ ID NO: 63393 - DNA, 31 bp, Homo sapiens
  chr2:67747554-67747585
  hypo
atttttcttaagcacacggccactgaacctc

SEQ ID NO: 63394 - DNA, 18 bp, Homo sapiens
  chr2:68246255-68246273
  hypo
acttttttttttttttta

SEQ ID NO: 63395 - DNA, 30 bp, Homo sapiens; identical to SEQ ID NO: 16215
  chr2:68251584-68251614
  hypo

SEQ ID NO: 63396 - DNA, 39 bp, Homo sapiens; identical to SEQ ID NO: 16216
  chr2:68287483-68287522
  hypo

SEQ ID NO: 63397 - DNA, 38 bp, Homo sapiens; identical to SEQ ID NO: 16217
  chr2:68287761-68287799
  hypo

SEQ ID NO: 63398 - DNA, 80 bp, Homo sapiens; identical to SEQ ID NO: 16218
  chr2:68433261-68433341
  hypo

SEQ ID NO: 63399 - DNA, 30 bp, Homo sapiens; identical to SEQ ID NO: 16219
  chr2:68544313-68544343
  hypo

SEQ ID NO: 63400 - DNA, 198 bp, Homo sapiens; identical to SEQ ID NO: 37598
  chr2:68546318-68546516
  hypo

SEQ ID NO: 63401 - DNA, 812 bp, Homo sapiens; identical to SEQ ID NO: 37599
  chr2:68546552-68547364
  hypo

SEQ ID NO: 63402 - DNA, 302 bp, Homo sapiens
  chr2:68672581-68672883
  hypo
cgtgttgctgctaaacgtttccagggagttgcaaaagttaatccttatggatcggtgattgaaatacagtgacatccctgctgctctgcagtgtgcgcaaaggtcaaatcaaaataacaaacacgcacgacgtcttcgatcaccttcctgtaaaaccgggtttctagccggacccatgtcctcacagttcctgaatcaagttcaccgtctgtgcaagcgccacctgacagagctccctgcgacactgaaacgcgtttgggcacttcccacgtgggaaccactcgccacgggcacctcctgag

SEQ ID NO: 63403 - DNA, 30 bp, Homo sapiens
  chr2:68873190-68873220
  hypo
aacttcatctttatcgctgccctggtccgc

SEQ ID NO: 63404 - DNA, 30 bp, Homo sapiens; identical to SEQ ID NO: 1574
  chr2:69220161-69220191
  hypo

SEQ ID NO: 63405 - DNA, 979 bp, Homo sapiens; identical to SEQ ID NO: 37603
  chr2:69240027-69241006
  hypo

SEQ ID NO: 63406 - DNA, 31 bp, Homo sapiens; identical to SEQ ID NO: 16225
  chr2:69520725-69520756
  hypo

SEQ ID NO: 63407 - DNA, 31 bp, Homo sapiens; identical to SEQ ID NO: 1577
  chr2:69614637-69614668
  hypo

SEQ ID NO: 63408 - DNA, 46 bp, Homo sapiens
  chr2:69778022-69778068
  hypo
taggcgtgagccacagtgcccagccgtcattcatttttaaagtgtg

SEQ ID NO: 63409 - DNA, 143 bp, Homo sapiens
  chr2:69928486-69928629
  hypo
cccattctctccactgccctccgtgtccctcccgctagcaaacaccattctattttctatctgtatgattttgactactctggctaccttgtaaaagcggaatcatttgtctttttgtgactggcttatttcacttagcgtaa

SEQ ID NO: 63410 - DNA, 70 bp, Homo sapiens; identical to SEQ ID NO: 37608
  chr2:69968733-69968803
  hypo

SEQ ID NO: 63411 - DNA, 19 bp, Homo sapiens
  chr2:69975511-69975530
  hypo
ctcaaaaaaagaaaaaaaa

SEQ ID NO: 63412 - DNA, 121 bp, Homo sapiens
  chr2:69997974-69998095
  hypo
acgttgggagggtgaggcagacgatcgcttgagcctaggcattcaaggccagcctaggcaatgcagcgaggccttgtctagaaaatttaaaaaaaaaaaaaattagctgggcgtggtggca

SEQ ID NO: 63413 - DNA, 46 bp, Homo sapiens
  chr2:70005611-70005657
  hypo
agaaagtaaagttgggctgggcgcggtggttcacgcctgtaatccc

SEQ ID NO: 63414 - DNA, 31 bp, Homo sapiens; identical to SEQ ID NO: 16228
  chr2:70020009-70020040
  hypo

SEQ ID NO: 63415 - DNA, 86 bp, Homo sapiens; identical to SEQ ID NO: 16229
  chr2:70166085-70166171
  hypo

SEQ ID NO: 63416 - DNA, 30 bp, Homo sapiens; identical to SEQ ID NO: 16230
  chr2:70186711-70186741
  hypo

SEQ ID NO: 63417 - DNA, 30 bp, Homo sapiens; identical to SEQ ID NO: 16231
  chr2:70188590-70188620
  hypo

SEQ ID NO: 63418 - DNA, 30 bp, Homo sapiens; identical to SEQ ID NO: 16232
  chr2:70203494-70203524
  hypo

SEQ ID NO: 63419 - DNA, 87 bp, Homo sapiens
  chr2:70203998-70204085
  hypo
acacacactcatacaccgaggagacacaaactgggcaaaaatgggacaggcaaggtgactcatgcctgtaattccagcactttggga

SEQ ID NO: 63420 - DNA, 185 bp, Homo sapiens; identical to SEQ ID NO: 16234
  chr2:70224880-70225065
  hypo

SEQ ID NO: 63421 - DNA, 27 bp, Homo sapiens
  chr2:70234358-70234385
  hypo
tctacttaagccgggcgcaggttgctc

SEQ ID NO: 63422 - DNA, 27 bp, Homo sapiens
  chr2:70234624-70234651
  hypo
gggcaacaagaacgaaaccctgcctca

SEQ ID NO: 63423 - DNA, 61 bp, Homo sapiens
  chr2:70329616-70329677
  hypo
ttcctggcaggggccgacgcagggaccggcgcgggggtgagagcgcgcggccggattcacc

SEQ ID NO: 63424 - DNA, 468 bp, Homo sapiens; identical to SEQ ID NO: 37615
  chr2:70351164-70351632
  hypo

SEQ ID NO: 63425 - DNA, 85 bp, Homo sapiens
  chr2:70367821-70367906
  hypo
caccgtgcccagcgacaagataattttaaaaggagagggaacgtctgcttttgttgcctttctcgtcttttgtggttccacatac

SEQ ID NO: 63426 - DNA, 296 bp, Homo sapiens; identical to SEQ ID NO: 1580
  chr2:70369035-70369331
  hypo

SEQ ID NO: 63427 - DNA, 30 bp, Homo sapiens; identical to SEQ ID NO: 37618
  chr2:70418109-70418139
  hypo

SEQ ID NO: 63428 - DNA, 31 bp, Homo sapiens; identical to SEQ ID NO: 1581
  chr2:70418190-70418221
  hypo

SEQ ID NO: 63429 - DNA, 102 bp, Homo sapiens
  chr2:70427483-70427585
  hypo
aaatccctactttttaaccctcgtattatttgtattgcaacaaatcaggtgaaaaagcactgaagccatagaaatcagaacttctggccgggcgcggtggct

SEQ ID NO: 63430 - DNA, 40 bp, Homo sapiens
  chr2:70557158-70557198
  hypo
cctgtaaagattcaaaagtgccggctgggcgcggtggctc

SEQ ID NO: 63431 - DNA, 22 bp, Homo sapiens
  chr2:71333964-71333986
  hypo
cggcctattgtttttaatgttc

SEQ ID NO: 63432 - DNA, 16 bp, Homo sapiens
  chr2:71355045-71355061
  hypo
gcgcctggccgaacat

SEQ ID NO: 63433 - DNA, 213 bp, Homo sapiens
  chr2:71355398-71355611
  hypo
tgtgcttttgtttttcggcgaagttttatgttccttaaaagaggggccataacatagaattaccatgtaatccagcaattccacttatgagtatacacacccccaaagaagcgggaattcagaagtatttgtacacccacgttcatagctgtattacaatagccaaaaggtggggataacccaaatgtctatcaagagacgaatggataaaca

SEQ ID NO: 63434 - DNA, 931 bp, Homo sapiens; identical to SEQ ID NO: 37625
  chr2:71503407-71504338
  hypo

SEQ ID NO: 63435 - DNA, 24 bp, Homo sapiens
  chr2:71507014-71507038
  hypo
aatgaaagaaaagaggatggccgt

SEQ ID NO: 63436 - DNA, 31 bp, Homo sapiens; identical to SEQ ID NO: 16241
  chr2:71615794-71615825
  hypo

SEQ ID NO: 63437 - DNA, 294 bp, Homo sapiens
  chr2:71753209-71753503
  hypo
cgcggtagtaagtgtcggagcgcagtctgccttactgcagaatgcagcatttatgtggcgaagctggaactcttagaaaaggaaagtaaaaccctgtgctcaggagcgcatgaaggaatcgtatttggttttctttgtagctggagagaaaagacccctctgaagacaaggaggacattgaaagcaacctgctccggcccacaggcgtagccctgcgaggagcccacttctgcctgaaggtcttccgggccgaggacttgccgcagagtgcgtggggcgcgcccttgggtggga

SEQ ID NO: 63438 - DNA, 175 bp, Homo sapiens
  chr2:71763614-71763789
  hypo
tgatctcttcatctccgctctccatgtgtgccgctctgactgcgggcgatgagctgtgcgtgtctctgcgtgtttgcgcatgtggatgtgagtgggtgcggttgtctcctgtgttgtggatgtgtctggcccgagtccgggtgagctgtgtcaaaggcatcggcgtactgtacaa

SEQ ID NO: 63439 - DNA, 33 bp, Homo sapiens
  chr2:71792490-71792523
  hypo
gattcaggcgtgagccaccgcgccagccctcct

SEQ ID NO: 63440 - DNA, 50 bp, Homo sapiens
  chr2:71839445-71839495
  hypo
aagaaatgttgagtcccgggccaactcccctcgcccgctccccagccagt

SEQ ID NO: 63441 - DNA, 50 bp, Homo sapiens
  chr2:71899879-71899929
  hypo
atgcaggcgggcctgcggagctggccataaaagctcgccagaggagggag

SEQ ID NO: 63442 - DNA, 34 bp, Homo sapiens
  chr2:72316765-72316799
  hypo
gaccccagggagaagcggcttcctgggcatgcgc

SEQ ID NO: 63443 - DNA, 30 bp, Homo sapiens
  chr2:72317232-72317262
  hypo
gacggatgcacctcccgtaactcgaatctc

SEQ ID NO: 63444 - DNA, 310 bp, Homo sapiens
  chr2:72359368-72359678
  hypo
ctcagcatggcctccgtctccggcaggatctcgttctggttggagtccaggccaaagaacttgacgctgaggccatccacggggtgcaggacggggaccaaggtgatgcgggggaaggtccgtgtggccagctcaaagcggctggtgctagccagctccaccgccagcaccttcaggaacagcttggccaggtgcttgcccaggcaggtccggacaccgccaccgaacgggaggtaatggaagcggccatccttgtcctcgctccgcgcctggctgaagcgatcggggtcgaacacgttcacgtctttga

SEQ ID NO: 63445 - DNA, 45 bp, Homo sapiens
  chr2:72359981-72360026
  hypo
cctgatgcatttggggcgcacttctcccatcggactgaaagctcc

SEQ ID NO: 63446 - DNA, 31 bp, Homo sapiens
  chr2:72369008-72369039
  hypo
ccaccaacatgccccacgtggcaagcataaa

SEQ ID NO: 63447 - DNA, 256 bp, Homo sapiens; identical to SEQ ID NO: 37633
  chr2:72374269-72374525
  hypo

SEQ ID NO: 63448 - DNA, 126 bp, Homo sapiens; identical to SEQ ID NO: 37634
  chr2:72374563-72374689
  hypo

SEQ ID NO: 63449 - DNA, 302 bp, Homo sapiens; identical to SEQ ID NO: 37635
  chr2:72374713-72375015
  hypo

SEQ ID NO: 63450 - DNA, 115 bp, Homo sapiens; identical to SEQ ID NO: 37636
  chr2:72375597-72375712
  hypo

SEQ ID NO: 63451 - DNA, 181 bp, Homo sapiens
  chr2:72430073-72430254
  hypo
cagaccattctgcctaagagccggccagttcacgacgttcatcgtttcttacttttgtgcctttgggcaaattactaacctctctctaaaatgaaaataatatttgccttggtagagtattcagcatagtgcctggcacaaacgttcagcaaatactggcgatgatgatgataatgacaat

SEQ ID NO: 63452 - DNA, 32 bp, Homo sapiens
  chr2:72459901-72459933
  hypo
ttattataaagaaacccgggccaggcgcagtg

SEQ ID NO: 63453 - DNA, 16 bp, Homo sapiens
  chr2:72778912-72778928
  hypo
ccgcgcccggccatta

SEQ ID NO: 63454 - DNA, 160 bp, Homo sapiens
  chr2:73042121-73042281
  hypo
aaaaataaaataaaataaaatggctttgtttactgatacctctttatgactaaaataataaagaggcaggtttgaaactttcgtttcttaaaaacaatggtttatttaccaatcacaactaattccactgtacatactcgtcatgcatttaagcaacata

SEQ ID NO: 63455 - DNA, 710 bp, Homo sapiens; identical to SEQ ID NO: 1596
  chr2:73052643-73053353
  hypo

SEQ ID NO: 63456 - DNA, 261 bp, Homo sapiens; identical to SEQ ID NO: 37641
  chr2:73114241-73114502
  hypo

SEQ ID NO: 63457 - DNA, 30 bp, Homo sapiens
  chr2:73121760-73121790
  hypo
ggcctccttcaccttcgtcctttcccatag

SEQ ID NO: 63458 - DNA, 1662 bp, Homo sapiens; identical to SEQ ID NO: 37647
  chr2:73142997-73144659
  hypo

SEQ ID NO: 63459 - DNA, 30 bp, Homo sapiens
  chr2:73190263-73190293
  hypo
aggctgtggaaggacggggctgccctcctg

SEQ ID NO: 63460 - DNA, 30 bp, Homo sapiens
  chr2:73216752-73216782
  hypo
aaccaacaaacatacgacggcatggaaaag

SEQ ID NO: 63461 - DNA, 244 bp, Homo sapiens; identical to SEQ ID NO: 16251
  chr2:73302642-73302886
  hypo

SEQ ID NO: 63462 - DNA, 30 bp, Homo sapiens
  chr2:73308861-73308891
  hypo
cccaccccctgcttcgggaccaggggccat

SEQ ID NO: 63463 - DNA, 31 bp, Homo sapiens
  chr2:73384739-73384770
  hypo
accgcgcccggcctcccgtagcatctcatta

SEQ ID NO: 63464 - DNA, 309 bp, Homo sapiens
  chr2:73440137-73440446
  hypo
tcccacgcatcaccacgcccggcaaatttttctattttttggagagacaaggtctcactacgttgcccagtctgttcttgagcccgggagctggaggctgccgtgagccgagatcgccccatgccagtatgggcgacaaagcgagaccctgtctcaaacaaaactcacaaaatcaggggacaaggaaacaaaacaaggcttgatagtcaggcctagctgtggggacaaatgccataggtctgtggtttgcagcttcttggggtcctgagagaacaggcccctcccccttttcacgacagtgtgtgcata

SEQ ID NO: 63465 - DNA, 30 bp, Homo sapiens; identical to SEQ ID NO: 16253
  chr2:73478534-73478564
  hypo

SEQ ID NO: 63466 - DNA, 35 bp, Homo sapiens; identical to SEQ ID NO: 16254
  chr2:73493682-73493717
  hypo

SEQ ID NO: 63467 - DNA, 927 bp, Homo sapiens; identical to SEQ ID NO: 37670
  chr2:73520124-73521051
  hypo

SEQ ID NO: 63468 - DNA, 17 bp, Homo sapiens
  chr2:73713209-73713226
  hypo
atcttggctcctgtccc

SEQ ID NO: 63469 - DNA, 28 bp, Homo sapiens
  chr2:74004336-74004364
  hypo
ctcaagcgatacacccaccttgcctccc

SEQ ID NO: 63470 - DNA, 30 bp, Homo sapiens
  chr2:74053684-74053714
  hypo
tgttttctaaaccccgatgttacatttcag

SEQ ID NO: 63471 - DNA, 30 bp, Homo sapiens
  chr2:74119709-74119739
  hypo
gggacagtgcctgggcgtcccaggcagacc

SEQ ID NO: 63472 - DNA, 190 bp, Homo sapiens
  chr2:74120175-74120365
  hypo
tcggtaagtactgtacggcttttgccacctcttcctttccggggctgcctggcctcctgggtgcgggaggtgcctccagattggcctggcttctgtgacgctggcccagatcacacaccagagcccttggtgggcagcggcacctgcaagcatactgcagcctgctgagaaaaggcgtatctggccatgg

SEQ ID NO: 63473 - DNA, 34 bp, Homo sapiens
  chr2:74126219-74126253
  hypo
agccaccgcgcccggccacaagaactttcacagt

SEQ ID NO: 63474 - DNA, 507 bp, Homo sapiens
  chr2:74152824-74153331
  hypo
tgggtaggactttagccgctccagtagccattaacgccccaccctggttatccttaaaaaattcgattaaaaaaaaagttcttaatatataaacatgacctcagccatcctatatatacatcaacataagaaaaaggtcccgtgctttttatgggaacagcttcaagacaggtatcccagcccccggcccctccccagcccccttgcaatcagatccttgtcttctaaaacctgccacacctaagagcgctgcctgaaggccggtttggcctgttgactcctggttttgactgttggtgatttaagcgattggaactggaagcaccatttgacaacattttgtaaatcattacttctgaggttgttatgacgacggggtgtggcagtccggcttcacctgtggcagcagcttaggtccctgccctcctgcagagcacacttcaccgacagcaggactcaggttttatacaagtctctactcgccattgcttacgtccaagaacccag

SEQ ID NO: 63475 - DNA, 7 bp, Homo sapiens
  chr2:74155568-74155575
  hypo
aaataaa

SEQ ID NO: 63476 - DNA, 42 bp, Homo sapiens; identical to SEQ ID NO: 16258
  chr2:74193106-74193148
  hypo

SEQ ID NO: 63477 - DNA, 30 bp, Homo sapiens; identical to SEQ ID NO: 37676
  chr2:74211425-74211455
  hypo

SEQ ID NO: 63478 - DNA, 246 bp, Homo sapiens
  chr2:74213647-74213893
  hypo
agtgagtcccaactccgagggggtggagatggtcgaaagaaacggaaacggtgtggtacttgtgagccctgccggcggctggaaaactgtggcgcttgcactagctgtaccaaccgccgcacgcaccagatctgcaaactgcgaaaatgtgaggtgctgaagaaaaaagtagggcttctcaaggaggtaagccggcccttgctgggctaccctgttccttcctcgagggcacggtgatcacggggg

SEQ ID NO: 63479 - DNA, 30 bp, Homo sapiens
  chr2:74214648-74214678
  hypo
ggttggtgacagccgcgacagcagagagtt

SEQ ID NO: 63480 - DNA, 23 bp, Homo sapiens
  chr2:74219449-74219472
  hypo
gttttgtttgagatggagtctcg

SEQ ID NO: 63481 - DNA, 30 bp, Homo sapiens
  chr2:74231282-74231312
  hypo
ggaactcttcctagcggagaggaagcgcgt

SEQ ID NO: 63482 - DNA, 30 bp, Homo sapiens
  chr2:74232658-74232688
  hypo
ttccattttcaggtcgtggtgtaagaagga

SEQ ID NO: 63483 - DNA, 20 bp, Homo sapiens
  chr2:74315938-74315958
  hypo
ggctcatgcctgtggtcgca

SEQ ID NO: 63484 - DNA, 24 bp, Homo sapiens
  chr2:74323598-74323622
  hypo
gaaaagcaggtcaggccgggcgca

SEQ ID NO: 63485 - DNA, 260 bp, Homo sapiens
  chr2:74327558-74327818
  hypo
agccctccctcaaggtggagccgcagaaccacttcagctccttcaagtacagcggcaacgcggtggtggagagctactcggtgctgggcaactgccggccctccgacccttacagcatgaacagcgtgtactcctaccactcctactatgcacagcccagcctgacctccgtcaatggcttccactccaagtacgctctcccgtcttttagctactatggctttccatccagcaaccccgtcttcccctctcagttcctg

SEQ ID NO: 63486 - DNA, 30 bp, Homo sapiens; identical to SEQ ID NO: 16262
  chr2:74329317-74329347
  hypo

SEQ ID NO: 63487 - DNA, 30 bp, Homo sapiens
  chr2:74329794-74329824
  hypo
ctcgctgggtctggcgagccaagcccctcg

SEQ ID NO: 63488 - DNA, 46 bp, Homo sapiens
  chr2:74350340-74350386
  hypo
aaaggtgctaacatgtcaaatcgcttgaattcaggcggcaaagatg

SEQ ID NO: 63489 - DNA, 121 bp, Homo sapiens
  chr2:74350565-74350686
  hypo
aaaccctgtctctactaaaaatacaaaaaactggacccggcctgtgggcggaaccgaccaagaaacacgccagccagggcaggggcgtgcaggagggattcggtaaccccagagaggagtg

SEQ ID NO: 63490 - DNA, 300 bp, Homo sapiens; identical to SEQ ID NO: 1621
  chr2:74405877-74406177
  hypo

SEQ ID NO: 63491 - DNA, 1040 bp, Homo sapiens; identical to SEQ ID NO: 37682
  chr2:74425423-74426463
  hypo

SEQ ID NO: 63492 - DNA, 31 bp, Homo sapiens
  chr2:74454230-74454261
  hypo
caggaagagcttgcagcgttcccagaactag

SEQ ID NO: 63493 - DNA, 31 bp, Homo sapiens
  chr2:74460531-74460562
  hypo
cagtttgttctccttccggttgacaatgacg

SEQ ID NO: 63494 - DNA, 30 bp, Homo sapiens
  chr2:74653151-74653181
  hypo
tagggaggtcccagcgagccccaggaatga

SEQ ID NO: 63495 - DNA, 212 bp, Homo sapiens; identical to SEQ ID NO: 16266
  chr2:74663401-74663613
  hypo

SEQ ID NO: 63496 - DNA, 31 bp, Homo sapiens
  chr2:74669782-74669813
  hypo
ataaagagcagctgcgcgcggtggctcacgc

SEQ ID NO: 63497 - DNA, 39 bp, Homo sapiens; identical to SEQ ID NO: 16267
  chr2:74672958-74672997
  hypo

SEQ ID NO: 63498 - DNA, 30 bp, Homo sapiens; identical to SEQ ID NO: 59735
  chr2:74679100-74679130
  hypo

SEQ ID NO: 63499 - DNA, 965 bp, Homo sapiens; identical to SEQ ID NO: 37689
  chr2:74740879-74741844
  hypo

SEQ ID NO: 63500 - DNA, 278 bp, Homo sapiens; identical to SEQ ID NO: 1628
  chr2:74741872-74742150
  hypo

SEQ ID NO: 63501 - DNA, 323 bp, Homo sapiens; identical to SEQ ID NO: 1629
  chr2:74742324-74742647
  hypo

SEQ ID NO: 63502 - DNA, 107 bp, Homo sapiens; identical to SEQ ID NO: 16272
  chr2:74753266-74753373
  hypo

SEQ ID NO: 63503 - DNA, 30 bp, Homo sapiens
  chr2:74760170-74760200
  hypo
ggttctgagggcaccgagacagagggttaa

SEQ ID NO: 63504 - DNA, 232 bp, Homo sapiens; identical to SEQ ID NO: 16273
  chr2:74761646-74761878
  hypo

SEQ ID NO: 63505 - DNA, 37 bp, Homo sapiens; identical to SEQ ID NO: 1631
  chr2:74776039-74776076
  hypo

SEQ ID NO: 63506 - DNA, 222 bp, Homo sapiens; identical to SEQ ID NO: 1634
  chr2:74781865-74782087
  hypo

SEQ ID NO: 63507 - DNA, 247 bp, Homo sapiens; identical to SEQ ID NO: 1635
  chr2:74782218-74782465
  hypo

SEQ ID NO: 63508 - DNA, 19 bp, Homo sapiens
  chr2:74790431-74790450
  hypo
aaagagagagcagggccgg

SEQ ID NO: 63509 - DNA, 31 bp, Homo sapiens; identical to SEQ ID NO: 16277
  chr2:74856914-74856945
  hypo

SEQ ID NO: 63510 - DNA, 42 bp, Homo sapiens
  chr2:74874697-74874739
  hypo
acttcatgggttcactttaaacgaaatgaaaacattctcgtg

SEQ ID NO: 63511 - DNA, 30 bp, Homo sapiens; identical to SEQ ID NO: 16278
  chr2:75031627-75031657
  hypo

SEQ ID NO: 63512 - DNA, 1611 bp, Homo sapiens; identical to SEQ ID NO: 37700
  chr2:75060917-75062528
  hypo

SEQ ID NO: 63513 - DNA, 135 bp, Homo sapiens
  chr2:75078339-75078474
  hypo
ttacccaagtgatctataaaacggaggtgcagaagttttacgaagacaatggagaacaggtcaggaaagccggaagtgcctgacaggtgagaaatgcttgaggaatgcttagccgctgtaaccatcaccccatta

SEQ ID NO: 63514 - DNA, 106 bp, Homo sapiens
  chr2:75105985-75106091
  hypo
aggcgaggagcggctgcgctctactattggggtcgacggttccgtctacaagaaacacccccagtgagtcagtgtgcagggcctggagatgcggagttcctggagt

SEQ ID NO: 63515 - DNA, 223 bp, Homo sapiens
  chr2:75145461-75145684
  hypo
gagaaggaccaattgatgaagcgatgttcttgcgtgggcgcgaggatgggatcgagtgcacagcggaaggtggcacttaggaacacgcagcactcgtccatgccagcaggaggcaaggcagaatggtgagtacaggcacacgtgtactgatgtggtgctgggagtgtgggtagaataggcggttgttctggatgatggatacggtttttctcagctcttaaaa

SEQ ID NO: 63516 - DNA, 31 bp, Homo sapiens
  chr2:75803805-75803836
  hypo
gaactttacctacaagcgatacaggcttact

SEQ ID NO: 63517 - DNA, 152 bp, Homo sapiens
  chr2:75825235-75825387
  hypo
gagtcctaggagcgcgcagtgggtggggctggacagcgagttccacttccatgccgcctgcgtgggcctcgcgcctacagatggccaacctgctgtaccacagccagcaccacatcaagatttggttccagaaccggcgcatgaagtacaag

SEQ ID NO: 63518 - DNA, 38 bp, Homo sapiens
  chr2:78904025-78904063
  hypo
cttgatctcctgacctcgtgatctgctgcacttgtttt

SEQ ID NO: 63519 - DNA, 27 bp, Homo sapiens
  chr2:79367855-79367882
  hypo
caccgcgcccagccagaacattttcaa

SEQ ID NO: 63520 - DNA, 39 bp, Homo sapiens
  chr2:79824566-79824605
  hypo
cagcctgggcgacagagcgggtctcaaaaaaaaaaaaaa

SEQ ID NO: 63521 - DNA, 90 bp, Homo sapiens; identical to SEQ ID NO: 16280
  chr2:79933146-79933236
  hypo

SEQ ID NO: 63522 - DNA, 29 bp, Homo sapiens
  chr2:79933475-79933504
  hypo
gagactccgtctcaaaaaaaaaaaaaaaa

SEQ ID NO: 63523 - DNA, 30 bp, Homo sapiens
  chr2:81694431-81694461
  hypo
cgacaggattggaccgagagacccggcggc

SEQ ID NO: 63524 - DNA, 30 bp, Homo sapiens
  chr2:84667198-84667228
  hypo
acatttaaaaaggctaatagccgggcatgg

SEQ ID NO: 63525 - DNA, 29 bp, Homo sapiens
  chr2:84667467-84667496
  hypo
gcctgggcgacagagcaaaactctgtctc

SEQ ID NO: 63526 - DNA, 30 bp, Homo sapiens
  chr2:85048990-85049020
  hypo
ccattcttcaagtccgaggggtcaggttct

SEQ ID NO: 63527 - DNA, 30 bp, Homo sapiens
  chr2:85051128-85051158
  hypo
gctgtgaccgcctccgcttcttccggaacc

SEQ ID NO: 63528 - DNA, 362 bp, Homo sapiens; identical to SEQ ID NO: 37716
  chr2:85107404-85107766
  hypo

SEQ ID NO: 63529 - DNA, 22 bp, Homo sapiens
  chr2:85169922-85169944
  hypo
ttttttttttagatggagtctc

SEQ ID NO: 63530 - DNA, 31 bp, Homo sapiens; identical to SEQ ID NO: 1643
  chr2:85198256-85198287
  hypo

SEQ ID NO: 63531 - DNA, 38 bp, Homo sapiens; identical to SEQ ID NO: 16284
  chr2:85227243-85227281
  hypo

SEQ ID NO: 63532 - DNA, 38 bp, Homo sapiens
  chr2:85227520-85227558
  hypo
cagccgtaagccactgcgcccagctatgaaatatattt

SEQ ID NO: 63533 - DNA, 141 bp, Homo sapiens
  chr2:85280280-85280421
  hypo
cctaaaatgtctgaaacggagcgccagtccatggaaagcgagcgtgcagaccgcagcctgtttgtccaagagctccttctgtccactttagtgcgtgaagagagctcatcctcagatgaggatgatcggggggagatggca

SEQ ID NO: 63534 - DNA, 55 bp, Homo sapiens; identical to SEQ ID NO: 16286
  chr2:85290473-85290528
  hypo

SEQ ID NO: 63535 - DNA, 31 bp, Homo sapiens; identical to SEQ ID NO: 16287
  chr2:85292073-85292104
  hypo

SEQ ID NO: 63536 - DNA, 30 bp, Homo sapiens; identical to SEQ ID NO: 16288
  chr2:85293322-85293352
  hypo

SEQ ID NO: 63537 - DNA, 121 bp, Homo sapiens
  chr2:85356673-85356794
  hypo
gattacagccgtgagccactgcgcctggcccttatgatctttttcaaccacttaaaaatgtaaaaaaagcggccgggcgacgtggctcacacctgtaaaaccagcacttgggcggatcacc

SEQ ID NO: 63538 - DNA, 62 bp, Homo sapiens; identical to SEQ ID NO: 37722
  chr2:85361466-85361528
  hypo

SEQ ID NO: 63539 - DNA, 14 bp, Homo sapiens
  chr2:85361628-85361642
  hypo
gcccccgggcttgg

SEQ ID NO: 63540 - DNA, 32 bp, Homo sapiens; identical to SEQ ID NO: 16291
  chr2:85498071-85498103
  hypo

SEQ ID NO: 63541 - DNA, 113 bp, Homo sapiens
  chr2:85515515-85515628
  hypo
gacatcccagtttactccatgcggctctccaggctagacgtgtgagcagaacttgaaggtttttcggagggagtcacagaggtttggacaccggcttttttgttaaaatactt

SEQ ID NO: 63542 - DNA, 17 bp, Homo sapiens
  chr2:85534082-85534099
  hypo
ggccagcgactgcattt

SEQ ID NO: 63543 - DNA, 24 bp, Homo sapiens
  chr2:85541360-85541384
  hypo
gacggagcaagactccatctaaaa

SEQ ID NO: 63544 - DNA, 156 bp, Homo sapiens
  chr2:85596562-85596718
  hypo
ccaggcagtgacttgccccctcgtagatgagagcatttagggatcacctcgtggggcagatccgccccatacccaccacagaggctgacctagcaagactgaatagcctcgtccaaaaagagagtcctcttcgccgacaatgccagcctcttgaaa

SEQ ID NO: 63545 - DNA, 30 bp, Homo sapiens
  chr2:85604351-85604381
  hypo
tgctgctcatgctccgctagcctgggaaga

SEQ ID NO: 63546 - DNA, 30 bp, Homo sapiens; identical to SEQ ID NO: 16292
  chr2:85660775-85660805
  hypo

SEQ ID NO: 63547 - DNA, 36 bp, Homo sapiens
  chr2:85686731-85686767
  hypo
aaaacaaaaaacaaaaaaaaacgaagaagaagaaga

SEQ ID NO: 63548 - DNA, 35 bp, Homo sapiens
  chr2:85729114-85729149
  hypo
cagctacctgggaggccgaggcaggccaatcacct

SEQ ID NO: 63549 - DNA, 293 bp, Homo sapiens
  chr2:85730474-85730767
  hypo
ccttgcttctggctctgtccacgcccttcgtagcacccacggagcagaggggcctggtcacagggagaggctgagatgcccagagaaatggatctggccacctgagctgaggcttctctgaaggtgagtcttcaccgaccccgccctagtagtggtgaatcgcgtgtcctgccctgttctctgctgcccctgagcagtgtctgaaccaggggcgccttttaacgccacagattctgcctcagggcgtggaacaccttcttctagaggggcgcgtgagaactctggtaggcagg

SEQ ID NO: 63550 - DNA, 88 bp, Homo sapiens; identical to SEQ ID NO: 16294
  chr2:85776392-85776480
  hypo

SEQ ID NO: 63551 - DNA, 45 bp, Homo sapiens
  chr2:85789678-85789723
  hypo
agaaagagaaagaaaagaaaaggcgggaagaaaagaaagaaagaa

SEQ ID NO: 63552 - DNA, 95 bp, Homo sapiens
  chr2:85819557-85819652
  hypo
gctgaaagtcaagggccacaccggtgtttgagatgagtcaggctgggagggttccacggcaggtggtatagaaagagagcagacaaggccgggcg

SEQ ID NO: 63553 - DNA, 30 bp, Homo sapiens
  chr2:85824642-85824672
  hypo
gtgctggccctctgcgtcttccttattaac

SEQ ID NO: 63554 - DNA, 236 bp, Homo sapiens; identical to SEQ ID NO: 37728
  chr2:85829250-85829486
  hypo

SEQ ID NO: 63555 - DNA, 212 bp, Homo sapiens
  chr2:85836003-85836215
  hypo
attccctgggcagaattcttccgagtgcagtgaatccagcctggagagaacgccttcaacatggtcagtgttggctctggcgctttgcaatctcctcctggatacgcaacttgagggcttctcgcatgggtggatccagaggcgtgtgtgccgacaccttctcactcacctttcctgggtcatcaccctacgtggaggaagagtcagaaggc

SEQ ID NO: 63556 - DNA, 30 bp, Homo sapiens
  chr2:85846339-85846369
  hypo
cagcaaagaatggccgagtggattctgagg

SEQ ID NO: 63557 - DNA, 91 bp, Homo sapiens; identical to SEQ ID NO: 16297
  chr2:85870243-85870334
  hypo

SEQ ID NO: 63558 - DNA, 228 bp, Homo sapiens
  chr2:85871980-85872208
  hypo
gaacaattttgtggtccgtttgtgtaggacagtttccttaacctcacagcctttgtctgattattccggctttattttaaccattaacagaaatgtggatctgagagaatacttgtctgaagaagtacaagcagtacacaagaataccacctatgacctcattgccaacatcgtgcatgacggcaagccctccgagggctcctaccggatccacgtgcttcatcatgt

SEQ ID NO: 63559 - DNA, 158 bp, Homo sapiens; identical to SEQ ID NO: 16299
  chr2:85878687-85878845
  hypo

SEQ ID NO: 63560 - DNA, 45 bp, Homo sapiens
  chr2:85885943-85885988
  hypo
ccatactgcagcactttaaaggacggtgtctttttctttctcata

SEQ ID NO: 63561 - DNA, 230 bp, Homo sapiens; identical to SEQ ID NO: 16301
  chr2:85890774-85891004
  hypo

SEQ ID NO: 63562 - DNA, 30 bp, Homo sapiens
  chr2:85941563-85941593
  hypo
taaacataggtaggctgagtgcggtggctc

SEQ ID NO: 63563 - DNA, 128 bp, Homo sapiens; identical to SEQ ID NO: 37733
  chr2:85980914-85981042
  hypo

SEQ ID NO: 63564 - DNA, 30 bp, Homo sapiens; identical to SEQ ID NO: 16302
  chr2:85998053-85998083
  hypo

SEQ ID NO: 63565 - DNA, 31 bp, Homo sapiens
  chr2:86258592-86258623
  hypo
ggagggcgggaagggacgggtcctcctcagt

SEQ ID NO: 63566 - DNA, 30 bp, Homo sapiens
  chr2:86282124-86282154
  hypo
ttagatgtgtgcaacgagggcgcggtggct

SEQ ID NO: 63567 - DNA, 33 bp, Homo sapiens; identical to SEQ ID NO: 16303
  chr2:86344874-86344907
  hypo

SEQ ID NO: 63568 - DNA, 31 bp, Homo sapiens; identical to SEQ ID NO: 16304
  chr2:86345268-86345299
  hypo

SEQ ID NO: 63569 - DNA, 44 bp, Homo sapiens
  chr2:86346747-86346791
  hypo
tgattacaggcgtgagccaccgcgcccagctttcctagactctt

SEQ ID NO: 63570 - DNA, 30 bp, Homo sapiens; identical to SEQ ID NO: 16305
  chr2:86362920-86362950
  hypo

SEQ ID NO: 63571 - DNA, 30 bp, Homo sapiens; identical to SEQ ID NO: 16306
  chr2:86374888-86374918
  hypo

SEQ ID NO: 63572 - DNA, 40 bp, Homo sapiens
  chr2:86423729-86423769
  hypo
ttgattctgtaatcaaaataaaacacgttaaatattaagc

SEQ ID NO: 63573 - DNA, 103 bp, Homo sapiens; identical to SEQ ID NO: 16307
  chr2:86425627-86425730
  hypo

SEQ ID NO: 63574 - DNA, 31 bp, Homo sapiens; identical to SEQ ID NO: 1652
  chr2:86428203-86428234
  hypo

SEQ ID NO: 63575 - DNA, 90 bp, Homo sapiens; identical to SEQ ID NO: 16309
  chr2:86783933-86784023
  hypo

SEQ ID NO: 63576 - DNA, 90 bp, Homo sapiens
  chr2:86809395-86809485
  hypo
acaaatgctaccacaatttagcggaagacgtgatattctttccattaagttttgttaggtctatttagatatccacaagaaggccaggcg

SEQ ID NO: 63577 - DNA, 31 bp, Homo sapiens; identical to SEQ ID NO: 1655
  chr2:86850367-86850398
  hypo

SEQ ID NO: 63578 - DNA, 27 bp, Homo sapiens
  chr2:86888385-86888412
  hypo
ctccccgcatagcagctttatttgtga

SEQ ID NO: 63579 - DNA, 27 bp, Homo sapiens
  chr2:86915599-86915626
  hypo
attcacgggaaagcaacgaacacctcg

SEQ ID NO: 63580 - DNA, 924 bp, Homo sapiens; identical to SEQ ID NO: 37747
  chr2:87017639-87018563
  hypo

SEQ ID NO: 63581 - DNA, 30 bp, Homo sapiens
  chr2:87142056-87142086
  hypo
ggcggcggcggcggcggcggcctggcctaa

SEQ ID NO: 63582 - DNA, 77 bp, Homo sapiens; identical to SEQ ID NO: 16313
  chr2:87569213-87569290
  hypo

SEQ ID NO: 63583 - DNA, 22 bp, Homo sapiens
  chr2:88328177-88328199
  hypo
ttttttcttgagatggcgtctc

SEQ ID NO: 63584 - DNA, 7 bp, Homo sapiens
  chr2:88366760-88366767
  hypo
caggcgt

SEQ ID NO: 63585 - DNA, 30 bp, Homo sapiens; identical to SEQ ID NO: 16316
  chr2:88367488-88367518
  hypo

SEQ ID NO: 63586 - DNA, 68 bp, Homo sapiens
  chr2:88387491-88387559
  hypo
ggagcagaaggacctgcgggtggacgtggacacattcttgcagtactggccgccgcagagccagcagt

SEQ ID NO: 63587 - DNA, 197 bp, Homo sapiens
  chr2:88559424-88559621
  hypo
ttagctatttagcattcgagactctttgcagggagtccaaggaacttcgcacttggcaccatccccacctaccagaagctggcaaattcaccgggagaagattcctcccaagttcatctttccacctgcaatcaaccgtggatgaactggtgctttgtttgaatagctaagtagagtgttttcggcatggaaaactg

SEQ ID NO: 63588 - DNA, 37 bp, Homo sapiens
  chr2:88591077-88591114
  hypo
cgccactgcactccagcatgggcgacagagcaagact

SEQ ID NO: 63589 - DNA, 154 bp, Homo sapiens; identical to SEQ ID NO: 37752
  chr2:88751265-88751419
  hypo

SEQ ID NO: 63590 - DNA, 355 bp, Homo sapiens; identical to SEQ ID NO: 37753
  chr2:88751460-88751815
  hypo

SEQ ID NO: 63591 - DNA, 909 bp, Homo sapiens; identical to SEQ ID NO: 37754
  chr2:88751942-88752851
  hypo

SEQ ID NO: 63592 - DNA, 20 bp, Homo sapiens
  chr2:88892429-88892449
  hypo
acattggatcacctgacgtc

SEQ ID NO: 63593 - DNA, 13 bp, Homo sapiens
  chr2:88908544-88908557
  hypo
cccggccttgatg

SEQ ID NO: 63594 - DNA, 25 bp, Homo sapiens
  chr2:88923517-88923542
  hypo
tttttttttgagacggagtttcgct

SEQ ID NO: 63595 - DNA, 294 bp, Homo sapiens; identical to SEQ ID NO: 1664
  chr2:89065128-89065422
  hypo

SEQ ID NO: 63596 - DNA, 19 bp, Homo sapiens
  chr2:89091848-89091867
  hypo
caggcgtgagccaccgcgc

SEQ ID NO: 63597 - DNA, 40 bp, Homo sapiens; identical to SEQ ID NO: 16323
  chr2:89601944-89601984
  hypo

SEQ ID NO: 63598 - DNA, 31 bp, Homo sapiens
  chr2:95646408-95646439
  hypo
ccctgaaggaagccgccggcagctatggtgg

SEQ ID NO: 63599 - DNA, 30 bp, Homo sapiens
  chr2:95677207-95677237
  hypo
tgctgggattacaggcgtgagccactgcca

SEQ ID NO: 63600 - DNA, 1543 bp, Homo sapiens; identical to SEQ ID NO: 37760
  chr2:95690893-95692436
  hypo

SEQ ID NO: 63601 - DNA, 35 bp, Homo sapiens
  chr2:95715630-95715665
  hypo
caagactccgcttagtcgtccggccagggctgcat

SEQ ID NO: 63602 - DNA, 134 bp, Homo sapiens; identical to SEQ ID NO: 16325
  chr2:95722587-95722721
  hypo

SEQ ID NO: 63603 - DNA, 541 bp, Homo sapiens
  chr2:95723255-95723796
  hypo
ttctaaaaagcatctcgtacccccactcccgcaggttgtaggactatttttgcaaagcagcccaaatggaggattgaaggctgccttacgctgaccttaaagagacagcaaagggtttgcgctgccagccgtgggctggagcgagcctgccttcggggcccacacaagggcctgttgttctgggtatcaactggggccggtgtggggttacaaagaggcctttcaaagagacaaagcgcctctggacaggctgagtgtccctgcacacgtgggcatccgcccagggcatttaaaataacgcgatttgaaaaaacagatttgaagtgatttttcctactccgcgttattcagtggcctttgttctgtctgcatcatacccggcgacagcagcttctaagagctggggcgctggagcagacacgggggttcctagctgtggctgctctcttccttcacaggtaacgagatcatcacactgccaggctctctagagggtaccagagaggttggattcacacggggtgctcggctgccaggactt

SEQ ID NO: 63604 - DNA, 31 bp, Homo sapiens
  chr2:95745774-95745805
  hypo
tgcctggcccggacacaagcatttctaactg

SEQ ID NO: 63605 - DNA, 346 bp, Homo sapiens; identical to SEQ ID NO: 37761
  chr2:95825282-95825628
  hypo

SEQ ID NO: 63606 - DNA, 197 bp, Homo sapiens; identical to SEQ ID NO: 16326
  chr2:95941662-95941859
  hypo

SEQ ID NO: 63607 - DNA, 30 bp, Homo sapiens; identical to SEQ ID NO: 16327
  chr2:95953891-95953921
  hypo

SEQ ID NO: 63608 - DNA, 230 bp, Homo sapiens
  chr2:95960743-95960973
  hypo
caaggcccgaacagccggtgggtccagcagagcagggcagttgtcccaggcccgcggtgtcacggctggtgaactccgaggacagcgcatctgagtgtgggatgtcagcgagtgtgccaagcaggggcgagcagctcttgggggtgctgctgtgatgagtgggttcctctgctcctgactcctccggccaggccgtcaggaagaccagcccatcacggcagtgcagtcac

SEQ ID NO: 63609 - DNA, 92 bp, Homo sapiens
  chr2:95992198-95992290
  hypo
gctctgggagggcagcggctcccaaattcttagcgcccaacatggcctacaggacctgtgtaactggaccggcctgccggccctgttctcaa

SEQ ID NO: 63610 - DNA, 30 bp, Homo sapiens; identical to SEQ ID NO: 37764
  chr2:96011949-96011979
  hypo

SEQ ID NO: 63611 - DNA, 30 bp, Homo sapiens; identical to SEQ ID NO: 37765
  chr2:96012313-96012343
  hypo

SEQ ID NO: 63612 - DNA, 31 bp, Homo sapiens; identical to SEQ ID NO: 16328
  chr2:96049659-96049690
  hypo

SEQ ID NO: 63613 - DNA, 242 bp, Homo sapiens
  chr2:96754441-96754683
  hypo
ctcaaaaaacattcagcgcagctttttctgtaatggtgaaaaaccagaagccacctgagtttccgataacaagagaagagttacataaatgaggaggtgcagctgtgccattctaagcagggcctgcagacactggtgaggcgggaagtgctgctgctgggaggtttgctgaaggcaggacacgaaacccagtggccgagacagcctggagctggcaggacggtggcagtggtgggactgtg

SEQ ID NO: 63614 - DNA, 30 bp, Homo sapiens
  chr2:96779832-96779862
  hypo
ccaggcctccaagaccgccccagcgaggca

SEQ ID NO: 63615 - DNA, 31 bp, Homo sapiens
  chr2:96800289-96800320
  hypo
ctccacagcaccccagcgtgcctgtgccatc

SEQ ID NO: 63616 - DNA, 31 bp, Homo sapiens
  chr2:96806866-96806897
  hypo
agaatcacccttcattcggcctcacagagtg

SEQ ID NO: 63617 - DNA, 43 bp, Homo sapiens
  chr2:96815036-96815079
  hypo
cattttaaccaagaggctttgcgcccctttctgcatttatcac

SEQ ID NO: 63618 - DNA, 224 bp, Homo sapiens; identical to SEQ ID NO: 16330
  chr2:96821756-96821980
  hypo

SEQ ID NO: 63619 - DNA, 31 bp, Homo sapiens; identical to SEQ ID NO: 16331
  chr2:96829030-96829061
  hypo

SEQ ID NO: 63620 - DNA, 28 bp, Homo sapiens
  chr2:96837380-96837408
  hypo
accccgcgggaattgaaatcttaccaca

SEQ ID NO: 63621 - DNA, 34 bp, Homo sapiens
  chr2:96993130-96993164
  hypo
ggacccagccctgggccgccgctgtggctgtgtg

SEQ ID NO: 63622 - DNA, 30 bp, Homo sapiens
  chr2:97039125-97039155
  hypo
ccttactcagttgccgggacatccccagtc

SEQ ID NO: 63623 - DNA, 190 bp, Homo sapiens
  chr2:97068615-97068805
  hypo
actgtgagatgatgaacggtgagagaatgcatttctgttgtttaagtccacaggctgtggtccttgttacagcagcccaagcaaatgaacacaatttgtatagaaatacataggcggcctactccaggcatgagccaccgctcccggccctatatatttctatacagagtgtgtccgtttgtttgggctg

SEQ ID NO: 63624 - DNA, 31 bp, Homo sapiens
  chr2:97170312-97170343
  hypo
gaaagaccaggtcctcaaggccgggtgcggt

SEQ ID NO: 63625 - DNA, 211 bp, Homo sapiens; identical to SEQ ID NO: 1667
  chr2:97171201-97171412
  hypo

SEQ ID NO: 63626 - DNA, 287 bp, Homo sapiens; identical to SEQ ID NO: 37773
  chr2:97175213-97175500
  hypo

SEQ ID NO: 63627 - DNA, 30 bp, Homo sapiens; identical to SEQ ID NO: 16334
  chr2:97192251-97192281
  hypo

SEQ ID NO: 63628 - DNA, 269 bp, Homo sapiens; identical to SEQ ID NO: 37776
  chr2:97203313-97203582
  hypo

SEQ ID NO: 63629 - DNA, 31 bp, Homo sapiens; identical to SEQ ID NO: 1673
  chr2:97304170-97304201
  hypo

SEQ ID NO: 63630 - DNA, 149 bp, Homo sapiens; identical to SEQ ID NO: 16337
  chr2:97305375-97305524
  hypo

SEQ ID NO: 63631 - DNA, 50 bp, Homo sapiens
  chr2:97361058-97361108
  hypo
gatccctcacaggacggggaagcctgtccttgtgcgccttcagacactgg

SEQ ID NO: 63632 - DNA, 30 bp, Homo sapiens; identical to SEQ ID NO: 16339
  chr2:97365975-97366005
  hypo

SEQ ID NO: 63633 - DNA, 37 bp, Homo sapiens
  chr2:97370002-97370039
  hypo
ctatattttctggaaacgctatcgcttcaaactcata

SEQ ID NO: 63634 - DNA, 31 bp, Homo sapiens; identical to SEQ ID NO: 1674
  chr2:97405566-97405597
  hypo

SEQ ID NO: 63635 - DNA, 738 bp, Homo sapiens
  chr2:97427362-97428100
  hypo
ggaccccatggagctgcgcatcgtgcagaactgtggcaccgagaaggagaggcgctatgcccgcaagattgagcccatccggcgcaagggcaactaccttctctgctcgttgctcctagggaacgtgctggtcaacacctccctcacaatccttctagacaacctcatcgggtccggcctcatggcggtggcctcctccaccattggcattgtcatctttggggagatcctacctcaggccctgtgctcccgacatgggctggctgtgggtgccaacaccatccttctcaccaaattctttatgctactcaccttccccctcagttttcccattagcaagctcctggacttttttctgggccaggagattcgcactgtttacaaccgggagaagctgatggagatgttgaaggtgacggagccctataatgacctcgtgaaagaggagctcaatatgatccagggtgccctggaactacggaccaaaactgtagaggatatcatgacccagctccaggactgcttcatgatccgcagcgatgccatcctggacttcaacaccatgtcggagataatggaaagcggctatactcgcatcccggtgttcgaagacgagcagtccaatattgtagatattctctacgtcaaagacttggcctttgtggaccccgatgactgcacccccctcaagactatcactcgcttctataaccacccggtgcactttgtcttccatga

SEQ ID NO: 63636 - DNA, 336 bp, Homo sapiens
  chr2:97435334-97435670
  hypo
aaggacagtgcagggggtgtcagtgtgtaaaagccaggctgaggcgactccttgatggagacgaagagaaccaagggggcacgctattcgggagcctccttggagggtcagatggggtgaagaccatgcacagactgtgggatgggaccttaggctgtggggtgcccagcgagagcagcctcggacaagtggtgcccgaaggcagctttgcaccggttctccgtcagccctgcctggtaatagcctcaatatggtgatttgatctcaagaagctgcctgggggcaggtgtatctgagagtgacaggagctggttaatactccgggtgcaggcagag

SEQ ID NO: 63637 - DNA, 197 bp, Homo sapiens
  chr2:97437987-97438184
  hypo
cttacacaccccatgcgcgcacacacactcatacccccacataggcacaggcaggctctactcccacccgtgcgcacacacactcatacccctcacataggcacaggcaggtgctcacacacacgtgcgcacacacactcatgccccccacgtaggcacaggcaggcgctcacacacacatgcgcacacacactcat

SEQ ID NO: 63638 - DNA, 231 bp, Homo sapiens
  chr2:97454843-97455074
  hypo
ggaggggttggggtagcatggcgaggagcgagggcactactcaggcctcgccaggctgcagcctggtcagtgggagatagacgccggtcagccgatggcacagagctgtgaagggaagaaatgggtcgggatccagggccctaaaagacaacatggctaacacccagggctaacgtttgagcccagggcagaaggataaagaggtgacacggaggctggggagcaggagga

SEQ ID NO: 63639 - DNA, 177 bp, Homo sapiens
  chr2:97463243-97463420
  hypo
cggcagctgacaaccgaagccggaagcgggtgtctgagaagaacaagcgtgacttctctgccttcaaggatgcggacaatgagctcaaagtgaaaatctccccgcagctcctcctggccgctcatcgcttcctagccacaggtagcatgaggaggaccttccggtcttggtggaaat

SEQ ID NO: 63640 - DNA, 31 bp, Homo sapiens; identical to SEQ ID NO: 16344
  chr2:97465079-97465110
  hypo

SEQ ID NO: 63641 - DNA, 26 bp, Homo sapiens
  chr2:97471882-97471908
  hypo
ctcccggacggggcggctggccgggc

SEQ ID NO: 63642 - DNA, 98 bp, Homo sapiens; identical to SEQ ID NO: 16345
  chr2:97479659-97479757
  hypo

SEQ ID NO: 63643 - DNA, 299 bp, Homo sapiens; identical to SEQ ID NO: 37780
  chr2:97482862-97483161
  hypo

SEQ ID NO: 63644 - DNA, 179 bp, Homo sapiens; identical to SEQ ID NO: 16347
  chr2:97485584-97485763
  hypo

SEQ ID NO: 63645 - DNA, 30 bp, Homo sapiens; identical to SEQ ID NO: 16348
  chr2:97489046-97489076
  hypo

SEQ ID NO: 63646 - DNA, 30 bp, Homo sapiens
  chr2:97511173-97511203
  hypo
ggcttgtgctatcgcgcccagctgaaaact

SEQ ID NO: 63647 - DNA, 34 bp, Homo sapiens; identical to SEQ ID NO: 16349
  chr2:97511923-97511957
  hypo

SEQ ID NO: 63648 - DNA, 30 bp, Homo sapiens; identical to SEQ ID NO: 16350
  chr2:97520074-97520104
  hypo

SEQ ID NO: 63649 - DNA, 30 bp, Homo sapiens; identical to SEQ ID NO: 16351
  chr2:97526598-97526628
  hypo

SEQ ID NO: 63650 - DNA, 30 bp, Homo sapiens
  chr2:97526903-97526933
  hypo
tccaaggtcaccgacgggcctgccacgaca

SEQ ID NO: 63651 - DNA, 177 bp, Homo sapiens
  chr2:97530638-97530815
  hypo
ctgccggtcagccccgctgggccagcagggctcccagggcccaccgctgtgagactcggtaccttgcagacacgggccacacgagccaccacctgctcggcatagcagtcggactccactgcccgctccctgaagaagaagtagaccttgtcgtcgtcccccgtgaagctgcccaca

SEQ ID NO: 63652 - DNA, 157 bp, Homo sapiens; identical to SEQ ID NO: 37784
  chr2:97535759-97535916
  hypo

SEQ ID NO: 63653 - DNA, 436 bp, Homo sapiens; identical to SEQ ID NO: 16353
  chr2:97544649-97545085
  hypo

SEQ ID NO: 63654 - DNA, 192 bp, Homo sapiens; identical to SEQ ID NO: 16354
  chr2:97545393-97545585
  hypo

SEQ ID NO: 63655 - DNA, 25 bp, Homo sapiens
  chr2:97546332-97546357
  hypo
aaacattttttttttttgagacgga

SEQ ID NO: 63656 - DNA, 25 bp, Homo sapiens
  chr2:97546656-97546681
  hypo
caacggtaattggctgaacctaact

SEQ ID NO: 63657 - DNA, 84 bp, Homo sapiens
  chr2:97550183-97550267
  hypo
gccctttgcaggctgggcccccggggcacggtctaggtatccacacaggttgggcacaacagcgatgaatcatgagtaatctga

SEQ ID NO: 63658 - DNA, 100 bp, Homo sapiens
  chr2:97552034-97552134
  hypo
ccaatgtgactggcttagagacgggcacctgacccaaaccaagccaatgagacgccattctggttacgattcgagggccgaagctctttcttgtccagga

SEQ ID NO: 63659 - DNA, 146 bp, Homo sapiens
  chr2:97552401-97552547
  hypo
cagggaagaagggacagaaaacgtgatgcgcagagagcacttgagaaggccatggtcggcctgggagctgttcctgcagactgaggatggcgtgtaagggaccttccccactgtgcttggccgtcttcggtgcacagctgggagcc

SEQ ID NO: 63660 - DNA, 159 bp, Homo sapiens; identical to SEQ ID NO: 16355
  chr2:97558026-97558185
  hypo

SEQ ID NO: 63661 - DNA, 29 bp, Homo sapiens
  chr2:97562880-97562909
  hypo
ggagtgagccacagcgcttggcccctttg

SEQ ID NO: 63662 - DNA, 19 bp, Homo sapiens
  chr2:97567214-97567233
  hypo
aggccgacctcttaatgcc

SEQ ID NO: 63663 - DNA, 190 bp, Homo sapiens
  chr2:97576051-97576241
  hypo
gagacgccgtcccaccggggagacggcctcctctgcacagtgaggttggtcatgcagcctcccacactctcttaggctttaacccccttcgacgaccaatatttgattccaaatgaaaaactgttctccttgacaaagacggcaaaagcaaaatacgaattgtgtagtgttgttccgtctgcatcagggc

SEQ ID NO: 63664 - DNA, 30 bp, Homo sapiens
  chr2:97587052-97587082
  hypo
tctcgccacccagcccgcacaggggagtaa

SEQ ID NO: 63665 - DNA, 154 bp, Homo sapiens
  chr2:97587296-97587450
  hypo
acgtccaggctggtgcggcacagcagctcaatcagtcccatgaggttctcatcagtgtaggcccccggctgggcctgggcacacagcgccagaaactggagagagaaaagagggcaggggtggccagggcatgggggaacgggagagtacttcg

SEQ ID NO: 63666 - DNA, 332 bp, Homo sapiens
  chr2:97588989-97589321
  hypo
atgagccaccatgcctggccccaattctttcttgtacaagaactctctcttggggcctagatcaggacccgtgtccgataacacagtttctgtagcatccggcccacagccagcacagtgcctgccatggtgctgagctcgccggagattctccgtgatgctcctggaatttagctgctgaatgggtctgaactgtaagccgagagtgccctgcatgaggcaggcggcttgactcaccttgtagatgtggcccaggctgatgtccaaggcaatctcttggggagcgtcctgctcctcattctcattcaggccagcctcgcctggaagcaccc

SEQ ID NO: 63667 - DNA, 30 bp, Homo sapiens; identical to SEQ ID NO: 16358
  chr2:97599772-97599802
  hypo

SEQ ID NO: 63668 - DNA, 31 bp, Homo sapiens
  chr2:97612348-97612379
  hypo
ccttcctaatggggagcgcatcagagacaac

SEQ ID NO: 63669 - DNA, 31 bp, Homo sapiens; identical to SEQ ID NO: 16359
  chr2:97614532-97614563
  hypo

SEQ ID NO: 63670 - DNA, 31 bp, Homo sapiens
  chr2:97615857-97615888
  hypo
ccgggaaggcactccacgccagtgtcagggt

SEQ ID NO: 63671 - DNA, 737 bp, Homo sapiens; identical to SEQ ID NO: 16360
  chr2:97651750-97652487
  hypo

SEQ ID NO: 63672 - DNA, 162 bp, Homo sapiens
  chr2:97655846-97656008
  hypo
tagagtaaagtggtctcgctgtagtgtgtgcttttacagtagtagctaagcctgttcccttaagggttcatgtgaccaaagcgttagagagccccttcctaggtgtctgtaaccccctttgattaatttgcattgatgaccttgaggtattaaaatttttga

SEQ ID NO: 63673 - DNA, 104 bp, Homo sapiens; identical to SEQ ID NO: 1677
  chr2:97779475-97779579
  hypo

SEQ ID NO: 63674 - DNA, 25 bp, Homo sapiens
  chr2:97825525-97825550
  hypo
atttttttttttgagacggagtctc

SEQ ID NO: 63675 - DNA, 31 bp, Homo sapiens; identical to SEQ ID NO: 16363
  chr2:97890111-97890142
  hypo

SEQ ID NO: 63676 - DNA, 31 bp, Homo sapiens
  chr2:98025686-98025717
  hypo
tgtgcttattgggccccgcttctggagaaac

SEQ ID NO: 63677 - DNA, 31 bp, Homo sapiens
  chr2:98266896-98266927
  hypo
caccgtgcccggccataaacttgtgttattt

SEQ ID NO: 63678 - DNA, 31 bp, Homo sapiens; identical to SEQ ID NO: 16364
  chr2:98276216-98276247
  hypo

SEQ ID NO: 63679 - DNA, 30 bp, Homo sapiens
  chr2:98349068-98349098
  hypo
ggtcaggtattccccgtgaatggccatctg

SEQ ID NO: 63680 - DNA, 110 bp, Homo sapiens; identical to SEQ ID NO: 16365
  chr2:98349522-98349632
  hypo

SEQ ID NO: 63681 - DNA, 374 bp, Homo sapiens
  chr2:98350812-98351186
  hypo
tatgccagtgtgtgcgtgtggatgtgcaggaacacgcatgggcacccacctgcttgtgcatgctccagggacggcacccttgtctggggcaggtgcttgtgggggctgaggctgccttgctccccacacccctgcccctgacctgggagtgtaccgctgtgtgtgcccagcacgcataacgtccccagacaaaccgcggccgatgcccatggacacgagcgtgtatgagagcccctacagcgacccagaggagctcaaggacaagaagctcttcctgaagcgcgataacctcctcatagctgacattgaacttggctgcggcaactttggctcagtgcgccagggcgtgtaccgcatgcgcaagtatggccgcc

SEQ ID NO: 63682 - DNA, 30 bp, Homo sapiens
  chr2:98351533-98351563
  hypo
ccgtcctcagcagacgctccaggctgcagg

SEQ ID NO: 63683 - DNA, 30 bp, Homo sapiens
  chr2:98354208-98354238
  hypo
cccctccccaggcccgctcagcagggaagt

SEQ ID NO: 63684 - DNA, 30 bp, Homo sapiens
  chr2:98357852-98357882
  hypo
ctccccgtccccaccggtgatgtcccctag

SEQ ID NO: 63685 - DNA, 322 bp, Homo sapiens
  chr2:98377006-98377328
  hypo
acttgagaagccttccgtctttctagcggttagtggtggtctaccgtacctgtctgagccatcgctgtcaacaggagcgtgtgaaatgccaaggctgctggagaaacctgttttgtttgaagaaactttagcaaagccattcccacctgtaacaatggacgttcaatcaatggaaggcacattaggacagaggtcattccaccaggcctggcgcctggcgtggcaggtctctgaagcaaaggcactgacctgggctcttgtcgtagccagccgtgactgcagcaaaagtggggttgccgttcttgcccgggagcgaggctgc

SEQ ID NO: 63686 - DNA, 594 bp, Homo sapiens
  chr2:98408813-98409407
  hypo
cacatcacggatctccggcagtgggagatgattacctttgctttttggcaatggcgatggaggctgctctgtaaacacttctagggctggggagtcatggtggtcgaagtctttgtccatggcttctatgagactggtgatgtccgagtcctcggaactgtgcctcgcgctgctggcacgttctgggtgggaagggtgtgcgaggggggcgggagacagcctttcaggctgcggctcctggggctgaggcactggcggtggcagaggaggctgagggtgctgctccagcgggctgtgggcatggtgctggctgccgtgctggctctgctttgcccctttggactttctgcccgctgtatgaccttgagtcactgtgttcgaatctaagacaagggggcttgttttgttagcagactgtgaagaagctgcttgagcagaagtcctactagaggtacttgaactgtttttggctctgacgttttccacgtcagctgagtttctattgctgtgactgctgtgtgggtggaccgatgggccacactgcttatgactcccggcactgggtcgggatgatgaaccgcctgctccacagaa

SEQ ID NO: 63687 - DNA, 10 bp, Homo sapiens
  chr2:98581934-98581944
  hypo
tacccgccag

SEQ ID NO: 63688 - DNA, 33 bp, Homo sapiens
  chr2:98613857-98613890
  hypo
aaaagcaattttagggcagggcgcagtggctca

SEQ ID NO: 63689 - DNA, 33 bp, Homo sapiens
  chr2:98614129-98614162
  hypo
gagcaaaactccgtctcaaaaaattaatcataa

SEQ ID NO: 63690 - DNA, 48 bp, Homo sapiens
  chr2:98674828-98674876
  hypo
aatgtgaaggattgccggcagcaactcgaagctcggaagagtcaaggg

SEQ ID NO: 63691 - DNA, 165 bp, Homo sapiens
  chr2:98871118-98871283
  hypo
cactagctcaagtcctcatggcgacactaggagtggagcggtactactatccccactttaccgaaaagttgggcactggcccaaagcctcacggcaagaaggagaagaagccgactgagctttgggccctggagttgtggctccggagtctaccctcttcagagg

SEQ ID NO: 63692 - DNA, 192 bp, Homo sapiens
  chr2:99097185-99097377
  hypo
caggcagaatgtgcccgtctccagtcccttgcattgctggcagcctcagaccggagagcactgaatcttccactagcctgtcttcttgccagctgcagccccagggcgcgtgtgtccgtctccgcagccaaactccccctgtgctggcctgtggagggtgagtggggggcagggtgccgcacactctggacc

SEQ ID NO: 63693 - DNA, 30 bp, Homo sapiens
  chr2:99207058-99207088
  hypo
ggtaacccagtcctcgttgtatgacttgtc

SEQ ID NO: 63694 - DNA, 30 bp, Homo sapiens; identical to SEQ ID NO: 16367
  chr2:99260668-99260698
  hypo

SEQ ID NO: 63695 - DNA, 198 bp, Homo sapiens; identical to SEQ ID NO: 16368
  chr2:99386852-99387050
  hypo

SEQ ID NO: 63696 - DNA, 207 bp, Homo sapiens
  chr2:99444495-99444702
  hypo
catttatacttcagcacggaagaactgatagcaaatggcaaacatgtcacctgggacaaagggatgctggcagtcatgtgaaagaatgaaggcaatacccgcagatccctgcccccgaacttggccagctccaccactgagtgaggtcgaagtgggctcccctgcagacacaagttgggatgaaactcggagcgcctgtgagcacat

SEQ ID NO: 63697 - DNA, 190 bp, Homo sapiens
  chr2:99517364-99517554
  hypo
ccagtgaaggagaaggtcacccggctccaccttctataatggtgccaggaggcaggtgaaggaagtcaagctccagaggaaggagcgctgagcccttcccctcacttaggacagaaagcgattctgcaagcaatggggttggcgcacagggtcaagcatgtaaaagcacgtggctctgccagccctgagt

SEQ ID NO: 63698 - DNA, 87 bp, Homo sapiens
  chr2:99543361-99543448
  hypo
tagactcaccagacagcccctcgcaacccacccaccctctcagctagggcgggtctccagggattcgtttctaagtacttggcttgt

SEQ ID NO: 63699 - DNA, 328 bp, Homo sapiens
  chr2:99796319-99796647
  hypo
cccggccggtagagtttgtagttctgaccaaagcaccaaaccataaagggctcccctctgctgccccaaagcttctgtaacactttaattataagaagcttaaactagaaagaacagagggagcttagtccagaccgggagtgtcgggggttggggagcaggagctgatcttatcaatttaatacataaatattgagtgtctactgtgagccagggttgtgctgggtgttaaggaatatttgggtatttctcaacattgaataatacgaaaagtctcacttgtctcctccacaaccctgcgcatttctcacaccgaacctcatccgtt

SEQ ID NO: 63700 - DNA, 78 bp, Homo sapiens; identical to SEQ ID NO: 16370
  chr2:99798645-99798723
  hypo

SEQ ID NO: 63701 - DNA, 138 bp, Homo sapiens
  chr2:99799022-99799160
  hypo
aataaataagataaaataaacgtattctttgagtcaaacgtggtgacacacacctagctccaattactgggaaaattgaggattgcttgaggctgagttcaataccagaaacatagcgagactctgtctctaaaaact

SEQ ID NO: 63702 - DNA, 30 bp, Homo sapiens; identical to SEQ ID NO: 16372
  chr2:99871723-99871753
  hypo

SEQ ID NO: 63703 - DNA, 105 bp, Homo sapiens
  chr2:100107652-100107757
  hypo
tcaacttcagtattctcgtcgctaatccaacgaatttagattgcatacttttcaaagacgtcataatttaaaacaaattgcgtaattgctttcttttcttttctt

SEQ ID NO: 63704 - DNA, 30 bp, Homo sapiens
  chr2:100210022-100210052
  hypo
ggcagaggcagccacggtctgtgctttgga

SEQ ID NO: 63705 - DNA, 31 bp, Homo sapiens; identical to SEQ ID NO: 16373
  chr2:100293283-100293314
  hypo

SEQ ID NO: 63706 - DNA, 97 bp, Homo sapiens; identical to SEQ ID NO: 16374
  chr2:100618384-100618481
  hypo

SEQ ID NO: 63707 - DNA, 825 bp, Homo sapiens; identical to SEQ ID NO: 37808
  chr2:100721080-100721905
  hypo

SEQ ID NO: 63708 - DNA, 30 bp, Homo sapiens; identical to SEQ ID NO: 16376
  chr2:100759830-100759860
  hypo

SEQ ID NO: 63709 - DNA, 30 bp, Homo sapiens; identical to SEQ ID NO: 16377
  chr2:100760336-100760366
  hypo

SEQ ID NO: 63710 - DNA, 30 bp, Homo sapiens; identical to SEQ ID NO: 37809
  chr2:100898038-100898068
  hypo

SEQ ID NO: 63711 - DNA, 392 bp, Homo sapiens; identical to SEQ ID NO: 37810
  chr2:100898413-100898805
  hypo

SEQ ID NO: 63712 - DNA, 121 bp, Homo sapiens
  chr2:101006127-101006248
  hypo
aacaaaacaaacataacaaaaaaacaaacggttgaagctgagagctacttggagttcagtgatcactttgacacacacatgtatttttgagaatgagtttcactcttgttgcccaggctga

SEQ ID NO: 63713 - DNA, 126 bp, Homo sapiens
  chr2:101013987-101014113
  hypo
tcctggtggctctgcgagtgtggggccctggggatgtcggacagagtgggtgactataaccatcagcacagggaacctgaagagacaaaggaggggggcctgggggtgggcgagccacctaaagtg

SEQ ID NO: 63714 - DNA, 30 bp, Homo sapiens
  chr2:101015479-101015509
  hypo
tccaccaaccccatcggccccctctagttg

SEQ ID NO: 63715 - DNA, 44 bp, Homo sapiens; identical to SEQ ID NO: 16378
  chr2:101022687-101022731
  hypo

SEQ ID NO: 63716 - DNA, 197 bp, Homo sapiens; identical to SEQ ID NO: 37815
  chr2:101033435-101033632
  hypo

SEQ ID NO: 63717 - DNA, 540 bp, Homo sapiens; identical to SEQ ID NO: 37816
  chr2:101033731-101034271
  hypo

SEQ ID NO: 63718 - DNA, 41 bp, Homo sapiens
  chr2:101035288-101035329
  hypo
aatgtggtactaggccgggcgtggtggctcacgcctgtaat

SEQ ID NO: 63719 - DNA, 198 bp, Homo sapiens; identical to SEQ ID NO: 16381
  chr2:101362899-101363097
  hypo

SEQ ID NO: 63720 - DNA, 215 bp, Homo sapiens
  chr2:101520348-101520563
  hypo
ggtggagggaacccaggcctgcgtgtggtaggagaggaagctggatctgtgggcctgagaagcatcaagccagtggcctgggagagtagaggctccggtgttgaggaagaacattcctggattgttacgtaatctttcacatctgtgcaccttcgctgtctcaaggagagtaaacgccctaagggaggaactgcggattacactcctttggggct

SEQ ID NO: 63721 - DNA, 169 bp, Homo sapiens
  chr2:101552628-101552797
  hypo
gaaaagaactctttcccctttcggcatggtataaaggtgcccttcatgcactgctcgtggcctcttccgggttcccgctgccatgcacttcagccacaccctcctaatgtgaaagaatgaattgtccacacagattctcagacatcacgtgaccatctagttgagtgca

SEQ ID NO: 63722 - DNA, 41 bp, Homo sapiens
  chr2:101574053-101574094
  hypo
tcttagtggaaagaaactggccgggtgattttcaaaggcat

SEQ ID NO: 63723 - DNA, 41 bp, Homo sapiens
  chr2:101574393-101574434
  hypo
aaaaaaggtctttgctttacggggtcctaatatgcaggctt

SEQ ID NO: 63724 - DNA, 30 bp, Homo sapiens
  chr2:101593777-101593807
  hypo
gtagcagtccacgcacgtcgtcctgcttga

SEQ ID NO: 63725 - DNA, 31 bp, Homo sapiens
  chr2:101607562-101607593
  hypo
acaattcacaccccaccgtttgccatcatct

SEQ ID NO: 63726 - DNA, 152 bp, Homo sapiens
  chr2:101612185-101612337
  hypo
catctctggagtgcagcgcttgctgcagtggaaatgatcaggaatactgaccgtgtttctcttgcctccgaggttcttgggcacactctatagccatactggacaggaaccaggtgccccgtgtaggcatcgtcggtcggtttgccgtcaga

SEQ ID NO: 63727 - DNA, 94 bp, Homo sapiens
  chr2:101638837-101638931
  hypo
ccgcaggtccagggcgagactagctgaaacaggtgtgcaaactgccgggcatctatgcggtactgctcagcatagggccggctggggtcgtggc

SEQ ID NO: 63728 - DNA, 31 bp, Homo sapiens; identical to SEQ ID NO: 16384
  chr2:101649863-101649894
  hypo

SEQ ID NO: 63729 - DNA, 31 bp, Homo sapiens
  chr2:101651029-101651060
  hypo
gatgaagggatgaatgcgtcccttatgaaaa

SEQ ID NO: 63730 - DNA, 176 bp, Homo sapiens
  chr2:101696582-101696758
  hypo
ggatgagtgtaattatttgagcgtaagcaaaatgactttatttaaaacagtaagagcctggtgacagtaactccataatagaaaagaaacgtgaaccgcagcaccccgagcgtgaccgaaaacaagtgtaacaactcgcatcgcctgacctcagcgtggggacccagagaaaagca

SEQ ID NO: 63731 - DNA, 30 bp, Homo sapiens
  chr2:101727882-101727912
  hypo
tggaacgagcctgccgaatccacaacacga

SEQ ID NO: 63732 - DNA, 705 bp, Homo sapiens; identical to SEQ ID NO: 1701
  chr2:101767138-101767843
  hypo

SEQ ID NO: 63733 - DNA, 39 bp, Homo sapiens
  chr2:101772515-101772554
  hypo
gcttgagccaccgcacccgccccacgctgaatagtttaa

SEQ ID NO: 63734 - DNA, 31 bp, Homo sapiens
  chr2:101833727-101833758
  hypo
taaaatatgataaaaacgtactaatttttta

SEQ ID NO: 63735 - DNA, 18 bp, Homo sapiens
  chr2:101835086-101835104
  hypo
cagcctagtcaccaagct

SEQ ID NO: 63736 - DNA, 106 bp, Homo sapiens
  chr2:101875535-101875641
  hypo
cagtgagctgtgattgcgccactgcactccagcctgcacaatatcgtgagacctgtctcgggatgctgaatagccaaaacccaacgttctcttggcatccttgttg

SEQ ID NO: 63737 - DNA, 30 bp, Homo sapiens
  chr2:101882659-101882689
  hypo
tccggattcccgctccggcttcccactccg

SEQ ID NO: 63738 - DNA, 68 bp, Homo sapiens
  chr2:101889653-101889721
  hypo
gccagtccagacaccgaggagccgaggaaacaggacagcaggcagggggctgcggagagcagcacagt

SEQ ID NO: 63739 - DNA, 956 bp, Homo sapiens; identical to SEQ ID NO: 37822
  chr2:101924526-101925482
  hypo

SEQ ID NO: 63740 - DNA, 31 bp, Homo sapiens
  chr2:101955034-101955065
  hypo
cacacgcccacttgggcgttaggagttgaag

SEQ ID NO: 63741 - DNA, 187 bp, Homo sapiens
  chr2:101970927-101971114
  hypo
ccatggggttgtggatcgcccctccagctcaacacttgccttcgtgttactctccctctactgcagaccaatgccttctagcctgtttccattgctgcaccagcctgcaccccagctccgagcctgcacttccggcggtccctgcatggacacctgtggaaaggccacccccgcgtgcatgcgcggt

SEQ ID NO: 63742 - DNA, 30 bp, Homo sapiens
  chr2:102226227-102226257
  hypo
tggggctgcttctgcggcttcgtgttcatt

SEQ ID NO: 63743 - DNA, 164 bp, Homo sapiens
  chr2:102232954-102233118
  hypo
gggctgctagtgagccagctgcgagagtgtgtcacatgggtcacagtgtgctggtgcccaggactactcctaatgtgcgtgaatgctcacggagctgcttggaacagcgccggctgcgcggcatcgtctgttacccttctgccggcagatgcaagcctcgggcg

SEQ ID NO: 63744 - DNA, 27 bp, Homo sapiens
  chr2:102251913-102251940
  hypo
ctgttaggaacagggtcgcatagctgg

SEQ ID NO: 63745 - DNA, 332 bp, Homo sapiens; identical to SEQ ID NO: 37825
  chr2:102313749-102314081
  hypo

SEQ ID NO: 63746 - DNA, 153 bp, Homo sapiens; identical to SEQ ID NO: 37826
  chr2:102314091-102314244
  hypo

SEQ ID NO: 63747 - DNA, 24 bp, Homo sapiens
  chr2:102320181-102320205
  hypo
aaaatcattaggggccgggcacgg

SEQ ID NO: 63748 - DNA, 31 bp, Homo sapiens; identical to SEQ ID NO: 16392
  chr2:102347214-102347245
  hypo

SEQ ID NO: 63749 - DNA, 31 bp, Homo sapiens
  chr2:102349438-102349469
  hypo
agctgtcctgtcagcccgagccctgtgtcac

SEQ ID NO: 63750 - DNA, 80 bp, Homo sapiens
  chr2:102356563-102356643
  hypo
tcaacacaacatctgtcgctttcttggcttcaaagttgctttatatcatcttttttttttttttttttttgagacggagt

SEQ ID NO: 63751 - DNA, 25 bp, Homo sapiens
  chr2:102377171-102377196
  hypo
aagaaaattgttggcccggcgcagt

SEQ ID NO: 63752 - DNA, 30 bp, Homo sapiens; identical to SEQ ID NO: 16395
  chr2:102381771-102381801
  hypo

SEQ ID NO: 63753 - DNA, 30 bp, Homo sapiens; identical to SEQ ID NO: 16396
  chr2:102427995-102428025
  hypo

SEQ ID NO: 63754 - DNA, 31 bp, Homo sapiens; identical to SEQ ID NO: 16397
  chr2:102450133-102450164
  hypo

SEQ ID NO: 63755 - DNA, 31 bp, Homo sapiens
  chr2:102452625-102452656
  hypo
tctctgaattacaaaacggtgacaaatgacc

SEQ ID NO: 63756 - DNA, 177 bp, Homo sapiens
  chr2:102636185-102636362
  hypo
agatgctggctattaccgctgtgtcctgacatttgcccatgaaggccagcaatacaacatcactaggagtattgagctacgcatcaagagtaagtacttgccattgaggcacctatctatcctggttcaataacaagcatgcagagaacaaatgacggtgcacgtagaattccttgc

SEQ ID NO: 63757 - DNA, 33 bp, Homo sapiens; identical to SEQ ID NO: 16399
  chr2:102640213-102640246
  hypo

SEQ ID NO: 63758 - DNA, 161 bp, Homo sapiens
  chr2:102683381-102683542
  hypo
gctccgcatctttgccgacatttgttcttgcccatcttctaaattttagccgttctgataggtgtgcagcactcgcttgttgcgttaatttacattcccctttatcacagtgtattttaattatctgcttaagagtcagtctcacccgtcagaattcagtg

SEQ ID NO: 63759 - DNA, 40 bp, Homo sapiens
  chr2:102804744-102804784
  hypo
ttctaagaaatttggtatggccgggcgcagtggctcatgc

SEQ ID NO: 63760 - DNA, 31 bp, Homo sapiens
  chr2:102849810-102849841
  hypo
ctgcttgcagcagcacgcgtctcactttgag

SEQ ID NO: 63761 - DNA, 30 bp, Homo sapiens
  chr2:102866730-102866760
  hypo
ccatcgggttcgatgcgctctctgctccct

SEQ ID NO: 63762 - DNA, 52 bp, Homo sapiens
  chr2:102867170-102867222
  hypo
cggggaccctagggtccgctccttcgctgcccgagcacggtgcctgcagggg

SEQ ID NO: 63763 - DNA, 43 bp, Homo sapiens; identical to SEQ ID NO: 16402
  chr2:103130074-103130117
  hypo

SEQ ID NO: 63764 - DNA, 24 bp, Homo sapiens
  chr2:104069671-104069695
  hypo
tatgcaggccgtgcacggtggctc

SEQ ID NO: 63765 - DNA, 42 bp, Homo sapiens
  chr2:104111994-104112036
  hypo
aacagcaataacaacaaagccgggataaagctgtatgcattg

SEQ ID NO: 63766 - DNA, 30 bp, Homo sapiens
  chr2:104669548-104669578
  hypo
ttaaaaatataaaacgcaatgaagttagaa

SEQ ID NO: 63767 - DNA, 177 bp, Homo sapiens; identical to SEQ ID NO: 1710
  chr2:105458974-105459151
  hypo

SEQ ID NO: 63768 - DNA, 565 bp, Homo sapiens; identical to SEQ ID NO: 1711
  chr2:105459902-105460467
  hypo

SEQ ID NO: 63769 - DNA, 250 bp, Homo sapiens; identical to SEQ ID NO: 1713
  chr2:105461163-105461413
  hypo

SEQ ID NO: 63770 - DNA, 112 bp, Homo sapiens; identical to SEQ ID NO: 1714
  chr2:105461555-105461667
  hypo

SEQ ID NO: 63771 - DNA, 204 bp, Homo sapiens; identical to SEQ ID NO: 1715
  chr2:105461699-105461903
  hypo

SEQ ID NO: 63772 - DNA, 1299 bp, Homo sapiens; identical to SEQ ID NO: 37841
  chr2:105468557-105469856
  hypo

SEQ ID NO: 63773 - DNA, 217 bp, Homo sapiens; identical to SEQ ID NO: 1720
  chr2:105471236-105471453
  hypo

SEQ ID NO: 63774 - DNA, 689 bp, Homo sapiens; identical to SEQ ID NO: 37846
  chr2:105478380-105479069
  hypo

SEQ ID NO: 63775 - DNA, 118 bp, Homo sapiens; identical to SEQ ID NO: 16412
  chr2:105528577-105528695
  hypo

SEQ ID NO: 63776 - DNA, 121 bp, Homo sapiens
  chr2:105695481-105695602
  hypo
tattaacatttcatgcgggggcggaaattagggagaaaatgcctataaaggattccttcatgggatgaatcatgaaaaaacaagtcatgctgccgtagaggaaaagcgacagatttgacta

SEQ ID NO: 63777 - DNA, 242 bp, Homo sapiens
  chr2:105697574-105697816
  hypo
ctgcctccaaacgccgccggtttgatctgtggtaatatttgtgaaggttccatatggacttgagccccctgcagtgctaagaaataatgtacaacgcttcatggtgcagacgcaaattttctctgaaaagggatgcaatgctgcgttttagctgtcggaggggatgatggagctgacgcgctaggcctgtcaacttgttacacggatgggttgcacgcagcgaagctgtggaaaatctgtgc

SEQ ID NO: 63778 - DNA, 472 bp, Homo sapiens
  chr2:105719461-105719933
  hypo
aagtaggtgtgagaaacgttgccactctcacctggaccaagtgcgatagctgattggctgcaggagagctgggggcgggtattcggtatgagatccacaggctgctgggaatgcaaagagccaggaagacaggaagaaaagttgatgggaggaggaggagacaccagaggggtcggctcgggtttcaggtgttcggggccacctcatatgagatgcttgaaataattggactgtgactcaggcgacgggtcagcctgctgacagatttgggaggctgctgcgtggaaggggaatttgaaacgtgggctggatcagcacggaggattgggcagggagaaggccaaggctcaagtggagaaacagccatcaagtttaaagtaggaaggagggaagagccagcaaagggggtggtgagcggtgataggaagacagcaagccaggcacagcggtcagggacgtcagtgatgaccaa

SEQ ID NO: 63779 - DNA, 30 bp, Homo sapiens; identical to SEQ ID NO: 37853
  chr2:105760360-105760390
  hypo

SEQ ID NO: 63780 - DNA, 30 bp, Homo sapiens; identical to SEQ ID NO: 1732
  chr2:105760875-105760905
  hypo

SEQ ID NO: 63781 - DNA, 30 bp, Homo sapiens
  chr2:105858474-105858504
  hypo
gtggtctgcatcatcgtgtaccagaggccg

SEQ ID NO: 63782 - DNA, 56 bp, Homo sapiens
  chr2:105859042-105859098
  hypo
gggcgggcctgcggcgcctgcagcggcagcaacaggtcagcgtggacttgagcttc

SEQ ID NO: 63783 - DNA, 30 bp, Homo sapiens
  chr2:105886100-105886130
  hypo
ctcgcccagcttcccgtgcaggatggcgct

SEQ ID NO: 63784 - DNA, 651 bp, Homo sapiens
  chr2:105887867-105888518
  hypo
actgatcagtcagggacggtggctgtgagtgaacagagattgcacagcggatcgccacagaaagtcctaatgtaggtgcaggtacaagccagaactagtgtttgctggtttcatgaaataccaacccacacctgtgttctggctctactgctcgtgggctgtgtgacctgtggcaagcggggtaacctctctgggcttcagtgcactcttctgtaaaaatggaggaaaaacaggcctcacttcacagggttgttgtggaaactgtgtcataaggcagcctcagcgtttcaacctatgctgggcatatctagtcaatcctcattatttgtggattctgtatttacaaagtcatctactcgctgaaatttatttgtaacctcccaatcaacactcgcagcagcttcaaggtcatttacgacaagcacagagcctgatgcagagctgaggccaaagaaggagcgccctccttccttgcttcagctgtcgtactagctacacgtttccttttcacgggctatttattgccatgcttttttgcattttggtgcttcttgttggtgatttcagtgtagtgctgaagtgctgcctagcgctcctaagctctggaaggttgtgatgtgctttatggagacaacacgtgtgttagatatg

SEQ ID NO: 63785 - DNA, 55 bp, Homo sapiens
  chr2:105937338-105937393
  hypo
cattaactacagtggtgggatcgaatttaacaacgtaataatccctaaaggaaaa

SEQ ID NO: 63786 - DNA, 89 bp, Homo sapiens
  chr2:105987706-105987795
  hypo
aacatctaagtcagcaagcttcgagtgcagcacgttacccacgtatcagggccgggcttcatctaatcggtagtgggccttaggggcaa

SEQ ID NO: 63787 - DNA, 70 bp, Homo sapiens
  chr2:106011678-106011748
  hypo
caggacaaccatagctgcacacgctagaatggcgggtggcctcgggtccgtcaatcacaccagtgtgggg

SEQ ID NO: 63788 - DNA, 395 bp, Homo sapiens
  chr2:106016088-106016483
  hypo
atcttggattcccctccagggcgggaaaaccaaagtgagctgggagcgtgcctcccacattccaagcccgggccctctgcgtgacgctgacgctgggtagggacagatggcactgttcagcattgtcgcagggagagcacaggttgagcccatccctgggagagggtgcgtcgtgatggaaacatttgctcctgagcaggtaaccggtccacttgcagaaaccggtggacgatgagtaggtggaccacaaaggcgtcctcggcactttgggggcaggtgtattatttttaacattcggggcagctcataggaatacatcctccagagaaggcgggaagaactccgtgattgctttcttttaattgatactctccgtctggtaggcctcatgggtc

SEQ ID NO: 63789 - DNA, 92 bp, Homo sapiens; identical to SEQ ID NO: 16419
  chr2:106064704-106064796
  hypo

SEQ ID NO: 63790 - DNA, 22 bp, Homo sapiens
  chr2:106066835-106066857
  hypo
tggcccccgaatttactttcaa

SEQ ID NO: 63791 - DNA, 37 bp, Homo sapiens; identical to SEQ ID NO: 16420
  chr2:106081973-106082010
  hypo

SEQ ID NO: 63792 - DNA, 30 bp, Homo sapiens; identical to SEQ ID NO: 16421
  chr2:106135399-106135429
  hypo

SEQ ID NO: 63793 - DNA, 84 bp, Homo sapiens; identical to SEQ ID NO: 1733
  chr2:106362017-106362101
  hypo

SEQ ID NO: 63794 - DNA, 57 bp, Homo sapiens
  chr2:106473750-106473807
  hypo
tcagactgagccagccgcccgtcctggagccggcactgggcccgcgcccgtccccga

SEQ ID NO: 63795 - DNA, 30 bp, Homo sapiens
  chr2:106485468-106485498
  hypo
ttatgtctcagtaacgtttgtttgtccaaa

SEQ ID NO: 63796 - DNA, 30 bp, Homo sapiens
  chr2:106497797-106497827
  hypo
cgcaggaagaccagcgcgcgggatgcgtcc

SEQ ID NO: 63797 - DNA, 30 bp, Homo sapiens
  chr2:106498147-106498177
  hypo
gcatgtggtccagacgctgtaccccttcag

SEQ ID NO: 63798 - DNA, 30 bp, Homo sapiens
  chr2:106498498-106498528
  hypo
gtcctcggtaagtgcgctgcgcccacagct

SEQ ID NO: 63799 - DNA, 160 bp, Homo sapiens
  chr2:106499099-106499259
  hypo
agatatgaggccactcgactggggcagcagacccagttcagcggtgggcaggctgggggcggtgagtttcaggcatggggtcaagcctgcatcccagaaggcaggcttttcgtgtgtgaaggaaatactcgaccagttttgcaaacgtctttccgaatac

SEQ ID NO: 63800 - DNA, 30 bp, Homo sapiens; identical to SEQ ID NO: 1734
  chr2:106685357-106685387
  hypo

SEQ ID NO: 63801 - DNA, 30 bp, Homo sapiens
  chr2:106710105-106710135
  hypo
ttcataaataaaatcggcattttttgtccc

SEQ ID NO: 63802 - DNA, 31 bp, Homo sapiens; identical to SEQ ID NO: 16424
  chr2:106718550-106718581
  hypo

SEQ ID NO: 63803 - DNA, 332 bp, Homo sapiens
  chr2:106730105-106730437
  hypo
agtgggcttttacagtgtatacgtatctaatgtttgatccactgcagaacaaacgtgcactttctgggcacctgagggcagggagcctggggcgtgaggacctgggctctgcttctcactgcgcccatgtgtccgccgttcccgctccaccgctcactgcccaggcctgccactgactcggtcgcagcaagactgggaaagaagcagtactcacctgaccgcctcagtgttctaagactgaagcacaggcccagtggctgtatttggtgccagttatcactaccagctgaaacagttcttttttcaatttcggccaacaccttaggctggca

SEQ ID NO: 63804 - DNA, 169 bp, Homo sapiens
  chr2:106734892-106735061
  hypo
agagtcagactcatgagggggcgaactcaaatgcacactaagcactgaccgcagcctacgggagaggcccccacatttatcaagccactgagtccaaatgcacacagaggcggcaatttaattcctccctggcaagttctaactattcgggaaaggctctgccctttga

SEQ ID NO: 63805 - DNA, 30 bp, Homo sapiens
  chr2:106742095-106742125
  hypo
gaggccaggagcagacgggcaccgactcgt

SEQ ID NO: 63806 - DNA, 153 bp, Homo sapiens; identical to SEQ ID NO: 16426
  chr2:106778554-106778707
  hypo

SEQ ID NO: 63807 - DNA, 300 bp, Homo sapiens
  chr2:106927122-106927422
  hypo
gtgaaggggaaggagcgactccatttgggaagaagagtctcaaaagcgccctggtgatgcctctgggaggcaggggcggtcctggcagggtggttgatgtggtctgcgcagcctgcatccccggcctccctttccctgacttcccggtgggtgcgaccaacgtgaggcgcgggtcctgggtgggcgcagagagtgcccgggagtttgtttcccttcctccctgctccctgcttggctcgcgcggtcctgctgctcttcctagctcagggcagctggcctctcccacgcaaggcaccggag

SEQ ID NO: 63808 - DNA, 515 bp, Homo sapiens
  chr2:106959094-106959609
  hypo
tgttagtggccatatgccatgcgcttcacgtgctccaggcagagacgagctcaagagcctctggtctctgctgcgggtggcgaggggcggctggaacagcatacttcagtcgttccgtgtcagcctccacccctggtagcaccagagcctcccaggcgtccccgcagtccgagccagccttagcacccagcgctttcttgctgtcgcctggttgttcccgcggcggccgagctcagcacctctcacactccctgcctctcgaggactctgcttgttcctcatcacagcacggttgctctcgcacccaaggcggtgtccccccagcgcctcaccacgatcgcggcagagatctcctgcagggcgtccgggccttgggaaggcatcgccatctcccgcagcgccctcccggactagcgcagcaggctggcatcgcttcctgaggtttggccccaagttttacggcttaatgaggcacataaatagataaattgtcttcatcacgtcagcgattgctt

SEQ ID NO: 63809 - DNA, 114 bp, Homo sapiens
  chr2:106959838-106959952
  hypo
agccgtggtccccacggaagcggtgagaacgcacctggccggctcagccacacggcacggtggcctaggccctgctgcgggctctggatccagcggtcacggtttcactgagag

SEQ ID NO: 63810 - DNA, 30 bp, Homo sapiens
  chr2:107084872-107084902
  hypo
gaacttgtgtcctgcgtcaacagtgtgtgg

SEQ ID NO: 63811 - DNA, 33 bp, Homo sapiens
  chr2:107134449-107134482
  hypo
gggagccaccgcgcccagcctgtttatagctct

SEQ ID NO: 63812 - DNA, 79 bp, Homo sapiens
  chr2:107204234-107204313
  hypo
ctttcttacctttggagtccacggacccttaaaaggtatgtgggtcgtggccgggcgcggtggctcacagccgtaatcc

SEQ ID NO: 63813 - DNA, 638 bp, Homo sapiens; identical to SEQ ID NO: 16429
  chr2:107459357-107459995
  hypo

SEQ ID NO: 63814 - DNA, 55 bp, Homo sapiens; identical to SEQ ID NO: 16430
  chr2:107460306-107460361
  hypo

SEQ ID NO: 63815 - DNA, 57 bp, Homo sapiens
  chr2:107595240-107595297
  hypo
ctgctgggactttgccccatccgcgacttggctctcgctcctaagtgcagatcataa

SEQ ID NO: 63816 - DNA, 30 bp, Homo sapiens
  chr2:107872047-107872077
  hypo
ggaaacctttacctcgcgaatcttggaatc

SEQ ID NO: 63817 - DNA, 157 bp, Homo sapiens
  chr2:107919280-107919437
  hypo
aaatatataaatataaatatatataatatataaatatatgtgtgtgtatgtataaatgtgtgcatgcgtatgtataaatatatgtacacatgtatacgtttctataacatggcaagtgaatttgtttttaatatatatactacgacaaatggaagga

SEQ ID NO: 63818 - DNA, 181 bp, Homo sapiens
  chr2:108085837-108086018
  hypo
cagggcgcgggcagccagtaccgtgccatgtgcctgcactcctcagcccttcggcggttgatgggacttgggaccgggctcagcggagcaggaggaggcgctggtcggggaggttcccgcgggcgtgcaggagcccacggaggcggaagctcaggcatggcgtgctgcaggtccccagccc

SEQ ID NO: 63819 - DNA, 76 bp, Homo sapiens
  chr2:108086317-108086393
  hypo
gagggagccagagctgctaggacgttgtcacctctcaccatgattgtgccactgcgctccagcctgtgaagacttt

SEQ ID NO: 63820 - DNA, 30 bp, Homo sapiens; identical to SEQ ID NO: 1739
  chr2:108160503-108160533
  hypo

SEQ ID NO: 63821 - DNA, 807 bp, Homo sapiens
  chr2:108160840-108161647
  hypo
gagacctggtgcactgagaggcggacgtgaaaccgagtggagatggaaggagacgcggtgcactgagaagcggatgtgaaactgagtggagatggaaggagacctggtgcactgagaggcggatgtgaaactgaggggagatggaaggagacctggcgcactgagaggcggatgtgaaactcaagagagatagaaggagacgtggcgcactgagagccggatgtgaaactgagggaagatggaaggagacctgacgcactgagagccggatgtgaaactgaggggagatggaaggagacgcggcgcactgagagccggatgtgaaactcaggggagatggaaggagacctggtgcactgagaggcggatgtgaaactgaggggagatggaaggagactgggcacactgagagacggatgtgaaactcaggagagatggaaggagacgtggtgcactgagagccggatgtgaaactgagggaagatggaaggggacctggcgcactgagaggcggatgtgaaactcaggagagatggaaggagacgtggcgcactgagagccggatgtgaaactgagtggagatggaaggagactgggcacactgagagacggatgtgaaactcaggagagatggaaggacacatggcgcactgagagccggatgtgaaagtgagtggagatggaggcggggcgcactgagaggcggctgtgaaactcaggagagatggaaggagacgtggcacactgagagccggatgtgaaagtgagtggagatggagacggagcgcactgagaggtggatgtgat

SEQ ID NO: 63822 - DNA, 25 bp, Homo sapiens
  chr2:108420525-108420550
  hypo
atgcgtttccattccacttcatcct

SEQ ID NO: 63823 - DNA, 30 bp, Homo sapiens
  chr2:108443356-108443386
  hypo
ctccgccggctacgcggagtcagtggcttt

SEQ ID NO: 63824 - DNA, 29 bp, Homo sapiens
  chr2:108917751-108917780
  hypo
ctctccccaaaggaggccaggcgcggtgg

SEQ ID NO: 63825 - DNA, 88 bp, Homo sapiens
  chr2:108918019-108918107
  hypo
gagcgagactccatctcaaaaaaaaagttctccccaaagggtaaacagatgaatcaggcagagcaacgctcttgaggacaccccacct

SEQ ID NO: 63826 - DNA, 20 bp, Homo sapiens
  chr2:109004253-109004273
  hypo
tttttttttttttttttgag

SEQ ID NO: 63827 - DNA, 40 bp, Homo sapiens
  chr2:109225029-109225069
  hypo
aattacaggcgtgagccaccgcgcccggcccactcacatt

SEQ ID NO: 63828 - DNA, 84 bp, Homo sapiens
  chr2:109328950-109329034
  hypo
gacatgataacttggcgaatgtgaaccctggaaacagtgcccgggggctttccaaaggcacttcgcatacgcggagcctgtcag

SEQ ID NO: 63829 - DNA, 101 bp, Homo sapiens
  chr2:109329293-109329394
  hypo
ctgaggctttgggtacggcttgttcttacaataccggtaacaacggacggggcggcggcccatggcgataccaggatcttcagcggcgcgcttaagagaaa

SEQ ID NO: 63830 - DNA, 87 bp, Homo sapiens
  chr2:109335079-109335166
  hypo
gcgtgaaccacagcgcccggcggaatgcgtggattttggcataagacggtggttctggaaccaatcccccgccgagatgactgttta

SEQ ID NO: 63831 - DNA, 30 bp, Homo sapiens
  chr2:109484644-109484674
  hypo
aattaataaaagttacgtttattttcttaa

SEQ ID NO: 63832 - DNA, 31 bp, Homo sapiens
  chr2:109523049-109523080
  hypo
gctgggtggtcagactcgtaagatacttggg

SEQ ID NO: 63833 - DNA, 38 bp, Homo sapiens; identical to SEQ ID NO: 16437
  chr2:109536233-109536271
  hypo

SEQ ID NO: 63834 - DNA, 31 bp, Homo sapiens
  chr2:109543737-109543768
  hypo
gtcccatggagtagggcgggaggcatcaaga

SEQ ID NO: 63835 - DNA, 38 bp, Homo sapiens; identical to SEQ ID NO: 16438
  chr2:109556839-109556877
  hypo

SEQ ID NO: 63836 - DNA, 343 bp, Homo sapiens
  chr2:109559032-109559375
  hypo
tgccttcattttgtgagtctgcgctgagtgaggccgtgaggcgggcggttccgccacctgctttccacgccagaggcctttcaagacggcgggagccctgcggttccagcgcgttcctgttcccgcctctccttttaccacgaagccagcttcgctcccaggcaccaccctggccatctggactctcacgaaggttcgtgccctgagaacttcaggaggaggcgcgctaagaaaactcaacagcagcaacaaaaacattttcaggctcccagtcttttaagtttgagcgggtaggatttttgtttgtttgtttgttttgaacgattcaatagatggattttct

SEQ ID NO: 63837 - DNA, 30 bp, Homo sapiens; identical to SEQ ID NO: 1741
  chr2:109583297-109583327
  hypo

SEQ ID NO: 63838 - DNA, 115 bp, Homo sapiens
  chr2:109604151-109604266
  hypo
gaggggtacagtggagacccccggccaatcgccaccaggatcgccaaactttcccagccgtgaagggtacacgtggactgtcatcggaacgaacgcttatttccaagccttgacc

SEQ ID NO: 63839 - DNA, 543 bp, Homo sapiens; identical to SEQ ID NO: 37870
  chr2:109647968-109648511
  hypo

SEQ ID NO: 63840 - DNA, 186 bp, Homo sapiens
  chr2:109741775-109741961
  hypo
tctgactatcaccatgtggagcgtcttccaaatctaaaaagaagttcaaattttgggccgccaaaaacctgacatacagccgtccagtcctgtttcctctgagctttttctcctttggacagacgccctgtgttccttcaactgaaactcatggatgaggcctccggatcccttaccacatcgtca

SEQ ID NO: 63841 - DNA, 30 bp, Homo sapiens
  chr2:109813161-109813191
  hypo
tgtgtgcctcctcccggaggagggagctgc

SEQ ID NO: 63842 - DNA, 192 bp, Homo sapiens; identical to SEQ ID NO: 16442
  chr2:110007878-110008070
  hypo

SEQ ID NO: 63843 - DNA, 41 bp, Homo sapiens; identical to SEQ ID NO: 16443
  chr2:110008966-110009007
  hypo

SEQ ID NO: 63844 - DNA, 41 bp, Homo sapiens; identical to SEQ ID NO: 16444
  chr2:110009246-110009287
  hypo

SEQ ID NO: 63845 - DNA, 31 bp, Homo sapiens
  chr2:110011965-110011996
  hypo
ctcttacttctcctgccgtctgttgaagctg

SEQ ID NO: 63846 - DNA, 254 bp, Homo sapiens
  chr2:110015169-110015423
  hypo
taagcagctcaggggcggtcagtgcctttcagcggcgtgtggatggcaagaagaacaccaagaaacgccactccttcaccgcgctcagtgtgacgcacagatcctcccaggctgccagccacaggcattccatggaaattagtgctccagtgttgatcagctccagcgatccccgagccgcggccaggattggagaccttgctcatctgtcgtgcgctgctcccacccaggtaacatcccgcgggccagggcag

SEQ ID NO: 63847 - DNA, 30 bp, Homo sapiens; identical to SEQ ID NO: 16446
  chr2:110016463-110016493
  hypo

SEQ ID NO: 63848 - DNA, 263 bp, Homo sapiens
  chr2:110016728-110016991
  hypo
acatatgcactcccacgcacatgtgcactcatacacatggcacacacatatacctgcacacccacacatgtgcacttacatacaccgccatccacatgcacacctacacatatacacatgcacgcacatatacacatatacacctgtgcacatatgtgcacttatatgcaccccttccacatgcacacacatacacatgtgcacacacatgcgtacaggtgcatttacacatacacccctccaggtgcacacctgcagataca

SEQ ID NO: 63849 - DNA, 143 bp, Homo sapiens; identical to SEQ ID NO: 16448
  chr2:110017050-110017193
  hypo

SEQ ID NO: 63850 - DNA, 450 bp, Homo sapiens; identical to SEQ ID NO: 16449
  chr2:110021670-110022120
  hypo

SEQ ID NO: 63851 - DNA, 91 bp, Homo sapiens
  chr2:110022452-110022543
  hypo
ggcccggctgcacatcgatggctggggagaggacacagctgcggggctctggctgaaggtgtccagggcgtgcagccggctgagcctcaga

SEQ ID NO: 63852 - DNA, 30 bp, Homo sapiens
  chr2:110022886-110022916
  hypo
gtaataagcagcccacgttctcggaggcac

SEQ ID NO: 63853 - DNA, 30 bp, Homo sapiens
  chr2:110023308-110023338
  hypo
ccaatcttacagccccgccctgttgagggg

SEQ ID NO: 63854 - DNA, 114 bp, Homo sapiens
  chr2:110025458-110025572
  hypo
ggaagccccgggtaggcgagaaaggggtcctataacttccttaacagacctcccctttccttgttgacgttttgagattttcattcaccaaactggagtcgggttgtggatgtt

SEQ ID NO: 63855 - DNA, 166 bp, Homo sapiens; identical to SEQ ID NO: 16450
  chr2:110028489-110028655
  hypo

SEQ ID NO: 63856 - DNA, 31 bp, Homo sapiens
  chr2:110033758-110033789
  hypo
gactcatgatccagaccggctctggggagtt

SEQ ID NO: 63857 - DNA, 30 bp, Homo sapiens; identical to SEQ ID NO: 16451
  chr2:110036817-110036847
  hypo

SEQ ID NO: 63858 - DNA, 225 bp, Homo sapiens
  chr2:110040035-110040260
  hypo
tcaagacaataagactcggtaaaataagtccctgccaggcttggaacgaaggcctggatcagcgaaatcaccgggtactgcccccaagaggtgtctcagaggccagccgcccagcctcctttgacagtgcccagccttgtggtcagcctggccccatggtcaccccttccaggcatggcggcaccgtcctcaggatattacagacagatgcgaccaagaatatga

SEQ ID NO: 63859 - DNA, 30 bp, Homo sapiens
  chr2:110045579-110045609
  hypo
ggaagggccggtctcggcacaaattgctct

SEQ ID NO: 63860 - DNA, 31 bp, Homo sapiens
  chr2:110105993-110106024
  hypo
tctacacagacaatgacgttgccaggcttgg

SEQ ID NO: 63861 - DNA, 50 bp, Homo sapiens; identical to SEQ ID NO: 16452
  chr2:110256841-110256891
  hypo

SEQ ID NO: 63862 - DNA, 195 bp, Homo sapiens; identical to SEQ ID NO: 16453
  chr2:110259062-110259257
  hypo

SEQ ID NO: 63863 - DNA, 31 bp, Homo sapiens; identical to SEQ ID NO: 16454
  chr2:110266916-110266947
  hypo

SEQ ID NO: 63864 - DNA, 31 bp, Homo sapiens; identical to SEQ ID NO: 16455
  chr2:110267204-110267235
  hypo

SEQ ID NO: 63865 - DNA, 38 bp, Homo sapiens; identical to SEQ ID NO: 16456
  chr2:110352251-110352289
  hypo

SEQ ID NO: 63866 - DNA, 162 bp, Homo sapiens
  chr2:110483972-110484134
  hypo
cagatcctatctcaataaaaaccccccaaaaaacaaaaaacaaacgaacaaacaaacaaaacaaaactggaggtgatgatgccccctccaggatccctttgtgaagggtgaagattatacaggcagggtccgtgtcgcagaggagaccgtttccaaggaggc

SEQ ID NO: 63867 - DNA, 197 bp, Homo sapiens
  chr2:110853613-110853810
  hypo
agaagccggcaaaaaacgtggtgtgggggcaaagagcttctcaaatatacgcatacctgagcactaccctccgggcggcactccaagtcctgctactcctagaagcctttggggacttcaagaaagccccagggtctggggtcctgccccagagagtctgcttgaacaggtaagggaggctgcgttgttccccaggt

SEQ ID NO: 63868 - DNA, 146 bp, Homo sapiens
  chr2:110855513-110855659
  hypo
agaccccagtcaagatgggtgcggctcttgtcatcagcacacaggtgagccggggtctcctggtcccaccacgggccaggcaggaatgggctctgcaaaggacacatgcgggcgttgcccacggcgggaacctggatgtcctgaag

SEQ ID NO: 63869 - DNA, 176 bp, Homo sapiens
  chr2:110861844-110862020
  hypo
tctgttcatcgagccttccaacgactgtgtcaacaagtccttgtattgaatcccctctgtgtgaagcacctatcatggtttctgtttcctactggaccgtgacaggcacagcgcctttacagatttccttggctgttctccaccgccctcattacgcatcaggctccataggcagg

SEQ ID NO: 63870 - DNA, 30 bp, Homo sapiens; identical to SEQ ID NO: 37874
  chr2:110927414-110927444
  hypo

SEQ ID NO: 63871 - DNA, 30 bp, Homo sapiens
  chr2:110966268-110966298
  hypo
gcagagactgcagacgcaacagagatgatg

SEQ ID NO: 63872 - DNA, 30 bp, Homo sapiens
  chr2:111430909-111430939
  hypo
ctcatgcaaactgatcgaactcagacccag

SEQ ID NO: 63873 - DNA, 97 bp, Homo sapiens
  chr2:111438059-111438156
  hypo
catcctaatcctccttgagctcgctaggttttatttcttctgcctcttcagggtttgtgtctattgctttttgcgcaggtgccgggagaggacttgt

SEQ ID NO: 63874 - DNA, 92 bp, Homo sapiens
  chr2:111438463-111438555
  hypo
agtgtttcaagagccacttgacgatacagaataaagagctgttcacgctagaaggaggttgggtggatgtttctgcttccttggcctcttga

SEQ ID NO: 63875 - DNA, 814 bp, Homo sapiens; identical to SEQ ID NO: 1747
  chr2:111490023-111490837
  hypo

SEQ ID NO: 63876 - DNA, 86 bp, Homo sapiens; identical to SEQ ID NO: 37882
  chr2:111880645-111880731
  hypo

SEQ ID NO: 63877 - DNA, 112 bp, Homo sapiens
  chr2:111890891-111891003
  hypo
tggtggagtcttaccccctttcgcttttctaatgtacgcatttattcagcgctagaaatttcctttccaccactgcttagctgcatcccacgtgttttggtatgttgtgttt

SEQ ID NO: 63878 - DNA, 138 bp, Homo sapiens
  chr2:111911465-111911603
  hypo
ggtgagagaggcacaggtgagcgcaaagtcccagtgcatgtcccctcttctctcccgatgcagtgtcattcccaggtgaacctgccgggctgaacggcctggcccctctattcagtcggagttttactactccagtgg

SEQ ID NO: 63879 - DNA, 43 bp, Homo sapiens
  chr2:111929291-111929334
  hypo
ttagccagggctggtttctgtcgctggcagccaaagcagtgac

SEQ ID NO: 63880 - DNA, 46 bp, Homo sapiens; identical to SEQ ID NO: 16458
  chr2:111935998-111936044
  hypo

SEQ ID NO: 63881 - DNA, 31 bp, Homo sapiens; identical to SEQ ID NO: 1750
  chr2:112655268-112655299
  hypo

SEQ ID NO: 63882 - DNA, 34 bp, Homo sapiens; identical to SEQ ID NO: 16460
  chr2:112655539-112655573
  hypo

SEQ ID NO: 63883 - DNA, 638 bp, Homo sapiens; identical to SEQ ID NO: 1751
  chr2:112656486-112657124
  hypo

SEQ ID NO: 63884 - DNA, 107 bp, Homo sapiens
  chr2:112785955-112786062
  hypo
accgatcccttagaccgccccaccttttcagtattgaggctgcagctagaaaaactcttagaaagtttgcctgacgttcggaaccaagcagacgttatttacgtcaa

SEQ ID NO: 63885 - DNA, 95 bp, Homo sapiens
  chr2:112786371-112786466
  hypo
gggaagctcattgcccgatgaacttttgtttgctgacgactcctcagaaggctcagaagtcctgatgtgaggagaggtgcggggagacattccaa

SEQ ID NO: 63886 - DNA, 30 bp, Homo sapiens; identical to SEQ ID NO: 16463
  chr2:112918537-112918567
  hypo

SEQ ID NO: 63887 - DNA, 30 bp, Homo sapiens; identical to SEQ ID NO: 16464
  chr2:112942790-112942820
  hypo

SEQ ID NO: 63888 - DNA, 30 bp, Homo sapiens
  chr2:112944629-112944659
  hypo
ggcaggtgggcagccgggtcagagcagctc

SEQ ID NO: 63889 - DNA, 48 bp, Homo sapiens; identical to SEQ ID NO: 16465
  chr2:112945139-112945187
  hypo

SEQ ID NO: 63890 - DNA, 406 bp, Homo sapiens
  chr2:113103032-113103438
  hypo
caccaccgcccgttttcgaatccatttggcacctccttcgcctaagaatttgcttttccaggcgtcccctttctgttccgtctctgtactgcactaacttcacctatacacaggtctgtatcctcctgttaaaaccactgaccaggactgccgcttctgggtgcgatacagtaacaggcattggattcctcctcttccctcaaacaactagaaagctggaggaaataaacgacgttactgttaggcattggataataggccatgaaagatacggatctattaaaaaaagaaaactaatcaggtaagctctgcaatcgccccagctttttccctgtagttccattcttgaccacagagcagggcatcccgggcagagcgcagctgcgcagcaatcttgctaaatgga

SEQ ID NO: 63891 - DNA, 36 bp, Homo sapiens; identical to SEQ ID NO: 16468
  chr2:113168034-113168070
  hypo

SEQ ID NO: 63892 - DNA, 31 bp, Homo sapiens
  chr2:113242120-113242151
  hypo
catgaaccaccgtgcccggccaacatttggt

SEQ ID NO: 63893 - DNA, 189 bp, Homo sapiens; identical to SEQ ID NO: 16469
  chr2:113286634-113286823
  hypo

SEQ ID NO: 63894 - DNA, 45 bp, Homo sapiens
  chr2:113349168-113349213
  hypo
tcaaggagctcggcgccaggaagcgactgccctcatcaaaccttc

SEQ ID NO: 63895 - DNA, 31 bp, Homo sapiens
  chr2:113451876-113451907
  hypo
ggcatgagccaccgcgcgctgcccacggtgt

SEQ ID NO: 63896 - DNA, 30 bp, Homo sapiens; identical to SEQ ID NO: 1753
  chr2:113469219-113469249
  hypo

SEQ ID NO: 63897 - DNA, 34 bp, Homo sapiens
  chr2:113494875-113494909
  hypo
tccataccgttttccataacggctgccccagtct

SEQ ID NO: 63898 - DNA, 101 bp, Homo sapiens
  chr2:113707197-113707298
  hypo
gaacacacattccaaagtgcacgttaggttctttgcatggtcccagtctgagtgagtgtgggtgtgtaagttctccctgcggtaggatggtgtcctgtcca

SEQ ID NO: 63899 - DNA, 32 bp, Homo sapiens; identical to SEQ ID NO: 16472
  chr2:113804065-113804097
  hypo

SEQ ID NO: 63900 - DNA, 30 bp, Homo sapiens
  chr2:113808515-113808545
  hypo
gccgtgcctctcagcgtggcctcccgatcc

SEQ ID NO: 63901 - DNA, 30 bp, Homo sapiens; identical to SEQ ID NO: 16473
  chr2:113830176-113830206
  hypo

SEQ ID NO: 63902 - DNA, 87 bp, Homo sapiens
  chr2:113908443-113908530
  hypo
ggtgagtcactgcacccgcccttgatgtttggttcttatgaaggtatttttttttttacatagatcgttgttaaatttggtgttcct

SEQ ID NO: 63903 - DNA, 30 bp, Homo sapiens
  chr2:113959946-113959976
  hypo
tgggacggaggctggcgaccaggcgaggcc

SEQ ID NO: 63904 - DNA, 189 bp, Homo sapiens
  chr2:113973330-113973519
  hypo
acaccaccccaaatgccggggcacgtcgaattgtctttctttcgcccgatacataaatggccttattttctgagcccgaaaaggggacccatggtttgaccatgggcagaatattggatgggtactagccaaggcctgttacatggggaacacatcccacagtcaacaaacacccgctctgagcagagg

SEQ ID NO: 63905 - DNA, 31 bp, Homo sapiens; identical to SEQ ID NO: 16475
  chr2:113975770-113975801
  hypo

SEQ ID NO: 63906 - DNA, 112 bp, Homo sapiens
  chr2:114060816-114060928
  hypo
cctgggcaagacagtgaggaccgcacggctggtgagtgatacatggagagctttgccgcctgcctgacaggcagaagataaacagctccccgttaaatctcacttaatgctg

SEQ ID NO: 63907 - DNA, 30 bp, Homo sapiens
  chr2:114430269-114430299
  hypo
ccctccccagccaccgtgaaaccagatgct

SEQ ID NO: 63908 - DNA, 31 bp, Homo sapiens
  chr2:114469901-114469932
  hypo
ttttttttttttgagacggagtctcgctgtc

SEQ ID NO: 63909 - DNA, 14 bp, Homo sapiens
  chr2:114470171-114470185
  hypo
gtgagccaccacgc

SEQ ID NO: 63910 - DNA, 22 bp, Homo sapiens
  chr2:114511584-114511606
  hypo
ttggccaggtgaggtggctcac

SEQ ID NO: 63911 - DNA, 88 bp, Homo sapiens; identical to SEQ ID NO: 16478
  chr2:114515439-114515527
  hypo

SEQ ID NO: 63912 - DNA, 32 bp, Homo sapiens
  chr2:114736318-114736350
  hypo
ggtaaacagatacaactttcccgggatgggga

SEQ ID NO: 63913 - DNA, 692 bp, Homo sapiens
  chr2:114736469-114737161
  hypo
aggtgaaggccgcagtaacgctgttccctgcattggatgaagtgctccccaccaaactctctcaccggagagggtgggatctgcgggctccctgggtggcttgatttcgacaccctgtgggctgccttccactctggtactttcctctgcctgctgatgcttgaaattccttgaaccggccacacacacctgctttctggaatcagaacactggaaaggcttcctgggacgggagaagagtgatttacattcctgccgaggtgtaaagctgcggatggcaggttctctcctgagaaccggcttcaactaggaggaggaggttggaagcaggaccccgagctgacctgttgaccaggagaggagtaagcagaagggaggcaggagcgggcggaggagagaaggccggggagccgggatgggggtcaccgcccccggggagccgggatgggggtcaccgcccccggggagcccggatgggggtcaccgcccccgcccccgtgatgccgagctgaaaaagacagtctccaggtaggataatccgtcacactagatgcatatagcttcatgcaagaagagcgactgttgcgctgtcttctaccccctttggccgcgatcccgtgacaatgccggcatccgggcaccaactggcttttgcgaaccgctctccgctccccgcccggattccgaagccc

SEQ ID NO: 63914 - DNA, 31 bp, Homo sapiens; identical to SEQ ID NO: 16480
  chr2:114737398-114737429
  hypo

SEQ ID NO: 63915 - DNA, 237 bp, Homo sapiens; identical to SEQ ID NO: 37896
  chr2:115918655-115918892
  hypo

SEQ ID NO: 63916 - DNA, 38 bp, Homo sapiens
  chr2:118628527-118628565
  hypo
ttacaggtatgagccactgtgcgcggcttcctcctcca

SEQ ID NO: 63917 - DNA, 80 bp, Homo sapiens
  chr2:118736285-118736365
  hypo
aaattgagccaggcgcgctggctcacgcctgcaaagtgctgtaatcccagcactttgggaggctgaggcgggcctatcac

SEQ ID NO: 63918 - DNA, 146 bp, Homo sapiens
  chr2:118743610-118743756
  hypo
tggcgtttgtatttccgacggggcttgtacacttcctaagtggatgagacagccaagttactgagtgtgagaaggctctcctcctgaattggctgctggatgcctccagccatggggtatattctctttttttttttttttttttt

SEQ ID NO: 63919 - DNA, 2 bp, Homo sapiens
  chr2:118743815-118743817
  hypo
ct

SEQ ID NO: 63920 - DNA, 44 bp, Homo sapiens
  chr2:118875672-118875716
  hypo
gctcttatgtaaaaagaaggccgggcgcgttggctcacgcctgt

SEQ ID NO: 63921 - DNA, 30 bp, Homo sapiens; identical to SEQ ID NO: 16482
  chr2:118942465-118942495
  hypo

SEQ ID NO: 63922 - DNA, 30 bp, Homo sapiens; identical to SEQ ID NO: 37936
  chr2:119769308-119769338
  hypo

SEQ ID NO: 63923 - DNA, 101 bp, Homo sapiens; identical to SEQ ID NO: 37939
  chr2:119916524-119916625
  hypo

SEQ ID NO: 63924 - DNA, 31 bp, Homo sapiens; identical to SEQ ID NO: 16484
  chr2:119997107-119997138
  hypo

SEQ ID NO: 63925 - DNA, 575 bp, Homo sapiens; identical to SEQ ID NO: 16485
  chr2:120005201-120005776
  hypo

SEQ ID NO: 63926 - DNA, 30 bp, Homo sapiens
  chr2:120007861-120007891
  hypo
cagctggtgtggggcggtgtggaggcctga

SEQ ID NO: 63927 - DNA, 151 bp, Homo sapiens; identical to SEQ ID NO: 16486
  chr2:120011807-120011958
  hypo

SEQ ID NO: 63928 - DNA, 31 bp, Homo sapiens
  chr2:120012442-120012473
  hypo
tgccagccagcttcagcgtggccctggccca

SEQ ID NO: 63929 - DNA, 251 bp, Homo sapiens
  chr2:120020671-120020922
  hypo
cacacgctcacctacggctggacccgcgccttcgaggagagccgctacaagttctacctgcctcccaccttcacgctcacgctgctggtgccctgcgtcgtcatcctggccaaagccctgtttctcctgccctgcatcagccgcagactcgccaggatccggagaggctgggagagggagagcaccatcaagttcacgctgcccacagaccacgccctggccgagaagacgagccacgtatgaggtgcctg

SEQ ID NO: 63930 - DNA, 30 bp, Homo sapiens; identical to SEQ ID NO: 16488
  chr2:120023906-120023936
  hypo

SEQ ID NO: 63931 - DNA, 83 bp, Homo sapiens; identical to SEQ ID NO: 16489
  chr2:120069740-120069823
  hypo

SEQ ID NO: 63932 - DNA, 185 bp, Homo sapiens; identical to SEQ ID NO: 16490
  chr2:120247826-120248011
  hypo

SEQ ID NO: 63933 - DNA, 163 bp, Homo sapiens
  chr2:120282305-120282468
  hypo
gctttctcatccctaacaacacgtctgataatacccactctcggactgaaagttgtcacacagtcgaggcccattgcatctattccccccgatagctaccttgcactttatttccgattttttcattattgaagtcattagcgctaattccatgaagtttcac

SEQ ID NO: 63934 - DNA, 19 bp, Homo sapiens
  chr2:120315524-120315543
  hypo
actccgtctcaaaaaaaaa

SEQ ID NO: 63935 - DNA, 162 bp, Homo sapiens
  chr2:120754213-120754375
  hypo
gttgctggggctggtggtaagcggagggacggtccaaaaaggaacacgaggaatcttttggcagtgacactgttctgttttgatcatggtggttttatgggaatataaaactatcaaaagtaactcaattggccgggtgcggtggctcacacctgtaatccc

SEQ ID NO: 63936 - DNA, 23 bp, Homo sapiens
  chr2:120769505-120769528
  hypo
tgagactgagtctggctttgtcg

SEQ ID NO: 63937 - DNA, 129 bp, Homo sapiens; identical to SEQ ID NO: 1791
  chr2:120770808-120770937
  hypo

SEQ ID NO: 63938 - DNA, 199 bp, Homo sapiens; identical to SEQ ID NO: 1792
  chr2:120770966-120771165
  hypo

SEQ ID NO: 63939 - DNA, 79 bp, Homo sapiens
  chr2:120973476-120973555
  hypo
ttcaactctttatcggatgagaaggcgtaggaatcatgtctttctaactggctgatgatatggccgagcagatgctaac

SEQ ID NO: 63940 - DNA, 679 bp, Homo sapiens
  chr2:120973770-120974449
  hypo
gcccaaccccagtctcggccctgctccactccagcactgtagttgtagcagttttcctactcatccgtttctactctttaatagaaaataacctattcatccaaacctttacattatgtctaggggctattaccaccctacttacagcaatctgcccttcagcgccaggggaatgcccgacagctaccttctcccccgtgaccgccgggctccgtatcctgggcgagccgcccggctccggatagcaggaaactggggagggctccggcctcgcctcgtcagccccggagccttcaccaatcccgggcccggaaagaccacgcccactgctggccccgcctagcacctgcgcaggtgcagtctccacctcaagccagctgggccttatgatagtcaaaattggtattaatcagccacacctagcattccttcacatctgcatccacgccttttaaaaagctatattatttatatgttcaggctccattatccataacctcaatgatgaacaagatatccgtaaaataggaggactattcaagactttacccttcacttcctcttcccttattattggcagccttgcacctacagatatgcctttcctcacaggcttttactctaaagaccttatcatcgaaaccgcaaatacatcatacaccaacgcctgagccctttc

SEQ ID NO: 63941 - DNA, 30 bp, Homo sapiens
  chr2:120976020-120976050
  hypo
ccatctttcctgcccggctgaatgacctgt

SEQ ID NO: 63942 - DNA, 544 bp, Homo sapiens; identical to SEQ ID NO: 16497
  chr2:120979867-120980411
  hypo

SEQ ID NO: 63943 - DNA, 102 bp, Homo sapiens; identical to SEQ ID NO: 16498
  chr2:120982087-120982189
  hypo

SEQ ID NO: 63944 - DNA, 173 bp, Homo sapiens
  chr2:120987005-120987178
  hypo
atgacactctgttctgagtagcgtgacaaaatcttgctccatctagcctgggacgtgacccctctctttgtccagcatcttcacaccgggcgtgctccctgggcgatcacatcagctgccgccagatcactgtccctctgttcaggtcacccgtgtttgacttaataatggct

SEQ ID NO: 63945 - DNA, 30 bp, Homo sapiens; identical to SEQ ID NO: 16499
  chr2:121035758-121035788
  hypo

SEQ ID NO: 63946 - DNA, 285 bp, Homo sapiens; identical to SEQ ID NO: 16500
  chr2:121058174-121058459
  hypo

SEQ ID NO: 63947 - DNA, 265 bp, Homo sapiens; identical to SEQ ID NO: 16501
  chr2:121108589-121108854
  hypo

SEQ ID NO: 63948 - DNA, 31 bp, Homo sapiens
  chr2:121109323-121109354
  hypo
ctgttaaagtattgtacgtttgtgtacagtt

SEQ ID NO: 63949 - DNA, 524 bp, Homo sapiens
  chr2:121116364-121116888
  hypo
ttttcaaaagcctataatttgcgccagcgtttgcgcttcatggtgaagctcagcctcatccgtgccgcaggcaaaggcaatgccaatccaaacgggtggcaagctgggcccgggcaccagggaagatcagccttcccgcttcctccctgcacctcaaggaaggcagcccttcccgccggcatcttccaccttcaggagagtgtggtttgtcacccgagggtgtctcatagaagctcagcttaattaatcaatcgccgactgatgcattggttaacgcggggccccactcccccgtgaatgatgggcgcattaatgaatgccaattatttcagcattaataattaatctccaaccatgccggagaaggagtggaaagtacacaagcctcgagtcagctccacgagccagcctgccaccccgtgctgctcaccgccttgcccagagtatctgagcggggcctctttgctactgcggggcgaaaaagcaccttggactgggcgtccggggcctggactctggttagg

SEQ ID NO: 63950 - DNA, 31 bp, Homo sapiens; identical to SEQ ID NO: 16502
  chr2:121136846-121136877
  hypo

SEQ ID NO: 63951 - DNA, 30 bp, Homo sapiens; identical to SEQ ID NO: 16503
  chr2:121137649-121137679
  hypo

SEQ ID NO: 63952 - DNA, 31 bp, Homo sapiens
  chr2:121190433-121190464
  hypo
gcatgtggggcagtggcggctgtgaagctag

SEQ ID NO: 63953 - DNA, 31 bp, Homo sapiens; identical to SEQ ID NO: 16504
  chr2:121210914-121210945
  hypo

SEQ ID NO: 63954 - DNA, 135 bp, Homo sapiens; identical to SEQ ID NO: 16505
  chr2:121243024-121243159
  hypo

SEQ ID NO: 63955 - DNA, 30 bp, Homo sapiens; identical to SEQ ID NO: 37964
  chr2:121245106-121245136
  hypo

SEQ ID NO: 63956 - DNA, 18 bp, Homo sapiens
  chr2:121253110-121253128
  hypo
ctccgtctctaaaataaa

SEQ ID NO: 63957 - DNA, 40 bp, Homo sapiens; identical to SEQ ID NO: 16506
  chr2:121327690-121327730
  hypo

SEQ ID NO: 63958 - DNA, 173 bp, Homo sapiens
  chr2:121381301-121381474
  hypo
ggaggcctccaatcaccggcatggacccaggtcccaggacatagtgttttctctcctgtgccatctgtacagtagccatgtccagaaggcagggtggggtgggagggaccgtacgtctcagaagagaccacaccctcccatcttacttcaggtcctccgcgctatggagtcaa

SEQ ID NO: 63959 - DNA, 31 bp, Homo sapiens
  chr2:121411774-121411805
  hypo
caagcccattaactctcgaccaccacgttgc

SEQ ID NO: 63960 - DNA, 34 bp, Homo sapiens
  chr2:121436962-121436996
  hypo
ggcctttcctggtcttcgtcgccaaaaatctgct

SEQ ID NO: 63961 - DNA, 31 bp, Homo sapiens; identical to SEQ ID NO: 1800
  chr2:121438058-121438089
  hypo

SEQ ID NO: 63962 - DNA, 31 bp, Homo sapiens
  chr2:121534939-121534970
  hypo
gtgaggcgtgtctgaacgagatgagggacag

SEQ ID NO: 63963 - DNA, 97 bp, Homo sapiens; identical to SEQ ID NO: 16508
  chr2:121542640-121542737
  hypo

SEQ ID NO: 63964 - DNA, 212 bp, Homo sapiens
  chr2:121550759-121550971
  hypo
tccgggccctgggtcccgggtgcccgctcccacccccttagcagaattttggagagtgtggctgtgtttccttcgtggttgtttggacagcggcagagctgtgtgttttgaaggtaaagtgaggaattgactcttctccttccctgtggtaggtgctgtgactcccagtccctctttttctggagctctgtggagcccgtgggagccatccc

SEQ ID NO: 63965 - DNA, 30 bp, Homo sapiens; identical to SEQ ID NO: 16509
  chr2:121570259-121570289
  hypo

SEQ ID NO: 63966 - DNA, 140 bp, Homo sapiens; identical to SEQ ID NO: 16510
  chr2:121609722-121609862
  hypo

SEQ ID NO: 63967 - DNA, 31 bp, Homo sapiens; identical to SEQ ID NO: 16511
  chr2:121688087-121688118
  hypo

SEQ ID NO: 63968 - DNA, 202 bp, Homo sapiens
  chr2:121692169-121692371
  hypo
atgttagggcaatagagtgaacgccagctggtgggcatgggggcctcacctccctttcatctgcatgcttggtcacgcaaaatgcatattacccagggcctccggagacagcattaagagtgtctgaagccccacttggtccccgagactgcatgttaatggggatgtttagccgggtgtcggtgtgccttcacttaagaga

SEQ ID NO: 63969 - DNA, 76 bp, Homo sapiens
  chr2:121708534-121708610
  hypo
cagcaagtccagtcgcgggtgcgaggtccattctccagcgtggaactggccggcgggtgcacgcaccagcgtggag

SEQ ID NO: 63970 - DNA, 30 bp, Homo sapiens
  chr2:121708911-121708941
  hypo
cgccccccacccgtacgtgaacccccacat

SEQ ID NO: 63971 - DNA, 142 bp, Homo sapiens
  chr2:121711173-121711315
  hypo
ccagtaaagacgtctacgggaggaaggaacagagcaccctcctggagatgctcaggaagcagagacgctgtattccactgattgcagtgtagcccatgaagagctgggtgggctgggcacagtggctcatgcctgtaattgg

SEQ ID NO: 63972 - DNA, 31 bp, Homo sapiens; identical to SEQ ID NO: 16512
  chr2:121723280-121723311
  hypo

SEQ ID NO: 63973 - DNA, 131 bp, Homo sapiens
  chr2:121726278-121726409
  hypo
ctatcccacagtgtcccgtttctccagcccgcgggtgacgccccgcctgagccgcaagcgggcgctgtccatctccccactctcagacgccagcctggacctgcagcggatgatccgcacctcacccaact

SEQ ID NO: 63974 - DNA, 367 bp, Homo sapiens; identical to SEQ ID NO: 16514
  chr2:121742085-121742452
  hypo

SEQ ID NO: 63975 - DNA, 1126 bp, Homo sapiens; identical to SEQ ID NO: 16515
  chr2:121745648-121746774
  hypo

SEQ ID NO: 63976 - DNA, 31 bp, Homo sapiens
  chr2:121818463-121818494
  hypo
ggttcccaagcttgagcgtgcatcagaatca

SEQ ID NO: 63977 - DNA, 31 bp, Homo sapiens
  chr2:121827342-121827373
  hypo
tggagggggtggggtacgcccatcccacgtt

SEQ ID NO: 63978 - DNA, 31 bp, Homo sapiens; identical to SEQ ID NO: 16516
  chr2:121846109-121846140
  hypo

SEQ ID NO: 63979 - DNA, 43 bp, Homo sapiens; identical to SEQ ID NO: 16517
  chr2:121924777-121924820
  hypo

SEQ ID NO: 63980 - DNA, 95 bp, Homo sapiens
  chr2:121962010-121962105
  hypo
ctaaggcacgagggttagagcttttgggttggtgagcaccaactccagggggacagaagctcctgcccttgggacgattccgggccttgctctat

SEQ ID NO: 63981 - DNA, 209 bp, Homo sapiens
  chr2:121975956-121976165
  hypo
ggccaggtgggcccaccgtatgctagctgacaagggcagtcacacaccggtaagtgctgatacaggatgaggggtgcggagctgaggatgttgttctctttgatgaaggcctgaaaacttcccctggcccctgctgcccacctcagggctcctcaggacgaagggcatgaggacaggttcccactctggcccttcgctgggggacatgg

SEQ ID NO: 63982 - DNA, 31 bp, Homo sapiens; identical to SEQ ID NO: 16519
  chr2:121982627-121982658
  hypo

SEQ ID NO: 63983 - DNA, 31 bp, Homo sapiens; identical to SEQ ID NO: 16520
  chr2:122006602-122006633
  hypo

SEQ ID NO: 63984 - DNA, 31 bp, Homo sapiens
  chr2:122011447-122011478
  hypo
tctgcatgcctacccccgtgccaacacagtg

SEQ ID NO: 63985 - DNA, 18 bp, Homo sapiens
  chr2:122012149-122012167
  hypo
gattgcctgaggtcagga

SEQ ID NO: 63986 - DNA, 38 bp, Homo sapiens
  chr2:122013319-122013357
  hypo
tatttttttttttttttgagacggaatctcgctctgtc

SEQ ID NO: 63987 - DNA, 37 bp, Homo sapiens
  chr2:122013596-122013633
  hypo
gtgagccaccgtgcccggcccccctgaacttcttgat

SEQ ID NO: 63988 - DNA, 290 bp, Homo sapiens
  chr2:122094601-122094891
  hypo
cagtgaccagcagagaagaaccgcaggcatgcaggggagcccggctgctctcagcggctctccagctcatctcgggattcgaggctgaggctttctcctgcttctacctttccggggagccactgttctcactgatcagttgaggaaatggagccgatgagggaggcccctgctcacatggcctccaggagcgtgggtgggattctagcccatgcgtctcacctcccaccttgtcaccgcacacacggcacagcaaccagctcccaggcgactccatcagatgtgatatt

SEQ ID NO: 63989 - DNA, 107 bp, Homo sapiens
  chr2:122096091-122096198
  hypo
ctgcagggaggcggcggcaaggcaaggcagctgcagctgtcagggtctagggggcgacggtgggctcggcgccctcccagtgaggtggtggcggcatgcgagtctcc

SEQ ID NO: 63990 - DNA, 89 bp, Homo sapiens; identical to SEQ ID NO: 16521
  chr2:122102163-122102252
  hypo

SEQ ID NO: 63991 - DNA, 30 bp, Homo sapiens
  chr2:122104163-122104193
  hypo
gtaaacatgagtcaacgcatgcaaagtgcg

SEQ ID NO: 63992 - DNA, 210 bp, Homo sapiens
  chr2:122104563-122104773
  hypo
agctggcagagcccaggtgtgcgtatcagcccaggtaacactatacataccttgctccctgtgagctgtgcaaggtgaggtttcaggtcttctccgattacggaataaattgccactaagcaaaacacgctggccttacgcacactactttcggtgttgtcataaccctagagagccagaagggaacacgaaaaggaaaccagatcaaag

SEQ ID NO: 63993 - DNA, 104 bp, Homo sapiens
  chr2:122118645-122118749
  hypo
gagagtcggtaagtgcgtgccaagacaccatggacggcttggcatttcatttaaatgcccgagtctaagtatgtactgccccatgaaaacaactgatatcatct

SEQ ID NO: 63994 - DNA, 30 bp, Homo sapiens
  chr2:122125264-122125294
  hypo
cgcgcccgcggccccgggaaggcgcgcgga

SEQ ID NO: 63995 - DNA, 359 bp, Homo sapiens
  chr2:122187626-122187985
  hypo
gagcataaaatatgtttcttacgctgggactgtgaaaccactttagcgcgactgcggccccggttatcaggtgtagaggcgacgttggtggcactcccagagctttgccgtcttgtgcggatccgacctggaggacacagcaaaaacagtgtttcacaacatttccagtaagtgccacctcctcaagaaaagaagccatgccccaaaagaggggcactgaccagccaactacatggggagcaacagcttctgtgagcagatcctccacacgaggtctgccacgtctccctgtgtgtgcatgcgcacatgcgcatatgatccacgcacaactgttctacgaacacaggatgaactcctga

SEQ ID NO: 63996 - DNA, 30 bp, Homo sapiens
  chr2:122260202-122260232
  hypo
atgacatcagaatggcggtgggtgccagat

SEQ ID NO: 63997 - DNA, 32 bp, Homo sapiens
  chr2:122274304-122274336
  hypo
gttaaaaatatcatcataagccgggcgtggtg

SEQ ID NO: 63998 - DNA, 30 bp, Homo sapiens; identical to SEQ ID NO: 16523
  chr2:122283865-122283895
  hypo

SEQ ID NO: 63999 - DNA, 262 bp, Homo sapiens; identical to SEQ ID NO: 16524
  chr2:122305113-122305375
  hypo

SEQ ID NO: 64000 - DNA, 182 bp, Homo sapiens
  chr2:122312634-122312816
  hypo
agttgtgggtggaaagcaacacggtctgtgcagacccagagtcctaatggagtcaagaactccctggagagctcacgctgcacacaaacctcagcaggtctctctgcggcccatgaatcctctgcagttttcctggatgtgctgtgctctcgcatgctcccgtctgcagcactgtgtgttct

SEQ ID NO: 64001 - DNA, 31 bp, Homo sapiens; identical to SEQ ID NO: 16526
  chr2:122409687-122409718
  hypo

SEQ ID NO: 64002 - DNA, 30 bp, Homo sapiens
  chr2:122495527-122495557
  hypo
tgaaggctaaagagcggggtgtggagaacc

SEQ ID NO: 64003 - DNA, 32 bp, Homo sapiens; identical to SEQ ID NO: 16527
  chr2:122497729-122497761
  hypo

SEQ ID NO: 64004 - DNA, 30 bp, Homo sapiens
  chr2:122498308-122498338
  hypo
cctgtcttggtatgtcgggttctcgttgcg

SEQ ID NO: 64005 - DNA, 156 bp, Homo sapiens
  chr2:122511907-122512063
  hypo
tgtgcctaactctaggtaaaacggagaggtgacgaaagtttgtatgagaacaaataggattctttaggacagacgaatgggttttgggagaacaaacacgagataagaaagggttttttattttttttgagacggagtctgttgcccaggctatag

SEQ ID NO: 64006 - DNA, 24 bp, Homo sapiens
  chr2:122523884-122523908
  hypo
tataaataagtcaggccgggcgtg

SEQ ID NO: 64007 - DNA, 99 bp, Homo sapiens
  chr2:122783864-122783963
  hypo
cccttaggctggaagtcggtacaggggcccagagcacacatggggagggatatgcttctcgccggggtaggttatttgcacagacgcagagcaccagag

SEQ ID NO: 64008 - DNA, 104 bp, Homo sapiens
  chr2:124441078-124441182
  hypo
gaccttgtgtagggaaacctacggccgtcatgctttacttcgtttagactcctattctgttcccctgtggctactctctcatcataagtgagaggtgacagcgt

SEQ ID NO: 64009 - DNA, 102 bp, Homo sapiens
  chr2:125119893-125119995
  hypo
accatcttggctcctcccagaatctcaacatcttaaatatcattaacaagatagtcctgaaagcgataaagaggatatatcgactaagtattgttgactttc

SEQ ID NO: 64010 - DNA, 381 bp, Homo sapiens; identical to SEQ ID NO: 37979
  chr2:127413346-127413727
  hypo

SEQ ID NO: 64011 - DNA, 26 bp, Homo sapiens
  chr2:127413969-127413995
  hypo
cggacgccctggtgtcccggtccgtg

SEQ ID NO: 64012 - DNA, 266 bp, Homo sapiens; identical to SEQ ID NO: 37981
  chr2:127414108-127414374
  hypo

SEQ ID NO: 64013 - DNA, 30 bp, Homo sapiens
  chr2:127423274-127423304
  hypo
gcctggggctgtgcacgccctggcaagcgc

SEQ ID NO: 64014 - DNA, 62 bp, Homo sapiens
  chr2:127428872-127428934
  hypo
ctcactgggcaggtgccggagggagagccagagcaggtgcaagcatgcgaggcaggcttccc

SEQ ID NO: 64015 - DNA, 258 bp, Homo sapiens
  chr2:127435278-127435536
  hypo
ctagggatgagcacacgagggtccgggaggggtgcttggagttgggacccagagcaccaggacttactgtcaaatctctctggcaccaaaacgcatgctccctatgccacctatcaggatgcacccttaaagcacttttaagatgctttttggaaagagccatttgttggtgtgcatttgtcttcaccactgccccaaacatagctgtccaatattcaggtgaaaatgtcccccatcggccgggtgcagcggctcacg

SEQ ID NO: 64016 - DNA, 256 bp, Homo sapiens
  chr2:127438528-127438784
  hypo
ggcaggtcagggcggcgggaagggaccttaacagaccttctagtcggcgactttgaagattcttcaagacaatagccagttctgaagattcatccccgtttcttcactgtaaaaataacacgttttttgtagatgacttggaaaatacagacagccatatgttagaagtaaacaaaaccactcctaacccgtctacttcttaaaagccggtacttaacatttgaagcgtatttcttttcatcgctttgttttaagg

SEQ ID NO: 64017 - DNA, 30 bp, Homo sapiens; identical to SEQ ID NO: 1805
  chr2:127464270-127464300
  hypo

SEQ ID NO: 64018 - DNA, 525 bp, Homo sapiens; identical to SEQ ID NO: 37983
  chr2:127534681-127535206
  hypo

SEQ ID NO: 64019 - DNA, 164 bp, Homo sapiens; identical to SEQ ID NO: 16531
  chr2:127801122-127801286
  hypo

SEQ ID NO: 64020 - DNA, 30 bp, Homo sapiens; identical to SEQ ID NO: 16532
  chr2:127815118-127815148
  hypo

SEQ ID NO: 64021 - DNA, 31 bp, Homo sapiens; identical to SEQ ID NO: 16533
  chr2:127816629-127816660
  hypo

SEQ ID NO: 64022 - DNA, 31 bp, Homo sapiens
  chr2:127827840-127827871
  hypo
ctgtgaggatcagatacgctgaggactgggg

SEQ ID NO: 64023 - DNA, 40 bp, Homo sapiens
  chr2:127855674-127855714
  hypo
acttagggtgtaaatgcgaagccatcgctgcctctaccca

SEQ ID NO: 64024 - DNA, 909 bp, Homo sapiens; identical to SEQ ID NO: 37989
  chr2:127863394-127864303
  hypo

SEQ ID NO: 64025 - DNA, 173 bp, Homo sapiens
  chr2:127895476-127895649
  hypo
ctcctcagccgcgctcgcagacagctgtcttccaagttcagggtgggacgcaggtcactggtcaccaccactcgcccagcagacaggctgagcctagttatgcagcagcaccagccagtgaggaggaacacctttgagaacatcctgtcatgaaccctcgcccaaacggactt

SEQ ID NO: 64026 - DNA, 174 bp, Homo sapiens
  chr2:127895961-127896135
  hypo
ggaggcctggagggtcgactggccacagccacctttcccactgcccaacagcagggtcccacgactgcggctgcatgccctcttcactttcctccgggggcctcccagacccccactctgtgtgccagcacttagtcctgcctaaaacagcaactcttccggggcgagggagac

SEQ ID NO: 64027 - DNA, 102 bp, Homo sapiens
  chr2:127933495-127933597
  hypo
ccgtgagctgtgatccgatcaaccacgcctacataatgaaacccagtaagaactccagacgtcacagctccggtgagtttccctgggcgacagcactctgtg

SEQ ID NO: 64028 - DNA, 31 bp, Homo sapiens
  chr2:128029535-128029566
  hypo
gtttggtgcttataagcgcccagccacaatc

SEQ ID NO: 64029 - DNA, 193 bp, Homo sapiens; identical to SEQ ID NO: 16534
  chr2:128127765-128127958
  hypo

SEQ ID NO: 64030 - DNA, 491 bp, Homo sapiens
  chr2:128158416-128158907
  hypo
ggcccctctgctgctgggaaccgggcgcactcccgccagtcgcaggagctggctccacccgccccttctgatccagtgtcccgcagtcctgcccgcttcaccgccctcgcctagcccccgcgggtggtaaaagtccagcccggcggagcgcccctgcctccttccacgcccctggcctgccctgcgcagctacgcccagcccgcgtccatcccggaccatcctgttgaaggcagtcccctggcacgcagggctgggagctcttagctgaggatggaaccgactgcaccaggagccgctgggaggaaggccgaggggcgcagaggagaggcaaggaaaaaacagcagcccaagaatcgggcctccctgttacagcaggagtcgcatctatttatatatgttatgtcttattgctcagcaaccagctctcggccggggcgtgggccgggaagaggggtctcctggtgcagcgggttggcgtgactcatcaccg

SEQ ID NO: 64031 - DNA, 79 bp, Homo sapiens; identical to SEQ ID NO: 16536
  chr2:128273730-128273809
  hypo

SEQ ID NO: 64032 - DNA, 78 bp, Homo sapiens; identical to SEQ ID NO: 16537
  chr2:128273868-128273946
  hypo

SEQ ID NO: 64033 - DNA, 30 bp, Homo sapiens
  chr2:128285594-128285624
  hypo
atcaaaattccaggcggaggttcagtggaa

SEQ ID NO: 64034 - DNA, 32 bp, Homo sapiens
  chr2:128292846-128292878
  hypo
ccatgcccgacgatcactttggaaattctaag

SEQ ID NO: 64035 - DNA, 64 bp, Homo sapiens
  chr2:128293881-128293945
  hypo
tgaggaccatggaagcgaaggtgcccacgggaagaagcagagccggattcgactccaaagccca

SEQ ID NO: 64036 - DNA, 84 bp, Homo sapiens
  chr2:128306300-128306384
  hypo
aactatgcattcagcactataaatttcccttcagtacttgtttcattggattccacaaatttcgatgtgatattttcattttca

SEQ ID NO: 64037 - DNA, 31 bp, Homo sapiens
  chr2:128338346-128338377
  hypo
tcagacgtgatggagacgcccgcctttccca

SEQ ID NO: 64038 - DNA, 30 bp, Homo sapiens
  chr2:128350291-128350321
  hypo
cggtggtggggtgccgggaaggggggtggc

SEQ ID NO: 64039 - DNA, 30 bp, Homo sapiens; identical to SEQ ID NO: 16538
  chr2:128350733-128350763
  hypo

SEQ ID NO: 64040 - DNA, 30 bp, Homo sapiens
  chr2:128366309-128366339
  hypo
cagaaaagccaaggcgctctccctgccaag

SEQ ID NO: 64041 - DNA, 324 bp, Homo sapiens
  chr2:128402977-128403301
  hypo
ttgttcactcagtctcagaggcggccgccggcagcattcaaaggcaccccagcccggagccaccccagggaggagccccaggccagcggtcagattcatgggcttccgtgcagaaggggagctgcaccggcgagcacccggcctctgagctgagccgcatcctcacggacaggacagcgccccattatgaggctcctgcagctgttcctcgctccagataaaggccatgatttattctgtgtgcccaaatggggcctcattatacagggcaggacacaaggaccctacagcaagtgtcctcaaagagtcgcctctcactccgtg

SEQ ID NO: 64042 - DNA, 30 bp, Homo sapiens
  chr2:128403695-128403725
  hypo
ccttaaatagccagcgttccacccacagcg

SEQ ID NO: 64043 - DNA, 106 bp, Homo sapiens; identical to SEQ ID NO: 1817
  chr2:128459398-128459504
  hypo

SEQ ID NO: 64044 - DNA, 33 bp, Homo sapiens; identical to SEQ ID NO: 16541
  chr2:128472922-128472955
  hypo

SEQ ID NO: 64045 - DNA, 25 bp, Homo sapiens
  chr2:128487353-128487378
  hypo
ccactgcacccggccaactattcat

SEQ ID NO: 64046 - DNA, 30 bp, Homo sapiens; identical to SEQ ID NO: 16543
  chr2:128549955-128549985
  hypo

SEQ ID NO: 64047 - DNA, 212 bp, Homo sapiens
  chr2:128583665-128583877
  hypo
gaaagtgctgggattacaggtgtgagccgctgcgcgtcaccaccaatccattttctccaggacctctctctgtgcagagagctcttctctttcacctattaaacttccactctgaacctcactctttgtatatccgcatcctagtgttctgtggctttagacaaggaacctcgagtatttacccaagacgatgatatcgtttcattggcagc

SEQ ID NO: 64048 - DNA, 85 bp, Homo sapiens
  chr2:128600134-128600219
  hypo
tttctccttgtagctccacaccgacgctattcaaaatgggggctcaataaacatttgctagtaagtacgcagtgcaggccgggca

SEQ ID NO: 64049 - DNA, 24 bp, Homo sapiens
  chr2:128600518-128600542
  hypo
gccacacaacggaagggaggcata

SEQ ID NO: 64050 - DNA, 23 bp, Homo sapiens
  chr2:128601382-128601405
  hypo
cttataaaagaggctgcgggctg

SEQ ID NO: 64051 - DNA, 181 bp, Homo sapiens; identical to SEQ ID NO: 16547
  chr2:128616460-128616641
  hypo

SEQ ID NO: 64052 - DNA, 30 bp, Homo sapiens; identical to SEQ ID NO: 38005
  chr2:128646900-128646930
  hypo

SEQ ID NO: 64053 - DNA, 42 bp, Homo sapiens; identical to SEQ ID NO: 16548
  chr2:128679950-128679992
  hypo

SEQ ID NO: 64054 - DNA, 41 bp, Homo sapiens; identical to SEQ ID NO: 16549
  chr2:128680171-128680212
  hypo

SEQ ID NO: 64055 - DNA, 30 bp, Homo sapiens
  chr2:128826372-128826402
  hypo
ggggaggaaaagccccggggagaatgaccc

SEQ ID NO: 64056 - DNA, 30 bp, Homo sapiens
  chr2:128826704-128826734
  hypo
tccatgtggagccaacgtgatcgcaaaggt

SEQ ID NO: 64057 - DNA, 31 bp, Homo sapiens
  chr2:128847692-128847723
  hypo
cgtgagccaccgcgcccggcctccatcagtg

SEQ ID NO: 64058 - DNA, 31 bp, Homo sapiens
  chr2:128952616-128952647
  hypo
atgaaggttaaactctgtggtcggtatttgc

SEQ ID NO: 64059 - DNA, 31 bp, Homo sapiens
  chr2:128952706-128952737
  hypo
cggatcacccgaggtcaggagtttgaggatt

SEQ ID NO: 64060 - DNA, 201 bp, Homo sapiens
  chr2:129021513-129021714
  hypo
tccacaccccaaataaacctccgcatgaagtgtccaggaaggactcgggagttcctcttggcgtctggcctctgctcctcccttccgcactctacctaggcatgagcaggtgttgacgtggagtctgagactggggttttaagaaggcagctacgttctgactcctgccctacttgtgccgtgaccctcccagaaacacct

SEQ ID NO: 64061 - DNA, 57 bp, Homo sapiens; identical to SEQ ID NO: 16550
  chr2:129027718-129027775
  hypo

SEQ ID NO: 64062 - DNA, 30 bp, Homo sapiens
  chr2:129057525-129057555
  hypo
ccccacctccaggccggggtcttgccagcc

SEQ ID NO: 64063 - DNA, 30 bp, Homo sapiens
  chr2:129103149-129103179
  hypo
acttccagattccgcggctgagcggcgagt

SEQ ID NO: 64064 - DNA, 30 bp, Homo sapiens; identical to SEQ ID NO: 16551
  chr2:129126360-129126390
  hypo

SEQ ID NO: 64065 - DNA, 31 bp, Homo sapiens
  chr2:129134897-129134928
  hypo
agggcctccaagagtgcgccactcaccactg

SEQ ID NO: 64066 - DNA, 171 bp, Homo sapiens
  chr2:129250622-129250793
  hypo
ctgcttatctaggccgccccctccgcgggcgcaccgatgcctggcactgcccgccggggcgtgggcgcgcccacaccgtccaccctgctcctgcccagagcgggtcctctgccgaaggaatttgcgctggcagctcccggagggtctggcccgcacgcggcagggcaataa

SEQ ID NO: 64067 - DNA, 30 bp, Homo sapiens; identical to SEQ ID NO: 16553
  chr2:129335826-129335856
  hypo

SEQ ID NO: 64068 - DNA, 31 bp, Homo sapiens
  chr2:129377450-129377481
  hypo
gaactgaggcctggggcgggcaggatgacac

SEQ ID NO: 64069 - DNA, 159 bp, Homo sapiens; identical to SEQ ID NO: 16554
  chr2:129542647-129542806
  hypo

SEQ ID NO: 64070 - DNA, 23 bp, Homo sapiens
  chr2:129660420-129660443
  hypo
tcagccgggtgcggtggttcacg

SEQ ID NO: 64071 - DNA, 43 bp, Homo sapiens
  chr2:130174991-130175034
  hypo
atttctttactttttgttgtccgtcttttatttctgttttcct

SEQ ID NO: 64072 - DNA, 95 bp, Homo sapiens; identical to SEQ ID NO: 16556
  chr2:130356760-130356855
  hypo

SEQ ID NO: 64073 - DNA, 196 bp, Homo sapiens
  chr2:130512121-130512317
  hypo
acaggtgagtacattccttggcgctttaagtgatcacgtgccttccgaatgccaggtgcggcgcccgctctgcgctgctcgctgcaactgctcccaccctttcccagggcgggtgctccactgcgccattcccctcaatccagggatttaacttcagcgaggctgggagcgctccgaggctggcctgtccagtcca

SEQ ID NO: 64074 - DNA, 30 bp, Homo sapiens
  chr2:130638043-130638073
  hypo
agcgcccctgacccccggccccgtgatggt

SEQ ID NO: 64075 - DNA, 31 bp, Homo sapiens
  chr2:130669986-130670017
  hypo
gaggcctgaggcctagcgggcacgtgaggtt

SEQ ID NO: 64076 - DNA, 37 bp, Homo sapiens; identical to SEQ ID NO: 16557
  chr2:130670340-130670377
  hypo

SEQ ID NO: 64077 - DNA, 381 bp, Homo sapiens; identical to SEQ ID NO: 38010
  chr2:130737256-130737637
  hypo

SEQ ID NO: 64078 - DNA, 30 bp, Homo sapiens
  chr2:130910908-130910938
  hypo
gcgtaaggatgagtccgtcctcacccacga

SEQ ID NO: 64079 - DNA, 139 bp, Homo sapiens; identical to SEQ ID NO: 16558
  chr2:130943150-130943289
  hypo

SEQ ID NO: 64080 - DNA, 83 bp, Homo sapiens
  chr2:130948070-130948153
  hypo
ggagcattggccctggcggaacgcagcagccgcgaaggatccagccagaggatgccacgccagcccagcgctaccaggctgcc

SEQ ID NO: 64081 - DNA, 30 bp, Homo sapiens
  chr2:131103220-131103250
  hypo
gccaacggcgtcaccgatctgctggtcgtt

SEQ ID NO: 64082 - DNA, 30 bp, Homo sapiens; identical to SEQ ID NO: 38014
  chr2:131113000-131113030
  hypo

SEQ ID NO: 64083 - DNA, 129 bp, Homo sapiens
  chr2:131116460-131116589
  hypo
gcctggaaggctgacggcgtgtgctccaccgtggccggcagtcggccagagaacgtgaggaagaaccgctacaaagacgtgctgccttgtaagtcggggcttccgtagggagtcggtgcagccttgcac

SEQ ID NO: 64084 - DNA, 30 bp, Homo sapiens
  chr2:131127705-131127735
  hypo
tggaggaagcccgtcgcctccagggatctg

SEQ ID NO: 64085 - DNA, 151 bp, Homo sapiens
  chr2:131486974-131487125
  hypo
cccactacctgctcccggctaacatcctgctctcagacctggcctacattctcctccacatgctcatctcctccagcagcctgggtggctgggagctgggccgcatggcctgtggcattctcactgatgctgtcttcgccgcctgcaccag

SEQ ID NO: 64086 - DNA, 30 bp, Homo sapiens
  chr2:131487528-131487558
  hypo
ctgatcacattgtacgtgagcacaggggtg

SEQ ID NO: 64087 - DNA, 89 bp, Homo sapiens; identical to SEQ ID NO: 16559
  chr2:131502559-131502648
  hypo

SEQ ID NO: 64088 - DNA, 900 bp, Homo sapiens; identical to SEQ ID NO: 38016
  chr2:131513384-131514284
  hypo

SEQ ID NO: 64089 - DNA, 31 bp, Homo sapiens
  chr2:131583858-131583889
  hypo
tcgcagtgatgcgagccgcatgttcctcgcc

SEQ ID NO: 64090 - DNA, 124 bp, Homo sapiens; identical to SEQ ID NO: 16560
  chr2:131639162-131639286
  hypo

SEQ ID NO: 64091 - DNA, 49 bp, Homo sapiens
  chr2:131674645-131674694
  hypo
ccttcaggtatctttccggaaaagtcctggctggcgtcccccggcagcc

SEQ ID NO: 64092 - DNA, 312 bp, Homo sapiens; identical to SEQ ID NO: 1821
  chr2:131720786-131721098
  hypo

SEQ ID NO: 64093 - DNA, 31 bp, Homo sapiens; identical to SEQ ID NO: 16562
  chr2:131813290-131813321
  hypo

SEQ ID NO: 64094 - DNA, 241 bp, Homo sapiens
  chr2:131818831-131819072
  hypo
gcctagccaagctggcaaaacctcgcctccaaaatttaaaaaaaaaaaaaaagtaaaaataagcaaggtgaaaagtatacagtactttcagatgctgacacacaactgagagcgtgtacgctagccagaaaatctccatggaaacaacagtcatgcatgaggtaaaagaacaagcaaggaagttagctgaaagggcccacggatcaccacacccaaacgcacccctagaagatgaattata

SEQ ID NO: 64095 - DNA, 24 bp, Homo sapiens
  chr2:131823063-131823087
  hypo
tcaaaaagaaaagaaacgccgggc

SEQ ID NO: 64096 - DNA, 25 bp, Homo sapiens
  chr2:131836750-131836775
  hypo
cttataaaaaacacacagggccggg

SEQ ID NO: 64097 - DNA, 325 bp, Homo sapiens
  chr2:131878503-131878828
  hypo
taggtgaagagatggcgtttgtgaagagtggctggttgctgcgacagagtgagtacaggatgtgcggtctgcgatcggcattgccgaagggcagtctctatttctgtttgcttaaagttgatcatatttaaaagcaaataacaaagttttatgagtgctatggccttgagtttccccttggacattcctagatctctgtgaactgtcttgcacaccacggagctcctccttggttgctgagttgacaggaaccaggaaatgatggcagtccctgctgctttcgctctcctcactagcatgctttactttttaattttaatttatt

SEQ ID NO: 64098 - DNA, 18 bp, Homo sapiens
  chr2:131882642-131882660
  hypo
caccgtgcctggccaaaa

SEQ ID NO: 64099 - DNA, 134 bp, Homo sapiens
  chr2:131883251-131883385
  hypo
gcattccaacttgggcgaaatagtaagactgtctctaaaaaaaaaaaaacaaccgtactattttttttttccaggtactattttgaagcgctggaagaagaactggtttgatctgtggtcggatggtcacctga

SEQ ID NO: 64100 - DNA, 30 bp, Homo sapiens; identical to SEQ ID NO: 16565
  chr2:132203188-132203218
  hypo

SEQ ID NO: 64101 - DNA, 31 bp, Homo sapiens; identical to SEQ ID NO: 16566
  chr2:132270119-132270150
  hypo

SEQ ID NO: 64102 - DNA, 319 bp, Homo sapiens; identical to SEQ ID NO: 16567
  chr2:132301068-132301387
  hypo

SEQ ID NO: 64103 - DNA, 30 bp, Homo sapiens; identical to SEQ ID NO: 16568
  chr2:132348690-132348720
  hypo

SEQ ID NO: 64104 - DNA, 85 bp, Homo sapiens
  chr2:132403829-132403914
  hypo
caccgcgcccggccaagaatttctttccgtctcctgtgtcattgctttggcagtggaaacgcacgtggcctctaaagagtgggtc

SEQ ID NO: 64105 - DNA, 534 bp, Homo sapiens; identical to SEQ ID NO: 16569
  chr2:132415329-132415863
  hypo

SEQ ID NO: 64106 - DNA, 88 bp, Homo sapiens
  chr2:132586578-132586666
  hypo
ccgagccaggacgtcacgctcacggtattttccgaagtcctccgtgtaaaaagggcgggcggtggagtgggcccggggctcctcaggg

SEQ ID NO: 64107 - DNA, 276 bp, Homo sapiens; identical to SEQ ID NO: 1828
  chr2:132767359-132767635
  hypo

SEQ ID NO: 64108 - DNA, 247 bp, Homo sapiens; identical to SEQ ID NO: 1829
  chr2:132767688-132767935
  hypo

SEQ ID NO: 64109 - DNA, 279 bp, Homo sapiens; identical to SEQ ID NO: 1830
  chr2:132795725-132796004
  hypo

SEQ ID NO: 64110 - DNA, 341 bp, Homo sapiens; identical to SEQ ID NO: 1831
  chr2:132796063-132796404
  hypo

SEQ ID NO: 64111 - DNA, 461 bp, Homo sapiens
  chr2:133174959-133175420
  hypo
cgaggcctgcagctacgctacgctgctgcacgtgctgacactcagctttgagcgctacatcgccatctgtcaccccttcaggtacaaggctgtgtcgggaccttgccaggtgaagctgctgattggcttcgtctgggtcacctccgccctggtggcactgcccttgctgtttgccatgggtactgagtaccccctggtgaacgtgcccagccaccggggtctcacttgcaaccgctccagcacccgccaccacgagcagcccgagacctccaatatgtccatctgtaccaacctctccagccgctggaccgtgttccagtccagcatcttcggcgccttcgtggtctacctcgtggtcctgctctccgtagccttcatgtgctggaacatgatgcaggtgctcatgaaaagccagaagggctcgctggccgggggcacgcggcctccgcagctgaggaagt

SEQ ID NO: 64112 - DNA, 30 bp, Homo sapiens
  chr2:134949188-134949218
  hypo
accctcttccttctcgcgcgagcgggttcc

SEQ ID NO: 64113 - DNA, 30 bp, Homo sapiens
  chr2:134949556-134949586
  hypo
gtagggtgggttcgcgccctcctcctcgcg

SEQ ID NO: 64114 - DNA, 20 bp, Homo sapiens
  chr2:135141291-135141311
  hypo
tttgagacagtctcactgtg

SEQ ID NO: 64115 - DNA, 20 bp, Homo sapiens
  chr2:135141550-135141570
  hypo
cttaagcatggtttttatgt

SEQ ID NO: 64116 - DNA, 22 bp, Homo sapiens
  chr2:135293577-135293599
  hypo
gccaccgcgcccagccttgttt

SEQ ID NO: 64117 - DNA, 1423 bp, Homo sapiens; identical to SEQ ID NO: 38039
  chr2:135475590-135477013
  hypo

SEQ ID NO: 64118 - DNA, 27 bp, Homo sapiens
  chr2:135663110-135663137
  hypo
aaggctatacaaaaattagcccgggca

SEQ ID NO: 64119 - DNA, 27 bp, Homo sapiens
  chr2:135663256-135663283
  hypo
cagagcgagactctgtctcaaaaaaaa

SEQ ID NO: 64120 - DNA, 97 bp, Homo sapiens
  chr2:135707350-135707447
  hypo
aggtaggcaaaatttttttttcggggggggggtgggggacagagtctcagtcgcccaggctatagagtgcggtggcgcaatctcggctcgctgcacc

SEQ ID NO: 64121 - DNA, 181 bp, Homo sapiens
  chr2:135718100-135718281
  hypo
aaaaatatttaagcataagctgttctttaataaggctgctcgccagcttccctctccttaccagcaatttccctgcaccttccacttgaaagaaaatgaaagctaattgcaataactttgataaagtagaattaggatagaaaagtcgcttcttttaaaatagattttcaggccgggtacg

SEQ ID NO: 64122 - DNA, 134 bp, Homo sapiens
  chr2:135926164-135926298
  hypo
agaggaaagaaggcagaactccgtgtcagacttcccaccccctgctggccgggaattcattttgcgcaccactgtgccgcgccctgctccctactccaaagctctgcctcagcggatgtacagtgttctcacca

SEQ ID NO: 64123 - DNA, 30 bp, Homo sapiens
  chr2:136150019-136150049
  hypo
atataaaatacaaatcatggccgggcacgg

SEQ ID NO: 64124 - DNA, 89 bp, Homo sapiens; identical to SEQ ID NO: 1839
  chr2:136288365-136288454
  hypo

SEQ ID NO: 64125 - DNA, 30 bp, Homo sapiens
  chr2:136545723-136545753
  hypo
tttactcagcaagtcgaaatcattcaagat

SEQ ID NO: 64126 - DNA, 30 bp, Homo sapiens
  chr2:136567139-136567169
  hypo
ccatcggcatcccacgcgccttcaatctga

SEQ ID NO: 64127 - DNA, 43 bp, Homo sapiens
  chr2:136721520-136721563
  hypo
gattacaggcgtgagccactgcgcctggccttaatgactatta

SEQ ID NO: 64128 - DNA, 222 bp, Homo sapiens
  chr2:136785591-136785813
  hypo
acattcaatgtgtgcacacttcggtgtatcaattatacttcaataaagctaaaacaaaaaaaggatgctgagacagtacacgggggcgcttaaagcgctcctacttcccgactgcagtactaggagggtgtgggctacggtagaaagatggtataaaatctcacgggtagctaactgttgtaaccgtgggcatggtgggccgagggaagctcagtagtgggt

SEQ ID NO: 64129 - DNA, 3177 bp, Homo sapiens; identical to SEQ ID NO: 38045
  chr2:136873850-136877027
  hypo

SEQ ID NO: 64130 - DNA, 34 bp, Homo sapiens
  chr2:136911819-136911853
  hypo
gggcaacagagcgagactccgtctaaaaaaaaaa

SEQ ID NO: 64131 - DNA, 43 bp, Homo sapiens; identical to SEQ ID NO: 16583
  chr2:137195176-137195219
  hypo

SEQ ID NO: 64132 - DNA, 713 bp, Homo sapiens; identical to SEQ ID NO: 38046
  chr2:137522036-137522749
  hypo

SEQ ID NO: 64133 - DNA, 544 bp, Homo sapiens; identical to SEQ ID NO: 1843
  chr2:137522848-137523392
  hypo

SEQ ID NO: 64134 - DNA, 27 bp, Homo sapiens
  chr2:138265955-138265982
  hypo
tttttttttttgagacagtctcgctgt

SEQ ID NO: 64135 - DNA, 31 bp, Homo sapiens; identical to SEQ ID NO: 1845
  chr2:138436702-138436733
  hypo

SEQ ID NO: 64136 - DNA, 199 bp, Homo sapiens
  chr2:138689490-138689689
  hypo
aagtcactgtcagaatcggtatctggtgaggctcagttttctggttcacagacagtgactgtcttctcgctgtgtcttctcttacaatggctttcccttgcagtggatctctcttgcatctctttaataaaagcactaatctgattcaccgattcatgaatcacgaatcacttttgaaagatcccgtctcctaatacca

SEQ ID NO: 64137 - DNA, 30 bp, Homo sapiens; identical to SEQ ID NO: 16587
  chr2:138940401-138940431
  hypo

SEQ ID NO: 64138 - DNA, 31 bp, Homo sapiens; identical to SEQ ID NO: 16588
  chr2:139274945-139274976
  hypo

SEQ ID NO: 64139 - DNA, 30 bp, Homo sapiens; identical to SEQ ID NO: 16589
  chr2:139436925-139436955
  hypo

SEQ ID NO: 64140 - DNA, 859 bp, Homo sapiens; identical to SEQ ID NO: 38051
  chr2:139536963-139537822
  hypo

SEQ ID NO: 64141 - DNA, 336 bp, Homo sapiens; identical to SEQ ID NO: 38052
  chr2:139537850-139538186
  hypo

SEQ ID NO: 64142 - DNA, 19 bp, Homo sapiens
  chr2:143555049-143555068
  hypo
cttaaagaaagcagaactg

SEQ ID NO: 64143 - DNA, 30 bp, Homo sapiens; identical to SEQ ID NO: 16591
  chr2:144478076-144478106
  hypo

SEQ ID NO: 64144 - DNA, 229 bp, Homo sapiens; identical to SEQ ID NO: 1850
  chr2:144694285-144694514
  hypo

SEQ ID NO: 64145 - DNA, 772 bp, Homo sapiens; identical to SEQ ID NO: 38056
  chr2:144694553-144695325
  hypo

SEQ ID NO: 64146 - DNA, 34 bp, Homo sapiens; identical to SEQ ID NO: 1852
  chr2:145090079-145090113
  hypo

SEQ ID NO: 64147 - DNA, 30 bp, Homo sapiens; identical to SEQ ID NO: 16595
  chr2:145162474-145162504
  hypo

SEQ ID NO: 64148 - DNA, 27 bp, Homo sapiens
  chr2:145167761-145167788
  hypo
caccgcgcccagccataaaaaagaatg

SEQ ID NO: 64149 - DNA, 1193 bp, Homo sapiens; identical to SEQ ID NO: 38058
  chr2:145273317-145274510
  hypo

SEQ ID NO: 64150 - DNA, 1306 bp, Homo sapiens; identical to SEQ ID NO: 38059
  chr2:145274576-145275882
  hypo

SEQ ID NO: 64151 - DNA, 677 bp, Homo sapiens; identical to SEQ ID NO: 38061
  chr2:145281301-145281978
  hypo

SEQ ID NO: 64152 - DNA, 201 bp, Homo sapiens
  chr2:147344899-147345100
  hypo
cggacaagcgacctcgctctgtggccagtgagttgtttctgattcggatgatttttgtccctcggcgcgtgcccttgctccccgcccccggctgcgagacccccggcccggcactcgctctcctcctgtcacgaaagggtcgcggcctgtagccctgtgggcagccgtgccgcgatgaaccccagcgcccccagctaccac

SEQ ID NO: 64153 - DNA, 30 bp, Homo sapiens; identical to SEQ ID NO: 1859
  chr2:148389097-148389127
  hypo

SEQ ID NO: 64154 - DNA, 704 bp, Homo sapiens; identical to SEQ ID NO: 38065
  chr2:148601815-148602519
  hypo

SEQ ID NO: 64155 - DNA, 216 bp, Homo sapiens; identical to SEQ ID NO: 1861
  chr2:148602727-148602943
  hypo

SEQ ID NO: 64156 - DNA, 84 bp, Homo sapiens
  chr2:148776774-148776858
  hypo
agcaatgatgcataaacggggtccactgcccaaacttacagaaagcaaaacgtggaaaattagtaactttaactgatagtgtac

SEQ ID NO: 64157 - DNA, 30 bp, Homo sapiens
  chr2:148823731-148823761
  hypo
gagcatggtgttgtgcgcctgtcatcgcag

SEQ ID NO: 64158 - DNA, 25 bp, Homo sapiens
  chr2:148912495-148912520
  hypo
tattcctattcggccatcttggctc

SEQ ID NO: 64159 - DNA, 38 bp, Homo sapiens; identical to SEQ ID NO: 16604
  chr2:149045674-149045712
  hypo

SEQ ID NO: 64160 - DNA, 29 bp, Homo sapiens
  chr2:149047808-149047837
  hypo
gagtcaccgcacccagccaaaaatcatgt

SEQ ID NO: 64161 - DNA, 195 bp, Homo sapiens; identical to SEQ ID NO: 16605
  chr2:149227322-149227517
  hypo

SEQ ID NO: 64162 - DNA, 30 bp, Homo sapiens; identical to SEQ ID NO: 16606
  chr2:149286257-149286287
  hypo

SEQ ID NO: 64163 - DNA, 30 bp, Homo sapiens
  chr2:149287072-149287102
  hypo
aaatgtgtctctcctcgtgaaagatcaaac

SEQ ID NO: 64164 - DNA, 33 bp, Homo sapiens; identical to SEQ ID NO: 16607
  chr2:149436587-149436620
  hypo

SEQ ID NO: 64165 - DNA, 101 bp, Homo sapiens
  chr2:149514579-149514680
  hypo
tttgaatacagggaatagggccgtcttagaagaatagaaaaaatgtcaatatgaacttgtggtttttaatattgatatagttagggctgggcgtggtggct

SEQ ID NO: 64166 - DNA, 199 bp, Homo sapiens; identical to SEQ ID NO: 16608
  chr2:149525278-149525477
  hypo

SEQ ID NO: 64167 - DNA, 30 bp, Homo sapiens; identical to SEQ ID NO: 1862
  chr2:149588676-149588706
  hypo

SEQ ID NO: 64168 - DNA, 273 bp, Homo sapiens; identical to SEQ ID NO: 1863
  chr2:149632584-149632857
  hypo

SEQ ID NO: 64169 - DNA, 1537 bp, Homo sapiens; identical to SEQ ID NO: 38071
  chr2:149632888-149634425
  hypo

SEQ ID NO: 64170 - DNA, 144 bp, Homo sapiens
  chr2:150131806-150131950
  hypo
aatacaggcatgagccaccacgcccggccgacaggcagaatttatgtgcttaacagctgggagaaaatgaagacatgtagtcgaaaatccagatgctttcaaatatatattcaattatttaacgttagatgaatcatagagata

SEQ ID NO: 64171 - DNA, 30 bp, Homo sapiens; identical to SEQ ID NO: 1869
  chr2:150153324-150153354
  hypo

SEQ ID NO: 64172 - DNA, 30 bp, Homo sapiens; identical to SEQ ID NO: 38077
  chr2:150186691-150186721
  hypo

SEQ ID NO: 64173 - DNA, 80 bp, Homo sapiens
  chr2:150394599-150394679
  hypo
caaagaaaaaagaaaaaaaaaaaaaaccaacatggttttgcactaccaaaagatttgacgagtcaaatgtgtgtgtttac

SEQ ID NO: 64174 - DNA, 34 bp, Homo sapiens
  chr2:150422348-150422382
  hypo
tgtgagccatggcgcctggccaagggttcttact

SEQ ID NO: 64175 - DNA, 30 bp, Homo sapiens
  chr2:152042660-152042690
  hypo
ccgctggttccgcacgctccgcacaccagc

SEQ ID NO: 64176 - DNA, 30 bp, Homo sapiens
  chr2:152134118-152134148
  hypo
ttttagttatatcccgattaccagtcgcca

SEQ ID NO: 64177 - DNA, 279 bp, Homo sapiens
  chr2:152153949-152154228
  hypo
accagagattgtcattctggtcgacgggttttatgtgccacctggctattacgaagcgcagaaccctcttactgtttccagcctggaggccgagtccatagacggaaagtgaggtatttctaggtgtccctgtgtttcatgaaggggcggtatatgcaaagcagcccccaaatgccaaaggagttgagctaccaaagaacaaggcagacaaatccagttcgtcagtaaggagtgttttaatggaaagttaagatggaaatgtggcggcaaggcagatct

SEQ ID NO: 64178 - DNA, 25 bp, Homo sapiens
  chr2:152266077-152266102
  hypo
cccaacagtacgttatctccttttg

SEQ ID NO: 64179 - DNA, 207 bp, Homo sapiens
  chr2:152295715-152295922
  hypo
aggggtggaacttgctgtttccgggatggaagaaagtctgaataggagtggactcatgccgtccaaacccgtgtcgttcaagggtcaactgtacttagtattgttgatttagaaaaaataaatttttacagctctctgtatagtcatctctaaaattacatgcttagaaatacacccttctagccgggcgcggtggctcatgcctgt

SEQ ID NO: 64180 - DNA, 25 bp, Homo sapiens
  chr2:152561379-152561404
  hypo
attcggccatcttggctcctcccca

SEQ ID NO: 64181 - DNA, 207 bp, Homo sapiens; identical to SEQ ID NO: 16617
  chr2:152642696-152642903
  hypo

SEQ ID NO: 64182 - DNA, 30 bp, Homo sapiens
  chr2:152681225-152681255
  hypo
aagtccttcttacacgaagttgtgtgcaaa

SEQ ID NO: 64183 - DNA, 30 bp, Homo sapiens; identical to SEQ ID NO: 38086
  chr2:152955768-152955798
  hypo

SEQ ID NO: 64184 - DNA, 131 bp, Homo sapiens; identical to SEQ ID NO: 38087
  chr2:152956019-152956150
  hypo

SEQ ID NO: 64185 - DNA, 30 bp, Homo sapiens; identical to SEQ ID NO: 16619
  chr2:153079603-153079633
  hypo

SEQ ID NO: 64186 - DNA, 339 bp, Homo sapiens; identical to SEQ ID NO: 38089
  chr2:153192136-153192475
  hypo

SEQ ID NO: 64187 - DNA, 30 bp, Homo sapiens
  chr2:153246169-153246199
  hypo
acgtggatccgagccggcgcgatgggcgga

SEQ ID NO: 64188 - DNA, 31 bp, Homo sapiens; identical to SEQ ID NO: 1876
  chr2:153573617-153573648
  hypo

SEQ ID NO: 64189 - DNA, 80 bp, Homo sapiens; identical to SEQ ID NO: 1883
  chr2:155553935-155554015
  hypo

SEQ ID NO: 64190 - DNA, 1096 bp, Homo sapiens; identical to SEQ ID NO: 1884
  chr2:155554076-155555172
  hypo

SEQ ID NO: 64191 - DNA, 29 bp, Homo sapiens
  chr2:156216743-156216772
  hypo
actttttttttttttttgagacggagtct

SEQ ID NO: 64192 - DNA, 213 bp, Homo sapiens; identical to SEQ ID NO: 38102
  chr2:157189364-157189577
  hypo

SEQ ID NO: 64193 - DNA, 460 bp, Homo sapiens; identical to SEQ ID NO: 38107
  chr2:157292162-157292622
  hypo

SEQ ID NO: 64194 - DNA, 35 bp, Homo sapiens
  chr2:157340914-157340949
  hypo
ccgggattacaggcgtgagcccagtcccaatcttt

SEQ ID NO: 64195 - DNA, 30 bp, Homo sapiens; identical to SEQ ID NO: 16626
  chr2:158155295-158155325
  hypo

SEQ ID NO: 64196 - DNA, 349 bp, Homo sapiens; identical to SEQ ID NO: 38109
  chr2:158484949-158485298
  hypo

SEQ ID NO: 64197 - DNA, 101 bp, Homo sapiens
  chr2:158607939-158608040
  hypo
tctaaccgaatgcaaagtttccttgcccgaactcaggggagggcaggaatccggtgtccagactcgacaggtgggaaggcgtgcaagccctgcttgctttc

SEQ ID NO: 64198 - DNA, 91 bp, Homo sapiens
  chr2:158674927-158675018
  hypo
cagtccttcaagccgcgtgccctcgttcagagcttctctcactctggtcactggggtactcggagagtagaagaggcgttcctgggattat

SEQ ID NO: 64199 - DNA, 31 bp, Homo sapiens; identical to SEQ ID NO: 16628
  chr2:158901219-158901250
  hypo

SEQ ID NO: 64200 - DNA, 34 bp, Homo sapiens
  chr2:158914981-158915015
  hypo
aggacgtgtgaggacacaacgagaaggtggtctc

SEQ ID NO: 64201 - DNA, 18 bp, Homo sapiens
  chr2:159207732-159207750
  hypo
ctgaccatagcccaagat

SEQ ID NO: 64202 - DNA, 31 bp, Homo sapiens; identical to SEQ ID NO: 1892
  chr2:159313053-159313084
  hypo

SEQ ID NO: 64203 - DNA, 565 bp, Homo sapiens; identical to SEQ ID NO: 1893
  chr2:159313328-159313893
  hypo

SEQ ID NO: 64204 - DNA, 700 bp, Homo sapiens; identical to SEQ ID NO: 38114
  chr2:159314097-159314797
  hypo

SEQ ID NO: 64205 - DNA, 31 bp, Homo sapiens; identical to SEQ ID NO: 16632
  chr2:159340499-159340530
  hypo

SEQ ID NO: 64206 - DNA, 158 bp, Homo sapiens; identical to SEQ ID NO: 16633
  chr2:159490659-159490817
  hypo

SEQ ID NO: 64207 - DNA, 154 bp, Homo sapiens; identical to SEQ ID NO: 16634
  chr2:159528147-159528301
  hypo

SEQ ID NO: 64208 - DNA, 31 bp, Homo sapiens
  chr2:159538761-159538792
  hypo
acccaagagaaaactgcgttttcttgccgaa

SEQ ID NO: 64209 - DNA, 30 bp, Homo sapiens; identical to SEQ ID NO: 1895
  chr2:159660261-159660291
  hypo

SEQ ID NO: 64210 - DNA, 31 bp, Homo sapiens
  chr2:159747449-159747480
  hypo
gttttggggcacacatcgctgtagcaggaag

SEQ ID NO: 64211 - DNA, 289 bp, Homo sapiens
  chr2:159946995-159947284
  hypo
aaaacagcctcgctcggcagggatcgggggtccctctgtgtggagggtgttggaaactgaatcaggtgtagcatcagtaggcctggcagagccacggaattcaagctgcagtgtgttccacaggactggtagacctggacaagtctgtgctggcaaggaaatgtagaatcccaaattccatgcagattgacggtgaatcctgccaggttgccttccaccacagctagctcgtgacttcacccttcattgggccaggcagaatgaccggagccagcgccactgtgctgca

SEQ ID NO: 64212 - DNA, 37 bp, Homo sapiens
  chr2:159964842-159964879
  hypo
gcattttttgctgcccgtttcccgccgcctgcagtta

SEQ ID NO: 64213 - DNA, 30 bp, Homo sapiens
  chr2:159965183-159965213
  hypo
tgtgacaggactgcgcgtgcgtctgcgtct

SEQ ID NO: 64214 - DNA, 30 bp, Homo sapiens; identical to SEQ ID NO: 16637
  chr2:159987935-159987965
  hypo

SEQ ID NO: 64215 - DNA, 155 bp, Homo sapiens
  chr2:159994716-159994871
  hypo
caggaccagacatttcggtttcgcctgaaattaagaagcagggtatgttttcatttttgttaagtgtctcgggagcaggtgtagttcacgtctgtgggtgcatggtcttgcctgaagatagccatgatgttggtggatgccgcagcagggtgagc

SEQ ID NO: 64216 - DNA, 245 bp, Homo sapiens
  chr2:160086243-160086488
  hypo
tcaacgactccgagaacgaagaggacaccccaacccctggcttaagtgaccactttcactctgaggagactgaagaggaagaaacttctccccaggaagaatctgtttccccaactcccaggtcccagccatcctcatctgtcccttcctcatacatccgaaaccttcaagaagggttacagtccaaaggaaggccggtatcgccacagagcagggcaggaatcggcaagtccctgagagagcct

SEQ ID NO: 64217 - DNA, 30 bp, Homo sapiens; identical to SEQ ID NO: 16639
  chr2:160087162-160087192
  hypo

SEQ ID NO: 64218 - DNA, 507 bp, Homo sapiens; identical to SEQ ID NO: 1898
  chr2:160142448-160142955
  hypo

SEQ ID NO: 64219 - DNA, 43 bp, Homo sapiens
  chr2:160632630-160632673
  hypo
tgggattacaggcgtgagccactgcgcccggcctgtgcctggc

SEQ ID NO: 64220 - DNA, 31 bp, Homo sapiens; identical to SEQ ID NO: 1900
  chr2:160654434-160654465
  hypo

SEQ ID NO: 64221 - DNA, 279 bp, Homo sapiens; identical to SEQ ID NO: 38125
  chr2:160760619-160760898
  hypo

SEQ ID NO: 64222 - DNA, 423 bp, Homo sapiens; identical to SEQ ID NO: 38126
  chr2:160760959-160761382
  hypo

SEQ ID NO: 64223 - DNA, 30 bp, Homo sapiens
  chr2:161054816-161054846
  hypo
gatacacactgaactcggagtttgggtttc

SEQ ID NO: 64224 - DNA, 116 bp, Homo sapiens
  chr2:161113755-161113871
  hypo
gattaaaagtgtgtgcgtcattctttaccgtgagaaggcagacaggttttgcaacaagctagaggatggtgtgtggagtaaataacaaatgcctcttggtcggaggctgtttgatc

SEQ ID NO: 64225 - DNA, 658 bp, Homo sapiens; identical to SEQ ID NO: 38128
  chr2:161126280-161126938
  hypo

SEQ ID NO: 64226 - DNA, 92 bp, Homo sapiens; identical to SEQ ID NO: 16646
  chr2:161127527-161127619
  hypo

SEQ ID NO: 64227 - DNA, 153 bp, Homo sapiens; identical to SEQ ID NO: 16647
  chr2:161128080-161128233
  hypo

SEQ ID NO: 64228 - DNA, 28 bp, Homo sapiens
  chr2:161226818-161226846
  hypo
aaatttttaaacccaagattacgttttt

SEQ ID NO: 64229 - DNA, 28 bp, Homo sapiens
  chr2:161226965-161226993
  hypo
aaaccccgtctctactaaagatacagac

SEQ ID NO: 64230 - DNA, 161 bp, Homo sapiens
  chr2:161253362-161253523
  hypo
cgcgcccagccgtagggaatgtctacctgcgcatgcacgtggcactctctgaccgaggtccggggactttcccctaggcggaaggatcttatcagaatctccatgccccaccctataccaaaagctcattgtctttcttgatttcacgtttccttagcctt

SEQ ID NO: 64231 - DNA, 403 bp, Homo sapiens; identical to SEQ ID NO: 1904
  chr2:161263951-161264354
  hypo

SEQ ID NO: 64232 - DNA, 327 bp, Homo sapiens; identical to SEQ ID NO: 1905
  chr2:161264419-161264746
  hypo

SEQ ID NO: 64233 - DNA, 30 bp, Homo sapiens; identical to SEQ ID NO: 16652
  chr2:161986974-161987004
  hypo

SEQ ID NO: 64234 - DNA, 18 bp, Homo sapiens
  chr2:161987325-161987343
  hypo
aggcataagaagaaatca

SEQ ID NO: 64235 - DNA, 17 bp, Homo sapiens
  chr2:161987582-161987599
  hypo
ctccatctaaaaaaaaa

SEQ ID NO: 64236 - DNA, 162 bp, Homo sapiens; identical to SEQ ID NO: 16654
  chr2:161989984-161990146
  hypo

SEQ ID NO: 64237 - DNA, 209 bp, Homo sapiens
  chr2:162096296-162096505
  hypo
agcagcgccctggccgcccctccgacaaagagcccatcggaacccgagtctgctgaaaaaagcctttcatacctgttgatgcaggcggggacctgagatttcatacaacctcctgttactttttgaccgtaaaagctgattgttgcacttaaaaggcacttttattcctaccattaaaatatttttactgttacgggtttacataaact

SEQ ID NO: 64238 - DNA, 393 bp, Homo sapiens; identical to SEQ ID NO: 38135
  chr2:162271729-162272122
  hypo

SEQ ID NO: 64239 - DNA, 442 bp, Homo sapiens; identical to SEQ ID NO: 38139
  chr2:162274784-162275226
  hypo

SEQ ID NO: 64240 - DNA, 127 bp, Homo sapiens; identical to SEQ ID NO: 1911
  chr2:162275310-162275437
  hypo

SEQ ID NO: 64241 - DNA, 337 bp, Homo sapiens; identical to SEQ ID NO: 1912
  chr2:162275472-162275809
  hypo

SEQ ID NO: 64242 - DNA, 263 bp, Homo sapiens; identical to SEQ ID NO: 38142
  chr2:162280152-162280415
  hypo

SEQ ID NO: 64243 - DNA, 203 bp, Homo sapiens; identical to SEQ ID NO: 1916
  chr2:162930081-162930284
  hypo

SEQ ID NO: 64244 - DNA, 639 bp, Homo sapiens; identical to SEQ ID NO: 1917
  chr2:162930338-162930977
  hypo

SEQ ID NO: 64245 - DNA, 260 bp, Homo sapiens; identical to SEQ ID NO: 38156
  chr2:165477433-165477693
  hypo

SEQ ID NO: 64246 - DNA, 30 bp, Homo sapiens; identical to SEQ ID NO: 38157
  chr2:165478237-165478267
  hypo

SEQ ID NO: 64247 - DNA, 22 bp, Homo sapiens
  chr2:165562521-165562543
  hypo
cgacaagagtgaaactccatct

SEQ ID NO: 64248 - DNA, 215 bp, Homo sapiens; identical to SEQ ID NO: 16661
  chr2:165637157-165637372
  hypo

SEQ ID NO: 64249 - DNA, 1157 bp, Homo sapiens; identical to SEQ ID NO: 38158
  chr2:165697512-165698669
  hypo

SEQ ID NO: 64250 - DNA, 476 bp, Homo sapiens; identical to SEQ ID NO: 1924
  chr2:166649933-166650409
  hypo

SEQ ID NO: 64251 - DNA, 791 bp, Homo sapiens; identical to SEQ ID NO: 38161
  chr2:166650454-166651245
  hypo

SEQ ID NO: 64252 - DNA, 89 bp, Homo sapiens; identical to SEQ ID NO: 16667
  chr2:166790774-166790863
  hypo

SEQ ID NO: 64253 - DNA, 87 bp, Homo sapiens; identical to SEQ ID NO: 16668
  chr2:166894500-166894587
  hypo

SEQ ID NO: 64254 - DNA, 30 bp, Homo sapiens; identical to SEQ ID NO: 38164
  chr2:167830802-167830832
  hypo

SEQ ID NO: 64255 - DNA, 2210 bp, Homo sapiens; identical to SEQ ID NO: 38165
  chr2:168148856-168151066
  hypo

SEQ ID NO: 64256 - DNA, 31 bp, Homo sapiens
  chr2:168249795-168249826
  hypo
tttaattatatagtcacgcctgtgatctagt

SEQ ID NO: 64257 - DNA, 20 bp, Homo sapiens
  chr2:168593132-168593152
  hypo
tggatgcagtggctcacgcc

SEQ ID NO: 64258 - DNA, 31 bp, Homo sapiens; identical to SEQ ID NO: 16670
  chr2:168931676-168931707
  hypo

SEQ ID NO: 64259 - DNA, 190 bp, Homo sapiens; identical to SEQ ID NO: 16671
  chr2:169073166-169073356
  hypo

SEQ ID NO: 64260 - DNA, 1391 bp, Homo sapiens; identical to SEQ ID NO: 38166
  chr2:169312408-169313799
  hypo

SEQ ID NO: 64261 - DNA, 97 bp, Homo sapiens
  chr2:169337554-169337651
  hypo
ggcaccaacctgggcttgactcgcagagaggcatctgcagaggatccttgaggagcttgtggtttgaaagagggacagttggccaggctggccgggc

SEQ ID NO: 64262 - DNA, 24 bp, Homo sapiens
  chr2:169340960-169340984
  hypo
gattacaggcgttgagccactgtg

SEQ ID NO: 64263 - DNA, 42 bp, Homo sapiens; identical to SEQ ID NO: 16674
  chr2:169436466-169436508
  hypo

SEQ ID NO: 64264 - DNA, 31 bp, Homo sapiens; identical to SEQ ID NO: 16675
  chr2:169453320-169453351
  hypo

SEQ ID NO: 64265 - DNA, 27 bp, Homo sapiens
  chr2:169519252-169519279
  hypo
acaaacgagccctggaaagaaagctag

SEQ ID NO: 64266 - DNA, 198 bp, Homo sapiens
  chr2:169533300-169533498
  hypo
catctggatgtttactcgagggtagaggtttaatgaagttaatgacttttatgcttcatcaaggatagtcatcagtgaaactttttccttctaatcgcgactgtctgctggtgaagaagacagtgtccatgagtagagtttggtgccactgtcttgtttcctgctaagcctccggcagttttacgcaccattgctttg

SEQ ID NO: 64267 - DNA, 33 bp, Homo sapiens
  chr2:169561124-169561157
  hypo
gtttgttttttgagacgagtctcgctttgtcgc

SEQ ID NO: 64268 - DNA, 32 bp, Homo sapiens
  chr2:169561396-169561428
  hypo
cgcacccggccgcacctttgttcttgatcccc

SEQ ID NO: 64269 - DNA, 20 bp, Homo sapiens
  chr2:169584038-169584058
  hypo
cagagcgagactccatctca

SEQ ID NO: 64270 - DNA, 31 bp, Homo sapiens
  chr2:169596485-169596516
  hypo
caggcatgagtcactgcgcccagcctggaaa

SEQ ID NO: 64271 - DNA, 31 bp, Homo sapiens
  chr2:169610604-169610635
  hypo
atcaaataccactccccgtgttaagtatcag

SEQ ID NO: 64272 - DNA, 1026 bp, Homo sapiens; identical to SEQ ID NO: 38167
  chr2:170218502-170219528
  hypo

SEQ ID NO: 64273 - DNA, 150 bp, Homo sapiens; identical to SEQ ID NO: 16677
  chr2:170282969-170283119
  hypo

SEQ ID NO: 64274 - DNA, 30 bp, Homo sapiens
  chr2:170337136-170337166
  hypo
tgtagtaacatattgcgcactttctatgac

SEQ ID NO: 64275 - DNA, 30 bp, Homo sapiens
  chr2:170337470-170337500
  hypo
agccactgcgcccggcgacattttctgtct

SEQ ID NO: 64276 - DNA, 78 bp, Homo sapiens; identical to SEQ ID NO: 16678
  chr2:170373533-170373611
  hypo

SEQ ID NO: 64277 - DNA, 205 bp, Homo sapiens; identical to SEQ ID NO: 38169
  chr2:170430255-170430460
  hypo

SEQ ID NO: 64278 - DNA, 21 bp, Homo sapiens
  chr2:170450460-170450481
  hypo
ggcccactgttttatatcttg

SEQ ID NO: 64279 - DNA, 158 bp, Homo sapiens; identical to SEQ ID NO: 16680
  chr2:170551728-170551886
  hypo

SEQ ID NO: 64280 - DNA, 38 bp, Homo sapiens; identical to SEQ ID NO: 16681
  chr2:170552125-170552163
  hypo

SEQ ID NO: 64281 - DNA, 30 bp, Homo sapiens; identical to SEQ ID NO: 16682
  chr2:170569216-170569246
  hypo

SEQ ID NO: 64282 - DNA, 145 bp, Homo sapiens
  chr2:170569585-170569730
  hypo
gcatcgtggtacctgcgatgggggcaccacgtgttctcccattagccagccccacccatcatagacactacgagtcagccagggggcaggcttgccatgggttttgcgacaccccctgtccaaagcctgccgtgttgcatcccac

SEQ ID NO: 64283 - DNA, 166 bp, Homo sapiens; identical to SEQ ID NO: 16684
  chr2:170584902-170585068
  hypo

SEQ ID NO: 64284 - DNA, 24 bp, Homo sapiens
  chr2:170587050-170587074
  hypo
ctattgttttttattttgagacgg

SEQ ID NO: 64285 - DNA, 20 bp, Homo sapiens
  chr2:170596964-170596984
  hypo
ttttttttttttgagacgga

SEQ ID NO: 64286 - DNA, 31 bp, Homo sapiens; identical to SEQ ID NO: 16685
  chr2:170620741-170620772
  hypo

SEQ ID NO: 64287 - DNA, 23 bp, Homo sapiens
  chr2:170681882-170681905
  hypo
tggagaggcagggcgcggcggct

SEQ ID NO: 64288 - DNA, 241 bp, Homo sapiens; identical to SEQ ID NO: 16687
  chr2:170682144-170682385
  hypo

SEQ ID NO: 64289 - DNA, 28 bp, Homo sapiens
  chr2:170716502-170716530
  hypo
aggcgtgagccaccgcacctggtcttat

SEQ ID NO: 64290 - DNA, 30 bp, Homo sapiens; identical to SEQ ID NO: 1934
  chr2:171300632-171300662
  hypo

SEQ ID NO: 64291 - DNA, 38 bp, Homo sapiens; identical to SEQ ID NO: 16690
  chr2:171624030-171624068
  hypo

SEQ ID NO: 64292 - DNA, 49 bp, Homo sapiens; identical to SEQ ID NO: 1939
  chr2:171627263-171627312
  hypo

SEQ ID NO: 64293 - DNA, 632 bp, Homo sapiens; identical to SEQ ID NO: 38182
  chr2:171627346-171627978
  hypo

SEQ ID NO: 64294 - DNA, 225 bp, Homo sapiens; identical to SEQ ID NO: 16693
  chr2:171730910-171731135
  hypo

SEQ ID NO: 64295 - DNA, 29 bp, Homo sapiens
  chr2:171788437-171788466
  hypo
ttataaaaaagtctctttggccgcgcaca

SEQ ID NO: 64296 - DNA, 719 bp, Homo sapiens
  chr2:171822422-171823141
  hypo
gagagctgctgtcttccctcccgcccaccagcaacgcaccctccgaccctgccacaactactgcaaaggcagacgctgcctcctcactcactgtggatgtgacgccccccactgccaaggcccccaccaccgttgaggacagagtcggcgactccaccccagtcagcgagaagcctgtttctgcggctgtggatgccaatgcttctgagtcaccttaactttgaaccattctttggaattggcgtggtatatttaaccacgggagcgtgtctggaaacgcaaactatcattaatttcatactagtttgtaccgtatctgtaggcatcctgtaaataattccaaggggaaaactaaacgaggacgtgggttgtatcctgccaggttgagtggggctcacacgctagggtgagatgtcagaaagcgcttgtattttaaacaaccaaaaagaattgtaagggtggcttgctgccaggcttgcactgccgttcctgggggtgtgcatcttcgggaaaggtggtggcggggcgtccactaggtttcctgtcccctgctgctccttccgtaagaaaatgaaatattctatgcctaatactcacacgcaacatttcttgtactttgtaagtcgtttgcgagaatgcagaccacctcactaaactgtaaacggtaaagagatttttacttttggtctccgtgagtcgcatctctactaaggtttaca

SEQ ID NO: 64297 - DNA, 17 bp, Homo sapiens
  chr2:171860859-171860876
  hypo
atcggaaaaaaaaaagc

SEQ ID NO: 64298 - DNA, 19 bp, Homo sapiens
  chr2:172129145-172129164
  hypo
tttttttttgagacagagt

SEQ ID NO: 64299 - DNA, 22 bp, Homo sapiens
  chr2:172178477-172178499
  hypo
ttttttttttttgatacgcagt

SEQ ID NO: 64300 - DNA, 25 bp, Homo sapiens
  chr2:172188767-172188792
  hypo
ttaataagttatttccacccccgcc

SEQ ID NO: 64301 - DNA, 25 bp, Homo sapiens
  chr2:172188911-172188936
  hypo
tcccgagtagctggaactacataca

SEQ ID NO: 64302 - DNA, 20 bp, Homo sapiens
  chr2:172192615-172192635
  hypo
tttttttttgagacaaagtt

SEQ ID NO: 64303 - DNA, 172 bp, Homo sapiens; identical to SEQ ID NO: 38195
  chr2:172378954-172379126
  hypo

SEQ ID NO: 64304 - DNA, 891 bp, Homo sapiens; identical to SEQ ID NO: 38196
  chr2:172379338-172380229
  hypo

SEQ ID NO: 64305 - DNA, 73 bp, Homo sapiens
  chr2:172411093-172411166
  hypo
tctgatcctggtgttcggggccctcattttttggatagtcaccagaccgcaatggaaacgtcctaaggagcca

SEQ ID NO: 64306 - DNA, 16 bp, Homo sapiens
  chr2:172778342-172778358
  hypo
cgcccggcctaggtaa

SEQ ID NO: 64307 - DNA, 30 bp, Homo sapiens
  chr2:172912439-172912469
  hypo
ggcgtgagccactgcgctcagccaaaatag

SEQ ID NO: 64308 - DNA, 21 bp, Homo sapiens
  chr2:173036682-173036703
  hypo
gtcaccgcgcccagcccaata

SEQ ID NO: 64309 - DNA, 62 bp, Homo sapiens; identical to SEQ ID NO: 16701
  chr2:173422679-173422741
  hypo

SEQ ID NO: 64310 - DNA, 101 bp, Homo sapiens; identical to SEQ ID NO: 16702
  chr2:173423967-173424068
  hypo

SEQ ID NO: 64311 - DNA, 30 bp, Homo sapiens
  chr2:173843280-173843310
  hypo
ctgagtgtgacaggcgtggaaaggtagggg

SEQ ID NO: 64312 - DNA, 45 bp, Homo sapiens
  chr2:173927295-173927340
  hypo
aaaaaatcacctccaataggccggtgcgttggctcacgcctgtaa

SEQ ID NO: 64313 - DNA, 320 bp, Homo sapiens; identical to SEQ ID NO: 38228
  chr2:173940415-173940735
  hypo

SEQ ID NO: 64314 - DNA, 22 bp, Homo sapiens
  chr2:174108654-174108676
  hypo
agatttacgtttttaacagatc

SEQ ID NO: 64315 - DNA, 142 bp, Homo sapiens
  chr2:174204827-174204969
  hypo
agcagtccctatgtcatcaggcgtccaatctttggtgactggaagtaggggagcagtatcacatggtgtcaaacgcagtgcttaagctgccagggatgggtattcagatgctgtcccgctcgggacaaaggtaaagaatgta

SEQ ID NO: 64316 - DNA, 30 bp, Homo sapiens
  chr2:174231926-174231956
  hypo
ggcagcgagatggacggtgtgcgactgggg

SEQ ID NO: 64317 - DNA, 218 bp, Homo sapiens; identical to SEQ ID NO: 1972
  chr2:174349950-174350168
  hypo

SEQ ID NO: 64318 - DNA, 160 bp, Homo sapiens
  chr2:174522466-174522626
  hypo
actgggtgacagagctagactccgtctcaaaaaaaaaataatcaatggatcatcatggtcgctgggagcttcgaagtttacaaaatgctcatcccatgccaccctggctcatttgctcatagctacaactcatgagggagtgggtcggtaggctggagat

SEQ ID NO: 64319 - DNA, 30 bp, Homo sapiens
  chr2:174731502-174731532
  hypo
caagcctactttcccgccctggagcaggtc

SEQ ID NO: 64320 - DNA, 30 bp, Homo sapiens; identical to SEQ ID NO: 16705
  chr2:174848652-174848682
  hypo

SEQ ID NO: 64321 - DNA, 85 bp, Homo sapiens; identical to SEQ ID NO: 16706
  chr2:174890779-174890864
  hypo

SEQ ID NO: 64322 - DNA, 30 bp, Homo sapiens; identical to SEQ ID NO: 16707
  chr2:174970629-174970659
  hypo

SEQ ID NO: 64323 - DNA, 30 bp, Homo sapiens; identical to SEQ ID NO: 16708
  chr2:175110638-175110668
  hypo

SEQ ID NO: 64324 - DNA, 73 bp, Homo sapiens
  chr2:175113857-175113930
  hypo
ttcctcgccttatagttaaagcgtcgcacacaggtactggatcacagaatgcgtttaattgagccaatttccc

SEQ ID NO: 64325 - DNA, 519 bp, Homo sapiens; identical to SEQ ID NO: 1981
  chr2:175199921-175200440
  hypo

SEQ ID NO: 64326 - DNA, 143 bp, Homo sapiens; identical to SEQ ID NO: 1982
  chr2:175200709-175200852
  hypo

SEQ ID NO: 64327 - DNA, 266 bp, Homo sapiens; identical to SEQ ID NO: 1983
  chr2:175200916-175201182
  hypo

SEQ ID NO: 64328 - DNA, 182 bp, Homo sapiens; identical to SEQ ID NO: 1984
  chr2:175201359-175201541
  hypo

SEQ ID NO: 64329 - DNA, 53 bp, Homo sapiens; identical to SEQ ID NO: 1985
  chr2:175201775-175201828
  hypo

SEQ ID NO: 64330 - DNA, 23 bp, Homo sapiens
  chr2:175218487-175218510
  hypo
ccggctcaattaagagctttaaa

SEQ ID NO: 64331 - DNA, 13 bp, Homo sapiens
  chr2:175255417-175255430
  hypo
gtatcgtgggagg

SEQ ID NO: 64332 - DNA, 5 bp, Homo sapiens
  chr2:175383935-175383940
  hypo
cacct

SEQ ID NO: 64333 - DNA, 36 bp, Homo sapiens; identical to SEQ ID NO: 16716
  chr2:175384179-175384215
  hypo

SEQ ID NO: 64334 - DNA, 30 bp, Homo sapiens; identical to SEQ ID NO: 16717
  chr2:175436394-175436424
  hypo

SEQ ID NO: 64335 - DNA, 1376 bp, Homo sapiens; identical to SEQ ID NO: 38259
  chr2:175546699-175548075
  hypo

SEQ ID NO: 64336 - DNA, 30 bp, Homo sapiens
  chr2:175584404-175584434
  hypo
cagggacaagagcccgtgatgtagagtttc

SEQ ID NO: 64337 - DNA, 30 bp, Homo sapiens; identical to SEQ ID NO: 16718
  chr2:175661546-175661576
  hypo

SEQ ID NO: 64338 - DNA, 31 bp, Homo sapiens; identical to SEQ ID NO: 16719
  chr2:175855047-175855078
  hypo

SEQ ID NO: 64339 - DNA, 287 bp, Homo sapiens
  chr2:175927665-175927952
  hypo
gctgcactctcctgctcgctctgccttcagggtcaccagcttaactctttccctctgggtgtaagcaagccgagctgtgtcctggctccctcttgccagtctgcaagacagacatctctggctttctctctctttctctgggcacgagcgcctgaacagtgtcagcagggcaattataccttttacagacaatagtagcgtaaagcccagtgatgaccttcccgtgttatgtacatagctgtgtttacattatacatggaattgtgcgcctgcgttccaatcctgct

SEQ ID NO: 64340 - DNA, 18 bp, Homo sapiens
  chr2:176026497-176026515
  hypo
tttttttttgagacaccg

SEQ ID NO: 64341 - DNA, 30 bp, Homo sapiens; identical to SEQ ID NO: 38262
  chr2:176494846-176494876
  hypo

SEQ ID NO: 64342 - DNA, 33 bp, Homo sapiens; identical to SEQ ID NO: 16722
  chr2:176569573-176569606
  hypo

SEQ ID NO: 64343 - DNA, 30 bp, Homo sapiens
  chr2:176862878-176862908
  hypo
gacagtaagcaggccgggtgcggtggctca

SEQ ID NO: 64344 - DNA, 390 bp, Homo sapiens; identical to SEQ ID NO: 2003
  chr2:176944456-176944846
  hypo

SEQ ID NO: 64345 - DNA, 131 bp, Homo sapiens; identical to SEQ ID NO: 2004
  chr2:176945137-176945268
  hypo

SEQ ID NO: 64346 - DNA, 52 bp, Homo sapiens; identical to SEQ ID NO: 2009
  chr2:176957576-176957628
  hypo

SEQ ID NO: 64347 - DNA, 694 bp, Homo sapiens; identical to SEQ ID NO: 38280
  chr2:176957914-176958608
  hypo

SEQ ID NO: 64348 - DNA, 65 bp, Homo sapiens; identical to SEQ ID NO: 16727
  chr2:177013794-177013859
  hypo

SEQ ID NO: 64349 - DNA, 30 bp, Homo sapiens; identical to SEQ ID NO: 38313
  chr2:177021872-177021902
  hypo

SEQ ID NO: 64350 - DNA, 30 bp, Homo sapiens; identical to SEQ ID NO: 38314
  chr2:177022107-177022137
  hypo

SEQ ID NO: 64351 - DNA, 14 bp, Homo sapiens
  chr2:177022548-177022562
  hypo
aaccggcccggctg

SEQ ID NO: 64352 - DNA, 30 bp, Homo sapiens; identical to SEQ ID NO: 38316
  chr2:177037295-177037325
  hypo

SEQ ID NO: 64353 - DNA, 331 bp, Homo sapiens; identical to SEQ ID NO: 38317
  chr2:177042471-177042802
  hypo

SEQ ID NO: 64354 - DNA, 297 bp, Homo sapiens; identical to SEQ ID NO: 2041
  chr2:177043266-177043563
  hypo

SEQ ID NO: 64355 - DNA, 762 bp, Homo sapiens; identical to SEQ ID NO: 38320
  chr2:177052672-177053434
  hypo

SEQ ID NO: 64356 - DNA, 84 bp, Homo sapiens; identical to SEQ ID NO: 2043
  chr2:177053618-177053702
  hypo

SEQ ID NO: 64357 - DNA, 91 bp, Homo sapiens; identical to SEQ ID NO: 16732
  chr2:177178832-177178923
  hypo

SEQ ID NO: 64358 - DNA, 91 bp, Homo sapiens
  chr2:177498055-177498146
  hypo
tgaattttgatatatagcctacgttatgaaagcttacctctttatggcttcaaccaggtgagtgtatggctccgggcttttcttttctttt

SEQ ID NO: 64359 - DNA, 1037 bp, Homo sapiens; identical to SEQ ID NO: 38326
  chr2:177502149-177503186
  hypo

SEQ ID NO: 64360 - DNA, 25 bp, Homo sapiens
  chr2:178089623-178089648
  hypo
ccagtttgggcgacagagcgagact

SEQ ID NO: 64361 - DNA, 31 bp, Homo sapiens
  chr2:178131779-178131810
  hypo
gctgtctttgggaagacggccttccctacat

SEQ ID NO: 64362 - DNA, 30 bp, Homo sapiens; identical to SEQ ID NO: 16734
  chr2:178133682-178133712
  hypo

SEQ ID NO: 64363 - DNA, 30 bp, Homo sapiens; identical to SEQ ID NO: 2047
  chr2:178257327-178257357
  hypo

SEQ ID NO: 64364 - DNA, 179 bp, Homo sapiens; identical to SEQ ID NO: 38330
  chr2:178257856-178258035
  hypo

SEQ ID NO: 64365 - DNA, 94 bp, Homo sapiens
  chr2:178586887-178586981
  hypo
aggcagccccagcctcgaaaccacatacatttacgtataagcctatgtccgtgagcaagaggttatactttccctgtaacgtcggacatgatta

SEQ ID NO: 64366 - DNA, 31 bp, Homo sapiens
  chr2:178627423-178627454
  hypo
gaaaatcctccaggcccgctcttcctcccag

SEQ ID NO: 64367 - DNA, 383 bp, Homo sapiens
  chr2:178936538-178936921
  hypo
accaattccagaaagaactgacgctcattatgctttttcagatggcacttgtagtcgatggctgtagggggataccgaggcagattcactctcgattccagcagcgcactgagaatatgggctgtggtggggggcagggagcttgccttccggagaagtgccctccgtcgtacactactcaggggttcctgagcccgggaggtcacctgttcatcgtaggtcctgttcacgtggatggccttggagcgggcaaaactcttccttagctctttctgagaagctctccgctgcaggttcccatcgcccctgctgccaccggcccagctgggactcaagggaaccccaccacagtccccgccaccgggaaggggctggctgtgggc

SEQ ID NO: 64368 - DNA, 188 bp, Homo sapiens
  chr2:178972991-178973179
  hypo
acctggccagagtccacgcctcaacttcgaggctggcgatccagaaagagcacctcacgccctgggctgcaagcgcagccggacgcgcgcgaccagtgatcgccagccaatggcaagccgggacccggtcccactgctgattggcccccagatcccgtgggatctcacctctcgcagaggcttaaagc

SEQ ID NO: 64369 - DNA, 31 bp, Homo sapiens; identical to SEQ ID NO: 16738
  chr2:179012822-179012853
  hypo

SEQ ID NO: 64370 - DNA, 31 bp, Homo sapiens; identical to SEQ ID NO: 16739
  chr2:179058447-179058478
  hypo

SEQ ID NO: 64371 - DNA, 33 bp, Homo sapiens; identical to SEQ ID NO: 16740
  chr2:179303694-179303727
  hypo

SEQ ID NO: 64372 - DNA, 31 bp, Homo sapiens; identical to SEQ ID NO: 2054
  chr2:179316144-179316175
  hypo

SEQ ID NO: 64373 - DNA, 310 bp, Homo sapiens; identical to SEQ ID NO: 38337
  chr2:179316376-179316686
  hypo

SEQ ID NO: 64374 - DNA, 30 bp, Homo sapiens
  chr2:179319696-179319726
  hypo
ggagctggacctggcggtccctttctgtgt

SEQ ID NO: 64375 - DNA, 31 bp, Homo sapiens
  chr2:179999949-179999980
  hypo
gtgagccaccgccccccggcccaaactgact

SEQ ID NO: 64376 - DNA, 32 bp, Homo sapiens
  chr2:180019920-180019952
  hypo
gtgtgagccatcgcatccggcccacaactctt

SEQ ID NO: 64377 - DNA, 81 bp, Homo sapiens
  chr2:180027693-180027774
  hypo
ggcaacagagcaagactccgtctcaaaaaaaaaaaaaaagaataaaggcaaataattgttgtctaacgagattgatatatt

SEQ ID NO: 64378 - DNA, 86 bp, Homo sapiens; identical to SEQ ID NO: 2056
  chr2:180129610-180129696
  hypo

SEQ ID NO: 64379 - DNA, 299 bp, Homo sapiens
  chr2:180886650-180886949
  hypo
cctctctcaccctggatattacgaacaacctcgcggggggtggtggtccataatatccgggtggggggagaggctgatatcactccccacatcgcgagggaggggatgtacaccgcccgccgccacgcgaggtggttcgtaatatccagtgggggagagggtgatatcacacccacatcgcggggggtgggagggcatgtacacaggatattatgttggttgaggttactgactctgaggcaaggcggccagaatatgtaccttggctctgccacttactgccccgtttgatcttgatc

SEQ ID NO: 64380 - DNA, 30 bp, Homo sapiens; identical to SEQ ID NO: 2058
  chr2:181179266-181179296
  hypo

SEQ ID NO: 64381 - DNA, 31 bp, Homo sapiens; identical to SEQ ID NO: 2061
  chr2:181846233-181846264
  hypo

SEQ ID NO: 64382 - DNA, 481 bp, Homo sapiens; identical to SEQ ID NO: 38347
  chr2:182321356-182321837
  hypo

SEQ ID NO: 64383 - DNA, 153 bp, Homo sapiens; identical to SEQ ID NO: 2063
  chr2:182322038-182322191
  hypo

SEQ ID NO: 64384 - DNA, 744 bp, Homo sapiens; identical to SEQ ID NO: 38349
  chr2:182322399-182323143
  hypo

SEQ ID NO: 64385 - DNA, 164 bp, Homo sapiens
  chr2:182413424-182413588
  hypo
ttaacaacagcaaaatctctccgttggttaggggacatccatcgatatttttctgccagagccaaagttcttccaccaaagccaaacatggctgagaacccaaagcgaagaagcttgccagcggtgctgaaggtgcagacgtcgaccagctgtacatgcccttg

SEQ ID NO: 64386 - DNA, 31 bp, Homo sapiens; identical to SEQ ID NO: 2069
  chr2:182756672-182756703
  hypo

SEQ ID NO: 64387 - DNA, 31 bp, Homo sapiens; identical to SEQ ID NO: 16751
  chr2:183587686-183587717
  hypo

SEQ ID NO: 64388 - DNA, 26 bp, Homo sapiens
  chr2:183865807-183865833
  hypo
gagacgctgtctcaaagaaagaaaaa

SEQ ID NO: 64389 - DNA, 105 bp, Homo sapiens; identical to SEQ ID NO: 38372
  chr2:183902296-183902401
  hypo

SEQ ID NO: 64390 - DNA, 567 bp, Homo sapiens; identical to SEQ ID NO: 2074
  chr2:183902442-183903009
  hypo

SEQ ID NO: 64391 - DNA, 601 bp, Homo sapiens; identical to SEQ ID NO: 38374
  chr2:183903037-183903638
  hypo

SEQ ID NO: 64392 - DNA, 31 bp, Homo sapiens
  chr2:183964790-183964821
  hypo
gaagatttgttgttcccgtctcttcaagaaa

SEQ ID NO: 64393 - DNA, 30 bp, Homo sapiens
  chr2:184122780-184122810
  hypo
agtttgggtgatcccgggaatatggcagca

SEQ ID NO: 64394 - DNA, 30 bp, Homo sapiens; identical to SEQ ID NO: 2077
  chr2:184857322-184857352
  hypo

SEQ ID NO: 64395 - DNA, 1570 bp, Homo sapiens; identical to SEQ ID NO: 38377
  chr2:185462254-185463824
  hypo

SEQ ID NO: 64396 - DNA, 93 bp, Homo sapiens
  chr2:185490892-185490985
  hypo
cccggatttcttaatatataatacttctaggacagggcaattttccaatttttctttgtaatctctagccccggttgttttgtttaattagta

SEQ ID NO: 64397 - DNA, 44 bp, Homo sapiens
  chr2:186081367-186081411
  hypo
gaaatatagctttattctggccgggcgcggtggctcatgcctgt

SEQ ID NO: 64398 - DNA, 30 bp, Homo sapiens
  chr2:187355304-187355334
  hypo
taatgagggaaaaccgtgacagcttctgcc

SEQ ID NO: 64399 - DNA, 285 bp, Homo sapiens; identical to SEQ ID NO: 2079
  chr2:187454989-187455274
  hypo

SEQ ID NO: 64400 - DNA, 28 bp, Homo sapiens
  chr2:190369395-190369423
  hypo
tttagggattatttaaataatcggaaaa

SEQ ID NO: 64401 - DNA, 30 bp, Homo sapiens; identical to SEQ ID NO: 16759
  chr2:190409988-190410018
  hypo

SEQ ID NO: 64402 - DNA, 30 bp, Homo sapiens
  chr2:190616056-190616086
  hypo
aaagggatgccttccggtactactaactca

SEQ ID NO: 64403 - DNA, 116 bp, Homo sapiens
  chr2:190686868-190686984
  hypo
gttgccgactgtggcgcgggcagtggaggaggaggcggggctggcgctgaagtcggatccggatccgttgctgtgcaccctggtcggggagagtccgatgcgcctgggtaggagca

SEQ ID NO: 64404 - DNA, 30 bp, Homo sapiens; identical to SEQ ID NO: 16760
  chr2:190703412-190703442
  hypo

SEQ ID NO: 64405 - DNA, 98 bp, Homo sapiens; identical to SEQ ID NO: 16761
  chr2:190703659-190703757
  hypo

SEQ ID NO: 64406 - DNA, 30 bp, Homo sapiens; identical to SEQ ID NO: 16762
  chr2:190704167-190704197
  hypo

SEQ ID NO: 64407 - DNA, 202 bp, Homo sapiens; identical to SEQ ID NO: 38391
  chr2:191044991-191045193
  hypo

SEQ ID NO: 64408 - DNA, 718 bp, Homo sapiens; identical to SEQ ID NO: 38392
  chr2:191045258-191045976
  hypo

SEQ ID NO: 64409 - DNA, 30 bp, Homo sapiens
  chr2:191301772-191301802
  hypo
ctgtctgtgggcatcgggatcgactacacc

SEQ ID NO: 64410 - DNA, 26 bp, Homo sapiens
  chr2:191374476-191374502
  hypo
attttccagctgggtgcggtggctca

SEQ ID NO: 64411 - DNA, 40 bp, Homo sapiens; identical to SEQ ID NO: 2093
  chr2:191513081-191513121
  hypo

SEQ ID NO: 64412 - DNA, 30 bp, Homo sapiens; identical to SEQ ID NO: 2095
  chr2:191728884-191728914
  hypo

SEQ ID NO: 64413 - DNA, 17 bp, Homo sapiens
  chr2:191793066-191793083
  hypo
ttttttttttttgagac

SEQ ID NO: 64414 - DNA, 121 bp, Homo sapiens; identical to SEQ ID NO: 16769
  chr2:191794488-191794609
  hypo

SEQ ID NO: 64415 - DNA, 217 bp, Homo sapiens
  chr2:191796738-191796955
  hypo
gttttaatatttgttcgtcctaaattgaagtttaacttcttgcatactgtgtagatggatatgtaaatggaaaaggattatcatattagtgagagaccgtatgaagcctcaaaagttttataagtcactgtagatgaaatatttttttccaccgtgtttaatgcaatattcctaataatcttacggtcctatttgtttgttacgagtttatttggct

SEQ ID NO: 64416 - DNA, 839 bp, Homo sapiens; identical to SEQ ID NO: 38406
  chr2:192109716-192110555
  hypo

SEQ ID NO: 64417 - DNA, 388 bp, Homo sapiens; identical to SEQ ID NO: 38407
  chr2:192110584-192110972
  hypo

SEQ ID NO: 64418 - DNA, 85 bp, Homo sapiens
  chr2:192342591-192342676
  hypo
caactagccttccccacgtgctatgtaaacatcatacctaatcaaactaatctatgagtcctatgaaaatcggacatcccctcct

SEQ ID NO: 64419 - DNA, 30 bp, Homo sapiens; identical to SEQ ID NO: 38410
  chr2:192587188-192587218
  hypo

SEQ ID NO: 64420 - DNA, 31 bp, Homo sapiens
  chr2:192746022-192746053
  hypo
tccacgaacttttcgtcgcatgccaggcctg

SEQ ID NO: 64421 - DNA, 146 bp, Homo sapiens
  chr2:192746554-192746700
  hypo
tccatgacttcctccccgttccgctgcccaaaaaaggcgtcaaacggatttttgccaccgaagaactcagcaaacatggcaagaggctctccatggaatgtgtagctgaaagaggtagcattggcaccaccgccgctaccgccact

SEQ ID NO: 64422 - DNA, 343 bp, Homo sapiens; identical to SEQ ID NO: 2103
  chr2:193058974-193059317
  hypo

SEQ ID NO: 64423 - DNA, 204 bp, Homo sapiens; identical to SEQ ID NO: 2104
  chr2:193059344-193059548
  hypo

SEQ ID NO: 64424 - DNA, 1231 bp, Homo sapiens; identical to SEQ ID NO: 2105
  chr2:193059661-193060892
  hypo

SEQ ID NO: 64425 - DNA, 31 bp, Homo sapiens; identical to SEQ ID NO: 16777
  chr2:194333178-194333209
  hypo

SEQ ID NO: 64426 - DNA, 43 bp, Homo sapiens
  chr2:196362208-196362251
  hypo
ttagaacctgttgtagctgggcgcggtggcccacgcctgtaat

SEQ ID NO: 64427 - DNA, 45 bp, Homo sapiens; identical to SEQ ID NO: 16778
  chr2:196402552-196402597
  hypo

SEQ ID NO: 64428 - DNA, 100 bp, Homo sapiens
  chr2:196411539-196411639
  hypo
ataaaagcagcctgaacccaaacggcaagcagtagcaagatttattgcaagaagcgaaacaacaaaccttccacaacgtggaagacgaccacagggagta

SEQ ID NO: 64429 - DNA, 41 bp, Homo sapiens
  chr2:196477242-196477283
  hypo
actctgtctggtgacagagcgagactccaactcaaaaataa

SEQ ID NO: 64430 - DNA, 321 bp, Homo sapiens; identical to SEQ ID NO: 2106
  chr2:197035641-197035962
  hypo

SEQ ID NO: 64431 - DNA, 90 bp, Homo sapiens
  chr2:197038937-197039027
  hypo
actgggagcgatgatcgttcccagtcactgcttaccacatgtggccagggaaggtgatcctctccggtaatggcacgacactcaccatat

SEQ ID NO: 64432 - DNA, 30 bp, Homo sapiens; identical to SEQ ID NO: 16780
  chr2:197094969-197094999
  hypo

SEQ ID NO: 64433 - DNA, 30 bp, Homo sapiens; identical to SEQ ID NO: 16781
  chr2:197095365-197095395
  hypo

SEQ ID NO: 64434 - DNA, 39 bp, Homo sapiens
  chr2:197095850-197095889
  hypo
ctagaccatacttttcccgattaaaatttcactttttga

SEQ ID NO: 64435 - DNA, 1378 bp, Homo sapiens; identical to SEQ ID NO: 38416
  chr2:197457191-197458569
  hypo

SEQ ID NO: 64436 - DNA, 31 bp, Homo sapiens
  chr2:197503798-197503829
  hypo
cacccttggcgacagaggaagaccctatctc

SEQ ID NO: 64437 - DNA, 16 bp, Homo sapiens
  chr2:197663622-197663638
  hypo
taaaaatttaaaaagg

SEQ ID NO: 64438 - DNA, 31 bp, Homo sapiens
  chr2:198252232-198252263
  hypo
ggtttttttttttttttgagacggagtttca

SEQ ID NO: 64439 - DNA, 30 bp, Homo sapiens; identical to SEQ ID NO: 2109
  chr2:198257066-198257096
  hypo

SEQ ID NO: 64440 - DNA, 122 bp, Homo sapiens; identical to SEQ ID NO: 2110
  chr2:198257785-198257907
  hypo

SEQ ID NO: 64441 - DNA, 30 bp, Homo sapiens; identical to SEQ ID NO: 2111
  chr2:198260933-198260963
  hypo

SEQ ID NO: 64442 - DNA, 26 bp, Homo sapiens
  chr2:198262503-198262529
  hypo
gagcgagactccgtctcaaaaaaaaa

SEQ ID NO: 64443 - DNA, 107 bp, Homo sapiens; identical to SEQ ID NO: 2112
  chr2:198262739-198262846
  hypo

SEQ ID NO: 64444 - DNA, 149 bp, Homo sapiens; identical to SEQ ID NO: 2113
  chr2:198265014-198265163
  hypo

SEQ ID NO: 64445 - DNA, 179 bp, Homo sapiens; identical to SEQ ID NO: 2114
  chr2:198265428-198265607
  hypo

SEQ ID NO: 64446 - DNA, 30 bp, Homo sapiens; identical to SEQ ID NO: 2115
  chr2:198266164-198266194
  hypo

SEQ ID NO: 64447 - DNA, 371 bp, Homo sapiens; identical to SEQ ID NO: 2116
  chr2:198266478-198266849
  hypo

SEQ ID NO: 64448 - DNA, 433 bp, Homo sapiens; identical to SEQ ID NO: 2117
  chr2:198267317-198267750
  hypo

SEQ ID NO: 64449 - DNA, 71 bp, Homo sapiens; identical to SEQ ID NO: 2118
  chr2:198268365-198268436
  hypo

SEQ ID NO: 64450 - DNA, 94 bp, Homo sapiens; identical to SEQ ID NO: 2119
  chr2:198269811-198269905
  hypo

SEQ ID NO: 64451 - DNA, 30 bp, Homo sapiens; identical to SEQ ID NO: 2120
  chr2:198270121-198270151
  hypo

SEQ ID NO: 64452 - DNA, 82 bp, Homo sapiens; identical to SEQ ID NO: 2121
  chr2:198272717-198272799
  hypo

SEQ ID NO: 64453 - DNA, 148 bp, Homo sapiens; identical to SEQ ID NO: 2122
  chr2:198273116-198273264
  hypo

SEQ ID NO: 64454 - DNA, 30 bp, Homo sapiens; identical to SEQ ID NO: 2123
  chr2:198274673-198274703
  hypo

SEQ ID NO: 64455 - DNA, 105 bp, Homo sapiens; identical to SEQ ID NO: 16798
  chr2:198276037-198276142
  hypo

SEQ ID NO: 64456 - DNA, 30 bp, Homo sapiens; identical to SEQ ID NO: 2124
  chr2:198285175-198285205
  hypo

SEQ ID NO: 64457 - DNA, 38 bp, Homo sapiens; identical to SEQ ID NO: 16800
  chr2:198317067-198317105
  hypo

SEQ ID NO: 64458 - DNA, 121 bp, Homo sapiens; identical to SEQ ID NO: 16801
  chr2:198456556-198456677
  hypo

SEQ ID NO: 64459 - DNA, 1046 bp, Homo sapiens; identical to SEQ ID NO: 38438
  chr2:198669112-198670158
  hypo

SEQ ID NO: 64460 - DNA, 929 bp, Homo sapiens; identical to SEQ ID NO: 38439
  chr2:200320440-200321369
  hypo

SEQ ID NO: 64461 - DNA, 30 bp, Homo sapiens; identical to SEQ ID NO: 2126
  chr2:200322551-200322581
  hypo

SEQ ID NO: 64462 - DNA, 30 bp, Homo sapiens; identical to SEQ ID NO: 38441
  chr2:200323753-200323783
  hypo

SEQ ID NO: 64463 - DNA, 31 bp, Homo sapiens
  chr2:200457172-200457203
  hypo
gaatgaacaggtgtgtcgttgcttctttcct

SEQ ID NO: 64464 - DNA, 30 bp, Homo sapiens
  chr2:200524604-200524634
  hypo
tgacctctacgcaacgggggtcatggaatg

SEQ ID NO: 64465 - DNA, 28 bp, Homo sapiens
  chr2:200807067-200807095
  hypo
gcgtgagctaccgcgcccggccagcctt

SEQ ID NO: 64466 - DNA, 58 bp, Homo sapiens
  chr2:200938956-200939014
  hypo
tcatcagaacccagaacgctgttttattcctgtcccctttctccgtctttctacctac

SEQ ID NO: 64467 - DNA, 30 bp, Homo sapiens; identical to SEQ ID NO: 16804
  chr2:200959336-200959366
  hypo

SEQ ID NO: 64468 - DNA, 24 bp, Homo sapiens
  chr2:201156841-201156865
  hypo
tccgtctcaaaagaacaaaaacaa

SEQ ID NO: 64469 - DNA, 30 bp, Homo sapiens
  chr2:201168278-201168308
  hypo
gcaagcgggaaatacggcattttgcaaaaa

SEQ ID NO: 64470 - DNA, 1254 bp, Homo sapiens; identical to SEQ ID NO: 38461
  chr2:201171094-201172348
  hypo

SEQ ID NO: 64471 - DNA, 31 bp, Homo sapiens; identical to SEQ ID NO: 2141
  chr2:201172568-201172599
  hypo

SEQ ID NO: 64472 - DNA, 30 bp, Homo sapiens; identical to SEQ ID NO: 16808
  chr2:201218933-201218963
  hypo

SEQ ID NO: 64473 - DNA, 238 bp, Homo sapiens
  chr2:201273759-201273997
  hypo
tatggcatgagagtcctttagcggggcagtcaagtgcagcttcaaacggtggcttaggtgttagcctgggctgtggcaatgaagtaaaaggctgtgtgaagctgcgccagaaacagcctctgcaaaacagccgctgcgggcgtgaattttatgagttctccgtatgcaaactactattagtcacgcattgattgatccattccttccaggagcatccgtcctcagaagcttggtttcc

SEQ ID NO: 64474 - DNA, 186 bp, Homo sapiens
  chr2:201281659-201281845
  hypo
aggggctttcttgaacactggcgtactgctctttgagaacaaagggaaggggattttactgtgtcccattcaaactggtttgctttcttgtcgagtcacaaagggcctgggatttctgggagctcgtgagatgcgtctgtgcatacacactagcaaaagtgtgccgctcctttcaaagtaactgtt

SEQ ID NO: 64475 - DNA, 21 bp, Homo sapiens
  chr2:201330741-201330762
  hypo
gagactctgtctcaaaacaaa

SEQ ID NO: 64476 - DNA, 324 bp, Homo sapiens
  chr2:201354839-201355163
  hypo
tcccgttctcagtccgcactcccaaggcacgggcagcttcgccgggaagcggcttgagggagttggcctgcctcgtggccgtgggggagggcaggcaaggcgcggtggcgcacagcggagtcctcttcagctttatcacccgctggggtgtaggcttcttgtcggagagtagcaccttagctggaggtaagtgcgtgcctccattttcagcgctcgcagccccaggggaagcctgaggatgcccaggtgcccccgtgcccaccagggccgtggctctggaaggtgcagagcgctgagctgcctttctgcggctaccactttgaa

SEQ ID NO: 64477 - DNA, 21 bp, Homo sapiens
  chr2:201389474-201389495
  hypo
ccaccgcgcccggctagcact

SEQ ID NO: 64478 - DNA, 31 bp, Homo sapiens; identical to SEQ ID NO: 16812
  chr2:201502745-201502776
  hypo

SEQ ID NO: 64479 - DNA, 340 bp, Homo sapiens
  chr2:201652445-201652785
  hypo
tgaccaatggctagtttctaacggccttcaccttcttcctacgccgcaaaccctaatacagtctccatccacggactcccctcctttacagcactgcgtctctcacatccccacgtctcattttccctccctgcttcttttgcatttctagatgcccagactcagtgagaactggcagcattaaaagcgccacctgtttagttcagtatctggagcccttcctccctgctgaaggaggagaggcacgtgaacattttgcatgctgccagacgcctggtttacccactcctctcgggcagttcactcccaaacactagccgttcaagatgaagcctgctca

SEQ ID NO: 64480 - DNA, 31 bp, Homo sapiens; identical to SEQ ID NO: 16814
  chr2:201691288-201691319
  hypo

SEQ ID NO: 64481 - DNA, 31 bp, Homo sapiens; identical to SEQ ID NO: 16815
  chr2:201712541-201712572
  hypo

SEQ ID NO: 64482 - DNA, 121 bp, Homo sapiens
  chr2:201809207-201809328
  hypo
tttgtgagcacacagagataggcagacattccaacacctcttggatgactcaacatgtctaataagcaccaggcacaatgcctagtacaagtacctgtcgcccaggagtacactggcgtga

SEQ ID NO: 64483 - DNA, 18 bp, Homo sapiens
  chr2:201966896-201966914
  hypo
taaagaataatttgttct

SEQ ID NO: 64484 - DNA, 95 bp, Homo sapiens
  chr2:202003518-202003613
  hypo
tacctcccatcagagccatcacgatggccaggtcggcctctgtcacagtgtccatgggggaggagatcagcggcgtcttcagagtgaccattggg

SEQ ID NO: 64485 - DNA, 258 bp, Homo sapiens
  chr2:202004688-202004946
  hypo
cagcgcagtgaacccgtcctcgaccacgtagccggtgctgctgctgataggtagtccctcatgctgccgcgagaccccgcgacccgacataaacgctgcagctgctgcgacgcggaggcgcgccgctgccacgctgcagccaggcgccgggtgggctgggtgggctgggggcgggggctgcggcagcggcggggcgggccagggcgccctatactccattcttcatgatgtttggtcgaagagtcatctgaaattttg

SEQ ID NO: 64486 - DNA, 30 bp, Homo sapiens
  chr2:202015887-202015917
  hypo
agtctcttctatctgcgcgtcaccattgct

SEQ ID NO: 64487 - DNA, 36 bp, Homo sapiens
  chr2:202119807-202119843
  hypo
cactttttatttttgttgagacggagtgtccctctg

SEQ ID NO: 64488 - DNA, 30 bp, Homo sapiens
  chr2:202136468-202136498
  hypo
gaaagttgtcagcacgagtgttacagatgt

SEQ ID NO: 64489 - DNA, 98 bp, Homo sapiens
  chr2:202261465-202261563
  hypo
gaaggcaggtagtatatactgcgtggagatactggacaaacggatgattcatatcctgggaagtatggagtaggatggcacaacatttcatcacgcta

SEQ ID NO: 64490 - DNA, 42 bp, Homo sapiens
  chr2:202270407-202270449
  hypo
aaagttctcagcaatttaggccgggcgcagtggctcacgcct

SEQ ID NO: 64491 - DNA, 27 bp, Homo sapiens
  chr2:202315117-202315144
  hypo
cagagcgagactctgtcttaaaaaaaa

SEQ ID NO: 64492 - DNA, 205 bp, Homo sapiens; identical to SEQ ID NO: 38481
  chr2:202644944-202645149
  hypo

SEQ ID NO: 64493 - DNA, 30 bp, Homo sapiens; identical to SEQ ID NO: 16817
  chr2:202848776-202848806
  hypo

SEQ ID NO: 64494 - DNA, 105 bp, Homo sapiens
  chr2:202888727-202888832
  hypo
ttcagggaacactcagggtatcgcgtgcccagccttctcagcacaagtgggcacaggctgtgagctgctgggcctggctgctgcgctgccatcagaacctgggaa

SEQ ID NO: 64495 - DNA, 44 bp, Homo sapiens
  chr2:202893411-202893455
  hypo
ttttttcctggagagtcgattgttaaacatttaccagcatacca

SEQ ID NO: 64496 - DNA, 1090 bp, Homo sapiens; identical to SEQ ID NO: 38484
  chr2:202898960-202900050
  hypo

SEQ ID NO: 64497 - DNA, 20 bp, Homo sapiens
  chr2:202900071-202900091
  hypo
cgaaccgggccgtgccaacg

SEQ ID NO: 64498 - DNA, 24 bp, Homo sapiens
  chr2:203068493-203068517
  hypo
tctttttttttttttttgagacgg

SEQ ID NO: 64499 - DNA, 81 bp, Homo sapiens
  chr2:203129281-203129362
  hypo
accgaaacagctcctcgtttctctcaaagtgaacatataattcatagagggttaacaaaataatatcgtgaagtttttccc

SEQ ID NO: 64500 - DNA, 46 bp, Homo sapiens
  chr2:203163326-203163372
  hypo
gcctgggcaacaagagcaaaactccgtctcaaaaaaagttcattca

SEQ ID NO: 64501 - DNA, 35 bp, Homo sapiens; identical to SEQ ID NO: 16819
  chr2:203250364-203250399
  hypo

SEQ ID NO: 64502 - DNA, 163 bp, Homo sapiens; identical to SEQ ID NO: 16820
  chr2:203431924-203432087
  hypo

SEQ ID NO: 64503 - DNA, 80 bp, Homo sapiens
  chr2:203467677-203467757
  hypo
caaggacaagatccatatttacggacagaaagccaacaaagaatacacagtagaaatggggccacggtggctcacgcctg

SEQ ID NO: 64504 - DNA, 170 bp, Homo sapiens
  chr2:203484418-203484588
  hypo
gaagatgaaaacgaacgcgtgggcagtaacaataacattgtacatctgatcatctcctagtagagtttctggttggtctagtcctgcttgaattaggaagcttaaggcggtgcctattatctccgctcttgcgccgaatagcaggtatagtgttccggtgactttgtggt

SEQ ID NO: 64505 - DNA, 34 bp, Homo sapiens
  chr2:203498544-203498578
  hypo
aaaaaggccttccaccaccgcgcaaagggaccca

SEQ ID NO: 64506 - DNA, 98 bp, Homo sapiens
  chr2:203621983-203622081
  hypo
agaagtagcagcacgcgcagcattgacacacagacgcctggtggggcagacaggggaagcaacaacagcagccgttcccagtccgtgtccccaacatc

SEQ ID NO: 64507 - DNA, 35 bp, Homo sapiens
  chr2:203880464-203880499
  hypo
gcgtgagccaccgcgcctggccccaacaactttga

SEQ ID NO: 64508 - DNA, 46 bp, Homo sapiens
  chr2:204055397-204055443
  hypo
tcttaagaatcaaattgctctcggctttcggctcggaggaggccaa

SEQ ID NO: 64509 - DNA, 33 bp, Homo sapiens
  chr2:204190591-204190624
  hypo
ctttgatttctctttctttttcgagacagagcc

SEQ ID NO: 64510 - DNA, 32 bp, Homo sapiens
  chr2:204206112-204206144
  hypo
agcattagaaaatgtcggagggcagtgaaata

SEQ ID NO: 64511 - DNA, 82 bp, Homo sapiens; identical to SEQ ID NO: 2152
  chr2:204399881-204399963
  hypo

SEQ ID NO: 64512 - DNA, 40 bp, Homo sapiens
  chr2:204475584-204475624
  hypo
tattatctttacttatcatagcgacattaaaaggtagata

SEQ ID NO: 64513 - DNA, 30 bp, Homo sapiens; identical to SEQ ID NO: 16825
  chr2:205130909-205130939
  hypo

SEQ ID NO: 64514 - DNA, 24 bp, Homo sapiens
  chr2:205341736-205341760
  hypo
taggaaagtaacaggccgggcgcg

SEQ ID NO: 64515 - DNA, 17 bp, Homo sapiens
  chr2:205861813-205861830
  hypo
atcttggctcctcccct

SEQ ID NO: 64516 - DNA, 30 bp, Homo sapiens
  chr2:205984017-205984047
  hypo
tggggcgtcgttgaacgggtttgtttttct

SEQ ID NO: 64517 - DNA, 35 bp, Homo sapiens; identical to SEQ ID NO: 16827
  chr2:205984486-205984521
  hypo

SEQ ID NO: 64518 - DNA, 31 bp, Homo sapiens; identical to SEQ ID NO: 2155
  chr2:206166172-206166203
  hypo

SEQ ID NO: 64519 - DNA, 45 bp, Homo sapiens
  chr2:206166493-206166538
  hypo
tgtactcagaaaaaagcgcacgcttttcctcgtcttcagccaaat

SEQ ID NO: 64520 - DNA, 317 bp, Homo sapiens; identical to SEQ ID NO: 38500
  chr2:206546582-206546899
  hypo

SEQ ID NO: 64521 - DNA, 150 bp, Homo sapiens
  chr2:206586381-206586531
  hypo
caggatgcctccatgcgtcccaagaaagcagacgcaagagctcaggagagaaacaaggccatccacaccacaaaggagccagaagccttccaaatgtcaatgcactgctgcatttttccaaacttgttgccggagcggcctttaacatcc

SEQ ID NO: 64522 - DNA, 38 bp, Homo sapiens
  chr2:206605354-206605392
  hypo
tccggctggagctcttcggctgccgggtcacaggtgag

SEQ ID NO: 64523 - DNA, 177 bp, Homo sapiens
  chr2:206608211-206608388
  hypo
tctcctacagcctaaacggcaaggactgggaatacattcaggaccccaggacccagcagccaaaggtaggctgttcttggaggcctctgtaacgttaccctcaacagggaggctaagtgtggtacagggagttgagactgatgatgtcccatctaaacagtcgtcatccaactcctg

SEQ ID NO: 64524 - DNA, 89 bp, Homo sapiens
  chr2:206609769-206609858
  hypo
actcctgtccttcccccggatgagtgtctccaagtgtactctaggctggtcctccaaagcagccccctgctccccgcatcatcagtttt

SEQ ID NO: 64525 - DNA, 154 bp, Homo sapiens
  chr2:206826959-206827113
  hypo
ctgcccctgctgctttcggagttgaacccagtctctctgactgcacgacctggttgcagtggtccctgtacctatcacgatggtgctgaatatagtcttccttaccatgccttaccaagtgtcattgaataatatttttctgtttttgagacag

SEQ ID NO: 64526 - DNA, 147 bp, Homo sapiens; identical to SEQ ID NO: 16832
  chr2:206830586-206830733
  hypo

SEQ ID NO: 64527 - DNA, 27 bp, Homo sapiens
  chr2:206830792-206830819
  hypo
gtgaccgctgctgtggtgggggaactg

SEQ ID NO: 64528 - DNA, 28 bp, Homo sapiens
  chr2:206889972-206890000
  hypo
cacgcatggtagctcacgcctgtaatcc

SEQ ID NO: 64529 - DNA, 149 bp, Homo sapiens; identical to SEQ ID NO: 16835
  chr2:206890497-206890646
  hypo

SEQ ID NO: 64530 - DNA, 140 bp, Homo sapiens
  chr2:206896303-206896443
  hypo
ccctgcctgcctcctgtgctgcgcagcacttgcgggtgccccagatggcactttacccctaggactggcttaaaatagtggagtgatcatcatggccgatgagaggcaggactggattgcagctccaactcggacagaca

SEQ ID NO: 64531 - DNA, 24 bp, Homo sapiens
  chr2:206970535-206970559
  hypo
catgtaagaatataactggaccga

SEQ ID NO: 64532 - DNA, 42 bp, Homo sapiens
  chr2:206971200-206971242
  hypo
gaggatcttttttttttgagacggagtcttgctctgtcgccc

SEQ ID NO: 64533 - DNA, 42 bp, Homo sapiens
  chr2:206971481-206971523
  hypo
ggcgtgagccaccacgcgcccggcctaagaggatctatttag

SEQ ID NO: 64534 - DNA, 44 bp, Homo sapiens; identical to SEQ ID NO: 16836
  chr2:207021943-207021987
  hypo

SEQ ID NO: 64535 - DNA, 81 bp, Homo sapiens
  chr2:207068387-207068468
  hypo
aaacctgcagtcttgtaagtacgccattttcccgagttctccgatctgatctagcgaactaatgaatgtgaggggcggtcg

SEQ ID NO: 64536 - DNA, 38 bp, Homo sapiens
  chr2:207068776-207068814
  hypo
aataaatgtgcaatatcaggccgggcgcagtggctcac

SEQ ID NO: 64537 - DNA, 972 bp, Homo sapiens; identical to SEQ ID NO: 38510
  chr2:207139217-207140189
  hypo

SEQ ID NO: 64538 - DNA, 3 bp, Homo sapiens
  chr2:207307474-207307477
  hypo
tcc

SEQ ID NO: 64539 - DNA, 126 bp, Homo sapiens; identical to SEQ ID NO: 2160
  chr2:207307547-207307673
  hypo

SEQ ID NO: 64540 - DNA, 1517 bp, Homo sapiens; identical to SEQ ID NO: 2161
  chr2:207307712-207309229
  hypo

SEQ ID NO: 64541 - DNA, 31 bp, Homo sapiens
  chr2:207395272-207395303
  hypo
gagcttgcagtgagccgagatcgcactactg

SEQ ID NO: 64542 - DNA, 30 bp, Homo sapiens
  chr2:207666259-207666289
  hypo
tcccatctccaacacgttttcaactgtggt

SEQ ID NO: 64543 - DNA, 30 bp, Homo sapiens
  chr2:207988636-207988666
  hypo
ctgtccactcttaacggcccccgcagccgt

SEQ ID NO: 64544 - DNA, 30 bp, Homo sapiens; identical to SEQ ID NO: 16841
  chr2:208331964-208331994
  hypo

SEQ ID NO: 64545 - DNA, 19 bp, Homo sapiens
  chr2:208372101-208372120
  hypo
ctgtcttgccgtgcgcggt

SEQ ID NO: 64546 - DNA, 31 bp, Homo sapiens; identical to SEQ ID NO: 2164
  chr2:208395299-208395330
  hypo

SEQ ID NO: 64547 - DNA, 48 bp, Homo sapiens; identical to SEQ ID NO: 16843
  chr2:208410313-208410361
  hypo

SEQ ID NO: 64548 - DNA, 241 bp, Homo sapiens; identical to SEQ ID NO: 16844
  chr2:208574935-208575176
  hypo

SEQ ID NO: 64549 - DNA, 42 bp, Homo sapiens
  chr2:208577541-208577583
  hypo
agttgtttttttgagacggaatctcgttttgtcgcccgccca

SEQ ID NO: 64550 - DNA, 30 bp, Homo sapiens
  chr2:208578996-208579026
  hypo
aagtttattttacacgattcagaggcaaca

SEQ ID NO: 64551 - DNA, 156 bp, Homo sapiens; identical to SEQ ID NO: 16845
  chr2:208580709-208580865
  hypo

SEQ ID NO: 64552 - DNA, 26 bp, Homo sapiens
  chr2:208588309-208588335
  hypo
ccttgctgggctgggcgcggtgactc

SEQ ID NO: 64553 - DNA, 17 bp, Homo sapiens
  chr2:208594468-208594485
  hypo
atccatactggagtgca

SEQ ID NO: 64554 - DNA, 16 bp, Homo sapiens
  chr2:208609390-208609406
  hypo
gccaggaagaagtttt

SEQ ID NO: 64555 - DNA, 30 bp, Homo sapiens; identical to SEQ ID NO: 16847
  chr2:208613160-208613190
  hypo

SEQ ID NO: 64556 - DNA, 138 bp, Homo sapiens
  chr2:208622062-208622200
  hypo
agcctgagcgacagcatgagactgtgtctcaaaaaaacaaaaactaactgatcactgtgtcttgataagttgccgactaggataaaagatctaacttaggaaaaaaatctatcatacgtcactttataagatggtttg

SEQ ID NO: 64557 - DNA, 31 bp, Homo sapiens; identical to SEQ ID NO: 16849
  chr2:208623136-208623167
  hypo

SEQ ID NO: 64558 - DNA, 27 bp, Homo sapiens
  chr2:208662164-208662191
  hypo
aaacttcaagaatttagtggccgggca

SEQ ID NO: 64559 - DNA, 30 bp, Homo sapiens; identical to SEQ ID NO: 16850
  chr2:208688759-208688789
  hypo

SEQ ID NO: 64560 - DNA, 69 bp, Homo sapiens
  chr2:208692451-208692520
  hypo
atcggctctgcttacgtgattccccgcctccacaggaggaactgaggcgggagcgccacggacaccagg

SEQ ID NO: 64561 - DNA, 30 bp, Homo sapiens; identical to SEQ ID NO: 16852
  chr2:208798586-208798616
  hypo

SEQ ID NO: 64562 - DNA, 31 bp, Homo sapiens; identical to SEQ ID NO: 16853
  chr2:208969265-208969296
  hypo

SEQ ID NO: 64563 - DNA, 30 bp, Homo sapiens; identical to SEQ ID NO: 16854
  chr2:208975111-208975141
  hypo

SEQ ID NO: 64564 - DNA, 31 bp, Homo sapiens
  chr2:208983457-208983488
  hypo
gcaagactccgtctcaaaaacaaaaacaaaa

SEQ ID NO: 64565 - DNA, 31 bp, Homo sapiens
  chr2:208994120-208994151
  hypo
acagtggggactctggcggcatgatggaaat

SEQ ID NO: 64566 - DNA, 151 bp, Homo sapiens
  chr2:208994584-208994735
  hypo
caggatggctgctgcgttggcaagaacaacacaaaaggggccctcagcggtaaggggattttatgcatctctttaacatcctgcattcactggaaatgattgtagattgtgtccttgttctctggtatattctaacgctgtcctgtacata

SEQ ID NO: 64567 - DNA, 20 bp, Homo sapiens
  chr2:209038329-209038349
  hypo
gagagcgagactccatctca

SEQ ID NO: 64568 - DNA, 44 bp, Homo sapiens
  chr2:209094645-209094689
  hypo
aaaaaggatgcaggctgggggcggtggctcacgcctgtaatccc

SEQ ID NO: 64569 - DNA, 30 bp, Homo sapiens; identical to SEQ ID NO: 2168
  chr2:209101844-209101874
  hypo

SEQ ID NO: 64570 - DNA, 30 bp, Homo sapiens; identical to SEQ ID NO: 2169
  chr2:209103912-209103942
  hypo

SEQ ID NO: 64571 - DNA, 30 bp, Homo sapiens; identical to SEQ ID NO: 2170
  chr2:209104621-209104651
  hypo

SEQ ID NO: 64572 - DNA, 79 bp, Homo sapiens; identical to SEQ ID NO: 2171
  chr2:209108239-209108318
  hypo

SEQ ID NO: 64573 - DNA, 309 bp, Homo sapiens; identical to SEQ ID NO: 2172
  chr2:209113080-209113389
  hypo

SEQ ID NO: 64574 - DNA, 153 bp, Homo sapiens; identical to SEQ ID NO: 38530
  chr2:209118760-209118913
  hypo

SEQ ID NO: 64575 - DNA, 31 bp, Homo sapiens; identical to SEQ ID NO: 16863
  chr2:209137007-209137038
  hypo

SEQ ID NO: 64576 - DNA, 930 bp, Homo sapiens
  chr2:209224957-209225887
  hypo
aacaggtaagaagagcgccccacttgttctcccgccttctgcgtgagcagcccctacggggtctcctactggtccctaggaactttcgccacacccggagcggcggcctccccgagcccctcggggccccttccctggcagctgggatgagggcagcgtgctcctcgcaggttacttggtcctgaggtcctccctcaggcgctgggcatgcctggggcgcagaaccgcagctctgggccagacccggctgagactgtgcttgtgcggcgagtggaggccgctcccggggccctgccgccctctcgctcgctcggggctctggagtctggcgggccgcaagccgcgctgccggctctacctggctttgtccatccagccacccaccaagcgccagggtaaaacagcacccggaagcagtcgtcgcctgctgccaccaggctgccttctgtggtgaaggtgggggccagggttgcaaggccctcctcttgttggcatcagccaggcacgcagtgctgtcgtggctgacccaggccgtgaggcacccgctgactgagaagccaacctgagcacccagccgcacctaccgctggcctcagacatcagcaccccaaagggtatgttggagtcccatggtggaggtgccggccgctcctccacgcacttgatgtataccgaggatcccatgcttgacgtcgcagggggcattagccaggagcacgttgctgggatgccagtccaggctgaggatggtggagccaatgggcttcttgatgtacttgcacacccaccagttattctcccgctggaaataacagatggcgatgacacacagctgccgcccacagcaaacttgtcctgtgggcccagcacacacagcaggcagtgggtgcgggcttaccctcctggcccgtcagcgtccacacagaggcc

SEQ ID NO: 64577 - DNA, 30 bp, Homo sapiens; identical to SEQ ID NO: 2174
  chr2:210051601-210051631
  hypo

SEQ ID NO: 64578 - DNA, 301 bp, Homo sapiens
  chr2:210673259-210673560
  hypo
aaaaaaaagtaaggcgggcccaggctgctactgcgcgagcccagccaggcccggcccacttgctcagagcgtggccttagggggaggcacgcctccaattggcgcgaaagtgataaagaggcgtggccggaaaggtcccaccctgctcccctggagtacttaagggagttggcggagcggctgcactcattgctccaaggctcggcctagtgagtgggtcgcctgcgctacttctgcgctactcagcgacctcgttgcctctgccaccatgccgcgctctttcctcgtcaggaagctccct

SEQ ID NO: 64579 - DNA, 42 bp, Homo sapiens
  chr2:211055939-211055981
  hypo
gtggcttttttgatattaggcgatatatgggaagagaaatag

SEQ ID NO: 64580 - DNA, 30 bp, Homo sapiens; identical to SEQ ID NO: 2182
  chr2:212452337-212452367
  hypo

SEQ ID NO: 64581 - DNA, 17 bp, Homo sapiens
  chr2:216132271-216132288
  hypo
tccgtcacaagaaaaaa

SEQ ID NO: 64582 - DNA, 30 bp, Homo sapiens
  chr2:216195134-216195164
  hypo
aatttccatataccccgcttccccgcagtt

SEQ ID NO: 64583 - DNA, 38 bp, Homo sapiens; identical to SEQ ID NO: 16868
  chr2:216196376-216196414
  hypo

SEQ ID NO: 64584 - DNA, 20 bp, Homo sapiens
  chr2:216808264-216808284
  hypo
ataaaatgccaagggcttgg

SEQ ID NO: 64585 - DNA, 19 bp, Homo sapiens
  chr2:216808583-216808602
  hypo
agagcgaaaggcttttgga

SEQ ID NO: 64586 - DNA, 83 bp, Homo sapiens
  chr2:216824990-216825073
  hypo
acaataggtatctataatgtctcctttatcaccagagtataggctacctgaccacaagaaccgggattcgcccaggtcctaac

SEQ ID NO: 64587 - DNA, 31 bp, Homo sapiens; identical to SEQ ID NO: 38547
  chr2:216826037-216826068
  hypo

SEQ ID NO: 64588 - DNA, 46 bp, Homo sapiens
  chr2:216852231-216852277
  hypo
tgctgggattacaggcgttagccaccatacccggcaacataagcaa

SEQ ID NO: 64589 - DNA, 184 bp, Homo sapiens
  chr2:216885425-216885609
  hypo
tggtaataacagctagcgatgcactgtttcaagcatggtgtgtgtatccaaggaggaccgccatctagaatggacagaaaggaccccacaaggaatagtcctgttgggccaaagccccgcaaaacacactacaggagctctctgcaagaggaacgtcagactcccactgcgtcccttaaaaatt

SEQ ID NO: 64590 - DNA, 31 bp, Homo sapiens
  chr2:216913503-216913534
  hypo
tgcagtgagctatgatcgtgacactatactt

SEQ ID NO: 64591 - DNA, 25 bp, Homo sapiens
  chr2:216949850-216949875
  hypo
gacaggtgcgcgctgccacgcctga

SEQ ID NO: 64592 - DNA, 42 bp, Homo sapiens; identical to SEQ ID NO: 2185
  chr2:217008384-217008426
  hypo

SEQ ID NO: 64593 - DNA, 30 bp, Homo sapiens; identical to SEQ ID NO: 2186
  chr2:217236025-217236055
  hypo

SEQ ID NO: 64594 - DNA, 487 bp, Homo sapiens; identical to SEQ ID NO: 38551
  chr2:217236410-217236897
  hypo

SEQ ID NO: 64595 - DNA, 30 bp, Homo sapiens
  chr2:217417251-217417281
  hypo
aagatggcaccatacggccagatgcggtgg

SEQ ID NO: 64596 - DNA, 57 bp, Homo sapiens; identical to SEQ ID NO: 16875
  chr2:217472020-217472077
  hypo

SEQ ID NO: 64597 - DNA, 17 bp, Homo sapiens
  chr2:217488116-217488133
  hypo
accgcgcccggccggaa

SEQ ID NO: 64598 - DNA, 31 bp, Homo sapiens; identical to SEQ ID NO: 16877
  chr2:217528923-217528954
  hypo

SEQ ID NO: 64599 - DNA, 581 bp, Homo sapiens; identical to SEQ ID NO: 2191
  chr2:217558851-217559432
  hypo

SEQ ID NO: 64600 - DNA, 222 bp, Homo sapiens; identical to SEQ ID NO: 16879
  chr2:217674465-217674687
  hypo

SEQ ID NO: 64601 - DNA, 212 bp, Homo sapiens
  chr2:217674953-217675165
  hypo
agagcagaggagcgacgctctggtgtgggcagcccgagaggtgatggggtttcagtaaatcatggcggggagttcaggccaccgccggagtccagtgggtagggctctctacggccggaggtggctgtgggggagacgggcgggaggcccagaccggcagggagctttctgcagggaagctggaaggatggtggggccggtaacccaacatg

SEQ ID NO: 64602 - DNA, 202 bp, Homo sapiens; identical to SEQ ID NO: 16880
  chr2:217690997-217691199
  hypo

SEQ ID NO: 64603 - DNA, 30 bp, Homo sapiens; identical to SEQ ID NO: 16881
  chr2:217724851-217724881
  hypo

SEQ ID NO: 64604 - DNA, 406 bp, Homo sapiens
  chr2:217751662-217752068
  hypo
gctcctgctggtgactcctgacggccatgagcaccaggaccctgagaagccgtgtttgaaaggtacctggttttctttgcttagccgtacttgacttttctttgagaagcacctgtttaacattcctggcgattaggctccacatcaagttcttccttatattgaaataaaagctgttgtctcgtagcattctccaccatggagggttcttgtttgctgtatgttgggtctctttcctggtagaatttaatctccacgagagcagggactttgcttaatttagaacagtgctttgcacacagtggacgataaacattggtttagtgacggtatctaagtgatctgcgtgctgggaaaggcagccgtttgtcccgtgcctttcctcgtgccatccctctcaccagga

SEQ ID NO: 64605 - DNA, 30 bp, Homo sapiens; identical to SEQ ID NO: 38562
  chr2:217905816-217905846
  hypo

SEQ ID NO: 64606 - DNA, 30 bp, Homo sapiens; identical to SEQ ID NO: 38563
  chr2:218296492-218296522
  hypo

SEQ ID NO: 64607 - DNA, 174 bp, Homo sapiens
  chr2:218664491-218664665
  hypo
aacacagatagataacggcacagagttttctttaactttatcatttataaagccatacaatgcattgcaaagaaacaaagcagctgtacaggagtggggacgcgtcagtgtacaatacattcatgtccaggataaggagcatacaccaggatttatacacggtggcagcggcta

SEQ ID NO: 64608 - DNA, 195 bp, Homo sapiens
  chr2:218665146-218665341
  hypo
acaggcctcacctcccgactcccctcactgctgggcgacattgaatttgaagttccattgcccagcacctccaaccccgactcccaagttccctaaagaaatgagcaaaacacacgcacacacatacatccacacttgcacatgcgcacacacgtcctgtgttaccactggccaaggaaacgcgagtctcaggat

SEQ ID NO: 64609 - DNA, 47 bp, Homo sapiens; identical to SEQ ID NO: 16882
  chr2:218676419-218676466
  hypo

SEQ ID NO: 64610 - DNA, 135 bp, Homo sapiens
  chr2:218678420-218678555
  hypo
ctgcatgatggttggaggtggcgaagacaccttcatggccagcccgtacgcgcctcggaaggagtgactgtcgcggatgatgaaggcccccggctcctggtccttgaggagcgcgatggctgcatggggaaggga

SEQ ID NO: 64611 - DNA, 862 bp, Homo sapiens; identical to SEQ ID NO: 16884
  chr2:218682481-218683343
  hypo

SEQ ID NO: 64612 - DNA, 155 bp, Homo sapiens; identical to SEQ ID NO: 16885
  chr2:218686228-218686383
  hypo

SEQ ID NO: 64613 - DNA, 30 bp, Homo sapiens; identical to SEQ ID NO: 16886
  chr2:218686608-218686638
  hypo

SEQ ID NO: 64614 - DNA, 264 bp, Homo sapiens
  chr2:218697818-218698082
  hypo
gcctggcctcagagacggtcattcatggaataaccacgaagcagccccagcccacaggtacgcgcatgtttaaccaactggtgcagcggaggcgcaggtgggcccgtgaggaggtgaagcggacgagaggaccagacagggcaggagctctctcttggttcctcccttgttcacctccagctcctgaattcctcgttcccccagttcctgggcaattgggcccttctgctgaggcagatgagtgggcgacgctaaagccaggca

SEQ ID NO: 64615 - DNA, 30 bp, Homo sapiens
  chr2:218698418-218698448
  hypo
cgagccacacatggccgcagagccgttgca

SEQ ID NO: 64616 - DNA, 69 bp, Homo sapiens
  chr2:218700731-218700800
  hypo
actcacctctttgggccgccctccaggattgagagcgatggtaagagccagctccggggagacacactg

SEQ ID NO: 64617 - DNA, 30 bp, Homo sapiens
  chr2:218704041-218704071
  hypo
gggctgcttcatacacgggcatcaggcctt

SEQ ID NO: 64618 - DNA, 309 bp, Homo sapiens
  chr2:218704292-218704601
  hypo
actcacacgcacactcgcacaccctgcaattctgggagctgtagccctgacacagaccgatacatgtactttggcaaagcactgctgcccaccacccctggatcacgtgacgagtaccctggtgtcaggcttcatgatgtgcctcctctgcaccccccagactggccactgccaccctcacagacccagctcttctttccagtcttccgatttccaaaagactggattcctcaggtccaggtagcagggctgggtgtccgacagcatgcctggggctccagaagcgaggggatccgggaggccacctgc

SEQ ID NO: 64619 - DNA, 1079 bp, Homo sapiens
  chr2:218712678-218713757
  hypo
tgtagtggggcagcagcggaggctggctccaggtccagcatcagcatattgagtgtttcgatggactgttcaatctcctgctgggaggctgctcgcgggaactcagggagactggggatgggggtctctgccaatggctgagggctgggcctgctggctacaagactctccaagtgggctctttcctgctggcgtggaggtgggcgaggctgctgctgctgctgctgctgctgctgccacgaattcagtcccctttgcacagcctcccggctgcttccccctcggaccggagctgggggcagctggggttcagcttccgaaaaggattgagagcggaacataccgctggggtcatgggcatagtgggaggtggtcactggctgtggccaggctgggtggggcccctccctctggtagccagctaaaccctcctgtgcagagtaggagggccgcatgggggccgtgtggccagcatgggcaggccccgcccggctggcagactcgtaggggtagcctcctccattgaccataggctccatggggtaggacttgtccagaccgttggtcagtggggacagggcctctgggtagcccccctcactggtgttggtgaccccgtccagagaagagagtgtgcccatgctgcccgcactgtgaccatcctggtttggcaattcatcgtccaggatgtctgtctcccgctcagatgctaacgccccaccattgacatgaacctgggctgggacaacgtggcgtccagaggagggcacagccgagccccctgctgggcgggacctgaggtgctgggtgtggtacatggcgccttgcttctctcgctctaagccaaagccactcagcaggcggtccagctcccgcttctcctggggactcaaggcagcagtggcactggaggccccggggacaggctcgtcggtcttgtcggtcttggtggaggctgtggagttgcccgagtcgctgctcacagaaagcgtgtgttccacgtggttgggggtggccgacagtgtaggacgtgtggcattaacagccccggtgctgccgtgcagggagtctttcttctt

SEQ ID NO: 64620 - DNA, 31 bp, Homo sapiens
  chr2:218738051-218738082
  hypo
ggaattgtggagagcacggtgtttggtggca

SEQ ID NO: 64621 - DNA, 47 bp, Homo sapiens
  chr2:218749829-218749876
  hypo
gcacacggaagatgacgtctcgggctgggcttcggaacttcttgtgg

SEQ ID NO: 64622 - DNA, 203 bp, Homo sapiens; identical to SEQ ID NO: 16892
  chr2:218757380-218757583
  hypo

SEQ ID NO: 64623 - DNA, 201 bp, Homo sapiens; identical to SEQ ID NO: 16893
  chr2:218765457-218765658
  hypo

SEQ ID NO: 64624 - DNA, 98 bp, Homo sapiens
  chr2:218819723-218819821
  hypo
ctcatgagctccacccaacagcggctgggtgcaggtacccacgggctgtctgggcagccagagccggacaggtgtccgccatagtccccagggggtta

SEQ ID NO: 64625 - DNA, 31 bp, Homo sapiens
  chr2:219016358-219016389
  hypo
tgttcctcaggtactgcgggaggcctgacac

SEQ ID NO: 64626 - DNA, 45 bp, Homo sapiens
  chr2:219080905-219080950
  hypo
cagatgtagcacaacgatgagttaagattccgcacgcaggtaaca

SEQ ID NO: 64627 - DNA, 30 bp, Homo sapiens
  chr2:219128068-219128098
  hypo
cgcgatgagccctccgccctggcccgggcc

SEQ ID NO: 64628 - DNA, 112 bp, Homo sapiens
  chr2:219129430-219129542
  hypo
ccctagtgcctagcactgggccgacatctctgcagccagcatggaggggattagaggaagcccccagcacgggagaagcagagctgactccgatggggaaaatcagtctcag

SEQ ID NO: 64629 - DNA, 30 bp, Homo sapiens
  chr2:219131099-219131129
  hypo
ggaggtgtatatcccgggattcggcctctg

SEQ ID NO: 64630 - DNA, 139 bp, Homo sapiens
  chr2:219145222-219145361
  hypo
ggagggcggcagagcgcagtttgtgcagcagcagggatagaggtgaagacagggatctgcatcagcctcacagaggcaggtgtgcaaagggtgtgcgtgactgtgcaggacccatgcgcagatccgcaccagcgcacat

SEQ ID NO: 64631 - DNA, 30 bp, Homo sapiens; identical to SEQ ID NO: 38566
  chr2:219154765-219154795
  hypo

SEQ ID NO: 64632 - DNA, 90 bp, Homo sapiens
  chr2:219204241-219204331
  hypo
cctggcctctccaattttcttctgtgagttcctcagttcatgtctccctgatagattttgagttctaggtgtgtccgtctcattctccat

SEQ ID NO: 64633 - DNA, 31 bp, Homo sapiens
  chr2:219205429-219205460
  hypo
caaacctcctctctctcgcaggcttccattg

SEQ ID NO: 64634 - DNA, 399 bp, Homo sapiens
  chr2:219209329-219209728
  hypo
aggcactcagccccaacgggaacccatccatgctgaccccaggcctgcgagcacctccccaaaactctgacctctttggcccatgggccctcaagtcagaactcctgaactccaggatggggcaggggtcgggtcaggcttctctgtcttgggtccatttcccagcttctctccaccaaacctggttcctctcacccacagtgcccatctaccctgggagaggagcgctcctacaacccgttcctgagaacccactgcctggcgctacaggaggctctggggccggggccgggccccactggggatgatgactactcccgggcccagctcctggaagagctccgccggctgaaggatatgcacaagagcaagtgatgcccccagcgcccccagcccagc

SEQ ID NO: 64635 - DNA, 68 bp, Homo sapiens
  chr2:219210000-219210068
  hypo
ttccctactcctgggacggcagcaaggacatgggggctgctgttagcttctccgtcaggaggcctcat

SEQ ID NO: 64636 - DNA, 21 bp, Homo sapiens
  chr2:219231159-219231180
  hypo
gattttcgagtgctgtacctc

SEQ ID NO: 64637 - DNA, 199 bp, Homo sapiens; identical to SEQ ID NO: 38568
  chr2:219232360-219232559
  hypo

SEQ ID NO: 64638 - DNA, 235 bp, Homo sapiens; identical to SEQ ID NO: 38569
  chr2:219232655-219232890
  hypo

SEQ ID NO: 64639 - DNA, 116 bp, Homo sapiens; identical to SEQ ID NO: 16897
  chr2:219256086-219256202
  hypo

SEQ ID NO: 64640 - DNA, 30 bp, Homo sapiens; identical to SEQ ID NO: 38572
  chr2:219262921-219262951
  hypo

SEQ ID NO: 64641 - DNA, 990 bp, Homo sapiens; identical to SEQ ID NO: 38573
  chr2:219263452-219264442
  hypo

SEQ ID NO: 64642 - DNA, 45 bp, Homo sapiens
  chr2:219267985-219268030
  hypo
aatggggggccttccgggcccggctgtttcgagagtcctgcgtct

SEQ ID NO: 64643 - DNA, 30 bp, Homo sapiens
  chr2:219283253-219283283
  hypo
aggaaaggttcaggcgccgctgaccctacc

SEQ ID NO: 64644 - DNA, 166 bp, Homo sapiens
  chr2:219294016-219294182
  hypo
ctggccaaggagatccgagaccaggagcggggagggcgcacctatgtaggcgtggtggacggagagaatgaattggcatccccgaagctgatggaggtgatgaaccacgtgctgggcaagcgcagggagctgaaggcggccgtgcccgacacggtggtggagccgg

SEQ ID NO: 64645 - DNA, 31 bp, Homo sapiens
  chr2:219431995-219432026
  hypo
ttcatggcttgcaagacgcatcctcctctat

SEQ ID NO: 64646 - DNA, 30 bp, Homo sapiens
  chr2:219507516-219507546
  hypo
gagttggtaccaaacgtctgggggcaagag

SEQ ID NO: 64647 - DNA, 31 bp, Homo sapiens; identical to SEQ ID NO: 16902
  chr2:219509561-219509592
  hypo

SEQ ID NO: 64648 - DNA, 30 bp, Homo sapiens
  chr2:219525792-219525822
  hypo
ccctggccctggcccggaagggtgtccaac

SEQ ID NO: 64649 - DNA, 32 bp, Homo sapiens
  chr2:219577394-219577426
  hypo
ccaccgcgcccggccccaatgaactctttttc

SEQ ID NO: 64650 - DNA, 30 bp, Homo sapiens
  chr2:219585142-219585172
  hypo
gaataggtccaactcgtggctttgctgatg

SEQ ID NO: 64651 - DNA, 45 bp, Homo sapiens; identical to SEQ ID NO: 16903
  chr2:219586060-219586105
  hypo

SEQ ID NO: 64652 - DNA, 903 bp, Homo sapiens; identical to SEQ ID NO: 38582
  chr2:219735784-219736687
  hypo

SEQ ID NO: 64653 - DNA, 749 bp, Homo sapiens; identical to SEQ ID NO: 2202
  chr2:219757350-219758099
  hypo

SEQ ID NO: 64654 - DNA, 30 bp, Homo sapiens
  chr2:219773280-219773310
  hypo
tgacaaactgctctacgacagtaacgaggc

SEQ ID NO: 64655 - DNA, 799 bp, Homo sapiens; identical to SEQ ID NO: 38591
  chr2:219824293-219825092
  hypo

SEQ ID NO: 64656 - DNA, 851 bp, Homo sapiens; identical to SEQ ID NO: 38592
  chr2:219825130-219825981
  hypo

SEQ ID NO: 64657 - DNA, 1320 bp, Homo sapiens; identical to SEQ ID NO: 38595
  chr2:219845550-219846870
  hypo

SEQ ID NO: 64658 - DNA, 468 bp, Homo sapiens; identical to SEQ ID NO: 2207
  chr2:219846894-219847362
  hypo

SEQ ID NO: 64659 - DNA, 76 bp, Homo sapiens; identical to SEQ ID NO: 2210
  chr2:219857661-219857737
  hypo

SEQ ID NO: 64660 - DNA, 1146 bp, Homo sapiens; identical to SEQ ID NO: 38601
  chr2:219857780-219858926
  hypo

SEQ ID NO: 64661 - DNA, 644 bp, Homo sapiens; identical to SEQ ID NO: 38602
  chr2:219866437-219867081
  hypo

SEQ ID NO: 64662 - DNA, 31 bp, Homo sapiens; identical to SEQ ID NO: 16912
  chr2:219879556-219879587
  hypo

SEQ ID NO: 64663 - DNA, 178 bp, Homo sapiens; identical to SEQ ID NO: 16913
  chr2:219892663-219892841
  hypo

SEQ ID NO: 64664 - DNA, 34 bp, Homo sapiens
  chr2:219919241-219919275
  hypo
ggtatgggagactgaccggcggagggggtgggga

SEQ ID NO: 64665 - DNA, 30 bp, Homo sapiens
  chr2:219920330-219920360
  hypo
aaagagcaggtgagcgggtgtgagtgccag

SEQ ID NO: 64666 - DNA, 93 bp, Homo sapiens
  chr2:219994458-219994551
  hypo
tgtggctaaatttaacgccctgcgcggccaggggagccgtgcgccccgggcaccgtgtgtccacacagacgccagctccgccaccttcacccg

SEQ ID NO: 64667 - DNA, 36 bp, Homo sapiens
  chr2:220039755-220039791
  hypo
tctgggtttcggtgccggagccgttcaatgtacacc

SEQ ID NO: 64668 - DNA, 30 bp, Homo sapiens
  chr2:220040333-220040363
  hypo
ttcttctggagtcggcgaatagggctgggg

SEQ ID NO: 64669 - DNA, 42 bp, Homo sapiens; identical to SEQ ID NO: 16914
  chr2:220049819-220049861
  hypo

SEQ ID NO: 64670 - DNA, 96 bp, Homo sapiens
  chr2:220066673-220066769
  hypo
gcgagggctctgaggactgccagcacgctgtcacctctcaagctcacgggagagctagtgcacctgaggacaaacggctgagcattgtcacaaaga

SEQ ID NO: 64671 - DNA, 362 bp, Homo sapiens
  chr2:220080602-220080964
  hypo
acaccaaggtgggagcggcagcttctcaggcggggtctgttctcttcctcccacgggcccctatccctgcttctccggctccaccctcccacatgccctttccactggggcggcacctgagcagccctgtgacactggatgtgccccgatccgcgatccgcagcacctcccctgtgcggcgccccaggtgccagcgcagtgagagctcgtgcaggtgggagaagatgagcagctccacccgccgagacgtgaactgctgcacccggatccacaggaaggtgcgcaggttgctcacgaagcctgcagggagccgggggacgcctcagtagggcctgggagctgagggacgtcagcccagcacc

SEQ ID NO: 64672 - DNA, 30 bp, Homo sapiens
  chr2:220084596-220084626
  hypo
ggaacgggagcaagcgaacagaacaggagc

SEQ ID NO: 64673 - DNA, 113 bp, Homo sapiens
  chr2:220092642-220092755
  hypo
cacttgctcccctcggcgacgtgcaccaacaggtcctcctcccctgggggtgaatcactataggaggcctctaggcgctggtattcagtgtcaaactgcgccatcaccaccgc

SEQ ID NO: 64674 - DNA, 30 bp, Homo sapiens
  chr2:220148148-220148178
  hypo
agaacgggcaggagcgggtggaagtggagg

SEQ ID NO: 64675 - DNA, 31 bp, Homo sapiens; identical to SEQ ID NO: 16916
  chr2:220149375-220149406
  hypo

SEQ ID NO: 64676 - DNA, 551 bp, Homo sapiens
  chr2:220150655-220151206
  hypo
acagcttgccgctgacgctctctcctgtcaccccgcccctgctctctccccagatgtgttctgagctggatgccgggttccagaatcgctgcacagttccaacaggacagcgccttcccccatgcgctgggaggggaccctccatttctccccctcacccatgctgagtgtagagccggggcctgggtggcgggtgggggccgggtgggaggtggcagtagtcttagcctgtgcactctcttccttgggtgtttggtgctggctcctggggactacaaatcccagagtgcggtgtgcccggcctcatttctgatagatcccgcttgggggaggtggtgtatggttacggagctgtgcatcttgggacatgtagtagcccaggtcggcttgtcactcgctgtgagatggggagattttgtcttttgatttatccctgtagggctggcagggttgtagatgaagggggaatgatctgagccttggttcccctgacacgtcttgctagccccagggttagagtgggcagggcagagccgcgcagcacctgggag

SEQ ID NO: 64677 - DNA, 97 bp, Homo sapiens; identical to SEQ ID NO: 38620
  chr2:220173939-220174036
  hypo

SEQ ID NO: 64678 - DNA, 244 bp, Homo sapiens; identical to SEQ ID NO: 38621
  chr2:220174059-220174303
  hypo

SEQ ID NO: 64679 - DNA, 30 bp, Homo sapiens
  chr2:220254233-220254263
  hypo
tggcattccctaaccgtttgttgaaatacc

SEQ ID NO: 64680 - DNA, 132 bp, Homo sapiens
  chr2:220316365-220316497
  hypo
gtcagcgctgcgcagcgagggccgcctcctcctccgggctgagggtgagcggcacaccctgctgctcagggaggccagggcagcagatgccgggagctatatggccaccgccaccaacgagctgggccaggc

SEQ ID NO: 64681 - DNA, 40 bp, Homo sapiens
  chr2:220337589-220337629
  hypo
ctagtagctcctctcccgccagacccggactccctgacgt

SEQ ID NO: 64682 - DNA, 750 bp, Homo sapiens; identical to SEQ ID NO: 2227
  chr2:220349054-220349804
  hypo

SEQ ID NO: 64683 - DNA, 30 bp, Homo sapiens; identical to SEQ ID NO: 16921
  chr2:220366828-220366858
  hypo

SEQ ID NO: 64684 - DNA, 84 bp, Homo sapiens; identical to SEQ ID NO: 16922
  chr2:220371684-220371768
  hypo

SEQ ID NO: 64685 - DNA, 294 bp, Homo sapiens; identical to SEQ ID NO: 2232
  chr2:220378981-220379275
  hypo

SEQ ID NO: 64686 - DNA, 30 bp, Homo sapiens; identical to SEQ ID NO: 16924
  chr2:220405148-220405178
  hypo

SEQ ID NO: 64687 - DNA, 30 bp, Homo sapiens
  chr2:220405620-220405650
  hypo
tcagatcctgtccccgtcactctgccaccc

SEQ ID NO: 64688 - DNA, 31 bp, Homo sapiens; identical to SEQ ID NO: 2233
  chr2:220408153-220408184
  hypo

SEQ ID NO: 64689 - DNA, 31 bp, Homo sapiens; identical to SEQ ID NO: 2234
  chr2:220408748-220408779
  hypo

SEQ ID NO: 64690 - DNA, 80 bp, Homo sapiens
  chr2:220420852-220420932
  hypo
gggccatggacaggcgagagtcgtggggcaggggctgcccacctcgcacccagcgcacggcccccgctgcacccactcgg

SEQ ID NO: 64691 - DNA, 87 bp, Homo sapiens
  chr2:220421316-220421403
  hypo
cgacggccccattgcgcagccaggtgacatcggcatctggtggggagacttcacaccggaacgtggcatcatcgccctcgtggacag

SEQ ID NO: 64692 - DNA, 118 bp, Homo sapiens; identical to SEQ ID NO: 16928
  chr2:220422086-220422204
  hypo

SEQ ID NO: 64693 - DNA, 402 bp, Homo sapiens; identical to SEQ ID NO: 16929
  chr2:220427078-220427480
  hypo

SEQ ID NO: 64694 - DNA, 126 bp, Homo sapiens
  chr2:220428139-220428265
  hypo
ctgagggctgggtggcgggcagcaccaggcggcgatggggcccctcattctccagcaccacgaagtcactctcctccacctcctgcccgtccttgtaccaacgcacaggggcgtcctctcggtcca

SEQ ID NO: 64695 - DNA, 30 bp, Homo sapiens
  chr2:220431384-220431414
  hypo
tgaaattggccttccggacctctgagccct

SEQ ID NO: 64696 - DNA, 58 bp, Homo sapiens
  chr2:220431757-220431815
  hypo
atgatggtggagagatcgagggagaagacggcatcttccccgtcgtatacctgcacat

SEQ ID NO: 64697 - DNA, 30 bp, Homo sapiens
  chr2:220432109-220432139
  hypo
ggctccggctttctcgatgctgaagcactg

SEQ ID NO: 64698 - DNA, 338 bp, Homo sapiens; identical to SEQ ID NO: 16931
  chr2:220432723-220433061
  hypo

SEQ ID NO: 64699 - DNA, 321 bp, Homo sapiens
  chr2:220434697-220435018
  hypo
gtggtgttccaccatctgcctcggaatcatttaaggagtttgctaagaagttcctgagtaccctggagacctactaaatccgaatccctggggagtgagaggcgggcgggtttggtattttaatattcccgcggaccacctctcctccagtcttgggggcagcgctgggcaccgaggagggctggagttcggagggcctcggaggacactcgaggcccctccctaggtcccgggctccgccgtacctttcacgtgcagctgcacggcactgagcgtctggcccgccgagttgcgcgcggcgcagacgtagagcccacgatc

SEQ ID NO: 64700 - DNA, 600 bp, Homo sapiens; identical to SEQ ID NO: 38643
  chr2:220435323-220435923
  hypo

SEQ ID NO: 64701 - DNA, 228 bp, Homo sapiens; identical to SEQ ID NO: 38644
  chr2:220436136-220436364
  hypo

SEQ ID NO: 64702 - DNA, 28 bp, Homo sapiens
  chr2:220444403-220444431
  hypo
tttttttttgagacagagtctcgttctg

SEQ ID NO: 64703 - DNA, 30 bp, Homo sapiens
  chr2:220480939-220480969
  hypo
gacctcaggagccacgctgtagacattccc

SEQ ID NO: 64704 - DNA, 43 bp, Homo sapiens; identical to SEQ ID NO: 2239
  chr2:220492469-220492512
  hypo

SEQ ID NO: 64705 - DNA, 31 bp, Homo sapiens; identical to SEQ ID NO: 16935
  chr2:220497988-220498019
  hypo

SEQ ID NO: 64706 - DNA, 35 bp, Homo sapiens; identical to SEQ ID NO: 16936
  chr2:220499162-220499197
  hypo

SEQ ID NO: 64707 - DNA, 35 bp, Homo sapiens
  chr2:220508876-220508911
  hypo
ctatggcaagggagggcggccgtagtttaggaagg

SEQ ID NO: 64708 - DNA, 27 bp, Homo sapiens
  chr2:221738581-221738608
  hypo
tcagctggctgggcgcggtggctcacg

SEQ ID NO: 64709 - DNA, 30 bp, Homo sapiens; identical to SEQ ID NO: 16937
  chr2:222034086-222034116
  hypo

SEQ ID NO: 64710 - DNA, 2254 bp, Homo sapiens; identical to SEQ ID NO: 2242
  chr2:222435994-222438248
  hypo

SEQ ID NO: 64711 - DNA, 2229 bp, Homo sapiens; identical to SEQ ID NO: 38668
  chr2:223169337-223171566
  hypo

SEQ ID NO: 64712 - DNA, 531 bp, Homo sapiens; identical to SEQ ID NO: 38674
  chr2:223183521-223184052
  hypo

SEQ ID NO: 64713 - DNA, 421 bp, Homo sapiens; identical to SEQ ID NO: 38675
  chr2:223185034-223185455
  hypo

SEQ ID NO: 64714 - DNA, 144 bp, Homo sapiens; identical to SEQ ID NO: 16940
  chr2:223562590-223562734
  hypo

SEQ ID NO: 64715 - DNA, 31 bp, Homo sapiens; identical to SEQ ID NO: 16941
  chr2:223628807-223628838
  hypo

SEQ ID NO: 64716 - DNA, 33 bp, Homo sapiens
  chr2:223743762-223743795
  hypo
agtgactcacacctgtaatttcgacactttggg

SEQ ID NO: 64717 - DNA, 176 bp, Homo sapiens
  chr2:223753467-223753643
  hypo
catagagtgtatctttccagacgctttgtttgcgacgctttgtttgcgtatccaagattgccatcttttaatgaagtagatgtgatggaaaaaggaatatactttgtccactttaatagtacgcctcactttgttttagacatgtctgtgcctgcgtctctttgagggatatacgt

SEQ ID NO: 64718 - DNA, 201 bp, Homo sapiens; identical to SEQ ID NO: 16942
  chr2:224640635-224640836
  hypo

SEQ ID NO: 64719 - DNA, 22 bp, Homo sapiens
  chr2:224661686-224661708
  hypo
cgactttttctatcattgagtg

SEQ ID NO: 64720 - DNA, 30 bp, Homo sapiens; identical to SEQ ID NO: 16943
  chr2:224698418-224698448
  hypo

SEQ ID NO: 64721 - DNA, 95 bp, Homo sapiens; identical to SEQ ID NO: 38682
  chr2:224809097-224809192
  hypo

SEQ ID NO: 64722 - DNA, 30 bp, Homo sapiens
  chr2:224866468-224866498
  hypo
ttgtcatgaggcctcgacttcacaatctga

SEQ ID NO: 64723 - DNA, 31 bp, Homo sapiens
  chr2:224900728-224900759
  hypo
ttcgctaacaatgaagcggatatggggtggg

SEQ ID NO: 64724 - DNA, 1026 bp, Homo sapiens; identical to SEQ ID NO: 38683
  chr2:224903615-224904641
  hypo

SEQ ID NO: 64725 - DNA, 43 bp, Homo sapiens
  chr2:225229320-225229363
  hypo
aaactacagagctatcggccgggcgcggtggctcacgcctgta

SEQ ID NO: 64726 - DNA, 31 bp, Homo sapiens
  chr2:225233497-225233528
  hypo
gggctcagaaaactcacgagaactgtggcag

SEQ ID NO: 64727 - DNA, 31 bp, Homo sapiens; identical to SEQ ID NO: 2266
  chr2:225381703-225381734
  hypo

SEQ ID NO: 64728 - DNA, 40 bp, Homo sapiens
  chr2:225390997-225391037
  hypo
tatcaagatgtgatgtatttccgggctgggcgctgtggct

SEQ ID NO: 64729 - DNA, 25 bp, Homo sapiens
  chr2:225394304-225394329
  hypo
cactgtactccgagactccctctca

SEQ ID NO: 64730 - DNA, 36 bp, Homo sapiens
  chr2:225463885-225463921
  hypo
gtaataataactcatactggccgggcgcggtggctt

SEQ ID NO: 64731 - DNA, 33 bp, Homo sapiens
  chr2:225482440-225482473
  hypo
ttgtggggcacatgaccgtacttaaatctggac

SEQ ID NO: 64732 - DNA, 49 bp, Homo sapiens; identical to SEQ ID NO: 16948
  chr2:225692100-225692149
  hypo

SEQ ID NO: 64733 - DNA, 30 bp, Homo sapiens; identical to SEQ ID NO: 16949
  chr2:225748121-225748151
  hypo

SEQ ID NO: 64734 - DNA, 22 bp, Homo sapiens
  chr2:225831797-225831819
  hypo
tctttttttttttttttgagac

SEQ ID NO: 64735 - DNA, 708 bp, Homo sapiens; identical to SEQ ID NO: 38685
  chr2:225906070-225906778
  hypo

SEQ ID NO: 64736 - DNA, 571 bp, Homo sapiens; identical to SEQ ID NO: 2269
  chr2:225906790-225907361
  hypo

SEQ ID NO: 64737 - DNA, 182 bp, Homo sapiens; identical to SEQ ID NO: 38687
  chr2:225907439-225907621
  hypo

SEQ ID NO: 64738 - DNA, 31 bp, Homo sapiens
  chr2:226907862-226907893
  hypo
tcttagaaattaaatacggccgggcatggtg

SEQ ID NO: 64739 - DNA, 150 bp, Homo sapiens
  chr2:227750576-227750726
  hypo
atatgctgggttttttcaatccgataaccgagatggctgttaagtgacgaatgggcaggtagtgtatgcagcatggatccactggacaaagggatggtttgtgtcccacgtgggatggagcaagacagcgtgagatttcatcacagtact

SEQ ID NO: 64740 - DNA, 30 bp, Homo sapiens
  chr2:227751189-227751219
  hypo
gaagacctgaaaacgcggctgagcaactgg

SEQ ID NO: 64741 - DNA, 30 bp, Homo sapiens
  chr2:227818777-227818807
  hypo
ttaacgactgttgatcgaatacctgccatg

SEQ ID NO: 64742 - DNA, 293 bp, Homo sapiens
  chr2:227841930-227842223
  hypo
tttgtgtctccccttcggcaagctccccctccctttagttttgcatttaacacagtcttgccttcatgactgccgcctcctttttttctgtaaacacaaatatgaagtgtatttgctttgcttttcagccttgtctgccccactgagtgtccgaaatagccggctggaattcatgagaatgttacgtcttcagatgtttataatccaaaagaatcccttatggtttttaataataaaacaacttagatgtcggtattttgtgttggaaaggcgagcaaagttcacaatgcagc

SEQ ID NO: 64743 - DNA, 30 bp, Homo sapiens
  chr2:227871066-227871096
  hypo
ctttgtatgaagcgcgtgcctgcctgagtg

SEQ ID NO: 64744 - DNA, 31 bp, Homo sapiens; identical to SEQ ID NO: 16954
  chr2:228010266-228010297
  hypo

SEQ ID NO: 64745 - DNA, 91 bp, Homo sapiens; identical to SEQ ID NO: 16955
  chr2:228185365-228185456
  hypo

SEQ ID NO: 64746 - DNA, 76 bp, Homo sapiens; identical to SEQ ID NO: 16956
  chr2:228211999-228212075
  hypo

SEQ ID NO: 64747 - DNA, 30 bp, Homo sapiens
  chr2:228336225-228336255
  hypo
tccgggtttccacacgcagcagttctcaag

SEQ ID NO: 64748 - DNA, 30 bp, Homo sapiens
  chr2:228466918-228466948
  hypo
cccacccatgcccagcgcccagcacaacac

SEQ ID NO: 64749 - DNA, 30 bp, Homo sapiens; identical to SEQ ID NO: 16957
  chr2:228632792-228632822
  hypo

SEQ ID NO: 64750 - DNA, 38 bp, Homo sapiens; identical to SEQ ID NO: 16958
  chr2:228638406-228638444
  hypo

SEQ ID NO: 64751 - DNA, 195 bp, Homo sapiens
  chr2:228735638-228735833
  hypo
ggttggctgactctgtctctccgcaggctttctcatggaaacgtggcaggcaaacaacgatgctggcaagaaattggacaagccgcatgaaggcctggagagttttaagcccaggttgagagcacaggtgtaggctttctggtgtaggttccgacgcacctgccttccattcccgcctatccatttaggctgcga

SEQ ID NO: 64752 - DNA, 95 bp, Homo sapiens
  chr2:228741008-228741103
  hypo
gacaggcgtgagccactgtgcccggccaagcctaggattcttaggctcacgtaattctcttgactcatgtttgcgactattgccttaatgcttat

SEQ ID NO: 64753 - DNA, 31 bp, Homo sapiens; identical to SEQ ID NO: 16959
  chr2:230136329-230136360
  hypo

SEQ ID NO: 64754 - DNA, 860 bp, Homo sapiens; identical to SEQ ID NO: 38700
  chr2:230578041-230578901
  hypo

SEQ ID NO: 64755 - DNA, 30 bp, Homo sapiens; identical to SEQ ID NO: 16960
  chr2:230664082-230664112
  hypo

SEQ ID NO: 64756 - DNA, 121 bp, Homo sapiens; identical to SEQ ID NO: 16961
  chr2:230743169-230743290
  hypo

SEQ ID NO: 64757 - DNA, 31 bp, Homo sapiens; identical to SEQ ID NO: 2279
  chr2:230786011-230786042
  hypo

SEQ ID NO: 64758 - DNA, 24 bp, Homo sapiens
  chr2:230788570-230788594
  hypo
tttttttttttttttttgagacgg

SEQ ID NO: 64759 - DNA, 21 bp, Homo sapiens
  chr2:230795172-230795193
  hypo
agagatgctttaggctgggca

SEQ ID NO: 64760 - DNA, 140 bp, Homo sapiens
  chr2:230795432-230795572
  hypo
ctcaagcctgggcgacagtgagatgccgtctcaaaacaaaaacaaaagagagatgctttaccccttcgccactgcacctgagaacctcagcccagctcagctgtgctggagccctcctcgaggtgtgctgtggttttccc

SEQ ID NO: 64761 - DNA, 46 bp, Homo sapiens
  chr2:230796253-230796299
  hypo
caactctaaaatgatgtttcacgaccggcatgttggctcacacctg

SEQ ID NO: 64762 - DNA, 30 bp, Homo sapiens
  chr2:230911329-230911359
  hypo
ccgaatccggtccccgtggtgctgaggccc

SEQ ID NO: 64763 - DNA, 30 bp, Homo sapiens
  chr2:230923759-230923789
  hypo
ttgtcatttgataacgattcagttttacga

SEQ ID NO: 64764 - DNA, 42 bp, Homo sapiens
  chr2:231492417-231492459
  hypo
catgctgttatagtctcccatcgtaaaaacaccttccggccg

SEQ ID NO: 64765 - DNA, 253 bp, Homo sapiens
  chr2:231530667-231530920
  hypo
gaaacagggagagaatcagagcgaaagcttccagttcaaacgcaggttgagaatgaggtttgcagagccagcgggcagtgagtgctgaccgagaagacccatggcggcccactgcagtgggggcggcggcagtgtgaccttgttgaaactagccgctccagtgacccaaggctgggggagatttggctctgctactttccagcactgtgagcttgggagccttacctgctccgagcttcagtttccttacttg

SEQ ID NO: 64766 - DNA, 30 bp, Homo sapiens
  chr2:231604218-231604248
  hypo
cttttttttgagacagagtttcgccctgtt

SEQ ID NO: 64767 - DNA, 161 bp, Homo sapiens; identical to SEQ ID NO: 16964
  chr2:231676878-231677039
  hypo

SEQ ID NO: 64768 - DNA, 31 bp, Homo sapiens
  chr2:231690698-231690729
  hypo
caggcgtgagccaccacgcccagcctaaagt

SEQ ID NO: 64769 - DNA, 237 bp, Homo sapiens; identical to SEQ ID NO: 2283
  chr2:231692870-231693107
  hypo

SEQ ID NO: 64770 - DNA, 32 bp, Homo sapiens; identical to SEQ ID NO: 16966
  chr2:231744874-231744906
  hypo

SEQ ID NO: 64771 - DNA, 30 bp, Homo sapiens
  chr2:231856330-231856360
  hypo
gctagactagctggccgacttcaggattct

SEQ ID NO: 64772 - DNA, 459 bp, Homo sapiens; identical to SEQ ID NO: 38710
  chr2:231902080-231902539
  hypo

SEQ ID NO: 64773 - DNA, 24 bp, Homo sapiens
  chr2:231919624-231919648
  hypo
tttttttctttttagacggagtct

SEQ ID NO: 64774 - DNA, 142 bp, Homo sapiens
  chr2:231965553-231965695
  hypo
cgaacttggaaatccacagtgggcaccaatgacttactgactgcgcagtttcttcaccttcattttcgagggttccctcgcaatctgttgcagcgttcctcacgcgggggcaccacctgccgagtctgtcctgcagattctg

SEQ ID NO: 64775 - DNA, 83 bp, Homo sapiens
  chr2:231977474-231977557
  hypo
agatgagtacagggccgtaagacgatttagaagaaaaaggatttcttttatacataatttctgaacatcggtatgttttcttt

SEQ ID NO: 64776 - DNA, 25 bp, Homo sapiens
  chr2:231992332-231992357
  hypo
gctgggattacgggcatgagccacc

SEQ ID NO: 64777 - DNA, 31 bp, Homo sapiens; identical to SEQ ID NO: 16968
  chr2:232054070-232054101
  hypo

SEQ ID NO: 64778 - DNA, 43 bp, Homo sapiens
  chr2:232109612-232109655
  hypo
ctcacaagtcctgttagtcaccgcctctctggagaggaagtct

SEQ ID NO: 64779 - DNA, 141 bp, Homo sapiens; identical to SEQ ID NO: 16969
  chr2:232113117-232113258
  hypo

SEQ ID NO: 64780 - DNA, 30 bp, Homo sapiens
  chr2:232115219-232115249
  hypo
cacactgcagagaacgcaggggatgctgag

SEQ ID NO: 64781 - DNA, 31 bp, Homo sapiens
  chr2:232131874-232131905
  hypo
cctgggaaacacagagcgtctggcggaattg

SEQ ID NO: 64782 - DNA, 43 bp, Homo sapiens
  chr2:232162353-232162396
  hypo
acaaaaatcattcttagctggcgagcataggaaagcaggcacc

SEQ ID NO: 64783 - DNA, 100 bp, Homo sapiens
  chr2:232223173-232223273
  hypo
aaagtgctgggattacaggcatggggccccctccacttcccttctctcactcaccttgccccaggcccatcctggccccaggcagcgctccccacaggtc

SEQ ID NO: 64784 - DNA, 30 bp, Homo sapiens
  chr2:232235319-232235349
  hypo
ctggatggaggggccgccagaagggcctga

SEQ ID NO: 64785 - DNA, 126 bp, Homo sapiens; identical to SEQ ID NO: 16970
  chr2:232247494-232247620
  hypo

SEQ ID NO: 64786 - DNA, 155 bp, Homo sapiens
  chr2:232264148-232264303
  hypo
tcctgggagagagggcccagccggctctccgcagccccaggcctgcctggagacgggccgcctctgccacagggcctccactcctggctgtgtcctgtaaggtctggaagggcgaccgctctgactacctcagcgcccctcagaatctccctggg

SEQ ID NO: 64787 - DNA, 23 bp, Homo sapiens
  chr2:232330293-232330316
  hypo
acctcaggccgggcgcggtggct

SEQ ID NO: 64788 - DNA, 30 bp, Homo sapiens; identical to SEQ ID NO: 16971
  chr2:232333015-232333045
  hypo

SEQ ID NO: 64789 - DNA, 31 bp, Homo sapiens
  chr2:232390143-232390174
  hypo
gacagagaagggaggccgagtgcccgcccga

SEQ ID NO: 64790 - DNA, 30 bp, Homo sapiens
  chr2:232398516-232398546
  hypo
acagtgcaggcagtcggggccctgcagccc

SEQ ID NO: 64791 - DNA, 79 bp, Homo sapiens
  chr2:232458616-232458695
  hypo
gacctgctgcacagctcggggcccagcttgcgctcggtccccagcctggtgggaagcgtcagctcggccttctcctctg

SEQ ID NO: 64792 - DNA, 81 bp, Homo sapiens
  chr2:232472539-232472620
  hypo
ttcactcaatgactggcgagcagtggcatcctgatgagtgacaaggcaggtggaaagatccagccctcttgcctcaactca

SEQ ID NO: 64793 - DNA, 30 bp, Homo sapiens; identical to SEQ ID NO: 2288
  chr2:232479660-232479690
  hypo

SEQ ID NO: 64794 - DNA, 132 bp, Homo sapiens
  chr2:232485558-232485690
  hypo
agcagaaactgacttcgtttccctgttattgatatgaggctgtgggggctcactgtaattaatcagtagggtcagccgcctttgaaggttactcgttgttcctcatagcggcatctccgcagtatggatgga

SEQ ID NO: 64795 - DNA, 20 bp, Homo sapiens
  chr2:232522882-232522902
  hypo
ggaataaaggctgggcgcgg

SEQ ID NO: 64796 - DNA, 531 bp, Homo sapiens; identical to SEQ ID NO: 38721
  chr2:232526741-232527272
  hypo

SEQ ID NO: 64797 - DNA, 31 bp, Homo sapiens; identical to SEQ ID NO: 16975
  chr2:232528195-232528226
  hypo

SEQ ID NO: 64798 - DNA, 350 bp, Homo sapiens; identical to SEQ ID NO: 38723
  chr2:232545778-232546128
  hypo

SEQ ID NO: 64799 - DNA, 31 bp, Homo sapiens; identical to SEQ ID NO: 16976
  chr2:232553412-232553443
  hypo

SEQ ID NO: 64800 - DNA, 31 bp, Homo sapiens
  chr2:232557730-232557761
  hypo
ggtgcctcttgccctgcgttctatgcccgca

SEQ ID NO: 64801 - DNA, 30 bp, Homo sapiens
  chr2:232649801-232649831
  hypo
tgagccaccgcgcccggcaacacaatctct

SEQ ID NO: 64802 - DNA, 246 bp, Homo sapiens
  chr2:232760318-232760564
  hypo
ctgaacgcgcaagatcgcagttcacaattcagagcagagggcctgtagcccttcgaggcccgaagccagagaatgccggaggagagttttattgcaggaacttaaatttaaccagctggaactctttaaacaatcatcctattcatatatttaaaataaattgtgcatcttttagcaggcagtcagcgtttcgttattaagatggaagatgggacagagtgttcttggctgcgttgatcccagaat

SEQ ID NO: 64803 - DNA, 1251 bp, Homo sapiens; identical to SEQ ID NO: 38731
  chr2:232790785-232792036
  hypo

SEQ ID NO: 64804 - DNA, 30 bp, Homo sapiens; identical to SEQ ID NO: 38732
  chr2:232794155-232794185
  hypo

SEQ ID NO: 64805 - DNA, 31 bp, Homo sapiens; identical to SEQ ID NO: 16977
  chr2:233197429-233197460
  hypo

SEQ ID NO: 64806 - DNA, 203 bp, Homo sapiens
  chr2:233198523-233198726
  hypo
aggctctgacccatcccgtcccgcagatggcactgtacttctgctcggggctgctgcaggacccagcgcagttccggcactacgcgctcaatgtgcccctgtacacacacttcacctcgcccatccgccgctttgccgacgtcctggtgcaccgcctcctggctgccgcgttaggtgaggggtgcagtcggggtcagggcaga

SEQ ID NO: 64807 - DNA, 31 bp, Homo sapiens
  chr2:233217697-233217728
  hypo
agaaggcctgggcctgcgagtgcggccccca

SEQ ID NO: 64808 - DNA, 79 bp, Homo sapiens; identical to SEQ ID NO: 38734
  chr2:233251507-233251586
  hypo

SEQ ID NO: 64809 - DNA, 644 bp, Homo sapiens; identical to SEQ ID NO: 38735
  chr2:233283249-233283893
  hypo

SEQ ID NO: 64810 - DNA, 46 bp, Homo sapiens; identical to SEQ ID NO: 38736
  chr2:233284113-233284159
  hypo

SEQ ID NO: 64811 - DNA, 83 bp, Homo sapiens; identical to SEQ ID NO: 38737
  chr2:233284386-233284469
  hypo

SEQ ID NO: 64812 - DNA, 618 bp, Homo sapiens; identical to SEQ ID NO: 38738
  chr2:233284686-233285304
  hypo

SEQ ID NO: 64813 - DNA, 199 bp, Homo sapiens; identical to SEQ ID NO: 38739
  chr2:233286044-233286243
  hypo

SEQ ID NO: 64814 - DNA, 31 bp, Homo sapiens
  chr2:233321555-233321586
  hypo
ttggggtctgggtgtccgccccgaagtagag

SEQ ID NO: 64815 - DNA, 30 bp, Homo sapiens
  chr2:233321813-233321843
  hypo
caggcccaagatctcggtcaccgatcctga

SEQ ID NO: 64816 - DNA, 205 bp, Homo sapiens; identical to SEQ ID NO: 2295
  chr2:233350334-233350539
  hypo

SEQ ID NO: 64817 - DNA, 435 bp, Homo sapiens; identical to SEQ ID NO: 2296
  chr2:233350843-233351278
  hypo

SEQ ID NO: 64818 - DNA, 30 bp, Homo sapiens; identical to SEQ ID NO: 38744
  chr2:233351942-233351972
  hypo

SEQ ID NO: 64819 - DNA, 277 bp, Homo sapiens; identical to SEQ ID NO: 2299
  chr2:233352174-233352451
  hypo

SEQ ID NO: 64820 - DNA, 256 bp, Homo sapiens; identical to SEQ ID NO: 38746
  chr2:233352506-233352762
  hypo

SEQ ID NO: 64821 - DNA, 46 bp, Homo sapiens
  chr2:233355392-233355438
  hypo
gggggtggaggaaggccggagccgccgtggccgccacagccgccac

SEQ ID NO: 64822 - DNA, 31 bp, Homo sapiens
  chr2:233357812-233357843
  hypo
cccccagtgcccagcccggagcctggcacgt

SEQ ID NO: 64823 - DNA, 30 bp, Homo sapiens; identical to SEQ ID NO: 38748
  chr2:233386293-233386323
  hypo

SEQ ID NO: 64824 - DNA, 109 bp, Homo sapiens
  chr2:233389941-233390050
  hypo
gctccaagacactgaccgggcttttcagagcctgggtgcgggcaggcttggggggccggcatgtggccttcagcggcctggtgggcctggagccggccacactggctcg

SEQ ID NO: 64825 - DNA, 31 bp, Homo sapiens
  chr2:233394636-233394667
  hypo
tgccgccctcagagaacggggagtgggagat

SEQ ID NO: 64826 - DNA, 30 bp, Homo sapiens
  chr2:233409100-233409130
  hypo
ctgctgaggatgcacgttcgcccgctggcc

SEQ ID NO: 64827 - DNA, 21 bp, Homo sapiens
  chr2:233440624-233440645
  hypo
ggggtgctttgctgggcgcag

SEQ ID NO: 64828 - DNA, 31 bp, Homo sapiens
  chr2:233466816-233466847
  hypo
ttacaggcatgagctccggcacccagcctgc

SEQ ID NO: 64829 - DNA, 406 bp, Homo sapiens; identical to SEQ ID NO: 38751
  chr2:233497773-233498179
  hypo

SEQ ID NO: 64830 - DNA, 181 bp, Homo sapiens; identical to SEQ ID NO: 2304
  chr2:233498345-233498526
  hypo

SEQ ID NO: 64831 - DNA, 302 bp, Homo sapiens; identical to SEQ ID NO: 2305
  chr2:233498571-233498873
  hypo

SEQ ID NO: 64832 - DNA, 449 bp, Homo sapiens; identical to SEQ ID NO: 38754
  chr2:233498895-233499344
  hypo

SEQ ID NO: 64833 - DNA, 30 bp, Homo sapiens; identical to SEQ ID NO: 38755
  chr2:233520329-233520359
  hypo

SEQ ID NO: 64834 - DNA, 150 bp, Homo sapiens
  chr2:233540160-233540310
  hypo
aggtcaggccttcccccgactgctgagtgttagaaccacctgcacaccggcttcccaggcccacccacatccacctgggatttctccaaggtgggtttcaggaaacgtgtagtcgatggagctgtgacatgattccgatgcacagccgca

SEQ ID NO: 64835 - DNA, 30 bp, Homo sapiens
  chr2:233599883-233599913
  hypo
tctattgtaaaaatacggaaaagaatggca

SEQ ID NO: 64836 - DNA, 30 bp, Homo sapiens
  chr2:233600174-233600204
  hypo
ggcgggagtcccacccgccctagaaaatta

SEQ ID NO: 64837 - DNA, 49 bp, Homo sapiens; identical to SEQ ID NO: 16990
  chr2:233714269-233714318
  hypo

SEQ ID NO: 64838 - DNA, 117 bp, Homo sapiens
  chr2:233750023-233750140
  hypo
atcatctgttccgtgcggctcattttcctgacgccctcgttgcatgccttcaccacctgggacaagaaggagggcacatcaggccaccaaagccggctgtcccggccccttcctcca

SEQ ID NO: 64839 - DNA, 234 bp, Homo sapiens
  chr2:233750441-233750675
  hypo
gacctaaaaatcccacgcttcctggggctcccgaggactcgttctgaaggaagacaattctgcagtgacacatggggcccggcacagggccaggctcgccgcaggctctcagggcacataaatgagcaccatgtccagggaagtgtgcgcgagggcctccctgccatgttgtctggagtgagaaacacgctcgccagcctcaacagccatcagtggattcgattaaaatagtta

SEQ ID NO: 64840 - DNA, 166 bp, Homo sapiens
  chr2:233753187-233753353
  hypo
cacacacatgtacacacgtgtacaaacatgcatacaagcatgtgtgcgcacacatacatgcatgcacatacatgcatacctgcacacacacacgcatgcacgcacacacatacacacagcctccatctgacaaatggagagcaagagagcccgcaggtgtggcacc

SEQ ID NO: 64841 - DNA, 188 bp, Homo sapiens
  chr2:233753917-233754105
  hypo
aacagcacggtttagacgccatcttttctcacaggcataaaagctgcatctgaccaggtggcattggtggcctcagatggagggcagtatgggttccttagcctggcacgtgctctcccacgccagcctccactcggtgtgtccccagcatgctgcctgatgtggagacttgccgttctctctggaat

SEQ ID NO: 64842 - DNA, 193 bp, Homo sapiens
  chr2:233764816-233765009
  hypo
gtcactcatatacacgttcactcacattctcacacacacacgctcacagtcactcatatacacgttcactcacattcacacacacgctctcacagtcactcatatacacgttcactcacattcacacacacacgctctcagtcactcatatacacgttcactcacattcacacacacacgctctcagtcactc

SEQ ID NO: 64843 - DNA, 30 bp, Homo sapiens; identical to SEQ ID NO: 38757
  chr2:233790029-233790059
  hypo

SEQ ID NO: 64844 - DNA, 23 bp, Homo sapiens
  chr2:233813713-233813736
  hypo
caagactgcgtctcaaaaaaacc

SEQ ID NO: 64845 - DNA, 172 bp, Homo sapiens
  chr2:233845596-233845768
  hypo
ggagaagctgcctgggcgagagcagcggcccttgctttggccaggtctagggcacatggagtgcctgcgcaggtcagaggcaagcaggagtcctgatctggagaaggactggcaccagtagggaaggggcagctggagccctgccatctctcgctatcgtcttctgcctctc

SEQ ID NO: 64846 - DNA, 31 bp, Homo sapiens
  chr2:233888472-233888503
  hypo
ttcctctgggaaaagccgcccaggccaccac

SEQ ID NO: 64847 - DNA, 30 bp, Homo sapiens; identical to SEQ ID NO: 16992
  chr2:233896303-233896333
  hypo

SEQ ID NO: 64848 - DNA, 30 bp, Homo sapiens
  chr2:233897228-233897258
  hypo
gaatgaaccccacgcgggaagaggacaggc

SEQ ID NO: 64849 - DNA, 30 bp, Homo sapiens
  chr2:233897546-233897576
  hypo
agaggagactacgacgcacccacccaccag

SEQ ID NO: 64850 - DNA, 144 bp, Homo sapiens; identical to SEQ ID NO: 16993
  chr2:233945669-233945813
  hypo

SEQ ID NO: 64851 - DNA, 162 bp, Homo sapiens
  chr2:233986775-233986937
  hypo
gttggttaacatgtgcgtttgtttggatgttctgtcctcaggcatccgaaggcgtctccatgaggttcttcaccaagctggaccagctcatcgagttttacaagaaggaaaacatggggctggtgacccatctgcaataccctgtgccgctggaggaagagg

SEQ ID NO: 64852 - DNA, 30 bp, Homo sapiens
  chr2:234077718-234077748
  hypo
accttcctctgccccgccgagaaggctgag

SEQ ID NO: 64853 - DNA, 30 bp, Homo sapiens
  chr2:234078954-234078984
  hypo
ttactgagcctcagccgctcctcacggttc

SEQ ID NO: 64854 - DNA, 144 bp, Homo sapiens
  chr2:234079668-234079812
  hypo
cctggggaatcagaattaaaacgaaagtctctctgtttcagaggaggaagaaatcacgtttgccccaacctaccgttttgagagactgactcgggacaaatacgcctacaccaagcagaaagcgacaggggtgagtcctcttca

SEQ ID NO: 64855 - DNA, 193 bp, Homo sapiens
  chr2:234093874-234094067
  hypo
agaaatcaggaagaagcgtgtgctgccagttctgcccctctggtccctgcctccttctccaactgaggtgggcccaggcctggtgctagagcggcctttgtcactgagtccccaagctccagttcacccagcagggtcaaagcggttcgaaaaatgatgaggatttttgtgcgggtgtttttaataaactatc

SEQ ID NO: 64856 - DNA, 30 bp, Homo sapiens
  chr2:234159331-234159361
  hypo
gacactcttcccaacgcaccctgacttcag

SEQ ID NO: 64857 - DNA, 279 bp, Homo sapiens
  chr2:234206549-234206828
  hypo
ggattgtaccccatttcgcaaatggggaaatgtttaacagctcagcaagaagttatcctcgtcctagagtcctgggcccatctgcttcagcactgcctgccacaccaggcccacagggacaggcgtgacactaaggtgtgccttcaaaagtgaatgggctgtactcctccgcatggctttttctctcgtgtcctgctttaataagtcctgcttacgttagaaattcctatttttcatctaaaaaactttggaaatcccggcactttgggaggctgaggc

SEQ ID NO: 64858 - DNA, 30 bp, Homo sapiens; identical to SEQ ID NO: 16996
  chr2:234216547-234216577
  hypo

SEQ ID NO: 64859 - DNA, 30 bp, Homo sapiens
  chr2:234260971-234261001
  hypo
aatccctcgtcacccgctctgctcacctgg

SEQ ID NO: 64860 - DNA, 92 bp, Homo sapiens
  chr2:234355708-234355800
  hypo
ctttccaccctgtccgtgcatctcctcagctgcgcagtgagccccaaacggtgcgcgcccgttccctcccccgccgcggtgcccacgtgcct

SEQ ID NO: 64861 - DNA, 30 bp, Homo sapiens; identical to SEQ ID NO: 16998
  chr2:234359917-234359947
  hypo

SEQ ID NO: 64862 - DNA, 359 bp, Homo sapiens
  chr2:234369790-234370149
  hypo
cgccaggtgcgggttccgcctgtgagtccctcccagccggcagctgtgctgctccgccggtgcggggcctgcctgcattctccccccgtggccgcacgctggctggtgccctggtgtccctttcttgtttcccctgggctccttcttctcctggctgtggacaggtgcacccgtcggttttgtgcccggcatgccgtgtgcccttccaggcagcctgcccagccctggcgtgcagatggatcgtctgtgccagccttcggctcttgtcgagcaggtggtcgctgtcccagtcatcaccggcgttcctcgctctgcacttccataccggctgcagtccttcctggcgctgcattctctgc

SEQ ID NO: 64863 - DNA, 30 bp, Homo sapiens
  chr2:234370958-234370988
  hypo
gcctgacatctgcccgtgcttctcttcctc

SEQ ID NO: 64864 - DNA, 779 bp, Homo sapiens
  chr2:234372715-234373494
  hypo
gcagagccctggagcggacctcacccccctgggcctcgcgctgatcagcagtgcacactctccatttctctctccctccctccgcctggagcagcagctggatccgcctcagaaggagcagctggggagtgctcttgccgagatggaccgacagctcaggaggctggcagacaccccgtggctctgccagtccgcagagcccggcgacgaagaggtatgtggctcatagggctgtgcctgggtctcccggacatggtggctctcgcctgaagtgcctgtgttccttgtgacccgtgtggctctgggatcaagatcgtgtcgctccggcagcccctgaggggccttctccagacttcgctattaaaatgctctttaaggcagggagggacagcaggtaggaaggagttctgggctgggattaagagtgccccttgaggaccagggacctgttgtcctctgaaacagaactgcagggcttcctggacagtgggtagaaggaaggctgagcccagccccacagcctcccccgagggtggagatgtatcatgggataaatggcagccttttgggatcccgctgtggacagggcgcagttggtgtgcgccactccccactcacactctcttcctgtgtgaacagaaagactccagctcgtcgcaggtctgggagggacccgaggacgcagggcatagcggaccctggggtggagtcacattcttctgcagggagtgctggctgaaggagccctggagagggccgtgtctggacaaggacaaacc

SEQ ID NO: 64865 - DNA, 30 bp, Homo sapiens
  chr2:234384935-234384965
  hypo
aggctcaggacatgcgacaccgtcttcggg

SEQ ID NO: 64866 - DNA, 30 bp, Homo sapiens
  chr2:234385344-234385374
  hypo
ggacccttggcctgcgggctgacgtgcagc

SEQ ID NO: 64867 - DNA, 31 bp, Homo sapiens; identical to SEQ ID NO: 17002
  chr2:234389853-234389884
  hypo

SEQ ID NO: 64868 - DNA, 292 bp, Homo sapiens
  chr2:234394403-234394695
  hypo
caactttacccagctagatatcggaagccactcgaacttttcgggaaagtatttggcaatttcaatcttctccacgggaagacgatagaaatcggcaactctctgcctcagggagccggcagtcccaccctgggccgcgttccacaccaggtccagggcaggggcataggtcctctcaccagggatgcgcacctgtgtcctcagcagcacgtcctgggggctgtaccagaaaaccgtcaagcgccagatccaaacaaacaaacaaaaccacgtggtaacttgaggcataatg

SEQ ID NO: 64869 - DNA, 104 bp, Homo sapiens
  chr2:234396519-234396623
  hypo
aagtagaataagggggcagagcgacgggagcaatgatgaatccgttggatggcagactgtccgaacacactgacaacagctgcgggtgggcctcttgctgacac

SEQ ID NO: 64870 - DNA, 45 bp, Homo sapiens
  chr2:234399623-234399668
  hypo
gaggccacgaggagccgtctgcaccatgggcgtgtattgcctgcg

SEQ ID NO: 64871 - DNA, 30 bp, Homo sapiens
  chr2:234399877-234399907
  hypo
aaacttgcgcaggctcgttcccagaagcac

SEQ ID NO: 64872 - DNA, 30 bp, Homo sapiens; identical to SEQ ID NO: 2311
  chr2:234652586-234652616
  hypo

SEQ ID NO: 64873 - DNA, 31 bp, Homo sapiens
  chr2:234724687-234724718
  hypo
tgacatacttaaattccgtattttaaatcct

SEQ ID NO: 64874 - DNA, 31 bp, Homo sapiens
  chr2:234737371-234737402
  hypo
cgggtgctgtccctgcgcgccctcggcaaca

SEQ ID NO: 64875 - DNA, 30 bp, Homo sapiens
  chr2:234750047-234750077
  hypo
ccgggaggcacatccggcgaggctggttcc

SEQ ID NO: 64876 - DNA, 30 bp, Homo sapiens
  chr2:234774815-234774845
  hypo
ctcagaggcagcgacgtaagctgactctgg

SEQ ID NO: 64877 - DNA, 59 bp, Homo sapiens
  chr2:235005078-235005137
  hypo
catgcccgcacgcacccgttcgtacagacatgcgcgcacgcacccgtttgtacacacat

SEQ ID NO: 64878 - DNA, 30 bp, Homo sapiens; identical to SEQ ID NO: 17004
  chr2:235406525-235406555
  hypo

SEQ ID NO: 64879 - DNA, 63 bp, Homo sapiens
  chr2:235442548-235442611
  hypo
tgcaagcttgcaaggcgtggcaatgaatggggccgagcacattagtagcgcaccccacacctg

SEQ ID NO: 64880 - DNA, 90 bp, Homo sapiens; identical to SEQ ID NO: 17005
  chr2:235460413-235460503
  hypo

SEQ ID NO: 64881 - DNA, 31 bp, Homo sapiens; identical to SEQ ID NO: 17006
  chr2:235517160-235517191
  hypo

SEQ ID NO: 64882 - DNA, 31 bp, Homo sapiens; identical to SEQ ID NO: 17007
  chr2:235637559-235637590
  hypo

SEQ ID NO: 64883 - DNA, 103 bp, Homo sapiens
  chr2:235700053-235700156
  hypo
tctcctgtgtgagaacgctgacacctggccagcatcctgcctcccgggcacccagtgcactcaagattcctgcacgatgcgttctcttcggggtcacattgcc

SEQ ID NO: 64884 - DNA, 74 bp, Homo sapiens
  chr2:235809203-235809277
  hypo
accttacctgggtttacgctaatgaaatgacactgatgccccctaaatagcttcaagaccggaggaaccaccca

SEQ ID NO: 64885 - DNA, 38 bp, Homo sapiens; identical to SEQ ID NO: 17008
  chr2:235815938-235815976
  hypo

SEQ ID NO: 64886 - DNA, 31 bp, Homo sapiens; identical to SEQ ID NO: 17009
  chr2:235823641-235823672
  hypo

SEQ ID NO: 64887 - DNA, 1364 bp, Homo sapiens; identical to SEQ ID NO: 38770
  chr2:235859954-235861318
  hypo

SEQ ID NO: 64888 - DNA, 96 bp, Homo sapiens
  chr2:235868187-235868283
  hypo
gtccagtggccatccccgtagttctgtgcaatttaatttttaattcaggtaggtttaccttgcctttgtttacccattttccactgttgccctttg

SEQ ID NO: 64889 - DNA, 29 bp, Homo sapiens
  chr2:235870196-235870225
  hypo
tgagccactgcgcccggcctccatgttgg

SEQ ID NO: 64890 - DNA, 31 bp, Homo sapiens; identical to SEQ ID NO: 17012
  chr2:235893743-235893774
  hypo

SEQ ID NO: 64891 - DNA, 56 bp, Homo sapiens; identical to SEQ ID NO: 17013
  chr2:235894217-235894273
  hypo

SEQ ID NO: 64892 - DNA, 31 bp, Homo sapiens
  chr2:235901828-235901859
  hypo
ggtttctcgaagcccccgtcagagctgatgt

SEQ ID NO: 64893 - DNA, 31 bp, Homo sapiens
  chr2:235903729-235903760
  hypo
ccggtgaaggtccttccgctggccactctcc

SEQ ID NO: 64894 - DNA, 31 bp, Homo sapiens; identical to SEQ ID NO: 17014
  chr2:235904049-235904080
  hypo

SEQ ID NO: 64895 - DNA, 165 bp, Homo sapiens
  chr2:235922809-235922974
  hypo
tagaggtgtaattacccgttgcctgccgacatcagcctgatccttcaggaatgtttggcgagcaggatcgggcgatgccggatactttgggctcttaggaaagtccactcagcgagcgtggaggctggccgagttttgtggtggaggcctcgtccctctttttgg

SEQ ID NO: 64896 - DNA, 64 bp, Homo sapiens; identical to SEQ ID NO: 17016
  chr2:235931226-235931290
  hypo

SEQ ID NO: 64897 - DNA, 313 bp, Homo sapiens
  chr2:235941052-235941365
  hypo
cattttctttctgcatcgattctcttcagtaaatgatcccgcatttttgtatgggaaggatttttactcctcactcagcctattgaagtcaggctgctctggaggtggccatcactggggtctccacagtggcctccaagcagcccgggggcttgcacacgtggcccttgcatttcggggctgccgggctgcctggctgtggtagggtggtctctcacgtggcggcaagaccccttcatccagctctacacgcaggctgtgcattcagagctacttggtcactgcttctggtagggggcgagggtgctgtgcc

SEQ ID NO: 64898 - DNA, 30 bp, Homo sapiens
  chr2:235950199-235950229
  hypo
tcgagtttcttcaccggcttgaaatcacct

SEQ ID NO: 64899 - DNA, 31 bp, Homo sapiens
  chr2:235950746-235950777
  hypo
tggagccctgtatgtacgtggctgtcgtggc

SEQ ID NO: 64900 - DNA, 31 bp, Homo sapiens; identical to SEQ ID NO: 17018
  chr2:235951107-235951138
  hypo

SEQ ID NO: 64901 - DNA, 31 bp, Homo sapiens
  chr2:235951347-235951378
  hypo
cccgactttccaggaccgcccggtgtccagc

SEQ ID NO: 64902 - DNA, 31 bp, Homo sapiens
  chr2:235960995-235961026
  hypo
actggtgaacctggcacgctctgcacatcat

SEQ ID NO: 64903 - DNA, 31 bp, Homo sapiens; identical to SEQ ID NO: 17019
  chr2:235970776-235970807
  hypo

SEQ ID NO: 64904 - DNA, 31 bp, Homo sapiens; identical to SEQ ID NO: 17020
  chr2:236008617-236008648
  hypo

SEQ ID NO: 64905 - DNA, 228 bp, Homo sapiens
  chr2:236014700-236014928
  hypo
tgatttgttgagcttgctggacgtgcgctgtggggatgcgtgggtgcacgtcgtcatccatggaggtgtgtgtcggtgttgacatctgcattgggtacgcggaagagggttcatttgattgtgagttgtcccacggttagcctgtcactccaggagcggctgcagccctgcctcgctggacagtggggatgacagagtttctgtgacgttcctgggaaggggtgagga

SEQ ID NO: 64906 - DNA, 187 bp, Homo sapiens
  chr2:236015359-236015546
  hypo
cccatgccctataaaacgcattcttgtcttgcgcttctgttggcgggtggtcctcactggacccccagaagctttcacatggtgtgagggccccatttgcctggcgcttccttggatcatatgccccaaaatagacacacttttggtcttccatggaaccaaatccagccctcgccctaaaagcagc

SEQ ID NO: 64907 - DNA, 200 bp, Homo sapiens; identical to SEQ ID NO: 17021
  chr2:236024874-236025074
  hypo

SEQ ID NO: 64908 - DNA, 19 bp, Homo sapiens
  chr2:236211239-236211258
  hypo
aaaatgaagttcttggctg

SEQ ID NO: 64909 - DNA, 31 bp, Homo sapiens; identical to SEQ ID NO: 17023
  chr2:236229403-236229434
  hypo

SEQ ID NO: 64910 - DNA, 1940 bp, Homo sapiens; identical to SEQ ID NO: 2316
  chr2:236402217-236404157
  hypo

SEQ ID NO: 64911 - DNA, 21 bp, Homo sapiens
  chr2:236412780-236412801
  hypo
cagcctcgaactctctttttt

SEQ ID NO: 64912 - DNA, 138 bp, Homo sapiens; identical to SEQ ID NO: 17026
  chr2:236415970-236416108
  hypo

SEQ ID NO: 64913 - DNA, 200 bp, Homo sapiens
  chr2:236417495-236417695
  hypo
gggatgctctgtgcatcaaagcgatttgcccagggttacacagaggaaggtggcagagccggaagtggcagaatccagtgcacgggcgggatgccgagtgtgtcgccaaactccaccactttagtcgggggcgtggtggtggctgcgctatctgcttcccactcactggcatcctagccgtgtggggtgtgtgctcacct

SEQ ID NO: 64914 - DNA, 31 bp, Homo sapiens
  chr2:236426084-236426115
  hypo
acatagctgtgcccaacgtagatctttatgg

SEQ ID NO: 64915 - DNA, 27 bp, Homo sapiens
  chr2:236437321-236437348
  hypo
tttttgtttgttttgagaagacggagt

SEQ ID NO: 64916 - DNA, 206 bp, Homo sapiens
  chr2:236443829-236444035
  hypo
caggttgcctcccatcgtttgcaggagcggaagacccgatggagcaggtttcacagtgccctcgctgctgcctcccgtttcatctgcacgtctctttcaatgcgggcgtgcgaacttccaggtagagccgagttcaagaaaatgaagtactgcatgcgacgagcaagtttattgaagagggtgtgaggtcgcggcgcctgaccctc

SEQ ID NO: 64917 - DNA, 107 bp, Homo sapiens
  chr2:236456628-236456735
  hypo
gagaatgcaggtatagcggtgacagctacaatatttgttagccaagctgcggacagagggttggcctcaggctgctgtttctgccccagggtcgtgagaaatagctg

SEQ ID NO: 64918 - DNA, 202 bp, Homo sapiens; identical to SEQ ID NO: 17028
  chr2:236459168-236459370
  hypo

SEQ ID NO: 64919 - DNA, 31 bp, Homo sapiens
  chr2:236466162-236466193
  hypo
aatggaaaatgagaaacgatgatgtcagtga

SEQ ID NO: 64920 - DNA, 31 bp, Homo sapiens; identical to SEQ ID NO: 17029
  chr2:236467580-236467611
  hypo

SEQ ID NO: 64921 - DNA, 31 bp, Homo sapiens
  chr2:236511015-236511046
  hypo
tatctactccctggcccgtggcagtggaact

SEQ ID NO: 64922 - DNA, 323 bp, Homo sapiens
  chr2:236541633-236541956
  hypo
ttccaaaccagaagcccgtggtgcagcctctgaacccccgactcttggtgggcttttgagttctgcttttgcttgaacttctagcggcagaaagggggtgatccctttcttctccatcataagggtcatggcccacatccctgtaacaaaagacaggttaacgagagaaaagcattatacatttacttgatcctggttttacggcatgcgggagcctacggaatgaagacccgaagattcaggggaggtcgtctgtgtgccttggttccatgacttgggggcagccaagtagaagtggaattggacaaatagggcatgagcgg

SEQ ID NO: 64923 - DNA, 31 bp, Homo sapiens; identical to SEQ ID NO: 17031
  chr2:236544007-236544038
  hypo

SEQ ID NO: 64924 - DNA, 95 bp, Homo sapiens
  chr2:236553451-236553546
  hypo
tatggtgtgtcagcttcgctgtctttcaaggatgacttgcgtagattgcatttaagtatagtggagcaacagcaatcaaggtgtaagactttttt

SEQ ID NO: 64925 - DNA, 24 bp, Homo sapiens
  chr2:236555500-236555524
  hypo
cgcgtgcggtggctcacgcctgta

SEQ ID NO: 64926 - DNA, 22 bp, Homo sapiens
  chr2:236566309-236566331
  hypo
gccaccgcgcccagcccagtgg

SEQ ID NO: 64927 - DNA, 195 bp, Homo sapiens
  chr2:236571424-236571619
  hypo
cctcatccccttgctccgctgcaagaacccctcaccctgctcagtgctcctggccactgctgactggtgcatggcgagcagaggttttattccatcttactgtgtcagatgtgattccggggacgcagttctttcttaagagctctgatgcatgttctaactaggagggcaggtagctgccgctcccagcagccc

SEQ ID NO: 64928 - DNA, 76 bp, Homo sapiens
  chr2:236602264-236602340
  hypo
tgcggcgggaggatcacgagctcaggagttcgagtgcagcctgggcaacatagtgaggcctcgtctccaaaaaacc

SEQ ID NO: 64929 - DNA, 198 bp, Homo sapiens; identical to SEQ ID NO: 17035
  chr2:236603368-236603566
  hypo

SEQ ID NO: 64930 - DNA, 31 bp, Homo sapiens
  chr2:236605764-236605795
  hypo
gccagctttaggtctgcgtggaaagggtgtt

SEQ ID NO: 64931 - DNA, 28 bp, Homo sapiens
  chr2:236612992-236613020
  hypo
ttagaaatgctgatttgaggccgggcgt

SEQ ID NO: 64932 - DNA, 147 bp, Homo sapiens; identical to SEQ ID NO: 17037
  chr2:236613259-236613406
  hypo

SEQ ID NO: 64933 - DNA, 31 bp, Homo sapiens
  chr2:236615816-236615847
  hypo
agtgcagggagaagtccgcctcccaggcatc

SEQ ID NO: 64934 - DNA, 110 bp, Homo sapiens
  chr2:236616174-236616284
  hypo
gtgggttgtgctcccccggcgtgtgacctggtgggacgtgctccccagcgtgtgacatggtgggttgtgctcccccggcgtgtgacttggtgggacgtgctccccagcat

SEQ ID NO: 64935 - DNA, 175 bp, Homo sapiens; identical to SEQ ID NO: 17039
  chr2:236617714-236617889
  hypo

SEQ ID NO: 64936 - DNA, 193 bp, Homo sapiens
  chr2:236618369-236618562
  hypo
aattaaaatttttgtcttttacgaaccttaccctttcggtgaaattatgtagagcttcaaattggcacgtgtaaaaagtggtccatcgcagccaccctttccagccgctcccctctaccgtaggatggaaggaaggggcaagtctaactttgaaacaaccaggttctttgtcgtgaaatatgtggcatttgtg

SEQ ID NO: 64937 - DNA, 188 bp, Homo sapiens; identical to SEQ ID NO: 17041
  chr2:236619769-236619957
  hypo

SEQ ID NO: 64938 - DNA, 31 bp, Homo sapiens
  chr2:236621491-236621522
  hypo
cgctccgacagcttcacgggtggcgtgacac

SEQ ID NO: 64939 - DNA, 31 bp, Homo sapiens; identical to SEQ ID NO: 17042
  chr2:236622524-236622555
  hypo

SEQ ID NO: 64940 - DNA, 189 bp, Homo sapiens; identical to SEQ ID NO: 17043
  chr2:236624441-236624630
  hypo

SEQ ID NO: 64941 - DNA, 193 bp, Homo sapiens; identical to SEQ ID NO: 17044
  chr2:236637397-236637590
  hypo

SEQ ID NO: 64942 - DNA, 31 bp, Homo sapiens
  chr2:236644830-236644861
  hypo
ccctgggggtgcccgccgttgggaggtgctg

SEQ ID NO: 64943 - DNA, 31 bp, Homo sapiens; identical to SEQ ID NO: 17045
  chr2:236646339-236646370
  hypo

SEQ ID NO: 64944 - DNA, 80 bp, Homo sapiens; identical to SEQ ID NO: 17046
  chr2:236647744-236647824
  hypo

SEQ ID NO: 64945 - DNA, 539 bp, Homo sapiens
  chr2:236648505-236649044
  hypo
gagggaatcagacgtcgctctgggcggcagtggagctggcaggcagcctctgggctctggcagcattgtcctctgggtccagcgatttggggtttagacagggtttctggacggcatctgcacagaggagcggaagacaagagctgggaaccgatgcgtgccttccctctttaaaacaagagtttcgaatccccatgagggttccctagcgtggtctcagagcccaggatctggagggggacgtctgtcattggagaaggcagaggagccagggtggaatccttcccgctgcccagcaggagcagggctggcctagcgggccgggctgggcactgcagcaaccttgtaccatcccctcctgagagcatcaggggccgggacgtccaaggtagcaccaggcccctcatgcccgcaccccctcctcatggtcacctctgttcctgcagggtcccggtggtctcccgctaaccccgcgtggtctctaacgcctcctgtcagccgctgctctgctgtctccacccgtgcggaggtcccatcca

SEQ ID NO: 64946 - DNA, 31 bp, Homo sapiens
  chr2:236652842-236652873
  hypo
agtaggccagccgctgcggtagcgagtggga

SEQ ID NO: 64947 - DNA, 126 bp, Homo sapiens
  chr2:236656835-236656961
  hypo
tggtgcagtggcagagattcccgtggtgcacctttgaagccgaaatttgacagaaaccaagcgagcatgccgctgaggacggaggggctgcgggattgctcggccgcaggtcagggtctcatggaa

SEQ ID NO: 64948 - DNA, 275 bp, Homo sapiens; identical to SEQ ID NO: 17048
  chr2:236660556-236660831
  hypo

SEQ ID NO: 64949 - DNA, 135 bp, Homo sapiens
  chr2:236663731-236663866
  hypo
gggaggcactgggggctggggcgggctggatgtgcggacttggcagctgggggctgcaggtccgtctgcagggactgcacagggctctcgttcctagattgcttcacagccagcggctctgtgcctgtcagattc

SEQ ID NO: 64950 - DNA, 31 bp, Homo sapiens; identical to SEQ ID NO: 17049
  chr2:236664671-236664702
  hypo

SEQ ID NO: 64951 - DNA, 81 bp, Homo sapiens
  chr2:236669005-236669086
  hypo
gagcgagactccgtctcaaaaaacaaaaccaaaaacaaaataaatacaaatgtgtaagatagaattcgttatgaagctaca

SEQ ID NO: 64952 - DNA, 202 bp, Homo sapiens; identical to SEQ ID NO: 17051
  chr2:236672624-236672826
  hypo

SEQ ID NO: 64953 - DNA, 380 bp, Homo sapiens
  chr2:236674124-236674504
  hypo
aaagagaagctgaacactgttcgtttgggggctcatcggctcactgccgcgtggtcagtcctggtgccgtgagcacagccaaccggactgtaccacatgttcccttctccctgggctgagcaatcgcttccccgctaaatgttcggcagcactttgccttgtacgtgtctacgtctgcaggaggggctgtgactcatccccagccaactgtattccaagcacagccatagttcagagtgaatctttatggtctgtgaattctggagtttcagaaaactctctcattcaacgttgtgagtaaaccgtaagaaaaaatattgaacaccaacatagtcatctgggtactgggaaatactcccatgcccgcaccaagatttcat

SEQ ID NO: 64954 - DNA, 37 bp, Homo sapiens; identical to SEQ ID NO: 17053
  chr2:236675950-236675987
  hypo

SEQ ID NO: 64955 - DNA, 31 bp, Homo sapiens; identical to SEQ ID NO: 17054
  chr2:236680141-236680172
  hypo

SEQ ID NO: 64956 - DNA, 400 bp, Homo sapiens
  chr2:236685966-236686366
  hypo
ctgggtgacagagcgagactctgtctcaaaaaaaaagacaaaagtgatttcctgagctgctccgagctggagacagaaccagcagacatgggacagaagaagaattacaggtgtgaagcgcccgtgtggggctgattcccacctgcctcctcgttatcagcaggcagccttgcgtctgcctctgggagcagaaaccgttgtttcaccagcaaattacgctggctgtactcgccatgtcctgttgccatagaggacgagtcacagctgtctcacctgcacccctccaatcgccttctcagaatccgacgctggtcctaagtgccttcagctgtcacctgagcacgttcaagcctcctgcccagcaccttcctagagcaccgccattggcataaggactagg

SEQ ID NO: 64957 - DNA, 31 bp, Homo sapiens
  chr2:236697236-236697267
  hypo
gagggtccatcggtgtcgtcagtgcacatcc

SEQ ID NO: 64958 - DNA, 97 bp, Homo sapiens
  chr2:236715041-236715138
  hypo
gctcacactttctcatgccatcgagagaggagactgagacgatggagctccttcagttttacccaagtcaaggtgcgcttttggttggggcttccct

SEQ ID NO: 64959 - DNA, 329 bp, Homo sapiens
  chr2:236716146-236716475
  hypo
cattagaatgagaagagggaacggagacaacagacctaatgaagtgcgggctgcccgcctgcatatggagtgcgtttccaggctgagagctttcaaaggctgcctttgtagcacggctttgattgggccgcgggccgccgggcaacaggggtaactcagatcgcctacaagagccccttgtgatcacaggaacagcccgacgtggccctaatttgctctcacagacggacatctgaacactgtttcaggctggtttgtaacaacgaggcaattagttgtgataatcatagccggtgtgtcagctgtgcgctcttgtttgtaatttgcta

SEQ ID NO: 64960 - DNA, 31 bp, Homo sapiens; identical to SEQ ID NO: 17056
  chr2:236717069-236717100
  hypo

SEQ ID NO: 64961 - DNA, 31 bp, Homo sapiens
  chr2:236719835-236719866
  hypo
cagatacacagtcatacgccttggcctcctc

SEQ ID NO: 64962 - DNA, 31 bp, Homo sapiens
  chr2:236721555-236721586
  hypo
ttacagagtgaactgccgtgccctgcaagct

SEQ ID NO: 64963 - DNA, 31 bp, Homo sapiens
  chr2:236722174-236722205
  hypo
cacttcttcggtgtcccgcagctcagacccc

SEQ ID NO: 64964 - DNA, 163 bp, Homo sapiens; identical to SEQ ID NO: 17057
  chr2:236722552-236722715
  hypo

SEQ ID NO: 64965 - DNA, 31 bp, Homo sapiens
  chr2:236723849-236723880
  hypo
aatcctgcagcctgggcggcttaaacagcac

SEQ ID NO: 64966 - DNA, 60 bp, Homo sapiens; identical to SEQ ID NO: 17058
  chr2:236727032-236727092
  hypo

SEQ ID NO: 64967 - DNA, 20 bp, Homo sapiens
  chr2:236730154-236730174
  hypo
gtagccgggactacagggaa

SEQ ID NO: 64968 - DNA, 99 bp, Homo sapiens; identical to SEQ ID NO: 17060
  chr2:236733469-236733568
  hypo

SEQ ID NO: 64969 - DNA, 189 bp, Homo sapiens; identical to SEQ ID NO: 17061
  chr2:236738718-236738907
  hypo

SEQ ID NO: 64970 - DNA, 193 bp, Homo sapiens; identical to SEQ ID NO: 17062
  chr2:236739766-236739959
  hypo

SEQ ID NO: 64971 - DNA, 189 bp, Homo sapiens; identical to SEQ ID NO: 17063
  chr2:236741688-236741877
  hypo

SEQ ID NO: 64972 - DNA, 31 bp, Homo sapiens; identical to SEQ ID NO: 17064
  chr2:236743374-236743405
  hypo

SEQ ID NO: 64973 - DNA, 31 bp, Homo sapiens
  chr2:236749799-236749830
  hypo
cagcaagtgtagacaccgcctaggagaggcc

SEQ ID NO: 64974 - DNA, 230 bp, Homo sapiens
  chr2:236750707-236750937
  hypo
gtggaggagggcctctcgttggaagcccaggctcactccatggctgcccctctccccagcctgctggcgttgggcttcctccgctcctggtttcttagttctggagcacagactccgtgctctggagcaagagttcttcactgtggttctgtagatagaattcaggggtccgcgaatgtggctggggggaaattcattcgtatttccactgacttcgactgaaagttaac

SEQ ID NO: 64975 - DNA, 38 bp, Homo sapiens; identical to SEQ ID NO: 17066
  chr2:236751636-236751674
  hypo

SEQ ID NO: 64976 - DNA, 195 bp, Homo sapiens
  chr2:236751878-236752073
  hypo
gggaggacctgagcttcggctgcggccttccagccccctgggtctcactgcttgctgcctcccctttctcacccacacaattctttccttccctccctctgtcccacgctgtgtccctttctcttcctttctttgagttcatttcagaattcctcctcggtgtctgcttattgcatggcacggtctggttgggcc

SEQ ID NO: 64977 - DNA, 229 bp, Homo sapiens
  chr2:236759875-236760104
  hypo
gctgaatatagaccatcggtgcccacctggcgctcctgctgctcggtcggagctgggagggaaacgtggctccactacagacatggggtttgggctgggaggccatggaatggtgaagatgctaagcaaggccatctcctgggaagggcagaagcagcttggccccaggtgtccgcatgtcaccccctttccctaaacttcacccgtccaccaacgcaccatgtgccgc

SEQ ID NO: 64978 - DNA, 158 bp, Homo sapiens; identical to SEQ ID NO: 17068
  chr2:236760925-236761083
  hypo

SEQ ID NO: 64979 - DNA, 31 bp, Homo sapiens; identical to SEQ ID NO: 17069
  chr2:236763010-236763041
  hypo

SEQ ID NO: 64980 - DNA, 269 bp, Homo sapiens
  chr2:236765491-236765760
  hypo
aagtgccagccactgtcgtgagctcaggtgtctgagagcacgcttggttcccacgctgcggtccggttggacgtggtagatgtgagaccagtgcctgaaagaatgccgctgtagggaaacatgaagacacacacactcagccacactgtatttaatgggccgggatttgtgtaagtgatctccatggagacgcaggtggtgagcctgagatgctacactttagagcaggagtcatccactcccagatggcagcctggtaccagtctgtg

SEQ ID NO: 64981 - DNA, 28 bp, Homo sapiens
  chr2:236766059-236766087
  hypo
atcctttgacgagcgtccccaaggagac

SEQ ID NO: 64982 - DNA, 31 bp, Homo sapiens
  chr2:236786675-236786706
  hypo
ttgagagaagggcccacggtgcccgtggaaa

SEQ ID NO: 64983 - DNA, 151 bp, Homo sapiens
  chr2:236791005-236791156
  hypo
ttaggaaatttcactccgcttctgcccagtggtctctttggtcggcagggtgttcttctcctgcgtctccgttttcttcagcttggccctattgaagctggcgattccccccacgtctggtttgtctgccattttcttaaaacaatcggta

SEQ ID NO: 64984 - DNA, 167 bp, Homo sapiens
  chr2:236796531-236796698
  hypo
ttgcagttgtattaaacgtggaagattcagacagagatgagatagggccgtgcggcagcccatcaccggcagcgcttgctcgtggtggtgaggcctctcccttccggcacagacatttatcttctgtccacgtgtgtgccgctcacagtccacgtaaggctgcgccc

SEQ ID NO: 64985 - DNA, 31 bp, Homo sapiens
  chr2:236801620-236801651
  hypo
acgctgctgcagaaggcgtgattcatcttaa

SEQ ID NO: 64986 - DNA, 346 bp, Homo sapiens
  chr2:236801866-236802212
  hypo
gcaccatgtctgtagcgcgggtgtgccatgtccatcataaggaagcgccgtgtctgtagcgtgggtgtagcgtgtctgtggcgcaggtgtgccgtgtctgtggcatgggtgtggcttgtctgtggtgtgggtgtgccgtgtccatcataggggtgtgctgtgtctgtggcgtgggtgtagcgtgtctttggtgtgggtgtgccgtgtccatcataaggaagagctgtgtctgtggtgcgggtgcaccatgtccatcataagggtgagccatgtttgtggcgtgggtgtggcatgtccacgagggtgcaccatgtctgtggtgcgggtgtgccgtgtccatcatgag

SEQ ID NO: 64987 - DNA, 377 bp, Homo sapiens
  chr2:236826181-236826558
  hypo
gcatttaagagggagcgctctccgccgtgacagggaccggggtaataaggagagcttgattaacgtggtgcacttgggggagagatgagaggcttcacgtggtcctgttcgggggaggcaatgaggcaccggcggctctgttgctgctcccggagattaatgaggcctaagagtgcattaggaacagtgacaaaggtttgatctaatgggctcagtcatttttcctttgagtgacagacgcacagaagtaattggctgtgcagaatggcagctcattggcggtacttaaggatacattatccccgttgtgtggcccgcagaggctgtttatcaaaactgctcacactgcagacgcggagtcgcgaagctgctgtttc

SEQ ID NO: 64988 - DNA, 560 bp, Homo sapiens
  chr2:236839043-236839603
  hypo
catcttgccggcctgccggatcgcggtgtctctgctaagactcgctgggtcttttgtcttcacttccactcgatgttgcggttgcggttgggttgcgtctttgtatagggttgttcggtgcgagccatctgtggcatcgggtcccttcacattgctttgtcaggcaccatcaagattggcgtcccccttttattcctcccgaatagtttctgtctggcgcttccgtttgccatgcaggcaggacaggggctgctctcggtggtaaggtgcactatgtgccagcgtgtgggtcccatagactaactcgcgctggtttctgtggtctgcagtccgcggtggtgttcacctgacttgtttattcctagggaatgtcactagtgcatctgggtctcagatggcaagcggcatcagcctggtctccttcaacagccgacccgacggcatgcaccagcgctcctactcagtctccagtgccgaccagtggagtgaggctacggtcattgcaaactcggccatcagcagtggtaagagggggctcagccccacggacccgcagccac

SEQ ID NO: 64989 - DNA, 38 bp, Homo sapiens
  chr2:236840459-236840497
  hypo
catctccaaaccaagccgggagacgcggagtcagcgag

SEQ ID NO: 64990 - DNA, 31 bp, Homo sapiens; identical to SEQ ID NO: 17075
  chr2:236841397-236841428
  hypo

SEQ ID NO: 64991 - DNA, 38 bp, Homo sapiens; identical to SEQ ID NO: 17076
  chr2:236842446-236842484
  hypo

SEQ ID NO: 64992 - DNA, 124 bp, Homo sapiens; identical to SEQ ID NO: 17077
  chr2:236847370-236847494
  hypo

SEQ ID NO: 64993 - DNA, 31 bp, Homo sapiens
  chr2:236848202-236848233
  hypo
cacgttccaggacactcgtctgtcctcagct

SEQ ID NO: 64994 - DNA, 36 bp, Homo sapiens; identical to SEQ ID NO: 17078
  chr2:236853750-236853786
  hypo

SEQ ID NO: 64995 - DNA, 36 bp, Homo sapiens; identical to SEQ ID NO: 17079
  chr2:236854025-236854061
  hypo

SEQ ID NO: 64996 - DNA, 209 bp, Homo sapiens
  chr2:236857147-236857356
  hypo
aagttattttaaaatacgaatttcataacgagaacacaaattgagaggtgaacatttgagaatttccatggccgctttggcagtagggatgtttagtttgaaactttaatttaaaaagtgagtgcagtgagtctgtctttgtagcgctagagatgggtcctcagctggccatgatagagaaggatgggcagaggcgggtgtttgagact

SEQ ID NO: 64997 - DNA, 41 bp, Homo sapiens; identical to SEQ ID NO: 17081
  chr2:236863815-236863856
  hypo

SEQ ID NO: 64998 - DNA, 224 bp, Homo sapiens
  chr2:236868107-236868331
  hypo
ttcatattcccgtggccgagctcagcgcccagtggacgggaacccggtccttcttgccatgagaacacccagcccaggagaggtcagggcctggcctccaggtgggtcctctctggtcgctcctcactggtcttgagtcccaggtgacacttcctgcccgacttctgtctcctgccacggcccccctcaattcacatcctaattcaccccgccatcaccttctc

SEQ ID NO: 64999 - DNA, 31 bp, Homo sapiens
  chr2:236868991-236869022
  hypo
cttgcctccttctccccgcagtggccaggac

SEQ ID NO: 65000 - DNA, 149 bp, Homo sapiens; identical to SEQ ID NO: 17082
  chr2:236870132-236870281
  hypo

SEQ ID NO: 65001 - DNA, 148 bp, Homo sapiens
  chr2:236870520-236870668
  hypo
caaaaaagtgagatgacagctcatgtttagtgccgggtgctgggtgagcgagggtgggtgagcatccatttcccaggggaggggccccgcgcccatggagactgctggggacaggctggggcagggcggggtggagggtgtcctcttc

SEQ ID NO: 65002 - DNA, 198 bp, Homo sapiens; identical to SEQ ID NO: 17083
  chr2:236872389-236872587
  hypo

SEQ ID NO: 65003 - DNA, 178 bp, Homo sapiens
  chr2:236877178-236877356
  hypo
cccctcccctcacgccaacagaaagaagcaccgaaggaagaaaagcactagcaacttcaaagccgacggcctgtccggcactgctgaaggtaagggttccgcggtgccccgggagagagtctccactgcggaaaattctctgttatttttcaaatgcgtgaaattagacacccttagc

SEQ ID NO: 65004 - DNA, 110 bp, Homo sapiens; identical to SEQ ID NO: 17085
  chr2:236881385-236881495
  hypo

SEQ ID NO: 65005 - DNA, 97 bp, Homo sapiens
  chr2:236900736-236900833
  hypo
gtgatggtggccatcacgagacccagataacaggagtggttagaagcgcagcggaggagcctgtcttcctgggtccgagttgcgtggttaggagcgc

SEQ ID NO: 65006 - DNA, 217 bp, Homo sapiens
  chr2:236901339-236901556
  hypo
aactcaccaagaatatcgtggccgctgaggtcctgcacacctggggatgcgtcgtgggcgccgaggagagcgtagcctcctgttaacgtagcctcctgctgctctttggggtagaccagccgtttccacgcacaggctgcacattgtttcatggcctttgcagttgagcttgtgttggcctctttccgtcgtgaaccatggacgtctctccttgacc

SEQ ID NO: 65007 - DNA, 31 bp, Homo sapiens
  chr2:236908516-236908547
  hypo
ttaaacttgtaagtcacgatttgtgggtgct

SEQ ID NO: 65008 - DNA, 172 bp, Homo sapiens; identical to SEQ ID NO: 17088
  chr2:236909410-236909582
  hypo

SEQ ID NO: 65009 - DNA, 31 bp, Homo sapiens
  chr2:236912262-236912293
  hypo
ctctcccttggatttgcgcctgttctttctc

SEQ ID NO: 65010 - DNA, 31 bp, Homo sapiens
  chr2:236919372-236919403
  hypo
ctctgtgtgtgttttccggaaaattaatacc

SEQ ID NO: 65011 - DNA, 156 bp, Homo sapiens
  chr2:236945109-236945265
  hypo
cagctgaacccagaggcgcttctgtgacagagggcccgcagggggactgctgtctcataaaagctaaactcttcatcccacactctgtgtttcagaacaagaagaaaattttgagtttatcattgtgtccctcactggccaaacatggcactttga

SEQ ID NO: 65012 - DNA, 253 bp, Homo sapiens; identical to SEQ ID NO: 17089
  chr2:236949321-236949574
  hypo

SEQ ID NO: 65013 - DNA, 177 bp, Homo sapiens
  chr2:236950836-236951013
  hypo
ggaggccagccagggtcggcttggccgggaagggagacaggagcccaggactgctccagacaaaagggaaaggaagcgccccctccaagagtccactcagcagcatagcaggcaggggagagatcaaaagtctgtctgcggcctctctggaagcctgtcctgcgggtgagggaaggg

SEQ ID NO: 65014 - DNA, 31 bp, Homo sapiens; identical to SEQ ID NO: 17090
  chr2:236951333-236951364
  hypo

SEQ ID NO: 65015 - DNA, 212 bp, Homo sapiens
  chr2:236954181-236954393
  hypo
aggcagtgctagcaggtggcacgcacacaggtgtgagggcctggagagcaggcagggccgccctggggctgtgggaccagcggggcctgaagccaggtggaggggcaggagacagtgcagaggtctgagtccgtgccaggaggctgggatcagccacaggccgaggttctccacccaggccgagacacagcgaagtgtcccagttgggcctt

SEQ ID NO: 65016 - DNA, 46 bp, Homo sapiens
  chr2:236970388-236970434
  hypo
cttcttttggagacaacgaaaatgatctggatttacatagtagtga

SEQ ID NO: 65017 - DNA, 166 bp, Homo sapiens
  chr2:236970493-236970659
  hypo
aattttatggtatataaattatgtcaattttgaaaaaaaaaaaaaaggaatttccaaaggaaaacagatgagccagggcgttccacaaagagcagctggagcaaaggtgcaggcgtacaggaacgcatgctgggtggcgggggcctgggtgcgggccgagggctgg

SEQ ID NO: 65018 - DNA, 57 bp, Homo sapiens
  chr2:236976365-236976422
  hypo
ctcatctcttaacagacgttccgcacatcctttccagtatgccgtgttcacgtgagg

SEQ ID NO: 65019 - DNA, 19 bp, Homo sapiens
  chr2:236981923-236981942
  hypo
ccaccgtgcctggcctata

SEQ ID NO: 65020 - DNA, 31 bp, Homo sapiens; identical to SEQ ID NO: 17093
  chr2:236989877-236989908
  hypo

SEQ ID NO: 65021 - DNA, 31 bp, Homo sapiens; identical to SEQ ID NO: 17094
  chr2:236991808-236991839
  hypo

SEQ ID NO: 65022 - DNA, 189 bp, Homo sapiens
  chr2:236994422-236994611
  hypo
gcctggctccatgggccgcctcaggatgtggcccagccggcttcctttgtgaaggcaagccccacacaaggagcaggactcctggaggggacaatggctgtccatcagtgatagcaaattccagcgtccaggccgtgggttcatctggctgccaggctgggctgatggcagcaacgctgaccacactcg

SEQ ID NO: 65023 - DNA, 155 bp, Homo sapiens; identical to SEQ ID NO: 17095
  chr2:236996174-236996329
  hypo

SEQ ID NO: 65024 - DNA, 94 bp, Homo sapiens
  chr2:236999642-236999736
  hypo
gaagtgctgggttgacaggcgtgtgccaccgcaccggccgtaatcgttcctggtaagcacatttctgaacacatcaatccgctgcctgcatgcc

SEQ ID NO: 65025 - DNA, 40 bp, Homo sapiens
  chr2:237007807-237007847
  hypo
tgcttggggccaggtgcggtggctcacgcctgtaatccca

SEQ ID NO: 65026 - DNA, 31 bp, Homo sapiens
  chr2:237010462-237010493
  hypo
ctgggtacacatttatcgggatttatgcttt

SEQ ID NO: 65027 - DNA, 29 bp, Homo sapiens
  chr2:237013228-237013257
  hypo
gggttacaaagacaagcgtgcacaggcca

SEQ ID NO: 65028 - DNA, 21 bp, Homo sapiens
  chr2:237014529-237014550
  hypo
cgtgcccggcccctcttgtgc

SEQ ID NO: 65029 - DNA, 134 bp, Homo sapiens
  chr2:237015288-237015422
  hypo
aaggtggctggagtcacgcacagccagctggtgggcagggctctctgcaggccatgggctcattttcccacctgcgtaagtcacggtgctggtggtagcaggatggggtctgcaggtctcgcaggagtaggtca

SEQ ID NO: 65030 - DNA, 158 bp, Homo sapiens
  chr2:237018157-237018315
  hypo
atggcagaagtgttctcgatcagcagccttggaaatgtcctagtcagcggcagcgtcggtgctctggaccggcagccatgggaatgtcctagtcggcagcagtgtcggtgttctagaccggcagccgtgggaacgtcctagtcggcggcagcgtcggt

SEQ ID NO: 65031 - DNA, 162 bp, Homo sapiens
  chr2:237020447-237020609
  hypo
aaaagaaagggtccatcccggtatcaggcaatgtgaagtgctgggaacacacagacctgcccatggcatcccccagtcacttgaggacagataaaccatcacagttggttgttgccttttgattggagtcatcggcagtgttgtcacgcgactggtcttgct

SEQ ID NO: 65032 - DNA, 276 bp, Homo sapiens
  chr2:237022762-237023038
  hypo
ttagctcattagctaacggaggctgtgaacggtgatcctcccggggattggaatgaggggaggtgatctactgccggctgcctgctcttgaactggccttccttggggaaaatgaaaggctcagccaagacaagccagggatcccagaagtagaattgcggcctccgagtgaccatttgagtctgtgtgctttgacatcatggcttcttagggcaaatgcctctagacggaatagtctcatcgagaagaagccattgtcagcgtgtcccttggtca

SEQ ID NO: 65033 - DNA, 165 bp, Homo sapiens; identical to SEQ ID NO: 17103
  chr2:237032440-237032605
  hypo

SEQ ID NO: 65034 - DNA, 404 bp, Homo sapiens
  chr2:237032664-237033068
  hypo
ggctgccccgacgagcgcttcgtgctcatggccacccctaacctgtccaggagaaacaataaccggaacaacagcagtgggagggtgcccaccatcatctgaggaacagccgtgcccgcctgctcgccgcacctgggacgcggcagcctcgccgcattctcgctcagaagtcgcagcacgtgagtcccgtcgcatcccctccctcttcctggtggccacctccctcccgcccacccactctcaccccaaacaaaatcacaaaacctggacatccctcaaggggcgaagaggcggccgggagactgcagaagtggctccttttcataaactcccctaaaccacacacaggagagagcgacgggcctcggccctttgatgatagcacatggcgcaggacccttgtc

SEQ ID NO: 65035 - DNA, 55 bp, Homo sapiens
  chr2:237034240-237034295
  hypo
agatggggtggttttccgaatgccagaccgaggtgccttacgaaggcagctgcca

SEQ ID NO: 65036 - DNA, 162 bp, Homo sapiens
  chr2:237037748-237037910
  hypo
gcctttggcatcaatgcgtgcattctccacctttccgcggcttgcgcttggatttctgagtggctttcttcagggagcccttgtggtcatgtgtctttaatgctgctccccatgcccccaggccaggccagcacgctcaggtgatagcgagtggggccagga

SEQ ID NO: 65037 - DNA, 823 bp, Homo sapiens; identical to SEQ ID NO: 2319
  chr2:237075812-237076635
  hypo

SEQ ID NO: 65038 - DNA, 349 bp, Homo sapiens; identical to SEQ ID NO: 38777
  chr2:237076656-237077005
  hypo

SEQ ID NO: 65039 - DNA, 206 bp, Homo sapiens; identical to SEQ ID NO: 38778
  chr2:237077033-237077239
  hypo

SEQ ID NO: 65040 - DNA, 105 bp, Homo sapiens; identical to SEQ ID NO: 38779
  chr2:237077284-237077389
  hypo

SEQ ID NO: 65041 - DNA, 31 bp, Homo sapiens
  chr2:237225643-237225674
  hypo
atcataggcgctcagccgggcgaggtggctc

SEQ ID NO: 65042 - DNA, 31 bp, Homo sapiens
  chr2:237482705-237482736
  hypo
gggggtgatgggcctgcgtgccttcccaatt

SEQ ID NO: 65043 - DNA, 374 bp, Homo sapiens
  chr2:237489567-237489941
  hypo
agcagcaggaagaagatggtacgccgtgtcgtctgcatcctggtgtggctgctggccttctgcgtgtctctgcctgacacctactacctgaagaccgtcacgtctgcgtccaacaatgagacctactgccggtccttctaccccgagcacagcatcaaggagtggctgatcggcatggagctggtctccgttgtcttgggctttgccgttcccttctccattatcgctgtcttctacttcctgctggccagagccatctcggcgtccagtgaccaggagaagcacagcagccggaagatcatcttctcctacgtggtggtcttccttgtctgctggctgccctaccacgtggcggtgctgctggacatcttctc

SEQ ID NO: 65044 - DNA, 108 bp, Homo sapiens
  chr2:237496906-237497014
  hypo
gaatgtatgttggcacggcaacatgtcatggggcgagcggcaaacatgtcctgtcggtggcggtggcgtgtctgaaagggccttgggctccaccgtgccatgctggat

SEQ ID NO: 65045 - DNA, 200 bp, Homo sapiens; identical to SEQ ID NO: 17109
  chr2:237542534-237542734
  hypo

SEQ ID NO: 65046 - DNA, 21 bp, Homo sapiens
  chr2:237543918-237543939
  hypo
ttatcttttgagacagagtct

SEQ ID NO: 65047 - DNA, 201 bp, Homo sapiens
  chr2:237544238-237544439
  hypo
gtttgcggcacattggtagggtagccacgggaggccggtgcacactcctctcacacatcgggacggtgtgaagtgggtgagagcacatgtctgacacaggctggcgcagagccaacccgccgcacctgctgggccccaccggctgttatcctgccttatccacccgccctccccactcccgaagaagggctctgccctctg

SEQ ID NO: 65048 - DNA, 31 bp, Homo sapiens; identical to SEQ ID NO: 17110
  chr2:237686475-237686506
  hypo

SEQ ID NO: 65049 - DNA, 30 bp, Homo sapiens; identical to SEQ ID NO: 2326
  chr2:237714754-237714784
  hypo

SEQ ID NO: 65050 - DNA, 26 bp, Homo sapiens
  chr2:237806448-237806474
  hypo
aattattaagaagtttcgggccgggc

SEQ ID NO: 65051 - DNA, 57 bp, Homo sapiens
  chr2:237973043-237973100
  hypo
agcctgagacgatgcgaggctatcgctgccgcagtaccgggcggagggcctgtctga

SEQ ID NO: 65052 - DNA, 30 bp, Homo sapiens
  chr2:238264583-238264613
  hypo
ctcaggccagaggccgcctgcggagactct

SEQ ID NO: 65053 - DNA, 31 bp, Homo sapiens
  chr2:238268758-238268789
  hypo
tggaaaccttgagtgccgttcacaccaggcg

SEQ ID NO: 65054 - DNA, 30 bp, Homo sapiens; identical to SEQ ID NO: 17113
  chr2:238274430-238274460
  hypo

SEQ ID NO: 65055 - DNA, 657 bp, Homo sapiens; identical to SEQ ID NO: 17114
  chr2:238280411-238281068
  hypo

SEQ ID NO: 65056 - DNA, 536 bp, Homo sapiens; identical to SEQ ID NO: 17115
  chr2:238283028-238283564
  hypo

SEQ ID NO: 65057 - DNA, 43 bp, Homo sapiens
  chr2:238359553-238359596
  hypo
ggctggtggccaccaccgtgaacagggccggcaaatgtttcct

SEQ ID NO: 65058 - DNA, 152 bp, Homo sapiens; identical to SEQ ID NO: 38796
  chr2:238384222-238384374
  hypo

SEQ ID NO: 65059 - DNA, 42 bp, Homo sapiens
  chr2:238392736-238392778
  hypo
attacaggcgtgagccaccgcgcctggccttatgaaatttta

SEQ ID NO: 65060 - DNA, 30 bp, Homo sapiens; identical to SEQ ID NO: 17118
  chr2:238473832-238473862
  hypo

SEQ ID NO: 65061 - DNA, 83 bp, Homo sapiens; identical to SEQ ID NO: 17119
  chr2:238492722-238492805
  hypo

SEQ ID NO: 65062 - DNA, 792 bp, Homo sapiens; identical to SEQ ID NO: 38799
  chr2:238536092-238536884
  hypo

SEQ ID NO: 65063 - DNA, 172 bp, Homo sapiens
  chr2:238540446-238540618
  hypo
tgcattaggaactcaccgtggggccttgagacagtgcggtgagcttattatcccctggtggtgccataggtaccccttcctcacccagcaggacggaggccctccccccataactgtttctgcagcctcctctccaagctggcccctctgtggcctgcggcctcgggccctg

SEQ ID NO: 65064 - DNA, 31 bp, Homo sapiens; identical to SEQ ID NO: 17121
  chr2:238550619-238550650
  hypo

SEQ ID NO: 65065 - DNA, 31 bp, Homo sapiens
  chr2:238552317-238552348
  hypo
gaccctggatcactagcgtttagtggcagaa

SEQ ID NO: 65066 - DNA, 31 bp, Homo sapiens
  chr2:238553952-238553983
  hypo
gaagccctggagttgtcgtggctcagccccg

SEQ ID NO: 65067 - DNA, 31 bp, Homo sapiens
  chr2:238590665-238590696
  hypo
gtgctgggctcgaagacggacagctgcctga

SEQ ID NO: 65068 - DNA, 220 bp, Homo sapiens; identical to SEQ ID NO: 38801
  chr2:238617173-238617393
  hypo

SEQ ID NO: 65069 - DNA, 175 bp, Homo sapiens
  chr2:238625969-238626144
  hypo
gtttccctgaggtcccaacaccggaatggctctgagcttctgcttctcttcgatggtgttttattccttcatcgcgtttgctttgaaggcatgagcagcctgttggagggggcgtgaaggctgctgggccggctttactgtcctgctctcccccgaggcccttcacctggggaag

SEQ ID NO: 65070 - DNA, 63 bp, Homo sapiens
  chr2:238629645-238629708
  hypo
gatgatttatatgcataggcacgttggttgtttctttctcccgagatgaagtcatcttttttt

SEQ ID NO: 65071 - DNA, 30 bp, Homo sapiens
  chr2:238657861-238657891
  hypo
cctgtctgcagccacgctggcctctctggg

SEQ ID NO: 65072 - DNA, 321 bp, Homo sapiens
  chr2:238707006-238707327
  hypo
cccgggagggaccacgcggcctgggaaacagttcggcaaggaggccgggcccctgtcccgcctctgagggcggaggactcggcctgcaccggacccaagcgaggggcagtctggcctctgctggcagaagcagcgcttccaagtattttcatatggtgactttgcagagctgcgcggtccagacgagggtttcaggctgcaaagcgggaaagtcttgggggccgctctgcgctccaagacagacgcccacaatctcttctacgtcgtgcaacattcaagcaggcggcctccttcccgcgctttcgcgcccacaggctgggc

SEQ ID NO: 65073 - DNA, 30 bp, Homo sapiens
  chr2:238708540-238708570
  hypo
cctgtggtttctggcgataccattccctgg

SEQ ID NO: 65074 - DNA, 41 bp, Homo sapiens
  chr2:238785778-238785819
  hypo
ccgggctgcaggggcgcgcgggctggcggtgatacccctag

SEQ ID NO: 65075 - DNA, 177 bp, Homo sapiens; identical to SEQ ID NO: 17124
  chr2:238786044-238786221
  hypo

SEQ ID NO: 65076 - DNA, 31 bp, Homo sapiens
  chr2:238786475-238786506
  hypo
acagcccccagcaggacggcttcagccgaac

SEQ ID NO: 65077 - DNA, 31 bp, Homo sapiens; identical to SEQ ID NO: 2330
  chr2:238791402-238791433
  hypo

SEQ ID NO: 65078 - DNA, 34 bp, Homo sapiens; identical to SEQ ID NO: 17126
  chr2:238793663-238793697
  hypo

SEQ ID NO: 65079 - DNA, 31 bp, Homo sapiens
  chr2:238819638-238819669
  hypo
aaaatagtcacacacacggtcacacagagaa

SEQ ID NO: 65080 - DNA, 33 bp, Homo sapiens
  chr2:238820427-238820460
  hypo
ggggcccaggctgcccgcgggtgcacccaggct

SEQ ID NO: 65081 - DNA, 52 bp, Homo sapiens; identical to SEQ ID NO: 17128
  chr2:238822392-238822444
  hypo

SEQ ID NO: 65082 - DNA, 464 bp, Homo sapiens; identical to SEQ ID NO: 38803
  chr2:238864726-238865190
  hypo

SEQ ID NO: 65083 - DNA, 18 bp, Homo sapiens
  chr2:238874441-238874459
  hypo
gcccggctgagttgtgtt

SEQ ID NO: 65084 - DNA, 52 bp, Homo sapiens; identical to SEQ ID NO: 2332
  chr2:238876149-238876201
  hypo

SEQ ID NO: 65085 - DNA, 30 bp, Homo sapiens
  chr2:238885933-238885963
  hypo
ccaggcactggtagcgattaagtttcagag

SEQ ID NO: 65086 - DNA, 30 bp, Homo sapiens
  chr2:238934773-238934803
  hypo
ctgagtccagctcgccgcccccgcccccac

SEQ ID NO: 65087 - DNA, 32 bp, Homo sapiens; identical to SEQ ID NO: 38805
  chr2:238967038-238967070
  hypo

SEQ ID NO: 65088 - DNA, 40 bp, Homo sapiens; identical to SEQ ID NO: 17133
  chr2:239005247-239005287
  hypo

SEQ ID NO: 65089 - DNA, 279 bp, Homo sapiens
  chr2:239010178-239010457
  hypo
gggaccctgtggccagcgggagggcactggggcaggggaccagccagaggtaggtgtcctgggaagcctttctgaccatgagcagagtgggcaggtgtctgcgggcacccgactgcgtgggaaagggccttctccacactggggacgggcccaggagagggcagggttgccagaggtggcctcccaagacctggacctgagtcctggccctcctctcacctcagtcccagcagggagcacctccctccatgttgcaggcagaaacggagggaaggagga

SEQ ID NO: 65090 - DNA, 30 bp, Homo sapiens
  chr2:239010664-239010694
  hypo
gggccactcggccacgctagagacccggga

SEQ ID NO: 65091 - DNA, 72 bp, Homo sapiens
  chr2:239011436-239011508
  hypo
ctgtcttggctgagggcgaaccttcctgtcccccagggacccacctacctctgaccacggctcttctctttt

SEQ ID NO: 65092 - DNA, 31 bp, Homo sapiens
  chr2:239012748-239012779
  hypo
tgagaggggaagggcccggaggtggagggtc

SEQ ID NO: 65093 - DNA, 31 bp, Homo sapiens
  chr2:239030394-239030425
  hypo
gccctggtgggccctccggacaggtgtactc

SEQ ID NO: 65094 - DNA, 31 bp, Homo sapiens
  chr2:239033394-239033425
  hypo
caggagagtgtacatgcgtgtgtgcaggaga

SEQ ID NO: 65095 - DNA, 74 bp, Homo sapiens
  chr2:239039047-239039121
  hypo
gaggcctcaatcccagcggctgagcccgcagggtctgcggaggcctcagaggtggcccccggggtgcagcccct

SEQ ID NO: 65096 - DNA, 30 bp, Homo sapiens
  chr2:239039944-239039974
  hypo
cagctgctggagtgcgacctgccggcggag

SEQ ID NO: 65097 - DNA, 170 bp, Homo sapiens
  chr2:239041689-239041859
  hypo
ctagggcccaaggggacggacactcaagaagatgtaaaattgggaggggtggtattggccattggggcaggcagggccgggaagggaagtagcaccggccgcagccccaagccagtggcttttccacaagggcctatcctgcagccggcccgctccggcttcctccactg

SEQ ID NO: 65098 - DNA, 742 bp, Homo sapiens; identical to SEQ ID NO: 17136
  chr2:239049367-239050109
  hypo

SEQ ID NO: 65099 - DNA, 128 bp, Homo sapiens
  chr2:239056570-239056698
  hypo
cggctgccggctgccggggccggctctacctggtgggctccagcgcctgcaagtacaacgccctggccctgcagtgctacaaccctgtcacaggtgggtggggctcagggaccgaggatagaggacca

SEQ ID NO: 65100 - DNA, 31 bp, Homo sapiens
  chr2:239057679-239057710
  hypo
cccaagtacctgtcctcgcctcgctgtgctg

SEQ ID NO: 65101 - DNA, 513 bp, Homo sapiens; identical to SEQ ID NO: 17138
  chr2:239059357-239059870
  hypo

SEQ ID NO: 65102 - DNA, 175 bp, Homo sapiens; identical to SEQ ID NO: 17139
  chr2:239065003-239065178
  hypo

SEQ ID NO: 65103 - DNA, 30 bp, Homo sapiens
  chr2:239070193-239070223
  hypo
ccagtgaggccaaccgccctgctgggctgg

SEQ ID NO: 65104 - DNA, 283 bp, Homo sapiens
  chr2:239074293-239074576
  hypo
ccatctctgtgaatggcgtcctgtacctgcaggtgagtgcggcaggcttgggcatcgaggggcaccgcctgggcatggccacgggtggctgggtgcagaagggtgctgttagatgctcaggatcactgggtcgggtgcagcaccctcagactccaggcctgggagagggtccaggacatgccaagttctcactttggtctgggcgcagccaggcttcaagtcctgatctccttcctccaaacacagcccttccccgagggcacctgcccgcttgagcagctgc

SEQ ID NO: 65105 - DNA, 62 bp, Homo sapiens; identical to SEQ ID NO: 17141
  chr2:239082211-239082273
  hypo

SEQ ID NO: 65106 - DNA, 110 bp, Homo sapiens; identical to SEQ ID NO: 17142
  chr2:239083095-239083205
  hypo

SEQ ID NO: 65107 - DNA, 30 bp, Homo sapiens; identical to SEQ ID NO: 17143
  chr2:239091668-239091698
  hypo

SEQ ID NO: 65108 - DNA, 30 bp, Homo sapiens
  chr2:239133338-239133368
  hypo
caatgtaaaattcccgcatcgctgctgaga

SEQ ID NO: 65109 - DNA, 31 bp, Homo sapiens; identical to SEQ ID NO: 17144
  chr2:239144284-239144315
  hypo

SEQ ID NO: 65110 - DNA, 30 bp, Homo sapiens
  chr2:239147430-239147460
  hypo
gccgggcccacccccgcaggactctggctg

SEQ ID NO: 65111 - DNA, 1057 bp, Homo sapiens; identical to SEQ ID NO: 38810
  chr2:239148239-239149296
  hypo

SEQ ID NO: 65112 - DNA, 30 bp, Homo sapiens
  chr2:239161473-239161503
  hypo
gaactgaggatgtgcggccggcctgccagg

SEQ ID NO: 65113 - DNA, 31 bp, Homo sapiens; identical to SEQ ID NO: 17147
  chr2:239167113-239167144
  hypo

SEQ ID NO: 65114 - DNA, 31 bp, Homo sapiens; identical to SEQ ID NO: 17148
  chr2:239188970-239189001
  hypo

SEQ ID NO: 65115 - DNA, 79 bp, Homo sapiens
  chr2:239192199-239192278
  hypo
gaggctggagcagagcgggcagcggtaggagggcggcagcaaggccagatcacggagtgccttgcgggggcagtcagaa

SEQ ID NO: 65116 - DNA, 56 bp, Homo sapiens; identical to SEQ ID NO: 17149
  chr2:239211885-239211941
  hypo

SEQ ID NO: 65117 - DNA, 207 bp, Homo sapiens
  chr2:239212967-239213174
  hypo
caaaactgggcaggagcgtgccaagtgatgccccagaagccagctgtgtgccagggtgattctcctccaccccggttccagcagcccttcctgctcttgaggatcagagccagtcacccctgctgggacaccgactcctttccttgcttgctcgtcttttggcacagagcctgagtgaccagtgacagccatcgcttattgtccact

SEQ ID NO: 65118 - DNA, 165 bp, Homo sapiens
  chr2:239224074-239224239
  hypo
tttgggaagactctcccgctttcagccaccacagcatcacctgcatctggtgcagcacccctggagggccctgtcatcctgtgaagatgaccgccctctctctaacacctgggagcaggaggctgctgcagtcttgtctaagggcttcatcgtttcagagcttta

SEQ ID NO: 65119 - DNA, 17 bp, Homo sapiens
  chr2:239265428-239265445
  hypo
tttttttttgaggtaga

SEQ ID NO: 65120 - DNA, 50 bp, Homo sapiens
  chr2:239265744-239265794
  hypo
aatacatgttctattgtacctggttccccgcagtctccctcacacatgtg

SEQ ID NO: 65121 - DNA, 30 bp, Homo sapiens; identical to SEQ ID NO: 17151
  chr2:239306154-239306184
  hypo

SEQ ID NO: 65122 - DNA, 30 bp, Homo sapiens; identical to SEQ ID NO: 17152
  chr2:239333817-239333847
  hypo

SEQ ID NO: 65123 - DNA, 39 bp, Homo sapiens
  chr2:239344602-239344641
  hypo
tctaccacgcctctcgcgtgggccgggcagacatcctga

SEQ ID NO: 65124 - DNA, 30 bp, Homo sapiens
  chr2:239349745-239349775
  hypo
tgattgagttcatgcgtttctttttgcttt

SEQ ID NO: 65125 - DNA, 57 bp, Homo sapiens
  chr2:239467686-239467743
  hypo
caagcatagctggcagcgatccggacagaggggggtgcccaccgtggagaaggttca

SEQ ID NO: 65126 - DNA, 31 bp, Homo sapiens
  chr2:239475086-239475117
  hypo
agggcatcagtgcaggcgacaacagcccctt

SEQ ID NO: 65127 - DNA, 168 bp, Homo sapiens
  chr2:239482479-239482647
  hypo
tctgataacacaaagcttatccgagcgctttttttttcttaaaactcccaattggctgcgtgatgtgctttgtccaacagggccccccgctgagcctctttgggtctcccagagttggccctgccttccctgagccggaagtatcccgccagcctccctgtgccccat

SEQ ID NO: 65128 - DNA, 241 bp, Homo sapiens
  chr2:239494956-239495197
  hypo
gagctgctgggggtgcgctggggcggatgaccacaccacgaggctctgtgcactggcaggcccagtccccgtcacatgcgggtccaagacactccacggcagcattcctgctttgacaacacgtttcccacttggagtgaaatcagtccgtgaaaatctctgcctgggactgcctgctctctgcccaagtgcagcagccgcagaacaagcccgattctccgagccccgtcagccgtccatg

SEQ ID NO: 65129 - DNA, 31 bp, Homo sapiens
  chr2:239709447-239709478
  hypo
agaattatgtacatcccgtaatacttgataa

SEQ ID NO: 65130 - DNA, 31 bp, Homo sapiens
  chr2:239780653-239780684
  hypo
actctacgcttcaaaacgttaagacggtcaa

SEQ ID NO: 65131 - DNA, 380 bp, Homo sapiens
  chr2:239800561-239800941
  hypo
caagctgtatttgtgcacctgcgcaaggcgggaccactgaaatttagccctggagttcgttcacggagccgctgaccacttatcccttcctcttcagcatgtgcttgccgctgagccatgcgggtgctgtgttctctgttatgtgccggtgtgtggactggaacccgcctgcagcagccactcccacctgccctcgggaccctgactgtacatgggctgagccaggcaaccaccggaagggtgagtccttccccaggactcagcgggtgagagactccggctcacctcacggcggaacgcagacacctgagagcccgcaagcctcaggacagagagaaacagaggtccaggtggaaatgcggaggcggcacgaggagggg

SEQ ID NO: 65132 - DNA, 31 bp, Homo sapiens
  chr2:239834260-239834291
  hypo
gcggcggccgcctctccgggcatcaccgcct

SEQ ID NO: 65133 - DNA, 30 bp, Homo sapiens
  chr2:239888048-239888078
  hypo
cactcaggtgacttcgtcgcagggctgttc

SEQ ID NO: 65134 - DNA, 450 bp, Homo sapiens
  chr2:239888393-239888843
  hypo
ctggtgagtggtcagccaggacgtggctccccgtccctccggtgaccaggtgggcactggctcctgatggttcgaagccccggtcagcccccgccatccctaaactagtgacttccacttgcgttctcccccagggtcttcggggcaccccacgggagagagcacctgcaaggaccataacacgtgaggctgtgctgagtcctacgacaggcaggaacttgtacttggcccccggcgacccgggcgatttgcgggtcttcctcttggtttaacgaaggctctagcccggttccggagcccaccaagacgctgaagccatcagttcttggcttgcatttctagagccacccgtgtagttgcgagacagtgagaaagttcgcccgagttgcaatcctgcccgtgcctctgtctaggagcgactgtggcttcgggttaagcctctgtctttac

SEQ ID NO: 65135 - DNA, 79 bp, Homo sapiens
  chr2:239925670-239925749
  hypo
ttgagaacttcatggaagcctcgcattttgcagcaatgccgggtccgtgcgtaccatcgtctgtcctggttgtgtctct

SEQ ID NO: 65136 - DNA, 30 bp, Homo sapiens
  chr2:239947344-239947374
  hypo
tggggactgcatccacgcttctgctgttcc

SEQ ID NO: 65137 - DNA, 41 bp, Homo sapiens
  chr2:239957266-239957307
  hypo
cctagcctagcagccccgctctcctgcgggctcccccgtgg

SEQ ID NO: 65138 - DNA, 57 bp, Homo sapiens
  chr2:239958979-239959036
  hypo
gggtgctcgcctaggccgtgtgggttctctgtctttcctgttcgctgcatttgtgct

SEQ ID NO: 65139 - DNA, 934 bp, Homo sapiens
  chr2:239969831-239970765
  hypo
gaggaagagagcgcacgggcagaaaccagagctgggagggcaagtaacgcagtctttatttacaccacaagataacacgttgcgtgatgtggtacagaatactggactccagtgaagtggaaagaaggtgaccgtcagaagaggatatcattggtcggtgaaaatccacccacacaaaacaagacaagaatgagaaaaccaaacacaaaacctccaactccactgagcaaaagaaagaaccatcgggcacgtccagacaatccaagagaaacggattaaattacagaggtgaatggtggccacggccagtgcgcagctcacggcgggcgcgaacaggcatcaggtaggttacagtgtcgttacaacttggttttctaccacattccgtaagaagctcttgggtgagtaaggttcaagccccctgtatagatagatagatagatagatagatagatagattatatatgtttgtcattctcatcaattggaaaatagcgcctccactatggagcacacacggcaaaaaaaacaaacaaaaactgttcgctttctttttctttcaatagcagacttttaatcaatgccagagacaaagtgaggccgagctaagaacacgctcagcttcgttacaatgaagaaatggtttcctttcgatgcaaagtataattgtaaaccacagtgctcgcacagttcacgactgcttaaagtgaaatcttagccatacatcacctaaaagtaattaaaaagtcaacacagctgtgcggaaaaggggactctttcgagtccgcccagttctcaatcagaataaaccgtcacaaggccagtgagggcgggcggcgctcgcctggcccgtggaaggagataaaaggaaacaaacaaaacaaaacaaaacaaaattcctccaaatcaactcgagagagacaggcagttcact

SEQ ID NO: 65140 - DNA, 65 bp, Homo sapiens
  chr2:239971538-239971603
  hypo
ggcacggcgggaagccgcgagggcagggcagacgccaagaggcccagtggcgtcatcagggtttc

SEQ ID NO: 65141 - DNA, 809 bp, Homo sapiens
  chr2:239973929-239974738
  hypo
tggccccggagatgacggctggtgcccgtgcttgaggcgtcaggccagctcgcggtgccagcactgccaggctcggctggccacaggaaactgtcccaccgattcctgctgtttgttttttcttaaggcattgttcctcagacttcagaaaacccagccacaaaaatccaccagagcaataaaaaaaaaggcacaaactcgcatcttccgatggcttttgagaaactcaagccagctcccccagctcacattcctgtttctgtccagttttgttttctttaaaggtccctctgtcccccacccgggtgcagaccccccgccgcacaccgctatggttcacagaggcgggccacagccgtagaaaacgtcctctttaaaaaaaaataagctacaagatgagtcgagtggtttacacagagactgtggagttgtgggtaataaactttaagcaccagttttaatcaagtttgttttgtattattagatctttgatatttgttttctgtgcctcgtgtcaactgaattcggcagctcggccgcctgttgccacaggctcctttcttccacggcgtcccttgcgggacccgccagagtgtgcttggcttccgcgtgtccgtgtgtctgcgcgtcgccggcgtctgtcccgtgttccctgtgaggctgccacgcccaggcgtgcatgtgcgtctcgagacctgtgggcctgggcggcagaaaggcttcccgtggctgttgcacgctgggtgtccctgggtgctccaagagagccccacggtgggacgcaggcgtgacacgggaaagtttcttgg

SEQ ID NO: 65142 - DNA, 30 bp, Homo sapiens
  chr2:239982754-239982784
  hypo
acgtggaccctgtgcgcgccacaatcggct

SEQ ID NO: 65143 - DNA, 206 bp, Homo sapiens
  chr2:239986520-239986726
  hypo
ggaggcgtcctctgcgaggtgccctgtgtgctggccacctcgaggcccactgcgcatgctgaggccactcacagacagtgggccagagagtggaccctccctctgcattttccagaacaatgcgaacgatgcctgcacaccagaccccgcgagcgccgtgcttaactacaggggtccgtggcctcctgtgcggcctgacgtttccc

SEQ ID NO: 65144 - DNA, 297 bp, Homo sapiens
  chr2:239997290-239997587
  hypo
ctaaggggagagagcggcttctcctcgcggtggcctctgcatttagggaggtcccgtgtgaagccgtggggtgccacgcatccccttcccgtggcctcaatgtggcttctctggcaccttcgttaccgacacagcactgcacccttcactcggtcatcagccaacctgcacctgcagcctgaagacgacatctcccctcagcttcccagggaatagagctgggctgggacagcagacaggtgccagccactccccttggtttcccgggaaacaaagctgggccgggatagcaggtgg

SEQ ID NO: 65145 - DNA, 139 bp, Homo sapiens; identical to SEQ ID NO: 17157
  chr2:239999814-239999953
  hypo

SEQ ID NO: 65146 - DNA, 189 bp, Homo sapiens
  chr2:240002663-240002852
  hypo
ggaccccacagccccgttcagccacagaccagtttcagacacgctcatctccaacaagtgcttcctggaatgtgtgcacagaggaaaagctgctacttcaggtgtcatgtgaagccgggaggctcacctgaaggccgccaagtactcagcgtctcccatgggggggtccaggccgccggtgaaagccat

SEQ ID NO: 65147 - DNA, 30 bp, Homo sapiens; identical to SEQ ID NO: 17158
  chr2:240003159-240003189
  hypo

SEQ ID NO: 65148 - DNA, 180 bp, Homo sapiens; identical to SEQ ID NO: 17159
  chr2:240015871-240016051
  hypo

SEQ ID NO: 65149 - DNA, 30 bp, Homo sapiens
  chr2:240016396-240016426
  hypo
actgccacagacttcgaaggggatgagatg

SEQ ID NO: 65150 - DNA, 30 bp, Homo sapiens
  chr2:240018007-240018037
  hypo
agcccacggatgcccgcaccccctacggac

SEQ ID NO: 65151 - DNA, 30 bp, Homo sapiens
  chr2:240026632-240026662
  hypo
gctctgcgacaccgcgacggctggggctgc

SEQ ID NO: 65152 - DNA, 30 bp, Homo sapiens
  chr2:240027044-240027074
  hypo
gctgttctggctcccgggaagcctctgcag

SEQ ID NO: 65153 - DNA, 131 bp, Homo sapiens
  chr2:240029793-240029924
  hypo
ctggatcctcccggcgtgctcggggtggctgctgctactcccgcaggtgcactggtgcttcagcatcagcgtgtcatacacgaggcctggggcggggcagaggggccaagatcagcgcacatccaggggcg

SEQ ID NO: 65154 - DNA, 30 bp, Homo sapiens; identical to SEQ ID NO: 17160
  chr2:240036882-240036912
  hypo

SEQ ID NO: 65155 - DNA, 553 bp, Homo sapiens
  chr2:240054227-240054780
  hypo
gcacagagcctgggcagggcacggtgggcaggtccccatgccaacgagcaagctgcacctgggaggaaaagagggatgagcgcacacagggaagaagcaacgccgagttcagtgcgtttctcagagaggtgagacccatgcacactcgatatccaggttctatcaaaaaggctgttttccaaaaacctgatacacaagattacgcatgctatttaatcgtgcagaataaactgatttagagaaggaaagaagataagtgacaaacatctctgacgaagtgaatcccaggaatcctgaagatcaggcacattttacgtttttaaagacaggcgagaaactcaggtgtccttcactacccacactcgtgccagctgatctagagcatccaagagactcagacgcaacctcagatacattcctccagagagatccgcgtgcctgccactgtggccgcagctcagagaggcactgtgagggctgccccctccctcgttacaccacgggctcctctgctctggacaggcagggacacgaattcaagcttctggagaaa

SEQ ID NO: 65156 - DNA, 30 bp, Homo sapiens
  chr2:240056009-240056039
  hypo
ctgcccctccgtcccgctccaagggcgagg

SEQ ID NO: 65157 - DNA, 30 bp, Homo sapiens
  chr2:240061312-240061342
  hypo
atttcaagctcatccgtcccgagtccgact

SEQ ID NO: 65158 - DNA, 41 bp, Homo sapiens; identical to SEQ ID NO: 17161
  chr2:240064715-240064756
  hypo

SEQ ID NO: 65159 - DNA, 362 bp, Homo sapiens
  chr2:240066059-240066421
  hypo
actaatgccaggagcagggcccggcttagacatgccggagtcatcaaacctggtcccctgggcctggcacttccagcgccatgggaacaggaccacactgggggttgacagcgtgaggcagacacgtgggttttcagaagctcctgagagaaatcgcctatggcaggaaggcctggcagagagggcagcggggcgggtgtacctgctcagccgacatacctgtgacatccaacggacgcttttttagagcagtgaccactggcccgtctttcctgcgtaacagggggctgctccgtctttcggccactttctgctttagcctggaccgtaatttcagattcggttcagaagctgcacaaaaa

SEQ ID NO: 65160 - DNA, 147 bp, Homo sapiens
  chr2:240067064-240067211
  hypo
tactgggcgtgggtcggtttctgtgaacagctctgcctgtgtggacagagccatttgcgaatctacacctttcagcccaccgtggtccccaactcatctgcatctggaacccaaacctccggcgcgaggcccgccttgggaagcact

SEQ ID NO: 65161 - DNA, 31 bp, Homo sapiens; identical to SEQ ID NO: 17164
  chr2:240077540-240077571
  hypo

SEQ ID NO: 65162 - DNA, 173 bp, Homo sapiens
  chr2:240080392-240080565
  hypo
cacaccatgcagagcccgccccaccgcgcacccgccctccagacaccaggagagggcggccctcaccgtcagggcaggtcacacccgcccagccctggtcacatggtcccaggccagaccgcacacgcgtgccctccgcgaagaagcgtccagcagggcgagcagaagtgaag

SEQ ID NO: 65163 - DNA, 30 bp, Homo sapiens
  chr2:240084853-240084883
  hypo
gtctctgtcaattgcgtgggccctggcagg

SEQ ID NO: 65164 - DNA, 31 bp, Homo sapiens; identical to SEQ ID NO: 17165
  chr2:240097929-240097960
  hypo

SEQ ID NO: 65165 - DNA, 30 bp, Homo sapiens
  chr2:240101489-240101519
  hypo
agcctgagagcccacgcggcgtgctcaggg

SEQ ID NO: 65166 - DNA, 145 bp, Homo sapiens
  chr2:240103577-240103722
  hypo
cacttttgaaagatgtcgcctagagacgccgacttcctgcagacactaaatatcctaaggtaaaatcaggccccctcaaggctagggagatactacctggagcacaccttcctaacgcggtgttccttgccgccacatgcaagca

SEQ ID NO: 65167 - DNA, 73 bp, Homo sapiens
  chr2:240105081-240105154
  hypo
gcgcccgcataaagcggcaggggccaggaggaaagggcggcagaatggacgccacggacggtaagctgccgcc

SEQ ID NO: 65168 - DNA, 174 bp, Homo sapiens
  chr2:240107030-240107204
  hypo
cctatgaagggtgccccgtgtctcgtggggagacatgtgccctgcagggggtgccccacgcctcctggggagaggtgtaccctaactgctggggaaaggtgtgccctgtgggggtgtcccgtgcctcctggggagagatgcaccctgcagggggtgccccgtgtttcctaggga

SEQ ID NO: 65169 - DNA, 30 bp, Homo sapiens
  chr2:240111548-240111578
  hypo
gcgcctcgtgctgccgggagagctgctcgt

SEQ ID NO: 65170 - DNA, 78 bp, Homo sapiens
  chr2:240112234-240112312
  hypo
cgaagtcaccgtgccgctgtgagagccacaagagcgtgtgccccagaagtggtccagacagacgctcgagacccggag

SEQ ID NO: 65171 - DNA, 30 bp, Homo sapiens
  chr2:240115663-240115693
  hypo
aattcccatcacaacgcaggcacctggcca

SEQ ID NO: 65172 - DNA, 459 bp, Homo sapiens; identical to SEQ ID NO: 17166
  chr2:240116629-240117088
  hypo

SEQ ID NO: 65173 - DNA, 189 bp, Homo sapiens
  chr2:240117492-240117681
  hypo
tgagagcacaaaggccgcattcagagtccaatgggagacggtcagtgtgctgtgaatgaattctcaatcacaaacagaaaaacctgttagtctctctctctcgctcttttaaaataaatgttcataaagaagcatactgattttccacgacatgcttaggtcctcttctcaggacgcgatttcatgcca

SEQ ID NO: 65174 - DNA, 30 bp, Homo sapiens
  chr2:240118236-240118266
  hypo
gggacaggacagtctcgagtccgagtctgc

SEQ ID NO: 65175 - DNA, 30 bp, Homo sapiens
  chr2:240118604-240118634
  hypo
cagtctggtgaggccggcccagacgctgcc

SEQ ID NO: 65176 - DNA, 30 bp, Homo sapiens
  chr2:240123835-240123865
  hypo
cctcacctcatccacgaaccttggaaccag

SEQ ID NO: 65177 - DNA, 37 bp, Homo sapiens
  chr2:240129718-240129755
  hypo
caagaaaacacaagaaaaggccgggcgcggtggctca

SEQ ID NO: 65178 - DNA, 37 bp, Homo sapiens
  chr2:240165273-240165310
  hypo
agctgcttttcagacacgggaacggaagcttagggct

SEQ ID NO: 65179 - DNA, 402 bp, Homo sapiens
  chr2:240167510-240167912
  hypo
tctacctaacttgttccttcacgaatatcccaacagtcttcagttcatccccagcccctatgtgttcaagcagacacacacgtctggttcacagctcagcgagcaggccctgagcgtctgggaacgtgagagtgagcaacgcagaggcctggccccggcccagcagaaccggcaacccacactggctgcctgcgtccagtcccgccatggggtctgcctggtgccagcacctgcccagacacagggcagaggagactgcaggggggtgtccagctgctctcacgtgccaggccaggcttgctaacacctgtggcttagtcgggtgatagggacaaaacgtgcaaactgagcccgctggacacgcagactcagcaggcaggcagagcccggtggggaggcaaa

SEQ ID NO: 65180 - DNA, 372 bp, Homo sapiens
  chr2:240168780-240169152
  hypo
gatgaaaggtgatgcagctatcggcaatggctggagactagctctgcggtctgctcgtggataaccgcgctccctcgctgccgggccacccgcacagccgggcaaaccaaaaggcccactttttcatgctgtacccaccacttctgtttccccgcaggcatcctactttctaaactaacaccttttcactcccgagaattctaacaaatattatacaattcctacccgcatctaccctccacctggacgtagaacccgtgtgggaggcagtcctgcagggtttggggtggaatatcccccctgtcgagtggagacgaggctgacatgaggagtgaataaacgaacacagataaagaacgaggcacacagtac

SEQ ID NO: 65181 - DNA, 193 bp, Homo sapiens
  chr2:240170921-240171114
  hypo
agacagaggagacacggctgcaggtccgaaggccatggtaaggaccttccattccgacttcagccaccatgcggagtgtcgcccagggcggggaggggctgcggaaggcgggggaggcggagagagagctgggagagatggggaaagggatccatcaggactctgcgatggacttggcgtgggtgtgccacac

SEQ ID NO: 65182 - DNA, 132 bp, Homo sapiens; identical to SEQ ID NO: 17171
  chr2:240172541-240172673
  hypo

SEQ ID NO: 65183 - DNA, 30 bp, Homo sapiens
  chr2:240187675-240187705
  hypo
ccgtatggcaggagcgtggcctgccttgcc

SEQ ID NO: 65184 - DNA, 30 bp, Homo sapiens
  chr2:240205155-240205185
  hypo
gtcgggctggccaccgcgaggggcctggga

SEQ ID NO: 65185 - DNA, 499 bp, Homo sapiens
  chr2:240212279-240212778
  hypo
acacacacacacacacaggcacgtgcgcacaagcagtcacgtacacacatgtacgcacacacaaccacacatgcgcgcacgcatgcattcagttcgcacgcgcatgcacacacacgcacgcacacactcacatacgcactcacgtacgcacacacgcgcacgcactcacacacacaccacacacgctcccgtgtttagtgtgtttctagggcactatggggagggccggggttctatacagggcctggcccacctgaaagtccatgtgaaaggcagcctccagggctcctatcaagtgggtggcttcgctcattcactcaggaatttttcgtggcacagtaaggcaaggggtggggatttttctttaaaagctttatccaatcatgactaatggaataagtgagccaggcctcaagaaaaccgaggacaaaaggaaagagccgttcagaaggcagcgcctgcctccacctgctggtgcgtgcccgggacagggaggacg

SEQ ID NO: 65186 - DNA, 220 bp, Homo sapiens
  chr2:240213546-240213766
  hypo
cttctccccgggagccgccgattacatttgcatgaaaatagaacctttgtttgcaagagttcccgctccagtggatccctcctttgtctgcagcacagcaactgatggggcaggatgctggtgtgtgcacacagcccagctcaggacagccacgccaggggctgcgcgcacggcccagctcggcccagctcagcccagctcagggcggccacaccagggg

SEQ ID NO: 65187 - DNA, 505 bp, Homo sapiens
  chr2:240226677-240227182
  hypo
aataggacagtcccgcgctttcttccagccggcctggggcatgtcaggaggcagggcctgtactgcaggctctgtgttcttagacagcctttgcagggggcagaggtgcccactgccacatgggcacacacaggaggctcaccacgtttcttcaaatgcagatgacaaagcagcttgagtaacacaaatacggccacactcatctgaggattgctgctgtgttttctaactgcatggccatgaccaagcagtcggttttcatccaggttggtagtcaggtttctgaaagcgatggcagtcgcctcagggctgacacggggagtctgcttggcacaccttcaccctcgttacattttctggacaatggtagggaacattccttactccgctggcctgtcagcttggctaagcctggtgcaagtggctcgctgtgggtccgcggctccattacgggggagtctgggtcatctgtgagcccaacagcgccctgcaggcacagacagcc

SEQ ID NO: 65188 - DNA, 181 bp, Homo sapiens
  chr2:240233008-240233189
  hypo
ggcacaagcaggcaccaagcccggagacacccgacgctcaccgttagactgggtagcatttgtcaagcgccgagcaaacagtggatgaagtgtcctcagccggcgtcagctgttctgatccgcagaacacataactcctggcactcctttccaagcatccgggaaatgtagaatccaagtg

SEQ ID NO: 65189 - DNA, 47 bp, Homo sapiens; identical to SEQ ID NO: 17176
  chr2:240234572-240234619
  hypo

SEQ ID NO: 65190 - DNA, 31 bp, Homo sapiens; identical to SEQ ID NO: 17177
  chr2:240247259-240247290
  hypo

SEQ ID NO: 65191 - DNA, 30 bp, Homo sapiens
  chr2:240265900-240265930
  hypo
gcctttctgttccccgccaagctgtgctca

SEQ ID NO: 65192 - DNA, 193 bp, Homo sapiens
  chr2:240270344-240270537
  hypo
tctgtgtcctgacaaacgcatcctgccctgccacagcgcatcccctcagggagggtgtggagggctggccgggcaaggggcgtaaggctccagggcctcctttcaaaggagagcccttccaggctaagtcaatccaggttcttccctcaggccgctcacatcattagaaatcgttctttagagcaataaaatc

SEQ ID NO: 65193 - DNA, 1069 bp, Homo sapiens
  chr2:240270754-240271823
  hypo
ctggactcccccagcccggcctgcccagggagtgagggcggcacgggcacccacaccaggccacacaggagcagggcccccatgccagatgggcaggcaagggtgagccaggcaggcaagagtgagccgggtgggcagggcgaaggacagggccagctagcagaggacggcacgagagacacacggagggaggggaggtgcagccaggtaggccccgaacaccacgttgccaggactcggctcctcggctcaaggaaaagggacagcggttccgtggctgtgctctgacacacctagaaatttcccgctcaagagagcaaactgaatcctttagtattaatgatttctcttcctcccaaaacccactaaaatgatgaaaagcaggattggaaagcacttccagcaatgcctgggagcggacggacaggtgcatcagctgacaagaaacacagaggaacttcccgaaactagagatctctggggatggagctgcttgggaaggcacacaagcgagtgggcctcgcccaggagggagggcacggttctgggcaagccccatcccccgcctgagacgtgggcagaggccgctgggccaccagccagtgtgtgcaggtggtggtatgcacgtgttgggcacaaggggtcctgcctcccaagggacctccgggcggaagggcagacacggcagggaaagatgacagcggacagggcagaggaggcagccagcagacttcaggccccaggcaaaccacctcagctgtaccccctgcacagatggagagcagagaatgggctgggccaaggggcagccctgccctcaccagtgcggcctgtcttcagcctccaacccactgagagagagaatggagaggtcgtgggtggcaataaggcgcacacaacccaactcacatgggcaggacaggcccgggcaggccggtgatcaaactgaaccgcagcggctgaaattcccacagaaaaggccaaacaaacccagcaccccgcggtttccagagctgagcctcaaagaacccggcctgaaaaggttagagacaagcggatggagaaatat

SEQ ID NO: 65194 - DNA, 240 bp, Homo sapiens; identical to SEQ ID NO: 38818
  chr2:240294231-240294471
  hypo

SEQ ID NO: 65195 - DNA, 30 bp, Homo sapiens
  chr2:240298220-240298250
  hypo
ctggcccgaaggcacgtgtctactaccatc

SEQ ID NO: 65196 - DNA, 30 bp, Homo sapiens
  chr2:240301916-240301946
  hypo
gctctgcaatggcccgcgtctttgggtaaa

SEQ ID NO: 65197 - DNA, 44 bp, Homo sapiens; identical to SEQ ID NO: 17182
  chr2:240312831-240312875
  hypo

SEQ ID NO: 65198 - DNA, 35 bp, Homo sapiens
  chr2:240316138-240316173
  hypo
cgccggggccctgggcgaagcggctggagaacaag

SEQ ID NO: 65199 - DNA, 121 bp, Homo sapiens; identical to SEQ ID NO: 17183
  chr2:240361082-240361203
  hypo

SEQ ID NO: 65200 - DNA, 143 bp, Homo sapiens; identical to SEQ ID NO: 2338
  chr2:240402417-240402560
  hypo

SEQ ID NO: 65201 - DNA, 31 bp, Homo sapiens
  chr2:240484932-240484963
  hypo
aataattttctttaagcgttgtaacaatccc

SEQ ID NO: 65202 - DNA, 31 bp, Homo sapiens
  chr2:240506414-240506445
  hypo
atgggaacctgggggacgggtctcaggctga

SEQ ID NO: 65203 - DNA, 197 bp, Homo sapiens
  chr2:240567503-240567700
  hypo
ttggagagttgttcacaagctcgtatgcattgatagtgtggtcctcgtgtggccgatagagttgcactgtggatatatcaagcgtgtgggtctttcgcctgctgaggggcgtctgggctatgccagcgtttgaagttgggaatacgctcagactttgtgactttaccttgcagggcgctgggcatctcagtcttcct

SEQ ID NO: 65204 - DNA, 260 bp, Homo sapiens; identical to SEQ ID NO: 17185
  chr2:240599652-240599912
  hypo

SEQ ID NO: 65205 - DNA, 35 bp, Homo sapiens; identical to SEQ ID NO: 17186
  chr2:240612327-240612362
  hypo

SEQ ID NO: 65206 - DNA, 111 bp, Homo sapiens
  chr2:240618672-240618783
  hypo
ggccttttctgtccaccgcaacagacccaggccccaactgtccttcaccacagagcagctgctgatttccttcttgctgcttataatcaaagctctcgtatttatggcttg

SEQ ID NO: 65207 - DNA, 226 bp, Homo sapiens
  chr2:240639522-240639748
  hypo
cagctgggcccagctgactatcgctgcggaccctcaggcttctctcactgcctcccagaggcgcaggcctgaactgatgcctggggagctgtgtgaggtgtgcggccccaggacgtcagggcctgtgagaccgggcaccgcggctccaccatttcgtgggttagggcgtgccacacagcaccaccggcaagggcgcgagggggccgaggaaggcagctgtctccac

SEQ ID NO: 65208 - DNA, 30 bp, Homo sapiens
  chr2:240643544-240643574
  hypo
cctaagatgaggatccgccccagcaacctc

SEQ ID NO: 65209 - DNA, 30 bp, Homo sapiens
  chr2:240644009-240644039
  hypo
agagcccggcagcaccgggccacacgctgc

SEQ ID NO: 65210 - DNA, 687 bp, Homo sapiens
  chr2:240658160-240658847
  hypo
tctccttggtgaggtcgcgtggaggcagtgatgtctgtcggtaccccaaggcctgtgtggaggcagcaaagtgtctgggggacggactggtttcccggctttgctcaagctccgatgcccacgggaggagggtaggaggcagtcgctggtctcggtaggacacgggatgccacgcatggctggttggccaatctgtgtttgggtcaacgcgcccctgtgtgctcggacctggaactgcacctttgtcgggcaccctgagataggaagggctcacaccctgacaggtgcgatcagtcagggcagggaggcgggcagcaggactggccactggccccgataggtgctggtgagctgggcagacactcggggtcttcctcccaccctccaccctgaggacaaggcaggacccccaggagcccccaacccaacgccccccaacccagcgcctcgcttcttccctctcccctccggcctccggaatgtggcgcccagcgacacagacaagcccatcctcaaaagcaccgggtctttcaaggcaggagctctgacgtcatcggagtcacgtgaacctggttccttcacaggttctgaaaaatggacgcaacaaaactagcggtggaaaaagcctttgactcccgccctcaaattcttgccagtgaaatacccggaaaaggagacatggctttt

SEQ ID NO: 65211 - DNA, 58 bp, Homo sapiens
  chr2:240666722-240666780
  hypo
gcactgagagtctggccgtctggaagccaggaccagctctgcccggaagtcgtagagc

SEQ ID NO: 65212 - DNA, 31 bp, Homo sapiens
  chr2:240668882-240668913
  hypo
tccaaatgtgtgaccccgatgggattttgat

SEQ ID NO: 65213 - DNA, 31 bp, Homo sapiens
  chr2:240670557-240670588
  hypo
ccaatgccaaagtgctcgccactgaggccac

SEQ ID NO: 65214 - DNA, 131 bp, Homo sapiens
  chr2:240687706-240687837
  hypo
ggagctgtttgagggcagggccgtatcagagttgcctgtgcactctcacacccagcgctgtgccctggggacctcgccagcacccagaaccttttgttggagaagctggcggtcatggtgatgggaggtgg

SEQ ID NO: 65215 - DNA, 101 bp, Homo sapiens
  chr2:240690337-240690438
  hypo
tgtctcccatcctgggctggacggtggctcggcaaagtcagtccctcacacatcctcgatccaggtcccgcacgtgccccggctctgaggtttagcctgtt

SEQ ID NO: 65216 - DNA, 381 bp, Homo sapiens
  chr2:240700323-240700704
  hypo
ccaggcagctccccagcctcccgccagcatcccctcggggcctgggaacagcactgcgagccggccgcacctgtgctggaaatcgccctcaggctgccgagtaattagttccacggttggatgcaggcccgtgctgtgacttgaagtcagtcggcgtggaacacatttcccatgtcgaggctgggcctgaccacccttctcacggtaaaggaggaagaaaattgcttctttgatggcatttgtgataggctggaaagcgcacagtggagtgagccaggaggcgctggctgggttcccacactggccgccgtcagcacccatcttgggagggaaaaaggagggaccacctcgtgtccccacgtccctgtgctccaaccccag

SEQ ID NO: 65217 - DNA, 254 bp, Homo sapiens
  chr2:240725284-240725538
  hypo
cagggttttaagttccgatgtagcgtcattatcctggcgatgtagcatcgttatcctggcgccgtagcgtccttatcctggcgccgtagcatcacagcacacctttccccggttcaccacctctgttgccagcggccaccagggaggacccttcagtgctccagcagcagccaaaacatgttaccgcaaattcttaacaagattcaggaggaaccaatgtggttgtctcgcaggcttgacgagccagtgccttg

SEQ ID NO: 65218 - DNA, 207 bp, Homo sapiens; identical to SEQ ID NO: 17189
  chr2:240733614-240733821
  hypo

SEQ ID NO: 65219 - DNA, 106 bp, Homo sapiens; identical to SEQ ID NO: 17190
  chr2:240734676-240734782
  hypo

SEQ ID NO: 65220 - DNA, 188 bp, Homo sapiens
  chr2:240747275-240747463
  hypo
tcatgctggagcatggcgggctggagtcctcctaaaagggggacatttggacacaagcaaatggggagaagggcacgtgaaggtgaaggcgcagatcaaggtggtgcttctgctagcccatgaacaccaaggctgccggcaaaccccagaggctggagagaggcctggagctgcggctgcctcccagc

SEQ ID NO: 65221 - DNA, 30 bp, Homo sapiens
  chr2:240750694-240750724
  hypo
agggccttccggggccgggtgcggaggaat

SEQ ID NO: 65222 - DNA, 139 bp, Homo sapiens
  chr2:240756516-240756655
  hypo
agtgggactccgtctcagaaaaaaaaaaaaaaacatgcggtagccgctatcttgcatgtctgctgcgccatttaattttaacatccgcacactggtgaaaggtgagcgctgaaagagcgatttcttgggaaactcaagt

SEQ ID NO: 65223 - DNA, 139 bp, Homo sapiens; identical to SEQ ID NO: 17191
  chr2:240809617-240809756
  hypo

SEQ ID NO: 65224 - DNA, 30 bp, Homo sapiens; identical to SEQ ID NO: 17192
  chr2:240844757-240844787
  hypo

SEQ ID NO: 65225 - DNA, 30 bp, Homo sapiens
  chr2:240896168-240896198
  hypo
gaggagtggcgtcacggcggagccgggcag

SEQ ID NO: 65226 - DNA, 147 bp, Homo sapiens
  chr2:240905880-240906027
  hypo
tggatctgtactttcttctcccggaaaaccccacaggaccggacttgttcccacccgtgcatcctgattcatatacaggaaagactggagaagagacagtattggacacgctcatcaaacccactcgtgatttcccccaaatatctg

SEQ ID NO: 65227 - DNA, 325 bp, Homo sapiens
  chr2:240906447-240906772
  hypo
tgttcccagttttcccgtcataaataacaccgatgtgccccctctagatttatgtgcttgagataaatttctagaaatggaactgcttgcttaaggaaaaacaataaacagagcaatagatgctgacgcagccatcggaatgggttgaatttaataacgccaagatgctgctccagatcattatgctgctgcttacacttcggggctgattcagagccttggtttctcgttatgaatttataccaggctcttggccttttactgcctcatgcatgggtcggcaaactgtagcccacagatcaaatctcgccgctgactgcttctg

SEQ ID NO: 65228 - DNA, 30 bp, Homo sapiens
  chr2:240907077-240907107
  hypo
tgcgcctggcaacagcggggaacagggtga

SEQ ID NO: 65229 - DNA, 59 bp, Homo sapiens
  chr2:240927100-240927159
  hypo
ggatgctacatgcaggcgcagcgcccagggaaggggtgggcagccgtggggcgaatgcg

SEQ ID NO: 65230 - DNA, 142 bp, Homo sapiens
  chr2:240928843-240928985
  hypo
acaaaccacagccaccactgccgcggatatggatcgtgctcttcccagtccactgacattgggatttgcagtgcaggctgcaactcacccgctggttcccagcgaaacttacacacgcctcgaacctaatggaatcttgcca

SEQ ID NO: 65231 - DNA, 87 bp, Homo sapiens
  chr2:240940090-240940177
  hypo
cgtcagctccactcacggtacatgccccagacgggtggaccattttcaccttttataccatattattttttatgtttagatacacaa

SEQ ID NO: 65232 - DNA, 31 bp, Homo sapiens
  chr2:240943998-240944029
  hypo
tagtcctgccccattccgccatggcctcctc

SEQ ID NO: 65233 - DNA, 130 bp, Homo sapiens
  chr2:240965862-240965992
  hypo
ttcagaaatgatcatgcgattgtaaaacagtgggaatgcagctgtgtaaactacggccggttctatggatgtttctataattgaagaattgctttttgtcaaaaatacggattcccggtccccaacgcag

SEQ ID NO: 65234 - DNA, 174 bp, Homo sapiens
  chr2:241069129-241069303
  hypo
aaaaacaactctcacgaaatgaattgcaagaacatagcactgaaaaaccccaccctctccaagtgcagacgacgtgcacgcctggccgctggaaaccctgctcctcgcctgcagataagccacgtgggtctcagaaacaaagcggcagcctcaacgtgcggcccagtgcagacc

SEQ ID NO: 65235 - DNA, 30 bp, Homo sapiens
  chr2:241070808-241070838
  hypo
ggacacgccagtgccgtgtctgcacccacg

SEQ ID NO: 65236 - DNA, 30 bp, Homo sapiens
  chr2:241072048-241072078
  hypo
tagaacacagcaatcgcctctaaccaatgg

SEQ ID NO: 65237 - DNA, 31 bp, Homo sapiens; identical to SEQ ID NO: 17194
  chr2:241073763-241073794
  hypo

SEQ ID NO: 65238 - DNA, 31 bp, Homo sapiens; identical to SEQ ID NO: 17195
  chr2:241100736-241100767
  hypo

SEQ ID NO: 65239 - DNA, 31 bp, Homo sapiens
  chr2:241154321-241154352
  hypo
aactccagggtgcccccggatatgagagagg

SEQ ID NO: 65240 - DNA, 254 bp, Homo sapiens
  chr2:241157269-241157523
  hypo
aacaggtagcatgcaccgcctttccgcacctgctgtagtccaaccacacgggcactgggcggtggccttgatctcagtccccgttgctcacggggtctcagatcccacctgtgaggggctgtgctgacccgaggccccttccaggacccgcggggttcacaattcaagtgactcaggccctagaaggcttgtaccatacaagtgcaggttgacgccccatagcagggctcacagctttgcgctgttctagatcc

SEQ ID NO: 65241 - DNA, 35 bp, Homo sapiens
  chr2:241197208-241197243
  hypo
tggcgacatcatcagccgaccgtaaacaccaggct

SEQ ID NO: 65242 - DNA, 286 bp, Homo sapiens; identical to SEQ ID NO: 17197
  chr2:241286543-241286829
  hypo

SEQ ID NO: 65243 - DNA, 195 bp, Homo sapiens; identical to SEQ ID NO: 17198
  chr2:241328245-241328440
  hypo

SEQ ID NO: 65244 - DNA, 214 bp, Homo sapiens
  chr2:241373309-241373523
  hypo
cctggtcagattaagaggaggcgtagacagtgacggggtaactatagagcctcaggccgggttaacctcaagtccagcttcctaggcccaggcagccctgcctgatcccgcagtgcgtgagaccacacagagagagagcgggatcgtgggcccaggctcctgaccgtgctggataaggtgtgcaggcagccacgccaggcccaggcaagaagga

SEQ ID NO: 65245 - DNA, 37 bp, Homo sapiens; identical to SEQ ID NO: 2339
  chr2:241374578-241374615
  hypo

SEQ ID NO: 65246 - DNA, 332 bp, Homo sapiens; identical to SEQ ID NO: 38824
  chr2:241375297-241375629
  hypo

SEQ ID NO: 65247 - DNA, 44 bp, Homo sapiens
  chr2:241378933-241378977
  hypo
gtaccaagcacccactcgttgggcccctccgaaggaatcttttc

SEQ ID NO: 65248 - DNA, 30 bp, Homo sapiens
  chr2:241380566-241380596
  hypo
ctccctacagcaggacggggggcataccta

SEQ ID NO: 65249 - DNA, 544 bp, Homo sapiens
  chr2:241380809-241381353
  hypo
cagtgagaggctggacgccttttcttaagccagaccgtcctcacagggcctggctcagttatttcagatcaagactggacccgtggtggaggctggggtgggcactcctacatgcggggcctctgcccagccctggccctgtccagtgtcgacgtgcccagagccctgagccggcctggatcttgccagtcgccagcacagccctgtggggcccgggatcttgcccactttacgtgggggctccagacaggagccgcctgcccggagcctgggctcctcgctgccgtgcctgtggtggcttttctttgtctgggaacaggcctgggcaggtgccctgagccgcttgaagtctcctgacggggtggggggtgcagtgtagggtgttgaggcttgggccagggaagcgggcggttctccctccacctccaggccccacacccaggcgggagcacgcagcagccaggtgttgggtgagggctatgctgaggagcagggcccagagctgcagcctccttggctgcccttggcccgccgtgggtggcgg

SEQ ID NO: 65250 - DNA, 30 bp, Homo sapiens
  chr2:241381611-241381641
  hypo
gggcatcggccaacacgtaccctccctgtt

SEQ ID NO: 65251 - DNA, 30 bp, Homo sapiens
  chr2:241383502-241383532
  hypo
ctgtgaacacggcccggcttctttgcagct

SEQ ID NO: 65252 - DNA, 31 bp, Homo sapiens; identical to SEQ ID NO: 17201
  chr2:241384030-241384061
  hypo

SEQ ID NO: 65253 - DNA, 31 bp, Homo sapiens
  chr2:241385468-241385499
  hypo
tgggcaacggggcccacggcacagagaaagt

SEQ ID NO: 65254 - DNA, 31 bp, Homo sapiens
  chr2:241388730-241388761
  hypo
cccccccccacccccacgctgcaaagggccg

SEQ ID NO: 65255 - DNA, 171 bp, Homo sapiens; identical to SEQ ID NO: 38826
  chr2:241393217-241393388
  hypo

SEQ ID NO: 65256 - DNA, 30 bp, Homo sapiens; identical to SEQ ID NO: 17203
  chr2:241401855-241401885
  hypo

SEQ ID NO: 65257 - DNA, 30 bp, Homo sapiens
  chr2:241402771-241402801
  hypo
gggcccggagtgctcgagagctgtcatgaa

SEQ ID NO: 65258 - DNA, 30 bp, Homo sapiens
  chr2:241403525-241403555
  hypo
caggtgtgtgctaacgtgatgggagctgac

SEQ ID NO: 65259 - DNA, 30 bp, Homo sapiens; identical to SEQ ID NO: 17204
  chr2:241405181-241405211
  hypo

SEQ ID NO: 65260 - DNA, 30 bp, Homo sapiens; identical to SEQ ID NO: 17205
  chr2:241407583-241407613
  hypo

SEQ ID NO: 65261 - DNA, 30 bp, Homo sapiens
  chr2:241439597-241439627
  hypo
tgactctcggtgatcgagggctcctgtcag

SEQ ID NO: 65262 - DNA, 30 bp, Homo sapiens; identical to SEQ ID NO: 17206
  chr2:241440208-241440238
  hypo

SEQ ID NO: 65263 - DNA, 30 bp, Homo sapiens; identical to SEQ ID NO: 17207
  chr2:241451552-241451582
  hypo

SEQ ID NO: 65264 - DNA, 158 bp, Homo sapiens
  chr2:241502880-241503038
  hypo
agcgctgggattacaggcgtgagccacctcgcccggccaatccactgagcatttctaagctgtgtatctcttaacaagacccagtcaggccctattggaacagggcttttaccacctaggcggaagctcagccattgaaatgacgatcaggtgcttca

SEQ ID NO: 65265 - DNA, 30 bp, Homo sapiens
  chr2:241512720-241512750
  hypo
ggggagagccccaccgggggtctgtggcct

SEQ ID NO: 65266 - DNA, 30 bp, Homo sapiens; identical to SEQ ID NO: 17208
  chr2:241516339-241516369
  hypo

SEQ ID NO: 65267 - DNA, 30 bp, Homo sapiens
  chr2:241530259-241530289
  hypo
ccgaccaggagtaccggggctccttcacct

SEQ ID NO: 65268 - DNA, 30 bp, Homo sapiens
  chr2:241533374-241533404
  hypo
gctccagggtcaggcgggccagtgcatcct

SEQ ID NO: 65269 - DNA, 30 bp, Homo sapiens; identical to SEQ ID NO: 17209
  chr2:241533679-241533709
  hypo

SEQ ID NO: 65270 - DNA, 269 bp, Homo sapiens
  chr2:241542035-241542304
  hypo
gccaccagcttcctgtggcaccgctgccactcccgccaggctcctggggcaccgccaccactcccgccaggctcctggggcaccgccggccactcccgccaggctcctggggcaccgccgcccactccctccaggctcctggggcaccgccgccactcccgccaggctcctggggcaccgccgccactcctgccagcctcctgcggcacagctgccactccctattaaccagcatggcacaggtgagcggtgtgaccttggtcttccca

SEQ ID NO: 65271 - DNA, 38 bp, Homo sapiens
  chr2:241542531-241542569
  hypo
gtcctaccagtgctcccgcctcccgtccccagctggct

SEQ ID NO: 65272 - DNA, 49 bp, Homo sapiens; identical to SEQ ID NO: 17211
  chr2:241543041-241543090
  hypo

SEQ ID NO: 65273 - DNA, 55 bp, Homo sapiens
  chr2:241543512-241543567
  hypo
accctgggaacacctgcggggagaagcgcccttggcctggcggcttgggggagac

SEQ ID NO: 65274 - DNA, 30 bp, Homo sapiens
  chr2:241544692-241544722
  hypo
atgtgggctgaagaccgtctccccaccatg

SEQ ID NO: 65275 - DNA, 195 bp, Homo sapiens; identical to SEQ ID NO: 17212
  chr2:241544974-241545169
  hypo

SEQ ID NO: 65276 - DNA, 48 bp, Homo sapiens; identical to SEQ ID NO: 17213
  chr2:241555875-241555923
  hypo

SEQ ID NO: 65277 - DNA, 30 bp, Homo sapiens
  chr2:241559777-241559807
  hypo
caggagttccaaggcgtggagacggcccct

SEQ ID NO: 65278 - DNA, 31 bp, Homo sapiens; identical to SEQ ID NO: 17214
  chr2:241580623-241580654
  hypo

SEQ ID NO: 65279 - DNA, 31 bp, Homo sapiens; identical to SEQ ID NO: 17215
  chr2:241580866-241580897
  hypo

SEQ ID NO: 65280 - DNA, 34 bp, Homo sapiens
  chr2:241581262-241581296
  hypo
agctcctacacgctcggtcggggcccagtggcac

SEQ ID NO: 65281 - DNA, 30 bp, Homo sapiens
  chr2:241581615-241581645
  hypo
ggacgccagtgcaacgcggggctgtctccc

SEQ ID NO: 65282 - DNA, 30 bp, Homo sapiens
  chr2:241581942-241581972
  hypo
gacttgttcctgaccgggcccaccggtgcc

SEQ ID NO: 65283 - DNA, 31 bp, Homo sapiens
  chr2:241628004-241628035
  hypo
ccactccatttcagctcgtctcccccgagag

SEQ ID NO: 65284 - DNA, 116 bp, Homo sapiens
  chr2:241631409-241631525
  hypo
ccctgctcccagtgggcgcctatgaagtcttcgcccgggaggcggtgggtgcgggtgcagctcgggccctgctgcctggagatgaggacgctggtcgagctcgggccctgggctgg

SEQ ID NO: 65285 - DNA, 41 bp, Homo sapiens; identical to SEQ ID NO: 17217
  chr2:241655277-241655318
  hypo

SEQ ID NO: 65286 - DNA, 31 bp, Homo sapiens; identical to SEQ ID NO: 17218
  chr2:241656740-241656771
  hypo

SEQ ID NO: 65287 - DNA, 30 bp, Homo sapiens
  chr2:241659765-241659795
  hypo
gggccaggccccacgcgactcgacctggtg

SEQ ID NO: 65288 - DNA, 161 bp, Homo sapiens
  chr2:241660273-241660434
  hypo
tggtcatgggtcagccgtggtgccagaagccactccgggagcctggagctcactcacctcaggtcagtggcaccgtaccgcccttcaaccagagaggggcaagtggaggagggggtgagagtggccacccctagaggggacatcgacgggtcccggagcag

SEQ ID NO: 65289 - DNA, 30 bp, Homo sapiens; identical to SEQ ID NO: 17219
  chr2:241664424-241664454
  hypo

SEQ ID NO: 65290 - DNA, 340 bp, Homo sapiens; identical to SEQ ID NO: 17220
  chr2:241689803-241690143
  hypo

SEQ ID NO: 65291 - DNA, 30 bp, Homo sapiens
  chr2:241717108-241717138
  hypo
gctgaacacccgcccgctgctgccactaaa

SEQ ID NO: 65292 - DNA, 31 bp, Homo sapiens
  chr2:241717833-241717864
  hypo
ccaacatttcctaacacggctccccacggga

SEQ ID NO: 65293 - DNA, 31 bp, Homo sapiens
  chr2:241718184-241718215
  hypo
cgcaccgttccacacacggttcctcaccgct

SEQ ID NO: 65294 - DNA, 936 bp, Homo sapiens
  chr2:241721414-241722350
  hypo
ccccgtggtggcgcccgccctgtctcacgcattcccacgctggctcactccgttcctgccggtccctcgaacgctttcacggctgcccacgcggttcctcacacagtccccagcgtcgccccaggcagcttcacacgtggcgcgctccgcggcacctccgactccacacgcgcccgcctccccctgtggccccgtcacgcctacggctgctcagagtccagcacgcctgtcacccgcttcctctcagggctccccagccctctccatgtccgaggggctcctccgcgcccctttcagctcctcccagggcccccacgccccccgggccacactttcccacctcggtgtctcccagcagcccccgccccaggccctgccgtgaggccgccccggacgccctccgtccccgcaggcacaggcaccgcacggggcctcccacacccgctttcttccttcccgggatccacccccacgtcccccatctcccagcgcactcactgcccgccccgcccctcaccacagggcgccaatgcagggcagacaccgccaccagcctcccgcacctgccccggggctgaaggaagccgcttaccttgttgggtccggagtcctgaaaaggaaaagacagagagaggctgaggcccggagcgaagctggcgcgggctgtgggggcggaagagcaggcggcccggctgcctcgccctggccatgactcaggctctaccaccccgtggtctcctagacagcagctcccccaggcagggtccctccagggccgcccttcccgggcccaggcctgggctgcctgctgcacggggccaactgtggccatagccccactttacaggcggggaaactgagggtcccgggagaaaccagggcccctaccccttctccagcatgtgacactctggccatctccgggctctcccttga

SEQ ID NO: 65295 - DNA, 458 bp, Homo sapiens
  chr2:241724228-241724686
  hypo
ggggcggggggggggacgtccacacctggtgccagtgtaagtgtgaggacactacccgccctgcacaggccagcattgggcctgtccttgtgctgcccccactggcctgaccaccacccctaccctgaccaccagccactgcccttggtggcaccgcctgtgaggccactcactcaccttctccgtggtgatattggtctctgcgtcatggcgcttctgggtgaagatgatgttgaagacggcgtgggagcgactgctggtctcattcatgttggtggccgccacggtcctgaggagcagaaagccacgcacggttacccctcgtcctgtggccgggtgcgagatcgccggtggtgccagccctctgaaccaggtcatcggggggggcagttcccccagaccccaggggccgccctgctgggcctggcactgatggcgcctcctgccaggactccagc

SEQ ID NO: 65296 - DNA, 41 bp, Homo sapiens
  chr2:241750152-241750193
  hypo
gatgacactccaggagcgatcagcaccgaattcatggtgct

SEQ ID NO: 65297 - DNA, 31 bp, Homo sapiens; identical to SEQ ID NO: 17224
  chr2:241789957-241789988
  hypo

SEQ ID NO: 65298 - DNA, 31 bp, Homo sapiens
  chr2:241817567-241817598
  hypo
gtgagagggagcgcctcgagggccttttgca

SEQ ID NO: 65299 - DNA, 31 bp, Homo sapiens
  chr2:241830264-241830295
  hypo
acgccgcccctgcctcgcgtgaaggggtcag

SEQ ID NO: 65300 - DNA, 31 bp, Homo sapiens; identical to SEQ ID NO: 17225
  chr2:241838794-241838825
  hypo

SEQ ID NO: 65301 - DNA, 116 bp, Homo sapiens
  chr2:241858347-241858463
  hypo
gggacagtcctgggcccggtgctggccaaggtgacggcgtgggggacagtcctgggctcgcggctggccaaggtgatggcgtgggggacagtcctgggcccggggctgggcaaggt

SEQ ID NO: 65302 - DNA, 30 bp, Homo sapiens; identical to SEQ ID NO: 17227
  chr2:241864767-241864797
  hypo

SEQ ID NO: 65303 - DNA, 104 bp, Homo sapiens; identical to SEQ ID NO: 17228
  chr2:241865149-241865253
  hypo

SEQ ID NO: 65304 - DNA, 30 bp, Homo sapiens; identical to SEQ ID NO: 17229
  chr2:241865564-241865594
  hypo

SEQ ID NO: 65305 - DNA, 80 bp, Homo sapiens
  chr2:241872168-241872248
  hypo
tgaattgggggagccacggcgcccactgaggagcccccaacgtgccacatccccccatcaaggggcgtccccaccacaca

SEQ ID NO: 65306 - DNA, 30 bp, Homo sapiens
  chr2:241889029-241889059
  hypo
gtggcacagcaggagcgggaggcacagcgg

SEQ ID NO: 65307 - DNA, 161 bp, Homo sapiens
  chr2:241896340-241896501
  hypo
ggtggccagagcccagcgataggacatagatgcaggagttacagcaggatctccaagggcccaggcggcctgaggagaggctgtttgtgttgaggtcggggctgctgtcctgggtggcaggggctggccctgaatagacacaggtgcgagggtgccctggg

SEQ ID NO: 65308 - DNA, 298 bp, Homo sapiens; identical to SEQ ID NO: 17231
  chr2:241896819-241897117
  hypo

SEQ ID NO: 65309 - DNA, 31 bp, Homo sapiens
  chr2:241903090-241903121
  hypo
gccgggcgctgagtgacgaggcccgcgagaa

SEQ ID NO: 65310 - DNA, 31 bp, Homo sapiens
  chr2:241908035-241908066
  hypo
agcggcaggcatggggcggccctggcccagc

SEQ ID NO: 65311 - DNA, 31 bp, Homo sapiens; identical to SEQ ID NO: 17232
  chr2:241937929-241937960
  hypo

SEQ ID NO: 65312 - DNA, 147 bp, Homo sapiens
  chr2:241971086-241971233
  hypo
gggcccttactggctctagtccgccctgtcccctagacggtgccaccaccccaattctacggccctcgcgtctttgtttgttttccgagtgttagcacttacgttcgccttcctgaagcagagcacgtagtttctctaatgttgact

SEQ ID NO: 65313 - DNA, 92 bp, Homo sapiens
  chr2:241988025-241988117
  hypo
gtgccatctttctgcgcccccacatgggaggctcctccctctcttcgtggcaggagtccccgatgactgtgagtgccgcaacggaggcagat

SEQ ID NO: 65314 - DNA, 219 bp, Homo sapiens
  chr2:241989255-241989474
  hypo
ggacccctgcttcaacggaggctcctgcgatgcccatgacgactcctacacctgcgagtgcccgcgcgggttccacggcaagcactgcgagaaaggtatggcgggcaggggcgtccgggccggcgtcagcaccctggagagcgcccgcggtccgccgtcctgcttctctgctgtctctctccttgtttcgcgaattgctgacctcgtctagagccttgc

SEQ ID NO: 65315 - DNA, 30 bp, Homo sapiens; identical to SEQ ID NO: 17234
  chr2:241991115-241991145
  hypo

SEQ ID NO: 65316 - DNA, 251 bp, Homo sapiens
  chr2:241992476-241992727
  hypo
ctgggccctgcagtcgggtcgggcagaggcagggcggtggggaggggccaggaaggcacaggaccgtgcgagacaggctgccgtgccttgcagaggtggactgcggccccccggaggaggtgaagcacgccacactgcgcttcaacggcacgcggctgggcgcggtggccctgtatgcatgtgaccgtggctacagcctgagcgcccccagccgcatccgggtctgccagccacacggtgtctggagtgag

SEQ ID NO: 65317 - DNA, 30 bp, Homo sapiens
  chr2:241993288-241993318
  hypo
ccctgcaggtgcatcgcattatgccagagg

SEQ ID NO: 65318 - DNA, 604 bp, Homo sapiens; identical to SEQ ID NO: 17236
  chr2:242004518-242005122
  hypo

SEQ ID NO: 65319 - DNA, 30 bp, Homo sapiens; identical to SEQ ID NO: 17237
  chr2:242009498-242009528
  hypo

SEQ ID NO: 65320 - DNA, 332 bp, Homo sapiens; identical to SEQ ID NO: 17238
  chr2:242010982-242011314
  hypo

SEQ ID NO: 65321 - DNA, 30 bp, Homo sapiens
  chr2:242031602-242031632
  hypo
cagcgtgtttatgacgctcgtgcaggtcga

SEQ ID NO: 65322 - DNA, 30 bp, Homo sapiens
  chr2:242066188-242066218
  hypo
gctgaggagctgcccgtgcagccaccgcac

SEQ ID NO: 65323 - DNA, 31 bp, Homo sapiens; identical to SEQ ID NO: 17239
  chr2:242072560-242072591
  hypo

SEQ ID NO: 65324 - DNA, 31 bp, Homo sapiens; identical to SEQ ID NO: 17240
  chr2:242074733-242074764
  hypo

SEQ ID NO: 65325 - DNA, 93 bp, Homo sapiens; identical to SEQ ID NO: 17241
  chr2:242076562-242076655
  hypo

SEQ ID NO: 65326 - DNA, 111 bp, Homo sapiens
  chr2:242102769-242102880
  hypo
ttcagaacctggatgcgctcaccaacctgacagtcctcagtatgcaggtacggagcttcctgagccgcccttccctgcgagccctggcagggccagcgctgctggacacaa

SEQ ID NO: 65327 - DNA, 30 bp, Homo sapiens
  chr2:242122191-242122221
  hypo
ccctcccctccgtgcggcagatcgatgcca

SEQ ID NO: 65328 - DNA, 30 bp, Homo sapiens
  chr2:242122476-242122506
  hypo
gagaacataagacacgttgcgttcattcgc

SEQ ID NO: 65329 - DNA, 120 bp, Homo sapiens
  chr2:242128738-242128858
  hypo
cctccgacctcctgcggcgcctccatggtcacaccctccggtcatcgtcgcagctccaaatgccagccccagctcgaaccctctccttccagggccacagatgtcgtgctcctggccccg

SEQ ID NO: 65330 - DNA, 30 bp, Homo sapiens
  chr2:242138763-242138793
  hypo
tacgccctcctcagcgcctcctgggctgtg

SEQ ID NO: 65331 - DNA, 30 bp, Homo sapiens
  chr2:242141853-242141883
  hypo
gcacacacatgcggcgatgtgatcaggcca

SEQ ID NO: 65332 - DNA, 53 bp, Homo sapiens
  chr2:242142972-242143025
  hypo
taacaatttgccagtccgtacccctggagggcagcgtgcgtgggggcctggac

SEQ ID NO: 65333 - DNA, 30 bp, Homo sapiens; identical to SEQ ID NO: 17242
  chr2:242143523-242143553
  hypo

SEQ ID NO: 65334 - DNA, 30 bp, Homo sapiens
  chr2:242148921-242148951
  hypo
cggccccagtttgccgcctcagcccccatg

SEQ ID NO: 65335 - DNA, 30 bp, Homo sapiens; identical to SEQ ID NO: 17243
  chr2:242165215-242165245
  hypo

SEQ ID NO: 65336 - DNA, 31 bp, Homo sapiens; identical to SEQ ID NO: 17244
  chr2:242167883-242167914
  hypo

SEQ ID NO: 65337 - DNA, 360 bp, Homo sapiens; identical to SEQ ID NO: 17245
  chr2:242169866-242170226
  hypo

SEQ ID NO: 65338 - DNA, 30 bp, Homo sapiens
  chr2:242177535-242177565
  hypo
cgcatcccacaggtcgcctccccaccacca

SEQ ID NO: 65339 - DNA, 31 bp, Homo sapiens; identical to SEQ ID NO: 17246
  chr2:242182172-242182203
  hypo

SEQ ID NO: 65340 - DNA, 139 bp, Homo sapiens; identical to SEQ ID NO: 17247
  chr2:242190664-242190803
  hypo

SEQ ID NO: 65341 - DNA, 30 bp, Homo sapiens
  chr2:242202033-242202063
  hypo
gaagggtccagtgacgttctagcctgcatc

SEQ ID NO: 65342 - DNA, 213 bp, Homo sapiens
  chr2:242209294-242209507
  hypo
ccctccgccctcccacgcttgcttgctgactctcacctggcatggtctctcactcaaggttgtcccgggctccaatgtcacttcttaaacccagacacccacccccttatcaagctaggttctgggcaagtctctagtgcccagtgacagccacactagaagtctgcaaaatgcagttccgtccatgtcagcccgcaccgactctccagcacg

SEQ ID NO: 65343 - DNA, 30 bp, Homo sapiens
  chr2:242209894-242209924
  hypo
tcaaaaacctgttttcgaagactgcgtttt

SEQ ID NO: 65344 - DNA, 20 bp, Homo sapiens
  chr2:242233324-242233344
  hypo
agaccctgcctcaaaaaaaa

SEQ ID NO: 65345 - DNA, 23 bp, Homo sapiens
  chr2:242259919-242259942
  hypo
cttttgcggccaagcacggtggc

SEQ ID NO: 65346 - DNA, 126 bp, Homo sapiens; identical to SEQ ID NO: 38840
  chr2:242269444-242269570
  hypo

SEQ ID NO: 65347 - DNA, 154 bp, Homo sapiens
  chr2:242277175-242277329
  hypo
ctgaaggaacgggagcggctgaagaaaagggtgagtgaggctggcgtcctgccctccctctgggtgcgactcgggggcatggggatgaagaaaggagtgtgttcccacgctcagtctgctcaggtgtcgggaggcagggcgggagaatttttcc

SEQ ID NO: 65348 - DNA, 256 bp, Homo sapiens
  chr2:242277631-242277887
  hypo
gaagcgcctctcacccgccagcagctcctgtggtgtcccagttttagtgcctcttccgtgtatgtctgtaaagcctctttattgattctctgctatatatttttaaattgcttactttgttctgattatatgctccttaagaaagtccaaatagtttatatatgctaaactctaaaaatacaaatccctaactgaacataccggtacgtgcataaaaatacaaatccctaaatgaacataccgatctgtgcgtgta

SEQ ID NO: 65349 - DNA, 21 bp, Homo sapiens
  chr2:242314657-242314678
  hypo
gcccagccccaaatcttttca

SEQ ID NO: 65350 - DNA, 99 bp, Homo sapiens; identical to SEQ ID NO: 17250
  chr2:242350118-242350217
  hypo

SEQ ID NO: 65351 - DNA, 152 bp, Homo sapiens; identical to SEQ ID NO: 17251
  chr2:242350469-242350621
  hypo

SEQ ID NO: 65352 - DNA, 262 bp, Homo sapiens; identical to SEQ ID NO: 17252
  chr2:242353961-242354223
  hypo

SEQ ID NO: 65353 - DNA, 30 bp, Homo sapiens
  chr2:242354474-242354504
  hypo
actccattgtacatacggtcagaccatgcg

SEQ ID NO: 65354 - DNA, 86 bp, Homo sapiens
  chr2:242357375-242357461
  hypo
ggggccagacacctgctgagtcggatttccaggtgctcgaaattgctcgaaagttggaaatgtacggcatcagatttcacatggct

SEQ ID NO: 65355 - DNA, 30 bp, Homo sapiens; identical to SEQ ID NO: 17253
  chr2:242357707-242357737
  hypo

SEQ ID NO: 65356 - DNA, 30 bp, Homo sapiens
  chr2:242434620-242434650
  hypo
gccatcatgggccccgggaggacagcggcc

SEQ ID NO: 65357 - DNA, 30 bp, Homo sapiens
  chr2:242435158-242435188
  hypo
gcccaggctcctgacggcctcttgggtgtg

SEQ ID NO: 65358 - DNA, 223 bp, Homo sapiens
  chr2:242435717-242435940
  hypo
tgcagccacacccacgagtgagcactggacctcaccccacgtccagcttcttggtgggggtgctctccccgaccctatggcacggccgccctcacctctgcactcgctccaccaggtgcaccatcagcttgtctgagatgccggggcaggactcctcggccaggctgaaggcgttctccagctcctccagcgcacccacgctcccgccgctctgcttgtgctt

SEQ ID NO: 65359 - DNA, 410 bp, Homo sapiens
  chr2:242436355-242436765
  hypo
ctgagcctcctgtcaccgggtgtcacccaccctcggggggctgtggctggatcagcaggctgcccaggacctggacccgagtggctgcttcccgctggggcctccacatgggctggggccaacgtccctcgaccgtgctcctccctttgccgtcctcaggcaggccctgccttcaccacctctcacccacatcctccatcctccctccccaggctccaggtggggctcctggagggcacacctgggcccaagcccgctggccacgccctgggcacacagatcctggctgtatcacatttctgaggacggtgctgactgcccatcagcaggtgacgttgatgcagggtcacgtgactaaccagggcggcacctgcccggggatggaccccgactaaaccttctctgctttc

SEQ ID NO: 65360 - DNA, 30 bp, Homo sapiens
  chr2:242438421-242438451
  hypo
gaggcaggcctccacgaactccttgaaggg

SEQ ID NO: 65361 - DNA, 30 bp, Homo sapiens; identical to SEQ ID NO: 17254
  chr2:242438805-242438835
  hypo

SEQ ID NO: 65362 - DNA, 30 bp, Homo sapiens; identical to SEQ ID NO: 17255
  chr2:242439074-242439104
  hypo

SEQ ID NO: 65363 - DNA, 288 bp, Homo sapiens; identical to SEQ ID NO: 17256
  chr2:242439376-242439664
  hypo

SEQ ID NO: 65364 - DNA, 342 bp, Homo sapiens
  chr2:242440833-242441175
  hypo
gacatggaagagagccgggcacagcaccagcagggtccccgcctccccacaacaggcacctttaggtaggagccaaagtagcgggtgatgtaggggctgtcgcactgactgaggacagtgatctcctgctggatgtcctcgatctcatcctcggcctcctccaggtcgatgatcttgatggccaccacctcctttgtgtggttatcgatgcccttgtagacctccccaaacgagcccttgccaatgcggtcgagcttggtgaagagctcctcagggtccactcgagagtgctgtggggccagggcggggacagagggcagacagcgccggtcacaagaggcg

SEQ ID NO: 65365 - DNA, 30 bp, Homo sapiens; identical to SEQ ID NO: 17257
  chr2:242479645-242479675
  hypo

SEQ ID NO: 65366 - DNA, 485 bp, Homo sapiens
  chr2:242523901-242524386
  hypo
tcttgagcctgcagaggctcacggccacacccacttctgccgcagggactgtctgttgaggagccgaaccgttgaggcacagtagccaggccctcccgagggctccagaagctctaggtttacggggtcaccttcttgtaggtgacgtgaagatgctgagtcattggctgtgtcgtggttgccatggagaccgtctgctcaagtttgccttcagaattcagcctgaacttccgggtgatctgagcaggagaatggaacaaagatagcttagttttatcttcaaaagattcaatcaatgcctgtgcgcccactgcatgccacacactcatcacgggctgtgagccaggcagtggccctgccagaggagggtagacacacagcccagggcccctgggcatgtcacaatccaggtgcccttcagctgcctccagaagaccaccaggggaacacagggattgtttatttagaagtcaccttttttgtcg

SEQ ID NO: 65367 - DNA, 21 bp, Homo sapiens
  chr2:242524445-242524466
  hypo
gggcctggttagtacttggat

SEQ ID NO: 65368 - DNA, 202 bp, Homo sapiens
  chr2:242554490-242554692
  hypo
cttgaaaacactgcgcgaaaagaaagaagccagacaaaaacgtatatattctatgattccaattagatgaaattcgagaccaggcagaaaggatggagggtggggaatctgaacggtgacggggaggggcttggaggggagtgcaaaggagaacctggaccgctggacgtgggtgtggctgcacaagcgcctgcacctgcca

SEQ ID NO: 65369 - DNA, 30 bp, Homo sapiens
  chr2:242555224-242555254
  hypo
cacccagcacatccccgtgccccaagccca

SEQ ID NO: 65370 - DNA, 403 bp, Homo sapiens; identical to SEQ ID NO: 17259
  chr2:242572244-242572647
  hypo

SEQ ID NO: 65371 - DNA, 30 bp, Homo sapiens
  chr2:242581628-242581658
  hypo
ggagtgcggtgggcgcgatctaggggagtg

SEQ ID NO: 65372 - DNA, 30 bp, Homo sapiens; identical to SEQ ID NO: 17260
  chr2:242585270-242585300
  hypo

SEQ ID NO: 65373 - DNA, 223 bp, Homo sapiens
  chr2:242599562-242599785
  hypo
ccactgcactccagcctggccacagagcgagaatccgtcccccgccccccaaaaaaaagacctcattcagagccacagccgtaactgcgcacagattcacagtgggagtgggtcctgccctgtgactgtgggtgtgccaggtcaccacacaggtgtgtgctgggtcacagacacgccccttccctgcctctccattctgtttcttcatcgtctggccatcctc

SEQ ID NO: 65374 - DNA, 192 bp, Homo sapiens
  chr2:242600212-242600404
  hypo
tcactgccccatcctccctcccgtgtttggggaaatcacttaccccctcgttccgcacgcgtgctcaggatctcaccaagtcacacctcagtccctggcctcggattagggaggctgttgctgggtgcagtggccaggaaggcgcaagggtcagggcttcctagaacctccgtccctctgggtgcaggtagc

SEQ ID NO: 65375 - DNA, 95 bp, Homo sapiens
  chr2:242602254-242602349
  hypo
ataaagtgggccgggcgcggtggctcacgcctataatcccaacttcaaaatcaataaagcgggccgggcatggtggctcacgcctataatcccaa

SEQ ID NO: 65376 - DNA, 391 bp, Homo sapiens
  chr2:242608060-242608451
  hypo
ccgcatgagcatcgcggagcttgacccgtccatcgctgtggtacgtggcggccacctgagcacacaggcatttggtgctgaatgctgtttgggaatgacgaggaaaactttcggatttttgcgttttttttttcagcatgttgggataagtactgtgttcacgtggttgggaatctgaagggtataagagccggaactgtgtccttgcaccctcacgtccctcccccaggcaccacctcctgtgcagccttcatggccttcgagtggcccagagagcgtgtgtctggatgtgagcgtgtgtgggcgcgtgctgagtgtgcatggatgagtgtgagccatggtgagtgtgtccccctcacacctacatttaaacacacgggcggcccctcca

SEQ ID NO: 65377 - DNA, 185 bp, Homo sapiens; identical to SEQ ID NO: 17262
  chr2:242610781-242610966
  hypo

SEQ ID NO: 65378 - DNA, 207 bp, Homo sapiens
  chr2:242611927-242612134
  hypo
ccagagtgttctctcgacactgccagccccgtgttagcacctgggcctcagtcccacttgctcccaggcgccggttctgtggttggtttggaattaaagtcctgtttgaagttgtcagacacagacatgaatttctgggcgctccctgagtcagagtctcagaagacctgtgcaggctggcgtgagaggagcggcagccacactgcg

SEQ ID NO: 65379 - DNA, 597 bp, Homo sapiens
  chr2:242616804-242617401
  hypo
actgctatcccacctgcgttccgggaaacgaaaagctgcgtgaccagcatcatctgcaggcacagccagtcgggctggggcgagaccctcggccctgctctggaggaggagctcaagggactgaagctccgcgggccgtggccacaagcgacagtgctggcgcccgacgtgccagaagccctggctgccgcctggaaagaggccacgtgggcagcggtgggcacgggcgactggagtctgggagagaggtaggggctgcggtcgggaggagcagaggcggccagcctgcgagtccactgggaggggagagtccagcgtcctgggagcagagccagacctgggactgctgagattgaaggaggcaggactgaagggagaggcagcacacagcaccctcctgaacttagatggccaggtgctgctgcagggcccatgcccagcgagaggccgcaccagaggacacagtggcaggaacaggctggcgctcgtgtctgaagaggggctgaggatgtggaggattgcgcagactctcacctgacccaccagacaaagcgccaaatgtcaacatttagcaaaactcatcgggttagaatttgc

SEQ ID NO: 65380 - DNA, 714 bp, Homo sapiens
  chr2:242617755-242618469
  hypo
aggaccagacggaaacggcagcagctttgctgacacaactgtgccagccaccacggtgtcatcctgagccacttctccacgcttcctagtgtgcaattctgggattctcaccttccagttcaaagtcgtgtctttcatgagctggtggaaacaccggagcgcccgctcctggaaagccccgttctcatagcgctcatggccaaacgctccccgcttggcagcatccgccagctgtaactggaggaacaggaccaggtcgggtttgggaaggcccacgtctggctgtttacaccaatctagggaaaaattctgccaagaaagaacccaacagttaaagcttagtgtagtctaggtttttgtttcgaaagtcgtaaaaacaggaaaaaatgaggggacatttggtgaggtaccaagatgtgagactgtttatattgtggctcgtttaatttttagaacctcaaacgtgtcggtttctccagtgtcacctttgtttttcctttgtaaacagacaagtggacagaaaagtaggtagatagaacggctgccagtccccgccacccacagcccaggccccatggaggccctcccagcacagctacaggcctgctggccaggagcaaacagtctatgtacagaacccctggagacccccggcctagaacgcctgcagcacagagcagctgggtccggacacaggcacgaggtccttggcag

SEQ ID NO: 65381 - DNA, 165 bp, Homo sapiens
  chr2:242618722-242618887
  hypo
gagggaaggcgtccacgagaacctcccacagagcctgcggctctgtcagctgatccgcacagcaggaagaagcaaaggaatcatgagtcttgtcctccttattatacaacgtaatacttcagaggggaaggactcaagctaacacatgaagaaatggcagaatta

SEQ ID NO: 65382 - DNA, 121 bp, Homo sapiens
  chr2:242636477-242636598
  hypo
cagagagacagactccgtttcaaaataataataataatataataatcaaaaattggaagtaaccaagatgctctttaataagtacatgggtggccaggggctgtggctcatgcctgtaatc

SEQ ID NO: 65383 - DNA, 71 bp, Homo sapiens
  chr2:242636837-242636908
  hypo
agactctgtctcaaaaaaaaaaaaaaaaaaagtacatgggtaaactgtggaacatccggacgttggaatat

SEQ ID NO: 65384 - DNA, 30 bp, Homo sapiens; identical to SEQ ID NO: 17268
  chr2:242637207-242637237
  hypo

SEQ ID NO: 65385 - DNA, 25 bp, Homo sapiens
  chr2:242637569-242637594
  hypo
atgtatcgggcccgccgtggtggct

SEQ ID NO: 65386 - DNA, 25 bp, Homo sapiens
  chr2:242637773-242637798
  hypo
ggcgtggatccgggaggtggagctt

SEQ ID NO: 65387 - DNA, 80 bp, Homo sapiens
  chr2:242648696-242648776
  hypo
accagcgcgtggagcgcctgcagaagatccagaacgcctacagcaagtgcaaggaatacagtgacgacaaagtgcagctg

SEQ ID NO: 65388 - DNA, 30 bp, Homo sapiens
  chr2:242660549-242660579
  hypo
gctgccctgctctccgcgggtgagaggtga

SEQ ID NO: 65389 - DNA, 246 bp, Homo sapiens
  chr2:242664009-242664255
  hypo
cctggctgggtttccgtgggcctgaggggctgccatgctctcaacgcgtgcttggtacctgcagcccccacagactgcagacagagggcaccagcgaccctgccatcggccggggaagaaggacccacctgttaaggaggaacgcctgggtgtcaaatcggttttgctcattgatggtgtatctgtcagcttcagaaccggcgtcctgcatagagccgcacgtgcatcggcgcattttccctgcgg

SEQ ID NO: 65390 - DNA, 752 bp, Homo sapiens
  chr2:242664618-242665370
  hypo
aagggcgaccttgcagggactcgccgccgcgacctcagtgtggcttttacaggactccccccgagcatcagcagggaccccggcggacgtgggcgggcgcgcgtgagctcgggctgcccggccgggcgtgcgggcggggacatggtaacctggtccacggagggcggccgccaccctcgcgtagctttcctgtggttttccaggactgtccggtacagcccgggctccgcgtgccccgcccgctggagcacctgccaccgaggcgcgcgtggggccactgccgtggcggcggctgccctcctcacactcggctccgcgccgcctccggccaccgtgcgctcccgcgtggggcgcctcggatgggcccgggagggctgggggctcttccctggaggaagcggcctccgcttcgctggcgccgcctttttagcttggacttcagtcctccctcggggactcacctccggagtaaacggctcttcattagcttggagtggccgcaggtcccgtgaccagcacccgcgagaccctgtgcgacagctgggctgatgctccgtttctctgggaattggtgattttttactgtgaagatgaaattaccctaatagcatgaagatcgtgggtctgtgtgtccgtgaagtgagtcccgtctgccaggagctgacgaaccacgaatgcttctgcctgtgctgtgcattcccaggcccgcagctcccggtcgaggggactccgatgtgaatttgttgtgaatt

SEQ ID NO: 65391 - DNA, 30 bp, Homo sapiens
  chr2:242678716-242678746
  hypo
gtcacaagtgtgtccgagtcgaaagctttg

SEQ ID NO: 65392 - DNA, 30 bp, Homo sapiens
  chr2:242682089-242682119
  hypo
tgagttagggccggcgctggggaaagaacc

SEQ ID NO: 65393 - DNA, 30 bp, Homo sapiens
  chr2:242688383-242688413
  hypo
tcgtgccacgcccacgtctaagccgggtgg

SEQ ID NO: 65394 - DNA, 30 bp, Homo sapiens
  chr2:242692867-242692897
  hypo
tctctgctgttgtccggtgttggcgaggct

SEQ ID NO: 65395 - DNA, 200 bp, Homo sapiens
  chr2:242713946-242714146
  hypo
acccctgcccctgccccgaggtggccctgggcttgcccgcccgcctgcagtgtcggctgaagagggtaacgtgcgtgcgccccggctgctcccggctgctcccggctgctccccggctgctccccgctgctcccggctgctccccggctgctccccggctgctccccgctgctcccggctgctctcggctgctcccggct

SEQ ID NO: 65396 - DNA, 301 bp, Homo sapiens
  chr2:242716414-242716715
  hypo
ggaccccccaggtggacaaagcgcttcatctgtggctattctgagagacggacaggagtgggttttgtttgtctttcgaaggaagtgacttggatttggaggctgttcctactcaggcttccctgaattcacctgtcttggcttcgtttcggaagtagggggcccctcctgcccaggcctggtgctgcttctgggtgtttgggggttctgggatgtggggcccagtgagaaagctgccccccaacactgtggcgtggagacgctcgagtgtccgcgtgacggctggggagggtgagacctg

SEQ ID NO: 65397 - DNA, 30 bp, Homo sapiens
  chr2:242734544-242734574
  hypo
cacggtgctctgggtcggtcacgggcacct

SEQ ID NO: 65398 - DNA, 562 bp, Homo sapiens
  chr2:242734967-242735529
  hypo
gctggtgaagtcctgcgtgggccttatcagtgagttaatctctaactgtgcggagccgtaaaactgcccttcccacctcgtgcagccactctcccggggagggtcttgggaagtccgcagaagtggcccaatggcagagcaggagctccgctctcagtgtggggcctcgtttgggtttgggaaaacatgtcctctctcacgaagacgtgggtgtctccagcgggaccctgatcccgcgtggggcgcatggccctctctgctctgcggcccctctcgctctcctctctgtgcctgggaattctagtgtttactgggccttggccgctgggagcctcttcaaggtggttccattttgacgtaaggactggaggggtgcattgaagaattgtagagtgcaggtgaagggagggcctggaagctcctgtcccgtctcctagaagcgtggctgtggtggcactggcattggagtctgaggtgccgcgtgtgccgtgaggatgaagtgtgagaaattttgggaggtcctagttctaccatccccagtgtcttcgagacccacaccctt

SEQ ID NO: 65399 - DNA, 31 bp, Homo sapiens
  chr2:242735880-242735911
  hypo
gagctgatggtcgtcacgtatcagggctctg

SEQ ID NO: 65400 - DNA, 31 bp, Homo sapiens
  chr2:242738173-242738204
  hypo
tctggtcccaggagcgcggccctgtcagctc

SEQ ID NO: 65401 - DNA, 31 bp, Homo sapiens
  chr2:242753192-242753223
  hypo
ccccagagggtgtgtgcggaccccagagggt

SEQ ID NO: 65402 - DNA, 30 bp, Homo sapiens; identical to SEQ ID NO: 17274
  chr2:242754581-242754611
  hypo

SEQ ID NO: 65403 - DNA, 762 bp, Homo sapiens; identical to SEQ ID NO: 17275
  chr2:242755672-242756434
  hypo

SEQ ID NO: 65404 - DNA, 30 bp, Homo sapiens; identical to SEQ ID NO: 17276
  chr2:242757210-242757240
  hypo

SEQ ID NO: 65405 - DNA, 411 bp, Homo sapiens; identical to SEQ ID NO: 17277
  chr2:242762673-242763084
  hypo

SEQ ID NO: 65406 - DNA, 30 bp, Homo sapiens
  chr2:242766032-242766062
  hypo
tgtgttcttctccacgacgttctctttgtc

SEQ ID NO: 65407 - DNA, 282 bp, Homo sapiens
  chr2:242791133-242791415
  hypo
gtttgagagctgtgagttctggacgctgatctcacaggcagcactctatggctttctcattgcctgtggtcattttccatgggacctatcgggttttgcggatggaaacccacatcatgtgcagagcccccgggcagcgttccctgccaggcctgatctgccggatctcaccgggagttcccagagctgcgaggtctctgtgcctgtccctgacacaggcatggggtccaggactgggctccaggatggcaagcagagaatgagccccggggtgtcagtggg

SEQ ID NO: 65408 - DNA, 159 bp, Homo sapiens
  chr2:242793063-242793222
  hypo
gcaggctggagccccggtcgcccccaggcagctcagcccctggacggcctgcaatggcctgcaccctgcctgcttctcctgaggaaatgcgctgacccgggctcatggtggagggtctgcagaacactggtggccaaggaagccggtcagaggggccaa

SEQ ID NO: 65409 - DNA, 258 bp, Homo sapiens
  chr2:242794839-242795097
  hypo
acagaggtaggtgccgctgtcattgcgccgggccctgaccacgctcatgtggaagtcacgcccgttgggcagttgtgtgacacggaagcggcagtcctggccgggctggctgcggtcctcggggaaggcggccagcttgtccgtctggttgctggggctcatgcggtaccagtttagcacgaagctctccgatgtgttggagaagctgcaggtgaaggtggcgttgtccccttcggtcaccacgagcagggctgggga

SEQ ID NO: 65410 - DNA, 30 bp, Homo sapiens
  chr2:242811947-242811977
  hypo
accctggccatggccgagaggaagccccag

SEQ ID NO: 65411 - DNA, 30 bp, Homo sapiens
  chr2:242815159-242815189
  hypo
aagggcggtggccacgttgcctacggcccc

SEQ ID NO: 65412 - DNA, 30 bp, Homo sapiens; identical to SEQ ID NO: 17280
  chr2:242821604-242821634
  hypo

SEQ ID NO: 65413 - DNA, 369 bp, Homo sapiens
  chr2:242832899-242833268
  hypo
atgttcaccgtgaatccggcaacctgtggagctgatttccatttctaaggaatgaggggggatggggaagaaccccccaggacagcaccaacagtccctgcggggacctttcccggacacccggccttctcggcggtgaggcaggtggcggcaccgacaggcccgggggggacctttcccggacacccagcctcctcggtggcgaggcaggtggcggcaccgacaggcccggcggggacctttcccggacacctggcctccttggcaaggcaggtggcggcaccaacaggcccgggggggacctttcccggacacctggcctcctcggcgaggcaggtggcagaactggttccacgtctgatcttcctt

SEQ ID NO: 65414 - DNA, 339 bp, Homo sapiens
  chr2:242833524-242833863
  hypo
acaggagctcagaccccggcatcagaccggcctccgcagggaggagctgcggtgcccaggccaggccaggaagcaccatggcccactgcctgggcctcacctcacgaacgccaagcactgtggcgggcacaggcggagcctggcggcttcacgcccacaccggcagctcctccctcagcccctcgcccgccgctcccaagtccggcagttctggagcacgggaagctctctgggggttgctgggcagcaggacctggtctgagatgactgagtctgcccaggtcttcacgcgcctaactgagcgtgagcgtgtctgagtcttaccgcagaaacattaaa

SEQ ID NO: 65415 - DNA, 155 bp, Homo sapiens
  chr2:242836485-242836640
  hypo
ggagcctggggcagggcgataatttcggcattgtgagtcaagctctcggaacttagtgacggccaagcccgtgtctctcagcacctgggcacctgtgagagcaggagtatgacactccctgccaggggtgggggtgtcaccgcatccctgcccag

SEQ ID NO: 65416 - DNA, 30 bp, Homo sapiens; identical to SEQ ID NO: 17283
  chr2:242845217-242845247
  hypo

SEQ ID NO: 65417 - DNA, 86 bp, Homo sapiens
  chr2:242845591-242845677
  hypo
gcaaggctgaggcccgagtgcggaggctgcacctgctcagctccactgtgacctcttggtgccggggacacgcctgcccccgcgca

SEQ ID NO: 65418 - DNA, 160 bp, Homo sapiens; identical to SEQ ID NO: 17284
  chr2:242874826-242874986
  hypo

SEQ ID NO: 65419 - DNA, 30 bp, Homo sapiens; identical to SEQ ID NO: 17285
  chr2:242887923-242887953
  hypo

SEQ ID NO: 65420 - DNA, 31 bp, Homo sapiens; identical to SEQ ID NO: 17286
  chr2:242895762-242895793
  hypo

SEQ ID NO: 65421 - DNA, 181 bp, Homo sapiens
  chr2:242925495-242925676
  hypo
atctcaaaagatacttcgagcaaaaacaccggacagaagcgtccgtgccagccccgcaggctgcctgtgtgccaggctatcccgtgccatctgatccgggagaagcaggactttcttgcacaggtactcagcgctgtggctgtgggaggagccgggagggccctggcgtgggtgggcttgg

SEQ ID NO: 65422 - DNA, 30 bp, Homo sapiens
  chr2:242929264-242929294
  hypo
gcctactgaggagccgctccctggctcagg

SEQ ID NO: 65423 - DNA, 265 bp, Homo sapiens
  chr2:242933405-242933670
  hypo
ctttgacatttgatacggtttggatcgtatccctgcccacgtcccacgtggacgtggaatctccagcgttgaaggcggggcctggtgggaggtgattggatcacggccggcgttcccacaaatggcttcgcaccgtcgcctccgtgacgccctcgtgacactgagtgagcaagttattgtgagacctggtcgtttgaaactgagttggggcccagctcagcgggcacgaccctgctctgggccacgcttacgcgcttgttcctaa

SEQ ID NO: 65424 - DNA, 30 bp, Homo sapiens; identical to SEQ ID NO: 17287
  chr2:242945967-242945997
  hypo

SEQ ID NO: 65425 - DNA, 268 bp, Homo sapiens
  chr2:242948201-242948469
  hypo
cttgccattagtgaaaaatgccgtaaaaacccatacccctgctgaggcctcggaacctgagaggtgtggcctgtctcctctaagccgtttatcatccgtggtccacagacacatcagagagtctccaaacgctttcctgattgcttctcccaagtaccccggacaggcactgttgttggcaccagggaacaccccggggaacagagcagatccaacaccaggcccaggagagtcggctcccggtgacgcctgagatgtctgtggactc

SEQ ID NO: 65426 - DNA, 30 bp, Homo sapiens
  chr2:242988080-242988110
  hypo
gcgggggtgtcccgcgagctgagcgatagt

SEQ ID NO: 65427 - DNA, 30 bp, Homo sapiens; identical to SEQ ID NO: 17288
  chr2:242997743-242997773
  hypo

SEQ ID NO: 65428 - DNA, 31 bp, Homo sapiens
  chr3:3167654-3167685
  hypo
ccggcaaaagtaatcccggcacttttggggg

SEQ ID NO: 65429 - DNA, 31 bp, Homo sapiens
  chr3:3167987-3168018
  hypo
tctctttgctcttttccgctctagaaagaat

SEQ ID NO: 65430 - DNA, 210 bp, Homo sapiens; identical to SEQ ID NO: 17289
  chr3:3179062-3179272
  hypo

SEQ ID NO: 65431 - DNA, 38 bp, Homo sapiens
  chr3:3426021-3426059
  hypo
gtaagaggtttaaagcatggccgggcgcagtggctcac

SEQ ID NO: 65432 - DNA, 28 bp, Homo sapiens
  chr3:3586573-3586601
  hypo
attgaaaaactactggctgagcgcggtg

SEQ ID NO: 65433 - DNA, 166 bp, Homo sapiens; identical to SEQ ID NO: 17290
  chr3:3786389-3786555
  hypo

SEQ ID NO: 65434 - DNA, 1856 bp, Homo sapiens; identical to SEQ ID NO: 2366
  chr3:3840368-3842224
  hypo

SEQ ID NO: 65435 - DNA, 30 bp, Homo sapiens
  chr3:3887381-3887411
  hypo
taccaaaagacagtcgaatccctccccaat

SEQ ID NO: 65436 - DNA, 233 bp, Homo sapiens; identical to SEQ ID NO: 17292
  chr3:4347746-4347979
  hypo

SEQ ID NO: 65437 - DNA, 98 bp, Homo sapiens
  chr3:4735354-4735452
  hypo
tcaagtgcaactccctgctcccgctggatgacatcgttcgcgtggtgacccacgaggactgcatccctgaggtgagcgagcccagcctggctgtgccc

SEQ ID NO: 65438 - DNA, 30 bp, Homo sapiens; identical to SEQ ID NO: 38868
  chr3:4742260-4742290
  hypo

SEQ ID NO: 65439 - DNA, 31 bp, Homo sapiens
  chr3:4748815-4748846
  hypo
acagtagcacctacctcgtggggttgatgtg

SEQ ID NO: 65440 - DNA, 323 bp, Homo sapiens
  chr3:4755960-4756283
  hypo
ctttggcctgggtgctgaggacgacaccacggtgagtgtggaggccgtttccctcctcccatccctgttttctgatgagtggcctcttatggagcttgtcccatgactgacacttccctggtgatgtccagaattgttctgcttctctgccctctcctgagccttcaccgccaaagaatcggatctggaggggccctggcatggcttcttccaactctccctgtgcctacgaggaggctggggctaagagctgagagactgcccgaggtcacgtgtgaagtctagatgagatcaagactaccgtctgggtttcccaaatccct

SEQ ID NO: 65441 - DNA, 63 bp, Homo sapiens
  chr3:4840916-4840979
  hypo
catcaagggcttgacacgatgtctaacaattgttaaatgcgtagaaagcggcacatgtgcctc

SEQ ID NO: 65442 - DNA, 107 bp, Homo sapiens
  chr3:4866429-4866536
  hypo
gttagatggggtgtgactttccgagctgctgccgccagcaaccactgctcagacaaccacttcacaaccctaggggttgttgagacggtaggagttcaggaaggggt

SEQ ID NO: 65443 - DNA, 386 bp, Homo sapiens; identical to SEQ ID NO: 38869
  chr3:4910323-4910709
  hypo

SEQ ID NO: 65444 - DNA, 38 bp, Homo sapiens; identical to SEQ ID NO: 17295
  chr3:4993605-4993643
  hypo

SEQ ID NO: 65445 - DNA, 533 bp, Homo sapiens; identical to SEQ ID NO: 38870
  chr3:5018756-5019289
  hypo

SEQ ID NO: 65446 - DNA, 31 bp, Homo sapiens; identical to SEQ ID NO: 2369
  chr3:5020396-5020427
  hypo

SEQ ID NO: 65447 - DNA, 177 bp, Homo sapiens
  chr3:5030719-5030896
  hypo
atataagaggctgcctcgctttgtggaacagggccaggatctcaggttagagaggagacagcatgtgttgagttcccacatggtttcatatgaagactgtgtgttaacgggatcggcatgttctcctgagacccagcattccctgaggtgtctgccacgtggcgtggagggagggaa

SEQ ID NO: 65448 - DNA, 31 bp, Homo sapiens
  chr3:5066590-5066621
  hypo
tataataaaatctagacggaaatggtccaaa

SEQ ID NO: 65449 - DNA, 32 bp, Homo sapiens
  chr3:5126484-5126516
  hypo
gaatgaatgaataaatcgctcaatgtttttat

SEQ ID NO: 65450 - DNA, 80 bp, Homo sapiens
  chr3:5165842-5165922
  hypo
cgcgcctggcctcctattgtaatattatgattttttgcgcttggaatgactatctttccgcaggaatagaagagtggaat

SEQ ID NO: 65451 - DNA, 18 bp, Homo sapiens
  chr3:5238581-5238599
  hypo
ctttgtcatcgtcgtcgt

SEQ ID NO: 65452 - DNA, 43 bp, Homo sapiens
  chr3:5296186-5296229
  hypo
ggggcaagcttcacatattcccgaggctgactctgtaaagccc

SEQ ID NO: 65453 - DNA, 36 bp, Homo sapiens
  chr3:6109802-6109838
  hypo
ttgttttgttttgttttgagacggagtcaggctctg

SEQ ID NO: 65454 - DNA, 36 bp, Homo sapiens
  chr3:6110077-6110113
  hypo
ggcgtgagccaccgcgcctggcctagatccaccaac

SEQ ID NO: 65455 - DNA, 30 bp, Homo sapiens
  chr3:6261097-6261127
  hypo
gcttctaatcctttcgtattgttcattcac

SEQ ID NO: 65456 - DNA, 85 bp, Homo sapiens; identical to SEQ ID NO: 17298
  chr3:6811741-6811826
  hypo

SEQ ID NO: 65457 - DNA, 30 bp, Homo sapiens; identical to SEQ ID NO: 38876
  chr3:6841364-6841394
  hypo

SEQ ID NO: 65458 - DNA, 77 bp, Homo sapiens
  chr3:8505218-8505295
  hypo
cgctgacaagaccctccggaactgagcctacctctccaatctctctctctctctcttttttttgagacaaaatctca

SEQ ID NO: 65459 - DNA, 31 bp, Homo sapiens; identical to SEQ ID NO: 2374
  chr3:8543387-8543418
  hypo

SEQ ID NO: 65460 - DNA, 44 bp, Homo sapiens; identical to SEQ ID NO: 17300
  chr3:8595737-8595781
  hypo

SEQ ID NO: 65461 - DNA, 96 bp, Homo sapiens; identical to SEQ ID NO: 17301
  chr3:8595840-8595936
  hypo

SEQ ID NO: 65462 - DNA, 29 bp, Homo sapiens
  chr3:8651966-8651995
  hypo
atgtctttactagccgagtgagaacagat

SEQ ID NO: 65463 - DNA, 46 bp, Homo sapiens; identical to SEQ ID NO: 17303
  chr3:8669370-8669416
  hypo

SEQ ID NO: 65464 - DNA, 31 bp, Homo sapiens
  chr3:8787621-8787652
  hypo
tcacaggggctgctggcgagctctttctctt

SEQ ID NO: 65465 - DNA, 30 bp, Homo sapiens
  chr3:8863687-8863717
  hypo
gaatgagtaaacagacggccttgtcgtatt

SEQ ID NO: 65466 - DNA, 20 bp, Homo sapiens
  chr3:8952242-8952262
  hypo
gatagcgccactgcactcct

SEQ ID NO: 65467 - DNA, 31 bp, Homo sapiens
  chr3:9006146-9006177
  hypo
caatttttttcttaaacgagatataaatata

SEQ ID NO: 65468 - DNA, 30 bp, Homo sapiens; identical to SEQ ID NO: 17304
  chr3:9032616-9032646
  hypo

SEQ ID NO: 65469 - DNA, 30 bp, Homo sapiens; identical to SEQ ID NO: 38885
  chr3:9077066-9077096
  hypo

SEQ ID NO: 65470 - DNA, 214 bp, Homo sapiens
  chr3:9173887-9174101
  hypo
acatcttgcattccatcgtgcatttattgcaattgaagagccaatactgacacaccaaagtctgtcacttacattacggctcaccctttgtgttgtacattctctgggttttgacaaacgtctaatgtcatgtgtccaccattacagtatcatacagaatagtgttgccaccctaaaaatcctcgtgctccacctatttcgccccttattcttc

SEQ ID NO: 65471 - DNA, 31 bp, Homo sapiens; identical to SEQ ID NO: 17305
  chr3:9188566-9188597
  hypo

SEQ ID NO: 65472 - DNA, 31 bp, Homo sapiens
  chr3:9204928-9204959
  hypo
catcagcgcccactctcgtgggagagatcac

SEQ ID NO: 65473 - DNA, 34 bp, Homo sapiens
  chr3:9553622-9553656
  hypo
tttttttttttttagacggaatctggctctgtcg

SEQ ID NO: 65474 - DNA, 28 bp, Homo sapiens
  chr3:9553895-9553923
  hypo
tgagccaccgcgccggcctacatggcaa

SEQ ID NO: 65475 - DNA, 37 bp, Homo sapiens
  chr3:9554923-9554960
  hypo
gtgagccaccgcgcccggcctggacatttgttttata

SEQ ID NO: 65476 - DNA, 30 bp, Homo sapiens
  chr3:9743601-9743631
  hypo
tggagcaatttgcccgtggtgttggactcc

SEQ ID NO: 65477 - DNA, 30 bp, Homo sapiens
  chr3:9780860-9780890
  hypo
agtcataataaaggcgaccctaatgcgcta

SEQ ID NO: 65478 - DNA, 155 bp, Homo sapiens; identical to SEQ ID NO: 17306
  chr3:9782959-9783114
  hypo

SEQ ID NO: 65479 - DNA, 40 bp, Homo sapiens; identical to SEQ ID NO: 17307
  chr3:9793442-9793482
  hypo

SEQ ID NO: 65480 - DNA, 31 bp, Homo sapiens; identical to SEQ ID NO: 2381
  chr3:9851988-9852019
  hypo

SEQ ID NO: 65481 - DNA, 258 bp, Homo sapiens
  chr3:9905282-9905540
  hypo
tctccacctatttcttcgtttccactggaaacactagtaaaacaattcctcagcctcgaccccagggagcggcccccactaaaccagctgacgtgggacccctgggtcaatgctggccaggagatgcggctgacatcaaagaccctgggcccctgggccccctacaaccctggtcacggtggccatgggattccaggcagcacacatctcagaatcagtatttcccccaccccacaaaaaatacatatatgggtcggg

SEQ ID NO: 65482 - DNA, 121 bp, Homo sapiens
  chr3:9924113-9924234
  hypo
aaaaaaaagacaaaatgggttagtggttgcttcgggctgggagtaggggatgggaggggaatggggagtggctgctaattagtacagggtttctttcagggttttcttttctttttttttt

SEQ ID NO: 65483 - DNA, 31 bp, Homo sapiens
  chr3:9926968-9926999
  hypo
gaaaatactgtatattcgaactaatatcaca

SEQ ID NO: 65484 - DNA, 38 bp, Homo sapiens
  chr3:9941463-9941501
  hypo
tagaaaactcattatttgggccgggcgcagtggctcac

SEQ ID NO: 65485 - DNA, 34 bp, Homo sapiens; identical to SEQ ID NO: 17310
  chr3:9947647-9947681
  hypo

SEQ ID NO: 65486 - DNA, 31 bp, Homo sapiens
  chr3:9948632-9948663
  hypo
tcctctccccaggacccgagttctcctttga

SEQ ID NO: 65487 - DNA, 912 bp, Homo sapiens; identical to SEQ ID NO: 38905
  chr3:9956772-9957684
  hypo

SEQ ID NO: 65488 - DNA, 31 bp, Homo sapiens; identical to SEQ ID NO: 17312
  chr3:9963223-9963254
  hypo

SEQ ID NO: 65489 - DNA, 31 bp, Homo sapiens; identical to SEQ ID NO: 17313
  chr3:9965746-9965777
  hypo

SEQ ID NO: 65490 - DNA, 30 bp, Homo sapiens; identical to SEQ ID NO: 17314
  chr3:9971741-9971771
  hypo

SEQ ID NO: 65491 - DNA, 230 bp, Homo sapiens
  chr3:9991407-9991637
  hypo
agaggtcctgtccagccgtgggagcttggtccttgagccatctggaggtcatcagttactgggagtcgttctctctgagctccttgtgctgctttgggcccgtacagggctgggccaaggggagaggctacaggcttctcaggcatctcttcagcaggggcgtggcggacatcagagttcctgtgactgtcagctctggggttctccgggaacacgtcaaaggcctgggg

SEQ ID NO: 65492 - DNA, 223 bp, Homo sapiens; identical to SEQ ID NO: 38909
  chr3:9993709-9993932
  hypo

SEQ ID NO: 65493 - DNA, 192 bp, Homo sapiens; identical to SEQ ID NO: 38910
  chr3:9993964-9994156
  hypo

SEQ ID NO: 65494 - DNA, 75 bp, Homo sapiens; identical to SEQ ID NO: 17316
  chr3:10011410-10011485
  hypo

SEQ ID NO: 65495 - DNA, 29 bp, Homo sapiens
  chr3:10061732-10061761
  hypo
aatgaaattctgaggtcggccaggcgtgg

SEQ ID NO: 65496 - DNA, 204 bp, Homo sapiens
  chr3:10131931-10132135
  hypo
cagtgcatcatggtgtgggcacgcatgcttttcccgtcttctaggcatacttttgttgttttcttccgtgtgatgatggctgaactagagaagacggtgaaaaaaattgagcctggcacagcagcagactcgcagcaggtgagtaagataatagtcacttcaagaagtggactttggattacttggaagttgctgatttttttt

SEQ ID NO: 65497 - DNA, 27 bp, Homo sapiens
  chr3:10137566-10137593
  hypo
tttttttttttttttttgagacggagt

SEQ ID NO: 65498 - DNA, 27 bp, Homo sapiens
  chr3:10137652-10137679
  hypo
cctcccggctggacagtgaatgtttaa

SEQ ID NO: 65499 - DNA, 79 bp, Homo sapiens
  chr3:10182837-10182916
  hypo
ttttgtactttataagcgtgatgattgggtgttcccgtgtgagatgcgccaccctcgaaccttgttacgacgtcggcac

SEQ ID NO: 65500 - DNA, 19 bp, Homo sapiens
  chr3:10183215-10183234
  hypo
cgggcgacagagtgagacc

SEQ ID NO: 65501 - DNA, 140 bp, Homo sapiens
  chr3:10212190-10212330
  hypo
tgttcctctctagcccatcaccgtgtttcatttccctcattccgcttcacagcctttgatgtcccctcgttcctgaattttttccacctgtctctccctatggaatggaagccccgtgcgggcaggggccttacctgtct

SEQ ID NO: 65502 - DNA, 30 bp, Homo sapiens; identical to SEQ ID NO: 17324
  chr3:10276368-10276398
  hypo

SEQ ID NO: 65503 - DNA, 30 bp, Homo sapiens; identical to SEQ ID NO: 17325
  chr3:10276657-10276687
  hypo

SEQ ID NO: 65504 - DNA, 30 bp, Homo sapiens; identical to SEQ ID NO: 17326
  chr3:10332155-10332185
  hypo

SEQ ID NO: 65505 - DNA, 113 bp, Homo sapiens
  chr3:10332491-10332604
  hypo
ggtggcctagcttccgtggggctgatgtacattccttgggaactaaaaatgttcttgtcctctgggtagaagtcaacagtggaggtcagatgccctgcggaattgctgggttg

SEQ ID NO: 65506 - DNA, 30 bp, Homo sapiens; identical to SEQ ID NO: 17327
  chr3:10353633-10353663
  hypo

SEQ ID NO: 65507 - DNA, 42 bp, Homo sapiens; identical to SEQ ID NO: 17328
  chr3:10363447-10363489
  hypo

SEQ ID NO: 65508 - DNA, 30 bp, Homo sapiens
  chr3:10400466-10400496
  hypo
tgctggggaagtcgcggtaggccacgcaga

SEQ ID NO: 65509 - DNA, 98 bp, Homo sapiens; identical to SEQ ID NO: 17329
  chr3:10638649-10638747
  hypo

SEQ ID NO: 65510 - DNA, 30 bp, Homo sapiens
  chr3:10670785-10670815
  hypo
ggcagcaccacgcttcggggccatttcaaa

SEQ ID NO: 65511 - DNA, 1 bp, Homo sapiens
  chr3:10749432-10749433
  hypo
c

SEQ ID NO: 65512 - DNA, 198 bp, Homo sapiens; identical to SEQ ID NO: 38919
  chr3:10749467-10749665
  hypo

SEQ ID NO: 65513 - DNA, 100 bp, Homo sapiens; identical to SEQ ID NO: 17330
  chr3:10960022-10960122
  hypo

SEQ ID NO: 65514 - DNA, 31 bp, Homo sapiens; identical to SEQ ID NO: 17331
  chr3:11050501-11050532
  hypo

SEQ ID NO: 65515 - DNA, 121 bp, Homo sapiens; identical to SEQ ID NO: 17332
  chr3:11133517-11133638
  hypo

SEQ ID NO: 65516 - DNA, 30 bp, Homo sapiens; identical to SEQ ID NO: 17333
  chr3:11203460-11203490
  hypo

SEQ ID NO: 65517 - DNA, 216 bp, Homo sapiens; identical to SEQ ID NO: 17334
  chr3:11210147-11210363
  hypo

SEQ ID NO: 65518 - DNA, 31 bp, Homo sapiens; identical to SEQ ID NO: 38924
  chr3:11258023-11258054
  hypo

SEQ ID NO: 65519 - DNA, 43 bp, Homo sapiens
  chr3:11300931-11300974
  hypo
cggtggcggacttgatcgtgggtgccgtcgtcatgcctatgaa

SEQ ID NO: 65520 - DNA, 30 bp, Homo sapiens; identical to SEQ ID NO: 17336
  chr3:11323545-11323575
  hypo

SEQ ID NO: 65521 - DNA, 30 bp, Homo sapiens; identical to SEQ ID NO: 17337
  chr3:11530042-11530072
  hypo

SEQ ID NO: 65522 - DNA, 258 bp, Homo sapiens
  chr3:11577994-11578252
  hypo
acttctgtttcccatgcaaaacgccaccacacacctagggaggatgtttgtgttccacggaggtcgccacccatctgttttcagagtaaacgtttgtgtgagcgcactctggcggggagtcccgagagcggaccctcttgccactgcacccataggtgcggaacgaacctgctgccccgaccctgcggctccgaccggggccgagcagcgaaggaccaccctggtctggtcacctacgattctgggtccagctcagct

SEQ ID NO: 65523 - DNA, 286 bp, Homo sapiens; identical to SEQ ID NO: 17338
  chr3:11581142-11581428
  hypo

SEQ ID NO: 65524 - DNA, 30 bp, Homo sapiens; identical to SEQ ID NO: 17339
  chr3:11600085-11600115
  hypo

SEQ ID NO: 65525 - DNA, 30 bp, Homo sapiens
  chr3:11600392-11600422
  hypo
cggactggctgccacggtcagcgtgggctc

SEQ ID NO: 65526 - DNA, 39 bp, Homo sapiens; identical to SEQ ID NO: 17340
  chr3:11606284-11606323
  hypo

SEQ ID NO: 65527 - DNA, 30 bp, Homo sapiens
  chr3:11607100-11607130
  hypo
gtgctgtagggagccggcgcgcagctctct

SEQ ID NO: 65528 - DNA, 30 bp, Homo sapiens; identical to SEQ ID NO: 17341
  chr3:11608499-11608529
  hypo

SEQ ID NO: 65529 - DNA, 30 bp, Homo sapiens; identical to SEQ ID NO: 17342
  chr3:11617571-11617601
  hypo

SEQ ID NO: 65530 - DNA, 575 bp, Homo sapiens
  chr3:11655423-11655998
  hypo
ggtgagtgggtgctccgaatctgctccaccaggagccggcgacgtcatctcagagcagctgcctgactttctatgactgtttccacatgtgtgaaaatggtagtgtgaacccacacacaggctcagagcgatacccggcacggtgccgcctcctccccacacacactctggacttacaggctttcttccatgcacgtttctccctccctagaatgtgttcagaagccctctctgccaatgcatactcatctgcactttcaaaacccgacttgagtgcctcttgtcagcctcagccccaagagcaccccttttggtgccatctacctgggctgagctgcctggcagcgtcccttgtgacgtgctgctggctccaactcaaaaactactcatttctcagcaacaccattgtgtgctaccgccaaacaggcgatcttgctctctgcagtaggttccagtccagaccctgaggagtaagatggtggtcccggaaaccagttcaaatttctcactggcatacagagtgctgaaggaaggctgtgtataggccccccgattctgatcgtgaaatctcatta

SEQ ID NO: 65531 - DNA, 31 bp, Homo sapiens
  chr3:11688146-11688177
  hypo
ataaaatatttggtaacgtcccttaagggac

SEQ ID NO: 65532 - DNA, 136 bp, Homo sapiens; identical to SEQ ID NO: 17344
  chr3:11707750-11707886
  hypo

SEQ ID NO: 65533 - DNA, 31 bp, Homo sapiens
  chr3:11712550-11712581
  hypo
cgacagcagctgcccccgtccttaagaccac

SEQ ID NO: 65534 - DNA, 30 bp, Homo sapiens
  chr3:11763304-11763334
  hypo
gcttcttcgaagagccggtgtggggttaca

SEQ ID NO: 65535 - DNA, 100 bp, Homo sapiens
  chr3:12186544-12186644
  hypo
acaaaaaccaaacaaacaaaaaaggagagtaccataatatcccatttcccagtccagaaaggaataataataataaaattacaaccgttgctcatgcatg

SEQ ID NO: 65536 - DNA, 82 bp, Homo sapiens; identical to SEQ ID NO: 17345
  chr3:12204373-12204455
  hypo

SEQ ID NO: 65537 - DNA, 31 bp, Homo sapiens
  chr3:12223765-12223796
  hypo
agcactgatggtgaagcgagtgctcactgag

SEQ ID NO: 65538 - DNA, 120 bp, Homo sapiens
  chr3:12486438-12486558
  hypo
taatggaaggagaaagtgcttcgcaaacaccacagactagcactcctggggccgccgtgttattagtactgttacctgacctggtgtctctgtacccgcggctcctgagtcagtcctcag

SEQ ID NO: 65539 - DNA, 30 bp, Homo sapiens
  chr3:12486896-12486926
  hypo
gtgctccaggagtcacgcaatcccacaggc

SEQ ID NO: 65540 - DNA, 30 bp, Homo sapiens
  chr3:12503124-12503154
  hypo
caggcgaggtggctcacgcctgtaatccta

SEQ ID NO: 65541 - DNA, 28 bp, Homo sapiens
  chr3:12507119-12507147
  hypo
tagtaacgtgtttttctaccaaatagac

SEQ ID NO: 65542 - DNA, 40 bp, Homo sapiens
  chr3:12558546-12558586
  hypo
tagaatttgcagataaggggccgggcccggtggctcacgc

SEQ ID NO: 65543 - DNA, 44 bp, Homo sapiens
  chr3:12575983-12576027
  hypo
ggctaatgatgtttacctaatcgtgtggttgtgtgggtaaagga

SEQ ID NO: 65544 - DNA, 91 bp, Homo sapiens
  chr3:12586166-12586257
  hypo
aaactctgtctcggggaaaaaaaaaaggtataatcctttcttttgctttctaattcatcctttttgtttatgctagcgctctcagcaagag

SEQ ID NO: 65545 - DNA, 150 bp, Homo sapiens
  chr3:12596373-12596523
  hypo
ctgctttttgttttgaagaggcgggaactaaattgacaggagactgagacttttcactttacgcttttaaaatatttgaacataataacgttcagatcgtgaatgtattccataaagaatgagataagctgaattttaaaaataagtggc

SEQ ID NO: 65546 - DNA, 30 bp, Homo sapiens; identical to SEQ ID NO: 17349
  chr3:12596822-12596852
  hypo

SEQ ID NO: 65547 - DNA, 102 bp, Homo sapiens
  chr3:12605272-12605374
  hypo
caccacacccggccagaatcacctttctttttaagcttgattgtatggatagaccacatcttgtttatgcattcgtccattagcgcacgcttgagttgcttc

SEQ ID NO: 65548 - DNA, 30 bp, Homo sapiens
  chr3:12625379-12625409
  hypo
agatgcggattggccgagtgccttgcctgg

SEQ ID NO: 65549 - DNA, 123 bp, Homo sapiens
  chr3:12626571-12626694
  hypo
gcccaggggctcccacgagttgggtcctttcgcaccagcacagacttacctgatctcggttgttgatgtgagaataaggaagctcccccgtcatcagttcatacaatacgatgccataggagt

SEQ ID NO: 65550 - DNA, 31 bp, Homo sapiens; identical to SEQ ID NO: 17351
  chr3:12660174-12660205
  hypo

SEQ ID NO: 65551 - DNA, 31 bp, Homo sapiens
  chr3:12734231-12734262
  hypo
tgcaaagcatttaggccgggcacagtggctc

SEQ ID NO: 65552 - DNA, 31 bp, Homo sapiens
  chr3:12788072-12788103
  hypo
gtgaggcacccaggctcggggccttctaggg

SEQ ID NO: 65553 - DNA, 30 bp, Homo sapiens
  chr3:12810339-12810369
  hypo
gggggcagcgctcattggggaggctcggcc

SEQ ID NO: 65554 - DNA, 95 bp, Homo sapiens
  chr3:12820701-12820796
  hypo
aaaaaaaaaaaaaacacatagacctaaatgcgaaacataaaactataaaatatgtagaggaaaatataagagaaaatcaacgtgagcttggattt

SEQ ID NO: 65555 - DNA, 79 bp, Homo sapiens
  chr3:12821388-12821467
  hypo
cactaaagaatatacacggatagcaaataggcacataataattcttaacctcattttttttttttttttgagatggagt

SEQ ID NO: 65556 - DNA, 30 bp, Homo sapiens
  chr3:12840319-12840349
  hypo
accagctgtccaggcgtccgtgtggccaag

SEQ ID NO: 65557 - DNA, 126 bp, Homo sapiens
  chr3:12856635-12856761
  hypo
ccagagagtgaagacgagtacagcgatgacgatgacatgagctggaaggtgcgccgggcagctgccaagtgcatcgcagccttgatcagctcgcggcctgacctgctgcccgatttccactgcacc

SEQ ID NO: 65558 - DNA, 30 bp, Homo sapiens
  chr3:12858400-12858430
  hypo
tggcctcattcctgcggaagaaccagcggg

SEQ ID NO: 65559 - DNA, 46 bp, Homo sapiens
  chr3:12867101-12867147
  hypo
ccaggagacaaagatccggcgggacctcatccgagaggtgtggagc

SEQ ID NO: 65560 - DNA, 25 bp, Homo sapiens
  chr3:12870930-12870955
  hypo
ccaccacgcccggccccatattaca

SEQ ID NO: 65561 - DNA, 30 bp, Homo sapiens
  chr3:12875590-12875620
  hypo
actgggggccctgtcgctcctggtcagggc

SEQ ID NO: 65562 - DNA, 44 bp, Homo sapiens
  chr3:12940403-12940447
  hypo
gagaattgatgagtcggagacaccagggcgcttccctgacagcc

SEQ ID NO: 65563 - DNA, 103 bp, Homo sapiens
  chr3:12940861-12940964
  hypo
cggggggcagtcctcgggtcccatggcttaggagcacagcactgacggctgcagtggctcgaaaggctgaaactacaaagtatggcccgtgggtgactcgggc

SEQ ID NO: 65564 - DNA, 30 bp, Homo sapiens
  chr3:12943805-12943835
  hypo
ctccaagaagaaagcgatgaggatgggcgg

SEQ ID NO: 65565 - DNA, 30 bp, Homo sapiens
  chr3:12947640-12947670
  hypo
ctttggatggatgtcgagtgcagacctggg

SEQ ID NO: 65566 - DNA, 30 bp, Homo sapiens; identical to SEQ ID NO: 17355
  chr3:12949442-12949472
  hypo

SEQ ID NO: 65567 - DNA, 162 bp, Homo sapiens
  chr3:12949774-12949936
  hypo
gccctgaatgcagacgccctgcctcggtcttgcatgcgctgggctagcaaggtggttctaggccaagctcttaccggcttccgagaggtcccgcagggagctgctgagggcgctgcgcttgaggccctcaccgctggcatagctgtcgtccaggcaggcccg

SEQ ID NO: 65568 - DNA, 30 bp, Homo sapiens
  chr3:12950498-12950528
  hypo
tctgcgggctcttgcgcacgggatgaccag

SEQ ID NO: 65569 - DNA, 76 bp, Homo sapiens; identical to SEQ ID NO: 17357
  chr3:12956288-12956364
  hypo

SEQ ID NO: 65570 - DNA, 123 bp, Homo sapiens
  chr3:12976952-12977075
  hypo
gaagaggttcaggccgatgcggtagtgcctcttgcggatgacatcgttgctaaaggcaggcgagtcccagctgttgcgggcctccttgtggtaggtctgcttgctgagcgtctgctcccgcag

SEQ ID NO: 65571 - DNA, 30 bp, Homo sapiens
  chr3:12983206-12983236
  hypo
tgccccggcggccccgagtacagcccatag

SEQ ID NO: 65572 - DNA, 440 bp, Homo sapiens
  chr3:12984506-12984946
  hypo
tggtgtgtgtcacggcgaatttggaaactcatacattgctgtatatacattttctctaaatcttaaaagcagtctacaaagaggaatcatcgactcccctttttcaggtgaggagactgaggcctacagggggtgccaggatgacccaggtaggaagtaggtgagtcagagttcaagcccaagtggtgggaccctgagacccagtggtcccctccgcctcaccacctcctgtccctgcaatgtgcacacatttctctgacatctccaagcaccatgggggagcagtgcccctggtggggccatgcggggcgggctgacgagctcatcccgactcggaactcgcaagccttttcactgtgtgcagacgctggtttccgctgcaggtggcttctcagtgtaggacgagcagggaagggagcgagttatgtcacagtttccaa

SEQ ID NO: 65573 - DNA, 419 bp, Homo sapiens; identical to SEQ ID NO: 38939
  chr3:13008719-13009138
  hypo

SEQ ID NO: 65574 - DNA, 102 bp, Homo sapiens
  chr3:13020985-13021087
  hypo
cacatgcacgcagcacgcgcacacacacactctaagatgtccctggacagcggttgtctctggggaggggaatgggacgtggaagggcgtggcgcatagctc

SEQ ID NO: 65575 - DNA, 399 bp, Homo sapiens
  chr3:13028576-13028975
  hypo
ccccatctggtgctgcggccagtgcgggtcataaaccctgagcccctgcttaatccgccagctcccgagtcagcgccagccagacacgtgacactgcagccccacagacctgtttggcaggagcagcagctggtcctgctgggggcggggagggctgtccgccttgccctcgccctgtccctaccacctcccagcccacagcctgcagttgggccactgcctgccttgtagcgagaggtatggtacgtgctgggggcagtgcaggtagggaaaagaacacggttctcaccaaatggtgccgggccacctgggaatgggtatatgtgtgcacctggggccgtgcatgtgcacacatgtgcatgtgtcagagagagagagagagaccgtagatgaaaatct

SEQ ID NO: 65576 - DNA, 30 bp, Homo sapiens; identical to SEQ ID NO: 17362
  chr3:13083462-13083492
  hypo

SEQ ID NO: 65577 - DNA, 220 bp, Homo sapiens
  chr3:13083877-13084097
  hypo
ctccagctggaccacggtaacgtctccgcggagacacggagaggggctagtgggaggtggagaaccggctgcttcggcccgccctggtccctgccacggcggcccccactcacatggcccagcccgcccggcgcagcttgtacagtacacgcctccaatacaaagagcagccagcacaaaagcctagcaactcattcacgcagctcgcctggcccggctc

SEQ ID NO: 65578 - DNA, 31 bp, Homo sapiens; identical to SEQ ID NO: 2399
  chr3:13138221-13138252
  hypo

SEQ ID NO: 65579 - DNA, 95 bp, Homo sapiens; identical to SEQ ID NO: 17365
  chr3:13205533-13205628
  hypo

SEQ ID NO: 65580 - DNA, 639 bp, Homo sapiens; identical to SEQ ID NO: 2400
  chr3:13323366-13324005
  hypo

SEQ ID NO: 65581 - DNA, 113 bp, Homo sapiens; identical to SEQ ID NO: 2401
  chr3:13324234-13324347
  hypo

SEQ ID NO: 65582 - DNA, 254 bp, Homo sapiens; identical to SEQ ID NO: 2402
  chr3:13324419-13324673
  hypo

SEQ ID NO: 65583 - DNA, 199 bp, Homo sapiens; identical to SEQ ID NO: 2403
  chr3:13324740-13324939
  hypo

SEQ ID NO: 65584 - DNA, 30 bp, Homo sapiens
  chr3:13358467-13358497
  hypo
atcagatgtctcaacggcttatgaaacaaa

SEQ ID NO: 65585 - DNA, 31 bp, Homo sapiens
  chr3:13363860-13363891
  hypo
gggtgtgggccaggcccgatggccaccacac

SEQ ID NO: 65586 - DNA, 53 bp, Homo sapiens
  chr3:13501984-13502037
  hypo
tgaaggctttgccaggcgggacccccatggcctggcgccggaaaaggaggttc

SEQ ID NO: 65587 - DNA, 30 bp, Homo sapiens
  chr3:13522725-13522755
  hypo
tgtctttttccacacggtaggctacacaca

SEQ ID NO: 65588 - DNA, 30 bp, Homo sapiens
  chr3:13547506-13547536
  hypo
ctcccactgtctcccggcctccctaatgct

SEQ ID NO: 65589 - DNA, 824 bp, Homo sapiens; identical to SEQ ID NO: 17370
  chr3:13611724-13612548
  hypo

SEQ ID NO: 65590 - DNA, 27 bp, Homo sapiens
  chr3:13627315-13627342
  hypo
aaaagcctagcacgtgtagttagttac

SEQ ID NO: 65591 - DNA, 207 bp, Homo sapiens
  chr3:13669959-13670166
  hypo
acagttttacagatgccggcctagtccccaagtgggtctgagattctacccgctctgcgccccccatcaactccttccaaaaaagggtttgcttagtctctgtgcctctaaaacttcttgttaatgtgctgtgcttccctggcagctagacccctggcacgtggttggtgtagttatcctagcactcagcctcgatcccgccctgcc

SEQ ID NO: 65592 - DNA, 140 bp, Homo sapiens
  chr3:13679174-13679314
  hypo
tccgcattggccccgcgccagccttcacgggggacaccatcgccctgaacatcatcaagggcaatgaggagggctactttggcacgcgcaggctcaatgcctacacgggtgtggtctacctgcagcgggccgtgctggag

SEQ ID NO: 65593 - DNA, 30 bp, Homo sapiens; identical to SEQ ID NO: 17372
  chr3:13860189-13860219
  hypo

SEQ ID NO: 65594 - DNA, 30 bp, Homo sapiens; identical to SEQ ID NO: 17373
  chr3:14164940-14164970
  hypo

SEQ ID NO: 65595 - DNA, 167 bp, Homo sapiens
  chr3:14174612-14174779
  hypo
cctgaccccagacaagctccccgcaaacaagtcacaaatataaggcctgcactaagcgtctaaggggatttgcacacacggggccggggaagcattttgttaatggtttgccatgggtgggaggacaatcaggacaggctttccagaggcagcggcatttgttcagg

SEQ ID NO: 65596 - DNA, 30 bp, Homo sapiens
  chr3:14239629-14239659
  hypo
tcctgtatggaaaacgggagactttgtaca

SEQ ID NO: 65597 - DNA, 94 bp, Homo sapiens
  chr3:14291142-14291236
  hypo
ttcatcttacagaatccttcttctcacttggaggtgtgggcttgtatatagcacttgtgggcttatgtgtccatctgtccgtgtctctcactag

SEQ ID NO: 65598 - DNA, 145 bp, Homo sapiens
  chr3:14383871-14384016
  hypo
taggtgccttgccccccgccatctggagctgcctacccaatgtttccagtgctgccagtgtggagcaaggcctgctcctgccttgcccttccctgagacacacacccgatcctgaccctctgtgtgccagcgcccaggcccctgg

SEQ ID NO: 65599 - DNA, 266 bp, Homo sapiens; identical to SEQ ID NO: 17375
  chr3:14384851-14385117
  hypo

SEQ ID NO: 65600 - DNA, 192 bp, Homo sapiens
  chr3:14386837-14387029
  hypo
gactgtcttcaggaaaccctccgaggagctctgaaagagcagcgggtgcagcggagcgcatggaaggcaccactgcaatgttgacacgctgcctccggcctcctccattccacgtacactgaaggcaccgccacgatgctgacacgctgcctccggcctcctccattccacgaactcagactcagctggctc

SEQ ID NO: 65601 - DNA, 30 bp, Homo sapiens; identical to SEQ ID NO: 38957
  chr3:14444020-14444050
  hypo

SEQ ID NO: 65602 - DNA, 100 bp, Homo sapiens; identical to SEQ ID NO: 2410
  chr3:14444315-14444415
  hypo

SEQ ID NO: 65603 - DNA, 92 bp, Homo sapiens
  chr3:14452943-14453035
  hypo
gcctcttaacagtgcctggcacgtagtaagcactcaaaaaagatgacgtgagttaaagtggacttcagctcgccctgctctgagccttgtgg

SEQ ID NO: 65604 - DNA, 37 bp, Homo sapiens
  chr3:14508071-14508108
  hypo
ctggtccgagggctgacgctgccgggcgcgggcgcag

SEQ ID NO: 65605 - DNA, 31 bp, Homo sapiens; identical to SEQ ID NO: 17377
  chr3:14510138-14510169
  hypo

SEQ ID NO: 65606 - DNA, 31 bp, Homo sapiens; identical to SEQ ID NO: 17378
  chr3:14510390-14510421
  hypo

SEQ ID NO: 65607 - DNA, 128 bp, Homo sapiens; identical to SEQ ID NO: 17379
  chr3:14514278-14514406
  hypo

SEQ ID NO: 65608 - DNA, 30 bp, Homo sapiens
  chr3:14555913-14555943
  hypo
cagagcacgacctccgtggtctccgtgtgc

SEQ ID NO: 65609 - DNA, 132 bp, Homo sapiens
  chr3:14564197-14564329
  hypo
gggaccattccacagacgggaaaaccaaggagcaggaaagggaagaacgacaccaaggctgcccctctccaaacaccccaacccctgagacagcagtatgttggggaagaaagggctcgaggtttccctcat

SEQ ID NO: 65610 - DNA, 31 bp, Homo sapiens
  chr3:14575093-14575124
  hypo
tgaagcacagggtgcccgatgttggctggcg

SEQ ID NO: 65611 - DNA, 30 bp, Homo sapiens
  chr3:14615429-14615459
  hypo
gtgcttctcgtgctcgcgccctgcgcgaat

SEQ ID NO: 65612 - DNA, 27 bp, Homo sapiens
  chr3:14694130-14694157
  hypo
gggcgcggtgactcacgcctgtaatcc

SEQ ID NO: 65613 - DNA, 30 bp, Homo sapiens
  chr3:14716123-14716153
  hypo
tgatctgcttttacacgctttatggtccga

SEQ ID NO: 65614 - DNA, 30 bp, Homo sapiens; identical to SEQ ID NO: 17380
  chr3:14716480-14716510
  hypo

SEQ ID NO: 65615 - DNA, 30 bp, Homo sapiens; identical to SEQ ID NO: 17381
  chr3:14849230-14849260
  hypo

SEQ ID NO: 65616 - DNA, 30 bp, Homo sapiens; identical to SEQ ID NO: 2411
  chr3:14852312-14852342
  hypo

SEQ ID NO: 65617 - DNA, 39 bp, Homo sapiens; identical to SEQ ID NO: 17383
  chr3:14852684-14852723
  hypo

SEQ ID NO: 65618 - DNA, 41 bp, Homo sapiens
  chr3:15004943-15004984
  hypo
aggagccaaaaggttgagattcgcattttttattttttatt

SEQ ID NO: 65619 - DNA, 4 bp, Homo sapiens
  chr3:15102737-15102741
  hypo
ctct

SEQ ID NO: 65620 - DNA, 30 bp, Homo sapiens; identical to SEQ ID NO: 17384
  chr3:15105505-15105535
  hypo

SEQ ID NO: 65621 - DNA, 18 bp, Homo sapiens
  chr3:15107708-15107726
  hypo
aatggtgctatcttggct

SEQ ID NO: 65622 - DNA, 164 bp, Homo sapiens; identical to SEQ ID NO: 17385
  chr3:15116203-15116367
  hypo

SEQ ID NO: 65623 - DNA, 306 bp, Homo sapiens; identical to SEQ ID NO: 17386
  chr3:15123749-15124055
  hypo

SEQ ID NO: 65624 - DNA, 31 bp, Homo sapiens; identical to SEQ ID NO: 17387
  chr3:15317991-15318022
  hypo

SEQ ID NO: 65625 - DNA, 46 bp, Homo sapiens; identical to SEQ ID NO: 17388
  chr3:15374561-15374607
  hypo

SEQ ID NO: 65626 - DNA, 30 bp, Homo sapiens
  chr3:15417155-15417185
  hypo
ggccgcggcgatggcgacggcggcgggacg

SEQ ID NO: 65627 - DNA, 153 bp, Homo sapiens
  chr3:15540527-15540680
  hypo
ccccccaccgagaccgtccaaggggagcctgccctcctctgcttcagggaagaccttcatggccaggggtctcagctctaatcctgtctgggccaaagtgttgctgacaaagctaaacgtaactaaaacaacaacaacgaaaccacaaacaaa

SEQ ID NO: 65628 - DNA, 31 bp, Homo sapiens
  chr3:15600371-15600402
  hypo
aaaaaaaaaaagctcacggggtcaaaactta

SEQ ID NO: 65629 - DNA, 22 bp, Homo sapiens
  chr3:15696527-15696549
  hypo
ccgcgcccggcctgcatcagtt

SEQ ID NO: 65630 - DNA, 19 bp, Homo sapiens
  chr3:15899076-15899095
  hypo
ccaccgcgcctggccgcaa

SEQ ID NO: 65631 - DNA, 30 bp, Homo sapiens; identical to SEQ ID NO: 17390
  chr3:15919490-15919520
  hypo

SEQ ID NO: 65632 - DNA, 30 bp, Homo sapiens; identical to SEQ ID NO: 17391
  chr3:16329435-16329465
  hypo

SEQ ID NO: 65633 - DNA, 30 bp, Homo sapiens
  chr3:16371441-16371471
  hypo
acccctgctgcagcccgacccgcctgctta

SEQ ID NO: 65634 - DNA, 30 bp, Homo sapiens; identical to SEQ ID NO: 17392
  chr3:16411652-16411682
  hypo

SEQ ID NO: 65635 - DNA, 216 bp, Homo sapiens; identical to SEQ ID NO: 17393
  chr3:16439261-16439477
  hypo

SEQ ID NO: 65636 - DNA, 1245 bp, Homo sapiens; identical to SEQ ID NO: 38969
  chr3:16553593-16554838
  hypo

SEQ ID NO: 65637 - DNA, 322 bp, Homo sapiens; identical to SEQ ID NO: 38970
  chr3:16555196-16555518
  hypo

SEQ ID NO: 65638 - DNA, 30 bp, Homo sapiens
  chr3:16645769-16645799
  hypo
gcatcttgtggtggcgctgaagcaacgcta

SEQ ID NO: 65639 - DNA, 35 bp, Homo sapiens; identical to SEQ ID NO: 2416
  chr3:16860035-16860070
  hypo

SEQ ID NO: 65640 - DNA, 564 bp, Homo sapiens; identical to SEQ ID NO: 38972
  chr3:16925655-16926219
  hypo

SEQ ID NO: 65641 - DNA, 353 bp, Homo sapiens; identical to SEQ ID NO: 38974
  chr3:16926665-16927018
  hypo

SEQ ID NO: 65642 - DNA, 121 bp, Homo sapiens
  chr3:17101441-17101562
  hypo
agagcaggaaagtatcgatgtgaaagtggcgatccaaacaaaaatgttctgggtctaacagaactcctctgtgcatgactgtggtgaagaagacctctttatttctcggtgaaatgaagtg

SEQ ID NO: 65643 - DNA, 25 bp, Homo sapiens
  chr3:17192867-17192892
  hypo
gagcgagaatcgtctcaaaaaaaaa

SEQ ID NO: 65644 - DNA, 31 bp, Homo sapiens; identical to SEQ ID NO: 2419
  chr3:17571374-17571405
  hypo

SEQ ID NO: 65645 - DNA, 31 bp, Homo sapiens; identical to SEQ ID NO: 17400
  chr3:17643205-17643236
  hypo

SEQ ID NO: 65646 - DNA, 21 bp, Homo sapiens
  chr3:17676888-17676909
  hypo
aaggctgggtgtggtgtctca

SEQ ID NO: 65647 - DNA, 153 bp, Homo sapiens; identical to SEQ ID NO: 17401
  chr3:18452750-18452903
  hypo

SEQ ID NO: 65648 - DNA, 30 bp, Homo sapiens
  chr3:18459504-18459534
  hypo
aaggtgtttatgcagcgcactgtcagactt

SEQ ID NO: 65649 - DNA, 109 bp, Homo sapiens; identical to SEQ ID NO: 17402
  chr3:18462349-18462458
  hypo

SEQ ID NO: 65650 - DNA, 505 bp, Homo sapiens; identical to SEQ ID NO: 38976
  chr3:18485350-18485855
  hypo

SEQ ID NO: 65651 - DNA, 183 bp, Homo sapiens; identical to SEQ ID NO: 38977
  chr3:18486088-18486271
  hypo

SEQ ID NO: 65652 - DNA, 77 bp, Homo sapiens
  chr3:19276254-19276331
  hypo
agcgagagagggccgtgagcactgccagcacgctgtcaccgctgaatttgacctgcgtacatgatcccagtctgagt

SEQ ID NO: 65653 - DNA, 139 bp, Homo sapiens; identical to SEQ ID NO: 17404
  chr3:19790878-19791017
  hypo

SEQ ID NO: 65654 - DNA, 26 bp, Homo sapiens
  chr3:20013244-20013270
  hypo
gtggaagccaccgcacctggcccagt

SEQ ID NO: 65655 - DNA, 45 bp, Homo sapiens
  chr3:20070403-20070448
  hypo
cagccactctgtgcacgttagtgaacactgcgctaattcatgagg

SEQ ID NO: 65656 - DNA, 99 bp, Homo sapiens
  chr3:20070773-20070872
  hypo
ctaggtttacaaggtcgccctgtctagaactcataccaactgacactaacaccaccacccccatctcacaactcacacacctttttttttgagacggag

SEQ ID NO: 65657 - DNA, 98 bp, Homo sapiens; identical to SEQ ID NO: 17407
  chr3:20071111-20071209
  hypo

SEQ ID NO: 65658 - DNA, 37 bp, Homo sapiens
  chr3:20120130-20120167
  hypo
gaagtgctgggattacagctaccgcacccttcatcat

SEQ ID NO: 65659 - DNA, 31 bp, Homo sapiens
  chr3:20171684-20171715
  hypo
tggagctttttgtcttcgactcctagcacta

SEQ ID NO: 65660 - DNA, 12 bp, Homo sapiens
  chr3:21313407-21313419
  hypo
gtgcggggccac

SEQ ID NO: 65661 - DNA, 30 bp, Homo sapiens; identical to SEQ ID NO: 2423
  chr3:22335323-22335353
  hypo

SEQ ID NO: 65662 - DNA, 30 bp, Homo sapiens; identical to SEQ ID NO: 38985
  chr3:22412730-22412760
  hypo

SEQ ID NO: 65663 - DNA, 320 bp, Homo sapiens
  chr3:23031954-23032274
  hypo
gcactggtgggcctcgcacgccctccactagccggacggggccccgcaaccctgaagaccttgggcggccacgtgtcccacaggtttcagcagcagtggctttgctcagcgggaaagctgggagccaaggtctgtctctggacgctttgaaacaggccaagctacctcacaccgacatcccttctgctgccagctgtctgtccccagggctgacgcccctcatcccactctgcagccggatgggagagggcactcctgaacatcagtctcacctccccagcgctgtgcgtcctcgggtctgggccgggtactctgccagc

SEQ ID NO: 65664 - DNA, 30 bp, Homo sapiens; identical to SEQ ID NO: 17410
  chr3:23427945-23427975
  hypo

SEQ ID NO: 65665 - DNA, 163 bp, Homo sapiens; identical to SEQ ID NO: 17411
  chr3:23750592-23750755
  hypo

SEQ ID NO: 65666 - DNA, 30 bp, Homo sapiens; identical to SEQ ID NO: 38992
  chr3:23848497-23848527
  hypo

SEQ ID NO: 65667 - DNA, 20 bp, Homo sapiens
  chr3:23924048-23924068
  hypo
gggaccgggagccgcggagc

SEQ ID NO: 65668 - DNA, 65 bp, Homo sapiens; identical to SEQ ID NO: 2429
  chr3:23986745-23986810
  hypo

SEQ ID NO: 65669 - DNA, 442 bp, Homo sapiens
  chr3:24160974-24161416
  hypo
acatgcttcaagggtgctcagcggttccttggaggctgagtctgtggggggcttagtgtcgaggaggggccagggcttgtacccctgttcatggaggagcaacaagaacggcgttgctggcacagagcgaaggcctggcagtccaccccaggcctgcactgcacactgaagagctgtcgcccggggcacaggtgaggggcttcgctgggctgaggcatcaacaggtcaagcgcgtcattgaggaccgaggctctagaaaaagctctgaggcggcacgtggtgttttgagcagaatcataaagaagaaaacatcttacttttttcattgtttctggaaatactgcacgtctaaattgagcaaagtacacttgagggtcacacacgcacgcgcatacactcacacgcacacacgccccacaccgctcatccctaaaagggaagt

SEQ ID NO: 65670 - DNA, 170 bp, Homo sapiens; identical to SEQ ID NO: 17414
  chr3:24344849-24345019
  hypo

SEQ ID NO: 65671 - DNA, 32 bp, Homo sapiens; identical to SEQ ID NO: 17415
  chr3:24374242-24374274
  hypo

SEQ ID NO: 65672 - DNA, 196 bp, Homo sapiens; identical to SEQ ID NO: 17416
  chr3:24436869-24437065
  hypo

SEQ ID NO: 65673 - DNA, 556 bp, Homo sapiens; identical to SEQ ID NO: 38997
  chr3:24536767-24537323
  hypo

SEQ ID NO: 65674 - DNA, 54 bp, Homo sapiens; identical to SEQ ID NO: 2431
  chr3:24563200-24563254
  hypo

SEQ ID NO: 65675 - DNA, 30 bp, Homo sapiens; identical to SEQ ID NO: 2432
  chr3:24563670-24563700
  hypo

SEQ ID NO: 65676 - DNA, 30 bp, Homo sapiens; identical to SEQ ID NO: 17420
  chr3:25728356-25728386
  hypo

SEQ ID NO: 65677 - DNA, 30 bp, Homo sapiens; identical to SEQ ID NO: 39012
  chr3:27415997-27416027
  hypo

SEQ ID NO: 65678 - DNA, 22 bp, Homo sapiens
  chr3:27487117-27487139
  hypo
tattgtaatggctgggcgcagc

SEQ ID NO: 65679 - DNA, 31 bp, Homo sapiens
  chr3:27514260-27514291
  hypo
aattccttttcaaaaacgaattgcatcaggc

SEQ ID NO: 65680 - DNA, 101 bp, Homo sapiens
  chr3:27519020-27519121
  hypo
ctgtttggcaataccacgtaatattaagctgcattctctccccatcaaagtttaatgtctttatgtattataaggtttctcagagcctttttttttggaga

SEQ ID NO: 65681 - DNA, 36 bp, Homo sapiens; identical to SEQ ID NO: 17422
  chr3:27564147-27564183
  hypo

SEQ ID NO: 65682 - DNA, 38 bp, Homo sapiens; identical to SEQ ID NO: 17423
  chr3:27587340-27587378
  hypo

SEQ ID NO: 65683 - DNA, 31 bp, Homo sapiens
  chr3:27671739-27671770
  hypo
tttttttttttttttttgagacggaatctcg

SEQ ID NO: 65684 - DNA, 1678 bp, Homo sapiens; identical to SEQ ID NO: 39017
  chr3:27762337-27764015
  hypo

SEQ ID NO: 65685 - DNA, 33 bp, Homo sapiens
  chr3:29664779-29664812
  hypo
acattataaaagtataaaagtcggccgggcgcg

SEQ ID NO: 65686 - DNA, 37 bp, Homo sapiens
  chr3:30574869-30574906
  hypo
taaagaaaatcaatgacgtggtcgcccatgtgcccac

SEQ ID NO: 65687 - DNA, 228 bp, Homo sapiens; identical to SEQ ID NO: 39027
  chr3:30648804-30649032
  hypo

SEQ ID NO: 65688 - DNA, 30 bp, Homo sapiens; identical to SEQ ID NO: 39028
  chr3:30682923-30682953
  hypo

SEQ ID NO: 65689 - DNA, 30 bp, Homo sapiens; identical to SEQ ID NO: 17426
  chr3:30713268-30713298
  hypo

SEQ ID NO: 65690 - DNA, 175 bp, Homo sapiens
  chr3:30713672-30713847
  hypo
tacaggagtacctgacgcggcatgtcatcagctgggaggacctgcgcaagctgggcagctccctcgcccgggggattgctcacctccacagtgatcacactccatgtgggaggcccaagatgcccatcgtgcacagggacctcaagagctccaatatcctcgtgaagaacgacct

SEQ ID NO: 65691 - DNA, 30 bp, Homo sapiens; identical to SEQ ID NO: 39029
  chr3:30804983-30805013
  hypo

SEQ ID NO: 65692 - DNA, 30 bp, Homo sapiens; identical to SEQ ID NO: 39030
  chr3:31064170-31064200
  hypo

SEQ ID NO: 65693 - DNA, 31 bp, Homo sapiens; identical to SEQ ID NO: 17428
  chr3:31398337-31398368
  hypo

SEQ ID NO: 65694 - DNA, 31 bp, Homo sapiens; identical to SEQ ID NO: 17429
  chr3:31717146-31717177
  hypo

SEQ ID NO: 65695 - DNA, 67 bp, Homo sapiens
  chr3:31786600-31786667
  hypo
aggtagaaaagcaggtttgggcgcccttgctccagcgtgaatacacgcaaatctcctagactggatt

SEQ ID NO: 65696 - DNA, 30 bp, Homo sapiens
  chr3:31977294-31977324
  hypo
tgagccaccgcacccggccaaaataattgg

SEQ ID NO: 65697 - DNA, 93 bp, Homo sapiens; identical to SEQ ID NO: 17430
  chr3:32151318-32151411
  hypo

SEQ ID NO: 65698 - DNA, 26 bp, Homo sapiens
  chr3:32151710-32151736
  hypo
aaatcgtgtttcttaaattgtggtcc

SEQ ID NO: 65699 - DNA, 30 bp, Homo sapiens
  chr3:32187886-32187916
  hypo
tttagattcacattcggtcagttaaaaatg

SEQ ID NO: 65700 - DNA, 31 bp, Homo sapiens
  chr3:32300385-32300416
  hypo
ctgagttctgtcccctcgcttccccacccca

SEQ ID NO: 65701 - DNA, 31 bp, Homo sapiens
  chr3:32412106-32412137
  hypo
taagtgcagtgactgacgtgcttgtgatatt

SEQ ID NO: 65702 - DNA, 1089 bp, Homo sapiens; identical to SEQ ID NO: 39034
  chr3:32433046-32434135
  hypo

SEQ ID NO: 65703 - DNA, 83 bp, Homo sapiens; identical to SEQ ID NO: 39037
  chr3:32612693-32612776
  hypo

SEQ ID NO: 65704 - DNA, 274 bp, Homo sapiens
  chr3:32663084-32663358
  hypo
gagcccgctgcaagacgcttgctagggttgacttgtttcatggtgagggctccttgaagtgctggcaccaacaggtacttcagctcggtgaaagcaatctcttccaaatcttcatttcaattgaacaagtcgagctgcgataacatttcgggaaccttctcaaggaggcccaggcccttgaacaccttctcctggactatctggtaaccggtggtttcagctgctaattctacttcgtccagaagctgtttgcctgtttcgagcagcatgggga

SEQ ID NO: 65705 - DNA, 30 bp, Homo sapiens; identical to SEQ ID NO: 2464
  chr3:32668904-32668934
  hypo

SEQ ID NO: 65706 - DNA, 42 bp, Homo sapiens
  chr3:32886050-32886092
  hypo
gctaactttaaaaaattttgtagagagcgtctcaccagtgac

SEQ ID NO: 65707 - DNA, 31 bp, Homo sapiens
  chr3:32891114-32891145
  hypo
tgctgggatttacaggcgtgagcctggccta

SEQ ID NO: 65708 - DNA, 30 bp, Homo sapiens
  chr3:32927433-32927463
  hypo
cgagcaggcccagacggtggcggaacaggt

SEQ ID NO: 65709 - DNA, 31 bp, Homo sapiens; identical to SEQ ID NO: 17434
  chr3:33012352-33012383
  hypo

SEQ ID NO: 65710 - DNA, 30 bp, Homo sapiens
  chr3:33104314-33104344
  hypo
tgtctacaaatcccccggttccttcttatc

SEQ ID NO: 65711 - DNA, 30 bp, Homo sapiens
  chr3:33132523-33132553
  hypo
caaacattaccagccgcatcaaacagtgga

SEQ ID NO: 65712 - DNA, 1076 bp, Homo sapiens; identical to SEQ ID NO: 2471
  chr3:33259727-33260803
  hypo

SEQ ID NO: 65713 - DNA, 121 bp, Homo sapiens
  chr3:33437662-33437783
  hypo
ccccactgccattctcgcttgcactgcttgcagcttgctgctgcccttgcagcactgtgctgcttggctgctcccggcagacatagatggttaaacggggtctaaccgacctgcaatcaga

SEQ ID NO: 65714 - DNA, 30 bp, Homo sapiens
  chr3:33444373-33444403
  hypo
ggggcatcgggccacggagaacactaagga

SEQ ID NO: 65715 - DNA, 138 bp, Homo sapiens
  chr3:33689108-33689246
  hypo
caatatgtaaacaaacgagtgcagttgtgcttcaataaaattttatatacaaaaacaggagggcagatggttttgatccgcaagcaacagtttgccaatctctgctctaggctaactactaaaagaagagtaagtagg

SEQ ID NO: 65716 - DNA, 30 bp, Homo sapiens; identical to SEQ ID NO: 17436
  chr3:33729785-33729815
  hypo

SEQ ID NO: 65717 - DNA, 198 bp, Homo sapiens
  chr3:33841158-33841356
  hypo
ataagaacattttttacgattttatagttaaacatttcttttgcataccttgttaatctcgttttctccgtatagtatattctacttgtttcacaggagaatcacaattgtattccaatccaagtagcagaaacccaggctaaactagcttgagctaagaaaagacttattctgccgggcgcggtggctcacgcctgt

SEQ ID NO: 65718 - DNA, 77 bp, Homo sapiens
  chr3:33841655-33841732
  hypo
actgaaaagtctagggatattccttccttagctttaggtatcactggagatcgtcttgcctccgtgatgcttccctc

SEQ ID NO: 65719 - DNA, 224 bp, Homo sapiens
  chr3:36778834-36779058
  hypo
aggtctcctccctgcacgtactccaggatcaggtagatttccatgtctgtttcgtagacttcatgcaatttcacgatgttggggtgagagaggctctggatgatcaagatctcactgtccaccatgtcctccttgcccttgagtctggacttgtcaatgatcttcatcgcataggcctgcctggtctcgcggtgtctgcactccttcacgacagcaaagttccc

SEQ ID NO: 65720 - DNA, 30 bp, Homo sapiens; identical to SEQ ID NO: 17438
  chr3:36868864-36868894
  hypo

SEQ ID NO: 65721 - DNA, 30 bp, Homo sapiens
  chr3:36902420-36902450
  hypo
gaagctgtttcttccgctggtcccaggtgc

SEQ ID NO: 65722 - DNA, 163 bp, Homo sapiens
  chr3:36984239-36984402
  hypo
aactcccctgtgaaatgctgacggtctcctcatactctgggagagcggcggaaacagaacctgcagttgccccataaagctggtcagtcggtcataaagtgaagttaacaatttatgacccgctttaaaaaaaaaaaaaaaacatagaatgggccggcgtggt

SEQ ID NO: 65723 - DNA, 42 bp, Homo sapiens; identical to SEQ ID NO: 17440
  chr3:36984641-36984683
  hypo

SEQ ID NO: 65724 - DNA, 1091 bp, Homo sapiens; identical to SEQ ID NO: 39060
  chr3:36985602-36986693
  hypo

SEQ ID NO: 65725 - DNA, 30 bp, Homo sapiens; identical to SEQ ID NO: 17442
  chr3:36987025-36987055
  hypo

SEQ ID NO: 65726 - DNA, 30 bp, Homo sapiens
  chr3:36987478-36987508
  hypo
cactggtcattctgcgttgtgaactagtct

SEQ ID NO: 65727 - DNA, 30 bp, Homo sapiens; identical to SEQ ID NO: 17443
  chr3:37017734-37017764
  hypo

SEQ ID NO: 65728 - DNA, 30 bp, Homo sapiens
  chr3:37018014-37018044
  hypo
atccaggaccagatcgctctggtggagagt

SEQ ID NO: 65729 - DNA, 1447 bp, Homo sapiens; identical to SEQ ID NO: 39061
  chr3:37033966-37035413
  hypo

SEQ ID NO: 65730 - DNA, 92 bp, Homo sapiens; identical to SEQ ID NO: 39062
  chr3:37038108-37038200
  hypo

SEQ ID NO: 65731 - DNA, 100 bp, Homo sapiens; identical to SEQ ID NO: 39063
  chr3:37042444-37042544
  hypo

SEQ ID NO: 65732 - DNA, 75 bp, Homo sapiens; identical to SEQ ID NO: 39064
  chr3:37045890-37045965
  hypo

SEQ ID NO: 65733 - DNA, 74 bp, Homo sapiens; identical to SEQ ID NO: 39065
  chr3:37048480-37048554
  hypo

SEQ ID NO: 65734 - DNA, 93 bp, Homo sapiens; identical to SEQ ID NO: 39066
  chr3:37050303-37050396
  hypo

SEQ ID NO: 65735 - DNA, 281 bp, Homo sapiens; identical to SEQ ID NO: 39067
  chr3:37053309-37053590
  hypo

SEQ ID NO: 65736 - DNA, 114 bp, Homo sapiens; identical to SEQ ID NO: 39068
  chr3:37055921-37056035
  hypo

SEQ ID NO: 65737 - DNA, 95 bp, Homo sapiens; identical to SEQ ID NO: 39069
  chr3:37058995-37059090
  hypo

SEQ ID NO: 65738 - DNA, 155 bp, Homo sapiens; identical to SEQ ID NO: 39070
  chr3:37061799-37061954
  hypo

SEQ ID NO: 65739 - DNA, 372 bp, Homo sapiens; identical to SEQ ID NO: 39071
  chr3:37067126-37067498
  hypo

SEQ ID NO: 65740 - DNA, 150 bp, Homo sapiens; identical to SEQ ID NO: 39072
  chr3:37070273-37070423
  hypo

SEQ ID NO: 65741 - DNA, 110 bp, Homo sapiens; identical to SEQ ID NO: 39073
  chr3:37081675-37081785
  hypo

SEQ ID NO: 65742 - DNA, 65 bp, Homo sapiens; identical to SEQ ID NO: 39074
  chr3:37083757-37083822
  hypo

SEQ ID NO: 65743 - DNA, 166 bp, Homo sapiens; identical to SEQ ID NO: 39075
  chr3:37089008-37089174
  hypo

SEQ ID NO: 65744 - DNA, 94 bp, Homo sapiens; identical to SEQ ID NO: 39076
  chr3:37090006-37090100
  hypo

SEQ ID NO: 65745 - DNA, 115 bp, Homo sapiens; identical to SEQ ID NO: 39077
  chr3:37090393-37090508
  hypo

SEQ ID NO: 65746 - DNA, 362 bp, Homo sapiens; identical to SEQ ID NO: 39078
  chr3:37091975-37092337
  hypo

SEQ ID NO: 65747 - DNA, 138 bp, Homo sapiens
  chr3:37144392-37144530
  hypo
ccaccccatgcaatacactcacgctggacaaatctgggatactgatatcatccacctcagagacaacacttcccctacgattggagcgactgaaataatcagcggcagatacctttcggtcagaaaaaaaacaagatg

SEQ ID NO: 65748 - DNA, 26 bp, Homo sapiens
  chr3:37360899-37360925
  hypo
ttatgagagagagtctcgctctgttg

SEQ ID NO: 65749 - DNA, 1039 bp, Homo sapiens; identical to SEQ ID NO: 39079
  chr3:37493090-37494129
  hypo

SEQ ID NO: 65750 - DNA, 30 bp, Homo sapiens; identical to SEQ ID NO: 2480
  chr3:37731246-37731276
  hypo

SEQ ID NO: 65751 - DNA, 62 bp, Homo sapiens
  chr3:37774453-37774515
  hypo
acaccggggtatactccggaggggctgcatcatatggtctttctcttcgattcacatgatgt

SEQ ID NO: 65752 - DNA, 21 bp, Homo sapiens
  chr3:37983173-37983194
  hypo
ttgggccgggcatgttttcat

SEQ ID NO: 65753 - DNA, 163 bp, Homo sapiens; identical to SEQ ID NO: 17448
  chr3:38017264-38017427
  hypo

SEQ ID NO: 65754 - DNA, 383 bp, Homo sapiens
  chr3:38030489-38030872
  hypo
tggctactgtggtaggatggtcgtagcggccaggcagacccagagacacagagggaggctggctccggagcaggcaggaggcgtgagagggagggccaggcccaggatccaccatgaaccagctgccgacgggccagtggcttgcgggagagagaaatcagggcaactccaggtttggggcctaagcaccctctggatgttcacactgaacgtgttcctggggctcagagagggtagatctgggaggggcctgaggcgatgttaaatgtgagaccaaacgtgctgggagagatgtgacagacggaagatggagacttaggccggggcaaggttcgggggagttgggtcagggagacactggcgtttccatgctatttgcagcc

SEQ ID NO: 65755 - DNA, 31 bp, Homo sapiens
  chr3:38032424-38032455
  hypo
ggccacagagcctccgcggcagaattgggag

SEQ ID NO: 65756 - DNA, 194 bp, Homo sapiens; identical to SEQ ID NO: 17450
  chr3:38033755-38033949
  hypo

SEQ ID NO: 65757 - DNA, 177 bp, Homo sapiens
  chr3:38051944-38052121
  hypo
tggcccatgtcctggtagacacggcggtgtgccaggctgaaggcgctgccgtcagccgacagtaagtacatgaggaagccgtccttggtcatctgccgctgcgccttggctgggagggaggaggccactgcccgtcagagccagcctccagcaggcgctcctggctgcccacccatc

SEQ ID NO: 65758 - DNA, 401 bp, Homo sapiens; identical to SEQ ID NO: 2484
  chr3:38080607-38081008
  hypo

SEQ ID NO: 65759 - DNA, 78 bp, Homo sapiens; identical to SEQ ID NO: 39089
  chr3:38081153-38081231
  hypo

SEQ ID NO: 65760 - DNA, 30 bp, Homo sapiens
  chr3:38164501-38164531
  hypo
gactgtctgcgtagcgcctccagcctggga

SEQ ID NO: 65761 - DNA, 30 bp, Homo sapiens; identical to SEQ ID NO: 2486
  chr3:38180464-38180494
  hypo

SEQ ID NO: 65762 - DNA, 30 bp, Homo sapiens; identical to SEQ ID NO: 2487
  chr3:38182009-38182039
  hypo

SEQ ID NO: 65763 - DNA, 55 bp, Homo sapiens; identical to SEQ ID NO: 2488
  chr3:38182281-38182336
  hypo

SEQ ID NO: 65764 - DNA, 159 bp, Homo sapiens; identical to SEQ ID NO: 2489
  chr3:38182625-38182784
  hypo

SEQ ID NO: 65765 - DNA, 30 bp, Homo sapiens
  chr3:38317674-38317704
  hypo
gagtaaaggcttcccgggggtttgggtaca

SEQ ID NO: 65766 - DNA, 78 bp, Homo sapiens; identical to SEQ ID NO: 39101
  chr3:38495096-38495174
  hypo

SEQ ID NO: 65767 - DNA, 52 bp, Homo sapiens; identical to SEQ ID NO: 39102
  chr3:38495213-38495265
  hypo

SEQ ID NO: 65768 - DNA, 102 bp, Homo sapiens; identical to SEQ ID NO: 39103
  chr3:38495678-38495780
  hypo

SEQ ID NO: 65769 - DNA, 1235 bp, Homo sapiens; identical to SEQ ID NO: 39104
  chr3:38496020-38497255
  hypo

SEQ ID NO: 65770 - DNA, 31 bp, Homo sapiens
  chr3:38645195-38645226
  hypo
ggctcaccgtgtctggcgggtgctctagcat

SEQ ID NO: 65771 - DNA, 178 bp, Homo sapiens
  chr3:38674619-38674797
  hypo
gcctgcaggtccagctggggccggggagcctcctcctcgggcagcccctctcggctctcctgcaaggtggttgagccgcgggcttgcttctctgccatgcgcttctcgatggctgccagggactcccgtgtgaacctgcggaagctgctggtgccccgaggtaataggaagtttgcca

SEQ ID NO: 65772 - DNA, 92 bp, Homo sapiens
  chr3:38755470-38755562
  hypo
agagcccgcagtggccgcagagcgcgaagggttcgaagggctttgatgggagccacttcagaatattccagaatcttcgctgtgagacttat

SEQ ID NO: 65773 - DNA, 43 bp, Homo sapiens; identical to SEQ ID NO: 2496
  chr3:39148466-39148509
  hypo

SEQ ID NO: 65774 - DNA, 30 bp, Homo sapiens; identical to SEQ ID NO: 17462
  chr3:39184202-39184232
  hypo

SEQ ID NO: 65775 - DNA, 30 bp, Homo sapiens; identical to SEQ ID NO: 17463
  chr3:39184537-39184567
  hypo

SEQ ID NO: 65776 - DNA, 247 bp, Homo sapiens
  chr3:39185650-39185897
  hypo
tgcagctgcaggtctcagggtcgcagatcctatcgcagtgacagccacaatcctcccgggattggcgcagtgcctgcagctcccgcttctcctcccgatcgatccttcgcacacctgaagccctcagcagagctcgacgtcgccgggctgggtagggctgtaggaagctcacttcttccaaccggccacctgccacagcgactgccaagtcctcctccacagaggcgtcatcaatggcatccaccac

SEQ ID NO: 65777 - DNA, 31 bp, Homo sapiens; identical to SEQ ID NO: 17464
  chr3:39229445-39229476
  hypo

SEQ ID NO: 65778 - DNA, 30 bp, Homo sapiens; identical to SEQ ID NO: 17465
  chr3:39231892-39231922
  hypo

SEQ ID NO: 65779 - DNA, 107 bp, Homo sapiens; identical to SEQ ID NO: 17466
  chr3:39234909-39235016
  hypo

SEQ ID NO: 65780 - DNA, 46 bp, Homo sapiens
  chr3:40172134-40172180
  hypo
tgctgggattacaagcgtgagccaccgcgcccggcctctagtccaa

SEQ ID NO: 65781 - DNA, 69 bp, Homo sapiens; identical to SEQ ID NO: 17467
  chr3:40231757-40231826
  hypo

SEQ ID NO: 65782 - DNA, 105 bp, Homo sapiens
  chr3:40374173-40374278
  hypo
aagaaaataatccagccgttggtggtaggagctgcagctgtctgaaaggagggatcatgagggaccctgaggagagcagagcaatgagcacgccagagatttgtt

SEQ ID NO: 65783 - DNA, 30 bp, Homo sapiens; identical to SEQ ID NO: 17468
  chr3:40429808-40429838
  hypo

SEQ ID NO: 65784 - DNA, 154 bp, Homo sapiens; identical to SEQ ID NO: 17469
  chr3:40510131-40510285
  hypo

SEQ ID NO: 65785 - DNA, 30 bp, Homo sapiens; identical to SEQ ID NO: 39120
  chr3:40924946-40924976
  hypo

SEQ ID NO: 65786 - DNA, 191 bp, Homo sapiens; identical to SEQ ID NO: 17470
  chr3:41119484-41119675
  hypo

SEQ ID NO: 65787 - DNA, 42 bp, Homo sapiens; identical to SEQ ID NO: 2502
  chr3:41266109-41266151
  hypo

SEQ ID NO: 65788 - DNA, 30 bp, Homo sapiens
  chr3:41282921-41282951
  hypo
aacataaagagccaccgcacggtgtttcaa

SEQ ID NO: 65789 - DNA, 172 bp, Homo sapiens
  chr3:41283295-41283467
  hypo
aaggtgtgaaacagccgttggaataaaacaatacagaaaaacatccatgacccaacaaaatatcaagattttaaataaaggcagtagtactgatttttcttttgcctcaagcgccagtaaggcttggtagggcacaacgctgacagtctacactggacgcccatgtgtccaa

SEQ ID NO: 65790 - DNA, 30 bp, Homo sapiens; identical to SEQ ID NO: 17472
  chr3:41288379-41288409
  hypo

SEQ ID NO: 65791 - DNA, 203 bp, Homo sapiens
  chr3:41289146-41289349
  hypo
gccatgaccaggagaccgttccatgcattcctgctctgcgcatcaaagcccctgtgtgacagaaggaatgcgtttgaacttggcccacccctggctgagtctaggctagactagtggggccatgctgcgcccccgcacacagcaggcccagtgaggctggaaaggacaaactactggcagagcagcatcggaactgagaacaa

SEQ ID NO: 65792 - DNA, 16 bp, Homo sapiens
  chr3:42033448-42033464
  hypo
agtggccgggcacgcc

SEQ ID NO: 65793 - DNA, 43 bp, Homo sapiens
  chr3:42159858-42159901
  hypo
taggtgtgagccactgcgccccgctgagatctgtatttacatg

SEQ ID NO: 65794 - DNA, 21 bp, Homo sapiens
  chr3:42162757-42162778
  hypo
ttttttttttttgagacggag

SEQ ID NO: 65795 - DNA, 271 bp, Homo sapiens
  chr3:42190935-42191206
  hypo
agtattctggaagggcggggaggcatggcagcgttttacttgacgttgatggtgctgtgaagtccattctttcctctgcaagactactgactatgcagaaatttatcgaagcggattattatgaactagactggtattatgaagaatgctcggatggtaattatggcccctgcaaaacagagccgggatgtataggggtattgtctccttctgggtggggggtgtcctgaaacctttaggggagacaggcggctggcgggtgggaggtacc

SEQ ID NO: 65796 - DNA, 252 bp, Homo sapiens
  chr3:42207052-42207304
  hypo
gaggtggttgtgatgcgtcaggcttttgtgggctgtggagttgggaatgtcagccccagagaaggggcctgagtcctgggcctttgttaatgtagtgtcatcggcagcactcgagggtgccgtgcacaactttcccgatgggtcagtgtcgaaggaggaactgacctggcgcatcagtacctaccgcagcactgttacaaaggtctcttggttcatggttttcattgtccttgtctccgcttgggatttggt

SEQ ID NO: 65797 - DNA, 158 bp, Homo sapiens
  chr3:42222605-42222763
  hypo
cctgttggtttctggccgtttgtgtgctggaagccttccgcatccttcaggtgctctggcagtcccttgccatgcctgagccatcttcattattatgctgtgtgcttgatttgtttgcattgaaatgtgcgtacaaaatgcggctaaaggccgggcgc

SEQ ID NO: 65798 - DNA, 97 bp, Homo sapiens
  chr3:42223002-42223099
  hypo
tccagcctgggcgacagatcgagactccatatcaaaaaccaacaaaaaatgtggcgaaggcatgcaaaatatcagcgcttgttggaacttggcagcc

SEQ ID NO: 65799 - DNA, 134 bp, Homo sapiens
  chr3:42243986-42244120
  hypo
agacggcgctgaggcggctgtccctgcgccgggagaactacctctcggagaggaggttctttgaggaggagcaagagaggaagctccaggagctggcggagaagggcgagctgcgcagcggctccctcacaccc

SEQ ID NO: 65800 - DNA, 30 bp, Homo sapiens
  chr3:42244342-42244372
  hypo
tcctttttcttccgcgacagccacccgcgc

SEQ ID NO: 65801 - DNA, 63 bp, Homo sapiens
  chr3:42249919-42249982
  hypo
ctctgcgcacaccatgcggcctctccctcaccccaccgcctcccacctcggcctgcctgtgtt

SEQ ID NO: 65802 - DNA, 51 bp, Homo sapiens
  chr3:42268625-42268676
  hypo
gtggtagtgggctggtaggatcgagggagcgtggtggtagcagaaattatg

SEQ ID NO: 65803 - DNA, 38 bp, Homo sapiens
  chr3:42569052-42569090
  hypo
cccagcgtggcccaggcgtgccccgacccctccactgt

SEQ ID NO: 65804 - DNA, 105 bp, Homo sapiens
  chr3:42577665-42577770
  hypo
ggaggcagcaacggcgccacgtgcagcacgcaggtttccatgctgacccgcgtcagcccaggtgcccgccgctcctccagcttccaagccgaagtctccctggtc

SEQ ID NO: 65805 - DNA, 88 bp, Homo sapiens
  chr3:42630385-42630473
  hypo
gtaaccaggaagccctgagtccgccccagctcaggtgttacctcacttctctcaccgggtttacctctctgtgaaatgggatgaaagc

SEQ ID NO: 65806 - DNA, 121 bp, Homo sapiens
  chr3:42640753-42640874
  hypo
cccatgtaatgtgtattttatagtttaaaaaaaaaacttataaaatagtgtggtactcagacacagatcattggaacaaaaatccagaaacagacccacacatatatggtcacaaggcgaa

SEQ ID NO: 65807 - DNA, 40 bp, Homo sapiens; identical to SEQ ID NO: 17476
  chr3:42659547-42659587
  hypo

SEQ ID NO: 65808 - DNA, 30 bp, Homo sapiens; identical to SEQ ID NO: 17477
  chr3:42692913-42692943
  hypo

SEQ ID NO: 65809 - DNA, 285 bp, Homo sapiens; identical to SEQ ID NO: 39134
  chr3:42696176-42696461
  hypo

SEQ ID NO: 65810 - DNA, 30 bp, Homo sapiens
  chr3:42699918-42699948
  hypo
gcgcagcgtctttccggcacacaagggtgt

SEQ ID NO: 65811 - DNA, 30 bp, Homo sapiens
  chr3:42700188-42700218
  hypo
aggcccaccaggtccgggcactgtggccct

SEQ ID NO: 65812 - DNA, 30 bp, Homo sapiens; identical to SEQ ID NO: 17479
  chr3:42701027-42701057
  hypo

SEQ ID NO: 65813 - DNA, 759 bp, Homo sapiens; identical to SEQ ID NO: 39135
  chr3:42814257-42815016
  hypo

SEQ ID NO: 65814 - DNA, 72 bp, Homo sapiens
  chr3:42815888-42815960
  hypo
aaatggatctttcccgttggtctccaattgctgcctggtgagctgagggtgggagacgtataatatacaggt

SEQ ID NO: 65815 - DNA, 23 bp, Homo sapiens
  chr3:42852211-42852234
  hypo
ccctttgttcaagtgcgctctca

SEQ ID NO: 65816 - DNA, 46 bp, Homo sapiens
  chr3:42860054-42860100
  hypo
attggcataatttttttgagacggagtctcactctgtcacccaggc

SEQ ID NO: 65817 - DNA, 30 bp, Homo sapiens
  chr3:42905953-42905983
  hypo
gcagcactacaggacgtcgggactgggcat

SEQ ID NO: 65818 - DNA, 43 bp, Homo sapiens; identical to SEQ ID NO: 17482
  chr3:42906565-42906608
  hypo

SEQ ID NO: 65819 - DNA, 45 bp, Homo sapiens
  chr3:43074999-43075044
  hypo
ccataccgagtgggcacgcctggcgctcttcgacttcctgttgca

SEQ ID NO: 65820 - DNA, 30 bp, Homo sapiens
  chr3:43121142-43121172
  hypo
aggagccaccttcccgaggccaggctgtgg

SEQ ID NO: 65821 - DNA, 240 bp, Homo sapiens
  chr3:43121443-43121683
  hypo
ctgacgcctggcaccgtgcctcccgcaccttgcctggatataggccgactgtccacttctgcttccgtggtcctggccggcccttcaccacgcgccgtatggtttgaatgagggacgggatgtccaccttggtgtcctggtagattcggaagagccactcggggttccggcaacagagatgccgtgggacctcacggctttgcaggatacgggcttgctcagcccggtccagatgggtga

SEQ ID NO: 65822 - DNA, 704 bp, Homo sapiens; identical to SEQ ID NO: 39144
  chr3:43147023-43147727
  hypo

SEQ ID NO: 65823 - DNA, 30 bp, Homo sapiens
  chr3:43405856-43405886
  hypo
gcacttttcttggccgggcgcggggctggt

SEQ ID NO: 65824 - DNA, 30 bp, Homo sapiens
  chr3:43526635-43526665
  hypo
ggagtgggccctggcgcggtagcactgggt

SEQ ID NO: 65825 - DNA, 30 bp, Homo sapiens
  chr3:43626297-43626327
  hypo
agcaactttacacgcgtgtgtaaaatgaaa

SEQ ID NO: 65826 - DNA, 194 bp, Homo sapiens; identical to SEQ ID NO: 17486
  chr3:43655461-43655655
  hypo

SEQ ID NO: 65827 - DNA, 215 bp, Homo sapiens; identical to SEQ ID NO: 2516
  chr3:43663333-43663548
  hypo

SEQ ID NO: 65828 - DNA, 27 bp, Homo sapiens
  chr3:43664635-43664662
  hypo
gcgtgagccaccgcgccctgccggctt

SEQ ID NO: 65829 - DNA, 26 bp, Homo sapiens
  chr3:43735475-43735501
  hypo
ccttcctgctcctaaactaaacgata

SEQ ID NO: 65830 - DNA, 26 bp, Homo sapiens
  chr3:43735740-43735766
  hypo
actccgtctcaaaaaaaaaaaaaaaa

SEQ ID NO: 65831 - DNA, 30 bp, Homo sapiens; identical to SEQ ID NO: 39150
  chr3:44035436-44035466
  hypo

SEQ ID NO: 65832 - DNA, 3812 bp, Homo sapiens; identical to SEQ ID NO: 39151
  chr3:44036213-44040025
  hypo

SEQ ID NO: 65833 - DNA, 217 bp, Homo sapiens
  chr3:44283268-44283485
  hypo
ccctcggagctccgcgagaggccctccaaaaagacgctggcacggaactcgcggctctcctgcccgttggatcccgaagcaccagtcggggccccagacacgaggccccacttccgcttacgcgccccacttccgcttccggccccgggctgtggtgactggcggtgtggggtgggtcagagggcagtaggtacctccaggcgggagcagcgtttgc

SEQ ID NO: 65834 - DNA, 31 bp, Homo sapiens
  chr3:44295784-44295815
  hypo
ttcctttgacattgaccgtatgacatacata

SEQ ID NO: 65835 - DNA, 31 bp, Homo sapiens; identical to SEQ ID NO: 2524
  chr3:44379883-44379914
  hypo

SEQ ID NO: 65836 - DNA, 154 bp, Homo sapiens
  chr3:44461797-44461951
  hypo
tacccagcaactcaagctcctcgtggcagggcacagtgctccactggcaaagccgaggatgcactgcaaggctggctaatgctcagcgatgccggccaggctgcacgtccgattctggccacacctacctgccgttgctctgcatgccccactc

SEQ ID NO: 65837 - DNA, 233 bp, Homo sapiens; identical to SEQ ID NO: 39158
  chr3:44518641-44518874
  hypo

SEQ ID NO: 65838 - DNA, 30 bp, Homo sapiens
  chr3:44620180-44620210
  hypo
ctcctcccggtgggcgttcttcatggcttc

SEQ ID NO: 65839 - DNA, 292 bp, Homo sapiens
  chr3:44752299-44752591
  hypo
tacagcttcctccttcatgaccgaagagattctgacacctgtacttgaagttattccacattttccccactttatccattgattataaaatcatcgggggcgcacggggcagcctcatccaggacacctaaggccaggcaggacgggcctggacggcgcagtcacctacagggcgagtccacccaccctctggtgcgtcccgtcccctccgactgcccagcgagcgcagcctcgcttcctccggactgagcctggggaccccagctccaccggatgcccccaccaggcccct

SEQ ID NO: 65840 - DNA, 733 bp, Homo sapiens; identical to SEQ ID NO: 39166
  chr3:44802920-44803653
  hypo

SEQ ID NO: 65841 - DNA, 38 bp, Homo sapiens; identical to SEQ ID NO: 17494
  chr3:44808573-44808611
  hypo

SEQ ID NO: 65842 - DNA, 211 bp, Homo sapiens; identical to SEQ ID NO: 17495
  chr3:44816760-44816971
  hypo

SEQ ID NO: 65843 - DNA, 24 bp, Homo sapiens
  chr3:44818860-44818884
  hypo
tttttatgtggagcatcgctggcc

SEQ ID NO: 65844 - DNA, 20 bp, Homo sapiens
  chr3:44821037-44821057
  hypo
tatttgtggctgggcacggt

SEQ ID NO: 65845 - DNA, 18 bp, Homo sapiens
  chr3:44825669-44825687
  hypo
tctttttgttttgagacg

SEQ ID NO: 65846 - DNA, 31 bp, Homo sapiens; identical to SEQ ID NO: 17499
  chr3:44834019-44834050
  hypo

SEQ ID NO: 65847 - DNA, 19 bp, Homo sapiens
  chr3:44836158-44836177
  hypo
atgtacccctgttagccgg

SEQ ID NO: 65848 - DNA, 28 bp, Homo sapiens
  chr3:44876135-44876163
  hypo
tgggcactgtggctcacgcctgtaatct

SEQ ID NO: 65849 - DNA, 77 bp, Homo sapiens; identical to SEQ ID NO: 17502
  chr3:44882437-44882514
  hypo

SEQ ID NO: 65850 - DNA, 24 bp, Homo sapiens
  chr3:44882895-44882919
  hypo
tgttttttttttgagacggagtct

SEQ ID NO: 65851 - DNA, 30 bp, Homo sapiens; identical to SEQ ID NO: 17504
  chr3:44888529-44888559
  hypo

SEQ ID NO: 65852 - DNA, 14 bp, Homo sapiens
  chr3:44902782-44902796
  hypo
ggaaacattctaaa

SEQ ID NO: 65853 - DNA, 30 bp, Homo sapiens; identical to SEQ ID NO: 2533
  chr3:44931198-44931228
  hypo

SEQ ID NO: 65854 - DNA, 261 bp, Homo sapiens; identical to SEQ ID NO: 17506
  chr3:44945260-44945521
  hypo

SEQ ID NO: 65855 - DNA, 31 bp, Homo sapiens; identical to SEQ ID NO: 17507
  chr3:44975282-44975313
  hypo

SEQ ID NO: 65856 - DNA, 187 bp, Homo sapiens
  chr3:44999994-45000181
  hypo
aaacattcaatagccacgtgcgcagcttggcatatttagctaagtcattgagcagaacactactgctttacccacagatattcaccaagaggcacttgctgcggcctgaaacaggcttgtccagcttttcaggaaaagatgcacctcgcccaagcaaagtgaaggccatttccgtgcaggttcctgg

SEQ ID NO: 65857 - DNA, 30 bp, Homo sapiens; identical to SEQ ID NO: 17508
  chr3:45365530-45365560
  hypo

SEQ ID NO: 65858 - DNA, 30 bp, Homo sapiens
  chr3:45647126-45647156
  hypo
gagattagaaaggacgaaaggtgtccttta

SEQ ID NO: 65859 - DNA, 92 bp, Homo sapiens
  chr3:45684620-45684712
  hypo
agcatgagaggaggaaaaacacgctgacttgtggggttgagtgaacttctcggcaccttcaagaatagtctgggaggccaggcgtggtggct

SEQ ID NO: 65860 - DNA, 297 bp, Homo sapiens
  chr3:45719313-45719610
  hypo
caggatttttttttttgcccacgtgtttgcgctgtttttctctggagttctcaagagttggtgacttggaaggccgcttctgcaaggcaagtctcaggaacccatgcaggtacatcgcttgcacctgtttttagcttatttaatgacgggcttttgggaagagctgcccgcatactgagagacagcttcttataaacaaggagagtttttgtgtgtgcgagatctctaagccagcgtgggagggagcgcctcaggataagttattatattcatttcgttggtttctctcctgcccaa

SEQ ID NO: 65861 - DNA, 30 bp, Homo sapiens
  chr3:45720201-45720231
  hypo
tggagcccctagcacgtgtgaactcaggct

SEQ ID NO: 65862 - DNA, 30 bp, Homo sapiens; identical to SEQ ID NO: 17510
  chr3:45761235-45761265
  hypo

SEQ ID NO: 65863 - DNA, 30 bp, Homo sapiens
  chr3:45821469-45821499
  hypo
ctcctgttctggcacgggccccccggctca

SEQ ID NO: 65864 - DNA, 30 bp, Homo sapiens
  chr3:45834354-45834384
  hypo
tgggaccctactgccgggcctggggccaca

SEQ ID NO: 65865 - DNA, 30 bp, Homo sapiens; identical to SEQ ID NO: 39174
  chr3:45837883-45837913
  hypo

SEQ ID NO: 65866 - DNA, 44 bp, Homo sapiens; identical to SEQ ID NO: 17511
  chr3:45968553-45968597
  hypo

SEQ ID NO: 65867 - DNA, 43 bp, Homo sapiens; identical to SEQ ID NO: 17512
  chr3:45968716-45968759
  hypo

SEQ ID NO: 65868 - DNA, 30 bp, Homo sapiens
  chr3:46009370-46009400
  hypo
ctcctcccaggagctcgtgtgggccagcaa

SEQ ID NO: 65869 - DNA, 484 bp, Homo sapiens
  chr3:46009622-46010106
  hypo
ctgcatctcctgggccgcatcactgggaataggttcttgccggccctttgtgtctgatgccgtatctgccttctgctgagccatggctagccagcctgggaagctggctaaatgctggtttttcttgtccagtgagtcccgtgtggcctcaagctcctgtgccaagggctgcagcatggactccagccgccgcagggctgtgtggtagtcctcctccttctctgctgctcctagctccaggccctgcaggcatgtctgcagctccttcacagtgttctgggtggcctgggtgacctcccactgcttctggagctcagctaccaagcaagtgaggcgaacgttgtcctccgctgcagtgcgccccctctccctctctgtctgcagttgctccccttgctggctgacagctgccctcagctcctggttctctctgtccagctgctgcatgcgctcccgtagctgcttctcccgcacctccaactgg

SEQ ID NO: 65870 - DNA, 87 bp, Homo sapiens
  chr3:46020638-46020725
  hypo
accgcgcccggcctgttctggagttttgtaaaacagcaaagccatggcattttgctcttgaggggcgcagaatttaaagtagaaagt

SEQ ID NO: 65871 - DNA, 30 bp, Homo sapiens; identical to SEQ ID NO: 17513
  chr3:46064701-46064731
  hypo

SEQ ID NO: 65872 - DNA, 29 bp, Homo sapiens
  chr3:46549770-46549799
  hypo
aacagttcaagtttaacgtaggaaatgat

SEQ ID NO: 65873 - DNA, 18 bp, Homo sapiens
  chr3:46557733-46557751
  hypo
ccgcgcccggccctcttg

SEQ ID NO: 65874 - DNA, 30 bp, Homo sapiens; identical to SEQ ID NO: 17515
  chr3:46571401-46571431
  hypo

SEQ ID NO: 65875 - DNA, 85 bp, Homo sapiens
  chr3:46586213-46586298
  hypo
gttgaatgaaaggcgccgtcacttaaattgatgttttttaaagacaaagaattatgttaagggtctagggcggggaacaggagag

SEQ ID NO: 65876 - DNA, 30 bp, Homo sapiens; identical to SEQ ID NO: 17516
  chr3:46593985-46594015
  hypo

SEQ ID NO: 65877 - DNA, 31 bp, Homo sapiens; identical to SEQ ID NO: 17517
  chr3:46713299-46713330
  hypo

SEQ ID NO: 65878 - DNA, 30 bp, Homo sapiens
  chr3:46755901-46755931
  hypo
atgacctggagcaccgggacatcggaggcg

SEQ ID NO: 65879 - DNA, 30 bp, Homo sapiens
  chr3:46758798-46758828
  hypo
cctgtagaaggaggcgctcctctatcctgc

SEQ ID NO: 65880 - DNA, 37 bp, Homo sapiens
  chr3:46769540-46769577
  hypo
ttgttgttgttgtttgagtctcgctctgtcgcccagg

SEQ ID NO: 65881 - DNA, 36 bp, Homo sapiens
  chr3:46769816-46769852
  hypo
tgagccactgcgcccggccaagataggaaaaaaaaa

SEQ ID NO: 65882 - DNA, 30 bp, Homo sapiens; identical to SEQ ID NO: 2537
  chr3:46774362-46774392
  hypo

SEQ ID NO: 65883 - DNA, 30 bp, Homo sapiens
  chr3:46775554-46775584
  hypo
ctctgcaagcagtgcgcagccgtgaggacc

SEQ ID NO: 65884 - DNA, 30 bp, Homo sapiens; identical to SEQ ID NO: 17519
  chr3:46798225-46798255
  hypo

SEQ ID NO: 65885 - DNA, 30 bp, Homo sapiens; identical to SEQ ID NO: 39179
  chr3:46866850-46866880
  hypo

SEQ ID NO: 65886 - DNA, 196 bp, Homo sapiens
  chr3:46943638-46943834
  hypo
ctgaggaacaggtaggcggtgagtggccccgggaaggctgcagctcagctgaaacctgaggagcggactgtgggatagtgaggttcgaccgtggaggggagtgcttgccagctgagggctccacaggtgcgaagggcccagggacagggggactgtcatttgaagtccgctccgggacaccgctgagaaccaacgg

SEQ ID NO: 65887 - DNA, 183 bp, Homo sapiens
  chr3:46944571-46944754
  hypo
tagattctgggtgtgtcggctgcctgtagccaaacaccctgttgtgaggatgggatttcacttggccttggagtttcccaggagtcccctattcccattttcattccgtgctgggtgtccaggggccgggatggggcatcgctggggttgggagacacacctgactgccgcacccttactgcc

SEQ ID NO: 65888 - DNA, 31 bp, Homo sapiens
  chr3:46947810-46947841
  hypo
aggctgcgagaagaatcgctgaaggcccttg

SEQ ID NO: 65889 - DNA, 221 bp, Homo sapiens
  chr3:46985693-46985914
  hypo
caaagtcacagaacccatcagcggtagctgcaagtctggatccaggtcgtcctgatgcctggccctcagtcttgccaaggagacgagagagaggctatcaagagtggaagagtggcgctgagtttctaaagagctctgattctacccgcctctcctgcgctccccacacagttcagacctggtcccatgtgctcagatgcggccacagccagcccaagtcc

SEQ ID NO: 65890 - DNA, 29 bp, Homo sapiens
  chr3:46996119-46996148
  hypo
gaacaggtatttccaccgggcacggtggc

SEQ ID NO: 65891 - DNA, 39 bp, Homo sapiens; identical to SEQ ID NO: 17523
  chr3:47007697-47007736
  hypo

SEQ ID NO: 65892 - DNA, 200 bp, Homo sapiens
  chr3:47043981-47044181
  hypo
agcgcgcccagagtcgtcgggccttccaggtgtgccacccggggtaagggatgggaaactgctccacacatgcacccaggagatgactgacaatgtggagaaacgggtagggcaggcagcagccaggggactgacctattacccccaccccaggagctggtgctggaacctgcgcagaggcgggcgcgcctggaggggct

SEQ ID NO: 65893 - DNA, 31 bp, Homo sapiens; identical to SEQ ID NO: 17524
  chr3:47052059-47052090
  hypo

SEQ ID NO: 65894 - DNA, 31 bp, Homo sapiens; identical to SEQ ID NO: 17525
  chr3:47087395-47087426
  hypo

SEQ ID NO: 65895 - DNA, 20 bp, Homo sapiens
  chr3:47147381-47147401
  hypo
gactccgtctccaaaaaaaa

SEQ ID NO: 65896 - DNA, 37 bp, Homo sapiens
  chr3:47185203-47185240
  hypo
ctttttttttttattttgagacggagtctcgctgtcg

SEQ ID NO: 65897 - DNA, 21 bp, Homo sapiens
  chr3:47275290-47275311
  hypo
gaggggaagccaggcacggtg

SEQ ID NO: 65898 - DNA, 139 bp, Homo sapiens
  chr3:47373435-47373574
  hypo
ggagagctggggcacacgcccagggacgggggacaggtagattcttactgaaattctcttctgattttctattttctcacctgagagtgaggatgagggacgaaggttagaaacttaaggaaggccgggagcagtggct

SEQ ID NO: 65899 - DNA, 30 bp, Homo sapiens
  chr3:47398194-47398224
  hypo
ggagcctggagggccgtgtagacccatggg

SEQ ID NO: 65900 - DNA, 19 bp, Homo sapiens
  chr3:47411264-47411283
  hypo
agaacgggacgcaggccgg

SEQ ID NO: 65901 - DNA, 21 bp, Homo sapiens
  chr3:47426559-47426580
  hypo
gtaattttttagtggggaaat

SEQ ID NO: 65902 - DNA, 30 bp, Homo sapiens
  chr3:47450761-47450791
  hypo
tgacatcactgcctcgctggtcaccacaga

SEQ ID NO: 65903 - DNA, 30 bp, Homo sapiens
  chr3:47459242-47459272
  hypo
caccatctgaaagtcgttcccagctctcct

SEQ ID NO: 65904 - DNA, 30 bp, Homo sapiens
  chr3:47459861-47459891
  hypo
atagccgtagtcgtcgcagggcagctcccc

SEQ ID NO: 65905 - DNA, 27 bp, Homo sapiens
  chr3:47521006-47521033
  hypo
cacctcaaggccgggcgcggtggctca

SEQ ID NO: 65906 - DNA, 23 bp, Homo sapiens
  chr3:47555870-47555893
  hypo
ggccgacacggaattatatcttg

SEQ ID NO: 65907 - DNA, 29 bp, Homo sapiens
  chr3:47588427-47588456
  hypo
ggtacattggccgggcgcggtgactcaca

SEQ ID NO: 65908 - DNA, 28 bp, Homo sapiens
  chr3:47799254-47799282
  hypo
caaagcgaggctccgtatcaaaaaaaaa

SEQ ID NO: 65909 - DNA, 30 bp, Homo sapiens; identical to SEQ ID NO: 17529
  chr3:47883008-47883038
  hypo

SEQ ID NO: 65910 - DNA, 30 bp, Homo sapiens
  chr3:47887941-47887971
  hypo
ctgtgggaagaccacgcgcatcccccagct

SEQ ID NO: 65911 - DNA, 30 bp, Homo sapiens
  chr3:47889025-47889055
  hypo
ggtgagagccccggcggagggaccagggac

SEQ ID NO: 65912 - DNA, 82 bp, Homo sapiens; identical to SEQ ID NO: 17530
  chr3:47889945-47890027
  hypo

SEQ ID NO: 65913 - DNA, 30 bp, Homo sapiens
  chr3:47890245-47890275
  hypo
tttcctgcctcacccgggaccccttcagca

SEQ ID NO: 65914 - DNA, 30 bp, Homo sapiens
  chr3:47890476-47890506
  hypo
gggaggaggtgctgcgttggcaggaccgca

SEQ ID NO: 65915 - DNA, 351 bp, Homo sapiens
  chr3:47890800-47891151
  hypo
ggcgtgctgatggccggcctctaccccaacctcatccaggtgctgcctctgggagggaatggagttcaccaggtcccagcctccttccctgtctgcagctccttgctcagccccacccgtcttttcctccatccctgcaggtgaggcagggcaaggtcacccggcaggggaagttcaagcccaacagcgtcacatataggaccaaatcaggcaacatcctgctgcacaagtcgaccattaacaggtgagggcatgcaggcctggatggggcagctgggatggtccaaaagggtggcctcaccagccctgtgttccctagggaggccacacggttacggagccgatggctga

SEQ ID NO: 65916 - DNA, 20 bp, Homo sapiens
  chr3:47964239-47964259
  hypo
tacatgaaaaaaaagcaggg

SEQ ID NO: 65917 - DNA, 90 bp, Homo sapiens
  chr3:48053066-48053156
  hypo
agtagtagtggcacacctgtgacccatttacaacagacgaatgtgggtgggaagccctattctatgctcgtccagcctactttacatata

SEQ ID NO: 65918 - DNA, 30 bp, Homo sapiens; identical to SEQ ID NO: 17533
  chr3:48078088-48078118
  hypo

SEQ ID NO: 65919 - DNA, 31 bp, Homo sapiens
  chr3:48179596-48179627
  hypo
gcttgattaaggaggccgggcgcggtagctc

SEQ ID NO: 65920 - DNA, 30 bp, Homo sapiens; identical to SEQ ID NO: 17534
  chr3:48227759-48227789
  hypo

SEQ ID NO: 65921 - DNA, 169 bp, Homo sapiens; identical to SEQ ID NO: 17535
  chr3:48263633-48263802
  hypo

SEQ ID NO: 65922 - DNA, 33 bp, Homo sapiens; identical to SEQ ID NO: 17536
  chr3:48275731-48275764
  hypo

SEQ ID NO: 65923 - DNA, 36 bp, Homo sapiens
  chr3:48316726-48316762
  hypo
tgagccaccacgcccgacctcttaaagtcacttata

SEQ ID NO: 65924 - DNA, 30 bp, Homo sapiens
  chr3:48339928-48339958
  hypo
tggatgggcgactgcgtcaggcttgatcag

SEQ ID NO: 65925 - DNA, 31 bp, Homo sapiens; identical to SEQ ID NO: 17537
  chr3:48451212-48451243
  hypo

SEQ ID NO: 65926 - DNA, 31 bp, Homo sapiens
  chr3:48456271-48456302
  hypo
ggctgcagggtggggtcggcctcataggaga

SEQ ID NO: 65927 - DNA, 30 bp, Homo sapiens
  chr3:48456671-48456701
  hypo
cattctcgagaccacggtcacccggattct

SEQ ID NO: 65928 - DNA, 258 bp, Homo sapiens
  chr3:48459417-48459675
  hypo
gcccctgatggtgacacgggtgcctccgtctacaggcccagtcagtggctccacctgttccaggacaaggactgctcacctctactcaactggaaaggcagccccaacctcccacctttgggcccccacaccctccctctaagggcagcactgaggaagggatggccagcctttcaacaaaccgagtggatgaggggcgctgggcactgggtggccacagcctcagcctcaccacaggcctcccgggtcacacaacgt

SEQ ID NO: 65929 - DNA, 71 bp, Homo sapiens
  chr3:48461256-48461327
  hypo
gtgggatgaagagcctcggggccagggtctgcagggggcactgctgctacctctgacggtgacagcgggga

SEQ ID NO: 65930 - DNA, 142 bp, Homo sapiens; identical to SEQ ID NO: 17539
  chr3:48474262-48474404
  hypo

SEQ ID NO: 65931 - DNA, 30 bp, Homo sapiens
  chr3:48484176-48484206
  hypo
taaatcgcctactgcgttccacatatatgg

SEQ ID NO: 65932 - DNA, 30 bp, Homo sapiens
  chr3:48506311-48506341
  hypo
agaggcggacagtgcgctgtctgcgggaca

SEQ ID NO: 65933 - DNA, 30 bp, Homo sapiens
  chr3:48517011-48517041
  hypo
ctgtggccacacctcgcctaatgggcctct

SEQ ID NO: 65934 - DNA, 85 bp, Homo sapiens
  chr3:48563028-48563113
  hypo
tcctggtcccgcagggcgaactccagtggataattatcctgaatttcctcgtaggtcatttcctcacagacgccctagggagata

SEQ ID NO: 65935 - DNA, 31 bp, Homo sapiens
  chr3:48584749-48584780
  hypo
ctgtgcatatggtatacgcatgtccggatgt

SEQ ID NO: 65936 - DNA, 31 bp, Homo sapiens; identical to SEQ ID NO: 17541
  chr3:48604090-48604121
  hypo

SEQ ID NO: 65937 - DNA, 31 bp, Homo sapiens; identical to SEQ ID NO: 17542
  chr3:48605091-48605122
  hypo

SEQ ID NO: 65938 - DNA, 40 bp, Homo sapiens
  chr3:48607710-48607750
  hypo
gatgcctggctccccacgctcgcctcggggcccaggcagc

SEQ ID NO: 65939 - DNA, 31 bp, Homo sapiens
  chr3:48622954-48622985
  hypo
tgcctcagagaaacctcgatggtctccacac

SEQ ID NO: 65940 - DNA, 107 bp, Homo sapiens
  chr3:48636552-48636659
  hypo
cttcccgcctagaagcgcagccagaacatgccgctacggatccggttgtagtctgggagctgctcaatggggcctgtggggatagggtggagcgtcagggtggggta

SEQ ID NO: 65941 - DNA, 30 bp, Homo sapiens
  chr3:48659225-48659255
  hypo
tggcaacgggcaaacgcccctcccccggga

SEQ ID NO: 65942 - DNA, 30 bp, Homo sapiens
  chr3:48670907-48670937
  hypo
actgcaaccaggtccgccactggtgggtcc

SEQ ID NO: 65943 - DNA, 30 bp, Homo sapiens; identical to SEQ ID NO: 17544
  chr3:48677758-48677788
  hypo

SEQ ID NO: 65944 - DNA, 31 bp, Homo sapiens; identical to SEQ ID NO: 17545
  chr3:48684050-48684081
  hypo

SEQ ID NO: 65945 - DNA, 31 bp, Homo sapiens; identical to SEQ ID NO: 17546
  chr3:48685739-48685770
  hypo

SEQ ID NO: 65946 - DNA, 264 bp, Homo sapiens; identical to SEQ ID NO: 39201
  chr3:48693436-48693700
  hypo

SEQ ID NO: 65947 - DNA, 227 bp, Homo sapiens; identical to SEQ ID NO: 2546
  chr3:48693851-48694078
  hypo

SEQ ID NO: 65948 - DNA, 111 bp, Homo sapiens; identical to SEQ ID NO: 17549
  chr3:48698353-48698464
  hypo

SEQ ID NO: 65949 - DNA, 121 bp, Homo sapiens; identical to SEQ ID NO: 2547
  chr3:48698889-48699010
  hypo

SEQ ID NO: 65950 - DNA, 666 bp, Homo sapiens; identical to SEQ ID NO: 39204
  chr3:48699376-48700042
  hypo

SEQ ID NO: 65951 - DNA, 330 bp, Homo sapiens; identical to SEQ ID NO: 39205
  chr3:48700254-48700584
  hypo

SEQ ID NO: 65952 - DNA, 641 bp, Homo sapiens; identical to SEQ ID NO: 39206
  chr3:48701046-48701687
  hypo

SEQ ID NO: 65953 - DNA, 30 bp, Homo sapiens; identical to SEQ ID NO: 17553
  chr3:48731496-48731526
  hypo

SEQ ID NO: 65954 - DNA, 73 bp, Homo sapiens
  chr3:48732602-48732675
  hypo
cacagggttgtctcattgaagcggagcacgcatgagtgccccccgacctggtggacaaagggctccagaagga

SEQ ID NO: 65955 - DNA, 20 bp, Homo sapiens
  chr3:48732782-48732802
  hypo
tcttctgtctgttgtttgtc

SEQ ID NO: 65956 - DNA, 36 bp, Homo sapiens; identical to SEQ ID NO: 17554
  chr3:48733583-48733619
  hypo

SEQ ID NO: 65957 - DNA, 32 bp, Homo sapiens
  chr3:48752181-48752213
  hypo
gaggcaggagaatggcgtgaacccggaaggcg

SEQ ID NO: 65958 - DNA, 24 bp, Homo sapiens
  chr3:48923662-48923686
  hypo
atataatagtaatggccgggtgcg

SEQ ID NO: 65959 - DNA, 50 bp, Homo sapiens
  chr3:48954851-48954901
  hypo
caggcgtgagccacggtgcccggccacgcggcatgatttttaatggcttt

SEQ ID NO: 65960 - DNA, 34 bp, Homo sapiens
  chr3:48978306-48978340
  hypo
aatatatttgtgcaggctgggcgcggtggctcac

SEQ ID NO: 65961 - DNA, 32 bp, Homo sapiens; identical to SEQ ID NO: 17556
  chr3:48986828-48986860
  hypo

SEQ ID NO: 65962 - DNA, 86 bp, Homo sapiens; identical to SEQ ID NO: 17557
  chr3:49023683-49023769
  hypo

SEQ ID NO: 65963 - DNA, 25 bp, Homo sapiens
  chr3:49023828-49023853
  hypo
ctgctcactgcggcctccactcctg

SEQ ID NO: 65964 - DNA, 31 bp, Homo sapiens; identical to SEQ ID NO: 17559
  chr3:49034284-49034315
  hypo

SEQ ID NO: 65965 - DNA, 314 bp, Homo sapiens
  chr3:49035604-49035918
  hypo
gcagactcacatgggcggtccaggcgggagccgttgttggccacagcagtgatacagagatcatggcccaaggggaagcgtccacaatgcaggatggctggccaggggtagctgtagcaggccatgatgggctcgcagctggcctgcatggcctcgcacaggctgtaggaggggtagatgaccctttgggggaaagggtcgggggctgcaccgccacaggctgagcacccagatcagctggaacctctccatgttcctacccctgtctcgtggcctggaactctctggttgctgggcaacgacactggtcgcct

SEQ ID NO: 65966 - DNA, 30 bp, Homo sapiens
  chr3:49042286-49042316
  hypo
ccaccagggtgctgcgcctcactcgcctgt

SEQ ID NO: 65967 - DNA, 30 bp, Homo sapiens; identical to SEQ ID NO: 17561
  chr3:49049559-49049589
  hypo

SEQ ID NO: 65968 - DNA, 30 bp, Homo sapiens
  chr3:49052437-49052467
  hypo
tggtaccccagctgcgtgtgctagaggaat

SEQ ID NO: 65969 - DNA, 17 bp, Homo sapiens
  chr3:49075508-49075525
  hypo
ttttaaaacagagtctc

SEQ ID NO: 65970 - DNA, 43 bp, Homo sapiens; identical to SEQ ID NO: 17563
  chr3:49080007-49080050
  hypo

SEQ ID NO: 65971 - DNA, 181 bp, Homo sapiens; identical to SEQ ID NO: 17564
  chr3:49095130-49095311
  hypo

SEQ ID NO: 65972 - DNA, 31 bp, Homo sapiens; identical to SEQ ID NO: 17565
  chr3:49145905-49145936
  hypo

SEQ ID NO: 65973 - DNA, 30 bp, Homo sapiens
  chr3:49146371-49146401
  hypo
cagctgcctgcaggcgagctcatctccagc

SEQ ID NO: 65974 - DNA, 30 bp, Homo sapiens
  chr3:49154620-49154650
  hypo
ggggccagcccctgcgcctacctcaccacg

SEQ ID NO: 65975 - DNA, 31 bp, Homo sapiens
  chr3:49167302-49167333
  hypo
cccaaagaagccatcacggcattgctggcag

SEQ ID NO: 65976 - DNA, 31 bp, Homo sapiens
  chr3:49168953-49168984
  hypo
atgccagccctcacctcgccttcagtggatg

SEQ ID NO: 65977 - DNA, 20 bp, Homo sapiens
  chr3:49189528-49189548
  hypo
ataaaagttaagccaagagg

SEQ ID NO: 65978 - DNA, 30 bp, Homo sapiens; identical to SEQ ID NO: 17566
  chr3:49211734-49211764
  hypo

SEQ ID NO: 65979 - DNA, 23 bp, Homo sapiens
  chr3:49243948-49243971
  hypo
actgcacccggcccagaggtcac

SEQ ID NO: 65980 - DNA, 30 bp, Homo sapiens
  chr3:49313319-49313349
  hypo
aatttcaagttactcgggagaagaaaaagt

SEQ ID NO: 65981 - DNA, 32 bp, Homo sapiens; identical to SEQ ID NO: 17567
  chr3:49433705-49433737
  hypo

SEQ ID NO: 65982 - DNA, 33 bp, Homo sapiens
  chr3:49522229-49522262
  hypo
cttttttttttttttttgagacggagtcttgct

SEQ ID NO: 65983 - DNA, 37 bp, Homo sapiens; identical to SEQ ID NO: 17568
  chr3:49532335-49532372
  hypo

SEQ ID NO: 65984 - DNA, 30 bp, Homo sapiens
  chr3:49568645-49568675
  hypo
actatttgacatgtcggccttcatggctgg

SEQ ID NO: 65985 - DNA, 30 bp, Homo sapiens; identical to SEQ ID NO: 39234
  chr3:49592461-49592491
  hypo

SEQ ID NO: 65986 - DNA, 98 bp, Homo sapiens
  chr3:49636111-49636209
  hypo
ttacaggcatgagccaccgtgcccggccgccaccattacacttaatggtgaaaaactgaatgctttccccataaaactgtgtacgaagcaaagatata

SEQ ID NO: 65987 - DNA, 127 bp, Homo sapiens
  chr3:49662398-49662525
  hypo
tcatttcagcacttcccggagactggaccccaaggaacccctgggtaaccagagagcagcttccccaactccgaagcaggcttctgctaccactcctggccatgagagcccccgagagacaagggca

SEQ ID NO: 65988 - DNA, 182 bp, Homo sapiens; identical to SEQ ID NO: 17569
  chr3:49688340-49688522
  hypo

SEQ ID NO: 65989 - DNA, 30 bp, Homo sapiens; identical to SEQ ID NO: 17570
  chr3:49690064-49690094
  hypo

SEQ ID NO: 65990 - DNA, 30 bp, Homo sapiens
  chr3:49694717-49694747
  hypo
gtcaggaggattgccgacagcagcgtgcag

SEQ ID NO: 65991 - DNA, 31 bp, Homo sapiens
  chr3:49698034-49698065
  hypo
agccagcctgctgcagcgagggctgacgggg

SEQ ID NO: 65992 - DNA, 58 bp, Homo sapiens
  chr3:49698934-49698992
  hypo
ctataccagtctggagcagaacgttcctcgaaactacgtaatgattgatgacatcagt

SEQ ID NO: 65993 - DNA, 211 bp, Homo sapiens
  chr3:49699562-49699773
  hypo
gacgcagtggaggacgaccgcatttatggcgggagcagccggtcccgggcaccttctgcatacagtggggagaagctgtccagccacgacttcagtggctggggcaaggggtacgaaagggaacgggaggctgtggagcgacttcaaaaagcgggccccaagccctcatccctaagtatggcccacagccgggtacgaccccccatgcgga

SEQ ID NO: 65994 - DNA, 31 bp, Homo sapiens; identical to SEQ ID NO: 17572
  chr3:49700336-49700367
  hypo

SEQ ID NO: 65995 - DNA, 30 bp, Homo sapiens; identical to SEQ ID NO: 17573
  chr3:49700590-49700620
  hypo

SEQ ID NO: 65996 - DNA, 31 bp, Homo sapiens
  chr3:49700894-49700925
  hypo
ctctggggcagcatcacgccagccacagaca

SEQ ID NO: 65997 - DNA, 31 bp, Homo sapiens
  chr3:49701764-49701795
  hypo
tgtgttcagattctctcgtgggtacttgccc

SEQ ID NO: 65998 - DNA, 263 bp, Homo sapiens; identical to SEQ ID NO: 17574
  chr3:49720314-49720577
  hypo

SEQ ID NO: 65999 - DNA, 30 bp, Homo sapiens; identical to SEQ ID NO: 17575
  chr3:49720803-49720833
  hypo

SEQ ID NO: 66000 - DNA, 219 bp, Homo sapiens
  chr3:49722991-49723210
  hypo
gaggcagggtcatgggggaagcgtcactagtgctcaccgcagcgtcgcagggcacagtagtcgaatggggtccttgggtccatcgtgtagcaccagggcccatggctatccccatctgggttccggcagaagttctcctccagttgtgcatgcggttcggaggtaaacgtgaacctaggcggaagcgggagcaaaatcgtggcagggtagtctcaacca

SEQ ID NO: 66001 - DNA, 30 bp, Homo sapiens
  chr3:49754476-49754506
  hypo
gaggctcctgctctcgagggacgtggagtt

SEQ ID NO: 66002 - DNA, 35 bp, Homo sapiens
  chr3:49755786-49755821
  hypo
acgctcacgttgtactcgtgcgtctggttgtggtg

SEQ ID NO: 66003 - DNA, 30 bp, Homo sapiens; identical to SEQ ID NO: 17576
  chr3:49758379-49758409
  hypo

SEQ ID NO: 66004 - DNA, 31 bp, Homo sapiens; identical to SEQ ID NO: 17577
  chr3:49781387-49781418
  hypo

SEQ ID NO: 66005 - DNA, 463 bp, Homo sapiens; identical to SEQ ID NO: 39240
  chr3:49906716-49907179
  hypo

SEQ ID NO: 66006 - DNA, 31 bp, Homo sapiens
  chr3:49928713-49928744
  hypo
ctgatgaggtccttcacggtggggttctggg

SEQ ID NO: 66007 - DNA, 1139 bp, Homo sapiens
  chr3:49939688-49940827
  hypo
agaatgcttctttccgcctgcccccccaccgcgcccccagatcccctcagtgatggaagggaagcagcctgtgttcagccatgtgcatgcagctcacaagtaagggccccttctttcagcttaccgggttggggcaaaaactgggcgactggaagaagtcgaggcctcgccggaggcctggatggactggggattcacaacagcgctccacaccctcatcaattagtgtgtccagcaggtcaatggggaaggcacagacgacagagttggggcccacgccaggaccaccatccttgccagtcacaaagaccccaaatagtacttcctggccctcggcgatgctcagctcagtggcaagttgggcacccactggagcggagtgggccacccgcagcacagggtagggctgtccgccttctggggccccccggcgcctgcgttttggagcaaatctgcagtcgaggaccagctcccgatagtcacccaactctggctcagtggcgctaagccgtgccaggcgtgtgtgcagggcactaggatcatctgtcacgctggccggctgtacagtcaggaagtatacgaaggctcccgtgtggaagctgtgcacgtattcaatactgtaggagacaagatgcttgggcagcactgacaacgccacaaagcccggtgcgaatcccgaggcgtcagccttgagacgcctgatagacactgagcgtgggctgaagctggcagccacggctgcgtccagtgaggatgccacgtagaaataggaggcctggccttgctcaaccacagttacacgggtgcccaatgggctggccacacagtcggggcagtcatcgggccggttatggtgggctgagaagaggcaggctggcgctgccagatgcacggctgtcccttggggctctaggtcatgcaggaagcagcggccctgcaggctggagccacaactgaccagcgcaggcagcgcgggatccagcaccagcacctttgtgtctgtgtcaccgggagggccgtggggtcctgggccacaggctgcacacgtctggcagccagggtctccagcagggcccgtggccaggctctggacagacttcaggtcaggcccaagcacatgcaggcgattgcgtatggct

SEQ ID NO: 66008 - DNA, 227 bp, Homo sapiens; identical to SEQ ID NO: 17579
  chr3:49948217-49948444
  hypo

SEQ ID NO: 66009 - DNA, 20 bp, Homo sapiens
  chr3:50071916-50071936
  hypo
aggtgcggtggctcacgcct

SEQ ID NO: 66010 - DNA, 19 bp, Homo sapiens
  chr3:50072175-50072194
  hypo
agagcgagactccgtctcc

SEQ ID NO: 66011 - DNA, 30 bp, Homo sapiens
  chr3:50140299-50140329
  hypo
gcactccctgactccgtttacctttactcc

SEQ ID NO: 66012 - DNA, 104 bp, Homo sapiens
  chr3:50144988-50145092
  hypo
ggtcatccacccaggtaagatcgaggatctttttgctcaaggtagtgtggtggtggtgcccagattcacagacgtgacctctcctgtggtactcgcagtatgag

SEQ ID NO: 66013 - DNA, 40 bp, Homo sapiens
  chr3:50145391-50145431
  hypo
tacagccgtgagccacagcgcccagcatcatgagctcatt

SEQ ID NO: 66014 - DNA, 115 bp, Homo sapiens; identical to SEQ ID NO: 39246
  chr3:50192965-50193080
  hypo

SEQ ID NO: 66015 - DNA, 31 bp, Homo sapiens
  chr3:50218760-50218791
  hypo
ttcctgctttttgagacggttgtctcactgt

SEQ ID NO: 66016 - DNA, 30 bp, Homo sapiens
  chr3:50220106-50220136
  hypo
ctgacagtgcggagcgcaatgatgataagc

SEQ ID NO: 66017 - DNA, 31 bp, Homo sapiens; identical to SEQ ID NO: 17581
  chr3:50220857-50220888
  hypo

SEQ ID NO: 66018 - DNA, 58 bp, Homo sapiens; identical to SEQ ID NO: 17582
  chr3:50224042-50224100
  hypo

SEQ ID NO: 66019 - DNA, 49 bp, Homo sapiens
  chr3:50225312-50225361
  hypo
caccactgtccatgagcgccccgccacccccaggcgcaggccccccaac

SEQ ID NO: 66020 - DNA, 31 bp, Homo sapiens; identical to SEQ ID NO: 17583
  chr3:50255894-50255925
  hypo

SEQ ID NO: 66021 - DNA, 104 bp, Homo sapiens; identical to SEQ ID NO: 2566
  chr3:50374390-50374494
  hypo

SEQ ID NO: 66022 - DNA, 198 bp, Homo sapiens; identical to SEQ ID NO: 39251
  chr3:50375362-50375560
  hypo

SEQ ID NO: 66023 - DNA, 30 bp, Homo sapiens
  chr3:50387131-50387161
  hypo
aatgggctcgagggcgcaggtcttggcctg

SEQ ID NO: 66024 - DNA, 30 bp, Homo sapiens
  chr3:50392541-50392571
  hypo
gggcctggactggccgatgcctcagaggct

SEQ ID NO: 66025 - DNA, 52 bp, Homo sapiens
  chr3:50395840-50395892
  hypo
catgtcccctcggccccggctatggcgctggtagaagcgaagatatacccaa

SEQ ID NO: 66026 - DNA, 30 bp, Homo sapiens
  chr3:50404112-50404142
  hypo
acctttcatacatccggttccccaggccat

SEQ ID NO: 66027 - DNA, 31 bp, Homo sapiens
  chr3:50417389-50417420
  hypo
ctcactcacacatccacgatgatgaccatgt

SEQ ID NO: 66028 - DNA, 41 bp, Homo sapiens
  chr3:50420381-50420422
  hypo
gctactcagccccatgcgcacagacccgtacccacctgcac

SEQ ID NO: 66029 - DNA, 31 bp, Homo sapiens
  chr3:50438043-50438074
  hypo
agggccgagcagggtccgtgacttacgtgct

SEQ ID NO: 66030 - DNA, 54 bp, Homo sapiens
  chr3:50523257-50523311
  hypo
gggatatagcaatcagcgagaggcactaacaaacaagcccgggcctcccagggg

SEQ ID NO: 66031 - DNA, 34 bp, Homo sapiens
  chr3:50575570-50575604
  hypo
gcggtatgtggtattcggtgcatggtattgttgg

SEQ ID NO: 66032 - DNA, 248 bp, Homo sapiens; identical to SEQ ID NO: 39258
  chr3:50605124-50605372
  hypo

SEQ ID NO: 66033 - DNA, 30 bp, Homo sapiens; identical to SEQ ID NO: 39264
  chr3:50751133-50751163
  hypo

SEQ ID NO: 66034 - DNA, 38 bp, Homo sapiens
  chr3:51660727-51660765
  hypo
tgggattacaggcatgagccaccgcgcccagcccccaa

SEQ ID NO: 66035 - DNA, 120 bp, Homo sapiens
  chr3:51680378-51680498
  hypo
aaaagctatgaggaagacaaacgcacatcagtcccctatacccgcccatcgtatgcgcagtattaccctgccagcgatcagagcctgaccagcatccccgccttcagccagagaaactgg

SEQ ID NO: 66036 - DNA, 30 bp, Homo sapiens
  chr3:51702494-51702524
  hypo
ctcagcagggcaggcgctcctgccccagag

SEQ ID NO: 66037 - DNA, 31 bp, Homo sapiens; identical to SEQ ID NO: 17586
  chr3:51731021-51731052
  hypo

SEQ ID NO: 66038 - DNA, 30 bp, Homo sapiens
  chr3:51743303-51743333
  hypo
cactggactttgtgcgtgcctcactcagcc

SEQ ID NO: 66039 - DNA, 176 bp, Homo sapiens
  chr3:51749173-51749349
  hypo
gcagtgggcgctatcgctaccagaaggtgggctactgggcagaaggcttgactctggacaccagcctcatcccatgggcctcaccctcagccggccccctgcccgcctctcgctgcagtgagccctgcctccagaatgaggtgaagagtgtgcagccgggcgaagtctgctgctgg

SEQ ID NO: 66040 - DNA, 207 bp, Homo sapiens
  chr3:51749767-51749974
  hypo
tcttcggtggggcccgggagggtgcccagcggccacgcttcatcagtcctgcctcacaggtggccatctgcctggcacttatctcgggccagctgctcatcgtggtcgcctggctggtggtggaggcaccgggcacaggcaaggagacagcccccgaacggcgggaggtggtgacactgcgctgcaaccaccgcgatgcaagtatgt

SEQ ID NO: 66041 - DNA, 291 bp, Homo sapiens; identical to SEQ ID NO: 39270
  chr3:51990359-51990650
  hypo

SEQ ID NO: 66042 - DNA, 67 bp, Homo sapiens
  chr3:51996782-51996849
  hypo
tcccagcaagccaccgtatggcataaggtctttgtttcctcacctatccaacggaggtgacaccctg

SEQ ID NO: 66043 - DNA, 41 bp, Homo sapiens; identical to SEQ ID NO: 2574
  chr3:52001296-52001337
  hypo

SEQ ID NO: 66044 - DNA, 30 bp, Homo sapiens
  chr3:52013091-52013121
  hypo
taggggatgccacacgctgttctgggtatt

SEQ ID NO: 66045 - DNA, 20 bp, Homo sapiens
  chr3:52025673-52025693
  hypo
gcctagactggcttgctttt

SEQ ID NO: 66046 - DNA, 167 bp, Homo sapiens; identical to SEQ ID NO: 17589
  chr3:52088123-52088290
  hypo

SEQ ID NO: 66047 - DNA, 31 bp, Homo sapiens; identical to SEQ ID NO: 17590
  chr3:52141679-52141710
  hypo

SEQ ID NO: 66048 - DNA, 31 bp, Homo sapiens; identical to SEQ ID NO: 17591
  chr3:52164141-52164172
  hypo

SEQ ID NO: 66049 - DNA, 30 bp, Homo sapiens
  chr3:52255539-52255569
  hypo
cggctgccatagaccgaggcccacaggttc

SEQ ID NO: 66050 - DNA, 283 bp, Homo sapiens
  chr3:52257378-52257661
  hypo
ttctcactcaggtccagcactcggaggtttcccagcccacggaaccaactggcattcagccaggagagagaactgtccttcaacaccaggccttcaagacggctcaggtggctgaaggtatcgggatgtagctgggggaagtgacgagggcactccatgcaggggttgggagcgtggtcgcagcggcggcaatttccgcccacatcgagcacacgcagggcggtcagattggccaggtcctcaggcgccagtttgacgatgcggttgtaggacaacagcagat

SEQ ID NO: 66051 - DNA, 43 bp, Homo sapiens
  chr3:52258189-52258232
  hypo
gccagttgcagttcaccaggccgtggggctggagctcacaggg

SEQ ID NO: 66052 - DNA, 30 bp, Homo sapiens; identical to SEQ ID NO: 17593
  chr3:52269721-52269751
  hypo

SEQ ID NO: 66053 - DNA, 18 bp, Homo sapiens
  chr3:52299043-52299061
  hypo
tcggccagccgggtgcgg

SEQ ID NO: 66054 - DNA, 30 bp, Homo sapiens
  chr3:52349178-52349208
  hypo
acaccccccgcccccgatgcctgcaactca

SEQ ID NO: 66055 - DNA, 26 bp, Homo sapiens
  chr3:52352345-52352371
  hypo
gccactgcgcccggcctggaggtgca

SEQ ID NO: 66056 - DNA, 144 bp, Homo sapiens
  chr3:52415739-52415883
  hypo
atgagccacatctgtcgcatcagccgcaccctacgccaggcgctgggcaatgcactcctgctgggcgtgggtggcagcggccgcagctccctcacaaggctcgcctcgcacatgtgagcgcctccagggcgtgctgggcagtgg

SEQ ID NO: 66057 - DNA, 30 bp, Homo sapiens
  chr3:52436341-52436371
  hypo
gccggtcaggcttccgctgcttgtggagcc

SEQ ID NO: 66058 - DNA, 30 bp, Homo sapiens; identical to SEQ ID NO: 17595
  chr3:52440356-52440386
  hypo

SEQ ID NO: 66059 - DNA, 205 bp, Homo sapiens
  chr3:52440845-52441050
  hypo
ctgcagtggcgaggccgatacgctccatgatgacccgccgggccttgtctgtccactcctcgtcctccccccagggccctagtggagaccaagacaaggaatcagcgagaaggaaaccctgagtttgggcaggccaggagtgggaaggaagacagagaagagcagttgagccagggaatcaggagctggtcgggcaatatggtgt

SEQ ID NO: 66060 - DNA, 31 bp, Homo sapiens; identical to SEQ ID NO: 39280
  chr3:52477535-52477566
  hypo

SEQ ID NO: 66061 - DNA, 31 bp, Homo sapiens; identical to SEQ ID NO: 17596
  chr3:52485958-52485989
  hypo

SEQ ID NO: 66062 - DNA, 31 bp, Homo sapiens
  chr3:52487923-52487954
  hypo
ctggggctactaaccccgcactctcagctga

SEQ ID NO: 66063 - DNA, 30 bp, Homo sapiens; identical to SEQ ID NO: 17597
  chr3:52517727-52517757
  hypo

SEQ ID NO: 66064 - DNA, 30 bp, Homo sapiens; identical to SEQ ID NO: 17598
  chr3:52522576-52522606
  hypo

SEQ ID NO: 66065 - DNA, 287 bp, Homo sapiens
  chr3:52526248-52526535
  hypo
ctaccagacctacccgcaggccctcaccctcgtcttcgatgacgtgcaaggtcatgacctcatgggcagtgtcaccctggaccactttggggaggtgccaggtggcccggctagagccagccagggccgtgaagtccagtggcaggtgtttgtccccagtgctgagagcagagagaagctcatctcgctgttggctcgccagtgggaggccctgtgtggccgtgagctgcctgtcgagctcaccggctagcccaggccacagccagcctgtcgtgtccagcctgacg

SEQ ID NO: 66066 - DNA, 30 bp, Homo sapiens; identical to SEQ ID NO: 17600
  chr3:52537788-52537818
  hypo

SEQ ID NO: 66067 - DNA, 31 bp, Homo sapiens
  chr3:52538705-52538736
  hypo
aagaggactggccccccggctcactttgctc

SEQ ID NO: 66068 - DNA, 423 bp, Homo sapiens
  chr3:52540174-52540597
  hypo
ccttgccccagctgaccgttgagaagctcatctccaagggtcggatcctcaccatggcgaaccaggtcctggctgtgaacatttctgaggaggtgaggtgcacggacacctgggcggatggtggggctggcggtgaccagctgcccacttggcctctcagccttgtgtgctccgagccccgtggtgggcaggacactgctaggccatggcgggctcatggggaaggaagcaggcagagatcaaattcctctgctggggcccaatgagagttaagggggaggactccaaaaaggagcatggagcacacggtagggctgccccatgtggcagaagccatgtgggtaaggacccgcagcctggagcagtgtcgttggccagagctgaaggagaggtggctggtatggccagcggggccttcagcag

SEQ ID NO: 66069 - DNA, 30 bp, Homo sapiens
  chr3:52550215-52550245
  hypo
tgtgtgagctgggccgctacgggcccaact

SEQ ID NO: 66070 - DNA, 30 bp, Homo sapiens; identical to SEQ ID NO: 17602
  chr3:52552578-52552608
  hypo

SEQ ID NO: 66071 - DNA, 31 bp, Homo sapiens
  chr3:52552851-52552882
  hypo
ctcagggcacccactgcgcttcagcgagagg

SEQ ID NO: 66072 - DNA, 134 bp, Homo sapiens
  chr3:52553418-52553552
  hypo
gggtatgacaagcacgggcctgggagctggaagacaggcaggtgggggcctgggatcctcccttcccgcctggcctagctgtttatgagagcctttcctcagagaaatgtcaccgccgccgcccagggcttcgg

SEQ ID NO: 66073 - DNA, 114 bp, Homo sapiens
  chr3:52556285-52556399
  hypo
cctggcagaacttccgacctctgaagggtgaagggcgcccactgctctctccaaccccagaacacacggcgctgtgagtgccacgcaggctacgtaggcgatggactgcagtgt

SEQ ID NO: 66074 - DNA, 31 bp, Homo sapiens
  chr3:52558927-52558958
  hypo
gcacccaggaggctaccgccctggccctccc

SEQ ID NO: 66075 - DNA, 30 bp, Homo sapiens; identical to SEQ ID NO: 17604
  chr3:52561332-52561362
  hypo

SEQ ID NO: 66076 - DNA, 425 bp, Homo sapiens
  chr3:52568497-52568922
  hypo
cacggtcactgcgcccgcttggttcggacctcggcaactggccgcactgacccgtcaactcccggtttcccggcgcacgcccctcgtgagatgctgtggtcttttctagcaacgtcgacaggctttccaacaaaattcctctttcctgcgcagaaccgctctccactcgcatttcttctgctcagatccgtattccgagcccgcacgcataccaggctgtgctcagggtccggaggaggccgacccagtagccgtgggccctgtcggaggggagccagctgggcgcgcgttgttttctgaggtggccgcgctgtctttcagggtgtgtgtacattcgaaactccactgaaccttgattgaagacctacagtgtggcagtccatggcctggggactggtaaggattgaggccgtaggatgggctcg

SEQ ID NO: 66077 - DNA, 85 bp, Homo sapiens
  chr3:52599731-52599816
  hypo
atttctctaaaaaaagacatacgaatgtccaataggcacatgaaacaatgcttagccaggcgcagtggctcatgtctgtaatccc

SEQ ID NO: 66078 - DNA, 30 bp, Homo sapiens; identical to SEQ ID NO: 17605
  chr3:52724029-52724059
  hypo

SEQ ID NO: 66079 - DNA, 30 bp, Homo sapiens
  chr3:52726711-52726741
  hypo
ctctttagaacagtcgggtatgctgttaca

SEQ ID NO: 66080 - DNA, 30 bp, Homo sapiens
  chr3:52867315-52867345
  hypo
agcaaggggagtggcgcacacttctcagcc

SEQ ID NO: 66081 - DNA, 30 bp, Homo sapiens
  chr3:52874453-52874483
  hypo
cctctgcacaccagcggctggcggggccct

SEQ ID NO: 66082 - DNA, 499 bp, Homo sapiens
  chr3:52899902-52900401
  hypo
tgtgtgtgtgtaggggcggtggggggacacaaaccgtcacatgctttacacgttgtctaaccttcctgctctcacctactgtacacatggctccattttctttcattagaggctacatggcatcccacagtgtggctgtgccatctcatttactctatgagctgctgccgcgaatgtccctgccatgtgctacctctgcctgtgtgggcccatatctgaggggcagattcctagaggcacacttgctacatcaaaagctatgtgcggcttattctgtggcgccgctctccacagaggctgtgccaactcacactcccactaatagcacgagtacccattcccacattcttgccagcatggtgtactagcaaaccttctcactctgacaatttgatcgctgaagaggctgtctcagcacggctgcggcgtgcacccatcaggccacttgggtgccagggcacctgcggggcttgccaccgtctaccgccttgaggggcct

SEQ ID NO: 66083 - DNA, 134 bp, Homo sapiens; identical to SEQ ID NO: 17607
  chr3:52900623-52900757
  hypo

SEQ ID NO: 66084 - DNA, 31 bp, Homo sapiens; identical to SEQ ID NO: 17608
  chr3:53014728-53014759
  hypo

SEQ ID NO: 66085 - DNA, 33 bp, Homo sapiens; identical to SEQ ID NO: 17609
  chr3:53032131-53032164
  hypo

SEQ ID NO: 66086 - DNA, 1232 bp, Homo sapiens
  chr3:53032403-53033635
  hypo
tctcaaaaaaaagaaaagaaaagaaaaaatgtagatcaataatattattttgctgacgcattggagaaagtaaaggctgggtgcagcttcaagctgaggaccacccaccatgcccccatcatggtggttcccctaggtgctgaagggcccagccatagctctcgccctcgcagggtccctccagggtctctgctgtttcctacctaggggtgactgcagccatggctaagaaagcgccagcgcccacccacctgggccaatggactggttctgctcgtgccacgctggttctgctcctcgccatctcggcagttcagaaagaaccccaacgagcttgtgatctcccgggtcctgtgggcgtatcaacagggggccagccctgtccctcaaccctggggagctggtgctgccgatcgacctgactggcccacaacgtcttcagctaccactgcaagggcctgcggggtgacggctgtgcagcgctgctcgcctagctgttgatcgcctggctgttgatgggctggcacccgcagagctgccctgccggccaccgaccaccatggagggagcattcagctggtgcgcgagctgggtactaaactggctctactgtgagccgccctcggcccctccatctcctcttaccccttgtcatccatgcgtaagccggggacgcccgaggacatgctcttcacccaaggcctgcgccggcgtctgctgatcaagggcccagtacaaaggccgtcatggagatccaggccttcgccaacagcggcctgttctggtgcaagggccagccgggcagcccaaggacctcacgactggctgctgggtcaaggcgttcccggggtgaaggtggataagcagaccaccaagggctcctggaaccctacgtgaaggaggccaagcacagccgtggacaccggcctgaaggctgggaaaggagccgacgccccacctcctctgaccaggcctgcggggaggagccacccacgcgccacagcaagtcctggacctggccctgcattccagggtggggcagggaggctggattctgagagagctgcttccggattgcgttggggtagtcaaggagctcgggacatcgcaggggaggcaaaaagccttggccagtgctcttttggtgtatcccttcagcttccagaggggaagccacaccctgatgctatgttcaaacgctccagaagacaggagttcgtgtccttgcccct

SEQ ID NO: 66087 - DNA, 140 bp, Homo sapiens
  chr3:53054012-53054152
  hypo
cctcacccagccttctctacacgtgactgcttcttgccttccacagcttagtctaaaaccagtacataaagatttttttttttcttgccgtggccagtgagtaccaagaaaaaaaaaagtaggccgggcgtgatgtaatc

SEQ ID NO: 66088 - DNA, 125 bp, Homo sapiens; identical to SEQ ID NO: 17612
  chr3:53132044-53132169
  hypo

SEQ ID NO: 66089 - DNA, 227 bp, Homo sapiens; identical to SEQ ID NO: 2578
  chr3:53195773-53196000
  hypo

SEQ ID NO: 66090 - DNA, 30 bp, Homo sapiens; identical to SEQ ID NO: 17614
  chr3:53220696-53220726
  hypo

SEQ ID NO: 66091 - DNA, 112 bp, Homo sapiens; identical to SEQ ID NO: 17615
  chr3:53276151-53276263
  hypo

SEQ ID NO: 66092 - DNA, 30 bp, Homo sapiens
  chr3:53294946-53294976
  hypo
tttgtgcacttgtgcgcatgcttgtaggtg

SEQ ID NO: 66093 - DNA, 531 bp, Homo sapiens; identical to SEQ ID NO: 39292
  chr3:53527869-53528400
  hypo

SEQ ID NO: 66094 - DNA, 230 bp, Homo sapiens; identical to SEQ ID NO: 39293
  chr3:53528642-53528872
  hypo

SEQ ID NO: 66095 - DNA, 31 bp, Homo sapiens; identical to SEQ ID NO: 17616
  chr3:53545544-53545575
  hypo

SEQ ID NO: 66096 - DNA, 203 bp, Homo sapiens
  chr3:53675066-53675269
  hypo
gagcagacgtgaagaccgtaccttccagtgagtatgcagatatgtgggaggctgtgggagctgagggactggaggcacgtggaggaggaaggggcatcaggaggggcaggggcactgtcctcgctggacccatgacagacgtcagttggttgttggtaggttgagtgtagacagattgcagaggtcctcggggatgccagatg

SEQ ID NO: 66097 - DNA, 31 bp, Homo sapiens
  chr3:53757556-53757587
  hypo
accggtttgattgcttcgtggtgtgtggtgg

SEQ ID NO: 66098 - DNA, 31 bp, Homo sapiens
  chr3:53841385-53841416
  hypo
cagtgcgcactgggcacgagagaccaggact

SEQ ID NO: 66099 - DNA, 35 bp, Homo sapiens; identical to SEQ ID NO: 17617
  chr3:53842745-53842780
  hypo

SEQ ID NO: 66100 - DNA, 44 bp, Homo sapiens
  chr3:53844087-53844131
  hypo
agcaacccctccctaccgggactggacaccgtgctacacccccc

SEQ ID NO: 66101 - DNA, 228 bp, Homo sapiens
  chr3:53845188-53845416
  hypo
tgtcagcaacaaaacacgaaatcgctgatgcctgtgacctcaccatcgacgagatggagagtgcagccagcaccctgcttaatgggaacgtgcgtccccgagccaacggggatgtgggccccctctcacaccggcaggactatgagctacaggactttggtcctggctacagcgacgaagagccagaccctgggagggatgaggaggacctggcggatgaaatgatat

SEQ ID NO: 66102 - DNA, 60 bp, Homo sapiens
  chr3:53857418-53857478
  hypo
gtggcctccaggaatgcgcagtgcagcgggtggttggtcttgccccgggacacccgcagc

SEQ ID NO: 66103 - DNA, 30 bp, Homo sapiens
  chr3:53857683-53857713
  hypo
ggccgtccaggccccgctgcacctctgtgt

SEQ ID NO: 66104 - DNA, 66 bp, Homo sapiens
  chr3:53857938-53858004
  hypo
cgctggccagggcccgggcacccagggattgctgctgccccagggctccccgtgccagggctccag

SEQ ID NO: 66105 - DNA, 148 bp, Homo sapiens
  chr3:54067943-54068091
  hypo
cgggactgctgggaagctgtgcgggggcgggtccagcaagccctggcaacggagatcttcccagacgagacagagcgaccgttacttcccgggctgctgtgggtctggtgtctggctctgtggccccgggctgcagggacaaaagtgg

SEQ ID NO: 66106 - DNA, 199 bp, Homo sapiens; identical to SEQ ID NO: 17619
  chr3:54237683-54237882
  hypo

SEQ ID NO: 66107 - DNA, 31 bp, Homo sapiens
  chr3:54307079-54307110
  hypo
ctcggctccagctgcacgtccagctcttccg

SEQ ID NO: 66108 - DNA, 548 bp, Homo sapiens
  chr3:54660168-54660716
  hypo
gaaaaagcaaggggagtctcacgataactgcgcaggcgcggaccagagagctcttttctgaggatccggcaagatggcagaagtagagcagaagaagcagaccttccgcaggttcacctaccgtggcgtggacctggaccagctgctggacatgtcctacaagcggctgatgccgctgtacagtgcgcgccagcagcggcggctgaaccggggcctgcggcggaagcagcactccctgctgaagtgcctgcgcaaggccaagaaggaggcgctgcccatggagaagccggaagtggtgaagacgcacctgcgtgacgtgatcatcctgcccgagatggtgggcagcatggtgggcgtctacaacggcaagaccttcaaccaggtggagatcaagcccgagatgatcgaccactacctgggcgagttctccatcacctacaagcccataaagcacggcgggcccggcatcggggccagccactcctcccgcttcatccctctcaagcagtggctcagctaataaaggcgcacatggttccagtcaaaaa

SEQ ID NO: 66109 - DNA, 30 bp, Homo sapiens; identical to SEQ ID NO: 2587
  chr3:55237864-55237894
  hypo

SEQ ID NO: 66110 - DNA, 23 bp, Homo sapiens
  chr3:55314345-55314368
  hypo
gttgacatctgttttatgtttcg

SEQ ID NO: 66111 - DNA, 23 bp, Homo sapiens
  chr3:55314667-55314690
  hypo
ccgtgcctggccatgttttgatt

SEQ ID NO: 66112 - DNA, 29 bp, Homo sapiens
  chr3:55380621-55380650
  hypo
tattaaaaattaacttttggccgggcacg

SEQ ID NO: 66113 - DNA, 30 bp, Homo sapiens; identical to SEQ ID NO: 2591
  chr3:55749866-55749896
  hypo

SEQ ID NO: 66114 - DNA, 28 bp, Homo sapiens
  chr3:55856928-55856956
  hypo
ccgcaccgagccccaagaatttttaata

SEQ ID NO: 66115 - DNA, 36 bp, Homo sapiens; identical to SEQ ID NO: 17624
  chr3:56093397-56093433
  hypo

SEQ ID NO: 66116 - DNA, 83 bp, Homo sapiens; identical to SEQ ID NO: 17625
  chr3:56691369-56691452
  hypo

SEQ ID NO: 66117 - DNA, 391 bp, Homo sapiens; identical to SEQ ID NO: 17626
  chr3:56718074-56718465
  hypo

SEQ ID NO: 66118 - DNA, 42 bp, Homo sapiens
  chr3:56792412-56792454
  hypo
ttcgagaccactctgggcaacgtagcaagacctcatttcagt

SEQ ID NO: 66119 - DNA, 98 bp, Homo sapiens; identical to SEQ ID NO: 17627
  chr3:56882997-56883095
  hypo

SEQ ID NO: 66120 - DNA, 31 bp, Homo sapiens
  chr3:57044050-57044081
  hypo
agctgccttctgagcccgggcttctgacctc

SEQ ID NO: 66121 - DNA, 33 bp, Homo sapiens
  chr3:57101180-57101213
  hypo
aaagaataacatttgtcggccaggcgcggtggc

SEQ ID NO: 66122 - DNA, 899 bp, Homo sapiens; identical to SEQ ID NO: 39313
  chr3:57112573-57113472
  hypo

SEQ ID NO: 66123 - DNA, 49 bp, Homo sapiens
  chr3:57117481-57117530
  hypo
tttggcatttgaaaggtgtgccgtgtccggttgcagtcttcacccaggg

SEQ ID NO: 66124 - DNA, 257 bp, Homo sapiens
  chr3:57131628-57131885
  hypo
cctgaagaggaggacacgctctccgtcagggaagacgtttctgtctggtccgtcgagagtccttccatcagtggcagagacagctcggatgagggcacagacgagtcatagatgcctgagtcccgcggcatgtccgaggggctgccggctttcaccgtgtgcagcaggggttgcagggcggcgctaccgtcaagggcaggccgggcctccccgtcttggtccaggcccccatgctgactctcgtgctgggagtcggc

SEQ ID NO: 66125 - DNA, 30 bp, Homo sapiens
  chr3:57235329-57235359
  hypo
gcggatgaataaaccggtgaacatttatac

SEQ ID NO: 66126 - DNA, 31 bp, Homo sapiens; identical to SEQ ID NO: 2596
  chr3:57261347-57261378
  hypo

SEQ ID NO: 66127 - DNA, 28 bp, Homo sapiens
  chr3:57356945-57356973
  hypo
agactccgtctcaaaacaaacaaacaaa

SEQ ID NO: 66128 - DNA, 30 bp, Homo sapiens; identical to SEQ ID NO: 17632
  chr3:57505728-57505758
  hypo

SEQ ID NO: 66129 - DNA, 121 bp, Homo sapiens
  chr3:57536862-57536983
  hypo
gattacaggcgtgagccaccgtgcccagccaaaacaaaaatttttaaacaaaagcacatatactcatgacttaacttttcctcactaaaaagatatgttgtttttatcgtactctgtatac

SEQ ID NO: 66130 - DNA, 31 bp, Homo sapiens
  chr3:57537282-57537313
  hypo
caccgcgcccggccacaaaattatttcttac

SEQ ID NO: 66131 - DNA, 37 bp, Homo sapiens
  chr3:57539554-57539591
  hypo
cttttttttttttttccgagacagagtcttgctgtct

SEQ ID NO: 66132 - DNA, 45 bp, Homo sapiens
  chr3:57544222-57544267
  hypo
attattattattattttgagacggagtctctgtcacctaggctgg

SEQ ID NO: 66133 - DNA, 181 bp, Homo sapiens
  chr3:57544506-57544687
  hypo
acgcccggcctatattggactattattaaaacatgttacactgaacctagtcatgtagatcctgaaactttaagttggatttcatgactgcagtcctagttcatcaagggaaggagatggaagaaaacgttagttcgccattagtcttagataaaaaacaggccgggcctggtggcttatg

SEQ ID NO: 66134 - DNA, 284 bp, Homo sapiens
  chr3:57679349-57679633
  hypo
ggcgacagagcgagattccgtctcaaaaaaataaaaataaaatatatgaacgcataatggtgacggtggctaacattgaacgcttactttgtgccagttgatatgccaagtacaagtgcgaatacttacaaatattaccttattgaatcttcacataatcgcaaataagtagactatttatttctttttacagataaggaaatggaggtcctggaggttacatgactagcccaacaagtatgacaactccgatatcggcttgcggttcactcattcagtttgct

SEQ ID NO: 66135 - DNA, 145 bp, Homo sapiens; identical to SEQ ID NO: 17635
  chr3:57679966-57680111
  hypo

SEQ ID NO: 66136 - DNA, 24 bp, Homo sapiens
  chr3:57680170-57680194
  hypo
cacggcagaacttaagcattttgc

SEQ ID NO: 66137 - DNA, 20 bp, Homo sapiens
  chr3:57905503-57905523
  hypo
aagagcgaaactccatctca

SEQ ID NO: 66138 - DNA, 94 bp, Homo sapiens; identical to SEQ ID NO: 17638
  chr3:57906366-57906460
  hypo

SEQ ID NO: 66139 - DNA, 30 bp, Homo sapiens; identical to SEQ ID NO: 17639
  chr3:58109086-58109116
  hypo

SEQ ID NO: 66140 - DNA, 143 bp, Homo sapiens
  chr3:58136696-58136839
  hypo
cggagctgtcgactccgccttcttggctttagttaacaggttcttcttgtgtagtcacatcaacgtcgggtcacatgggaatgtggtaaagcctcattactgtagagttcagacatgatcacttaaaaagagctttattgggc

SEQ ID NO: 66141 - DNA, 105 bp, Homo sapiens
  chr3:58153497-58153602
  hypo
gtgaagcaggaatcacggaaaggattccataccacatgcgtaaatggtgctgtgcacaggacctggagccggagtggggtacgcatgccccgtcagcgggagctg

SEQ ID NO: 66142 - DNA, 30 bp, Homo sapiens
  chr3:58222059-58222089
  hypo
actgtcccaaactccggatgaattccagct

SEQ ID NO: 66143 - DNA, 30 bp, Homo sapiens
  chr3:58305029-58305059
  hypo
ctcagttatgtaaacggtctgatctgtaaa

SEQ ID NO: 66144 - DNA, 23 bp, Homo sapiens
  chr3:58342711-58342734
  hypo
tctagaaaacttcaggctgggcg

SEQ ID NO: 66145 - DNA, 30 bp, Homo sapiens; identical to SEQ ID NO: 2600
  chr3:58474980-58475010
  hypo

SEQ ID NO: 66146 - DNA, 23 bp, Homo sapiens
  chr3:58484907-58484930
  hypo
gctgatctcgaactcctgacctc

SEQ ID NO: 66147 - DNA, 31 bp, Homo sapiens; identical to SEQ ID NO: 17642
  chr3:58554742-58554773
  hypo

SEQ ID NO: 66148 - DNA, 25 bp, Homo sapiens
  chr3:58713169-58713194
  hypo
ttctttttttttgagacggagtttc

SEQ ID NO: 66149 - DNA, 38 bp, Homo sapiens
  chr3:59041983-59042021
  hypo
tttttttttttttttttgagacggagtgtggctctgtc

SEQ ID NO: 66150 - DNA, 30 bp, Homo sapiens
  chr3:60133193-60133223
  hypo
ttgcgctcccacctccgccaccgtgggtgt

SEQ ID NO: 66151 - DNA, 31 bp, Homo sapiens; identical to SEQ ID NO: 17643
  chr3:61332124-61332155
  hypo

SEQ ID NO: 66152 - DNA, 925 bp, Homo sapiens; identical to SEQ ID NO: 39333
  chr3:61546307-61547232
  hypo

SEQ ID NO: 66153 - DNA, 91 bp, Homo sapiens; identical to SEQ ID NO: 2603
  chr3:61656125-61656216
  hypo

SEQ ID NO: 66154 - DNA, 31 bp, Homo sapiens; identical to SEQ ID NO: 17645
  chr3:62022461-62022492
  hypo

SEQ ID NO: 66155 - DNA, 93 bp, Homo sapiens
  chr3:63082428-63082521
  hypo
ctccagctcggacagcttggcgttggcatccttaaccaccaaatccccgtgcagctcggcatctgtgatggcggcctccagggaagccctctg

SEQ ID NO: 66156 - DNA, 30 bp, Homo sapiens
  chr3:63847208-63847238
  hypo
tagcagacacaggacgcataatagtgaaga

SEQ ID NO: 66157 - DNA, 31 bp, Homo sapiens; identical to SEQ ID NO: 17646
  chr3:63867446-63867477
  hypo

SEQ ID NO: 66158 - DNA, 30 bp, Homo sapiens; identical to SEQ ID NO: 39362
  chr3:63967884-63967914
  hypo

SEQ ID NO: 66159 - DNA, 124 bp, Homo sapiens
  chr3:64142935-64143059
  hypo
gctcattgcagacagtgcatacgaagcacggcgggtgccagcaaacgccgtggccagcgcgtgacgcaaacacagcgatgtctccaccattgatctggcctccgcactgtgaggcaaacagaaa

SEQ ID NO: 66160 - DNA, 30 bp, Homo sapiens; identical to SEQ ID NO: 2621
  chr3:64232467-64232497
  hypo

SEQ ID NO: 66161 - DNA, 338 bp, Homo sapiens; identical to SEQ ID NO: 17648
  chr3:64547142-64547480
  hypo

SEQ ID NO: 66162 - DNA, 36 bp, Homo sapiens; identical to SEQ ID NO: 39366
  chr3:64673480-64673516
  hypo

SEQ ID NO: 66163 - DNA, 133 bp, Homo sapiens; identical to SEQ ID NO: 39367
  chr3:64673805-64673938
  hypo

SEQ ID NO: 66164 - DNA, 27 bp, Homo sapiens
  chr3:64950009-64950036
  hypo
ggactacatgtgcgagacaccatgccc

SEQ ID NO: 66165 - DNA, 30 bp, Homo sapiens
  chr3:65170879-65170909
  hypo
ctaggaactagtgcccggcacgtcgtaagt

SEQ ID NO: 66166 - DNA, 156 bp, Homo sapiens
  chr3:65364854-65365010
  hypo
tgagtcagctttcactcgcaagagaacaaaaactcccaggcatggtgggaaaccctgggtaatttcacgttcagcactcaccaaaggtcgtgcctgcttcgggcctgctcaccgaggacacgatgacgaagccgaagccctcgttctccccgcgcc

SEQ ID NO: 66167 - DNA, 242 bp, Homo sapiens
  chr3:65368389-65368631
  hypo
gctaagaacatgaactcgagtcagaccttatttgtcagtccctccatttggtagctctgcgatcttgggcaagttagttagcctttcttttccttgatgtgaaaacgggataaactggtgggtttgacggataaatgagagaatgtatgttaagagcctttagcacagaacctggcacatagtaagcgctcgatgaataatggctgttattaccacaaggaaattaacgatacctatttcag

SEQ ID NO: 66168 - DNA, 40 bp, Homo sapiens; identical to SEQ ID NO: 17653
  chr3:65435158-65435198
  hypo

SEQ ID NO: 66169 - DNA, 21 bp, Homo sapiens
  chr3:65676965-65676986
  hypo
agactccgtctcaaaaaaaaa

SEQ ID NO: 66170 - DNA, 20 bp, Homo sapiens
  chr3:65722694-65722714
  hypo
ttttgagacggagtctcgct

SEQ ID NO: 66171 - DNA, 25 bp, Homo sapiens
  chr3:65949273-65949298
  hypo
aagcgagactcagtctctaaataaa

SEQ ID NO: 66172 - DNA, 31 bp, Homo sapiens
  chr3:65999147-65999178
  hypo
agatagaggccagactcggtggctcaagcct

SEQ ID NO: 66173 - DNA, 1263 bp, Homo sapiens; identical to SEQ ID NO: 39371
  chr3:66024207-66025470
  hypo

SEQ ID NO: 66174 - DNA, 104 bp, Homo sapiens; identical to SEQ ID NO: 17657
  chr3:66053362-66053466
  hypo

SEQ ID NO: 66175 - DNA, 104 bp, Homo sapiens; identical to SEQ ID NO: 17658
  chr3:66053765-66053869
  hypo

SEQ ID NO: 66176 - DNA, 30 bp, Homo sapiens
  chr3:66433506-66433536
  hypo
gtgaagatgcctaccgtggtcccatccttc

SEQ ID NO: 66177 - DNA, 31 bp, Homo sapiens; identical to SEQ ID NO: 17659
  chr3:66452458-66452489
  hypo

SEQ ID NO: 66178 - DNA, 135 bp, Homo sapiens
  chr3:66455987-66456122
  hypo
agtctgtattctgccccgagagagcggacatctggccccagcactgagaatcaacccaaaaggttccttaaggctcccgtctgctctcataccaaccagagtcccttttctggacatgaccgagaaactgcagaa

SEQ ID NO: 66179 - DNA, 52 bp, Homo sapiens
  chr3:66460440-66460492
  hypo
gtctctgagccctccccgaggccactgtgtggtggaacgaaccaggcctagc

SEQ ID NO: 66180 - DNA, 97 bp, Homo sapiens
  chr3:66461117-66461214
  hypo
gacccaggccaacaaacgggcacaggagttccaggcaagggcaaagcccattaaaggaatagaaaggagagcgaataggaggcggctcttattatca

SEQ ID NO: 66181 - DNA, 31 bp, Homo sapiens; identical to SEQ ID NO: 17660
  chr3:66463001-66463032
  hypo

SEQ ID NO: 66182 - DNA, 197 bp, Homo sapiens; identical to SEQ ID NO: 17661
  chr3:66482907-66483104
  hypo

SEQ ID NO: 66183 - DNA, 179 bp, Homo sapiens
  chr3:66521939-66522118
  hypo
agcctagggccccagccgctgcagggagagcaaaggctcatccatcccaaccagcagggacggagggcatggcggggatgaagggcggccagaggtaaaacccagaggttctctcagttaaaggatggcagagggttctcataaatgaaaaccacgctctactgcggcagaaaacggag

SEQ ID NO: 66184 - DNA, 1605 bp, Homo sapiens; identical to SEQ ID NO: 39372
  chr3:66550297-66551902
  hypo

SEQ ID NO: 66185 - DNA, 30 bp, Homo sapiens
  chr3:66744845-66744875
  hypo
gcgtaagccaccgtgcgcatccatgttctg

SEQ ID NO: 66186 - DNA, 156 bp, Homo sapiens
  chr3:66852897-66853053
  hypo
tagtgtaaaagtaatacgagaacttttagcactacctcttcaatttttatgttaattcaaatctgttctacacaatgtctattaatttttttaaacctggcagcgctgtttcagaaaaagatccatgttagctaacgtctaacagttagataaatt

SEQ ID NO: 66187 - DNA, 30 bp, Homo sapiens; identical to SEQ ID NO: 2632
  chr3:66879269-66879299
  hypo

SEQ ID NO: 66188 - DNA, 879 bp, Homo sapiens; identical to SEQ ID NO: 39374
  chr3:67048414-67049293
  hypo

SEQ ID NO: 66189 - DNA, 44 bp, Homo sapiens
  chr3:67079755-67079799
  hypo
aacatgtaagaatgaataggccgggcgcggtggctcatgcctgt

SEQ ID NO: 66190 - DNA, 159 bp, Homo sapiens; identical to SEQ ID NO: 2636
  chr3:69062097-69062256
  hypo

SEQ ID NO: 66191 - DNA, 24 bp, Homo sapiens
  chr3:69095216-69095240
  hypo
accactgcacgctagcctggacaa

SEQ ID NO: 66192 - DNA, 303 bp, Homo sapiens
  chr3:69230131-69230434
  hypo
gtctgagtcaaagctggtctgcgggctgtgtccctgatccttctgcccagaggcccgctggtaccagccacgcaagtgctcggcaactaaggccttgtggatgtttttggtgatgtgctccgattttgcagcagccttccttggcagccggagagttgcatatgggttatggggtacccggtcgacctcatcttcgtgaaaggatctgctgtagtccctctggcgctcatatccatagtgggctgaggaccggtaggaagggttgacactatactgtccctcggtgtcattctcatagacata

SEQ ID NO: 66193 - DNA, 18 bp, Homo sapiens
  chr3:69309256-69309274
  hypo
acgtgctagcagccctcg

SEQ ID NO: 66194 - DNA, 77 bp, Homo sapiens; identical to SEQ ID NO: 17669
  chr3:69309453-69309530
  hypo

SEQ ID NO: 66195 - DNA, 30 bp, Homo sapiens
  chr3:69314077-69314107
  hypo
gaattaatgctcagccgtgggaggataata

SEQ ID NO: 66196 - DNA, 683 bp, Homo sapiens; identical to SEQ ID NO: 39382
  chr3:69434905-69435588
  hypo

SEQ ID NO: 66197 - DNA, 186 bp, Homo sapiens; identical to SEQ ID NO: 2638
  chr3:69590940-69591126
  hypo

SEQ ID NO: 66198 - DNA, 198 bp, Homo sapiens; identical to SEQ ID NO: 39384
  chr3:69591779-69591977
  hypo

SEQ ID NO: 66199 - DNA, 31 bp, Homo sapiens; identical to SEQ ID NO: 2641
  chr3:69788413-69788444
  hypo

SEQ ID NO: 66200 - DNA, 148 bp, Homo sapiens; identical to SEQ ID NO: 39387
  chr3:69788530-69788678
  hypo

SEQ ID NO: 66201 - DNA, 62 bp, Homo sapiens; identical to SEQ ID NO: 39388
  chr3:69789152-69789214
  hypo

SEQ ID NO: 66202 - DNA, 30 bp, Homo sapiens
  chr3:69928217-69928247
  hypo
ccccaaagtgcaaacgaagggtctcattag

SEQ ID NO: 66203 - DNA, 255 bp, Homo sapiens; identical to SEQ ID NO: 17675
  chr3:69937600-69937855
  hypo

SEQ ID NO: 66204 - DNA, 30 bp, Homo sapiens
  chr3:70008526-70008556
  hypo
aagaaactggagcacgccaaccggcatttg

SEQ ID NO: 66205 - DNA, 30 bp, Homo sapiens
  chr3:70900167-70900197
  hypo
tttttgagtgggaccgtgtctcaaaaaaga

SEQ ID NO: 66206 - DNA, 41 bp, Homo sapiens
  chr3:70901511-70901552
  hypo
ggaagtgaagacagaccgcacgctcacggaaatagcgtttg

SEQ ID NO: 66207 - DNA, 253 bp, Homo sapiens; identical to SEQ ID NO: 17676
  chr3:71036210-71036463
  hypo

SEQ ID NO: 66208 - DNA, 271 bp, Homo sapiens; identical to SEQ ID NO: 17677
  chr3:71049501-71049772
  hypo

SEQ ID NO: 66209 - DNA, 30 bp, Homo sapiens
  chr3:71074446-71074476
  hypo
ttacagatataaatccgattcggtggttct

SEQ ID NO: 66210 - DNA, 30 bp, Homo sapiens
  chr3:71082358-71082388
  hypo
agaacctgtatcagcggcagcggcgcatca

SEQ ID NO: 66211 - DNA, 1739 bp, Homo sapiens; identical to SEQ ID NO: 39389
  chr3:71113095-71114834
  hypo

SEQ ID NO: 66212 - DNA, 314 bp, Homo sapiens
  chr3:71119373-71119687
  hypo
tttaatgtaaaaatgcacattcgtctactctattgcctcctcgctcacagcaggggagtgccaaactcgatattttagctcacctaagagaacaacctgtattactgttgggcatcttgccttcttttgctcactctccggggagagcatgtcggcgcattttcaataaaacaccttcttagcagtaatgggccactgttcccatttcagtggtccctaaggtttcacgatacagtatatttggctgactcgcagttcgagttttcttctggcattcctaagatccaaaaaacggaagagaaaaagcaaaagaa

SEQ ID NO: 66213 - DNA, 78 bp, Homo sapiens
  chr3:71120997-71121075
  hypo
attacaggcgtgagccactgcgcccagcctctgtagtttaacaacaacaacaacaacgacaacaacaacagctatcat

SEQ ID NO: 66214 - DNA, 19 bp, Homo sapiens
  chr3:71127280-71127299
  hypo
cctcctctgtatattttct

SEQ ID NO: 66215 - DNA, 27 bp, Homo sapiens
  chr3:71148377-71148404
  hypo
taggttgcacacagtggctcacgccta

SEQ ID NO: 66216 - DNA, 277 bp, Homo sapiens
  chr3:71163676-71163953
  hypo
taagaaacacaagcaccgatagatgagtgacaaagaaaagaccatgggaaagtggaaccctgctatcccacctgcctactgcatccacccccgtgtcccagggaggccttctgcctactgaactcaccacgaccagcccttcagatgtaatgcacaggctagttcatctgtgaagggagagacagattcgacaaggcctgcctggaagagcctcgagaaaaggggctgtctgagtggggcatctggaagccaagacgcctgggagagttgcctgaga

SEQ ID NO: 66217 - DNA, 28 bp, Homo sapiens
  chr3:71175339-71175367
  hypo
gaaaagaaatttttggccgggcgtggtg

SEQ ID NO: 66218 - DNA, 110 bp, Homo sapiens
  chr3:71218263-71218373
  hypo
gctcataaactgaggtggtgccgtgactatcaacagctgtatttgactatttcatcgagtcagtttacagtgtctccatcacagtggacgcctgtcagctgcactcttgc

SEQ ID NO: 66219 - DNA, 78 bp, Homo sapiens
  chr3:71247379-71247457
  hypo
gaggtcagctgccccgatgtccacggccggcgtctctccgttggaccgcccctcccgaagaccgccgcactctagtaa

SEQ ID NO: 66220 - DNA, 30 bp, Homo sapiens
  chr3:71292536-71292566
  hypo
cgagcacagtcataacgtaaaataaaattc

SEQ ID NO: 66221 - DNA, 30 bp, Homo sapiens; identical to SEQ ID NO: 17682
  chr3:71357180-71357210
  hypo

SEQ ID NO: 66222 - DNA, 153 bp, Homo sapiens; identical to SEQ ID NO: 17683
  chr3:71366444-71366597
  hypo

SEQ ID NO: 66223 - DNA, 286 bp, Homo sapiens
  chr3:71410778-71411064
  hypo
acagtaacatgacattgatggcggggcacactaatgaccattctccaagacagggctgtcagcctgtcgttccagtgagacgccggtctgctttcaccgctgctcaggactggatgctcaactaattattcagacagcgacattaatgagagccctcatgtttattttcaacagactaaccagcgcttagcttccatttgtctgatatggtcactgattaaaatgtgtttcatgaatagtaaatttgaactctaatataacaaagaagcaccggagaaaaataagg

SEQ ID NO: 66224 - DNA, 26 bp, Homo sapiens
  chr3:71509869-71509895
  hypo
gtgagctaccgcgcctggcctaattt

SEQ ID NO: 66225 - DNA, 26 bp, Homo sapiens
  chr3:71510925-71510951
  hypo
gggaaaaagagcgagactctgtatcg

SEQ ID NO: 66226 - DNA, 30 bp, Homo sapiens
  chr3:71511869-71511899
  hypo
gtattctagtcatccgatgaaggaaaattc

SEQ ID NO: 66227 - DNA, 30 bp, Homo sapiens; identical to SEQ ID NO: 17685
  chr3:71531004-71531034
  hypo

SEQ ID NO: 66228 - DNA, 94 bp, Homo sapiens
  chr3:71533899-71533993
  hypo
tgtctcagtgtgggcccgaaagtctgtatttaatgcgcttcccaggcagtgctgagatgacactttgaaaaacacaaaacgtggaggtaaagaa

SEQ ID NO: 66229 - DNA, 30 bp, Homo sapiens
  chr3:71538233-71538263
  hypo
accttctggaagctgcgccaccaccgcccc

SEQ ID NO: 66230 - DNA, 31 bp, Homo sapiens; identical to SEQ ID NO: 17686
  chr3:71567986-71568017
  hypo

SEQ ID NO: 66231 - DNA, 30 bp, Homo sapiens
  chr3:71600099-71600129
  hypo
ccttccagacttcacggagttgggtttcac

SEQ ID NO: 66232 - DNA, 937 bp, Homo sapiens; identical to SEQ ID NO: 39390
  chr3:71630564-71631501
  hypo

SEQ ID NO: 66233 - DNA, 110 bp, Homo sapiens; identical to SEQ ID NO: 2646
  chr3:71631789-71631899
  hypo

SEQ ID NO: 66234 - DNA, 396 bp, Homo sapiens; identical to SEQ ID NO: 39396
  chr3:71833527-71833923
  hypo

SEQ ID NO: 66235 - DNA, 730 bp, Homo sapiens; identical to SEQ ID NO: 39397
  chr3:71834125-71834855
  hypo

SEQ ID NO: 66236 - DNA, 30 bp, Homo sapiens; identical to SEQ ID NO: 17690
  chr3:71942837-71942867
  hypo

SEQ ID NO: 66237 - DNA, 72 bp, Homo sapiens
  chr3:72420266-72420338
  hypo
agcacaggccacacgcgacaccacgacacgattaatggcattaacagcgccggaggccgctgattgttctaa

SEQ ID NO: 66238 - DNA, 24 bp, Homo sapiens
  chr3:72429879-72429903
  hypo
cgatccacccgcctcggcctccca

SEQ ID NO: 66239 - DNA, 39 bp, Homo sapiens
  chr3:72506010-72506049
  hypo
gttctgcaatgtttattaaagccccgggcccagaaattg

SEQ ID NO: 66240 - DNA, 207 bp, Homo sapiens
  chr3:72618810-72619017
  hypo
actgtgtatgtataccgcacagcctgccttataagctgctttttaaatttaaaatatcgtgaacatctttccatgtcatagctgtgggatgttgaccaagtcatttcacctctctaaagctccatttcctcctttgcggaatagggggtgtactgtgagaatcaatgaccaggacaagtgttctgtgcttagcgcagactctggcac

SEQ ID NO: 66241 - DNA, 30 bp, Homo sapiens
  chr3:72703938-72703968
  hypo
gaccgtaaacactctcggacccatggcaaa

SEQ ID NO: 66242 - DNA, 31 bp, Homo sapiens
  chr3:72739581-72739612
  hypo
tgtgagccactgtgcccggtctgaatcccat

SEQ ID NO: 66243 - DNA, 30 bp, Homo sapiens; identical to SEQ ID NO: 17691
  chr3:72769747-72769777
  hypo

SEQ ID NO: 66244 - DNA, 42 bp, Homo sapiens
  chr3:72773316-72773358
  hypo
gcattgaaggcctgagccaccgtgcccagcccccatccttac

SEQ ID NO: 66245 - DNA, 14 bp, Homo sapiens
  chr3:72773738-72773752
  hypo
ttttttttgagacg

SEQ ID NO: 66246 - DNA, 85 bp, Homo sapiens
  chr3:72795275-72795360
  hypo
gagccatcgcgcccagccccgtttctaagatgaagggaaaggtgtcgtttggagtccccccctcgtgagccagctacagtggagc

SEQ ID NO: 66247 - DNA, 153 bp, Homo sapiens; identical to SEQ ID NO: 17692
  chr3:72877845-72877998
  hypo

SEQ ID NO: 66248 - DNA, 31 bp, Homo sapiens; identical to SEQ ID NO: 39401
  chr3:72896942-72896973
  hypo

SEQ ID NO: 66249 - DNA, 31 bp, Homo sapiens; identical to SEQ ID NO: 17693
  chr3:72913684-72913715
  hypo

SEQ ID NO: 66250 - DNA, 32 bp, Homo sapiens
  chr3:72964697-72964729
  hypo
ttgagggagctgggcgcgggtggctcacgcct

SEQ ID NO: 66251 - DNA, 31 bp, Homo sapiens
  chr3:72998942-72998973
  hypo
tgtgagccacagtgcccggcctcattctttc

SEQ ID NO: 66252 - DNA, 30 bp, Homo sapiens
  chr3:73044532-73044562
  hypo
gtgagccaccgtgcccgggcagtacctttt

SEQ ID NO: 66253 - DNA, 15 bp, Homo sapiens
  chr3:73045128-73045143
  hypo
ttttttgaaacagtc

SEQ ID NO: 66254 - DNA, 259 bp, Homo sapiens; identical to SEQ ID NO: 39403
  chr3:73045502-73045761
  hypo

SEQ ID NO: 66255 - DNA, 31 bp, Homo sapiens; identical to SEQ ID NO: 17696
  chr3:73232504-73232535
  hypo

SEQ ID NO: 66256 - DNA, 25 bp, Homo sapiens
  chr3:73342730-73342755
  hypo
gagcgagagtctgtctcaaacaaac

SEQ ID NO: 66257 - DNA, 819 bp, Homo sapiens
  chr3:73433223-73434042
  hypo
ggggtccagctccttcagggacgggctataggtaggggtgcccacttcgggatcttccgtgatggagagcagattcttggaggctggcccgtaggcttccgtggtccccacagccccttcgctgctcgggcagctgatgccctccgccgctctcctcaaggagttgtcgggggagatctccagggtgagcggggtgctgcggcagctctcgcctgtgttgtaggcgctcgagctgtccttgtcggatttctccgggagctcggtgatatctgagagctcgtgtctgcgcacgtcgatgctggtgttgtagttgcggaagccgctgttgtgcagcatccaggactcgcggtactgctccttgagctgctgcatcttgtgggcgcgcacgatgctcaggcactccagctcgatgctgcgcagctcttcgttcagcagctccagctccttgtccacgctctcagggtcactcttgccggcgtccagggggccgctagggtagtacaggccgtaaggggtggcgctcttcacctggcacttgagctccaggagctcgcggaagcgctcgcactcgtccaccgggatccccaggtagtcggcgtccgtgcagtcggccgaaatgaaagactcgttgctgaagggcaggtcgccgctgcccaaggtgtcctggctgcaggtgagcttcctctgccccgccagcgggttggaggatgcggtggcgtcgtcgccattgttctcttgctccgagctctcgtcattacgggtgctctcgtcggtccgccccacaccgctgtccttctcgtgctggttggacaagatggt

SEQ ID NO: 66258 - DNA, 392 bp, Homo sapiens; identical to SEQ ID NO: 39405
  chr3:73673261-73673653
  hypo

SEQ ID NO: 66259 - DNA, 30 bp, Homo sapiens; identical to SEQ ID NO: 2655
  chr3:74663492-74663522
  hypo

SEQ ID NO: 66260 - DNA, 31 bp, Homo sapiens; identical to SEQ ID NO: 2656
  chr3:74663813-74663844
  hypo

SEQ ID NO: 66261 - DNA, 30 bp, Homo sapiens; identical to SEQ ID NO: 2657
  chr3:75168992-75169022
  hypo

SEQ ID NO: 66262 - DNA, 30 bp, Homo sapiens; identical to SEQ ID NO: 39412
  chr3:77400955-77400985
  hypo

SEQ ID NO: 66263 - DNA, 199 bp, Homo sapiens
  chr3:82247998-82248197
  hypo
caaagtaaatggcttccgaatagtatatatatatatatatatatatctttgaggatgtatttatgcacaactctgccctgaaattctgctggttcatttaaacaggcatatttttgtgtacatcgtgttcaagctttgctcacttaaaaaaaataaacctttacaggtatcgagaaactcacgccgtataacactaatg

SEQ ID NO: 66264 - DNA, 31 bp, Homo sapiens; identical to SEQ ID NO: 17700
  chr3:82363227-82363258
  hypo

SEQ ID NO: 66265 - DNA, 41 bp, Homo sapiens
  chr3:84175658-84175699
  hypo
ctgagtgggcaaatctcgggaaaaggcgccaccaccacaga

SEQ ID NO: 66266 - DNA, 31 bp, Homo sapiens
  chr3:85471958-85471989
  hypo
caggagctggggcgagcgctttggggcttca

SEQ ID NO: 66267 - DNA, 30 bp, Homo sapiens; identical to SEQ ID NO: 2663
  chr3:85617271-85617301
  hypo

SEQ ID NO: 66268 - DNA, 30 bp, Homo sapiens; identical to SEQ ID NO: 17702
  chr3:86061700-86061730
  hypo

SEQ ID NO: 66269 - DNA, 31 bp, Homo sapiens
  chr3:87005927-87005958
  hypo
ccgtcccaccgtcccaaaaaaaaaaaaaaaa

SEQ ID NO: 66270 - DNA, 43 bp, Homo sapiens
  chr3:87652051-87652094
  hypo
ccgtgttagccaggatggtctcgattacaaaaacatttcttat

SEQ ID NO: 66271 - DNA, 37 bp, Homo sapiens; identical to SEQ ID NO: 17703
  chr3:87737839-87737876
  hypo

SEQ ID NO: 66272 - DNA, 161 bp, Homo sapiens
  chr3:88098565-88098726
  hypo
tagatgaaaaatacataaaatcgtcattattatcatcattattagtattgaataggtactacataagcacggtaaacagaaaaacattcaaaaaggaaaaagggatataaaaacaaagtctattacacactgattcctgttatgtttaaaaagtttggaga

SEQ ID NO: 66273 - DNA, 30 bp, Homo sapiens
  chr3:88188011-88188041
  hypo
tattttttctggagcgctccttagaagcgt

SEQ ID NO: 66274 - DNA, 23 bp, Homo sapiens
  chr3:88210213-88210236
  hypo
ttttttttttttgagacggagtc

SEQ ID NO: 66275 - DNA, 39 bp, Homo sapiens; identical to SEQ ID NO: 17705
  chr3:93697928-93697967
  hypo

SEQ ID NO: 66276 - DNA, 39 bp, Homo sapiens; identical to SEQ ID NO: 17706
  chr3:93698206-93698245
  hypo

SEQ ID NO: 66277 - DNA, 31 bp, Homo sapiens; identical to SEQ ID NO: 17707
  chr3:93707708-93707739
  hypo

SEQ ID NO: 66278 - DNA, 79 bp, Homo sapiens
  chr3:93780313-93780392
  hypo
gttttgggacacagcgacgatgcagtttagcaaaagaaacatgacagcagcggttaacacctccgaacttgctggctac

SEQ ID NO: 66279 - DNA, 30 bp, Homo sapiens
  chr3:93800934-93800964
  hypo
gtataactgtgtttccgatcatttttttat

SEQ ID NO: 66280 - DNA, 30 bp, Homo sapiens
  chr3:93801348-93801378
  hypo
gagaaagcagtttcacgtattagccctaaa

SEQ ID NO: 66281 - DNA, 85 bp, Homo sapiens
  chr3:94174883-94174968
  hypo
aactcataaatagttcacctgcggagaaatggcttcagatgttttcactcattacgcccaggctggagcgcagtggcatgatctc

SEQ ID NO: 66282 - DNA, 113 bp, Homo sapiens
  chr3:94656924-94657037
  hypo
acccctggtggcggcggtgttgagccggtggctagcgagaagtcggccggcagtggggccgcctccttttcttcctcctgcttggacgactgtcttccgcctcaactgtggag

SEQ ID NO: 66283 - DNA, 30 bp, Homo sapiens
  chr3:96338459-96338489
  hypo
tcacccagtgctaccgaaacacgggcgccc

SEQ ID NO: 66284 - DNA, 30 bp, Homo sapiens; identical to SEQ ID NO: 39432
  chr3:97115818-97115848
  hypo

SEQ ID NO: 66285 - DNA, 102 bp, Homo sapiens; identical to SEQ ID NO: 2672
  chr3:97690940-97691042
  hypo

SEQ ID NO: 66286 - DNA, 106 bp, Homo sapiens; identical to SEQ ID NO: 17710
  chr3:97744979-97745085
  hypo

SEQ ID NO: 66287 - DNA, 30 bp, Homo sapiens
  chr3:98235903-98235933
  hypo
agatggagaatgcccgtggcaatggtggga

SEQ ID NO: 66288 - DNA, 46 bp, Homo sapiens
  chr3:98290223-98290269
  hypo
atatttaaggctttaagaaaacgctgtggccgggcgcggtggctca

SEQ ID NO: 66289 - DNA, 46 bp, Homo sapiens
  chr3:98304495-98304541
  hypo
catcacacctggaaaacacagcggcgccaaaccagggatcaaatgg

SEQ ID NO: 66290 - DNA, 31 bp, Homo sapiens
  chr3:98408813-98408844
  hypo
ttattaatttatgtattgagacggagtcttg

SEQ ID NO: 66291 - DNA, 29 bp, Homo sapiens
  chr3:98618381-98618410
  hypo
ccgcgcccggtagactggccttttctaaa

SEQ ID NO: 66292 - DNA, 1418 bp, Homo sapiens; identical to SEQ ID NO: 39441
  chr3:98619781-98621199
  hypo

SEQ ID NO: 66293 - DNA, 24 bp, Homo sapiens
  chr3:98696063-98696087
  hypo
cccggccagggggtcttacatccc

SEQ ID NO: 66294 - DNA, 450 bp, Homo sapiens; identical to SEQ ID NO: 2677
  chr3:99594871-99595321
  hypo

SEQ ID NO: 66295 - DNA, 30 bp, Homo sapiens
  chr3:99598903-99598933
  hypo
gtgcttctactctccgatcccttctcctct

SEQ ID NO: 66296 - DNA, 31 bp, Homo sapiens
  chr3:99622031-99622062
  hypo
aaaacagtagctggcacgtcataaatctgtg

SEQ ID NO: 66297 - DNA, 31 bp, Homo sapiens; identical to SEQ ID NO: 17714
  chr3:99694509-99694540
  hypo

SEQ ID NO: 66298 - DNA, 117 bp, Homo sapiens
  chr3:99944287-99944404
  hypo
acctacaaggggtgcccgagcggctgctgggggcggcggggaccgaagagaagaagaagttaatcagggattttgatgaaaagcaacaggaagcaaatgaaacgttggcagagatgg

SEQ ID NO: 66299 - DNA, 30 bp, Homo sapiens; identical to SEQ ID NO: 17716
  chr3:100270285-100270315
  hypo

SEQ ID NO: 66300 - DNA, 30 bp, Homo sapiens; identical to SEQ ID NO: 2679
  chr3:100306083-100306113
  hypo

SEQ ID NO: 66301 - DNA, 185 bp, Homo sapiens
  chr3:100329427-100329612
  hypo
cctggaaaaggaggacgtgggaggggaagtagtgagtaaaacaatgatgttaaagaaaagcccgctggaactcagaacgcgaaatttcaatgatcctaatgctggatcccttgggctgtagagcttctccgtaaaggaattcaatgttggatgggctacatactccctttcgtgaaaatcagaga

SEQ ID NO: 66302 - DNA, 30 bp, Homo sapiens; identical to SEQ ID NO: 17718
  chr3:100535428-100535458
  hypo

SEQ ID NO: 66303 - DNA, 46 bp, Homo sapiens
  chr3:100796977-100797023
  hypo
gatttttttttttttttgagacggagtctggtgatctctgctcact

SEQ ID NO: 66304 - DNA, 33 bp, Homo sapiens
  chr3:100989028-100989061
  hypo
cctcagcctcccgaagtgctaggattacaggcc

SEQ ID NO: 66305 - DNA, 30 bp, Homo sapiens
  chr3:100998530-100998560
  hypo
gagttaaattgtctccgacgtcaaatcaaa

SEQ ID NO: 66306 - DNA, 189 bp, Homo sapiens
  chr3:101021601-101021790
  hypo
aggcaaaaaacacatgcaatacgtttcattaaaatgtgaggtgccatgattaaaagttgcgttcattttaaaacacacaaaaccctgcacagcttcaaaacatttataccctcgcaaaatttgtctttggtccacccacgtttatcaaaccatccttctctccccaacgtcccccatttaataagatca

SEQ ID NO: 66307 - DNA, 30 bp, Homo sapiens
  chr3:101133120-101133150
  hypo
gagagagagaacatccggaagatgcagggt

SEQ ID NO: 66308 - DNA, 150 bp, Homo sapiens; identical to SEQ ID NO: 17719
  chr3:101157527-101157677
  hypo

SEQ ID NO: 66309 - DNA, 90 bp, Homo sapiens; identical to SEQ ID NO: 17720
  chr3:101230980-101231070
  hypo

SEQ ID NO: 66310 - DNA, 827 bp, Homo sapiens; identical to SEQ ID NO: 39450
  chr3:101231553-101232380
  hypo

SEQ ID NO: 66311 - DNA, 82 bp, Homo sapiens
  chr3:101232950-101233032
  hypo
cctttatacccctaacgcctatccctccaacccccatctcccatcctaacggagtcaataaagggatcggcccaactcgtcc

SEQ ID NO: 66312 - DNA, 121 bp, Homo sapiens
  chr3:101393170-101393291
  hypo
gagaagaaaagaaagaaaggaacaatgggttcgagttaaatataactttatcaaaaaagcatttatatgagtgtagatttagagaccaaaagaggttgtattggccgggcgctgtggctta

SEQ ID NO: 66313 - DNA, 31 bp, Homo sapiens; identical to SEQ ID NO: 17722
  chr3:101406817-101406848
  hypo

SEQ ID NO: 66314 - DNA, 16 bp, Homo sapiens
  chr3:101420460-101420476
  hypo
cagagcgagactctgt

SEQ ID NO: 66315 - DNA, 402 bp, Homo sapiens; identical to SEQ ID NO: 39458
  chr3:101497829-101498231
  hypo

SEQ ID NO: 66316 - DNA, 104 bp, Homo sapiens; identical to SEQ ID NO: 2686
  chr3:101498503-101498607
  hypo

SEQ ID NO: 66317 - DNA, 44 bp, Homo sapiens; identical to SEQ ID NO: 17726
  chr3:101575166-101575210
  hypo

SEQ ID NO: 66318 - DNA, 238 bp, Homo sapiens
  chr3:101588884-101589122
  hypo
gcccatcgctggtaccggttcatggcgctggagttggggaaccctgctgtagggaaagaaccccttagctctgcagcagccacgatttcagatggtacaacttgtttaaaataaatagacacactcacttcagagactggtcaagaaatagttgccgagagctcttggaaccaagatgagaacttacattacagtttcttctgcagcctaggatcacagatgacgggcaggggcttta

SEQ ID NO: 66319 - DNA, 29 bp, Homo sapiens
  chr3:102885888-102885917
  hypo
aaacccagtcaaaagctcaaacgccggca

SEQ ID NO: 66320 - DNA, 26 bp, Homo sapiens
  chr3:103645244-103645270
  hypo
acttcgtcaaaaaacaaacaaacaaa

SEQ ID NO: 66321 - DNA, 21 bp, Homo sapiens
  chr3:105174273-105174294
  hypo
cgacaccgtctcaaaaaaaaa

SEQ ID NO: 66322 - DNA, 174 bp, Homo sapiens
  chr3:106350365-106350539
  hypo
ttgtttggggatggcctcagccggaatggcctttgcgccacatggtttttcattgtcgggtagctcaactcgtgcttgttcacatagtggctgggcaggtttccaggtgagtgaagagaagtatcaagatcttttatgtctatgttcagaaccggcacctttcttctgccacat

SEQ ID NO: 66323 - DNA, 31 bp, Homo sapiens
  chr3:106554231-106554262
  hypo
ttttttgtttgtttgttgagacggagtctcg

SEQ ID NO: 66324 - DNA, 92 bp, Homo sapiens
  chr3:107520014-107520106
  hypo
acacaacaccgaggtcggggagacgcggagcagtactccagaaatgcctgccgtgtctgcgttctttagcctcgctgcgctggctgaagtgg

SEQ ID NO: 66325 - DNA, 106 bp, Homo sapiens; identical to SEQ ID NO: 17729
  chr3:107530307-107530413
  hypo

SEQ ID NO: 66326 - DNA, 30 bp, Homo sapiens
  chr3:107552851-107552881
  hypo
cccgatgttctccacgtgactcgactctgc

SEQ ID NO: 66327 - DNA, 31 bp, Homo sapiens
  chr3:107718612-107718643
  hypo
gatattagagttggctgggcacggtggctca

SEQ ID NO: 66328 - DNA, 30 bp, Homo sapiens
  chr3:107749983-107750013
  hypo
tggaaaccatgtttgcggctgctttaaact

SEQ ID NO: 66329 - DNA, 85 bp, Homo sapiens
  chr3:107750327-107750412
  hypo
cttaacattttcctggaactccggtgaggctccccgagcatgggactttttagctccgtctgacgactgatccctgcagttaact

SEQ ID NO: 66330 - DNA, 87 bp, Homo sapiens
  chr3:107771804-107771891
  hypo
actccatctcaaaaaataaaaaaacccaaaaaaacaaataaatacagaataagaatcctacagatggaaaagcgttgaacagaaaca

SEQ ID NO: 66331 - DNA, 30 bp, Homo sapiens
  chr3:107836747-107836777
  hypo
tcattgcaaggaatcgaagccataaagtct

SEQ ID NO: 66332 - DNA, 240 bp, Homo sapiens
  chr3:108836863-108837103
  hypo
gacgcagctgggcccgctgaagcgcagggtacctgtcgtccatgccctcgaacacgacccgcgcaactcaaggggacaaggacacctgaccggcagccgttcgcctgcgcccgcgcccactcccacgcccacgctcacgcgcagagggcgggttcagcaaacacgtgctcccccttgcggcgggaccgcgaagctcccactgcgtcgtcgactcagttgtctcgcgaggtttgttgcttg

SEQ ID NO: 66333 - DNA, 28 bp, Homo sapiens
  chr3:108918697-108918725
  hypo
cctatcttaaaagttgttctccggggga

SEQ ID NO: 66334 - DNA, 30 bp, Homo sapiens; identical to SEQ ID NO: 2692
  chr3:108976491-108976521
  hypo

SEQ ID NO: 66335 - DNA, 30 bp, Homo sapiens
  chr3:109035627-109035657
  hypo
tacaatataatcattttaggccgggcgcgg

SEQ ID NO: 66336 - DNA, 121 bp, Homo sapiens
  chr3:109035956-109036077
  hypo
tgaaaatctatgggaagaatctatattggaatagcttagggaaactttagagaagattacactttttgaggaagagcttaccagtcgtggaagtagtcaatacaaacagggaacagactcc

SEQ ID NO: 66337 - DNA, 146 bp, Homo sapiens; identical to SEQ ID NO: 17733
  chr3:109061755-109061901
  hypo

SEQ ID NO: 66338 - DNA, 28 bp, Homo sapiens
  chr3:111281074-111281102
  hypo
cctccccgaataacaacttctttgaagt

SEQ ID NO: 66339 - DNA, 124 bp, Homo sapiens; identical to SEQ ID NO: 2694
  chr3:111393431-111393555
  hypo

SEQ ID NO: 66340 - DNA, 20 bp, Homo sapiens
  chr3:111469485-111469505
  hypo
aaatctaaaaataaaattcc

SEQ ID NO: 66341 - DNA, 30 bp, Homo sapiens
  chr3:112021542-112021572
  hypo
ggcagacatctgaaccgtggtaaggttttg

SEQ ID NO: 66342 - DNA, 30 bp, Homo sapiens
  chr3:112021858-112021888
  hypo
gcatgtgaacccacccgggacacgagagac

SEQ ID NO: 66343 - DNA, 17 bp, Homo sapiens
  chr3:112186070-112186087
  hypo
tgcgaggattatagacg

SEQ ID NO: 66344 - DNA, 22 bp, Homo sapiens
  chr3:112207083-112207105
  hypo
tttttttttgagacagagtctc

SEQ ID NO: 66345 - DNA, 121 bp, Homo sapiens
  chr3:112207344-112207465
  hypo
aggcgtgagccaccgcactgggcctagcccagtaagtttatgcaaacttaccataccctcatatccccactccctagcaaatgtctgatgctattttgtgtgagatgcatcactccttttt

SEQ ID NO: 66346 - DNA, 42 bp, Homo sapiens
  chr3:112249241-112249283
  hypo
ctgtctccaaaaaaaaaaggcggggggggtgatataagcaaa

SEQ ID NO: 66347 - DNA, 31 bp, Homo sapiens; identical to SEQ ID NO: 17739
  chr3:112539318-112539349
  hypo

SEQ ID NO: 66348 - DNA, 39 bp, Homo sapiens; identical to SEQ ID NO: 17740
  chr3:112543789-112543828
  hypo

SEQ ID NO: 66349 - DNA, 987 bp, Homo sapiens; identical to SEQ ID NO: 39490
  chr3:112930655-112931642
  hypo

SEQ ID NO: 66350 - DNA, 30 bp, Homo sapiens
  chr3:112998762-112998792
  hypo
agcggtcgcgtgtacgagaggcccgtggca

SEQ ID NO: 66351 - DNA, 30 bp, Homo sapiens; identical to SEQ ID NO: 17742
  chr3:113005188-113005218
  hypo

SEQ ID NO: 66352 - DNA, 1137 bp, Homo sapiens; identical to SEQ ID NO: 39492
  chr3:113251173-113252310
  hypo

SEQ ID NO: 66353 - DNA, 30 bp, Homo sapiens
  chr3:113412708-113412738
  hypo
aaggtcaacgtcaacgtctgtagcaaaagc

SEQ ID NO: 66354 - DNA, 24 bp, Homo sapiens
  chr3:113473364-113473388
  hypo
agcgacaccctgtctcaaaagtaa

SEQ ID NO: 66355 - DNA, 79 bp, Homo sapiens; identical to SEQ ID NO: 39495
  chr3:113557397-113557476
  hypo

SEQ ID NO: 66356 - DNA, 30 bp, Homo sapiens
  chr3:113599901-113599931
  hypo
gttctatgccccagcgacttagaggtatca

SEQ ID NO: 66357 - DNA, 30 bp, Homo sapiens
  chr3:113822398-113822428
  hypo
tccttcttctgcgccgtagtcacccacctc

SEQ ID NO: 66358 - DNA, 253 bp, Homo sapiens
  chr3:113957888-113958141
  hypo
ggtttgcatgcccccgtgacgagtggtctgcaggtctctggtgtcacctcccagtacggggtcctctggggctggtccagctgctcccacttcttccaggttaagatcatggacatgtcctgcaccactgcctcggatgtcgctgcaatggagcaagacaaaagccacgcggcacctgcatccgcatatgcagagagtacttccgactacagataccagagagccgcgtgcagcctccgccagccgaactaca

SEQ ID NO: 66359 - DNA, 30 bp, Homo sapiens
  chr3:114069711-114069741
  hypo
cagcctggctgtcccgcgccgccccaggcc

SEQ ID NO: 66360 - DNA, 231 bp, Homo sapiens; identical to SEQ ID NO: 17746
  chr3:114070277-114070508
  hypo

SEQ ID NO: 66361 - DNA, 30 bp, Homo sapiens
  chr3:114649472-114649502
  hypo
ggcgacctcacaggcggcgcctgctgatgg

SEQ ID NO: 66362 - DNA, 703 bp, Homo sapiens; identical to SEQ ID NO: 39500
  chr3:115377287-115377990
  hypo

SEQ ID NO: 66363 - DNA, 29 bp, Homo sapiens
  chr3:115502400-115502429
  hypo
caagagcgaaacgccgtctcaaaagaaaa

SEQ ID NO: 66364 - DNA, 30 bp, Homo sapiens; identical to SEQ ID NO: 2707
  chr3:115881799-115881829
  hypo

SEQ ID NO: 66365 - DNA, 26 bp, Homo sapiens
  chr3:118290927-118290953
  hypo
tgtttgtttgtttgtttgagacgaag

SEQ ID NO: 66366 - DNA, 212 bp, Homo sapiens
  chr3:118864572-118864784
  hypo
agttttgtggtcctcgtgcagctggttgtgtgttcatctgttgacatttggaggtgcggtgggggatgttaatcagaggagcagtacctgagagagggcctctttctcacacactgcggagaacctctgtgaacaaggaagagggtaacactctaggtggcgatgcacggagccccgtggcctggttgctcggcagggtgaggagaagctgt

SEQ ID NO: 66367 - DNA, 39 bp, Homo sapiens; identical to SEQ ID NO: 17749
  chr3:119011021-119011060
  hypo

SEQ ID NO: 66368 - DNA, 97 bp, Homo sapiens
  chr3:119342486-119342583
  hypo
cagcctgcttccctgacgctgggtgtgtggagagggagcagggccgttgctgtatttaatgagttaattctctctttcttttttttttttttttttt

SEQ ID NO: 66369 - DNA, 45 bp, Homo sapiens
  chr3:119432909-119432954
  hypo
gagtagaaatgctggagcagccgggcgcggtggctcacgcctgta

SEQ ID NO: 66370 - DNA, 43 bp, Homo sapiens; identical to SEQ ID NO: 17750
  chr3:119517357-119517400
  hypo

SEQ ID NO: 66371 - DNA, 31 bp, Homo sapiens; identical to SEQ ID NO: 17751
  chr3:119687780-119687811
  hypo

SEQ ID NO: 66372 - DNA, 21 bp, Homo sapiens
  chr3:119755627-119755648
  hypo
agactccgactcaaaaaaaaa

SEQ ID NO: 66373 - DNA, 32 bp, Homo sapiens
  chr3:119827278-119827310
  hypo
ccaccacgctcggccagtttaagtcttaagtg

SEQ ID NO: 66374 - DNA, 30 bp, Homo sapiens
  chr3:119885172-119885202
  hypo
acctcaggtacatccgatcccaggggagag

SEQ ID NO: 66375 - DNA, 30 bp, Homo sapiens
  chr3:120026677-120026707
  hypo
tcggcctcatcctccgtgaccagggcaact

SEQ ID NO: 66376 - DNA, 159 bp, Homo sapiens
  chr3:120064576-120064735
  hypo
gagcatagcctaaacctttaccgattcttagcagtaacgagaaataaggcacgcaagtgaaaaatgaaaacagtgacgttaaagatatcatacattattggtgtcaaagacacaatgaacaataaacacagatagcacggttgttagcccagaaaactg

SEQ ID NO: 66377 - DNA, 31 bp, Homo sapiens; identical to SEQ ID NO: 2716
  chr3:120068919-120068950
  hypo

SEQ ID NO: 66378 - DNA, 42 bp, Homo sapiens
  chr3:120150380-120150422
  hypo
cagttatggctggatgcggtggctcacgcctgttatcccagc

SEQ ID NO: 66379 - DNA, 102 bp, Homo sapiens
  chr3:120150481-120150583
  hypo
caatatagcaagatcctgtctcttaaaaaaaaaagaaaaagagaaaaaaggaaataaaaatagttctgagttctgacctcactgcatcggaggaggagggtt

SEQ ID NO: 66380 - DNA, 30 bp, Homo sapiens
  chr3:120174413-120174443
  hypo
acattgattcctttcgcatccagcttgctt

SEQ ID NO: 66381 - DNA, 39 bp, Homo sapiens
  chr3:120313289-120313328
  hypo
gcgtgagccaccgcgcccggccaaactgccaaatgtggg

SEQ ID NO: 66382 - DNA, 726 bp, Homo sapiens; identical to SEQ ID NO: 39521
  chr3:120626866-120627592
  hypo

SEQ ID NO: 66383 - DNA, 37 bp, Homo sapiens
  chr3:121215301-121215338
  hypo
atgagccaccgcgcccggcaatcagtaccttaatgag

SEQ ID NO: 66384 - DNA, 30 bp, Homo sapiens; identical to SEQ ID NO: 17757
  chr3:121215804-121215834
  hypo

SEQ ID NO: 66385 - DNA, 1 bp, Homo sapiens
  chr3:121280224-121280225
  hypo
c

SEQ ID NO: 66386 - DNA, 30 bp, Homo sapiens
  chr3:121348594-121348624
  hypo
tagtgagagggcagcggtaccaaagccttt

SEQ ID NO: 66387 - DNA, 213 bp, Homo sapiens; identical to SEQ ID NO: 17758
  chr3:121438458-121438671
  hypo

SEQ ID NO: 66388 - DNA, 95 bp, Homo sapiens; identical to SEQ ID NO: 17759
  chr3:121500623-121500718
  hypo

SEQ ID NO: 66389 - DNA, 21 bp, Homo sapiens
  chr3:121511496-121511517
  hypo
agactccgtctcaaaaaaaaa

SEQ ID NO: 66390 - DNA, 102 bp, Homo sapiens
  chr3:121563923-121564025
  hypo
tgaaaagctctgatgccgaaagaacaaagagtttgtggaataagtgactttacgtagtaaatcatagtataatgaaaaatgggatgggcgcggtggctcacc

SEQ ID NO: 66391 - DNA, 30 bp, Homo sapiens; identical to SEQ ID NO: 2722
  chr3:121634394-121634424
  hypo

SEQ ID NO: 66392 - DNA, 361 bp, Homo sapiens
  chr3:121637755-121638116
  hypo
agaaatctctgtggccactaccgcctctgtctgggccttgctctggcccactgggctcgctcagcctgcgactggactgggcatgtagcgagcagcttctgtgttgggtgcggcatctagacaaggggaacacggtggcgcccaaaaactcggagatgctagcaattgcagagtcctaagaggtgttatagctcctgctcagggagtcccaaggtctgagcccccagaaatgttacagctgttcactcctgtagttcaacgagcaggagcatgttacaactctctcctgtagtctagcgagcgggagcgtgttacggctcttttattcccgctgcccatagcttggcgagctgcccagggg

SEQ ID NO: 66393 - DNA, 34 bp, Homo sapiens
  chr3:121638471-121638505
  hypo
caggaaccggcaagtcggttttcaggctttaaac

SEQ ID NO: 66394 - DNA, 11 bp, Homo sapiens
  chr3:121657605-121657616
  hypo
gctgttcctat

SEQ ID NO: 66395 - DNA, 30 bp, Homo sapiens
  chr3:121712094-121712124
  hypo
agtgcgagccgcggcggtgggcccgccagc

SEQ ID NO: 66396 - DNA, 241 bp, Homo sapiens; identical to SEQ ID NO: 17764
  chr3:122003335-122003576
  hypo

SEQ ID NO: 66397 - DNA, 29 bp, Homo sapiens
  chr3:122140551-122140580
  hypo
ccgcacccggccactagcttttctaagac

SEQ ID NO: 66398 - DNA, 77 bp, Homo sapiens; identical to SEQ ID NO: 17765
  chr3:122231235-122231312
  hypo

SEQ ID NO: 66399 - DNA, 26 bp, Homo sapiens
  chr3:122234248-122234274
  hypo
attaagggccgggcgcggtggctcac

SEQ ID NO: 66400 - DNA, 45 bp, Homo sapiens; identical to SEQ ID NO: 39534
  chr3:122296693-122296738
  hypo

SEQ ID NO: 66401 - DNA, 30 bp, Homo sapiens
  chr3:122355327-122355357
  hypo
actgcttaagtggagcggctaccgttatgc

SEQ ID NO: 66402 - DNA, 181 bp, Homo sapiens; identical to SEQ ID NO: 17766
  chr3:122451546-122451727
  hypo

SEQ ID NO: 66403 - DNA, 164 bp, Homo sapiens; identical to SEQ ID NO: 2728
  chr3:122514391-122514555
  hypo

SEQ ID NO: 66404 - DNA, 92 bp, Homo sapiens
  chr3:122573578-122573670
  hypo
tacccaggtagaagaagaaatcgtttggtggacagctggcaatccctgtcacaagtgtaatgaaaaatatgactcaaaggctgggcgcggtg

SEQ ID NO: 66405 - DNA, 32 bp, Homo sapiens
  chr3:122573969-122574001
  hypo
aaatatgactcgaaaaacaacaaaaggtagaa

SEQ ID NO: 66406 - DNA, 30 bp, Homo sapiens; identical to SEQ ID NO: 17769
  chr3:122604764-122604794
  hypo

SEQ ID NO: 66407 - DNA, 30 bp, Homo sapiens
  chr3:122612195-122612225
  hypo
gaagactttagctcccgatatgtgtcccca

SEQ ID NO: 66408 - DNA, 30 bp, Homo sapiens; identical to SEQ ID NO: 17770
  chr3:122629778-122629808
  hypo

SEQ ID NO: 66409 - DNA, 30 bp, Homo sapiens
  chr3:122645374-122645404
  hypo
cctccagcaggaatcggccccccacgtcat

SEQ ID NO: 66410 - DNA, 30 bp, Homo sapiens; identical to SEQ ID NO: 39541
  chr3:122705777-122705807
  hypo

SEQ ID NO: 66411 - DNA, 31 bp, Homo sapiens
  chr3:122762423-122762454
  hypo
ctactaattctgctggcgactggctttgaaa

SEQ ID NO: 66412 - DNA, 70 bp, Homo sapiens; identical to SEQ ID NO: 2729
  chr3:122785819-122785889
  hypo

SEQ ID NO: 66413 - DNA, 30 bp, Homo sapiens
  chr3:122840239-122840269
  hypo
tcttctccacaggccgagaccaggtgtgtc

SEQ ID NO: 66414 - DNA, 31 bp, Homo sapiens
  chr3:122844185-122844216
  hypo
gtaaggaagatgttaccgttctcttcatttt

SEQ ID NO: 66415 - DNA, 31 bp, Homo sapiens
  chr3:123061284-123061315
  hypo
cctgatgtgtggggagcggggctgactacct

SEQ ID NO: 66416 - DNA, 31 bp, Homo sapiens; identical to SEQ ID NO: 17772
  chr3:123064299-123064330
  hypo

SEQ ID NO: 66417 - DNA, 31 bp, Homo sapiens
  chr3:123161050-123161081
  hypo
cctgggaaacacatgacggcaggttgcaccc

SEQ ID NO: 66418 - DNA, 436 bp, Homo sapiens; identical to SEQ ID NO: 17773
  chr3:123166197-123166633
  hypo

SEQ ID NO: 66419 - DNA, 1077 bp, Homo sapiens; identical to SEQ ID NO: 39545
  chr3:123167490-123168567
  hypo

SEQ ID NO: 66420 - DNA, 30 bp, Homo sapiens; identical to SEQ ID NO: 39547
  chr3:123170279-123170309
  hypo

SEQ ID NO: 66421 - DNA, 43 bp, Homo sapiens
  chr3:123200211-123200254
  hypo
tgaactctcataattttaaaacgctggtaaccaaaacaattta

SEQ ID NO: 66422 - DNA, 30 bp, Homo sapiens; identical to SEQ ID NO: 17775
  chr3:123339402-123339432
  hypo

SEQ ID NO: 66423 - DNA, 30 bp, Homo sapiens; identical to SEQ ID NO: 17776
  chr3:123340799-123340829
  hypo

SEQ ID NO: 66424 - DNA, 31 bp, Homo sapiens
  chr3:123356920-123356951
  hypo
atgtagcagatgaccccgatgctccacatgt

SEQ ID NO: 66425 - DNA, 21 bp, Homo sapiens
  chr3:123498992-123499013
  hypo
ttttatggttgggcgcggtgg

SEQ ID NO: 66426 - DNA, 31 bp, Homo sapiens
  chr3:123528975-123529006
  hypo
gagtgcccacaatacccgctaggactataaa

SEQ ID NO: 66427 - DNA, 44 bp, Homo sapiens; identical to SEQ ID NO: 17777
  chr3:123667349-123667393
  hypo

SEQ ID NO: 66428 - DNA, 89 bp, Homo sapiens; identical to SEQ ID NO: 39550
  chr3:123752027-123752116
  hypo

SEQ ID NO: 66429 - DNA, 254 bp, Homo sapiens
  chr3:123813449-123813703
  hypo
ggctcggtctgcacacggcgttgttctgcacttgttcctttgttgctgtgaaaccggctcccggcacagtcagcctctgtgtgggaggactggtggctgtctttgcaggcaggcatttgcttagagcaggctgtgtgcgagcccagcgtcaagtgattccggcctcctcgagtcagcggtggtgggatgaggctctgccgaggggactggctgtgaaggatgagttcagggtgggatgacggaccgcttctggg

SEQ ID NO: 66430 - DNA, 313 bp, Homo sapiens
  chr3:124103486-124103799
  hypo
atgaggcacctagctggtgcccgcctgcaggctgctcgcttgctgagaggcggcgtgccagctccgcgcaccgcgcctcagtgccagatcagggagctgtcagctcagcgcccacgcccctccgcttcagctccggggagccccagggtgggctgctggaaggcgcgactgcaacttgactttgcctcactgttgttgctggcagaatacgtacaccaatgcggacaagctcctagaagcagcagagcagttggctcagacgggggaatgtgaccccgaggagatctacaaggcagctcgacacctggaggtg

SEQ ID NO: 66431 - DNA, 95 bp, Homo sapiens
  chr3:124126551-124126646
  hypo
agcacatacactaaactgaaacgatacagagattagcatgggccctgacgcacaaatacgtgaagcattccataaattttttttttattttttat

SEQ ID NO: 66432 - DNA, 209 bp, Homo sapiens; identical to SEQ ID NO: 17780
  chr3:124281714-124281923
  hypo

SEQ ID NO: 66433 - DNA, 31 bp, Homo sapiens
  chr3:124331583-124331614
  hypo
aagtttctaatttcagcgactttgtctgtct

SEQ ID NO: 66434 - DNA, 31 bp, Homo sapiens
  chr3:124377424-124377455
  hypo
tttcagaaataccagacgtcatccatccata

SEQ ID NO: 66435 - DNA, 96 bp, Homo sapiens
  chr3:124436153-124436249
  hypo
agtagctttctatatccgagacatcatggaggctctgcagtaccttcacaactgcagggttgcacatttggacataaaggtaataagaagtggcaa

SEQ ID NO: 66436 - DNA, 29 bp, Homo sapiens
  chr3:124440790-124440819
  hypo
gcaaaattctgtctcgaaaaaaaaggaaa

SEQ ID NO: 66437 - DNA, 85 bp, Homo sapiens
  chr3:124465923-124466008
  hypo
caaccttgacttgggctcaagcgatccgctcaagtagctggaactactctcaagtagctctcaagagcctctcgagtggctggaa

SEQ ID NO: 66438 - DNA, 52 bp, Homo sapiens
  chr3:124466067-124466119
  hypo
ggaggttctcactgtgactcagtgtgtgcccgacagcagagcccacaccact

SEQ ID NO: 66439 - DNA, 402 bp, Homo sapiens
  chr3:124515255-124515657
  hypo
tcctggcacaggagaagttgtcgcactcacagaaaggcccatagatcttgccaaactcgctctcgaagcaggagcactggttgcagctgcagtccccacgcccgctgcacagtggcttgccctctgcctcccggcacaggttctggtacacgctctggttctccccatcctggcactcgcacctggtgcccaggtagccggggctgcactcacacaggccgcagacataggtcccgctcccgttgcacctggcgctgttgggttccagccccacgctgcagccgcacgtgcagttgtaggtgacccccacctccaggctgtcccggaatcccaccggccgcagggcaaacacatgctccgtgtgtctgctgggacagcttcgggcctccaatgatacttcaa

SEQ ID NO: 66440 - DNA, 31 bp, Homo sapiens
  chr3:124516871-124516902
  hypo
cttaattctattctttcggctagaataaagc

SEQ ID NO: 66441 - DNA, 194 bp, Homo sapiens
  chr3:124518662-124518856
  hypo
atgaggtctacctcatcggggtgcgcagggagagccagcctggcttactaaagggaccccttgatggtgatccccaaagtggtggccagaggcatctccacatctttctgccgtgggctgggaacgatttgagcctgcagataggataagagtggggactatgcctgcccgaagccacccgtggggccatcaag

SEQ ID NO: 66442 - DNA, 524 bp, Homo sapiens; identical to SEQ ID NO: 39555
  chr3:124605379-124605903
  hypo

SEQ ID NO: 66443 - DNA, 30 bp, Homo sapiens; identical to SEQ ID NO: 17783
  chr3:124609499-124609529
  hypo

SEQ ID NO: 66444 - DNA, 617 bp, Homo sapiens; identical to SEQ ID NO: 2736
  chr3:124773768-124774385
  hypo

SEQ ID NO: 66445 - DNA, 31 bp, Homo sapiens
  chr3:124884655-124884686
  hypo
agtgccaggccagctgcgaggcccagagagc

SEQ ID NO: 66446 - DNA, 186 bp, Homo sapiens
  chr3:124885657-124885843
  hypo
tatcaagtgaaaggatccatgcggtatgatacaatgtatataaaattttcaaacgctgaacaatagccgacatcacttagggccagctacatatggtagaaaaataaaaacacatggggaggatgagcctccggacagtggtcccttggggaacaggacggggtcggtgaaggtacagcttaaact

SEQ ID NO: 66447 - DNA, 40 bp, Homo sapiens; identical to SEQ ID NO: 17786
  chr3:125026373-125026413
  hypo

SEQ ID NO: 66448 - DNA, 27 bp, Homo sapiens
  chr3:125041099-125041126
  hypo
gacttcgtgatccaccagcctcagcct

SEQ ID NO: 66449 - DNA, 21 bp, Homo sapiens
  chr3:125042500-125042521
  hypo
ggccttataaagaacaattgc

SEQ ID NO: 66450 - DNA, 30 bp, Homo sapiens
  chr3:125050009-125050039
  hypo
aatacgttaggcaaacgcccatcccgccag

SEQ ID NO: 66451 - DNA, 57 bp, Homo sapiens; identical to SEQ ID NO: 17789
  chr3:125078754-125078811
  hypo

SEQ ID NO: 66452 - DNA, 150 bp, Homo sapiens
  chr3:125261067-125261217
  hypo
taaaagcttgtaccaaactaccgtaagaaaggtatatttaaaaagttacgccaatgattaacacaaagcaaaagaagttaggttatggaaagcgatgctttttcttttctttcttttttttttgagatgcagttccgttcttgtggagtg

SEQ ID NO: 66453 - DNA, 33 bp, Homo sapiens
  chr3:125412959-125412992
  hypo
tgatagccagggtagacggtgacattacttcat

SEQ ID NO: 66454 - DNA, 31 bp, Homo sapiens; identical to SEQ ID NO: 2737
  chr3:125635404-125635435
  hypo

SEQ ID NO: 66455 - DNA, 31 bp, Homo sapiens
  chr3:125652362-125652393
  hypo
aggttggccaggtgcccgtcacaccaacccc

SEQ ID NO: 66456 - DNA, 30 bp, Homo sapiens
  chr3:125677975-125678005
  hypo
tcagccctgccggccgcattgggcactccc

SEQ ID NO: 66457 - DNA, 43 bp, Homo sapiens
  chr3:125678378-125678421
  hypo
aggccagccgccccggcggtcgctgctgcgcctcaggtagccc

SEQ ID NO: 66458 - DNA, 31 bp, Homo sapiens; identical to SEQ ID NO: 17792
  chr3:125679194-125679225
  hypo

SEQ ID NO: 66459 - DNA, 171 bp, Homo sapiens
  chr3:125679707-125679878
  hypo
ctcaggactctgcctccgccacccccgtgggcacacactgaagggttgcccgcagggtctccagatgagggggagcctgcaggatgggcagcaccttctcctggcttccccacagtcccctgcagcatcctgtctggctgttgacctagatgcagtcgggcagacctcaca

SEQ ID NO: 66460 - DNA, 187 bp, Homo sapiens
  chr3:125774552-125774739
  hypo
ctcaatgattccaatacgctgcccaaaccatgctaggggagaaacagactgtgataagcaaatctccctcagcacacgcctccactgcagggagaccgccatggccctcccacctgcacccccagggctgcaaaccttgtccttttttaccaggggccacgccaggatgctgcgggctgggcacact

SEQ ID NO: 66461 - DNA, 35 bp, Homo sapiens
  chr3:125793293-125793328
  hypo
aggaaaagaaatgagacgtatccagcttgaaaagg

SEQ ID NO: 66462 - DNA, 94 bp, Homo sapiens
  chr3:125793387-125793481
  hypo
ggatccacatacacacaaactattacagccagtaaacaagttcagcaaggtgtaggactggaggacgcaggtcaatacacgaaagtcagttttt

SEQ ID NO: 66463 - DNA, 31 bp, Homo sapiens; identical to SEQ ID NO: 17793
  chr3:125828922-125828953
  hypo

SEQ ID NO: 66464 - DNA, 31 bp, Homo sapiens; identical to SEQ ID NO: 17794
  chr3:125846598-125846629
  hypo

SEQ ID NO: 66465 - DNA, 30 bp, Homo sapiens
  chr3:125875511-125875541
  hypo
ctgagccgccctgccgctcaggccatgtga

SEQ ID NO: 66466 - DNA, 190 bp, Homo sapiens
  chr3:125977271-125977461
  hypo
ccatccaggagtcactcgcatggctactgtcacctgtctgctcaatagggctagtggggctgggatggcctctctggcgtgtctggcagttggtgctggcggtcgactggggcaccttagtttctctccacatgacccctgccctctgaaggctggactggtctttcctatagcacggtgggctcagggc

SEQ ID NO: 66467 - DNA, 277 bp, Homo sapiens; identical to SEQ ID NO: 39567
  chr3:126074821-126075098
  hypo

SEQ ID NO: 66468 - DNA, 215 bp, Homo sapiens; identical to SEQ ID NO: 39568
  chr3:126075302-126075517
  hypo

SEQ ID NO: 66469 - DNA, 37 bp, Homo sapiens
  chr3:126137172-126137209
  hypo
ccggtagtcacctgggcgtggacgcaaagcagtggcc

SEQ ID NO: 66470 - DNA, 319 bp, Homo sapiens; identical to SEQ ID NO: 39573
  chr3:126195082-126195401
  hypo

SEQ ID NO: 66471 - DNA, 31 bp, Homo sapiens
  chr3:126202246-126202277
  hypo
ctctcccctcggcctccggggtaccgtccag

SEQ ID NO: 66472 - DNA, 88 bp, Homo sapiens
  chr3:126218193-126218281
  hypo
cacataggaagggtagcggaactctgtcctgccagcacctttcttctccacatccgctcctgtgggcagagcccggacagtcaccacc

SEQ ID NO: 66473 - DNA, 31 bp, Homo sapiens; identical to SEQ ID NO: 17796
  chr3:126220860-126220891
  hypo

SEQ ID NO: 66474 - DNA, 90 bp, Homo sapiens
  chr3:126253862-126253952
  hypo
cagccaggagacacacagcatcgctgtcctcagccgggagacagacagacagcatccctgtccccagccgggagacagatagacagcatc

SEQ ID NO: 66475 - DNA, 153 bp, Homo sapiens; identical to SEQ ID NO: 17797
  chr3:126254314-126254467
  hypo

SEQ ID NO: 66476 - DNA, 31 bp, Homo sapiens; identical to SEQ ID NO: 17798
  chr3:126258809-126258840
  hypo

SEQ ID NO: 66477 - DNA, 30 bp, Homo sapiens; identical to SEQ ID NO: 17799
  chr3:126261822-126261852
  hypo

SEQ ID NO: 66478 - DNA, 30 bp, Homo sapiens
  chr3:126374822-126374852
  hypo
agatactgtgctgggcgctgcggatttggc

SEQ ID NO: 66479 - DNA, 30 bp, Homo sapiens
  chr3:126452008-126452038
  hypo
tccctgcccacgggcgaaggcagcatcagc

SEQ ID NO: 66480 - DNA, 54 bp, Homo sapiens
  chr3:126465314-126465368
  hypo
catctcccctggcagcagtggcgcttggtgtgcgagtgcatccagggcaggatc

SEQ ID NO: 66481 - DNA, 30 bp, Homo sapiens; identical to SEQ ID NO: 17800
  chr3:126465979-126466009
  hypo

SEQ ID NO: 66482 - DNA, 229 bp, Homo sapiens
  chr3:126472158-126472387
  hypo
ttctgtgaagaagtcaaggttcggcagcaggagctgtgccgtccttttgcccacctggaggctgaggaggaggggcactgaggcactcgtagctgggtgcagatcattccaaagacattccaggagcatgctgcagcccgcctgcatgcctgccatagctgcggcttgtagaccggccttggggtggagttctctgtaaacattggacggggcctctgtagaagtggca

SEQ ID NO: 66483 - DNA, 84 bp, Homo sapiens
  chr3:126501194-126501278
  hypo
gtctgttctggcctctgactgcgagctgtctgacattacatttcattgacggttgagtaaggcccaggccgatgtcatacgctt

SEQ ID NO: 66484 - DNA, 423 bp, Homo sapiens
  chr3:126577517-126577940
  hypo
gacacagccagaatgcggcaggcccactgttagcccacatctgtttgcacccggcccgctgggctcttgcctcctctgagttctataattctgagtacctcctcttctgaccaggttgctccatgtccattcagtctaatagagttgctaaaaccctgtgtcaggtgctgtgagacaagggtcatgggcacagaatgagggctgggtgtggagctacacctcactggagtgccccataggcaccgcagaatcgcctgctgctccgttgtctgtcccccgctgaggtttgagccctgtgcatattctagcacttgccacactctgtcttgttagcgcctgtggctgtctgctctgcatctgtgagcacagtccttgctggtctgattcatcaggtgattcatcgccaagggctgaggatgcagt

SEQ ID NO: 66485 - DNA, 165 bp, Homo sapiens
  chr3:126676241-126676406
  hypo
gctcttgtcttctgcaggccccgcagggtggagcccgtctgctcagggttgcaggcccagattctccactgctaccgagatcgcccgcatgaggtgctgctgtgctcggacctggtcaaggcataccagcgctgcgtgagcgccgcccacaaggtaaggccttgc

SEQ ID NO: 66486 - DNA, 118 bp, Homo sapiens
  chr3:126707398-126707516
  hypo
caggaccagagcaccgaggcccaaggccccagcctgccatgccgctgccaccgcggagcctgcaggtgctcctgctgctgctgctgttgctgctgctgctgccgggcatgtgggctga

SEQ ID NO: 66487 - DNA, 30 bp, Homo sapiens
  chr3:126707739-126707769
  hypo
cagtcctgcccccacggcctgggcagtact

SEQ ID NO: 66488 - DNA, 30 bp, Homo sapiens
  chr3:126711245-126711275
  hypo
agcccatgtgtgcccgcgagtggggctggg

SEQ ID NO: 66489 - DNA, 403 bp, Homo sapiens
  chr3:126724695-126725098
  hypo
ctggggagagtctcgcggttctcaacccctcacactgagcaggaggcaagcagggcagatcccaggccctggtcacctgggggctgagggggctggatgcgtgtttgatgcgactgatggtggcagctaggagggtctccgggcaagttgttcccctgtctggacttgccctgtgtgggagtcctgggcaagcagtcctggtgactcagccatgctgctcgtgcaggagaccagcgggtggtgaaactctacctaaagtccaaggagacagggaagaagtttgcgtctgtggacttcgtcttctacaactgcagcgtccaccagtcgtgagtgtctctaggcccctccgcccgcctgggcctgggctacttgccccactcccgtccctgtggtcccactgtgc

SEQ ID NO: 66490 - DNA, 329 bp, Homo sapiens
  chr3:126730804-126731133
  hypo
gcccacagatcctgccctccacgcagatctacgtgccagtgggagtggtaaaacccatcaccctggccgcacggaacctgccacagccacagtcaggccagcgtggatatgagtgcctcttccacatcccgggcagcccggcccgtgtcaccgccctgcgcttcaacagctccagcctgcagtgccagaattcctcggtgaggtggccagggcaggggctgggggccgtgagccggaatgggccggttatcctcacggccctgggtcctggcgtgtgcttgttcataaagggcagtgcacgtgctcacgtgtatctctgatgagtcaga

SEQ ID NO: 66491 - DNA, 30 bp, Homo sapiens
  chr3:126736636-126736666
  hypo
tacacggtgctcatcggctccacaccctgt

SEQ ID NO: 66492 - DNA, 30 bp, Homo sapiens
  chr3:126737186-126737216
  hypo
ggacagcctgctgacgctgcctgccattgt

SEQ ID NO: 66493 - DNA, 182 bp, Homo sapiens
  chr3:126747048-126747230
  hypo
atgagaatgcacctgaggtgccggtgaaggggctggactgtgacacggtcacccaggccaaggagaagctgctggacgctgcctacaagggcgtgccctactcccagcggcccaaggccgcggacatggacctgggtgagcgggcggggccacggctgcccggggtgtgtgctggagcagag

SEQ ID NO: 66494 - DNA, 30 bp, Homo sapiens; identical to SEQ ID NO: 17807
  chr3:126755850-126755880
  hypo

SEQ ID NO: 66495 - DNA, 76 bp, Homo sapiens
  chr3:126756348-126756424
  hypo
ccacactctgtgagttgggtgcgctcagcccaggtgacacattggagcccttggcggagactaaaacaccagtgcc

SEQ ID NO: 66496 - DNA, 169 bp, Homo sapiens
  chr3:126894144-126894313
  hypo
aacaaatgtatctatggatcccgacaagaaagcggaaaggcagtaccacttgccatcggaggtacctgagaacacaagcacaatgagcgcctgaaacagccagcgagccaacttgcgattctgcctgccaaggctctggcctgacgccggtttgctctctattcaaaag

SEQ ID NO: 66497 - DNA, 30 bp, Homo sapiens
  chr3:127006272-127006302
  hypo
tttcccaagcgtcacgcagcgatgcggacc

SEQ ID NO: 66498 - DNA, 30 bp, Homo sapiens
  chr3:127007386-127007416
  hypo
gtgggggcgggggccgcaggagctggtctt

SEQ ID NO: 66499 - DNA, 30 bp, Homo sapiens
  chr3:127285884-127285914
  hypo
agagcctcccggagccggctttaaacactc

SEQ ID NO: 66500 - DNA, 30 bp, Homo sapiens
  chr3:127288516-127288546
  hypo
cccctccagctgtcccgagggaaacggcag

SEQ ID NO: 66501 - DNA, 80 bp, Homo sapiens; identical to SEQ ID NO: 17809
  chr3:127292369-127292449
  hypo

SEQ ID NO: 66502 - DNA, 30 bp, Homo sapiens
  chr3:127323635-127323665
  hypo
gttgtctgcctgcccgagggactgggaagc

SEQ ID NO: 66503 - DNA, 30 bp, Homo sapiens
  chr3:127323950-127323980
  hypo
agccacggccacaacgtcttcaaggagcgc

SEQ ID NO: 66504 - DNA, 285 bp, Homo sapiens
  chr3:127325613-127325898
  hypo
gtcctgagtgccagtcggccggcccctttgaggtcaacatggaggaggtgagagaggacacaaggtctgctgccagctgtccttaggggtgcccagtatgcaggacctgactggcctctcaggctgtggaagaccagtgtgggcagccgcaagaagcaagatagaattgtgtgttggccacaccctggggtggacccagtctgtctggccagtggacttagcttggcccacacgacgtttttaggaattcaagtcaatatttaagtcaggcgatttgtttaaacc

SEQ ID NO: 66505 - DNA, 203 bp, Homo sapiens; identical to SEQ ID NO: 17811
  chr3:127326109-127326312
  hypo

SEQ ID NO: 66506 - DNA, 30 bp, Homo sapiens
  chr3:127333578-127333608
  hypo
gtgttgaggtttccacgctgcaggtgtcat

SEQ ID NO: 66507 - DNA, 30 bp, Homo sapiens
  chr3:127339593-127339623
  hypo
ggcggaggcccacgcgcgcatccatctgcg

SEQ ID NO: 66508 - DNA, 469 bp, Homo sapiens; identical to SEQ ID NO: 39583
  chr3:127347861-127348330
  hypo

SEQ ID NO: 66509 - DNA, 269 bp, Homo sapiens
  chr3:127366355-127366624
  hypo
tacccaactcagacaggctcacgggcctgtctgataaaaggggactttattggctgaagaacgggggtccaggaacaggcttccagctccagcactcggcgtgccgccctcaacgtgctggagcctgccctgtcccatcagtcatgctcggctttcccttgctggcttcgttctcaggcaggctggtcctgggcaccggcttggagagcccagtagctccacactgtcgtcccatcactcagcaccccgcagaaagggagctctgcctt

SEQ ID NO: 66510 - DNA, 30 bp, Homo sapiens; identical to SEQ ID NO: 17813
  chr3:127373504-127373534
  hypo

SEQ ID NO: 66511 - DNA, 30 bp, Homo sapiens
  chr3:127393182-127393212
  hypo
ctcagaccatgaacccgtcctgacccaggc

SEQ ID NO: 66512 - DNA, 30 bp, Homo sapiens
  chr3:127393501-127393531
  hypo
gtgcatgcatgcgtgcgtgcattcaaaggc

SEQ ID NO: 66513 - DNA, 810 bp, Homo sapiens
  chr3:127394386-127395196
  hypo
gcctggattataggtgtgagctgccacgcccaggcttgtttttcttaatagtccctgccatcgttaggtagtgggttgattgtcctgcctcactagagtataagttcagcaggacagggacctgtgtctcgttcactgctgtgctccagtgtgtgggacaagcccagccaccaagtcagctctccgttctgtgttgtctgtcttccgtgtgagtgagtatgtgcctgtgtgagtgcacacagacgtgcccattcgcctagcccttgactgggagggtgttggggtcagagtgggcccagggtaatttgggaaggcatcgccagagattcggagccccatgtgtgggaaggtggggaggagggacagggagattagaatttcccccaggccccttccctgctaactggtgagccctgcctcccccaggagcccgctgcgaggccaacaccttcgatggtgagcgctgcctctatggggcactgagtgaccccatccgccgggctctacgcgattacaagcaggtcacggcttcctgcaggaggcgggattactatgacgacttcttgcagcggtgagccagggcacacgaggggtgcagcatggggtgcggtggccctggtgggtgtggcgagtctgctctgactgtggcctgcactgggttctgagtgctccgaggaatggggtggggctgtgccaagtatcctccctcctggcttgtccctccccaggcttctagagcagggcatccacagtgacgtggtctttgtagtacacgggaagccattccgggtgcatcgctgcgtcctgggt

SEQ ID NO: 66514 - DNA, 159 bp, Homo sapiens
  chr3:127395762-127395921
  hypo
atgacagctgaggtcccgcaggccctcatcctccccactgcccccaggccgcctggacattggcgtagagcatgtgagtgactgtgagcgcctggccaagcaatgccagctgtgggacctgctcagcgacctggaggccaagtgcgagaaggtgtctga

SEQ ID NO: 66515 - DNA, 31 bp, Homo sapiens; identical to SEQ ID NO: 17816
  chr3:127401716-127401747
  hypo

SEQ ID NO: 66516 - DNA, 30 bp, Homo sapiens
  chr3:127408594-127408624
  hypo
ccaaggacagggaccggctctggagtggcc

SEQ ID NO: 66517 - DNA, 30 bp, Homo sapiens
  chr3:127439454-127439484
  hypo
cggggcggaggagcgcggcagtggatgcga

SEQ ID NO: 66518 - DNA, 144 bp, Homo sapiens
  chr3:127439916-127440060
  hypo
aggattggcaagaaccagaggcgaaatgagtaccatgccggcgaagtggcccggcctctctgcggccgtgaggatggcgatggcgcctccctgtaatgcagaatgggcagagctgctgtgttcggcttgcaccagtgcacacat

SEQ ID NO: 66519 - DNA, 26 bp, Homo sapiens
  chr3:127512901-127512927
  hypo
cagccctccaggaggccgaggtgggc

SEQ ID NO: 66520 - DNA, 30 bp, Homo sapiens
  chr3:127523159-127523189
  hypo
gggcggaccagacccggctcaaatgtcacg

SEQ ID NO: 66521 - DNA, 30 bp, Homo sapiens; identical to SEQ ID NO: 17818
  chr3:127534320-127534350
  hypo

SEQ ID NO: 66522 - DNA, 181 bp, Homo sapiens; identical to SEQ ID NO: 17819
  chr3:127534723-127534904
  hypo

SEQ ID NO: 66523 - DNA, 225 bp, Homo sapiens; identical to SEQ ID NO: 2755
  chr3:127634094-127634319
  hypo

SEQ ID NO: 66524 - DNA, 81 bp, Homo sapiens
  chr3:127637228-127637309
  hypo
tatttctgacacagatttacacgtgtaaagacagaacagcatgttagccaggcgcggtggctcacgcctgtaatcccagca

SEQ ID NO: 66525 - DNA, 31 bp, Homo sapiens; identical to SEQ ID NO: 17821
  chr3:127783728-127783759
  hypo

SEQ ID NO: 66526 - DNA, 82 bp, Homo sapiens
  chr3:127788442-127788524
  hypo
tactttgagatcttcgttaaggagcaaagcgaggttggcagcatgggggccctgctcttctgagcccgtctcccggacaggt

SEQ ID NO: 66527 - DNA, 30 bp, Homo sapiens
  chr3:127790447-127790477
  hypo
actgtcactgtggacgccaaaatggcataa

SEQ ID NO: 66528 - DNA, 899 bp, Homo sapiens; identical to SEQ ID NO: 39589
  chr3:127794263-127795162
  hypo

SEQ ID NO: 66529 - DNA, 30 bp, Homo sapiens; identical to SEQ ID NO: 39591
  chr3:127795649-127795679
  hypo

SEQ ID NO: 66530 - DNA, 214 bp, Homo sapiens
  chr3:127816139-127816353
  hypo
tacctgatgacacagttgcctcggttggatgcaaagatgacgatgggagcgatagaagactccagggcgcggtgcaggtaggtgaagcactcaatgtccagcatgtggacctcatcaacaaacagcacacccgggaccagctcagcaatgccctggtcgatgtacttgttcaccaccttattaatctcccctcgaagtttgtctaggagatgca

SEQ ID NO: 66531 - DNA, 74 bp, Homo sapiens
  chr3:127865561-127865635
  hypo
ggccccatctgcctgccgctgtgtgcacgtgtgtgtacgtacatctgtgtgtctctgtgcgtgtgcacgtgtgt

SEQ ID NO: 66532 - DNA, 27 bp, Homo sapiens
  chr3:127873581-127873608
  hypo
acgtccggcctgtaccaacattttctg

SEQ ID NO: 66533 - DNA, 211 bp, Homo sapiens
  chr3:127993822-127994033
  hypo
aagcaaggggtgagatggatgcgggcttgctgggcttaccgaaacttgtatgcctgtaggcctctgggggtgcagtcatttcctccctctagctgtgggctgcggtgcctttggaataggatgcgcatgtcatcgaggggtctagcagtgacctgaggactggcaggacctcgatactggggcccaaagcggtttcctctcctgggaaatg

SEQ ID NO: 66534 - DNA, 30 bp, Homo sapiens; identical to SEQ ID NO: 17824
  chr3:127998756-127998786
  hypo

SEQ ID NO: 66535 - DNA, 30 bp, Homo sapiens; identical to SEQ ID NO: 17825
  chr3:128037666-128037696
  hypo

SEQ ID NO: 66536 - DNA, 30 bp, Homo sapiens; identical to SEQ ID NO: 17826
  chr3:128038297-128038327
  hypo

SEQ ID NO: 66537 - DNA, 111 bp, Homo sapiens
  chr3:128056453-128056564
  hypo
atgcagtcactctcttcagagcggctgggcgtttatctggacctgtcacaaccaggtttctcagcagctcctgtgctgggcactgaggacgcagcatagggagagcacagt

SEQ ID NO: 66538 - DNA, 56 bp, Homo sapiens; identical to SEQ ID NO: 17827
  chr3:128070500-128070556
  hypo

SEQ ID NO: 66539 - DNA, 137 bp, Homo sapiens
  chr3:128080965-128081102
  hypo
cacctgggaggctgcgctcccaaagctcatcttggcaagccgtctgtcccaccgctgccaccctcccctctgcctcagtgtgccaggcatcagcactcactcacagaggcaggctggatggcgggtgggacaacagc

SEQ ID NO: 66540 - DNA, 118 bp, Homo sapiens
  chr3:128110727-128110845
  hypo
ctgtgccagagggaggcgcccagcaccatggatgccctgtgggggccattggagggagtctgcaagcgcttccagaagggcgagtgcctgagtgtgccccagccgtggcttccctggg

SEQ ID NO: 66541 - DNA, 30 bp, Homo sapiens; identical to SEQ ID NO: 17829
  chr3:128118206-128118236
  hypo

SEQ ID NO: 66542 - DNA, 31 bp, Homo sapiens; identical to SEQ ID NO: 17830
  chr3:128122245-128122276
  hypo

SEQ ID NO: 66543 - DNA, 30 bp, Homo sapiens; identical to SEQ ID NO: 17831
  chr3:128127093-128127123
  hypo

SEQ ID NO: 66544 - DNA, 31 bp, Homo sapiens
  chr3:128141569-128141600
  hypo
ctgacaaggaggtgcccgggagggtgggaga

SEQ ID NO: 66545 - DNA, 103 bp, Homo sapiens
  chr3:128179464-128179567
  hypo
ttcattccagttcctgatagacgtcaccccctcagaaatggaggccactctgttggtttgtttttttgttttgttttgtttttcgtttttgtcgtttttttgt

SEQ ID NO: 66546 - DNA, 206 bp, Homo sapiens
  chr3:128182026-128182232
  hypo
ttcttgatgtcctccggggaagcgctggcctgcacgcccagcacttcgtagtagttagccatggccaggggtgtgggtgagaggagagggaacgtggaggccaggtgggcgcaggggcccagctggtcagatggacgggggagaagtggccggtggtctggggcccttcagcaggggcctggctggactccgcaagctctaggcaa

SEQ ID NO: 66547 - DNA, 162 bp, Homo sapiens; identical to SEQ ID NO: 39601
  chr3:128273889-128274051
  hypo

SEQ ID NO: 66548 - DNA, 346 bp, Homo sapiens; identical to SEQ ID NO: 2761
  chr3:128274308-128274654
  hypo

SEQ ID NO: 66549 - DNA, 40 bp, Homo sapiens; identical to SEQ ID NO: 17835
  chr3:128290741-128290781
  hypo

SEQ ID NO: 66550 - DNA, 174 bp, Homo sapiens
  chr3:128340996-128341170
  hypo
cgacacttactctgtcgcacagatcagagccctctgtcttcagcctggactgcagcagtgcaatctcactggtcaaggccttgtgttcagtctccaggctcttcttgccactgttgagggtggagatgtcccgggattgcttgtacctattgacggtctcgtcaaagtgacggt

SEQ ID NO: 66551 - DNA, 46 bp, Homo sapiens
  chr3:128401971-128402017
  hypo
tgggattacaggtgtgagccacttcgccaggccaagagggcattct

SEQ ID NO: 66552 - DNA, 121 bp, Homo sapiens
  chr3:128526382-128526503
  hypo
caggtggccacaaagcgggcacaggcctggtgctacagcaaaaacaacattccctactttgagaccagtgccaaggaggccatcaacgtggagcaggcgttccagacgattgcacggaatg

SEQ ID NO: 66553 - DNA, 31 bp, Homo sapiens
  chr3:128662254-128662285
  hypo
tatggatttgccggttcgggacatttcacaa

SEQ ID NO: 66554 - DNA, 30 bp, Homo sapiens
  chr3:128689155-128689185
  hypo
gcgagaggaggatgacgactggcacctgtg

SEQ ID NO: 66555 - DNA, 183 bp, Homo sapiens; identical to SEQ ID NO: 2764
  chr3:128720163-128720346
  hypo

SEQ ID NO: 66556 - DNA, 115 bp, Homo sapiens; identical to SEQ ID NO: 2765
  chr3:128720418-128720533
  hypo

SEQ ID NO: 66557 - DNA, 699 bp, Homo sapiens; identical to SEQ ID NO: 2766
  chr3:128720566-128721265
  hypo

SEQ ID NO: 66558 - DNA, 227 bp, Homo sapiens; identical to SEQ ID NO: 17839
  chr3:128737540-128737767
  hypo

SEQ ID NO: 66559 - DNA, 30 bp, Homo sapiens; identical to SEQ ID NO: 17840
  chr3:128766078-128766108
  hypo

SEQ ID NO: 66560 - DNA, 31 bp, Homo sapiens
  chr3:128768446-128768477
  hypo
gaaaaattattttcaacgaatgatgctagaa

SEQ ID NO: 66561 - DNA, 30 bp, Homo sapiens
  chr3:128782773-128782803
  hypo
ctgcctaagaacaatcgtaaaagctggcat

SEQ ID NO: 66562 - DNA, 30 bp, Homo sapiens
  chr3:128783015-128783045
  hypo
tcagtccccaacccccgacatagggtgcta

SEQ ID NO: 66563 - DNA, 164 bp, Homo sapiens; identical to SEQ ID NO: 17841
  chr3:128785013-128785177
  hypo

SEQ ID NO: 66564 - DNA, 30 bp, Homo sapiens
  chr3:128785898-128785928
  hypo
ctctgtgtcctctggcgcaattgctccagc

SEQ ID NO: 66565 - DNA, 26 bp, Homo sapiens
  chr3:128791367-128791393
  hypo
ttttattttttttttttgagtcggag

SEQ ID NO: 66566 - DNA, 85 bp, Homo sapiens; identical to SEQ ID NO: 17843
  chr3:128791632-128791717
  hypo

SEQ ID NO: 66567 - DNA, 31 bp, Homo sapiens
  chr3:128822756-128822787
  hypo
atttttctttagtgcacgtcactgcctgaca

SEQ ID NO: 66568 - DNA, 30 bp, Homo sapiens; identical to SEQ ID NO: 17844
  chr3:128889309-128889339
  hypo

SEQ ID NO: 66569 - DNA, 3 bp, Homo sapiens
  chr3:128908890-128908893
  hypo
ctg

SEQ ID NO: 66570 - DNA, 31 bp, Homo sapiens
  chr3:128933594-128933625
  hypo
ctagacctgtattaagcgctttatagacatt

SEQ ID NO: 66571 - DNA, 68 bp, Homo sapiens
  chr3:128973539-128973607
  hypo
acaactaccggggcccggccgtgcgagccctctgccagatcactgatgtgagtcgtgccggttcctcc

SEQ ID NO: 66572 - DNA, 32 bp, Homo sapiens; identical to SEQ ID NO: 17845
  chr3:129008730-129008762
  hypo

SEQ ID NO: 66573 - DNA, 24 bp, Homo sapiens
  chr3:129011640-129011664
  hypo
atttcaagtcgactaacaagaaga

SEQ ID NO: 66574 - DNA, 479 bp, Homo sapiens
  chr3:129045162-129045641
  hypo
cagcccagccgaggccggaccagcagcgccctcgcctccctgaggctgcctgctcctgtcccacctccctggcctaccacccagctctggggaacgattctccatgactggtcccttagccctggggaccggacggcaccacgtctcactctccccagatcccagcttggggagatgtcggggacgtggtgtagcatggagtgtgggctgctgggcaggctgacttcagggatccttcccacgcagcctcccacttcagcctgcatttacaaacgagcccactgttcccctgcacaagagcaatctgccgccatgcttccatctccccagcatctgccggtgccgggccacgccgtaatttatttcctcgcctggttactctaggtgtcacatgtcaaattgaccacaaatccaggacaatccagctccaacctgccttggtgtctgggatttctgttatcattcggctcaggtgcaga

SEQ ID NO: 66575 - DNA, 31 bp, Homo sapiens
  chr3:129072726-129072757
  hypo
aaccctgcccaaacctcgatagcagggcctt

SEQ ID NO: 66576 - DNA, 30 bp, Homo sapiens; identical to SEQ ID NO: 17847
  chr3:129120402-129120432
  hypo

SEQ ID NO: 66577 - DNA, 30 bp, Homo sapiens
  chr3:129183556-129183586
  hypo
aaagtaaagatcgagcggccggggggctcc

SEQ ID NO: 66578 - DNA, 30 bp, Homo sapiens; identical to SEQ ID NO: 17848
  chr3:129221577-129221607
  hypo

SEQ ID NO: 66579 - DNA, 117 bp, Homo sapiens; identical to SEQ ID NO: 17849
  chr3:129221881-129221998
  hypo

SEQ ID NO: 66580 - DNA, 30 bp, Homo sapiens
  chr3:129224227-129224257
  hypo
ttggagcccctcaaccgaaagccctcattg

SEQ ID NO: 66581 - DNA, 172 bp, Homo sapiens
  chr3:129231140-129231312
  hypo
ttctctcactgcaggaagatccgttcagtgtccatcgtcctgaaactcttttcaacatctccaggttcctgctgcacagcctgcccaaggacaccccctcgggcatctctaaagtgtatcctttctcttatccctcctccgtcccaccaccgttcttgtctaatggccccaa

SEQ ID NO: 66582 - DNA, 31 bp, Homo sapiens
  chr3:129233461-129233492
  hypo
tgcctggcctgggttccgtttgaagagagac

SEQ ID NO: 66583 - DNA, 167 bp, Homo sapiens
  chr3:129246204-129246371
  hypo
cagcacttgcacaggccgccccagacaccccacttcattcctgggaggtgtcatcatgttgcttggacgacggggagagggggacctgccagtgttggcctccattttcccccagtcatctgcccccaaggctctgactactttctttctcacggtacatcctgcta

SEQ ID NO: 66584 - DNA, 83 bp, Homo sapiens
  chr3:129247537-129247620
  hypo
ggtgggagcagccacgggtcagccacaagggccacagccatgaatggcacagaaggccctaacttctacgtgcccttctccaa

SEQ ID NO: 66585 - DNA, 31 bp, Homo sapiens
  chr3:129247919-129247950
  hypo
tctttgccaccctgggcggtatgagccgggt

SEQ ID NO: 66586 - DNA, 30 bp, Homo sapiens
  chr3:129251272-129251302
  hypo
ggtgggcggcctcacggctctgagggtcca

SEQ ID NO: 66587 - DNA, 112 bp, Homo sapiens
  chr3:129252487-129252599
  hypo
agaacccactgggtgacgatgaggcctctgctaccgtgtccaagacggagacgagccaggtggccccggcctaagacctgcctaggactctgtggccgactataggcgtctc

SEQ ID NO: 66588 - DNA, 30 bp, Homo sapiens
  chr3:129261753-129261783
  hypo
gcagagggcacaggcgagatcaagcatctc

SEQ ID NO: 66589 - DNA, 30 bp, Homo sapiens
  chr3:129266338-129266368
  hypo
ctggggagcagcgccggggcacgtcggtgg

SEQ ID NO: 66590 - DNA, 31 bp, Homo sapiens
  chr3:129266573-129266604
  hypo
gcctctgtgagtgctgcggcctctactggaa

SEQ ID NO: 66591 - DNA, 31 bp, Homo sapiens
  chr3:129275268-129275299
  hypo
gatctgaggggagcagcggagtcagccgggc

SEQ ID NO: 66592 - DNA, 31 bp, Homo sapiens
  chr3:129275852-129275883
  hypo
attgaggcccagcccccgacccccgatccct

SEQ ID NO: 66593 - DNA, 30 bp, Homo sapiens
  chr3:129281733-129281763
  hypo
gcccgcacgctcagcgagtccatgccacag

SEQ ID NO: 66594 - DNA, 225 bp, Homo sapiens; identical to SEQ ID NO: 17850
  chr3:129290481-129290706
  hypo

SEQ ID NO: 66595 - DNA, 30 bp, Homo sapiens
  chr3:129293110-129293140
  hypo
cctcgagggcactgcgcatgcgccgtgccg

SEQ ID NO: 66596 - DNA, 30 bp, Homo sapiens
  chr3:129303299-129303329
  hypo
cagggcctgggacccgagccacagtgcgga

SEQ ID NO: 66597 - DNA, 1258 bp, Homo sapiens; identical to SEQ ID NO: 39619
  chr3:129324075-129325333
  hypo

SEQ ID NO: 66598 - DNA, 53 bp, Homo sapiens
  chr3:129370401-129370454
  hypo
cacaaggaataaagtgctgaacgtcctgttgcgagtcttcatgagggggacca

SEQ ID NO: 66599 - DNA, 87 bp, Homo sapiens; identical to SEQ ID NO: 17852
  chr3:129372594-129372681
  hypo

SEQ ID NO: 66600 - DNA, 53 bp, Homo sapiens
  chr3:129373805-129373858
  hypo
ctaacctggatgtcccgggcccgttcataggactgatacgcgattttttcttc

SEQ ID NO: 66601 - DNA, 53 bp, Homo sapiens
  chr3:129398050-129398103
  hypo
ctcttccctcagacacctgcacggcttgctccgtcacctcctttaagtctttg

SEQ ID NO: 66602 - DNA, 16 bp, Homo sapiens
  chr3:129510236-129510252
  hypo
gacacaccagaaattt

SEQ ID NO: 66603 - DNA, 40 bp, Homo sapiens
  chr3:129511159-129511199
  hypo
ctgaaaagacaaatagaggcacgatgcatttgctgatata

SEQ ID NO: 66604 - DNA, 48 bp, Homo sapiens; identical to SEQ ID NO: 2770
  chr3:129693151-129693199
  hypo

SEQ ID NO: 66605 - DNA, 194 bp, Homo sapiens; identical to SEQ ID NO: 2771
  chr3:129693304-129693498
  hypo

SEQ ID NO: 66606 - DNA, 16 bp, Homo sapiens
  chr3:129916680-129916696
  hypo
aaaaaaaaaaaaaaga

SEQ ID NO: 66607 - DNA, 30 bp, Homo sapiens
  chr3:129979327-129979357
  hypo
gtatttgacatttacgactgcccctttgaa

SEQ ID NO: 66608 - DNA, 404 bp, Homo sapiens
  chr3:129982957-129983361
  hypo
gcgaggcttcagcccgccccttacagggaaccgccccccctgggccacgccctggagtggacgctggagaatgtgctcctggcagcccctcggccgcggaaggcacaagtcctcttcgccatcgtggccagcgagacaagtagctgggacagggagaagctatggactctgtccctggaggccaaatgcaagggcattaccctctttgtgctggccttgggtccgggtgtggggacccatgagctagccgagctagccgagctggtcagtgctccctctgagcagcatctactgcgcctacaaggggtctcagagccagaggttaactacgctcagggattcactcgggccttcctgaacctcctaaaaagtgagcagtccccgggaactggggcaccttgggt

SEQ ID NO: 66609 - DNA, 164 bp, Homo sapiens; identical to SEQ ID NO: 39626
  chr3:130064445-130064609
  hypo

SEQ ID NO: 66610 - DNA, 119 bp, Homo sapiens; identical to SEQ ID NO: 39627
  chr3:130064780-130064899
  hypo

SEQ ID NO: 66611 - DNA, 30 bp, Homo sapiens; identical to SEQ ID NO: 2773
  chr3:130132286-130132316
  hypo

SEQ ID NO: 66612 - DNA, 276 bp, Homo sapiens; identical to SEQ ID NO: 39629
  chr3:130235787-130236063
  hypo

SEQ ID NO: 66613 - DNA, 101 bp, Homo sapiens; identical to SEQ ID NO: 2775
  chr3:130236173-130236274
  hypo

SEQ ID NO: 66614 - DNA, 44 bp, Homo sapiens; identical to SEQ ID NO: 17859
  chr3:130237351-130237395
  hypo

SEQ ID NO: 66615 - DNA, 245 bp, Homo sapiens
  chr3:130424514-130424759
  hypo
ttacaagttgtaattcgaatctgataggtggatggtaagattgtactacttaaaaccggtattactggttttttattttggacagttgtcacttctggaacctacaaaacaaatagaattctaactatttacgtcgtaagcaaagtatatttgaagacagaagtgtatgcatgtttttatctataaattataacagctttttgtcctcattaatgtaccaattttaaaatcgatataattacaat

SEQ ID NO: 66616 - DNA, 115 bp, Homo sapiens
  chr3:130460752-130460867
  hypo
agtcctcaacggtatcgatgggttcttggaaactgcaactttaagtacaacaacgtacaacaaaaccatttattttctcaccatttcattataatgaaaacgacattatttgatg

SEQ ID NO: 66617 - DNA, 43 bp, Homo sapiens
  chr3:130464452-130464495
  hypo
atgagcctttactatgtgttccgtgctgtgcttggggctatga

SEQ ID NO: 66618 - DNA, 27 bp, Homo sapiens
  chr3:130473843-130473870
  hypo
gagagagaaagagtctcgctctgtagc

SEQ ID NO: 66619 - DNA, 26 bp, Homo sapiens
  chr3:130474109-130474135
  hypo
gtgagccaccgcgcccggccagaaca

SEQ ID NO: 66620 - DNA, 30 bp, Homo sapiens
  chr3:130548531-130548561
  hypo
atgaaaaagacttgacggactgaaactgcc

SEQ ID NO: 66621 - DNA, 65 bp, Homo sapiens; identical to SEQ ID NO: 17860
  chr3:131100367-131100432
  hypo

SEQ ID NO: 66622 - DNA, 152 bp, Homo sapiens; identical to SEQ ID NO: 17861
  chr3:132034533-132034685
  hypo

SEQ ID NO: 66623 - DNA, 31 bp, Homo sapiens; identical to SEQ ID NO: 17862
  chr3:132398974-132399005
  hypo

SEQ ID NO: 66624 - DNA, 37 bp, Homo sapiens; identical to SEQ ID NO: 17863
  chr3:132399370-132399407
  hypo

SEQ ID NO: 66625 - DNA, 30 bp, Homo sapiens
  chr3:132442076-132442106
  hypo
ctgctatgtgcttcccgcgatatctctctc

SEQ ID NO: 66626 - DNA, 231 bp, Homo sapiens; identical to SEQ ID NO: 39638
  chr3:132756306-132756537
  hypo

SEQ ID NO: 66627 - DNA, 538 bp, Homo sapiens; identical to SEQ ID NO: 2778
  chr3:132756941-132757479
  hypo

SEQ ID NO: 66628 - DNA, 452 bp, Homo sapiens; identical to SEQ ID NO: 39640
  chr3:132757536-132757988
  hypo

SEQ ID NO: 66629 - DNA, 139 bp, Homo sapiens
  chr3:133217916-133218055
  hypo
ttacaggcatgagccaccgtgcccggcctgttctatgtgttcttatagtgcaaagcatttgtggaaaacgtgcccttgttagagagttatgttcttctgtactggtatctttgtatgccttttgcgttctaatcattta

SEQ ID NO: 66630 - DNA, 30 bp, Homo sapiens; identical to SEQ ID NO: 17866
  chr3:133265114-133265144
  hypo

SEQ ID NO: 66631 - DNA, 50 bp, Homo sapiens; identical to SEQ ID NO: 2780
  chr3:133276457-133276507
  hypo

SEQ ID NO: 66632 - DNA, 30 bp, Homo sapiens; identical to SEQ ID NO: 17868
  chr3:133520559-133520589
  hypo

SEQ ID NO: 66633 - DNA, 109 bp, Homo sapiens; identical to SEQ ID NO: 17869
  chr3:133560512-133560621
  hypo

SEQ ID NO: 66634 - DNA, 30 bp, Homo sapiens; identical to SEQ ID NO: 17870
  chr3:133610700-133610730
  hypo

SEQ ID NO: 66635 - DNA, 561 bp, Homo sapiens; identical to SEQ ID NO: 39647
  chr3:133646156-133646717
  hypo

SEQ ID NO: 66636 - DNA, 205 bp, Homo sapiens; identical to SEQ ID NO: 17871
  chr3:133648426-133648631
  hypo

SEQ ID NO: 66637 - DNA, 237 bp, Homo sapiens; identical to SEQ ID NO: 39648
  chr3:133748100-133748337
  hypo

SEQ ID NO: 66638 - DNA, 550 bp, Homo sapiens; identical to SEQ ID NO: 39649
  chr3:133748401-133748951
  hypo

SEQ ID NO: 66639 - DNA, 53 bp, Homo sapiens; identical to SEQ ID NO: 39650
  chr3:133969906-133969959
  hypo

SEQ ID NO: 66640 - DNA, 31 bp, Homo sapiens
  chr3:134021045-134021076
  hypo
aaagtttgctgactcccgtcttagcagattt

SEQ ID NO: 66641 - DNA, 24 bp, Homo sapiens
  chr3:134042382-134042406
  hypo
gactgcccagctgtgccgggtgca

SEQ ID NO: 66642 - DNA, 94 bp, Homo sapiens
  chr3:134080495-134080589
  hypo
ttgcgcagctcctcttcggctcgagctgcccggccctgcgcattgcccagagcctgctccagcagctcggcacgccgccgctggtcctcgatgg

SEQ ID NO: 66643 - DNA, 1049 bp, Homo sapiens; identical to SEQ ID NO: 2783
  chr3:134092502-134093551
  hypo

SEQ ID NO: 66644 - DNA, 239 bp, Homo sapiens; identical to SEQ ID NO: 39653
  chr3:134093626-134093865
  hypo

SEQ ID NO: 66645 - DNA, 31 bp, Homo sapiens
  chr3:134103115-134103146
  hypo
tttgtaagataccacacggttttccaaagtg

SEQ ID NO: 66646 - DNA, 31 bp, Homo sapiens; identical to SEQ ID NO: 17877
  chr3:134166665-134166696
  hypo

SEQ ID NO: 66647 - DNA, 23 bp, Homo sapiens
  chr3:134202943-134202966
  hypo
ccgggcgcggtggctcgcgcctg

SEQ ID NO: 66648 - DNA, 30 bp, Homo sapiens; identical to SEQ ID NO: 17878
  chr3:134203393-134203423
  hypo

SEQ ID NO: 66649 - DNA, 575 bp, Homo sapiens; identical to SEQ ID NO: 39656
  chr3:134369552-134370127
  hypo

SEQ ID NO: 66650 - DNA, 1984 bp, Homo sapiens; identical to SEQ ID NO: 39658
  chr3:134513850-134515834
  hypo

SEQ ID NO: 66651 - DNA, 30 bp, Homo sapiens; identical to SEQ ID NO: 2788
  chr3:134592951-134592981
  hypo

SEQ ID NO: 66652 - DNA, 86 bp, Homo sapiens
  chr3:135601877-135601963
  hypo
aactccaactgcaataatccccgtgaattacagaggagttttaagaaccaataccagccgggcacgctggctcacgcctttaatcc

SEQ ID NO: 66653 - DNA, 834 bp, Homo sapiens; identical to SEQ ID NO: 39662
  chr3:135684609-135685443
  hypo

SEQ ID NO: 66654 - DNA, 173 bp, Homo sapiens
  chr3:135741865-135742038
  hypo
cagaagtgtgctggacagttgcgaagtaaacatttacttttcaaagatgatgatcaaggaaacatctctacgaagggacccggatttaaggggagagctagctttcctggcaaggggctgtgattttgttctcccttcacggtttaagaagcggctgaagtcatttcagcaga

SEQ ID NO: 66655 - DNA, 29 bp, Homo sapiens
  chr3:135866169-135866198
  hypo
cactccagcctaggcgacagagcaagacc

SEQ ID NO: 66656 - DNA, 117 bp, Homo sapiens; identical to SEQ ID NO: 17884
  chr3:135870036-135870153
  hypo

SEQ ID NO: 66657 - DNA, 23 bp, Homo sapiens
  chr3:135900460-135900483
  hypo
gttttaaaatcaaaacttggccg

SEQ ID NO: 66658 - DNA, 30 bp, Homo sapiens
  chr3:135996508-135996538
  hypo
ctgcacagaagagatcgcacagtgtgtggg

SEQ ID NO: 66659 - DNA, 29 bp, Homo sapiens
  chr3:136314295-136314324
  hypo
gaggctgaggcaggtggatcacgaggtca

SEQ ID NO: 66660 - DNA, 27 bp, Homo sapiens
  chr3:136344867-136344894
  hypo
ctgggcgaaagagtagaactctgtctc

SEQ ID NO: 66661 - DNA, 22 bp, Homo sapiens
  chr3:136375996-136376018
  hypo
taaagaacgtcctctcctacac

SEQ ID NO: 66662 - DNA, 38 bp, Homo sapiens; identical to SEQ ID NO: 17885
  chr3:136582611-136582649
  hypo

SEQ ID NO: 66663 - DNA, 121 bp, Homo sapiens; identical to SEQ ID NO: 17886
  chr3:136582948-136583069
  hypo

SEQ ID NO: 66664 - DNA, 37 bp, Homo sapiens; identical to SEQ ID NO: 17887
  chr3:136583308-136583345
  hypo

SEQ ID NO: 66665 - DNA, 32 bp, Homo sapiens
  chr3:136593311-136593343
  hypo
acgcccggcccgtttacaggtctttaatgaac

SEQ ID NO: 66666 - DNA, 133 bp, Homo sapiens
  chr3:136678362-136678495
  hypo
aaatgttgccaagaaaacatccgtccactaagctgaaacgagaagatgggaggctgaatgagaagaggaaagcccagcatttttcgacttgacattttcttcaatgacgcccgtcttataagtattttcttga

SEQ ID NO: 66667 - DNA, 30 bp, Homo sapiens
  chr3:136729076-136729106
  hypo
ggcccaggtgaagccgagaacctggtctgc

SEQ ID NO: 66668 - DNA, 30 bp, Homo sapiens
  chr3:136753940-136753970
  hypo
tccctctggctctccggctctatctcctct

SEQ ID NO: 66669 - DNA, 121 bp, Homo sapiens
  chr3:137433348-137433469
  hypo
tgggactgggtgccatgaagcaaggggcagcgctagtccgggaccgggtgccatggagcagggggcagcactagtccgggaggctcaggccgtgcaggagcccacggcagggggtggggga

SEQ ID NO: 66670 - DNA, 33 bp, Homo sapiens
  chr3:137561183-137561216
  hypo
taaaagagtctagctattggccgggcaccgtgg

SEQ ID NO: 66671 - DNA, 33 bp, Homo sapiens
  chr3:137561455-137561488
  hypo
gagcaagactccgtctcaagaaaaaaaaaaaaa

SEQ ID NO: 66672 - DNA, 91 bp, Homo sapiens; identical to SEQ ID NO: 17888
  chr3:137717830-137717921
  hypo

SEQ ID NO: 66673 - DNA, 28 bp, Homo sapiens
  chr3:137729017-137729045
  hypo
agcaggagggcggcagcttctcgcaggc

SEQ ID NO: 66674 - DNA, 196 bp, Homo sapiens
  chr3:137783020-137783216
  hypo
actctgatgtgctatgcgaggccactccagtaccacccttgggggagtccgctccacacacatattgtgttagggtccatggcagagtgagggactggggaggagcccactgtgggatgagaccgggctggaagagcagctgctgcaggatgccagacacagagtcagctccgaagctctccgagaggcaggagat

SEQ ID NO: 66675 - DNA, 196 bp, Homo sapiens; identical to SEQ ID NO: 17889
  chr3:137822426-137822622
  hypo

SEQ ID NO: 66676 - DNA, 163 bp, Homo sapiens
  chr3:137831297-137831460
  hypo
tcagcagggcttgtctgaacccgactcagctccacagcttgcgtcctgattaggataggcggacaaaaagccaaatgagagtgttgcatgttacctggaaaccatacaccccaggggcaaggacatcgtgcttttttcagacgaattgtgagcagactgcttt

SEQ ID NO: 66677 - DNA, 30 bp, Homo sapiens
  chr3:137880390-137880420
  hypo
gacaagtaaattgtcggccaggcacagtgg

SEQ ID NO: 66678 - DNA, 25 bp, Homo sapiens
  chr3:137890018-137890043
  hypo
atagcaaaatacaggccgggcgtgg

SEQ ID NO: 66679 - DNA, 32 bp, Homo sapiens; identical to SEQ ID NO: 17891
  chr3:137891418-137891450
  hypo

SEQ ID NO: 66680 - DNA, 18 bp, Homo sapiens
  chr3:138000423-138000441
  hypo
ccccggcctaattgattt

SEQ ID NO: 66681 - DNA, 35 bp, Homo sapiens; identical to SEQ ID NO: 17893
  chr3:138001201-138001236
  hypo

SEQ ID NO: 66682 - DNA, 30 bp, Homo sapiens
  chr3:138009726-138009756
  hypo
tccagaggccatttgcgtacattcgcctga

SEQ ID NO: 66683 - DNA, 42 bp, Homo sapiens
  chr3:138020317-138020359
  hypo
attacaggtgtgagtcactgcgcccagccatattattttcat

SEQ ID NO: 66684 - DNA, 892 bp, Homo sapiens; identical to SEQ ID NO: 39696
  chr3:138066746-138067638
  hypo

SEQ ID NO: 66685 - DNA, 59 bp, Homo sapiens
  chr3:138081463-138081522
  hypo
gcctacattgtactcccgtatggacttggggctagggcagggtccgggggcctccagca

SEQ ID NO: 66686 - DNA, 1021 bp, Homo sapiens; identical to SEQ ID NO: 39697
  chr3:138153255-138154276
  hypo

SEQ ID NO: 66687 - DNA, 202 bp, Homo sapiens
  chr3:138158922-138159124
  hypo
tctgccatcattaaccagtcccgagcctgcttttctctggtgacacataccccacaggaccccactcgctgcctttcatgcctgtccccatctaactgggtgcgcactggggctgccggcagaagcaagcaccaggggaaaaaggtgagccgttcacacaaagcgatgggcattctgaggcgcagagcagtggtccctggga

SEQ ID NO: 66688 - DNA, 126 bp, Homo sapiens; identical to SEQ ID NO: 39699
  chr3:138327441-138327567
  hypo

SEQ ID NO: 66689 - DNA, 147 bp, Homo sapiens
  chr3:138413615-138413762
  hypo
tgcagaagatacctcatctgtcgcaggcagcctacagcatattctcgaacgtactggtctggatagttgaaatccagaagctctagggcctcccgggggggcagtttaggccaaatctgaagcagcgcctgaagctgtttaaaaaat

SEQ ID NO: 66690 - DNA, 27 bp, Homo sapiens
  chr3:138442408-138442435
  hypo
tcatgctttatacggttacatgtttta

SEQ ID NO: 66691 - DNA, 35 bp, Homo sapiens
  chr3:138542242-138542277
  hypo
tacagaaaaaaaaaaaagcaacggtcgggcaaggt

SEQ ID NO: 66692 - DNA, 35 bp, Homo sapiens
  chr3:138542516-138542551
  hypo
cctggcgacagagcgaggctctgtctcaaaaaata

SEQ ID NO: 66693 - DNA, 27 bp, Homo sapiens
  chr3:138572035-138572062
  hypo
aatatttacatgagtggggcacggtgg

SEQ ID NO: 66694 - DNA, 39 bp, Homo sapiens; identical to SEQ ID NO: 17898
  chr3:138577522-138577561
  hypo

SEQ ID NO: 66695 - DNA, 31 bp, Homo sapiens; identical to SEQ ID NO: 17899
  chr3:138634049-138634080
  hypo

SEQ ID NO: 66696 - DNA, 30 bp, Homo sapiens; identical to SEQ ID NO: 17900
  chr3:138647455-138647485
  hypo

SEQ ID NO: 66697 - DNA, 30 bp, Homo sapiens; identical to SEQ ID NO: 39700
  chr3:138654909-138654939
  hypo

SEQ ID NO: 66698 - DNA, 15 bp, Homo sapiens
  chr3:138679565-138679580
  hypo
cgggcacagacgcgc

SEQ ID NO: 66699 - DNA, 31 bp, Homo sapiens
  chr3:138694446-138694477
  hypo
aggttggccagccaggcggagacctgtacac

SEQ ID NO: 66700 - DNA, 37 bp, Homo sapiens
  chr3:138981443-138981480
  hypo
tctgtgatacacagttcggcttcgatgagacagagtt

SEQ ID NO: 66701 - DNA, 28 bp, Homo sapiens
  chr3:139077502-139077530
  hypo
atggagcgaaactctgtctcaaaagaaa

SEQ ID NO: 66702 - DNA, 213 bp, Homo sapiens
  chr3:139180922-139181135
  hypo
gtgaatgaaaaacaccagccccggtcagtaccttaacatgccggttatccaggctctttgtgtactcgtcaaactctactccaacagtgaaatccacatcatagttgcggaatgtgctagtggtttttgtcttgaagttatcaccatcttgatcaataaccttcgtctgagtgagacgtactgcaatcttgcgggtggcaaaatcaatatctg

SEQ ID NO: 66703 - DNA, 808 bp, Homo sapiens; identical to SEQ ID NO: 39717
  chr3:139258159-139258967
  hypo

SEQ ID NO: 66704 - DNA, 63 bp, Homo sapiens; identical to SEQ ID NO: 17906
  chr3:139353010-139353073
  hypo

SEQ ID NO: 66705 - DNA, 1784 bp, Homo sapiens; identical to SEQ ID NO: 39719
  chr3:139653417-139655201
  hypo

SEQ ID NO: 66706 - DNA, 499 bp, Homo sapiens
  chr3:140401391-140401890
  hypo
ctcaattgccccatgtgcagccggctgcgcctgcactcattcatgctgccctgcaaccacagcctgtgcgagaagtgcctgcggcagctgcagaagcacgccgaggtcaccgagaacttcttcatcctcatctgcccagtgtgcgaccgctcgcactgcatgccctacagcaacaagatgcagctgcccgagaactacctgcacgggcgtctcaccaagcgctacatgcaggagcacggctacctcaagtggcgctttgaccgctcctccgggcccatcctctgccaggtctgccgcaacaagcgcatcgcttacaagcgctgcatcacctgccgcctcaacctgtgcaacgactgcctcaaggccttccactcggatgtggccatgcaagaccacgtctttgtggacaccagcgccgaggaacaggacgagaagatctgcatccaccacccatccagccgcatcatcgagtactgccgcaatgacaacaaattgctct

SEQ ID NO: 66707 - DNA, 153 bp, Homo sapiens
  chr3:140434138-140434291
  hypo
cctcctcaaacctgactataaaatccagcacatctgccgtccaccagccttttccacatggagacccgcttctctatagagagagctatttctctttctcttcttttctgtctattaaacctctgctcctaaattcctcgtgtgtgtctatgt

SEQ ID NO: 66708 - DNA, 1423 bp, Homo sapiens; identical to SEQ ID NO: 39720
  chr3:140660222-140661645
  hypo

SEQ ID NO: 66709 - DNA, 30 bp, Homo sapiens; identical to SEQ ID NO: 17909
  chr3:140696571-140696601
  hypo

SEQ ID NO: 66710 - DNA, 30 bp, Homo sapiens; identical to SEQ ID NO: 39721
  chr3:140713624-140713654
  hypo

SEQ ID NO: 66711 - DNA, 794 bp, Homo sapiens; identical to SEQ ID NO: 2830
  chr3:140769507-140770301
  hypo

SEQ ID NO: 66712 - DNA, 182 bp, Homo sapiens; identical to SEQ ID NO: 2831
  chr3:140770407-140770589
  hypo

SEQ ID NO: 66713 - DNA, 1203 bp, Homo sapiens; identical to SEQ ID NO: 39724
  chr3:140770643-140771846
  hypo

SEQ ID NO: 66714 - DNA, 30 bp, Homo sapiens; identical to SEQ ID NO: 17913
  chr3:140784660-140784690
  hypo

SEQ ID NO: 66715 - DNA, 30 bp, Homo sapiens
  chr3:140784974-140785004
  hypo
agtcagtggaggtgcgagagccggcgctgc

SEQ ID NO: 66716 - DNA, 30 bp, Homo sapiens
  chr3:140785458-140785488
  hypo
tgcgctgcccgactcgctgctcgtggtgct

SEQ ID NO: 66717 - DNA, 39 bp, Homo sapiens
  chr3:141053874-141053913
  hypo
taccgcctctgctgccgacactaccgcttctgctgccgt

SEQ ID NO: 66718 - DNA, 233 bp, Homo sapiens
  chr3:141086061-141086294
  hypo
ccagaaggcaacaaagacaagcgtggactctggctcccgccgaggtactctgtaccccgtggctctcggattttgcatctaccacatgccacaggcttgcgtccatccgacctccctagtttctcatccccacttgaacctgatgactgattcgccctcctggctacgctgagtaagccacccacttgccaaacctcagacctggtgttgacgcagtaagaaggcatgaggcc

SEQ ID NO: 66719 - DNA, 242 bp, Homo sapiens
  chr3:141161721-141161963
  hypo
cacaaatgcattttccatcatcgaaacagaaaatagtaataacatgttttccccgctggacttgagggcaagtttcaaaaaggtctccgactccatgagaacagctagcctttgcctggagaggacggacgtctgccacgaggcagagcctgtccgcacacttgccgagcactcatacgctgtttcttccgtagctgaagcttacagaagtcagcctgtacgtgaacatgatggcagttcac

SEQ ID NO: 66720 - DNA, 30 bp, Homo sapiens; identical to SEQ ID NO: 17916
  chr3:141166409-141166439
  hypo

SEQ ID NO: 66721 - DNA, 520 bp, Homo sapiens
  chr3:141174173-141174693
  hypo
cgtgctcgacatctgcgtgagtgtggtgagtggaagagcatcaggccatgtcccaggtctttccaaatcagactccattatttctgacattcctcttcctaaagaccagaggtaggaattcagggccgccattttcgtcgtctcttatcacgatgggaatcagcgttctctgctgctgctcctgctgaacacgacgacattccagccaccgggaactgctcgggactcagtatcattctcagacctaggcaggagcgttccgtgcttgccctcctccacaggtgccccgccgcacggggcaaagagtctgcagggccaacagggatgtgcccccgcaatgtccacgccatccccagagaccgcattctggtacccagaacctgagaattccctgcagactttcaaggcctgttctggccgcttccttgccagtgccacacccctggggcagccaaagggcagctgtttgcaggggttgtggaccgagtttgtgatggagtttcagcgtccacatgtgtgc

SEQ ID NO: 66722 - DNA, 30 bp, Homo sapiens
  chr3:141174926-141174956
  hypo
gacacatgatatatacgcctccatctgtac

SEQ ID NO: 66723 - DNA, 29 bp, Homo sapiens
  chr3:141203918-141203947
  hypo
tgttaaagaaacaggttcaaccgggcgca

SEQ ID NO: 66724 - DNA, 30 bp, Homo sapiens; identical to SEQ ID NO: 17918
  chr3:141319348-141319378
  hypo

SEQ ID NO: 66725 - DNA, 34 bp, Homo sapiens
  chr3:141363514-141363548
  hypo
tgtgagccaccgcgcctggctgagttttctatca

SEQ ID NO: 66726 - DNA, 139 bp, Homo sapiens
  chr3:141481967-141482106
  hypo
cctattcggccatcttggctcctcctccagatcttcttaaggatgaaaaatatgggcttggattcttcccatacctcatgcttcaaatagccgttgatgaccctgaagccatagtgctgtgtttcggtcaaacaacagc

SEQ ID NO: 66727 - DNA, 39 bp, Homo sapiens; identical to SEQ ID NO: 17920
  chr3:141509676-141509715
  hypo

SEQ ID NO: 66728 - DNA, 43 bp, Homo sapiens
  chr3:141524078-141524121
  hypo
agggccaggccttacaggtctcggtatccctggaactcattgc

SEQ ID NO: 66729 - DNA, 214 bp, Homo sapiens; identical to SEQ ID NO: 17921
  chr3:141622401-141622615
  hypo

SEQ ID NO: 66730 - DNA, 18 bp, Homo sapiens
  chr3:141637292-141637310
  hypo
ttttttttttttgagacg

SEQ ID NO: 66731 - DNA, 30 bp, Homo sapiens
  chr3:141654232-141654262
  hypo
ctttcacctactgacggtgttgtctcgctt

SEQ ID NO: 66732 - DNA, 406 bp, Homo sapiens; identical to SEQ ID NO: 17923
  chr3:141656808-141657214
  hypo

SEQ ID NO: 66733 - DNA, 24 bp, Homo sapiens
  chr3:141790269-141790293
  hypo
gaatacacgcgtgagccaccgcac

SEQ ID NO: 66734 - DNA, 29 bp, Homo sapiens
  chr3:141863646-141863675
  hypo
actgggattataggcgtgagtcactgcac

SEQ ID NO: 66735 - DNA, 30 bp, Homo sapiens
  chr3:141868982-141869012
  hypo
gtcattctgtcccgcggaaactgcacacac

SEQ ID NO: 66736 - DNA, 36 bp, Homo sapiens
  chr3:141954423-141954459
  hypo
acaggcatgagccactgtgcccggcccaaggtatat

SEQ ID NO: 66737 - DNA, 31 bp, Homo sapiens
  chr3:141959959-141959990
  hypo
tattaaaagcaaaacacgggcagggcacggt

SEQ ID NO: 66738 - DNA, 30 bp, Homo sapiens
  chr3:141991373-141991403
  hypo
aaatgttggcggggacgtgaagtagcctgg

SEQ ID NO: 66739 - DNA, 20 bp, Homo sapiens
  chr3:142102828-142102848
  hypo
aaggctgggcgcagtggctc

SEQ ID NO: 66740 - DNA, 19 bp, Homo sapiens
  chr3:142103147-142103166
  hypo
aagcataaaagacaagttt

SEQ ID NO: 66741 - DNA, 103 bp, Homo sapiens; identical to SEQ ID NO: 17927
  chr3:142321773-142321876
  hypo

SEQ ID NO: 66742 - DNA, 41 bp, Homo sapiens
  chr3:142354391-142354432
  hypo
ctgagttcgtgccactacacgccagcctgagtgagtgacag

SEQ ID NO: 66743 - DNA, 181 bp, Homo sapiens
  chr3:142499676-142499857
  hypo
aatgattatgaggaactagcccggcaatgtaaaatgtttgctaaggatttacttgcacaagcccggaattctcgtgaattggaagttattctaaaccatacgtctagtgacgagcctcttgacaaacggggattattagaagaaagaatgaatttaagtcgtctaaaacttgctatcaaat

SEQ ID NO: 66744 - DNA, 175 bp, Homo sapiens; identical to SEQ ID NO: 17928
  chr3:142537598-142537773
  hypo

SEQ ID NO: 66745 - DNA, 30 bp, Homo sapiens
  chr3:142681000-142681030
  hypo
tccaaacagatgggcgaaccagtagtctcc

SEQ ID NO: 66746 - DNA, 30 bp, Homo sapiens
  chr3:142681386-142681416
  hypo
gaagagccagctctcgagcataatggggca

SEQ ID NO: 66747 - DNA, 975 bp, Homo sapiens; identical to SEQ ID NO: 2839
  chr3:142682049-142683024
  hypo

SEQ ID NO: 66748 - DNA, 77 bp, Homo sapiens; identical to SEQ ID NO: 17930
  chr3:142683682-142683759
  hypo

SEQ ID NO: 66749 - DNA, 35 bp, Homo sapiens
  chr3:142718176-142718211
  hypo
acagttaagatctaggctgggcgcggtggctcacg

SEQ ID NO: 66750 - DNA, 34 bp, Homo sapiens; identical to SEQ ID NO: 17932
  chr3:142718450-142718484
  hypo

SEQ ID NO: 66751 - DNA, 34 bp, Homo sapiens
  chr3:142725293-142725327
  hypo
taagaatgtacccatttttagcggccgggcacag

SEQ ID NO: 66752 - DNA, 40 bp, Homo sapiens
  chr3:142727624-142727664
  hypo
tttttgatatggagtctctgtcgcctaggcggtagtgcag

SEQ ID NO: 66753 - DNA, 39 bp, Homo sapiens; identical to SEQ ID NO: 17934
  chr3:142727843-142727882
  hypo

SEQ ID NO: 66754 - DNA, 45 bp, Homo sapiens
  chr3:142728139-142728184
  hypo
acagaaagagtgagatggggccgggtgcggtcgctcatgtctgta

SEQ ID NO: 66755 - DNA, 36 bp, Homo sapiens; identical to SEQ ID NO: 17936
  chr3:142788518-142788554
  hypo

SEQ ID NO: 66756 - DNA, 46 bp, Homo sapiens
  chr3:142791152-142791198
  hypo
tattaagactgtcacgcgcgttcgtgtgaagagaccaccaaacaga

SEQ ID NO: 66757 - DNA, 17 bp, Homo sapiens
  chr3:142796897-142796914
  hypo
taaattagccaggcatg

SEQ ID NO: 66758 - DNA, 94 bp, Homo sapiens
  chr3:142820240-142820334
  hypo
aaagagaaacctatagaaggacgaagatatatcgtctgaaaactaatgagatgttacattttgaaccaaaatcgcatctaacttttcagcatgt

SEQ ID NO: 66759 - DNA, 522 bp, Homo sapiens; identical to SEQ ID NO: 2840
  chr3:142837796-142838318
  hypo

SEQ ID NO: 66760 - DNA, 167 bp, Homo sapiens; identical to SEQ ID NO: 2841
  chr3:142838479-142838646
  hypo

SEQ ID NO: 66761 - DNA, 196 bp, Homo sapiens; identical to SEQ ID NO: 2842
  chr3:142838876-142839072
  hypo

SEQ ID NO: 66762 - DNA, 321 bp, Homo sapiens; identical to SEQ ID NO: 2843
  chr3:142839204-142839525
  hypo

SEQ ID NO: 66763 - DNA, 126 bp, Homo sapiens; identical to SEQ ID NO: 2844
  chr3:142839562-142839688
  hypo

SEQ ID NO: 66764 - DNA, 118 bp, Homo sapiens; identical to SEQ ID NO: 2845
  chr3:142839783-142839901
  hypo

SEQ ID NO: 66765 - DNA, 183 bp, Homo sapiens; identical to SEQ ID NO: 2846
  chr3:142839944-142840127
  hypo

SEQ ID NO: 66766 - DNA, 26 bp, Homo sapiens
  chr3:142861655-142861681
  hypo
tgggagctgcccgccccatcttggga

SEQ ID NO: 66767 - DNA, 677 bp, Homo sapiens
  chr3:142895257-142895934
  hypo
gcctcctggtggcggagaccccggtgggggtagcggggggttcccgggaggccgagggaagcaagacatcggggacattctgcagcagataatgaccatcaccgaccagagcctggacgaggcccaggccaagaaacacgccctaaactgccaccgaatgaagcctgctctctttagcgtcctgtgtgaaatcaaggagaaaaccggcctcagcattcggagctcccaggaggaggagccggtggacccacagctgatgcgcttggacaacatgcttctggcagagggtgtggctgggcccgagaaagggggcggctcagcagcagcagctgcagccgctgcagcctctggtggtggcgtgtcccctgacaactccatcgaacactcggactatcgcagcaaacttgcccagatccgtcacatataccactcggaactggagaagtatgagcaggcatgtaatgagttcacgacccatgtcatgaacctgctgagggagcagagccgcaccaggcccgtggcccccaaagagatggaacgcatggtgagcatcatccatcgaaagttcagcgccatccagatgcagctgaagcagagcacctgcgaggctatgatgatgctgcgctcccgtttcctggatgccagacgaaagcgccgtaacttcagcagacaggcca

SEQ ID NO: 66768 - DNA, 31 bp, Homo sapiens
  chr3:142896155-142896186
  hypo
agcagcaccagctccccgacacccccttcct

SEQ ID NO: 66769 - DNA, 31 bp, Homo sapiens; identical to SEQ ID NO: 17946
  chr3:142913605-142913636
  hypo

SEQ ID NO: 66770 - DNA, 103 bp, Homo sapiens
  chr3:142957647-142957750
  hypo
taatgaacatttttaactggcctctcatttccattttctccatcttccaatccatccctcattccgtggctctattcatcacgatgcttcagacctccagtgg

SEQ ID NO: 66771 - DNA, 30 bp, Homo sapiens
  chr3:142973742-142973772
  hypo
ctacacaggttaacgcgggagggagcaaca

SEQ ID NO: 66772 - DNA, 99 bp, Homo sapiens; identical to SEQ ID NO: 17948
  chr3:143027448-143027547
  hypo

SEQ ID NO: 66773 - DNA, 223 bp, Homo sapiens
  chr3:143316289-143316512
  hypo
aaggcaagggagaactggcctcgcaaccttgcgtgggggtggccaattcaagcagctgagacagagcggacagcgtaagaaaagctgctcaggagagaggtagtttaagaaagctgttgatgagagctgctgctgaataaaaccatattcacccgcctgtggccccccgagggttctttctgctcatccacccactcccctcggacttcagcatggtgtggac

SEQ ID NO: 66774 - DNA, 31 bp, Homo sapiens
  chr3:145833014-145833045
  hypo
ctcacagaaattgagtcgatctacatgtgaa

SEQ ID NO: 66775 - DNA, 876 bp, Homo sapiens; identical to SEQ ID NO: 39752
  chr3:145878416-145879292
  hypo

SEQ ID NO: 66776 - DNA, 31 bp, Homo sapiens; identical to SEQ ID NO: 17951
  chr3:145969119-145969150
  hypo

SEQ ID NO: 66777 - DNA, 40 bp, Homo sapiens; identical to SEQ ID NO: 17952
  chr3:145970677-145970717
  hypo

SEQ ID NO: 66778 - DNA, 141 bp, Homo sapiens
  chr3:148394229-148394370
  hypo
cccaatctcccattggccaaacgcaaccagaggacaaccctcagtaggcgttaacctgccaaggaataaataaagcagaacggggaaggatagacaatagtttgggaggtgtcggggtacgaatggtggttaatcagcata

SEQ ID NO: 66779 - DNA, 30 bp, Homo sapiens; identical to SEQ ID NO: 17953
  chr3:148450845-148450875
  hypo

SEQ ID NO: 66780 - DNA, 15 bp, Homo sapiens
  chr3:148463858-148463873
  hypo
cgcgcccagcgtgaa

SEQ ID NO: 66781 - DNA, 26 bp, Homo sapiens
  chr3:148523201-148523227
  hypo
taaaagacttcaaaggtgggccgggc

SEQ ID NO: 66782 - DNA, 25 bp, Homo sapiens
  chr3:148523466-148523491
  hypo
gagcgagactcctactcaaaaaaaa

SEQ ID NO: 66783 - DNA, 30 bp, Homo sapiens; identical to SEQ ID NO: 17955
  chr3:148704508-148704538
  hypo

SEQ ID NO: 66784 - DNA, 159 bp, Homo sapiens
  chr3:148705304-148705463
  hypo
tcctgctgagccttaaacctccgggagatttcctctttgaactccttgaccgaggctcgatcgcagatcacaatttcctccttgtccttgggggtcttgacggtgacccgaatggggggcctcgtctcggccccgctcggctccgccatgccgccgccg

SEQ ID NO: 66785 - DNA, 177 bp, Homo sapiens; identical to SEQ ID NO: 2864
  chr3:148710030-148710207
  hypo

SEQ ID NO: 66786 - DNA, 34 bp, Homo sapiens; identical to SEQ ID NO: 17957
  chr3:148726131-148726165
  hypo

SEQ ID NO: 66787 - DNA, 39 bp, Homo sapiens
  chr3:148802989-148803028
  hypo
attatgggccggatgcggtggctcacgcctggaatccca

SEQ ID NO: 66788 - DNA, 502 bp, Homo sapiens; identical to SEQ ID NO: 39783
  chr3:148804062-148804564
  hypo

SEQ ID NO: 66789 - DNA, 19 bp, Homo sapiens
  chr3:148808201-148808220
  hypo
gactccctctcaaaaaaaa

SEQ ID NO: 66790 - DNA, 59 bp, Homo sapiens; identical to SEQ ID NO: 17958
  chr3:148867080-148867139
  hypo

SEQ ID NO: 66791 - DNA, 67 bp, Homo sapiens; identical to SEQ ID NO: 17959
  chr3:149096958-149097025
  hypo

SEQ ID NO: 66792 - DNA, 30 bp, Homo sapiens
  chr3:149182947-149182977
  hypo
gccggagtcaggcccggtcctgggtccgtg

SEQ ID NO: 66793 - DNA, 33 bp, Homo sapiens
  chr3:149233986-149234019
  hypo
agccaccatgcgcctggccgattggacagtttt

SEQ ID NO: 66794 - DNA, 30 bp, Homo sapiens
  chr3:149260170-149260200
  hypo
tggattctctgaagccgcagtttctgctgc

SEQ ID NO: 66795 - DNA, 25 bp, Homo sapiens
  chr3:149286554-149286579
  hypo
ttgttgtttttgttgttgagacgga

SEQ ID NO: 66796 - DNA, 31 bp, Homo sapiens
  chr3:149345428-149345459
  hypo
gtccatgaaatcacagcggggttcacctcca

SEQ ID NO: 66797 - DNA, 289 bp, Homo sapiens
  chr3:149700883-149701172
  hypo
caaagagattttacttcctgccgaacagcgttggctacggctttcttgactcgtccagacctcacgaccgccagatccgagtcggcgtaatccgccacggtcactcggccggagcaggcgtcgtgggcccggaacttgagtcgctttcctctcttgggcatggcgaccgtatcggggcgaggcctgcctagcgggccgggcccccgggccatgtctccggccagagagccggccccggtagccgcaagccagctccgcccggctccgcggccatcccacaccctatcat

SEQ ID NO: 66798 - DNA, 31 bp, Homo sapiens
  chr3:149858728-149858759
  hypo
tctccctttctctgggcgccagcatgcccac

SEQ ID NO: 66799 - DNA, 174 bp, Homo sapiens
  chr3:149931180-149931354
  hypo
aagtgagtgggctcagtaactcgcccgagtcacagagtcaaagcaggagctggacccagatagtccagagctcatgctcgtacacacttcacttcgctatcctgaataaaaaaaccaagactccaggagggctgcagcttcgtccaaggtgtcgtgacttgcccacagccaccc

SEQ ID NO: 66800 - DNA, 190 bp, Homo sapiens
  chr3:150026517-150026707
  hypo
gcaaggatttggtgaggaggacgtggaagcctcccgtggattgcattcaggccggcatactcaccaaggcagatgacgtgcatgagatcttggtgacatttgctcaggtgaaaagtgcagggtgtggtgttatctacgctttgtttggctgggcagtcataattcttccgacattacaggagcttgagtg

SEQ ID NO: 66801 - DNA, 19 bp, Homo sapiens
  chr3:150045490-150045509
  hypo
cctcccgaagtgctgggat

SEQ ID NO: 66802 - DNA, 31 bp, Homo sapiens
  chr3:150057189-150057220
  hypo
gtgtaaaaatgttcatcgcaactttatttgt

SEQ ID NO: 66803 - DNA, 151 bp, Homo sapiens
  chr3:150086092-150086243
  hypo
ggctgactaccacagtcggcactcattcaacatctgaatgagcgaatgaagtgatctcctcaggaccacatcccaaagcacttgtcagtgaagaaccaaagtgaactcatttatcttacagaagtcttgggtataaaaatccatcccggcc

SEQ ID NO: 66804 - DNA, 104 bp, Homo sapiens
  chr3:150187003-150187107
  hypo
gattaccggcgtgagccaccgcgcccggccaacatgcaacaatacttctaagcaaggcgatacagatcagcaactctggtgccgatgtgttctatttcctttgg

SEQ ID NO: 66805 - DNA, 164 bp, Homo sapiens
  chr3:150237437-150237601
  hypo
taacctctggtaaaactgacacgccactttaggtagctgcagccatgcaaaagtttgatatcaaagtatctgaaaagcatagcattcaccagttgtcgaagcaccgttccgggacttgcagcatcagcttcacttgagaacctgttagagatgcacattctcgg

SEQ ID NO: 66806 - DNA, 103 bp, Homo sapiens; identical to SEQ ID NO: 17963
  chr3:150237900-150238003
  hypo

SEQ ID NO: 66807 - DNA, 164 bp, Homo sapiens; identical to SEQ ID NO: 39789
  chr3:150321029-150321193
  hypo

SEQ ID NO: 66808 - DNA, 431 bp, Homo sapiens
  chr3:150329377-150329808
  hypo
tgtaaagatgcctgcgctcttatccagctcgatcttcaccttctgggatatgctcttctggatcctcttgctgaagctggcgttgcctgctgcccgaccgcaccgctcaccatcctccgcaggcagcacagttgccaggagcccggcctggccgcccccaggggcccagccgctgagaccgcccctgcgcccggcccctcagccccgatttcccggacgaggcactggcgaccacagcggccactgcggctgccgcctccccactgcccaggcgtgaagccgttcatgtctccgagctccggggtaccggcgctgacagaaatccccactctcctggccgctccgtcggcggcagttcactctgcacaccaagttagctgcatggcagaacaccaactgggcctgctgctgctggcgccgaaacagtggac

SEQ ID NO: 66809 - DNA, 160 bp, Homo sapiens
  chr3:150379954-150380114
  hypo
actaatacactagggcgcgtaatgggaacaactgaagagcgaatgagtgaggggaaagaatgggctggccctggcgaaaggtacaactcacaaagaagagagtcagcatctttaatttcctgatcacagagcttcaaaatatatacggcaaaagttgatt

SEQ ID NO: 66810 - DNA, 197 bp, Homo sapiens
  chr3:150443085-150443282
  hypo
gtctgggcagagacacagagtcgtgaaagaactcggtatgtttgtgaactgtgggaagttcagggagactggagcggagggtgccttaggaatgtgctatagaggagtctgtcaagacctgggtgcctgctacactccgagaggtcagcgaacgggccctcactggcttcttttgcgttgatggcctggtctgtatt

SEQ ID NO: 66811 - DNA, 24 bp, Homo sapiens
  chr3:150445180-150445204
  hypo
gagccttacagaggccgggcacgg

SEQ ID NO: 66812 - DNA, 27 bp, Homo sapiens
  chr3:150470111-150470138
  hypo
taggccaggtgcagtggctcacgcctg

SEQ ID NO: 66813 - DNA, 26 bp, Homo sapiens
  chr3:150470377-150470403
  hypo
agagcgagactccatctcagtattaa

SEQ ID NO: 66814 - DNA, 30 bp, Homo sapiens
  chr3:150497159-150497189
  hypo
tcggcgtcggcaagcgcctgtgcaggctct

SEQ ID NO: 66815 - DNA, 187 bp, Homo sapiens
  chr3:150497416-150497603
  hypo
gttgaagacggcgtcgtggctcaggttgcccagcagcaccagctctccagagttcagagacagggcagggtccccctggtggaagacccgcaggattcaggagaacatgagctctatggagttctgcttgaagcaccgagaggtggccaggaggtgggtgtacgtgtagtacgagcagaaccgatcc

SEQ ID NO: 66816 - DNA, 28 bp, Homo sapiens
  chr3:150670180-150670208
  hypo
ggctcagctgtaggcaatgtgcgtcctg

SEQ ID NO: 66817 - DNA, 87 bp, Homo sapiens
  chr3:150670267-150670354
  hypo
gcattttcaatttaacgatatttcaacttatgacgggtttatcgggaagtaacatcatcataagtcgagtcacatctatactacaat

SEQ ID NO: 66818 - DNA, 197 bp, Homo sapiens; identical to SEQ ID NO: 39794
  chr3:150802802-150802999
  hypo

SEQ ID NO: 66819 - DNA, 1870 bp, Homo sapiens; identical to SEQ ID NO: 2872
  chr3:150803025-150804895
  hypo

SEQ ID NO: 66820 - DNA, 252 bp, Homo sapiens; identical to SEQ ID NO: 2873
  chr3:150804936-150805188
  hypo

SEQ ID NO: 66821 - DNA, 30 bp, Homo sapiens; identical to SEQ ID NO: 17970
  chr3:150872693-150872723
  hypo

SEQ ID NO: 66822 - DNA, 30 bp, Homo sapiens; identical to SEQ ID NO: 17971
  chr3:151056254-151056284
  hypo

SEQ ID NO: 66823 - DNA, 157 bp, Homo sapiens
  chr3:151112505-151112662
  hypo
aacatgctacagcggcgctcaggcgccatgatgcagccgccttctcttcatgcaatcacatcgcagcagcagttgatacagatgaagcttctgcagcagcagcagcaacagcgacttctcaggcaagcccagactcggcctttccaacaggtttgtc

SEQ ID NO: 66824 - DNA, 31 bp, Homo sapiens
  chr3:151142108-151142139
  hypo
gtacagattagatgactctgccggatgcaat

SEQ ID NO: 66825 - DNA, 18 bp, Homo sapiens
  chr3:151869974-151869992
  hypo
taaaagatagcactgact

SEQ ID NO: 66826 - DNA, 7 bp, Homo sapiens
  chr3:151913601-151913608
  hypo
tgcccgg

SEQ ID NO: 66827 - DNA, 18 bp, Homo sapiens
  chr3:151944526-151944544
  hypo
caggtgcagtggctcacg

SEQ ID NO: 66828 - DNA, 30 bp, Homo sapiens
  chr3:152549375-152549405
  hypo
gattataggtaaatcgctggctgtttttaa

SEQ ID NO: 66829 - DNA, 84 bp, Homo sapiens
  chr3:152786502-152786586
  hypo
ccattcattaattgtatgagccgatggtacaatagttagctcactaaaaagatatgtaatcactgtataggacgtacagtttta

SEQ ID NO: 66830 - DNA, 121 bp, Homo sapiens
  chr3:152830628-152830749
  hypo
caggcatgagccaccacgcccggccaaataagcactccatgacctctgtcttttacaagcagcaatttcatagaagccttcaaaggacaatgggattgtgaatagactttcttattatgtg

SEQ ID NO: 66831 - DNA, 30 bp, Homo sapiens; identical to SEQ ID NO: 17975
  chr3:152877466-152877496
  hypo

SEQ ID NO: 66832 - DNA, 150 bp, Homo sapiens; identical to SEQ ID NO: 17976
  chr3:152877716-152877866
  hypo

SEQ ID NO: 66833 - DNA, 40 bp, Homo sapiens
  chr3:152891477-152891517
  hypo
gacgtaagccaccacgcccggcctacaacactattgtgct

SEQ ID NO: 66834 - DNA, 46 bp, Homo sapiens; identical to SEQ ID NO: 17977
  chr3:153010522-153010568
  hypo

SEQ ID NO: 66835 - DNA, 46 bp, Homo sapiens; identical to SEQ ID NO: 17978
  chr3:153010747-153010793
  hypo

SEQ ID NO: 66836 - DNA, 30 bp, Homo sapiens; identical to SEQ ID NO: 17979
  chr3:153811970-153812000
  hypo

SEQ ID NO: 66837 - DNA, 22 bp, Homo sapiens
  chr3:153824797-153824819
  hypo
ttgctttttttttttttgagac

SEQ ID NO: 66838 - DNA, 82 bp, Homo sapiens
  chr3:153824878-153824960
  hypo
tctgcctcctgggttcaagtgattctcctagtttggttactttttaaaaaataatcacagcgtgaaataggcctctctacaa

SEQ ID NO: 66839 - DNA, 56 bp, Homo sapiens
  chr3:154907167-154907223
  hypo
gaaaatgtcattggcccggagacctcaggaaagctatttaacgcctctgaaactta

SEQ ID NO: 66840 - DNA, 30 bp, Homo sapiens; identical to SEQ ID NO: 17980
  chr3:155059288-155059318
  hypo

SEQ ID NO: 66841 - DNA, 16 bp, Homo sapiens
  chr3:155351687-155351703
  hypo
gcgagactctgtctca

SEQ ID NO: 66842 - DNA, 40 bp, Homo sapiens
  chr3:155454718-155454758
  hypo
ggcataaaagagtatacaggccgggcacagtggctcatgc

SEQ ID NO: 66843 - DNA, 39 bp, Homo sapiens; identical to SEQ ID NO: 17981
  chr3:155454997-155455036
  hypo

SEQ ID NO: 66844 - DNA, 159 bp, Homo sapiens
  chr3:155460890-155461049
  hypo
ataagcaagaagctaccgctccttctacataccccttaagatgtgtacttttgccaaatgctaggctgtatgtaaacaaacggattttaaaagaggggatagggctgtcaagattcacaattttatgaaaatgaaaatgattctcatctgctgggcgcg

SEQ ID NO: 66845 - DNA, 30 bp, Homo sapiens; identical to SEQ ID NO: 17982
  chr3:155524961-155524991
  hypo

SEQ ID NO: 66846 - DNA, 28 bp, Homo sapiens
  chr3:155668814-155668842
  hypo
cgcgcccggcctagttttatttcttgat

SEQ ID NO: 66847 - DNA, 42 bp, Homo sapiens; identical to SEQ ID NO: 2887
  chr3:155722291-155722333
  hypo

SEQ ID NO: 66848 - DNA, 43 bp, Homo sapiens; identical to SEQ ID NO: 17984
  chr3:156002787-156002830
  hypo

SEQ ID NO: 66849 - DNA, 30 bp, Homo sapiens; identical to SEQ ID NO: 39823
  chr3:156406981-156407011
  hypo

SEQ ID NO: 66850 - DNA, 30 bp, Homo sapiens; identical to SEQ ID NO: 39824
  chr3:156435624-156435654
  hypo

SEQ ID NO: 66851 - DNA, 219 bp, Homo sapiens; identical to SEQ ID NO: 17985
  chr3:156543099-156543318
  hypo

SEQ ID NO: 66852 - DNA, 30 bp, Homo sapiens; identical to SEQ ID NO: 17986
  chr3:156636841-156636871
  hypo

SEQ ID NO: 66853 - DNA, 168 bp, Homo sapiens; identical to SEQ ID NO: 2891
  chr3:156799360-156799528
  hypo

SEQ ID NO: 66854 - DNA, 31 bp, Homo sapiens
  chr3:156862937-156862968
  hypo
ggattttgccgggcgcggtggctcatgcctg

SEQ ID NO: 66855 - DNA, 30 bp, Homo sapiens
  chr3:156930064-156930094
  hypo
aactaggaagtgataagtagccgggggcgg

SEQ ID NO: 66856 - DNA, 43 bp, Homo sapiens; identical to SEQ ID NO: 17988
  chr3:157866878-157866921
  hypo

SEQ ID NO: 66857 - DNA, 30 bp, Homo sapiens
  chr3:158176354-158176384
  hypo
gaggggacagttagccggggagagtggaag

SEQ ID NO: 66858 - DNA, 98 bp, Homo sapiens
  chr3:158361236-158361334
  hypo
agttccctccagaaacggcagtactgagaggtggggagaagtaagttctggattttctttttttttttttttttttgagactcgctctgtcacccagg

SEQ ID NO: 66859 - DNA, 22 bp, Homo sapiens
  chr3:158400513-158400535
  hypo
tgctttatgactgtcataggcc

SEQ ID NO: 66860 - DNA, 38 bp, Homo sapiens
  chr3:158434647-158434685
  hypo
taggcgtgactcactgcgcctggttaacaagcactctt

SEQ ID NO: 66861 - DNA, 30 bp, Homo sapiens; identical to SEQ ID NO: 17989
  chr3:158441968-158441998
  hypo

SEQ ID NO: 66862 - DNA, 77 bp, Homo sapiens
  chr3:158448985-158449062
  hypo
ggtgtttgcttccaggcgtttggcactgttaaatgaaaatcctgctgctacactttaaaactcgacctatttattaa

SEQ ID NO: 66863 - DNA, 33 bp, Homo sapiens
  chr3:158451329-158451362
  hypo
gattacaggcgtgagccacggtacccggcggca

SEQ ID NO: 66864 - DNA, 194 bp, Homo sapiens
  chr3:158690124-158690318
  hypo
atggattttctaaatacgtggagttatctacttattgcatcatataataagacatataatgacctgttattgttataggagcaagaggttcatatgcgcgctctgcagtaacagacttattacactgagactgcagggtttgtaacagagaaagagtttaatgatcgcagggcactgatcgaggagatgggagg

SEQ ID NO: 66865 - DNA, 38 bp, Homo sapiens
  chr3:159001223-159001261
  hypo
cgtgaaccatcatgcccggcatattttttactttactt

SEQ ID NO: 66866 - DNA, 166 bp, Homo sapiens; identical to SEQ ID NO: 39855
  chr3:159706859-159707025
  hypo

SEQ ID NO: 66867 - DNA, 171 bp, Homo sapiens
  chr3:159814275-159814446
  hypo
tcctagccttccccttaccaccgggtattagcctcctgttattattggctggcttatcgacttggatttaacgctcttggttgtttccctttgattgacaggtctgttgttacccggatagtcttttattcaggtggatacacgcagctcgttttaacaacatggccttac

SEQ ID NO: 66868 - DNA, 31 bp, Homo sapiens; identical to SEQ ID NO: 17990
  chr3:160115509-160115540
  hypo

SEQ ID NO: 66869 - DNA, 30 bp, Homo sapiens
  chr3:160115719-160115749
  hypo
gctggtctcgaactcccaacctcaggtgat

SEQ ID NO: 66870 - DNA, 520 bp, Homo sapiens; identical to SEQ ID NO: 39863
  chr3:160167468-160167988
  hypo

SEQ ID NO: 66871 - DNA, 30 bp, Homo sapiens; identical to SEQ ID NO: 17992
  chr3:160170174-160170204
  hypo

SEQ ID NO: 66872 - DNA, 39 bp, Homo sapiens
  chr3:160328304-160328343
  hypo
gccaccacgcccggcctcgagtgattatttttcaactca

SEQ ID NO: 66873 - DNA, 1478 bp, Homo sapiens; identical to SEQ ID NO: 2918
  chr3:160472595-160474073
  hypo

SEQ ID NO: 66874 - DNA, 28 bp, Homo sapiens
  chr3:160590694-160590722
  hypo
gcacagcgggactctgtctgggaaaaaa

SEQ ID NO: 66875 - DNA, 36 bp, Homo sapiens
  chr3:160863216-160863252
  hypo
aaaaggtttgtgtttgctgggcgcagtggctcacgc

SEQ ID NO: 66876 - DNA, 39 bp, Homo sapiens; identical to SEQ ID NO: 17994
  chr3:160879848-160879887
  hypo

SEQ ID NO: 66877 - DNA, 31 bp, Homo sapiens; identical to SEQ ID NO: 17995
  chr3:162129671-162129702
  hypo

SEQ ID NO: 66878 - DNA, 31 bp, Homo sapiens
  chr3:165174993-165175024
  hypo
tggctttgttaagtgccgggtctgtttagca

SEQ ID NO: 66879 - DNA, 20 bp, Homo sapiens
  chr3:165592807-165592827
  hypo
tcccacgcaaaccgaagagc

SEQ ID NO: 66880 - DNA, 30 bp, Homo sapiens
  chr3:167449627-167449657
  hypo
ggctcccctgacgaacgatatttaaattga

SEQ ID NO: 66881 - DNA, 31 bp, Homo sapiens
  chr3:167566092-167566123
  hypo
atgtacatttcccccccgccctttgtataca

SEQ ID NO: 66882 - DNA, 60 bp, Homo sapiens
  chr3:167916938-167916998
  hypo
gtacacctgctgtgatatcaccgggagttgtacaccgccggtgatattgggtgtgatatt

SEQ ID NO: 66883 - DNA, 29 bp, Homo sapiens
  chr3:168156698-168156727
  hypo
caggaggcggagcttgcagtaagccaaga

SEQ ID NO: 66884 - DNA, 38 bp, Homo sapiens
  chr3:168197106-168197144
  hypo
aaaaaatcattgcagccgaaatgtccttttacctgttt

SEQ ID NO: 66885 - DNA, 25 bp, Homo sapiens
  chr3:168393410-168393435
  hypo
ctccgtcccaaaaaaacaaaaaaca

SEQ ID NO: 66886 - DNA, 30 bp, Homo sapiens
  chr3:168427047-168427077
  hypo
ctagatgtcgatgaacgtgcagtggtgaat

SEQ ID NO: 66887 - DNA, 24 bp, Homo sapiens
  chr3:168548104-168548128
  hypo
agtaaacaaatgtaggctggacgc

SEQ ID NO: 66888 - DNA, 146 bp, Homo sapiens; identical to SEQ ID NO: 17996
  chr3:168608962-168609108
  hypo

SEQ ID NO: 66889 - DNA, 31 bp, Homo sapiens; identical to SEQ ID NO: 39877
  chr3:168754776-168754807
  hypo

SEQ ID NO: 66890 - DNA, 32 bp, Homo sapiens; identical to SEQ ID NO: 17997
  chr3:169030444-169030476
  hypo

SEQ ID NO: 66891 - DNA, 78 bp, Homo sapiens
  chr3:169200019-169200097
  hypo
tgaaactaagacacactggggcgtgtactcgcctgtgtcattcaccatggggaggagcactgcagagctctgttacag

SEQ ID NO: 66892 - DNA, 78 bp, Homo sapiens; identical to SEQ ID NO: 17999
  chr3:169200396-169200474
  hypo

SEQ ID NO: 66893 - DNA, 21 bp, Homo sapiens
  chr3:169243516-169243537
  hypo
taaaaggtggctggatgcagc

SEQ ID NO: 66894 - DNA, 30 bp, Homo sapiens; identical to SEQ ID NO: 39885
  chr3:169380584-169380614
  hypo

SEQ ID NO: 66895 - DNA, 30 bp, Homo sapiens; identical to SEQ ID NO: 39886
  chr3:169381040-169381070
  hypo

SEQ ID NO: 66896 - DNA, 263 bp, Homo sapiens; identical to SEQ ID NO: 39887
  chr3:169381407-169381670
  hypo

SEQ ID NO: 66897 - DNA, 985 bp, Homo sapiens; identical to SEQ ID NO: 39890
  chr3:169482161-169483146
  hypo

SEQ ID NO: 66898 - DNA, 30 bp, Homo sapiens; identical to SEQ ID NO: 39892
  chr3:169492085-169492115
  hypo

SEQ ID NO: 66899 - DNA, 30 bp, Homo sapiens
  chr3:169492631-169492661
  hypo
tattttattttatttttgagacgggctcac

SEQ ID NO: 66900 - DNA, 30 bp, Homo sapiens; identical to SEQ ID NO: 2934
  chr3:169530022-169530052
  hypo

SEQ ID NO: 66901 - DNA, 850 bp, Homo sapiens
  chr3:169539897-169540747
  hypo
tccccaggagattcagcgtttaaagaacatcagggtcctctacctggataagaacaacctgaggagcctgtgcccggcgctggggctgctgagcagcctggagagcctggacctgagctacaaccccatcttctcctcctcccttgtcgttgtcagcttcctccacgccctgcgcgagctccggctctaccagaccgacctgaaggaaattcccgtcgtcatctttaaaaacctccaccatctcgagctgctcggactgaccggaaaccacctgaaatgtctgcccaaggaaatagtgaaccagaccaagctgagggagatctacctgaagcgaaaccagtttgaagttttcccccaggagctctgtgttctctacaccctggaaatcattgacctggacgagaacaaaataggtgccatcccagaagagatcggacacctgacggggctgcagaagttctatatggcttctaacaaccttcccgttctgcccgcgtccttgtgccagtgtagccaactgtcggtgctcgatttatcccacaacctcctccactccatcccgaagagcttcgccgagctcaggaagatgacggaaatcgggctgagcgggaaccgcctggagaaggtgccacgcctcatttgcaggtggacctcgctgcacctgctctacctgggaaacaccggcctgcacaggctgcggggctccttcaggtgcctggtcaacttgcgcttcctggacctaagccagaaccatctgcaccactgcccgctgcagatctgtgcactgaagaaccttgaagtcctgggactggatgacaataaaataggacaggtacggattccttttctg

SEQ ID NO: 66902 - DNA, 19 bp, Homo sapiens
  chr3:169616164-169616183
  hypo
ctcaaaaaaaaaaaaaagt

SEQ ID NO: 66903 - DNA, 48 bp, Homo sapiens; identical to SEQ ID NO: 2935
  chr3:169645351-169645399
  hypo

SEQ ID NO: 66904 - DNA, 146 bp, Homo sapiens; identical to SEQ ID NO: 18005
  chr3:169656678-169656824
  hypo

SEQ ID NO: 66905 - DNA, 80 bp, Homo sapiens
  chr3:169780673-169780753
  hypo
agagggagctctcccggggcgcctttgtggtagaaaagcaccggagcctcacggagatcaccgacgccacgggacccctc

SEQ ID NO: 66906 - DNA, 30 bp, Homo sapiens
  chr3:169782064-169782094
  hypo
acccacggctcctgcgaggtcgcagccatg

SEQ ID NO: 66907 - DNA, 33 bp, Homo sapiens
  chr3:169795276-169795309
  hypo
ggagaataagctgaacgcagctgttctctgacc

SEQ ID NO: 66908 - DNA, 92 bp, Homo sapiens
  chr3:169795488-169795580
  hypo
tatgtctgtactgaataaaagcaagcagctccagctgttcgaggctgctctcttcttcagccattagtgccgggcagcccactagctgctgt

SEQ ID NO: 66909 - DNA, 30 bp, Homo sapiens
  chr3:169796499-169796529
  hypo
cagcagaccgctttacgcaaagccagaaca

SEQ ID NO: 66910 - DNA, 18 bp, Homo sapiens
  chr3:169807405-169807423
  hypo
aaagttgctacactgtcg

SEQ ID NO: 66911 - DNA, 97 bp, Homo sapiens; identical to SEQ ID NO: 18007
  chr3:169896228-169896325
  hypo

SEQ ID NO: 66912 - DNA, 101 bp, Homo sapiens
  chr3:169915437-169915538
  hypo
tcatttggagttagctgctcccgtaataatccgtctatacttgtctaataataacaggtgtttttttaattgagatataattcactggccgggtgcggtgg

SEQ ID NO: 66913 - DNA, 40 bp, Homo sapiens
  chr3:169916137-169916177
  hypo
ggcgacagagtgagactccgtctcaagaaaaaaaaaaaga

SEQ ID NO: 66914 - DNA, 37 bp, Homo sapiens
  chr3:169917046-169917083
  hypo
aaaacctgtgcacgacgttttgtacagacatgttttt

SEQ ID NO: 66915 - DNA, 41 bp, Homo sapiens; identical to SEQ ID NO: 18009
  chr3:169980658-169980699
  hypo

SEQ ID NO: 66916 - DNA, 31 bp, Homo sapiens; identical to SEQ ID NO: 18010
  chr3:169983366-169983397
  hypo

SEQ ID NO: 66917 - DNA, 30 bp, Homo sapiens; identical to SEQ ID NO: 39902
  chr3:170138442-170138472
  hypo

SEQ ID NO: 66918 - DNA, 75 bp, Homo sapiens
  chr3:170179926-170180001
  hypo
ctgtgtttggccctccgcggactttcctctgacatcttgggcccctggtaaaacctagtgcgaaaggggacggca

SEQ ID NO: 66919 - DNA, 43 bp, Homo sapiens
  chr3:170267373-170267416
  hypo
tgaggaagtttgtttaaatatcgccagtgtgacacttatgacc

SEQ ID NO: 66920 - DNA, 97 bp, Homo sapiens
  chr3:170555016-170555113
  hypo
ggtttctcttcttttattgttttctgcctctgctttcattgtaagccttctttagtattcatcttttatttcatccggcttaaaggaagaagaccag

SEQ ID NO: 66921 - DNA, 31 bp, Homo sapiens
  chr3:170588652-170588683
  hypo
gcgtctgtactcccagccactcgggaggctg

SEQ ID NO: 66922 - DNA, 94 bp, Homo sapiens
  chr3:170588742-170588836
  hypo
ctgcactccagcctgggtaacagtgagactgtctcaaagggaaaaacacgtagtgcttgcttcttgttcattcgtttggtataatttatcatgg

SEQ ID NO: 66923 - DNA, 732 bp, Homo sapiens; identical to SEQ ID NO: 39908
  chr3:170625810-170626542
  hypo

SEQ ID NO: 66924 - DNA, 274 bp, Homo sapiens; identical to SEQ ID NO: 39909
  chr3:170626965-170627239
  hypo

SEQ ID NO: 66925 - DNA, 17 bp, Homo sapiens
  chr3:170785203-170785220
  hypo
aatcccagcactttggg

SEQ ID NO: 66926 - DNA, 17 bp, Homo sapiens
  chr3:170785459-170785476
  hypo
ccaaaaaaaaaaaaaaa

SEQ ID NO: 66927 - DNA, 46 bp, Homo sapiens
  chr3:170870833-170870879
  hypo
acagtgggcgtgagccactgcgcccggccaaaactatgttttaaat

SEQ ID NO: 66928 - DNA, 37 bp, Homo sapiens
  chr3:171121103-171121140
  hypo
ttagaaaagggggtgaatggccgggcacggtggctca

SEQ ID NO: 66929 - DNA, 66 bp, Homo sapiens
  chr3:171171981-171172047
  hypo
gttgtgctcagctgggcatggcggccatgattcaatcacaggagcgcctggctgggtggactttag

SEQ ID NO: 66930 - DNA, 18 bp, Homo sapiens
  chr3:171242760-171242778
  hypo
actctgatgccacagata

SEQ ID NO: 66931 - DNA, 217 bp, Homo sapiens
  chr3:171362727-171362944
  hypo
gagcatttcctccgccggttgaaatgtctccttcgaaccctggcagaagtggtatcacgacatatacccggtatttctggttttccctgcaaaggtcagatgcagagaaattcacccaaaaaataaaaggtagtatcaattttagatgacagccaagcagttcacatggtttttgagattgagtgaatggcttcctacaacacgttctgtcacattt

SEQ ID NO: 66932 - DNA, 164 bp, Homo sapiens; identical to SEQ ID NO: 18016
  chr3:171363248-171363412
  hypo

SEQ ID NO: 66933 - DNA, 30 bp, Homo sapiens
  chr3:171455811-171455841
  hypo
atttacccgtggctcgtttttcagtgacat

SEQ ID NO: 66934 - DNA, 114 bp, Homo sapiens; identical to SEQ ID NO: 18017
  chr3:171493912-171494026
  hypo

SEQ ID NO: 66935 - DNA, 29 bp, Homo sapiens
  chr3:171503242-171503271
  hypo
tttttagatggagtcttgctccgatgccc

SEQ ID NO: 66936 - DNA, 29 bp, Homo sapiens
  chr3:171503510-171503539
  hypo
gccaccacgcccagcctccagtgtctatt

SEQ ID NO: 66937 - DNA, 46 bp, Homo sapiens; identical to SEQ ID NO: 18018
  chr3:171529765-171529811
  hypo

SEQ ID NO: 66938 - DNA, 31 bp, Homo sapiens; identical to SEQ ID NO: 2948
  chr3:171758578-171758609
  hypo

SEQ ID NO: 66939 - DNA, 31 bp, Homo sapiens; identical to SEQ ID NO: 18020
  chr3:171926519-171926550
  hypo

SEQ ID NO: 66940 - DNA, 200 bp, Homo sapiens
  chr3:171965334-171965534
  hypo
agtactggagtccgccgggtggtggtcacaccccagtctcctgagtgttatcccccaagctacccctcagccatgtctccaacccatcatctccctccctatctgactcaccatccacattttattcataactcacacacggcttactacccacctgttaccggacctggagatatgccgcctcagttttttccccagca

SEQ ID NO: 66941 - DNA, 113 bp, Homo sapiens
  chr3:171976024-171976137
  hypo
ttagatcacattccacgacatagactcacaggttctggttatgataccgaaagccagtgatgagggcattattcttgtgcatttgtctttcagagttcgcagattgctttctg

SEQ ID NO: 66942 - DNA, 19 bp, Homo sapiens
  chr3:172032876-172032895
  hypo
gaatttacagccgggcgcg

SEQ ID NO: 66943 - DNA, 318 bp, Homo sapiens
  chr3:172033194-172033512
  hypo
tcattggcttttcagctgtggccttcagtttcgattttcacctgaaacaggtcagtttttattacttgagaaggtgtggccattccttgccaagttcccttgtggtgactcgtgagctttagtgtttagagccatggggtttaataactgaccccgcatttttgtagatttttagccgctttcctccttcaggagacaccccattaggagcagaaaggcagaaggtcattttcaagtctttttcacttgaacgttagatgagtcacatcacatttttatttcagtgtccccgcccccgtgtttacactttaatctaca

SEQ ID NO: 66944 - DNA, 30 bp, Homo sapiens
  chr3:172042752-172042782
  hypo
ttccctcagccctgcggaccagctgactcc

SEQ ID NO: 66945 - DNA, 39 bp, Homo sapiens
  chr3:172056804-172056843
  hypo
gtgtgagccaccgcgcccggcccaccattaaattttttt

SEQ ID NO: 66946 - DNA, 25 bp, Homo sapiens
  chr3:172186701-172186726
  hypo
tacaggttaagaagaaacaggcgtg

SEQ ID NO: 66947 - DNA, 15 bp, Homo sapiens
  chr3:172302224-172302239
  hypo
agtgagcctagatcg

SEQ ID NO: 66948 - DNA, 451 bp, Homo sapiens
  chr3:172341509-172341960
  hypo
cagaggtgaggctgacgtgacccccacatcaagggtcctagtcttgtgagggagtcagacctacctgcagacaattaccatgtcatgtgtggagtgcagtgtgagacccgaggaacgacccctaaatcctcctgagaaaggagttaggaaaggctcctggaggaggctggcaaagaaatacaagaacagtgaaaagcactctaaggagaaggaagggtgttcggtaagagaacatggcgcatgtgcggaacacgaacagaaccgcggtaataagttccgggttggctagctgtaccacagcacgatgtgcagggacggccaggagaggatgctacagagcagcagctctcaaacttttcagtctcaggactttacaatcttaaacattattgaggacccttccccctcccccacgaagagcttttgtttatgtgggcttcatttattgatg

SEQ ID NO: 66949 - DNA, 21 bp, Homo sapiens
  chr3:172342379-172342400
  hypo
gaggctgtttgccaagattgt

SEQ ID NO: 66950 - DNA, 18 bp, Homo sapiens
  chr3:172342645-172342663
  hypo
tttttttttttgagacgg

SEQ ID NO: 66951 - DNA, 36 bp, Homo sapiens
  chr3:172351502-172351538
  hypo
tctgcaatgagtggggcggagcgggcatccagcaac

SEQ ID NO: 66952 - DNA, 241 bp, Homo sapiens
  chr3:172355749-172355990
  hypo
tcacttgaacccaggaagtggaagttgcagtgagctgagatcgaaagaacaagacctgggcgaaagagcaagaccctgtctcaaaataaaatcctgctaggtaattaaacatcttgacattcattgtagataaaatcaaatggacaaatgtttgtgaaatacgttgacaagtagtgaatgtggatctggtcattccggaattaccacattttgaaactaaatgcaataaaaaaactccctt

SEQ ID NO: 66953 - DNA, 18 bp, Homo sapiens
  chr3:172356109-172356127
  hypo
tgccatatagcagataaa

SEQ ID NO: 66954 - DNA, 142 bp, Homo sapiens
  chr3:172394008-172394150
  hypo
tctgttaataaaagcaaaccccgaaccatttcttttctaacagaaaaaccgcttgaagggccgggccaggaagctttgatacgcaaatgccgcccgttagaaatggtccacccaatatggcgactcctgccttcttcttgtc

SEQ ID NO: 66955 - DNA, 81 bp, Homo sapiens; identical to SEQ ID NO: 18031
  chr3:172395701-172395782
  hypo

SEQ ID NO: 66956 - DNA, 34 bp, Homo sapiens
  chr3:172409439-172409473
  hypo
aagaaagaacagggtgctggccgggcgcggtggc

SEQ ID NO: 66957 - DNA, 78 bp, Homo sapiens
  chr3:172424593-172424671
  hypo
attcgtttaaatggtgctgcaaataaaagaaaaaaagattgctcgattttacttcacgtttattataagtggcagtgc

SEQ ID NO: 66958 - DNA, 42 bp, Homo sapiens
  chr3:172425341-172425383
  hypo
aagatcatctggggaacttttcgttttttatttttattatta

SEQ ID NO: 66959 - DNA, 42 bp, Homo sapiens; identical to SEQ ID NO: 18032
  chr3:172425682-172425724
  hypo

SEQ ID NO: 66960 - DNA, 42 bp, Homo sapiens
  chr3:172426414-172426456
  hypo
gggattacagcgtgagccaccgccccaggccatgacaccagg

SEQ ID NO: 66961 - DNA, 38 bp, Homo sapiens; identical to SEQ ID NO: 18033
  chr3:172469919-172469957
  hypo

SEQ ID NO: 66962 - DNA, 38 bp, Homo sapiens
  chr3:172470196-172470234
  hypo
tgtgagccaccgcgtccggcctttcaaatggtattttt

SEQ ID NO: 66963 - DNA, 24 bp, Homo sapiens
  chr3:172475718-172475742
  hypo
tcactgcaacctctgctttcccgg

SEQ ID NO: 66964 - DNA, 84 bp, Homo sapiens
  chr3:172475921-172476005
  hypo
ttacaggcatgagccaccgtgccccgcttctttttgtttttaaacagcatttcaatatgagtcgtatgagagttagtccctatt

SEQ ID NO: 66965 - DNA, 23 bp, Homo sapiens
  chr3:172550528-172550551
  hypo
ccggcctatttctcaaattacag

SEQ ID NO: 66966 - DNA, 200 bp, Homo sapiens
  chr3:172727364-172727564
  hypo
acaggggaggctaggctctttcgcatgcccttaggatagctgcagcagccgcagtgctcaggagcagactacagaccgcacctctgctgctgctcgccaggcaagtcccaccggcttgggcctccagtgtgcacacctgcctgtgttactggtcataggcagttgtccaggttcttggtgttttgaacaaagaattagag

SEQ ID NO: 66967 - DNA, 139 bp, Homo sapiens; identical to SEQ ID NO: 18036
  chr3:172727623-172727762
  hypo

SEQ ID NO: 66968 - DNA, 8 bp, Homo sapiens
  chr3:173162802-173162810
  hypo
aatcccag

SEQ ID NO: 66969 - DNA, 181 bp, Homo sapiens
  chr3:173864874-173865055
  hypo
atagctgagattggcctcccccgtcatccccagttatagaaaaagcattctagttacggccggtattttttgttaatgccaaaccacagctaagcctagattacccaggtgaactagggtttgtgtaaggatgtcataggtagcgtctgtaaaagttcccggctccaggagaccaatgaaa

SEQ ID NO: 66970 - DNA, 134 bp, Homo sapiens
  chr3:174095071-174095205
  hypo
ggctgcgtttcccgcgcaggtgaagcaccgtcagggcacagcgcgcctgcgcgctgtggactgcccccagcggctacaagagcaccgtgaagggcgctatccactacccgggctgcggcgcgcccctcgccaag

SEQ ID NO: 66971 - DNA, 782 bp, Homo sapiens; identical to SEQ ID NO: 39934
  chr3:174158580-174159362
  hypo

SEQ ID NO: 66972 - DNA, 33 bp, Homo sapiens; identical to SEQ ID NO: 18041
  chr3:175307700-175307733
  hypo

SEQ ID NO: 66973 - DNA, 408 bp, Homo sapiens
  chr3:175338229-175338637
  hypo
aggggtgttacagctatagctcggggagtcccggggtctcggcccccagaagttttgctgctctttctcccatagtccactgcttgggagcatattacaagcccatttattcctgccactcacagatcggcaggcagaaaggagtaacactcagtggctttttcactcccgcaattcggcgagcaggagggggtgtgttacagctctcttgttcctgctgcctgcagctcagcgaacaggggcatgtcacagctctcttgttcttaccacctggaacgggtacatgttgccgctctcttcgtgcctgcacatgttgccgctcttttcgtgcctgcaatctggcaggttacaggttcttgtcctgtgaccaagagaaatgaggtatgcggacacaggatagcaaataag

SEQ ID NO: 66974 - DNA, 30 bp, Homo sapiens; identical to SEQ ID NO: 2961
  chr3:175414760-175414790
  hypo

SEQ ID NO: 66975 - DNA, 92 bp, Homo sapiens; identical to SEQ ID NO: 18044
  chr3:176545043-176545135
  hypo

SEQ ID NO: 66976 - DNA, 219 bp, Homo sapiens
  chr3:176710429-176710648
  hypo
tgtaatgccacgtagaccacataaagagaaaacctatggcctcaaattactggtttaatcatgtgattaggcagaactggcatggaagcacaatgaggaaagagaatcatgatctcagtggttccagcccattagctgctccaccacattcaccaggcactcacgcgctctgccacctcccgggggactcgatgatttaatattcgcctccacacaaac

SEQ ID NO: 66977 - DNA, 88 bp, Homo sapiens
  chr3:176753532-176753620
  hypo
ctgacccagcaatggatgaataaagtacactaacacacagatatcctgtttcgccagtccagctgagggtgtccgagccatttacaga

SEQ ID NO: 66978 - DNA, 26 bp, Homo sapiens
  chr3:176836759-176836785
  hypo
ttttgttttttgtttttgagacggag

SEQ ID NO: 66979 - DNA, 26 bp, Homo sapiens
  chr3:176845707-176845733
  hypo
caaaacattgtaaaacgggccgggcg

SEQ ID NO: 66980 - DNA, 20 bp, Homo sapiens
  chr3:176849312-176849332
  hypo
ttttgagacagagtctcact

SEQ ID NO: 66981 - DNA, 35 bp, Homo sapiens; identical to SEQ ID NO: 18046
  chr3:176854101-176854136
  hypo

SEQ ID NO: 66982 - DNA, 94 bp, Homo sapiens
  chr3:176869523-176869617
  hypo
gataaaaagaattttcccagacgggcacggtggctcacacctgtaatcccagcccaaggcagcagatcacctgagttcagaagtttgagaccaa

SEQ ID NO: 66983 - DNA, 18 bp, Homo sapiens
  chr3:176872485-176872503
  hypo
agaactttttaaaaagaa

SEQ ID NO: 66984 - DNA, 76 bp, Homo sapiens; identical to SEQ ID NO: 18048
  chr3:176890963-176891039
  hypo

SEQ ID NO: 66985 - DNA, 35 bp, Homo sapiens
  chr3:176893550-176893585
  hypo
taataagttattcaggccaggcgcggtggctcatg

SEQ ID NO: 66986 - DNA, 120 bp, Homo sapiens
  chr3:176897152-176897272
  hypo
ttgttgtactgacataattctcgtatttaccaattacatatgagcctattccggatacagacacacgctggagcacaaccaagtattcttttaacttacggtatctgttttattctaact

SEQ ID NO: 66987 - DNA, 31 bp, Homo sapiens; identical to SEQ ID NO: 2962
  chr3:176915777-176915808
  hypo

SEQ ID NO: 66988 - DNA, 37 bp, Homo sapiens
  chr3:176990423-176990460
  hypo
tttaaaagaaggcaggctgggcgtggtggctcatgcc

SEQ ID NO: 66989 - DNA, 36 bp, Homo sapiens
  chr3:176990699-176990735
  hypo
acagtgggacactccgtctcagaaaaaaaaaggaag

SEQ ID NO: 66990 - DNA, 46 bp, Homo sapiens
  chr3:177001715-177001761
  hypo
tgggattacaggcgtgagccaccgcgcccagttaggaaaagacttt

SEQ ID NO: 66991 - DNA, 89 bp, Homo sapiens
  chr3:177030448-177030537
  hypo
aactaagcatgggcagtgagacgaagtttcctaccctcacgcccacagggctacgtcgatggcaatgcgattttctgagattaggagtc

SEQ ID NO: 66992 - DNA, 30 bp, Homo sapiens
  chr3:177094966-177094996
  hypo
aaactggcatagcagcgagtcagggagtga

SEQ ID NO: 66993 - DNA, 90 bp, Homo sapiens
  chr3:177158384-177158474
  hypo
atgtaatgatggtggcgaggatcactggaatctccctcctttaattgacagctgcgctgggccttccctgatgctcgggacctggtgccc

SEQ ID NO: 66994 - DNA, 44 bp, Homo sapiens
  chr3:177238609-177238653
  hypo
gcaaacattaaaaagtccttgcggtggggcgtggtggctcatgc

SEQ ID NO: 66995 - DNA, 121 bp, Homo sapiens; identical to SEQ ID NO: 18051
  chr3:177238892-177239013
  hypo

SEQ ID NO: 66996 - DNA, 59 bp, Homo sapiens
  chr3:177239192-177239251
  hypo
tctgacagcaggtggagctcagacagtagagctcgctcaaccgccgctcaccttgtgct

SEQ ID NO: 66997 - DNA, 31 bp, Homo sapiens; identical to SEQ ID NO: 18052
  chr3:177299217-177299248
  hypo

SEQ ID NO: 66998 - DNA, 32 bp, Homo sapiens
  chr3:177308261-177308293
  hypo
aaaacataaaatattagaggccgggcatggtg

SEQ ID NO: 66999 - DNA, 20 bp, Homo sapiens
  chr3:177383082-177383102
  hypo
gagctgttcctattcggcca

SEQ ID NO: 67000 - DNA, 44 bp, Homo sapiens
  chr3:177829172-177829216
  hypo
tttttcagtgtgtgagttacacgtaaatataaatagttagctgg

SEQ ID NO: 67001 - DNA, 181 bp, Homo sapiens; identical to SEQ ID NO: 18054
  chr3:178860952-178861133
  hypo

SEQ ID NO: 67002 - DNA, 30 bp, Homo sapiens; identical to SEQ ID NO: 2966
  chr3:178916861-178916891
  hypo

SEQ ID NO: 67003 - DNA, 30 bp, Homo sapiens; identical to SEQ ID NO: 2967
  chr3:178921538-178921568
  hypo

SEQ ID NO: 67004 - DNA, 39 bp, Homo sapiens; identical to SEQ ID NO: 2968
  chr3:178936067-178936106
  hypo

SEQ ID NO: 67005 - DNA, 30 bp, Homo sapiens; identical to SEQ ID NO: 2969
  chr3:178952070-178952100
  hypo

SEQ ID NO: 67006 - DNA, 43 bp, Homo sapiens
  chr3:178978409-178978452
  hypo
atcaaacattactgagagtgtcggaagtctctccattggtaac

SEQ ID NO: 67007 - DNA, 41 bp, Homo sapiens; identical to SEQ ID NO: 2971
  chr3:179064153-179064194
  hypo

SEQ ID NO: 67008 - DNA, 45 bp, Homo sapiens
  chr3:179085021-179085066
  hypo
aatagatgttcaaaagacagaatcgttaagagaaagatttcctgt

SEQ ID NO: 67009 - DNA, 31 bp, Homo sapiens
  chr3:179112492-179112523
  hypo
gcgcccggccgaaagccaactcttatgccta

SEQ ID NO: 67010 - DNA, 26 bp, Homo sapiens
  chr3:179121285-179121311
  hypo
aattaaaaagtcaggccgggcgcagt

SEQ ID NO: 67011 - DNA, 1132 bp, Homo sapiens; identical to SEQ ID NO: 39952
  chr3:179168655-179169787
  hypo

SEQ ID NO: 67012 - DNA, 37 bp, Homo sapiens; identical to SEQ ID NO: 18061
  chr3:179203079-179203116
  hypo

SEQ ID NO: 67013 - DNA, 42 bp, Homo sapiens
  chr3:179319837-179319879
  hypo
gtcattataaattaactggggcggtggttcacacctgtattc

SEQ ID NO: 67014 - DNA, 154 bp, Homo sapiens
  chr3:179377823-179377977
  hypo
ctgtctcaaaaaacaaacaaacaaaacattttaactcgatttaattgtacaattcagtggcattaaattacattcgcatggaaacattttaactcgttttaattgtacaattcagtggcattaaattacattcgcattgttgtgtaactatcac

SEQ ID NO: 67015 - DNA, 179 bp, Homo sapiens
  chr3:179383081-179383260
  hypo
agtctggcatgaggacataaccgcttgagctaactccaatccgtcaagtgtctattatgagtcaaacactatgccaggcacttttatgtacgtcatctcatttaattatgatagtaattggcttacatgttatagttacgattttgcccctgttttacggatgaggaaatggagagtca

SEQ ID NO: 67016 - DNA, 21 bp, Homo sapiens
  chr3:179390182-179390203
  hypo
tttttttttgagacagtgtgt

SEQ ID NO: 67017 - DNA, 142 bp, Homo sapiens; identical to SEQ ID NO: 18063
  chr3:179391535-179391677
  hypo

SEQ ID NO: 67018 - DNA, 21 bp, Homo sapiens
  chr3:179391976-179391997
  hypo
ggcctgttttgagatttgtat

SEQ ID NO: 67019 - DNA, 121 bp, Homo sapiens
  chr3:179398939-179399060
  hypo
ccagggctggggtgaagccaccgctgtgggtgtctgtggagctgccgaatagtcattgatgatgactacagtgttgtgaccaagcgagttacagagaaacgccacactttgagacaaatta

SEQ ID NO: 67020 - DNA, 374 bp, Homo sapiens
  chr3:179449286-179449660
  hypo
ggtttggtaagctgccgggtggttcttaagcaggctcaagtaggagaaactccgtgggccagtcgttactaattaatagaaccactgaaagataggcttgatgttttaatggccagacctgcatttccactggaccctccctatgctgcttgttgtacaactccagagggtactactcataacttggtctttttgagtggtgcccttggaattgtgtagtgcacagcttacgcatctgtgtttggcaccgtcctctcccgttgccacagatgccctgagtggaacgcgtgccccacttccccgccacctgctctggcttcctagtatcctgtcttgacttactgggcaggctcgttcagttctgtgtctcaagt

SEQ ID NO: 67021 - DNA, 521 bp, Homo sapiens; identical to SEQ ID NO: 2973
  chr3:179754238-179754759
  hypo

SEQ ID NO: 67022 - DNA, 69 bp, Homo sapiens; identical to SEQ ID NO: 2974
  chr3:179754803-179754872
  hypo

SEQ ID NO: 67023 - DNA, 241 bp, Homo sapiens; identical to SEQ ID NO: 2975
  chr3:179755086-179755327
  hypo

SEQ ID NO: 67024 - DNA, 966 bp, Homo sapiens; identical to SEQ ID NO: 39960
  chr3:180397083-180398049
  hypo

SEQ ID NO: 67025 - DNA, 35 bp, Homo sapiens
  chr3:180502776-180502811
  hypo
tgtacattaagaatttgaggccgggcgcggtggct

SEQ ID NO: 67026 - DNA, 623 bp, Homo sapiens
  chr3:180546428-180547051
  hypo
gggttggcagctcctggtcttcgaccttcgctcgctttctgggccggggcctggtgagagtcagggggccggggcccctgaggcagagaaaactgttcacgccttggaggagagtgtccacttggctcccagggccggcctgcacagcctgcagcgtctccatggccttctcctgctgccgccgggcctccaggccctccacgtcgggcgggtagcagtggccacgcatcacggtcacctgctgtccctgggtgatggcccggctccggcagctgtgcagcgcgtggtcccggcaggtccaatacgccttctcccccacggccttctcccgcttgtagaggaacgactcgtgcaccaggaagctatccccgtagcacgtcctcaggaactcaaggggccgggcctgtcccaggcccaggatcgagcacttcttgggcgtcaggctcagcagctacaggattcggggtccgtcgtcgtcctccgggccggcttgctcagcactagcccaggggtgggctctggctccggctccttggggcactgccacaggccccccctctccagcggctcctccactcggcttccagagccctcaggaccccggggatgtcccaagacctctg

SEQ ID NO: 67027 - DNA, 220 bp, Homo sapiens; identical to SEQ ID NO: 2985
  chr3:181430146-181430366
  hypo

SEQ ID NO: 67028 - DNA, 868 bp, Homo sapiens; identical to SEQ ID NO: 39972
  chr3:181430443-181431311
  hypo

SEQ ID NO: 67029 - DNA, 178 bp, Homo sapiens; identical to SEQ ID NO: 2993
  chr3:181444346-181444524
  hypo

SEQ ID NO: 67030 - DNA, 336 bp, Homo sapiens; identical to SEQ ID NO: 2994
  chr3:181444612-181444948
  hypo

SEQ ID NO: 67031 - DNA, 88 bp, Homo sapiens
  chr3:181466763-181466851
  hypo
aagactccgtctcaacaacaacaacaacaaaagactctacgcaaaagaagttattgacattgccttcggtacccacttaaggaccact

SEQ ID NO: 67032 - DNA, 90 bp, Homo sapiens
  chr3:181521186-181521276
  hypo
tctataatgccaccccattgaaaatcaccgttaatttatcggtgtgaaatcacatcagtatttttatacgtatactatattcctttatgc

SEQ ID NO: 67033 - DNA, 263 bp, Homo sapiens
  chr3:182314907-182315170
  hypo
aaagcacggagaacccgagggagtgtgaagatcaaatcaggtgtctttcggtcagtggaggaaacacccggaagcagtgaaacgcactgggcttattgcaacaaccccagctactgaaaatgccaccctctccacgacgaagcaccgccagtcccaaactccaatcagccgctgggctgggaggccgaaaaggcaagaagacacagagcggggttgaaatgaagaaggaactctttttcaacgagactcattacagtatgcaa

SEQ ID NO: 67034 - DNA, 293 bp, Homo sapiens; identical to SEQ ID NO: 39987
  chr3:182510866-182511159
  hypo

SEQ ID NO: 67035 - DNA, 171 bp, Homo sapiens; identical to SEQ ID NO: 2998
  chr3:182511622-182511793
  hypo

SEQ ID NO: 67036 - DNA, 31 bp, Homo sapiens; identical to SEQ ID NO: 18077
  chr3:182599428-182599459
  hypo

SEQ ID NO: 67037 - DNA, 35 bp, Homo sapiens; identical to SEQ ID NO: 18078
  chr3:182650848-182650883
  hypo

SEQ ID NO: 67038 - DNA, 128 bp, Homo sapiens; identical to SEQ ID NO: 18079
  chr3:182656909-182657037
  hypo

SEQ ID NO: 67039 - DNA, 21 bp, Homo sapiens
  chr3:182663292-182663313
  hypo
ggcaggagaatggtgtgaacc

SEQ ID NO: 67040 - DNA, 20 bp, Homo sapiens
  chr3:182663372-182663392
  hypo
agactccctctcaaaacaaa

SEQ ID NO: 67041 - DNA, 30 bp, Homo sapiens; identical to SEQ ID NO: 18080
  chr3:182699399-182699429
  hypo

SEQ ID NO: 67042 - DNA, 42 bp, Homo sapiens
  chr3:182704500-182704542
  hypo
taaactagcaaatgggctgggcgcggtggctcacgtctgtaa

SEQ ID NO: 67043 - DNA, 43 bp, Homo sapiens
  chr3:182725058-182725101
  hypo
aatttgcatttctaataacttcgcaggtagtgctgctgctgct

SEQ ID NO: 67044 - DNA, 77 bp, Homo sapiens; identical to SEQ ID NO: 18081
  chr3:182778668-182778745
  hypo

SEQ ID NO: 67045 - DNA, 30 bp, Homo sapiens; identical to SEQ ID NO: 18082
  chr3:182788837-182788867
  hypo

SEQ ID NO: 67046 - DNA, 77 bp, Homo sapiens; identical to SEQ ID NO: 18083
  chr3:182800448-182800525
  hypo

SEQ ID NO: 67047 - DNA, 40 bp, Homo sapiens
  chr3:182812782-182812822
  hypo
ctgccctggccaggcacggtggctcacacctgtaatccca

SEQ ID NO: 67048 - DNA, 30 bp, Homo sapiens; identical to SEQ ID NO: 18085
  chr3:182813273-182813303
  hypo

SEQ ID NO: 67049 - DNA, 46 bp, Homo sapiens; identical to SEQ ID NO: 18086
  chr3:182815988-182816034
  hypo

SEQ ID NO: 67050 - DNA, 13 bp, Homo sapiens
  chr3:182833361-182833374
  hypo
aggtgcggtggcc

SEQ ID NO: 67051 - DNA, 38 bp, Homo sapiens; identical to SEQ ID NO: 18088
  chr3:182895950-182895988
  hypo

SEQ ID NO: 67052 - DNA, 164 bp, Homo sapiens
  chr3:182935982-182936146
  hypo
gggctgatgaatggaatagatcgtgctgctgcctctgaaaaacgtatcatggattcgtagcttctcattcataataaagaagcttcgcttcctggtaaaagaaaacagactctcacctgaatttattttaacaacatcaataagggattaagagttcttggcag

SEQ ID NO: 67053 - DNA, 30 bp, Homo sapiens
  chr3:182938994-182939024
  hypo
cttgggtagctcccacggctcctcacagac

SEQ ID NO: 67054 - DNA, 44 bp, Homo sapiens
  chr3:182976026-182976070
  hypo
tacaggcatgagccaccgcacccggcccacttcaccctttaagc

SEQ ID NO: 67055 - DNA, 148 bp, Homo sapiens
  chr3:182976757-182976905
  hypo
tgtttagtgcataatgacaagaaaaaaatgtgcatgttcagtacagacacgaccataaatttttttttcaaatgtttttgatctgtagttggttgaatctgaggatgcggaacccatgaacgtacacgaccaactgcatatgggtttc

SEQ ID NO: 67056 - DNA, 30 bp, Homo sapiens; identical to SEQ ID NO: 18090
  chr3:182987886-182987916
  hypo

SEQ ID NO: 67057 - DNA, 43 bp, Homo sapiens
  chr3:183014965-183015008
  hypo
gaaacagtgccctgtgcacttcgcctgaccacaactcagagcc

SEQ ID NO: 67058 - DNA, 31 bp, Homo sapiens; identical to SEQ ID NO: 18091
  chr3:183020691-183020722
  hypo

SEQ ID NO: 67059 - DNA, 297 bp, Homo sapiens
  chr3:183035118-183035415
  hypo
gcttctgtgaaataatgggttcgttctgtttgtgcttctcaaggtagaaaggtgccaacactcatccagggagaagccccgggaagatttccctgtactgcatgagtgaaagaacctgccaagctcccttttctcggcaggttctgacgtgcttttacgaatcatttaataggtgcctgaccttcaactcaggacagggtgccttccgtagtcctttttctcaaattcatccccaaataaaaagatgcactcctgagaaagtgaagcaataagtccgcttattagtctgccccaaaa

SEQ ID NO: 67060 - DNA, 57 bp, Homo sapiens
  chr3:183052205-183052262
  hypo
caataggggacagatgagcaccgtgggcctccaggcgatactccaagaaggacatgt

SEQ ID NO: 67061 - DNA, 739 bp, Homo sapiens; identical to SEQ ID NO: 3006
  chr3:183165108-183165847
  hypo

SEQ ID NO: 67062 - DNA, 121 bp, Homo sapiens
  chr3:183183283-183183404
  hypo
caaaaaaaaaaaaaaaaaaaagaaagaaaagaaaaagaaaatgcttatccctttactgaaatgaaataccttttcttacttgtcctgcgtggcaaattcctactcatcaaaaaggtttttt

SEQ ID NO: 67063 - DNA, 34 bp, Homo sapiens; identical to SEQ ID NO: 18095
  chr3:183183703-183183737
  hypo

SEQ ID NO: 67064 - DNA, 30 bp, Homo sapiens
  chr3:183199501-183199531
  hypo
agcattccacgtgtacgatctcgtctaatc

SEQ ID NO: 67065 - DNA, 31 bp, Homo sapiens; identical to SEQ ID NO: 18096
  chr3:183199735-183199766
  hypo

SEQ ID NO: 67066 - DNA, 32 bp, Homo sapiens
  chr3:183208294-183208326
  hypo
atcatttaaaaaaaaaaagaccgggcccagtg

SEQ ID NO: 67067 - DNA, 42 bp, Homo sapiens; identical to SEQ ID NO: 18097
  chr3:183209171-183209213
  hypo

SEQ ID NO: 67068 - DNA, 249 bp, Homo sapiens
  chr3:183209978-183210227
  hypo
cagcgggctgtaggcgtacagcgctctcatggccccacctgaggagagggaggaaacacggtgggcatcgctccatttttctggtttcttccctcttaaccactaaaattcaacttctgattaggccaagtctaccctcttgccaagagaaacagtcgattgatggctctcctgaaagccagagtgggtcctaggggcagtgagttgccagcgctggagacaccgcgacacaccgtttacgtgctgcag

SEQ ID NO: 67069 - DNA, 247 bp, Homo sapiens
  chr3:183217391-183217638
  hypo
tcatttttcaatgtcacgcatgcaaactccacccacttcttattctcactctccagctcatgctctgttagcgggagcttggccacctccaggcggctgcgcctcagggggtccaggcaggtcacctctgccacaaaccgttcatccttcgtgcagccgccaatgatcatgaacacctcagactggaactcatgcatcctgggcttggtgcgttccgaaatgatctggaaatcgatgggggtacatg

SEQ ID NO: 67070 - DNA, 30 bp, Homo sapiens
  chr3:183225874-183225904
  hypo
gcttcctggagcagcgggaagacctctggg

SEQ ID NO: 67071 - DNA, 58 bp, Homo sapiens
  chr3:183245665-183245723
  hypo
gacattctgcttggtgatcagcgccttgctggtgtacgtgtagtccaacagagtgtgc

SEQ ID NO: 67072 - DNA, 151 bp, Homo sapiens; identical to SEQ ID NO: 18099
  chr3:183275003-183275154
  hypo

SEQ ID NO: 67073 - DNA, 121 bp, Homo sapiens
  chr3:183356999-183357120
  hypo
tgggctttactcttaactgaggtttccaaaggctaccactgtaaataattcgtgtcactactaagataaatataaaccactgactatgtgcttttattcatagagaagtcatgtaaaatat

SEQ ID NO: 67074 - DNA, 172 bp, Homo sapiens; identical to SEQ ID NO: 18101
  chr3:183381134-183381306
  hypo

SEQ ID NO: 67075 - DNA, 157 bp, Homo sapiens
  chr3:183419804-183419961
  hypo
tcacctctaccttctccgcttaccgaaatgctcttcatccttcaagaatcaaattccgactcatccatgaagtgaactccagccttcgaaagctttttttccccctaactactacagaacagatgatatggaaacaatctgcatcaggccagccgcg

SEQ ID NO: 67076 - DNA, 221 bp, Homo sapiens; identical to SEQ ID NO: 18103
  chr3:183479751-183479972
  hypo

SEQ ID NO: 67077 - DNA, 56 bp, Homo sapiens; identical to SEQ ID NO: 18104
  chr3:183525221-183525277
  hypo

SEQ ID NO: 67078 - DNA, 61 bp, Homo sapiens; identical to SEQ ID NO: 18105
  chr3:183525821-183525882
  hypo

SEQ ID NO: 67079 - DNA, 208 bp, Homo sapiens; identical to SEQ ID NO: 40006
  chr3:183602889-183603097
  hypo

SEQ ID NO: 67080 - DNA, 31 bp, Homo sapiens; identical to SEQ ID NO: 18107
  chr3:183627257-183627288
  hypo

SEQ ID NO: 67081 - DNA, 31 bp, Homo sapiens; identical to SEQ ID NO: 18108
  chr3:183637698-183637729
  hypo

SEQ ID NO: 67082 - DNA, 30 bp, Homo sapiens
  chr3:183639057-183639087
  hypo
aagaaaagagacttcgtcaacagggaggag

SEQ ID NO: 67083 - DNA, 45 bp, Homo sapiens
  chr3:183642079-183642124
  hypo
ttacaggcatgagccaccgtgcccggcctactccacttcctatgg

SEQ ID NO: 67084 - DNA, 67 bp, Homo sapiens; identical to SEQ ID NO: 18109
  chr3:183642827-183642894
  hypo

SEQ ID NO: 67085 - DNA, 338 bp, Homo sapiens; identical to SEQ ID NO: 18110
  chr3:183643315-183643653
  hypo

SEQ ID NO: 67086 - DNA, 18 bp, Homo sapiens
  chr3:183644369-183644387
  hypo
tttaatcaaatacttgcc

SEQ ID NO: 67087 - DNA, 199 bp, Homo sapiens; identical to SEQ ID NO: 18112
  chr3:183647990-183648189
  hypo

SEQ ID NO: 67088 - DNA, 61 bp, Homo sapiens
  chr3:183652389-183652450
  hypo
ctactaaagctacaggcgcacgatgttctacccacaccagctgcacgcgcccatggtcaat

SEQ ID NO: 67089 - DNA, 31 bp, Homo sapiens
  chr3:183657846-183657877
  hypo
gacttggaagaagtaacgcccaggaaacttg

SEQ ID NO: 67090 - DNA, 31 bp, Homo sapiens
  chr3:183659806-183659837
  hypo
aaaggatctacagttacgcatttcttttctt

SEQ ID NO: 67091 - DNA, 102 bp, Homo sapiens; identical to SEQ ID NO: 18113
  chr3:183670354-183670456
  hypo

SEQ ID NO: 67092 - DNA, 88 bp, Homo sapiens; identical to SEQ ID NO: 40007
  chr3:183676017-183676105
  hypo

SEQ ID NO: 67093 - DNA, 13 bp, Homo sapiens
  chr3:183676472-183676485
  hypo
tcccccaggctgg

SEQ ID NO: 67094 - DNA, 31 bp, Homo sapiens
  chr3:183681332-183681363
  hypo
ctctggcgctgcccaccgctcaggttggctc

SEQ ID NO: 67095 - DNA, 154 bp, Homo sapiens
  chr3:183684047-183684201
  hypo
acacaggtgtacctacgtacaccacaaactggtagcattctgatgtgcacttcaaagggttcagaagtccccagggggtctactgtggaaagccggcacttctggctgctgcacaaacaccgcacattgcagcgctatcaacagatgtaaacta

SEQ ID NO: 67096 - DNA, 31 bp, Homo sapiens
  chr3:183687201-183687232
  hypo
cagatgcagcagctcacgcctataatcccca

SEQ ID NO: 67097 - DNA, 211 bp, Homo sapiens
  chr3:183703568-183703779
  hypo
agcggcagtccccaccggcgtcaccaaaaccttggatcatcttggtgtataaatgtcagcatcagctggctggcaggtaaaaacaaacagaacacaacaacttgactgtgtttcatttgttctgattatggctaccaaggttcggtgaaacccgagcagggacaagaaataaaaatgccattttatttggggagcccgtatgtgggcagtc

SEQ ID NO: 67098 - DNA, 41 bp, Homo sapiens; identical to SEQ ID NO: 18116
  chr3:183710272-183710313
  hypo

SEQ ID NO: 67099 - DNA, 30 bp, Homo sapiens; identical to SEQ ID NO: 18117
  chr3:183713881-183713911
  hypo

SEQ ID NO: 67100 - DNA, 23 bp, Homo sapiens
  chr3:183716581-183716604
  hypo
aaacaatgactcagggccaggcg

SEQ ID NO: 67101 - DNA, 124 bp, Homo sapiens
  chr3:183720293-183720417
  hypo
gtatgaaaaacaggtaacattcgattcataagcagacagatctgctcttgcaaaagacgcttctgcgggcgctaacgccatcctcaggcctcagataatcagcgcacctatcacaccccatggc

SEQ ID NO: 67102 - DNA, 144 bp, Homo sapiens
  chr3:183728815-183728959
  hypo
caccgtgcccggcccaaactcattcttaatatctccccaatctccttttcttatgtccacgaataggtttaaatccttaccatcaatcccagacaccccaatgcctccctatcttctagaaacgcctttcctccatcctcactt

SEQ ID NO: 67103 - DNA, 31 bp, Homo sapiens
  chr3:183756606-183756637
  hypo
atggacaagggcccagcgggaacacgaggcc

SEQ ID NO: 67104 - DNA, 30 bp, Homo sapiens
  chr3:183801205-183801235
  hypo
ctttctggttgccatcgatgccctcagctt

SEQ ID NO: 67105 - DNA, 318 bp, Homo sapiens
  chr3:183801889-183802207
  hypo
gaaggaggtgagacccggagagactgagctagatgggggctcaggatggacaaacgcccagctagtggagctgtgggtgcagttcagccacgcgatggacaccctgctcttccgcctcgggaacacctaggagttgagttctgagtgtgcgcgagcagcagggttcagcttcccttggcctcagcgggccatgccaggcgctgcttctgcactgcagtcggcagacccagccccagccatgccatgatccctgctccagcccttcctgtggttaaatagaaccactgctagcactcccagaaacgagaatgtatttcc

SEQ ID NO: 67106 - DNA, 31 bp, Homo sapiens; identical to SEQ ID NO: 18120
  chr3:183806894-183806925
  hypo

SEQ ID NO: 67107 - DNA, 31 bp, Homo sapiens
  chr3:183830375-183830406
  hypo
gttttcgttgcctgctcgtaattttgtgtcc

SEQ ID NO: 67108 - DNA, 31 bp, Homo sapiens; identical to SEQ ID NO: 3010
  chr3:183851914-183851945
  hypo

SEQ ID NO: 67109 - DNA, 30 bp, Homo sapiens
  chr3:183853604-183853634
  hypo
taaatgtagaaacagcgcttgagagaagcc

SEQ ID NO: 67110 - DNA, 44 bp, Homo sapiens; identical to SEQ ID NO: 18122
  chr3:183872151-183872195
  hypo

SEQ ID NO: 67111 - DNA, 30 bp, Homo sapiens; identical to SEQ ID NO: 18123
  chr3:183886659-183886689
  hypo

SEQ ID NO: 67112 - DNA, 30 bp, Homo sapiens
  chr3:183890221-183890251
  hypo
aattaacaatacttccttggacgggtgcgg

SEQ ID NO: 67113 - DNA, 137 bp, Homo sapiens
  chr3:183891938-183892075
  hypo
agctaaggagaacatcggctcgttcatgaaaagctgtagctgacctccgggaagagtgtacagtcatggacttatttgtgaaaaggtttagtttcttccaagtagtcgcctccttcctccccgctcctctccttggg

SEQ ID NO: 67114 - DNA, 30 bp, Homo sapiens; identical to SEQ ID NO: 18125
  chr3:183895700-183895730
  hypo

SEQ ID NO: 67115 - DNA, 215 bp, Homo sapiens
  chr3:183898697-183898912
  hypo
agggtatcaagtatcgtcggaatgagctcttcctggatgtgctggagagtgtgaacctgctcatgtccccacaaggtgaggtccctctcacgacaaagttggagggggcccagggcaggatcctgggcctgcctgcctgactccgctgctccccatttatctgttccatcaccagggcaggtgctgagtgcccatgtgtcgggccgggtggtgat

SEQ ID NO: 67116 - DNA, 30 bp, Homo sapiens
  chr3:183911491-183911521
  hypo
ccaggctgaggactcgcccaggacatggac

SEQ ID NO: 67117 - DNA, 23 bp, Homo sapiens
  chr3:183918605-183918628
  hypo
gcgagactccatctcaaaataca

SEQ ID NO: 67118 - DNA, 101 bp, Homo sapiens
  chr3:183921231-183921332
  hypo
aacacagtgattggaagaacacgtgaggtatgatcggatcctgcaacggggaagggtgtgacggagcgagctgtggtcacgggatccccagccctgccttg

SEQ ID NO: 67119 - DNA, 143 bp, Homo sapiens
  chr3:184015335-184015478
  hypo
ttccttttttctcaccttacacgcacacacacacacacacagctgaagaagaaactctggggtttgcctaaaacagtcaagggctttgaagactgaaagactgagctttaaattttgattccgccgggcgcggtggctcacgc

SEQ ID NO: 67120 - DNA, 23 bp, Homo sapiens
  chr3:184015597-184015620
  hypo
gcgtggtggcacaaaaattcaac

SEQ ID NO: 67121 - DNA, 111 bp, Homo sapiens
  chr3:184018032-184018143
  hypo
tcctttttgtctgagccctgtcgtctcttgatcaggagaaggatacatccctgtatcgaccagcgctggaggaattgcgaaggcagattcgttcttctacaacttccatga

SEQ ID NO: 67122 - DNA, 87 bp, Homo sapiens; identical to SEQ ID NO: 18128
  chr3:184026271-184026358
  hypo

SEQ ID NO: 67123 - DNA, 30 bp, Homo sapiens; identical to SEQ ID NO: 18129
  chr3:184041990-184042020
  hypo

SEQ ID NO: 67124 - DNA, 74 bp, Homo sapiens
  chr3:184042660-184042734
  hypo
ggcaggcagaggaacgaggacgcctgaaggaagagctggaagaggctcgggacatagcccggcggcgctcttta

SEQ ID NO: 67125 - DNA, 144 bp, Homo sapiens
  chr3:184043271-184043415
  hypo
attgggtgccacgccgaggggatcagggtcccaagaccattgaccagatccataaggaggctgagatggaagaacatcgagagcacatcaaagtgcagcagctcatggccaagggcagtgacaagcgtcggggcggtcctccag

SEQ ID NO: 67126 - DNA, 30 bp, Homo sapiens; identical to SEQ ID NO: 18131
  chr3:184048817-184048847
  hypo

SEQ ID NO: 67127 - DNA, 80 bp, Homo sapiens
  chr3:184057168-184057248
  hypo
gttccttttcctggaggcaggcgggctgcttgctgacagggattggtggagaagggtttttgttttttgttatttatttt

SEQ ID NO: 67128 - DNA, 17 bp, Homo sapiens
  chr3:184057547-184057564
  hypo
tgagaaggggggtttta

SEQ ID NO: 67129 - DNA, 164 bp, Homo sapiens; identical to SEQ ID NO: 18133
  chr3:184059510-184059674
  hypo

SEQ ID NO: 67130 - DNA, 143 bp, Homo sapiens
  chr3:184059934-184060077
  hypo
agggctggagcaagccgagtgactcacctgctgccctggaatcagccttttcctcctattcagacctcagcgagggcgaacaagaggctcgctttgcagcaggtggatggcagaaaggggataagctacactcttggcacagg

SEQ ID NO: 67131 - DNA, 30 bp, Homo sapiens
  chr3:184064339-184064369
  hypo
acattctgggctgacgggcatggctagcac

SEQ ID NO: 67132 - DNA, 128 bp, Homo sapiens
  chr3:184067617-184067745
  hypo
tggtctggccctagctgtggccgccactctggcctttaccattgcttctccgtgggtggcctctgaatgaattacttattagccggcacagcgatctccagttgcacgggttcctaagtagtctccag

SEQ ID NO: 67133 - DNA, 108 bp, Homo sapiens
  chr3:184070506-184070614
  hypo
caggctccagccactcacctccgaagcagcctcagggggtggactgccacagaagaggctccggagggcgatgcctgccgactctgcgctccctgtgttcccaaacat

SEQ ID NO: 67134 - DNA, 31 bp, Homo sapiens; identical to SEQ ID NO: 18135
  chr3:184070999-184071030
  hypo

SEQ ID NO: 67135 - DNA, 326 bp, Homo sapiens
  chr3:184071378-184071704
  hypo
gctccctgccccttcccgaagcttcgaccctgggcaatgcccctagcacctgggacccctcctggcctcaccaggggactccactagggccagcattcggcccttggtcctgtgcagtgccaaacgcaggtcccggaaggtgcagctgagggccacatggggaacatcccgcaccatgatgtcctccacacgcacccggtactgcctgggggccgagagaggcgcttggtttgtggtcagcatggggagaggtgcccagagcattgccatcccagggccacaaggagggctccagagcccatccatggggacgggagctaaggacc

SEQ ID NO: 67136 - DNA, 80 bp, Homo sapiens; identical to SEQ ID NO: 18137
  chr3:184072026-184072106
  hypo

SEQ ID NO: 67137 - DNA, 31 bp, Homo sapiens
  chr3:184073334-184073365
  hypo
cctcaggctgggaaaccgacaggatgaaggg

SEQ ID NO: 67138 - DNA, 26 bp, Homo sapiens
  chr3:184092860-184092886
  hypo
cccccggcccacatgtagaagtttat

SEQ ID NO: 67139 - DNA, 225 bp, Homo sapiens; identical to SEQ ID NO: 40022
  chr3:184097687-184097912
  hypo

SEQ ID NO: 67140 - DNA, 281 bp, Homo sapiens; identical to SEQ ID NO: 40023
  chr3:184098371-184098652
  hypo

SEQ ID NO: 67141 - DNA, 30 bp, Homo sapiens
  chr3:184100177-184100207
  hypo
tctgtggggtgtggcgggcagtgcctcggt

SEQ ID NO: 67142 - DNA, 30 bp, Homo sapiens
  chr3:184122273-184122303
  hypo
ggattcatggggcctcgtctagtccacagc

SEQ ID NO: 67143 - DNA, 31 bp, Homo sapiens
  chr3:184127162-184127193
  hypo
ttggaggacccctacacgcagacactgcaag

SEQ ID NO: 67144 - DNA, 31 bp, Homo sapiens; identical to SEQ ID NO: 18139
  chr3:184133972-184134003
  hypo

SEQ ID NO: 67145 - DNA, 43 bp, Homo sapiens
  chr3:184144971-184145014
  hypo
atagatcagctctaagtagcacggagcctctcatagtcaccca

SEQ ID NO: 67146 - DNA, 87 bp, Homo sapiens; identical to SEQ ID NO: 18140
  chr3:184186551-184186638
  hypo

SEQ ID NO: 67147 - DNA, 30 bp, Homo sapiens
  chr3:184200586-184200616
  hypo
catcattttggtccgcgcacacacacacac

SEQ ID NO: 67148 - DNA, 219 bp, Homo sapiens; identical to SEQ ID NO: 18141
  chr3:184225974-184226193
  hypo

SEQ ID NO: 67149 - DNA, 102 bp, Homo sapiens
  chr3:184257023-184257125
  hypo
ctcacagtctccatagaaagacgtgcaggtgcacgctggctcacacacacacacagcacatgcacacacgcagcacataacgagaactaacaactggcaaac

SEQ ID NO: 67150 - DNA, 172 bp, Homo sapiens; identical to SEQ ID NO: 18142
  chr3:184273716-184273888
  hypo

SEQ ID NO: 67151 - DNA, 1099 bp, Homo sapiens; identical to SEQ ID NO: 40027
  chr3:184279131-184280230
  hypo

SEQ ID NO: 67152 - DNA, 30 bp, Homo sapiens
  chr3:184290374-184290404
  hypo
caactggcttcgcacggggttcatctggcg

SEQ ID NO: 67153 - DNA, 30 bp, Homo sapiens
  chr3:184290705-184290735
  hypo
atgtcgctcatctccgtgcgcgccttctac

SEQ ID NO: 67154 - DNA, 30 bp, Homo sapiens
  chr3:184294859-184294889
  hypo
ctgctggcccacacgcgctacacctttgag

SEQ ID NO: 67155 - DNA, 166 bp, Homo sapiens
  chr3:184295483-184295649
  hypo
ctccgtgcagctggacgggcttcggcctgacgcccgctatgtggtccaggtccgtgcccgcacagtagctggctatgggcagtacagccgccctgccgagtttgagaccacaagtgagagaggttagtagccccctgcgcctgtccccatcgcggccctcactctc

SEQ ID NO: 67156 - DNA, 31 bp, Homo sapiens
  chr3:184298770-184298801
  hypo
cgtggagcaggattaccggctgccaccaccc

SEQ ID NO: 67157 - DNA, 191 bp, Homo sapiens
  chr3:184316125-184316316
  hypo
cctcatctggaagtcagtgaccgtaatttctaccttgcatagttgctgggaagataaggcccacgagcaagcatcatgcgcgcagcacacactccacgaagagtggctgcgatgatcatgaccagacgcccagctaagcagggaaggtgacaaggaactagccgggactcggctcttcctgctgcctcagc

SEQ ID NO: 67158 - DNA, 274 bp, Homo sapiens; identical to SEQ ID NO: 40030
  chr3:184319873-184320147
  hypo

SEQ ID NO: 67159 - DNA, 111 bp, Homo sapiens; identical to SEQ ID NO: 3018
  chr3:184321762-184321873
  hypo

SEQ ID NO: 67160 - DNA, 184 bp, Homo sapiens; identical to SEQ ID NO: 40032
  chr3:184322209-184322393
  hypo

SEQ ID NO: 67161 - DNA, 183 bp, Homo sapiens
  chr3:184331110-184331293
  hypo
agtctggggtcctgcccgctgtgggctcacggggcacatgagccttcttgaatattaggtcaataatggcctggtgcagtgcaccagctagtaatatacacagaaatcaggttaatgacgtagaaggtggtgagtgcaaggcctgtagacagtggtgtgggagcgatgcgctctgccagtcta

SEQ ID NO: 67162 - DNA, 149 bp, Homo sapiens
  chr3:184340017-184340166
  hypo
tagtcaataaacatatgaaaacgtgcccagcctcactagtaatcaaagaaatgcaagtaaaaataacgccaagttaatggttttcacctgtcagatttgcaaaatttaaaagagatttgcgccgggcgcggtggctcactcctgtaatc

SEQ ID NO: 67163 - DNA, 31 bp, Homo sapiens; identical to SEQ ID NO: 18149
  chr3:184353658-184353689
  hypo

SEQ ID NO: 67164 - DNA, 89 bp, Homo sapiens
  chr3:184357509-184357598
  hypo
gagcagatgcgctggcggaaggccttgtccaaagccggcactgcagcaccggtgctcgaacgagtgagacagaacgggagaattggaga

SEQ ID NO: 67165 - DNA, 46 bp, Homo sapiens
  chr3:184378703-184378749
  hypo
ggagcaggattctggccgcagaggctgggtgcgagatagcagtgag

SEQ ID NO: 67166 - DNA, 222 bp, Homo sapiens
  chr3:184459042-184459264
  hypo
ggggaccctgacagctcccatcgggagctgagaaagaagcagaggcctctttggtggaggaatcccggcaggccggcaagtcccaacaggccgatgttgggctgctgcaggcagacagtgagtcacctgggtccccgctgcttacaggacagagccagaataatgacaataataatagaggtccacggtgctgttattaacgcccacctttcctcccaggac

SEQ ID NO: 67167 - DNA, 31 bp, Homo sapiens
  chr3:184491997-184492028
  hypo
ggaaatgaaggccaggcgcagtggctcaggc

SEQ ID NO: 67168 - DNA, 327 bp, Homo sapiens; identical to SEQ ID NO: 18152
  chr3:184626081-184626408
  hypo

SEQ ID NO: 67169 - DNA, 39 bp, Homo sapiens
  chr3:184630018-184630057
  hypo
gtggcgtttttctaactcgctcaggtacaacagtaaagt

SEQ ID NO: 67170 - DNA, 100 bp, Homo sapiens; identical to SEQ ID NO: 18153
  chr3:184661514-184661614
  hypo

SEQ ID NO: 67171 - DNA, 31 bp, Homo sapiens
  chr3:184689920-184689951
  hypo
tgccctctcagccacccgggtttaattcaag

SEQ ID NO: 67172 - DNA, 30 bp, Homo sapiens
  chr3:184769939-184769969
  hypo
ttctgtgcccagagcgtccacagcaccatt

SEQ ID NO: 67173 - DNA, 298 bp, Homo sapiens; identical to SEQ ID NO: 18154
  chr3:184784965-184785263
  hypo

SEQ ID NO: 67174 - DNA, 268 bp, Homo sapiens
  chr3:184800613-184800881
  hypo
aagaatgtcttagttgtaagacggagagaagctaatcagcataccactgaactgctacggttgttggttggagcggggcggggtgggtagaaaatatcaacagcattggaaaaaaggatccaccagacaaaggtacaaaagctcggcgtgggtccgaggctgtggcttcctgtctggactctcacacagtcgtttctatcgtttcaatcacttccaggtcagactgcgagggggagagaagggtgcactcatccggttcccagctgct

SEQ ID NO: 67175 - DNA, 94 bp, Homo sapiens; identical to SEQ ID NO: 18156
  chr3:184833595-184833689
  hypo

SEQ ID NO: 67176 - DNA, 93 bp, Homo sapiens
  chr3:184833748-184833841
  hypo
ttaggatttcaatatatgaatttggacggtgggggaccaaacattcagtcccttgcagatggtctctgcaacggagcttgtcccagtccagtg

SEQ ID NO: 67177 - DNA, 1188 bp, Homo sapiens; identical to SEQ ID NO: 40036
  chr3:184870164-184871352
  hypo

SEQ ID NO: 67178 - DNA, 30 bp, Homo sapiens
  chr3:184880672-184880702
  hypo
gactccagcacacagcgaatgtcctcgcca

SEQ ID NO: 67179 - DNA, 31 bp, Homo sapiens
  chr3:184935944-184935975
  hypo
tgattgcttcttcaaccgggtctgagtttac

SEQ ID NO: 67180 - DNA, 28 bp, Homo sapiens
  chr3:185001905-185001933
  hypo
gtgaaccactacgcgcggccactttcct

SEQ ID NO: 67181 - DNA, 46 bp, Homo sapiens
  chr3:185055820-185055866
  hypo
acatgaaaagcaatggccagtcgcagcggctcacacctgtaatccc

SEQ ID NO: 67182 - DNA, 98 bp, Homo sapiens
  chr3:185061153-185061251
  hypo
tttctgtacctaaaaaggcaacggagtgccttgtttttatttttttcctcctctgtgctgcaaacggacgactctcagcagggtatgtttatttattt

SEQ ID NO: 67183 - DNA, 106 bp, Homo sapiens
  chr3:185069788-185069894
  hypo
agcttcatctctaacaagacccggaagttgcaaacatcactcactcactcacatctcattgactagaacttagtcatgtggtcacgtgtacagccaggaaagtaca

SEQ ID NO: 67184 - DNA, 143 bp, Homo sapiens; identical to SEQ ID NO: 18159
  chr3:185191404-185191547
  hypo

SEQ ID NO: 67185 - DNA, 30 bp, Homo sapiens
  chr3:185212882-185212912
  hypo
ggccatgcacgtagcgactgtctggggtcc

SEQ ID NO: 67186 - DNA, 30 bp, Homo sapiens; identical to SEQ ID NO: 18160
  chr3:185214820-185214850
  hypo

SEQ ID NO: 67187 - DNA, 30 bp, Homo sapiens; identical to SEQ ID NO: 3021
  chr3:185233301-185233331
  hypo

SEQ ID NO: 67188 - DNA, 34 bp, Homo sapiens; identical to SEQ ID NO: 18162
  chr3:185266641-185266675
  hypo

SEQ ID NO: 67189 - DNA, 77 bp, Homo sapiens
  chr3:185270831-185270908
  hypo
ttgtatttcttcctaccgagaatttctacagctctaataggtcttttttaaaaaagaaaaacaggccggcacggtgg

SEQ ID NO: 67190 - DNA, 91 bp, Homo sapiens
  chr3:185271290-185271381
  hypo
gtaatttaattccctttctggcgagagtgcttgcaacactaactcaggcttctagtggtctgatgagcttaaaaatcaattaataagccgg

SEQ ID NO: 67191 - DNA, 361 bp, Homo sapiens
  chr3:185277644-185278005
  hypo
gcacatgtaacccaaaacttaaagtatagttaaaaaataaataagagctgccccccgccccgctcagctggaattgtctgagaacccatttcgtggcattcattgtaaactataagctctgcaagtggtgtccccgacatgatcgccttaaagttacgtgtgaaggaggagagctcatcaattttcggtgaatctccacctgaaaagaattcagaagatttaaagggagagattcctgactcctatcaggaggacacgacccacacgtaaaatatcaggtgttgagttatcatgggtcaggaaatgaccaaagaacagaaagttttttttgtttgtttgtttgttttgatatggagtctcg

SEQ ID NO: 67192 - DNA, 21 bp, Homo sapiens
  chr3:185278244-185278265
  hypo
ggcccagaaagtatttttaaa

SEQ ID NO: 67193 - DNA, 19 bp, Homo sapiens
  chr3:185301293-185301312
  hypo
tttgtttttgagacagagt

SEQ ID NO: 67194 - DNA, 105 bp, Homo sapiens; identical to SEQ ID NO: 18166
  chr3:185303179-185303284
  hypo

SEQ ID NO: 67195 - DNA, 131 bp, Homo sapiens; identical to SEQ ID NO: 18167
  chr3:185317866-185317997
  hypo

SEQ ID NO: 67196 - DNA, 81 bp, Homo sapiens; identical to SEQ ID NO: 18168
  chr3:185352336-185352417
  hypo

SEQ ID NO: 67197 - DNA, 273 bp, Homo sapiens; identical to SEQ ID NO: 18169
  chr3:185360804-185361077
  hypo

SEQ ID NO: 67198 - DNA, 116 bp, Homo sapiens
  chr3:185362625-185362741
  hypo
acacaggtgatccagaactgccgtgagtgtccttccgacgagatttccctctgggtgaattttgtgcgggtggcctcaaagctcctctctacaccgtgagacctcccaaagacttt

SEQ ID NO: 67199 - DNA, 275 bp, Homo sapiens; identical to SEQ ID NO: 18171
  chr3:185363068-185363343
  hypo

SEQ ID NO: 67200 - DNA, 30 bp, Homo sapiens; identical to SEQ ID NO: 18172
  chr3:185363726-185363756
  hypo

SEQ ID NO: 67201 - DNA, 197 bp, Homo sapiens; identical to SEQ ID NO: 18173
  chr3:185365779-185365976
  hypo

SEQ ID NO: 67202 - DNA, 296 bp, Homo sapiens
  chr3:185375183-185375479
  hypo
ctggatactgggagggcgagacaagaaagaagacatcattccaaccaggctttctcctccaggcactcaacaggtaccaagcaccttaccatgaaccccatggtgggaaggccccgccacccaaggaaatggccaaaatggtgcacaggatccttctgcggcctgcggctctgcaggtgtgaagcctgaggaagggacctgagcacaggcagcgctagtgataatcaagggcatcctcctcttgagcttctcaatttgttggattccaaaagctgtctgatcgcaggttttctgtc

SEQ ID NO: 67203 - DNA, 30 bp, Homo sapiens
  chr3:185375910-185375940
  hypo
caggtgcaacagcaacggcctaggcctctg

SEQ ID NO: 67204 - DNA, 159 bp, Homo sapiens
  chr3:185376172-185376331
  hypo
ggctggagaagtatccggagtgggtctgcagcatgagagaaagagtcagtgggcgggtgctctcagggactgtcactggcctcagggaggccagattcccaacatgcgacacaggctctctgtggcatcagctggctccactgtcgtgtctacacgcct

SEQ ID NO: 67205 - DNA, 31 bp, Homo sapiens
  chr3:185384087-185384118
  hypo
attctaaacaactggattatgcggttgtgta

SEQ ID NO: 67206 - DNA, 258 bp, Homo sapiens; identical to SEQ ID NO: 18175
  chr3:185407214-185407472
  hypo

SEQ ID NO: 67207 - DNA, 267 bp, Homo sapiens
  chr3:185445846-185446113
  hypo
agggaggggcacttccgttacgtatacctgaactatgtttgcgattcacacaaaataaagaattgaccaggaccaaccccagcctatgagaggcaaagttactgctgcccgctttaccccaccctagagcgccctctgatccacactctcacactgccttccagctttcccacggcgccagacccttgctgctcctgggccccttccccttgctcccttcatcaggcgctctccgctcctccagcccatcagcgccttgactcgggt

SEQ ID NO: 67208 - DNA, 31 bp, Homo sapiens
  chr3:185448439-185448470
  hypo
tcgagctcccgacctcaggtgatctgcccac

SEQ ID NO: 67209 - DNA, 30 bp, Homo sapiens; identical to SEQ ID NO: 18177
  chr3:185457319-185457349
  hypo

SEQ ID NO: 67210 - DNA, 31 bp, Homo sapiens
  chr3:185498444-185498475
  hypo
gaaaacatgttatatacgtgattccttctgc

SEQ ID NO: 67211 - DNA, 35 bp, Homo sapiens; identical to SEQ ID NO: 18178
  chr3:185551484-185551519
  hypo

SEQ ID NO: 67212 - DNA, 181 bp, Homo sapiens
  chr3:185551758-185551939
  hypo
tggacacaagagggaaactatgtctcaaaaaaaaaaaaaaaaagaaagaaagaaaagtctattcccagtacaatgataaaaaccagtaaataaacattgatactgtaatctgcagactcttcaaatttcaaattttatgaattgtgtcaatattattgcaaaagaaaatcccaggctgggt

SEQ ID NO: 67213 - DNA, 39 bp, Homo sapiens
  chr3:185630394-185630433
  hypo
tatttttaaaaacaatctcttcggccgggcccagtggct

SEQ ID NO: 67214 - DNA, 38 bp, Homo sapiens; identical to SEQ ID NO: 18180
  chr3:185630672-185630710
  hypo

SEQ ID NO: 67215 - DNA, 181 bp, Homo sapiens; identical to SEQ ID NO: 18181
  chr3:185643231-185643412
  hypo

SEQ ID NO: 67216 - DNA, 81 bp, Homo sapiens; identical to SEQ ID NO: 18182
  chr3:185656907-185656988
  hypo

SEQ ID NO: 67217 - DNA, 35 bp, Homo sapiens; identical to SEQ ID NO: 18183
  chr3:185667604-185667639
  hypo

SEQ ID NO: 67218 - DNA, 96 bp, Homo sapiens
  chr3:185668396-185668492
  hypo
gcgcccgaccttctattaagtcttaaactggctaccagtgtactaggaaattttgtttggtataagatatagatcgtattatttttctccatatag

SEQ ID NO: 67219 - DNA, 21 bp, Homo sapiens
  chr3:185681299-185681320
  hypo
tcaaggaaaactgtgaaggcc

SEQ ID NO: 67220 - DNA, 81 bp, Homo sapiens
  chr3:185681619-185681700
  hypo
aactgtgaaagactttgaaatgggaaaaaaaggttgctgggtgtccatgcccagggcaccgttctcacttttgtgagcctt

SEQ ID NO: 67221 - DNA, 714 bp, Homo sapiens; identical to SEQ ID NO: 40042
  chr3:185825459-185826173
  hypo

SEQ ID NO: 67222 - DNA, 473 bp, Homo sapiens; identical to SEQ ID NO: 3026
  chr3:185826424-185826897
  hypo

SEQ ID NO: 67223 - DNA, 300 bp, Homo sapiens; identical to SEQ ID NO: 3027
  chr3:185827120-185827420
  hypo

SEQ ID NO: 67224 - DNA, 26 bp, Homo sapiens
  chr3:185909804-185909830
  hypo
ttattttttgagacagagtttcgctc

SEQ ID NO: 67225 - DNA, 30 bp, Homo sapiens
  chr3:186075864-186075894
  hypo
gaaagagaaatgcacgtaaagcatccagta

SEQ ID NO: 67226 - DNA, 1081 bp, Homo sapiens; identical to SEQ ID NO: 40045
  chr3:186078689-186079770
  hypo

SEQ ID NO: 67227 - DNA, 484 bp, Homo sapiens; identical to SEQ ID NO: 3029
  chr3:186079818-186080302
  hypo

SEQ ID NO: 67228 - DNA, 44 bp, Homo sapiens; identical to SEQ ID NO: 18190
  chr3:186142829-186142873
  hypo

SEQ ID NO: 67229 - DNA, 37 bp, Homo sapiens; identical to SEQ ID NO: 18191
  chr3:186271904-186271941
  hypo

SEQ ID NO: 67230 - DNA, 35 bp, Homo sapiens
  chr3:186309944-186309979
  hypo
caattaaattatgacaatggccgggcgcggtggct

SEQ ID NO: 67231 - DNA, 31 bp, Homo sapiens; identical to SEQ ID NO: 18192
  chr3:186329021-186329052
  hypo

SEQ ID NO: 67232 - DNA, 30 bp, Homo sapiens; identical to SEQ ID NO: 18193
  chr3:186338548-186338578
  hypo

SEQ ID NO: 67233 - DNA, 30 bp, Homo sapiens
  chr3:186370493-186370523
  hypo
acagagcgtgcacacgtagagtggctagtg

SEQ ID NO: 67234 - DNA, 192 bp, Homo sapiens
  chr3:186409539-186409731
  hypo
gtgtccttcatcagacatgtacgatcatgaattgcgtgcaaccccatttgacctatccgctccatcctggtgggcgtgaacattctccgattgccaagcctccatgtaaggatccttgccaagccccaaggatccagagatcatcgtcatcctgagaagccacatgaacacgatgcccacttccagtagatg

SEQ ID NO: 67235 - DNA, 100 bp, Homo sapiens; identical to SEQ ID NO: 18195
  chr3:186429028-186429128
  hypo

SEQ ID NO: 67236 - DNA, 185 bp, Homo sapiens
  chr3:186471881-186472066
  hypo
tgtttgttgttggtgctgactcgcaggcatggtaagtcgtttccatgtatgtctggagtataagttcatcggtagcagggcttggtttttcctgagagaattcactgtgagaaagagtcttggcacgtctgttctctgttgacacttgccgagagtcttggaacgtcactgggcttgtacacatt

SEQ ID NO: 67237 - DNA, 20 bp, Homo sapiens
  chr3:186495279-186495299
  hypo
atgaagggccgggtgcggtg

SEQ ID NO: 67238 - DNA, 30 bp, Homo sapiens
  chr3:186530316-186530346
  hypo
gacagtctgttatagcgacaaaatggacaa

SEQ ID NO: 67239 - DNA, 48 bp, Homo sapiens; identical to SEQ ID NO: 3030
  chr3:186544978-186545026
  hypo

SEQ ID NO: 67240 - DNA, 23 bp, Homo sapiens
  chr3:186629364-186629387
  hypo
caagactccgtctcaaaaaaaga

SEQ ID NO: 67241 - DNA, 27 bp, Homo sapiens
  chr3:186663470-186663497
  hypo
taattagaagtgtaccttttccggctg

SEQ ID NO: 67242 - DNA, 168 bp, Homo sapiens; identical to SEQ ID NO: 18198
  chr3:186697395-186697563
  hypo

SEQ ID NO: 67243 - DNA, 30 bp, Homo sapiens; identical to SEQ ID NO: 18199
  chr3:186731783-186731813
  hypo

SEQ ID NO: 67244 - DNA, 203 bp, Homo sapiens; identical to SEQ ID NO: 18200
  chr3:186783727-186783930
  hypo

SEQ ID NO: 67245 - DNA, 30 bp, Homo sapiens; identical to SEQ ID NO: 18201
  chr3:186795537-186795567
  hypo

SEQ ID NO: 67246 - DNA, 51 bp, Homo sapiens; identical to SEQ ID NO: 18202
  chr3:186938674-186938725
  hypo

SEQ ID NO: 67247 - DNA, 30 bp, Homo sapiens; identical to SEQ ID NO: 18203
  chr3:186945828-186945858
  hypo

SEQ ID NO: 67248 - DNA, 144 bp, Homo sapiens
  chr3:187281940-187282084
  hypo
ggaggttgcagtgagacaagatcacaccattccagtccagactaggcaacgaaagtgaaactccatctcgagaagaaaaaatgaacacatgatttggtagcggaaaggacaataagatgatgcgaagactaggaaactagatca

SEQ ID NO: 67249 - DNA, 376 bp, Homo sapiens
  chr3:187443047-187443423
  hypo
tgcccactctgctcacctacccgctctgctcacctgcccgctctgctcacctgcccgctctgctcacctgcacacggggactgagtgggactttctcctgcccgctctgctcacctgcccgctccgcttgcctgcccgctccacttgcctgcccactcctccgcttgcctgcccactcctccgctcgcctgcccgctccgctcgcctgcccgctccgctcgcctgcccactctgctcacctgtacaaatctggctccgcaggtttcgcatttgtagggcttctctccagagtgaattcgagtgtgggttttcaggttggctggccggttgaactgggccccacagatgttgcaacgatagggtttctcacctatta

SEQ ID NO: 67250 - DNA, 2819 bp, Homo sapiens; identical to SEQ ID NO: 40057
  chr3:187455341-187458160
  hypo

SEQ ID NO: 67251 - DNA, 249 bp, Homo sapiens; identical to SEQ ID NO: 40060
  chr3:187462563-187462812
  hypo

SEQ ID NO: 67252 - DNA, 210 bp, Homo sapiens; identical to SEQ ID NO: 40061
  chr3:187463099-187463309
  hypo

SEQ ID NO: 67253 - DNA, 29 bp, Homo sapiens
  chr3:187559335-187559364
  hypo
taatgcgcgtaaaagacagagttaattcc

SEQ ID NO: 67254 - DNA, 17 bp, Homo sapiens
  chr3:187869996-187870013
  hypo
agccatgttcatatttt

SEQ ID NO: 67255 - DNA, 172 bp, Homo sapiens
  chr3:187930466-187930638
  hypo
cccttgttctggaagctgaggcgagaatgtctcagttctgttcccttcaggcttcgagaccaccgccttgctgtgtcccgtagtggactgagggcctgcaagagggagtgagggctagtggagggccagctgcctgtgggggctggacatcgtgtgagtacatcattactgc

SEQ ID NO: 67256 - DNA, 84 bp, Homo sapiens
  chr3:187984521-187984605
  hypo
cgagttattgccatgcgggtggctctccaagcattccagttgcatagctcttccagaaatatttcttgacgcacttatttagca

SEQ ID NO: 67257 - DNA, 30 bp, Homo sapiens; identical to SEQ ID NO: 18207
  chr3:188067316-188067346
  hypo

SEQ ID NO: 67258 - DNA, 165 bp, Homo sapiens; identical to SEQ ID NO: 18208
  chr3:188070250-188070415
  hypo

SEQ ID NO: 67259 - DNA, 39 bp, Homo sapiens
  chr3:188246126-188246165
  hypo
ccagctttttttttaaacggagctttcatttaaatcttt

SEQ ID NO: 67260 - DNA, 95 bp, Homo sapiens; identical to SEQ ID NO: 18209
  chr3:188353740-188353835
  hypo

SEQ ID NO: 67261 - DNA, 33 bp, Homo sapiens
  chr3:189160151-189160184
  hypo
attgacattttaaaaagttcccggctgggcacc

SEQ ID NO: 67262 - DNA, 30 bp, Homo sapiens; identical to SEQ ID NO: 40063
  chr3:189508455-189508485
  hypo

SEQ ID NO: 67263 - DNA, 203 bp, Homo sapiens
  chr3:189557796-189557999
  hypo
tgtctacttcacagcttactgcgatgatcatataagacataaagaacttagcgaagtgcctagactgtagatcacagtacgtgttagctttttgtgttttatacatcaagcgtaagtcttattttttacatctgtcatattaccctttccccagtattcagagtatttgagtgtatacgtacgggtggtaagtgttgtttttc

SEQ ID NO: 67264 - DNA, 94 bp, Homo sapiens; identical to SEQ ID NO: 18210
  chr3:189618731-189618825
  hypo

SEQ ID NO: 67265 - DNA, 30 bp, Homo sapiens; identical to SEQ ID NO: 40064
  chr3:189645917-189645947
  hypo

SEQ ID NO: 67266 - DNA, 28 bp, Homo sapiens
  chr3:189900046-189900074
  hypo
gcgcccagccggtcgtttatctcttgaa

SEQ ID NO: 67267 - DNA, 298 bp, Homo sapiens
  chr3:189900375-189900673
  hypo
gagtactttcacaaacatttacgctctaaatgctgtcagtgaatcagtaagttattaatgttttcttttacgtttgaagaaatcgactcacagttaaagtggcttcgaggtcacagtaatatagagattcttgcccggagacaagaaagagcactgagttataatgccaaagtgaccagcatcgtgactttggaattataactcggtgctctgtcttgtctccggcacaagaagctctatattactgtgaagcatgtctataaccaaggcattacacgaatggagcagtgcaaatggt

SEQ ID NO: 67268 - DNA, 20 bp, Homo sapiens
  chr3:190116998-190117018
  hypo
aaaatgtttttaggctgggc

SEQ ID NO: 67269 - DNA, 43 bp, Homo sapiens
  chr3:190278464-190278507
  hypo
ctagtttcagcctgtcacctgcgggctaggtgagagaattcag

SEQ ID NO: 67270 - DNA, 31 bp, Homo sapiens
  chr3:190421350-190421381
  hypo
catggcagaggtactacgtagattataaacc

SEQ ID NO: 67271 - DNA, 94 bp, Homo sapiens
  chr3:190595740-190595834
  hypo
atgtggaccaggtgttggcctcgaactcgcactctcgaaccctcgcctccctgaaggcccgagggcaggcgcaaccggccggagccacaatggc

SEQ ID NO: 67272 - DNA, 30 bp, Homo sapiens; identical to SEQ ID NO: 40069
  chr3:191046934-191046964
  hypo

SEQ ID NO: 67273 - DNA, 586 bp, Homo sapiens; identical to SEQ ID NO: 3045
  chr3:192126786-192127372
  hypo

SEQ ID NO: 67274 - DNA, 174 bp, Homo sapiens; identical to SEQ ID NO: 3046
  chr3:192127556-192127730
  hypo

SEQ ID NO: 67275 - DNA, 274 bp, Homo sapiens; identical to SEQ ID NO: 40074
  chr3:192127936-192128210
  hypo

SEQ ID NO: 67276 - DNA, 286 bp, Homo sapiens; identical to SEQ ID NO: 3049
  chr3:192232532-192232818
  hypo

SEQ ID NO: 67277 - DNA, 102 bp, Homo sapiens; identical to SEQ ID NO: 3050
  chr3:192232849-192232951
  hypo

SEQ ID NO: 67278 - DNA, 255 bp, Homo sapiens; identical to SEQ ID NO: 3051
  chr3:192233094-192233349
  hypo

SEQ ID NO: 67279 - DNA, 22 bp, Homo sapiens
  chr3:192495248-192495270
  hypo
agtaacaattatcataaaagac

SEQ ID NO: 67280 - DNA, 547 bp, Homo sapiens; identical to SEQ ID NO: 40081
  chr3:192635621-192636168
  hypo

SEQ ID NO: 67281 - DNA, 32 bp, Homo sapiens
  chr3:192670615-192670647
  hypo
cactcaaaaccagcagcaggccgggcgcggtg

SEQ ID NO: 67282 - DNA, 29 bp, Homo sapiens
  chr3:192858850-192858879
  hypo
gtattaaagaaatttatgggccgggcacg

SEQ ID NO: 67283 - DNA, 28 bp, Homo sapiens
  chr3:193235270-193235298
  hypo
ttattttattttattttgagacggagtt

SEQ ID NO: 67284 - DNA, 88 bp, Homo sapiens; identical to SEQ ID NO: 18221
  chr3:193235537-193235625
  hypo

SEQ ID NO: 67285 - DNA, 87 bp, Homo sapiens; identical to SEQ ID NO: 18222
  chr3:193312127-193312214
  hypo

SEQ ID NO: 67286 - DNA, 27 bp, Homo sapiens
  chr3:193312453-193312480
  hypo
accgtgagccaccgcgcccggcccaat

SEQ ID NO: 67287 - DNA, 176 bp, Homo sapiens; identical to SEQ ID NO: 18224
  chr3:193391747-193391923
  hypo

SEQ ID NO: 67288 - DNA, 220 bp, Homo sapiens
  chr3:193392561-193392781
  hypo
tacggatgagaatatcgtctgtgaagtagtatgagatggaaattttcctagaaagattattgtactcggaatttggaactgaaaagtgtagaaaggggaagtgatgtgtttaaaactgtttgcggaggtggggctctgccatgtgtattttgacaaagctacacaggtgattcttgccatccccgattaccgtgtacccgcctgcccctgagctggcact

SEQ ID NO: 67289 - DNA, 414 bp, Homo sapiens
  chr3:193419603-193420017
  hypo
ttctgagagtgtaattttgttcgcgtcaaaagcattgttttcttatcctgttggtggagtgaggcatttggacctggatgctctccccattgggcgccccccgttggtacgtttcgccagctgtgtactctatgattggctggccttttgatgtgcaggtactacaagttggtcacaaacttgtgtacaatgggcctgttctggttcatgtgaaaatcaacatccttttttgtgttaccgggtgacaggatgctacaatactattagcatttgcaaagagtgtgctctgtccaagggtgtaaccacaggtcgtgtgctgctcactttgtgtttctctattatgtgagagacacaaagaagctgagggctcgcaaaggcctgtcaaatcttgtaatgtggcgctcgacccccaaa

SEQ ID NO: 67290 - DNA, 80 bp, Homo sapiens; identical to SEQ ID NO: 18227
  chr3:193428485-193428565
  hypo

SEQ ID NO: 67291 - DNA, 68 bp, Homo sapiens; identical to SEQ ID NO: 18228
  chr3:193428949-193429017
  hypo

SEQ ID NO: 67292 - DNA, 46 bp, Homo sapiens; identical to SEQ ID NO: 18229
  chr3:193438389-193438435
  hypo

SEQ ID NO: 67293 - DNA, 30 bp, Homo sapiens
  chr3:193450100-193450130
  hypo
tagccaggagaagacgtgcagagcagcctc

SEQ ID NO: 67294 - DNA, 302 bp, Homo sapiens; identical to SEQ ID NO: 18230
  chr3:193455064-193455366
  hypo

SEQ ID NO: 67295 - DNA, 31 bp, Homo sapiens
  chr3:193481550-193481581
  hypo
tttttcttacatatcacgttcaatgtcagca

SEQ ID NO: 67296 - DNA, 31 bp, Homo sapiens
  chr3:193481891-193481922
  hypo
ctttggggcctttgtacggcgcctctctcag

SEQ ID NO: 67297 - DNA, 252 bp, Homo sapiens
  chr3:193490129-193490381
  hypo
ccgccatcatttttccgtggaggtgttgccatagagatgttgtctgatccatctctattgatatcaccctttaaaggggcccctgaataggcactgaggtaggtaaatgtatgcagtgacattgagcggatgattctattctgaaaaattcctgcaccatttgtttctgtgcttgtctgagggccgggacacggtgttgggttttgttgcacgtgctctcttcacaggcccggagttaatgcaagccttgtt

SEQ ID NO: 67298 - DNA, 30 bp, Homo sapiens
  chr3:193493018-193493048
  hypo
gaaaggatttcaagcgagggaatgacaagg

SEQ ID NO: 67299 - DNA, 36 bp, Homo sapiens
  chr3:193503309-193503345
  hypo
ggttccccaggccgggcgcggtggctcacgcctgta

SEQ ID NO: 67300 - DNA, 209 bp, Homo sapiens
  chr3:193505271-193505480
  hypo
cagctgccaccccattcggtacttctctcaaggcacacgggcggtgtggcagagcctgttccttgctgaccagtgtccattccccctttcttccttagtatcggattccagttttatctggagtggtgatgaggctacatttccagccctccttgcagcaaggatggccaacgagacgcaagcacaagtcatgacgtgggtcttcaagg

SEQ ID NO: 67301 - DNA, 103 bp, Homo sapiens
  chr3:193509944-193510047
  hypo
ataggtgtgtgtgtggcggggtgtggtggggggcggtaaccatggaggcattggaccagttgttcaaaagggaccttctcagttctaggtatttgtttggttt

SEQ ID NO: 67302 - DNA, 161 bp, Homo sapiens
  chr3:193513919-193514080
  hypo
attacaggcatgagccaccccgcccggctgaccctgaccctctttactccagccacgctgctcttcttccatccccccatactcacggggtccctcctctcgtagggcctttgtacattcgactcccgccagcaaatcccgttcttcccctcttcacctgg

SEQ ID NO: 67303 - DNA, 153 bp, Homo sapiens; identical to SEQ ID NO: 18234
  chr3:193548631-193548784
  hypo

SEQ ID NO: 67304 - DNA, 31 bp, Homo sapiens
  chr3:193577777-193577808
  hypo
tatgaaaacaaagatacgtttgtttgagcat

SEQ ID NO: 67305 - DNA, 434 bp, Homo sapiens
  chr3:193586964-193587398
  hypo
gaaggatgcctgaaatgcctccgctgcagcttgctagaggccttctaattaacctgcgaagaaccgtctgcaggcccccagtccggtgttcactcgttcattcattcgctcttcactgggtgccctggcactccaagcctccagcgcacacccagccctaaccttgaccagggtgctgagcacgaggagccccaccctgagccaggcctggagaggcgcctttaagcgcaggtcctgcggctgctgacaggtcatcagagctgggaccaaagacccgccgggaggctggcagcctaggtcgcttcccaagctctccgggcccttcccttcggcggctaatttccacttttcataaggatgtgttcattcaggggactaggagcagaggcgcgcccgatgggggacacgtgccccctcgacggcacgcgctttga

SEQ ID NO: 67306 - DNA, 173 bp, Homo sapiens
  chr3:193588184-193588357
  hypo
agatctagaactcaggtgctacgctgtcggcctgctgttggtctgcggagctactatatagctgttgcgtgactcagggaacacctggggcgtgactgacaggtggagaagggtcaaggtggttggagcccaagcgtggataagacagccccggagggagaggccagcctggg

SEQ ID NO: 67307 - DNA, 30 bp, Homo sapiens
  chr3:193589851-193589881
  hypo
aagcgcgttttttcacgtaatcctcacagt

SEQ ID NO: 67308 - DNA, 31 bp, Homo sapiens
  chr3:193595776-193595807
  hypo
gcgagactccgtctcaaaaaaaaaaaaaaaa

SEQ ID NO: 67309 - DNA, 148 bp, Homo sapiens; identical to SEQ ID NO: 18237
  chr3:193659934-193660082
  hypo

SEQ ID NO: 67310 - DNA, 31 bp, Homo sapiens; identical to SEQ ID NO: 18238
  chr3:193663524-193663555
  hypo

SEQ ID NO: 67311 - DNA, 170 bp, Homo sapiens; identical to SEQ ID NO: 18239
  chr3:193711553-193711723
  hypo

SEQ ID NO: 67312 - DNA, 207 bp, Homo sapiens; identical to SEQ ID NO: 3056
  chr3:193721400-193721607
  hypo

SEQ ID NO: 67313 - DNA, 31 bp, Homo sapiens; identical to SEQ ID NO: 40088
  chr3:193852179-193852210
  hypo

SEQ ID NO: 67314 - DNA, 70 bp, Homo sapiens; identical to SEQ ID NO: 3058
  chr3:193852643-193852713
  hypo

SEQ ID NO: 67315 - DNA, 31 bp, Homo sapiens; identical to SEQ ID NO: 3059
  chr3:193853961-193853992
  hypo

SEQ ID NO: 67316 - DNA, 312 bp, Homo sapiens; identical to SEQ ID NO: 3062
  chr3:193858569-193858881
  hypo

SEQ ID NO: 67317 - DNA, 282 bp, Homo sapiens; identical to SEQ ID NO: 3063
  chr3:193858949-193859231
  hypo

SEQ ID NO: 67318 - DNA, 95 bp, Homo sapiens
  chr3:193903173-193903268
  hypo
ctcaaagcgctgaggcgcgatgaatgagcaaccagccctttccctgcctcttgccccagagatggcactgcaggcggtaccggtttccagcactc

SEQ ID NO: 67319 - DNA, 204 bp, Homo sapiens
  chr3:193922614-193922818
  hypo
gcactgtccgaaactcgcctggacaagtccaacttcattcttttcagtacgactagctcctgtgcgctgcagaagactcgggctgatctgaaagcgcctctcctattcgagactctcaggttttaagtaggtcttccgcacctgcagatgaaaaaagatgtggctattattttcctcgattacgttgacattgcctgaaaatga

SEQ ID NO: 67320 - DNA, 112 bp, Homo sapiens
  chr3:193940698-193940810
  hypo
aggcttctgagcatcccgtaccctcttccagacaacctagtgcaatcactgtggatcttaggtagctgaggccgcaggacacagaaggggtgtttgccgctttcactaagct

SEQ ID NO: 67321 - DNA, 294 bp, Homo sapiens; identical to SEQ ID NO: 18246
  chr3:193970000-193970294
  hypo

SEQ ID NO: 67322 - DNA, 151 bp, Homo sapiens; identical to SEQ ID NO: 40098
  chr3:193987503-193987654
  hypo

SEQ ID NO: 67323 - DNA, 31 bp, Homo sapiens; identical to SEQ ID NO: 18247
  chr3:194012830-194012861
  hypo

SEQ ID NO: 67324 - DNA, 19 bp, Homo sapiens
  chr3:194041069-194041088
  hypo
actcccagcactttgggag

SEQ ID NO: 67325 - DNA, 648 bp, Homo sapiens
  chr3:194048750-194049398
  hypo
acacacaaccacacaacggtgtggctgaagccagcagaaatgaaaagtcctctggtacctccccttcaaacagctcacactcatgcgggtcactgtggcacggcgccctcacacgcgcatccgcagagcgcacctgtcccagcgtggccaagaccgcctctttcacccagggccctctgtggacgttagtctgctctgagtcacccctggataactgaggacttgcctgtcaagtatgaaacatttagcacgtacagtcctttgagtggaattagagtggaagagtgtaactcagcgtgtaagagttgcctgctgctgctttgaacagagggtaattgcagcagatgccttcagcccctgctcttttcagcagccactgtacagggcggttccaccccatctcccacctcccggcccagctctctgatgtctctgcccggtggcgttccccgatgcccctttgcctgagcgccgaagcgtggggagtggaagctggcggtgggagccggtggaggcatgcgcgcctcctgtgcttcaggaaggcagccctggagaccttctggatgcttcccaggaaggccccacagcagccaccacagccagcacgtttttctctaccggttttcccccttccgcatctcatggtcc

SEQ ID NO: 67326 - DNA, 94 bp, Homo sapiens
  chr3:194058379-194058473
  hypo
aagtttagcaactgagccgcacgtacacagagaacctgaaagacctgagtgtgaatcacagaaatgccagcgaaaacagcgtaggtgtcattct

SEQ ID NO: 67327 - DNA, 172 bp, Homo sapiens
  chr3:194061693-194061865
  hypo
tgaaaagccaaggcttcggagactcagctcccctccgcccctacctgtcgcctggtcaggccccagaggcccccttccccagctcctgtatgcgctgctactagggccctgctgcccgagcctcgatagacacggtgagccgcagagaaccgcagctcgacctcaggtccca

SEQ ID NO: 67328 - DNA, 203 bp, Homo sapiens
  chr3:194066804-194067007
  hypo
cagttcccaaagctcccgcacatacatcttgatcctcagcgcaaacctagaagtgcccagggcaggcagactggggctcccggagctacagtgactggcccaagggaacacaacacagaagcgaggggccagggccagtcctgacagcccgggctctgcagggaagatggacccggggaggcagcccacggaggccggggtcc

SEQ ID NO: 67329 - DNA, 83 bp, Homo sapiens
  chr3:194078511-194078594
  hypo
cattagaaagacactagattccgttacacttcgttttcaattaaaggatctcatctctgagcgatttcacttcccctaagtga

SEQ ID NO: 67330 - DNA, 30 bp, Homo sapiens; identical to SEQ ID NO: 18251
  chr3:194080502-194080532
  hypo

SEQ ID NO: 67331 - DNA, 213 bp, Homo sapiens
  chr3:194128257-194128470
  hypo
tctccctctcctccctggccccgctgagagcacggtaaacgtgactcaccgctctcaatgttaaaggtctgctagcttaagcctgtcaacaaaacacaatcagctgcactgctaccaagaatttaaaggcaaaaaaggtggacaaaagtaagctacgtggcattctggggtggggacggggaaagtctgaagattactcgcctagtagccttt

SEQ ID NO: 67332 - DNA, 112 bp, Homo sapiens
  chr3:194166904-194167016
  hypo
aatatagcatgtcctcaaatacgattgttttgtccgtctttttttataacacgatgggtgccagtggtggggagagctgaggcccagccgcgaccactatctacatggagtt

SEQ ID NO: 67333 - DNA, 30 bp, Homo sapiens; identical to SEQ ID NO: 18252
  chr3:194171233-194171263
  hypo

SEQ ID NO: 67334 - DNA, 283 bp, Homo sapiens; identical to SEQ ID NO: 40099
  chr3:194207974-194208257
  hypo

SEQ ID NO: 67335 - DNA, 77 bp, Homo sapiens; identical to SEQ ID NO: 40100
  chr3:194208467-194208544
  hypo

SEQ ID NO: 67336 - DNA, 148 bp, Homo sapiens
  chr3:194228175-194228323
  hypo
acctagttttcagcaccgaagcgaagctctcaagactttgtcaaaggtcaggcagttaacttaatggccgcaggaaaagcaaagtccaggtctcccctctgcttctgcaaagaaccggttctgttggtccagtcgcttgagttcctac

SEQ ID NO: 67337 - DNA, 116 bp, Homo sapiens; identical to SEQ ID NO: 3066
  chr3:194278584-194278700
  hypo

SEQ ID NO: 67338 - DNA, 241 bp, Homo sapiens
  chr3:194301030-194301271
  hypo
ctggcgagaatctttctttactcctgttctttctcacccagctggctttgaaaaacttccaacctacagaaaagatgaaagaataacgaacatgtttatgctattcgcctagattaatccattgttcccgtttttccgtttgctttgtctctctccaactacctgaaaaatttataatttttttctgctgaaatatttaaaagtcagttgcttggggccaggtgcggtggctcacacctgt

SEQ ID NO: 67339 - DNA, 30 bp, Homo sapiens
  chr3:194303490-194303520
  hypo
cgccacacaaccctcggatgcgaagacggt

SEQ ID NO: 67340 - DNA, 16 bp, Homo sapiens
  chr3:194303993-194304009
  hypo
gcccaaaagattttaa

SEQ ID NO: 67341 - DNA, 148 bp, Homo sapiens
  chr3:194316643-194316791
  hypo
gcacccggctgatggtctgtatttcttacctgctatatctgacagccctcctcaggatcatgaaaggcttcctggaggaagggggatttagacaggacagcgaaaggtaggagaagacagataggcagagaaacgcagagaagagaaa

SEQ ID NO: 67342 - DNA, 218 bp, Homo sapiens
  chr3:194324944-194325162
  hypo
caaggagcacccagcaagtgtcggcgaacgatggcacccacgcacccgcccagcaggcaacagccgtgtacctccaggtcggagttgatggaggagacctcagaggagctgccggaagacacccgggcccggatgacctgaacgggagggtacgacggggggtcctgcagggacgcatctccggcgctcgtctgcccgtcacctggcagcctggtggc

SEQ ID NO: 67343 - DNA, 37 bp, Homo sapiens
  chr3:194335589-194335626
  hypo
aacatttgtataattgcgaaaccggaggatcctatgg

SEQ ID NO: 67344 - DNA, 31 bp, Homo sapiens
  chr3:194338061-194338092
  hypo
gtggcacagcaggttgcggggcaagccctct

SEQ ID NO: 67345 - DNA, 35 bp, Homo sapiens
  chr3:194341459-194341494
  hypo
gttgaagtccctaggccgggcgtggtggctcaaac

SEQ ID NO: 67346 - DNA, 31 bp, Homo sapiens
  chr3:194344004-194344035
  hypo
ctacccagcaggtagccgaggatctcagtat

SEQ ID NO: 67347 - DNA, 572 bp, Homo sapiens; identical to SEQ ID NO: 40102
  chr3:194353931-194354503
  hypo

SEQ ID NO: 67348 - DNA, 220 bp, Homo sapiens
  chr3:194365660-194365880
  hypo
gagacctagctcttcccatggcgccccagactaggatgaaatctctttcttcttttctcgtttgcattcccactcaagtattcttcagtatacggacatgatcatacttatggtgaatattttccaaaacaaaactcaagacataactggacagttacggtaatgccgggttagactgttaaagtcaggagagttcctcgactcctgtatgtggggttgc

SEQ ID NO: 67349 - DNA, 241 bp, Homo sapiens
  chr3:194374238-194374479
  hypo
tctcacaaaaaaaaaaaaaagatgaacaggggacaagcaaagttcgacggagatggaaaggtgaacacagggaggagacaacgaaagcctttcagttcagtgccgtgacagacaaccatcgagggtggcgccctcctggaggggagaattggaccttcccttcactttttactttatatgtttctgtactatttgaactctgtacaaagaacatgtattacttttgtaatttaaaataact

SEQ ID NO: 67350 - DNA, 21 bp, Homo sapiens
  chr3:194411156-194411177
  hypo
tacaggcgtgagccactgtac

SEQ ID NO: 67351 - DNA, 31 bp, Homo sapiens; identical to SEQ ID NO: 18260
  chr3:194431442-194431473
  hypo

SEQ ID NO: 67352 - DNA, 77 bp, Homo sapiens
  chr3:194558267-194558344
  hypo
agatgggagcatgccccgccagggcagggggcctgggaatccgtggagtgggagctggtcccgcgtgtaggtggttg

SEQ ID NO: 67353 - DNA, 30 bp, Homo sapiens
  chr3:194578140-194578170
  hypo
tcataaagataacgcgtgtgcatcttctcc

SEQ ID NO: 67354 - DNA, 187 bp, Homo sapiens; identical to SEQ ID NO: 18261
  chr3:194596887-194597074
  hypo

SEQ ID NO: 67355 - DNA, 31 bp, Homo sapiens; identical to SEQ ID NO: 40109
  chr3:194602924-194602955
  hypo

SEQ ID NO: 67356 - DNA, 185 bp, Homo sapiens
  chr3:194669149-194669334
  hypo
catgctctaggagaggcggaaggaaacgagtaaacaagaatattatgctgttttgcttgttgttgctgcattcggcaagatattacaagaaaaacaatgagctcagaaaagaactgctcaattcacaagaagaaatgaaacagaatggagagaatcagaaattcgggacacgcagcaatggggaa

SEQ ID NO: 67357 - DNA, 31 bp, Homo sapiens; identical to SEQ ID NO: 18262
  chr3:194670887-194670918
  hypo

SEQ ID NO: 67358 - DNA, 21 bp, Homo sapiens
  chr3:194706825-194706846
  hypo
cgcgcccggcctcaacctcag

SEQ ID NO: 67359 - DNA, 31 bp, Homo sapiens; identical to SEQ ID NO: 18264
  chr3:194755642-194755673
  hypo

SEQ ID NO: 67360 - DNA, 64 bp, Homo sapiens; identical to SEQ ID NO: 18265
  chr3:194766333-194766397
  hypo

SEQ ID NO: 67361 - DNA, 49 bp, Homo sapiens
  chr3:194783224-194783273
  hypo
cagcctccttccacagcggcatatgccactcatgcggaggcagctctga

SEQ ID NO: 67362 - DNA, 31 bp, Homo sapiens; identical to SEQ ID NO: 18266
  chr3:194790031-194790062
  hypo

SEQ ID NO: 67363 - DNA, 85 bp, Homo sapiens
  chr3:194790285-194790370
  hypo
agcacagtgacctgcccggcaggaggtctcagcaccttaatcacaggacttccctgcggtgtctctctagcgggtcagacactgc

SEQ ID NO: 67364 - DNA, 159 bp, Homo sapiens
  chr3:194790634-194790793
  hypo
ggtccccgaggtggccgcggaagtggtacttgtcggccagctgctgcacctgcgccggctccagcaggcggctgtagagcggggactggcgcatggcctccaggttcagcaacatcaccccgctgttgaagcccggcagcccctcggggggcgggcccc

SEQ ID NO: 67365 - DNA, 53 bp, Homo sapiens
  chr3:194793569-194793622
  hypo
tgtgtctgctggttctcgtagaggaatcgcatcagcctcggggtagaaggaat

SEQ ID NO: 67366 - DNA, 31 bp, Homo sapiens; identical to SEQ ID NO: 18268
  chr3:194798290-194798321
  hypo

SEQ ID NO: 67367 - DNA, 39 bp, Homo sapiens; identical to SEQ ID NO: 18269
  chr3:194799661-194799700
  hypo

SEQ ID NO: 67368 - DNA, 31 bp, Homo sapiens; identical to SEQ ID NO: 18270
  chr3:194817220-194817251
  hypo

SEQ ID NO: 67369 - DNA, 70 bp, Homo sapiens
  chr3:194818058-194818128
  hypo
catcctcactaaactttgtgacgcgggttacagcaatggcaaatgcgtatcaacacgtatctagcaccac

SEQ ID NO: 67370 - DNA, 30 bp, Homo sapiens
  chr3:194824115-194824145
  hypo
acgccagcggcctgcgtccatcaccccacg

SEQ ID NO: 67371 - DNA, 164 bp, Homo sapiens
  chr3:194825298-194825462
  hypo
ggcagtggggacgaggcggggacccgggagatccagacagcgtggcacgaccacctgagagaggctgctgctgttcagctgaggccaggggttctggagaaaaggcaggcctagtatcatcctgacttctgagttttaaaggaaagctacggaataccttgatt

SEQ ID NO: 67372 - DNA, 125 bp, Homo sapiens
  chr3:194832847-194832972
  hypo
ttattcttaaaacccacgagaccatttctagccgtcaggagggcccatgaactaggaaactgaggcttgctgacatctcagcgacacctgggcaaaagcctactggaatccgggtcaggttctgt

SEQ ID NO: 67373 - DNA, 602 bp, Homo sapiens
  chr3:194835411-194836013
  hypo
agcacttgatgtagaaggcagcgcggctttgcccacattccctgaacctctgtcaagcttgtgacaagctttcgtcaatcagacgaaactaagtgaaaaagcaatcgcttttggagcacgcaggaaggtagcagtcttacaggcttagaaaaccagggaggagtgaagccgctcagtggtctccctgccggtgcaaggaggctgccacctgcagaaggtgctaacgccaagtgtgggaagacaccggggtcggcctgggcgcagtcactcctgggtggaggctgagcttgggagtgtgaatgccgcaggccccacccgttccactcgtcaaaatcgtacctagctgaggttgcacagttggctcctcccaaacctcccgttgatcctcctcctattgagaggttggaacgagggaaactaagcttcccagatgcccaaacggcgagagctcgggacgtgaatcaggtgctgcgactcgggaactagtgtgctcacatgagacgtgcccggtgagaatgtggcttctggctgtcactgctggttagacggtcccagtcaccttgaacccaggtcgtgctgccgcttcctgagtaccagaaaag

SEQ ID NO: 67374 - DNA, 31 bp, Homo sapiens
  chr3:194841585-194841616
  hypo
atgtcaggccagcccccgccctgttcccaga

SEQ ID NO: 67375 - DNA, 31 bp, Homo sapiens
  chr3:194841831-194841862
  hypo
gggaaccacagcacaccggccatgcccttgg

SEQ ID NO: 67376 - DNA, 505 bp, Homo sapiens
  chr3:194851493-194851998
  hypo
ccatggccatacacaacaaaacgtgcatacaatttcagggtgcagggagaagggagaggagggcagtgaggctgaaagatcagcttgaggccagatcggaagaggtctttatgctgcaccaactgcggctttgtcccatacgctccgaaaaacaaggcagagctggacccaatggtgacaggatccccaagggtctgcttagcctgagacctgcaaacacaacaccattgccaagacctgcaaattctgcaagcaggaccattcaggtccctccttcaatgtatccctcgtgccctctacggcctattctcagaaatgggacccaaacagtgttctcccttgtgccggcctgctccattggccggttccttcccaagctgctgaggaagcagcctcgctttgtcacaggcatcctcattacccactacctgacccccacattgctcaaacaccctagactcagaagccgaaccaccctctttccgtctccccattcatttccaaa

SEQ ID NO: 67377 - DNA, 31 bp, Homo sapiens
  chr3:194863436-194863467
  hypo
ggctggggctggggtgcgtatgcacgctggg

SEQ ID NO: 67378 - DNA, 167 bp, Homo sapiens; identical to SEQ ID NO: 18273
  chr3:194866033-194866200
  hypo

SEQ ID NO: 67379 - DNA, 31 bp, Homo sapiens; identical to SEQ ID NO: 18274
  chr3:194866459-194866490
  hypo

SEQ ID NO: 67380 - DNA, 24 bp, Homo sapiens
  chr3:194890868-194890892
  hypo
acgcctggccgttaatgtatatat

SEQ ID NO: 67381 - DNA, 31 bp, Homo sapiens
  chr3:194896168-194896199
  hypo
gtcattagccaagcttcggaaagggcacatt

SEQ ID NO: 67382 - DNA, 23 bp, Homo sapiens
  chr3:194927203-194927226
  hypo
atagtactttccagccagttgcg

SEQ ID NO: 67383 - DNA, 31 bp, Homo sapiens
  chr3:194933211-194933242
  hypo
gtccccaagccccatgcgaacaggtacaggt

SEQ ID NO: 67384 - DNA, 153 bp, Homo sapiens
  chr3:194935162-194935315
  hypo
aaccagcccccacccccgtcaatcctcagaccacttctttctgaagcaagcaggggccacagggctaactatgggaaccagcatgcaccgtcagcccctttcagtcaggatctcagaggctggaaaaccatctacatacggcatccacaatcg

SEQ ID NO: 67385 - DNA, 259 bp, Homo sapiens; identical to SEQ ID NO: 40111
  chr3:194980252-194980511
  hypo

SEQ ID NO: 67386 - DNA, 2 bp, Homo sapiens
  chr3:194981904-194981906
  hypo
ta

SEQ ID NO: 67387 - DNA, 31 bp, Homo sapiens; identical to SEQ ID NO: 18278
  chr3:195005356-195005387
  hypo

SEQ ID NO: 67388 - DNA, 188 bp, Homo sapiens; identical to SEQ ID NO: 18279
  chr3:195012970-195013158
  hypo

SEQ ID NO: 67389 - DNA, 30 bp, Homo sapiens
  chr3:195092658-195092688
  hypo
attacaggcatgagccggtacgcccagccc

SEQ ID NO: 67390 - DNA, 81 bp, Homo sapiens; identical to SEQ ID NO: 18280
  chr3:195093139-195093220
  hypo

SEQ ID NO: 67391 - DNA, 21 bp, Homo sapiens
  chr3:195095450-195095471
  hypo
ttttcttttttgagacggagt

SEQ ID NO: 67392 - DNA, 20 bp, Homo sapiens
  chr3:195095530-195095550
  hypo
cctcccgggttcatgccatt

SEQ ID NO: 67393 - DNA, 79 bp, Homo sapiens
  chr3:195134177-195134256
  hypo
aaaaactgagcaaaagggggccggacacgatggctcatgactataatgacagcactttgagaggctgaggcgggcatat

SEQ ID NO: 67394 - DNA, 78 bp, Homo sapiens
  chr3:195139466-195139544
  hypo
tgctctatcaatttgccattaacttgtttcaggtccttgctcggtctgccttaaaacgcagcttcaagattgtttata

SEQ ID NO: 67395 - DNA, 139 bp, Homo sapiens
  chr3:195172945-195173084
  hypo
ctgagaagtccaaggtcttctcggggggcaggctgcaccttgtgagaaccttcttgctggtggggactccgtggcgtccccaaggtagggcaagggatcacgtggtgagaggctgagcgtgctaatgcttgctcaggtt

SEQ ID NO: 67396 - DNA, 31 bp, Homo sapiens
  chr3:195176385-195176416
  hypo
ccaggagggtagagatcgaggtttggggtcc

SEQ ID NO: 67397 - DNA, 29 bp, Homo sapiens
  chr3:195183765-195183794
  hypo
gctggcattacaggcgtgagccaccgtgc

SEQ ID NO: 67398 - DNA, 239 bp, Homo sapiens
  chr3:195194374-195194613
  hypo
tgggatgacaggtgtgagccgccgcgcccagcttggttgggtactttcataattcttttttcaaacttattactggtgattaatttttaaacagtatctagtaatgtgagcactcgtcctatttatgaggtgaaacttctcatatcctatacttaataatttctaaaatataaacatacaaatgcctgccgtatcttgtctattctgtctctgtcttcgttttcttttttctttctttc

SEQ ID NO: 67399 - DNA, 156 bp, Homo sapiens; identical to SEQ ID NO: 18287
  chr3:195393195-195393351
  hypo

SEQ ID NO: 67400 - DNA, 228 bp, Homo sapiens; identical to SEQ ID NO: 18288
  chr3:195419008-195419236
  hypo

SEQ ID NO: 67401 - DNA, 30 bp, Homo sapiens
  chr3:195501027-195501057
  hypo
gcagcccggactcacgtagagggaatcacg

SEQ ID NO: 67402 - DNA, 176 bp, Homo sapiens
  chr3:195536330-195536506
  hypo
tgccaaggccctggtcatgcccggtcagatgtgtgggtgccatctcccagccacgaccatctcctctcctggcccagctccacttggtccccttagcgacgcaaaggactcagcgctccacgacatgcctagcttcttcgggtcgtcatggagacgcccttgcacaccaacagtcc

SEQ ID NO: 67403 - DNA, 245 bp, Homo sapiens
  chr3:195537486-195537731
  hypo
agctcagaggtaagaagcccacggccagcacctcccggccctctgcgccctggccgcctcctccgcaccaccctcccggccggcctgcccctctcctccttgtcgcttcccttgcttgctgctgtctcccgatcttctcctctctccattcccagggtcctcagtttgtctgcgtctcacctgtctcgtcctctcaccctgcagctttacatgagttttcttccgtctccatcacccagctttcc

SEQ ID NO: 67404 - DNA, 17 bp, Homo sapiens
  chr3:195538343-195538360
  hypo
tccactcttctttctct

SEQ ID NO: 67405 - DNA, 196 bp, Homo sapiens; identical to SEQ ID NO: 18290
  chr3:195539282-195539478
  hypo

SEQ ID NO: 67406 - DNA, 31 bp, Homo sapiens
  chr3:195540175-195540206
  hypo
ataataatgcggataccgtggggaagtggcg

SEQ ID NO: 67407 - DNA, 31 bp, Homo sapiens
  chr3:195544692-195544723
  hypo
gtatgtggtctctatccgaggccatggtgaa

SEQ ID NO: 67408 - DNA, 30 bp, Homo sapiens; identical to SEQ ID NO: 18291
  chr3:195545397-195545427
  hypo

SEQ ID NO: 67409 - DNA, 30 bp, Homo sapiens
  chr3:195564733-195564763
  hypo
caggacatgggagccggaggcggcacgaga

SEQ ID NO: 67410 - DNA, 182 bp, Homo sapiens
  chr3:195573452-195573634
  hypo
agctcttcaagacccacgggcttcctgcaaaccttggcggtggcctccagtggaatatgaagtgaccagcaaagtcccatgcggggggctggtgcatgttttcgaaggaggaatcgtatcagaagctgaaggcagctcacatcacaacttgtttgcagggattttgtcgcatctttcagtaa

SEQ ID NO: 67411 - DNA, 306 bp, Homo sapiens
  chr3:195586971-195587277
  hypo
tcatgatccaggcctgcctcacgcgccaggatcacgagagccgcctctaacccacccccaaaacaacaaaaggatgcgctctggccttgccaacttcagtgcctgggacaagccggctcgtgcccgccgcctcggctgcagggccctccacctgcagcgctttcgtccctacctggcgttcaccgttctcacccatcacatcagcacaacgtgaccttgtggggagccacctcctctgctcccaagacacctggtgcgtaacgattacagagcacccgtcctgccgtgatgctgtcacagtccccc

SEQ ID NO: 67412 - DNA, 88 bp, Homo sapiens
  chr3:195591688-195591776
  hypo
ctgcgtcccaggtgcaaatcagtaagaaacacccgagacagtgacagacaggtgacagcaagtgcctgcgtcccgggtgcaaatcagt

SEQ ID NO: 67413 - DNA, 280 bp, Homo sapiens
  chr3:195592095-195592375
  hypo
atcagtaagaaccacccgagacagtgacagacaggtgacagcgagtgcctgcgtcccaggtgcaaatcagtaagaaccacccgagacagtgacagacaggtgacagcgagtgcctgcgtcccgggtgcaaatcagtaagaaccacccgagacagtgacagacaggtgacacagagtgcctgcgtcccgggtgcaaatcagttaagaatgacccgagacaggatgggacagacaggtgacaccgagtgcctgcatcccaggtgcaaatcagtaagaaccac

SEQ ID NO: 67414 - DNA, 160 bp, Homo sapiens
  chr3:195592434-195592594
  hypo
aaccacccgagacagtgacagacaggtgacagcgaatgcctgcgtcccaggtgcaaatcagtaagaaccacccgagacaatgacagacaggtgacacagagtgcctgcgtcccaggtgcaaatcagttaagaacgacccgagacagtatgggacagacag

SEQ ID NO: 67415 - DNA, 30 bp, Homo sapiens
  chr3:195594857-195594887
  hypo
gctggacgtgtgggcgcgtgggccgagggg

SEQ ID NO: 67416 - DNA, 160 bp, Homo sapiens
  chr3:195595788-195595948
  hypo
agccccatgtgggccggtgagccccgcctcgctccgtctaagctgcagcaagcaacactggctcctgcctgacgctgcctccaccagcacaagaccccggcggccctgctcctgcgccctggcgagttagtgagccctcatccccgcccctgtcacggca

SEQ ID NO: 67417 - DNA, 30 bp, Homo sapiens; identical to SEQ ID NO: 18295
  chr3:195596746-195596776
  hypo

SEQ ID NO: 67418 - DNA, 315 bp, Homo sapiens
  chr3:195597934-195598249
  hypo
ggcccctgctttccacgcctctcagggcagaccagagtatcagaagtcagcaggagaagggctgcagaggccaggggcctggaatccccctgcggccagcagagaggcttggaggcctggcgcaagaagcttcggggggtggggggtggcatcccggaagtgactgattctgcgtgtccttcccagatgcccctcggtggccttatcctcttacataggagacagggcctctcccaggtatggagtgagctccgtagagtactgtgtggtggggaggcggagctgccacctaacgttccctctgcagtccccaag

SEQ ID NO: 67419 - DNA, 30 bp, Homo sapiens; identical to SEQ ID NO: 40114
  chr3:195599090-195599120
  hypo

SEQ ID NO: 67420 - DNA, 1961 bp, Homo sapiens; identical to SEQ ID NO: 40115
  chr3:195599452-195601413
  hypo

SEQ ID NO: 67421 - DNA, 466 bp, Homo sapiens
  chr3:195602335-195602801
  hypo
agctccccctcgggatggcgcccacgcacactccaaggcagcttcatcccaaggctccagtgggacttccaagaggaccgtgtcacttctcgcagcccacacgcacccgtgtgaggctcagtgtggccgaggcaccagcagtccagaggggactgaggccagcccttccttccaggcccgccctgtccgcgccctctctctcccgccatgaacaggccggagtccccgtggccatgggagggccagggctgctacccggccgtgactgaagcaggggcggatgaggacttcctgggggagcaggaaaagggcccaacacctccgcatgaaccttctacctcctgctgcccccgggcctctggtcaacatctctggggtagacaagatggaaaacagaggccggtgctgagaactgcctaaggctgccccagctctggaaatctcagcaccacgttcccgtccgggc

SEQ ID NO: 67422 - DNA, 186 bp, Homo sapiens
  chr3:195603077-195603263
  hypo
aatctagacacagcacgaaacatctaggtgtctcccctctgcccacagcctggtaccctgagaaggactgagcctagactcagtcagagctgcggcaggtggcctcccagactccgcaccaggaaacaaatactggacacagcttcgcaagtgggaagccacggcgaagagaaggccaggctagga

SEQ ID NO: 67423 - DNA, 715 bp, Homo sapiens
  chr3:195603846-195604561
  hypo
agaggggccaggcccacggctttccagctcgtggaggtggacacggtcatgaggctggacttcgggctggaggccctgccaggtacttccaggggacccccccacccttaatcttcctatttccagaatgctccccggagcgccacgcttgcaatcccatccctggcccctcagctccaaacctgcagactgtttgcctcctgtccccaggcctctctttctagaaccttctgcattcttccccagcataacacccctaaccacaggccctgcagtctcagtatgtcattcctattcccagaccctgggcccaagggtgagggagccgggcctgggaaggctcggggtgtcggggccacagcggtgcaggtcacactccacacagccccccaggtctcctccacccacccccaagaggcacaggattgcaccgaaggccgcagactccaaaagctgcagtgcaggtggaagaggctccctgggaagcagccctagccccatccttgcctggcctgagtcaggagctgcgagcacaggggatttcctccacttcactcttcttcctggtcctcaatactgcccctgcctcaaaggtacctgaaacctgccctgccccagccagttgctcagacaccctggggatcagccagcacaaggcagggccagcagtggtggggcctcagggcaggcgctagaactgcgggggctcaggtgg

SEQ ID NO: 67424 - DNA, 116 bp, Homo sapiens
  chr3:195604986-195605102
  hypo
actgcagggttcaggcccaaccgccagcctgtatgtggccaagggaatcttggaggccaaacagatctgtccacaggtccctccgacctgtgcccttcaagcgatcccagggcggg

SEQ ID NO: 67425 - DNA, 205 bp, Homo sapiens
  chr3:195605369-195605574
  hypo
gagcccagcactggaccatgacgttgtagatgtcctggggacagtcctcgggccggggcagccgctccccctccttgtcgatcttatgcaggatctgaaggtgaggaggtgcagagtttgacgacaaacagagcgcccagcccttcacttcccgccttccctccagcccatccacagctgcagcggctgctgccatgcctggcct

SEQ ID NO: 67426 - DNA, 30 bp, Homo sapiens
  chr3:195614952-195614982
  hypo
gcacatggaccccccggtagtcagaatgat

SEQ ID NO: 67427 - DNA, 34 bp, Homo sapiens; identical to SEQ ID NO: 3074
  chr3:195636197-195636231
  hypo

SEQ ID NO: 67428 - DNA, 271 bp, Homo sapiens
  chr3:195637215-195637486
  hypo
gaaggagaaaacccagcgctcggattcccagcggcggggcagcctgcaggccctgttcccagcccacagacccatgtcccagcccaaacggaggcagccctgggcagcgggcgcgtggagcccaagggctcagggccactcagcccttgttactgtccctcatctagaaaatggatgtaataacaaaacagttcacggtaggtggcaagatcagacacatcggaaactgtgtagggctggctctttctgcgctcacactgtccagcaatgg

SEQ ID NO: 67429 - DNA, 27 bp, Homo sapiens
  chr3:195639185-195639212
  hypo
tatttttttgagatggagtttcgtgct

SEQ ID NO: 67430 - DNA, 181 bp, Homo sapiens
  chr3:195639451-195639632
  hypo
tataggcctgagccactgcgtacagcttgtttttaaataaagcagtttttaaaactactgttgcaaccttttagagggaggtaaactgaatatggtggattttgaatgactatttttttgttttatgaaagaggataataatagaatagaaaatatgagaatgtttggccgggtgcggtgg

SEQ ID NO: 67431 - DNA, 113 bp, Homo sapiens
  chr3:195640365-195640478
  hypo
gtcacagtcaaaacacggagagccatggctacaacttgagcaagtcaaacacgctgtgattcaggccagggagatgagcgtgggtaaagaacactgtacgaactagctcaggg

SEQ ID NO: 67432 - DNA, 73 bp, Homo sapiens; identical to SEQ ID NO: 18303
  chr3:195648872-195648945
  hypo

SEQ ID NO: 67433 - DNA, 30 bp, Homo sapiens; identical to SEQ ID NO: 18304
  chr3:195709683-195709713
  hypo

SEQ ID NO: 67434 - DNA, 196 bp, Homo sapiens
  chr3:195735620-195735816
  hypo
atgttatagaacaacttttaacgttccacaaaagtataaatagtagaaaaggaaactagtgcgtgtgaactaggactccatgaaaagtacccagtagttgaagctccacgactccatggacagaagtttgcataaatatttaagcgatgttagttcctgaacatataagcaagccgtggcaggtctgtggccagag

SEQ ID NO: 67435 - DNA, 401 bp, Homo sapiens
  chr3:195750617-195751018
  hypo
aacagcctctttcagcgtcattaaaatatttcaacaggaggactgagtttagactcaacctgtgttttctcccctggaaaacgaaggtttcatgaagcaaggaaggtctttactgtcctcatccgaaacgctgaggcatctgtgatgtctgctgtaagtgccaccaggctctccgctgaaatctcgcaacgggaaaatagagaccgtagattctgcttttagaaaggggagaatcagaagtaatgtggaaatgccatgtcctcgttcataaacatcttcttttacaaattccacaagtttagttactttgggattaatatgggcttatcttaaagtgcgtttattaacttagcgtgagttgttcaaatgcattctggatcctgagccgacatccagcaatg

SEQ ID NO: 67436 - DNA, 127 bp, Homo sapiens; identical to SEQ ID NO: 18305
  chr3:195751983-195752110
  hypo

SEQ ID NO: 67437 - DNA, 18 bp, Homo sapiens
  chr3:195763582-195763600
  hypo
gagccactgcacccagcc

SEQ ID NO: 67438 - DNA, 30 bp, Homo sapiens
  chr3:195763812-195763842
  hypo
cgatttatttttggccgagttgctgtgact

SEQ ID NO: 67439 - DNA, 95 bp, Homo sapiens
  chr3:195770515-195770610
  hypo
tgcgcccggcgtcgttacggttttgaattacacctatgtacacctgtcttactgaacacaggaaagagatattcgtcacagatctatgatggtca

SEQ ID NO: 67440 - DNA, 345 bp, Homo sapiens
  chr3:195778817-195779162
  hypo
actcattgtcaatgtcccaaacgtcaccagagagggcatttgcagctccctgaatagtccaagtagctagagccaactggtttctgaacagcgtttcattaaaagcaccgttattttgtttacgcagtttcaagttctccagtaaagctggcagcgtgtgagagccggagccccagaagacatgtcggaaaggagactcttttggagatacgtagggagagaggaagtgatactccacctacgaaaacaacacacaaggcaatttacacagccctgtgacttttgtagtaaaacaacagttcacttcaaatgtaaaatgtcccaaatttaagaatgccgatcaga

SEQ ID NO: 67441 - DNA, 402 bp, Homo sapiens; identical to SEQ ID NO: 40118
  chr3:195808864-195809266
  hypo

SEQ ID NO: 67442 - DNA, 29 bp, Homo sapiens
  chr3:195834904-195834933
  hypo
gccaccgcgcctgtcatctttttaacatt

SEQ ID NO: 67443 - DNA, 30 bp, Homo sapiens
  chr3:195837118-195837148
  hypo
acaggcgtgagccaccgcacctgccacgta

SEQ ID NO: 67444 - DNA, 101 bp, Homo sapiens
  chr3:195855352-195855453
  hypo
gcctgtcattagcgcggtggctcacgcctgccattgcctgttgtccccgtcctctgtggccctcttggcttctgtatcactgtcacgcgtagcagggccag

SEQ ID NO: 67445 - DNA, 37 bp, Homo sapiens
  chr3:195863856-195863893
  hypo
ggatgacaggcgtgagccactgcgcctggcccataag

SEQ ID NO: 67446 - DNA, 38 bp, Homo sapiens; identical to SEQ ID NO: 18309
  chr3:195866854-195866892
  hypo

SEQ ID NO: 67447 - DNA, 198 bp, Homo sapiens
  chr3:195867975-195868173
  hypo
tgcagcactgcactccagcctcggtgacagagtgtgactccaagtcacaggaaaacccaacaaaacacagacgccgcccccacctgctttgcccgactctgcagagtcccacccggatgatctgggggagggaaggagtttgtctttttcgaagccctctgtggttttcggatgagcggatttagggacagtctgcac

SEQ ID NO: 67448 - DNA, 30 bp, Homo sapiens
  chr3:195875353-195875383
  hypo
gtggccccaccccctcgctctctctcttgc

SEQ ID NO: 67449 - DNA, 36 bp, Homo sapiens; identical to SEQ ID NO: 18310
  chr3:195901886-195901922
  hypo

SEQ ID NO: 67450 - DNA, 30 bp, Homo sapiens; identical to SEQ ID NO: 18311
  chr3:195924623-195924653
  hypo

SEQ ID NO: 67451 - DNA, 33 bp, Homo sapiens
  chr3:195961175-195961208
  hypo
gagcaaaactccgtctcaaaaaaaataaaaata

SEQ ID NO: 67452 - DNA, 45 bp, Homo sapiens; identical to SEQ ID NO: 18312
  chr3:195990770-195990815
  hypo

SEQ ID NO: 67453 - DNA, 40 bp, Homo sapiens
  chr3:196039338-196039378
  hypo
gaggggcgggggatggagtctcgctctgtcgcccaggctg

SEQ ID NO: 67454 - DNA, 25 bp, Homo sapiens
  chr3:196039617-196039642
  hypo
ccgcgcctggcccatagtatattct

SEQ ID NO: 67455 - DNA, 30 bp, Homo sapiens; identical to SEQ ID NO: 18314
  chr3:196046442-196046472
  hypo

SEQ ID NO: 67456 - DNA, 38 bp, Homo sapiens; identical to SEQ ID NO: 18315
  chr3:196046696-196046734
  hypo

SEQ ID NO: 67457 - DNA, 361 bp, Homo sapiens; identical to SEQ ID NO: 18316
  chr3:196069870-196070231
  hypo

SEQ ID NO: 67458 - DNA, 25 bp, Homo sapiens
  chr3:196138387-196138412
  hypo
aaaactagcagatggccgagcacag

SEQ ID NO: 67459 - DNA, 39 bp, Homo sapiens
  chr3:196138791-196138830
  hypo
taaaatatgactgaaaaaaggcggccggccaggtgcggt

SEQ ID NO: 67460 - DNA, 139 bp, Homo sapiens
  chr3:196143803-196143942
  hypo
taagaaaggcctgcagtaccacgtgagggcaacttagggcaggaaaagacactgaacacctggagccacagacacagcaagaagttaaaataaatgtacacacaggcgcggcggctcacgcctgtaatcccagaacttt

SEQ ID NO: 67461 - DNA, 78 bp, Homo sapiens
  chr3:196144181-196144259
  hypo
cgaaaactaaataaataaatcaaataaataaataaatgtataaaaacctttgcctccgccctgtcttatgcccagtaa

SEQ ID NO: 67462 - DNA, 243 bp, Homo sapiens; identical to SEQ ID NO: 18320
  chr3:196199258-196199501
  hypo

SEQ ID NO: 67463 - DNA, 147 bp, Homo sapiens
  chr3:196226288-196226435
  hypo
agaataaatttctgctaagttcgtggtactttgttacagtagccctaggaaataaaaagaattccatttatatgaagttccagaacagaaaaaactcatctatggtggataaaaactaaaacagcccggacgcggtggctcacgctt

SEQ ID NO: 67464 - DNA, 30 bp, Homo sapiens
  chr3:196231389-196231419
  hypo
agaaaatcactgtgcgtgaaagcagccttt

SEQ ID NO: 67465 - DNA, 82 bp, Homo sapiens
  chr3:196245240-196245322
  hypo
tccactccttaatccactctacgtgtgtctatgttgctaattttctcggcatgtgacaaaggaccctggatgtttccccaga

SEQ ID NO: 67466 - DNA, 121 bp, Homo sapiens
  chr3:196263348-196263469
  hypo
atgtttagaagagacggggttccccttttacctcgttgcactcctgagagcaagatgggtcaccagcagctgtactggagccacgcgcgaaaattcggccagggttctcgctcttgtcgcg

SEQ ID NO: 67467 - DNA, 45 bp, Homo sapiens
  chr3:196263528-196263573
  hypo
ttccgtcagtacgcgaaggatgtcggtttcattaagttggactaa

SEQ ID NO: 67468 - DNA, 28 bp, Homo sapiens
  chr3:196297099-196297127
  hypo
tgaatgcattagtaactaaaacgataac

SEQ ID NO: 67469 - DNA, 209 bp, Homo sapiens
  chr3:196302818-196303027
  hypo
attgcaggggtgagccaccgcgcccggccccttcattgaatcttacgttttggtcttataagtgccttaaagtattttataatacgagcagataggaaaaacattgggaatgcctcagttttattgtgaatgcatgggatactggaaacaaatagttctctgtttttaaatctgcgctctgcagctcactgaaacggtagagtgccagc

SEQ ID NO: 67470 - DNA, 220 bp, Homo sapiens
  chr3:196318687-196318907
  hypo
gagctgctggtgtgccgcgttcctcactggccgtacgggctccacagcccagcgggtagagcgagggaggcgggcctgcaatacccccaaaggacaaccaactgccttctaaaccgtgactctgccaactaaaggctgcgggggtgttttgttgtttcgggatttttcttttccttacataccccacacctctgaataacaatcctagcagttcaatttt

SEQ ID NO: 67471 - DNA, 919 bp, Homo sapiens
  chr3:196386775-196387694
  hypo
ctgcacagctgccacctggagcgcatcagccgcggcgccttccaggagcaaggtcacctgcgcagcctggtcctgggggacaactgcctctcagagaactacgaagagacggcagccgccctccacgccctgccgggcctgcggaggctggacttgtcaggaaacgccctgacggaggacatggcagccctcatgctccagaacctctcctcgctgcggtccgtgtccctggcggggaacaccatcatgcggctggacgactccgtcttcgagggcctggagcgtctccgggagctggatctgcagaggaactacatcttcgagatcgagggcggcgctttcgacggcctggctgagctgaggcacctcaacctggccttcaacaacctcccctgcatcgtggacttcgggctcacgcggctgcgggtcctcaacgtcagctacaacgtcctggagtggttcctcgcgaccgggggagaggctgccttcgagctggagacgctggacctgtctcacaaccagctgctgttcttcccgctgctgccccagtacagcaagttgcggaccctcctgctgcgcgacaacaacatgggcttctaccgggacctgtacaacacctcgtcgccgagggagatggtggcccagttcctcctcgtggacggcaacgtgaccaacatcaccaccgtcagcctctgggaagaattctcctccagcgacctcgcagatctccgcttcctggacatgagccagaaccagttccagtacctgccagacggcttcctgaggaaaatgccttccctctcccacctgaacctccaccagaattgcctgatgacgcttcacattcgggagcacgagccccccggagcgctcaccgagctggacctgagccacaaccagctgtcggagctgcacctgg

SEQ ID NO: 67472 - DNA, 196 bp, Homo sapiens
  chr3:196388385-196388581
  hypo
ctccaagatcatccgcgtgacggagctgcccggaggtgtgcctcgggactgcaagtgggagcggctggacctgggcctgctctacctcgtgctcatcctccccagctgcctcaccctgctggtggcctgcactgtcatcgtcctcacttttaagaagcctctgcttcaggtcatcaagagccgctgccactggtcc

SEQ ID NO: 67473 - DNA, 30 bp, Homo sapiens
  chr3:196389171-196389201
  hypo
tgcgtgactggccaccgccgtcagaacggt

SEQ ID NO: 67474 - DNA, 31 bp, Homo sapiens; identical to SEQ ID NO: 18324
  chr3:196402160-196402191
  hypo

SEQ ID NO: 67475 - DNA, 210 bp, Homo sapiens; identical to SEQ ID NO: 18325
  chr3:196402790-196403000
  hypo

SEQ ID NO: 67476 - DNA, 89 bp, Homo sapiens
  chr3:196412487-196412576
  hypo
aagccatgggagatgcggaattcagctgaagatcacttaaacatccagcaccgctgtagcactagtcatagaaagaatatgaagagaat

SEQ ID NO: 67477 - DNA, 30 bp, Homo sapiens; identical to SEQ ID NO: 18326
  chr3:196434188-196434218
  hypo

SEQ ID NO: 67478 - DNA, 127 bp, Homo sapiens; identical to SEQ ID NO: 18327
  chr3:196434730-196434857
  hypo

SEQ ID NO: 67479 - DNA, 121 bp, Homo sapiens
  chr3:196440473-196440594
  hypo
ggccagaagaatttttaaacagttggatttggtaatctgtagaggcttccaacgttagcattttataattgaaaaggggtcaaaattagcggggcgtgatggcgtgcccctgtagtcccag

SEQ ID NO: 67480 - DNA, 30 bp, Homo sapiens
  chr3:196475368-196475398
  hypo
gcaacccctggcaaccgctgatccttttac

SEQ ID NO: 67481 - DNA, 66 bp, Homo sapiens
  chr3:196478075-196478141
  hypo
catatagtataggttgagcatcgctaatctgaaaatccaaaatccgaaatgctccaaattccagca

SEQ ID NO: 67482 - DNA, 203 bp, Homo sapiens; identical to SEQ ID NO: 18328
  chr3:196530354-196530557
  hypo

SEQ ID NO: 67483 - DNA, 22 bp, Homo sapiens
  chr3:196561446-196561468
  hypo
aaatagaagtatagggccaggc

SEQ ID NO: 67484 - DNA, 130 bp, Homo sapiens
  chr3:196674979-196675109
  hypo
gggagcagcaccagggcctcccgggtcagagacttcaaaccagggtttgtggctccacgagtgccccagaggtagagggggaccacagcaaaggccagaaaggtgggccggttgaagaagccagcagcca

SEQ ID NO: 67485 - DNA, 90 bp, Homo sapiens
  chr3:196700061-196700151
  hypo
tctcattgtctccctctccctcgccctcgccctcgccctcgccctcgccctctccctctccccacggtctccctctgatgccgagctgaa

SEQ ID NO: 67486 - DNA, 31 bp, Homo sapiens
  chr3:196719326-196719357
  hypo
ttgggcgggatgggagcgccctggagccaac

SEQ ID NO: 67487 - DNA, 292 bp, Homo sapiens; identical to SEQ ID NO: 18329
  chr3:196723695-196723987
  hypo

SEQ ID NO: 67488 - DNA, 30 bp, Homo sapiens
  chr3:196724290-196724320
  hypo
gcagggccagagggacgggggagccgcatg

SEQ ID NO: 67489 - DNA, 30 bp, Homo sapiens
  chr3:196726283-196726313
  hypo
agaacaggcttccccgccatagcccacccg

SEQ ID NO: 67490 - DNA, 91 bp, Homo sapiens
  chr3:196728412-196728503
  hypo
agctggaatgtgccagggcagcggaggccctgcaagagccagagaaccagtccaggtcgaagaagggcgcggggggcctcactgactagag

SEQ ID NO: 67491 - DNA, 98 bp, Homo sapiens; identical to SEQ ID NO: 18331
  chr3:196752752-196752850
  hypo

SEQ ID NO: 67492 - DNA, 506 bp, Homo sapiens
  chr3:196754391-196754897
  hypo
tcaggtgcctttctttgctggcgccctctgagcagcgggtcctcctgaggctcccacctcctggcctgggcccggcgggaggcaagctggcctcgtggccagggagactcgggagatcctatcggccgggcctggcagggcgaggtcggctcctttcctggtgaatggggctgttgtgtgctccctcctgagtcacagccctcttgtctggcagggtggaagggagaggactcaccgcgatgagctggacgcagtggtcggcggaggtgccccggacgcagaggagggagggctggatgcccgcttcccggaaggcctcgctcatgttgccgcacttgtgctgctctgggtccgaggtggcgcaccaccgcacctccatgccaccgagcactgcgggcaggggaccgtgaggcccggctcccccgccctgcccagccccggcccaccatggagggtggctccagcagttctgtgtgagcccattcgcctggacagccagtcctcta

SEQ ID NO: 67493 - DNA, 196 bp, Homo sapiens; identical to SEQ ID NO: 18333
  chr3:196766006-196766202
  hypo

SEQ ID NO: 67494 - DNA, 30 bp, Homo sapiens
  chr3:196767074-196767104
  hypo
agtatcaagtatcagatgatacgattgtgt

SEQ ID NO: 67495 - DNA, 30 bp, Homo sapiens; identical to SEQ ID NO: 18334
  chr3:196767403-196767433
  hypo

SEQ ID NO: 67496 - DNA, 193 bp, Homo sapiens; identical to SEQ ID NO: 18335
  chr3:196817781-196817974
  hypo

SEQ ID NO: 67497 - DNA, 148 bp, Homo sapiens
  chr3:196907216-196907364
  hypo
gactgtgtatgctaagtaggacggggccgattattgagtgaccctcaacacaagaataggagggacgctgagggtgcggaaccaaggagggcttcgcaatgcatagagaactttttctatactaatcgtttgaaattaaggacaaaaa

SEQ ID NO: 67498 - DNA, 85 bp, Homo sapiens
  chr3:196910544-196910629
  hypo
ttgcagttcatctgacgagcccttttttgcccagtgtttctgctttgggcctgctgagccatggctagagctagtattgcctcct

SEQ ID NO: 67499 - DNA, 4 bp, Homo sapiens
  chr3:196910640-196910644
  hypo
agag

SEQ ID NO: 67500 - DNA, 17 bp, Homo sapiens
  chr3:196948088-196948105
  hypo
ataaagaaacataacag

SEQ ID NO: 67501 - DNA, 43 bp, Homo sapiens
  chr3:197027475-197027518
  hypo
ctgaaggcttcagggggactacgggaggctctttcagcatgga

SEQ ID NO: 67502 - DNA, 159 bp, Homo sapiens
  chr3:197094179-197094338
  hypo
gccactgtgaccacatagctgcgggcttctctgccttgtagacacgggcaaccatcaaggccaaggcatttggcgggaagctccagagctggggtcggggcagggaggggccacgctgggactctgctggcccagtacgggggcagatgctgtcttaag

SEQ ID NO: 67503 - DNA, 30 bp, Homo sapiens
  chr3:197121362-197121392
  hypo
gcagctggaagcccacggcggaatgggccg

SEQ ID NO: 67504 - DNA, 87 bp, Homo sapiens
  chr3:197127429-197127516
  hypo
atatttggggttcacagatggaaacagaaagtcaagtggtcataatagtgctgcgaaccccctggccagcaccgggccctgactccc

SEQ ID NO: 67505 - DNA, 31 bp, Homo sapiens; identical to SEQ ID NO: 18336
  chr3:197133968-197133999
  hypo

SEQ ID NO: 67506 - DNA, 32 bp, Homo sapiens
  chr3:197136799-197136831
  hypo
atggctgaataggaacagctccggtctacagc

SEQ ID NO: 67507 - DNA, 75 bp, Homo sapiens
  chr3:197152284-197152359
  hypo
ggaaggaaggtgcaggcgcagcagtgatgtccttccagcactgtgcctggcacaagtgggcgcccagcatgttca

SEQ ID NO: 67508 - DNA, 31 bp, Homo sapiens
  chr3:197161832-197161863
  hypo
ttaaatcacagagctgcgctcattagtggtc

SEQ ID NO: 67509 - DNA, 108 bp, Homo sapiens
  chr3:197170405-197170513
  hypo
aaaaatctaagagagagagagcgctttgtgagttttcagactcaaaagttagagactgcacggaccaacctgagagcaggtgagtccggttaggagggagcagaagtg

SEQ ID NO: 67510 - DNA, 95 bp, Homo sapiens
  chr3:197216364-197216459
  hypo
gtgcccagggattccccgactggacccctgaccttcccatactctgactgggaagacacagtgcaatcttttcttcgagacagagtctcgctctg

SEQ ID NO: 67511 - DNA, 97 bp, Homo sapiens; identical to SEQ ID NO: 3081
  chr3:197222651-197222748
  hypo

SEQ ID NO: 67512 - DNA, 30 bp, Homo sapiens
  chr3:197225516-197225546
  hypo
acctgaatgagcctcgagccagagagagtg

SEQ ID NO: 67513 - DNA, 30 bp, Homo sapiens
  chr3:197232597-197232627
  hypo
caggcttctctccccgcaccatgctccctg

SEQ ID NO: 67514 - DNA, 30 bp, Homo sapiens
  chr3:197238898-197238928
  hypo
tcgatgacaggggacgtgtctgtggagcca

SEQ ID NO: 67515 - DNA, 30 bp, Homo sapiens
  chr3:197239169-197239199
  hypo
tgcagtacggggagcgggccgggttggcca

SEQ ID NO: 67516 - DNA, 124 bp, Homo sapiens; identical to SEQ ID NO: 18339
  chr3:197241467-197241591
  hypo

SEQ ID NO: 67517 - DNA, 224 bp, Homo sapiens; identical to SEQ ID NO: 18340
  chr3:197243348-197243572
  hypo

SEQ ID NO: 67518 - DNA, 30 bp, Homo sapiens; identical to SEQ ID NO: 18341
  chr3:197246921-197246951
  hypo

SEQ ID NO: 67519 - DNA, 212 bp, Homo sapiens; identical to SEQ ID NO: 18342
  chr3:197250415-197250627
  hypo

SEQ ID NO: 67520 - DNA, 3 bp, Homo sapiens
  chr3:197313938-197313941
  hypo
aaa

SEQ ID NO: 67521 - DNA, 301 bp, Homo sapiens
  chr3:197327054-197327355
  hypo
ctagtcataacctattttcagctggaaaccagaaaggctggttctatgtgcagatggcaatgctgaggtttagaggtaaaacacccacctgaagtgaatagaggctggactggaacccaggatggctcacctggaggcggcgctcccatacggcacccggcagcctgttttgtacaggaacaatacttgccttcctccgcaaaaaacaaacaaacaaacaaaaaatgcaggggttgaaaagaaaactgcctgagctgaaaagttttgttgttgttgttctgagacagggtttccctgtcgc

SEQ ID NO: 67522 - DNA, 243 bp, Homo sapiens
  chr3:197327640-197327883
  hypo
attgcctctgagccccatgtgcgatccctcagatgccgaggcaggttgcactatcacccaccatgagccctccgaccctggcctgtggagtggagaaaagacgccaactgctcccctgcagcaccctgcgcttttcttcctccaggcccgatggtgggtctcagccagctggttacacacgagcgcgcgacatgtccaaagcgaagcacagccctttgtgtcgtcagcaggggaagagatagc

SEQ ID NO: 67523 - DNA, 147 bp, Homo sapiens
  chr3:197330094-197330241
  hypo
agagggagagggactctcagataactttctaaaacctccgaagatcttttttcatgtgtgagataataatagaagatattcctgagagttttgtgtatttttgtgtattttccttgcttgtggatggaagcgcgatgtcttctatta

SEQ ID NO: 67524 - DNA, 30 bp, Homo sapiens; identical to SEQ ID NO: 18346
  chr3:197330502-197330532
  hypo

SEQ ID NO: 67525 - DNA, 31 bp, Homo sapiens; identical to SEQ ID NO: 18347
  chr3:197435285-197435316
  hypo

SEQ ID NO: 67526 - DNA, 31 bp, Homo sapiens; identical to SEQ ID NO: 18348
  chr3:197459517-197459548
  hypo

SEQ ID NO: 67527 - DNA, 30 bp, Homo sapiens; identical to SEQ ID NO: 18349
  chr3:197537987-197538017
  hypo

SEQ ID NO: 67528 - DNA, 21 bp, Homo sapiens
  chr3:197551218-197551239
  hypo
ccaccacgcccggcttttttt

SEQ ID NO: 67529 - DNA, 325 bp, Homo sapiens
  chr3:197582089-197582414
  hypo
cttccgtggtctgttcgcattgctgtgtattccacaaccttcatttcctttgagatggataaagcaccttttaactgggcggtcttataggtgaatacaatcatcacactctagagttttagtttaagtgaattggcctaagaagcgaataataagttaaaaatgtagacaaatattgagagcctccgacgatccaaacacttaccaaaattatctcatttactcctcgcagcaaccttaagagtgaaggttaaacttatcacctttttacaaatgattactgaggcccagaatgtgacttgtccaatgtcgcatagacagtaag

SEQ ID NO: 67530 - DNA, 77 bp, Homo sapiens
  chr3:197608098-197608175
  hypo
tgagatcctgaatccccgctttgtcggtaggcacaggtccatataagcatttgcggtctggacgtttcaaaggtatt

SEQ ID NO: 67531 - DNA, 98 bp, Homo sapiens
  chr3:197612488-197612586
  hypo
gaaaacgcgccccatctcgctccaccacaagcgcctttatatactcaatgatgggtggaggaaaagggcccaagggctcacaccgcacaggagccttt

SEQ ID NO: 67532 - DNA, 191 bp, Homo sapiens
  chr3:197616592-197616783
  hypo
agaaaaggggagtgagtacgacgtatgctatgcctgacaagctgcattctttccacataaagggactgttgaataaagtaacttctgtctgacaaacagtctctctccaggacatggaagtagccaggcacgtaatcacttcagcgatgctctcctgtcgtgcaggacccggagcttaagccatggactca

SEQ ID NO: 67533 - DNA, 77 bp, Homo sapiens; identical to SEQ ID NO: 18352
  chr3:197663679-197663756
  hypo

SEQ ID NO: 67534 - DNA, 121 bp, Homo sapiens; identical to SEQ ID NO: 18353
  chr3:197685683-197685804
  hypo

SEQ ID NO: 67535 - DNA, 36 bp, Homo sapiens
  chr3:197714310-197714346
  hypo
tgagccaccgcgcccggccaaaatttttacaaaaca

SEQ ID NO: 67536 - DNA, 88 bp, Homo sapiens
  chr3:197726425-197726513
  hypo
ggtctcactccttctgcgcaggctggagtgcagtggcaatctggactcactaatcctggacttcccgggctcaagcagtcctctcacc

SEQ ID NO: 67537 - DNA, 184 bp, Homo sapiens; identical to SEQ ID NO: 18354
  chr3:197764837-197765021
  hypo

SEQ ID NO: 67538 - DNA, 107 bp, Homo sapiens
  chr4:503183-503290
  hypo
tcagtattcagacacgccccaaacacacacacaccccactctgacctgtgcccagactcagccgccagcctatgcactctgccctcgcggccgccggccttgctgtc

SEQ ID NO: 67539 - DNA, 939 bp, Homo sapiens
  chr4:512571-513510
  hypo
gcccattgtctacaccgtcggggatcctttttcctaaaacaaaatggggtatgtgttctgacactgaaatacgttttagaacccacagccaggcccgtgcagtccctcggtggcgtccagtctgttggaggctttgtgcccacccggctctctcagtgtagtgggaccggctttttctcacctctggacttttgcacatgctgttcccatcagcttgatgctcttcctgcagttttttgcctggcgaattcctgggtaccgtttacatttcagcgtaaacatcagaccttcctggtccagcgcccactcccaatccaaaatcagttcctccccattaccaaaaatccctcattgataccctctacttttccttcctgggaaacttgtaattacagctgtaatgcagtcacagtttgtaattacgcttgtgtgcgtgcgtgcgtgtctgtgagccctactggatccaagccccagcaggcaaggattgcacctgcttgctcgccatgctgtgtctcccctggcacagcgcctggcacagtgcctggcacgtcgtccacgctccatggatatttgtttcgatgcatgcacaggtgcacccccatagctttgtgactctctgataggcggtggggtgtggacacaggcgtccccccatccagggtggtaggtgtagcaatgaaggatgccagccctggaaccagactgcctgagtttcatttgcagcttttacccactggcactgtggcccaggtgcgtgactcaccctctgtgtctcagttgcctcctctggataacagttctgatgctcatccctgcctcatagggtcattagggaggtgaaacgagcgagccgcctagtgttgctggctactggcacttagtgcagagcacctggtgccggcagcagtggggtgggcctgcaggcgtgtgggttcatgc

SEQ ID NO: 67540 - DNA, 253 bp, Homo sapiens
  chr4:513790-514043
  hypo
tcagggacctggtgccggcagcagtggggcgggcctgcaggcgtatgagttcatgctcagggacttgtgccacagcaccctggacctcagtggcttgagcgcctgtggcagctctttcactgctgtgatagcaggcctggggcatgcagagccacagggtggggcgagcctgccaagaggcacagctgagacccttcttggcatggctcttctggagtaggaagctcatgtcaaataccgagggggtctcagg

SEQ ID NO: 67541 - DNA, 30 bp, Homo sapiens
  chr4:519698-519728
  hypo
gcatgtagagcagccgggtgtgtcagggag

SEQ ID NO: 67542 - DNA, 30 bp, Homo sapiens; identical to SEQ ID NO: 18358
  chr4:520188-520218
  hypo

SEQ ID NO: 67543 - DNA, 30 bp, Homo sapiens
  chr4:527110-527140
  hypo
tggcagcacctcaccgtagatgggacctgg

SEQ ID NO: 67544 - DNA, 30 bp, Homo sapiens
  chr4:529356-529386
  hypo
agccccagggagcgcgctgtggcctctccg

SEQ ID NO: 67545 - DNA, 136 bp, Homo sapiens
  chr4:530422-530558
  hypo
tttgaggccagccgcgtgctcacactggccttacagaaacaggagacgccgtcctcggccgtctggggtgggctgtcagcacgtcgtgtggtcaggtgtcaggacaagcgggcgtgagcgcgtggaggtgcatctg

SEQ ID NO: 67546 - DNA, 100 bp, Homo sapiens; identical to SEQ ID NO: 40141
  chr4:569335-569435
  hypo

SEQ ID NO: 67547 - DNA, 272 bp, Homo sapiens; identical to SEQ ID NO: 40142
  chr4:569460-569732
  hypo

SEQ ID NO: 67548 - DNA, 254 bp, Homo sapiens
  chr4:616351-616605
  hypo
cacaggtgcatctcacaggtgcgtctcacagctatgtctcacaggtgtgcctcataggtgcgtctcacgtgtgtctcacgtgtgtctcacaggtgcgtctcaggtgcgtctcacgtgtgtctcacaggtgcatctcacaggtgcatgtcacaggtgtgtctcacaggtgcatgtcacaggtgcgtctcacatgtgtgtctcacaggtgcatctcacgtgtttctcacaggtgcgtctcaggtgcatgtcacagg

SEQ ID NO: 67549 - DNA, 243 bp, Homo sapiens
  chr4:617077-617320
  hypo
cagaggctgtggactccttgccgccctgaacctactcacctacaatcacgacgggctcctggggcaggacaaagccacaggtgaggaacgcggtgctgcgggtggaagctgctgtcacagtcgtgttagggtgagtggactatggccgcagactgtgggctcctcccagccaaccctcactcccgctagcgccccaaatcttcagtccagcaccccttccccgtcccacccactctccacact

SEQ ID NO: 67550 - DNA, 440 bp, Homo sapiens; identical to SEQ ID NO: 18361
  chr4:619492-619932
  hypo

SEQ ID NO: 67551 - DNA, 31 bp, Homo sapiens
  chr4:623248-623279
  hypo
gaacagccacggaccccgcagtgctgtgcat

SEQ ID NO: 67552 - DNA, 1221 bp, Homo sapiens
  chr4:628234-629455
  hypo
ctggggggcaccagcatcctccgcacaggggtgcatggagccaggctggagccacagggacaggcccagctttcaccgcccggtggccacatcccagtgcccagcagggcccctgggcacctcacacctggagggcagcagcccccacagagcttgacgacaaccccagtggtgcgggctccaggcccacggtgcgacagcctctttagcctctttcctctcttgcggcagtgccctcacttcagctcatttgctgacgagctcactgactacaagacaaagaatatgctggccacacccatcatgaatggcaaagacgtcgtggcggtgatcatggcagtgaacaagctcaacggcccattcttcaccagcgaagacgaagatgtgagtgtggggggcacctgggcagccgcgcgtctgcctccctgcctgcctgcccgcccgcctgttctgtgctgcgcatccacctctttacctgcctgcccgcctgcccgtgtgttctctgctgcgtgtctgcctccttacctgcctgcccgcgtgttctgtgctgcgtgtctgcctccttacctgcctgcccgcgtgttctgtgctgcgcgtccacctccttacctgcctgcccgcctgcccgtgtgttctctgctgcgtgtctgcctccttacctgcctgcccgcgtgttctgtgctgcgtgtctgcctccttacctgcctgcccgcgtgttctgtgctgcgcgtccacctccttacctgcctgcccgcctgcccgcgtgttctgtgctgcgtgtccacctccttacctgcctgcccgcctgcctgcgtgttctgtgctgcgcgtctgcctccctgcctgcctccctgcccgcctgcccgcgtgttctgtgctgtgcgtccacctccttacctgcctgcctgcctgcccgcgtgttctgtgccacgcgtctgcctccctgcctgcctgcccgtgtgttctgtgctgtgcgtccacctccttacctgcctgcctgcctgcctgcgtgttctgtgccacgcgtctgcctccctgcctgcctgcccgtgtgttctgtgctgtgcgtccacctccttacctgcctgcctgcctgcccgcgtgttctgtgccacgcgtctgcctccctgcctgcctgcccgcgtgttctgtgctgcgcgtctgctgggctgctgggctccacgtgctcatctgcacatcgctgtgctcctgtgtgtctgt

SEQ ID NO: 67553 - DNA, 30 bp, Homo sapiens
  chr4:646838-646868
  hypo
gggaaataaagctacgaacatctcactgcc

SEQ ID NO: 67554 - DNA, 293 bp, Homo sapiens; identical to SEQ ID NO: 18363
  chr4:651098-651391
  hypo

SEQ ID NO: 67555 - DNA, 237 bp, Homo sapiens; identical to SEQ ID NO: 18364
  chr4:655878-656115
  hypo

SEQ ID NO: 67556 - DNA, 30 bp, Homo sapiens
  chr4:656324-656354
  hypo
gacctggaggccttcgccatggtgacagcc

SEQ ID NO: 67557 - DNA, 30 bp, Homo sapiens; identical to SEQ ID NO: 3086
  chr4:657827-657857
  hypo

SEQ ID NO: 67558 - DNA, 30 bp, Homo sapiens
  chr4:658966-658996
  hypo
ggagcctcacggggcgggcccgggcccttc

SEQ ID NO: 67559 - DNA, 30 bp, Homo sapiens; identical to SEQ ID NO: 18366
  chr4:660390-660420
  hypo

SEQ ID NO: 67560 - DNA, 30 bp, Homo sapiens; identical to SEQ ID NO: 18367
  chr4:660942-660972
  hypo

SEQ ID NO: 67561 - DNA, 227 bp, Homo sapiens; identical to SEQ ID NO: 40146
  chr4:667539-667766
  hypo

SEQ ID NO: 67562 - DNA, 255 bp, Homo sapiens; identical to SEQ ID NO: 18368
  chr4:679511-679766
  hypo

SEQ ID NO: 67563 - DNA, 30 bp, Homo sapiens
  chr4:698465-698495
  hypo
ccaacctgccctcccgtcctgggccgccag

SEQ ID NO: 67564 - DNA, 31 bp, Homo sapiens; identical to SEQ ID NO: 40147
  chr4:699369-699400
  hypo

SEQ ID NO: 67565 - DNA, 45 bp, Homo sapiens
  chr4:708089-708134
  hypo
actgcccagacccactcgtggccgttcggccgcatttgcttcctc

SEQ ID NO: 67566 - DNA, 441 bp, Homo sapiens
  chr4:717886-718327
  hypo
ccaatggcagagccccggcagaaagactcagggcagatggtggttgtcagccgggagggggcacggagccctgggggtggtcaggcccacgtggccttgggacgagagcgaagaggtgggatcggctgcgggagacagggaagtgggtgacaaggaggctcaggggctacagcaaaggccccggaggcttttccacacccgagtccgtcctcggccatgccagccaggtcaggggctcagtcctgtgggccaccacagccggccgcacaggcagggaaggtgaagctccacggagcaccctggtggacagcggtgctgtgggggccatggaccagaaggcggagcccatgctgtgggctgggtggggtggcagctgccagttcaaagtctgtcttttgtttatttacttcataaaatactccaggtgttttgttagaaatt

SEQ ID NO: 67567 - DNA, 31 bp, Homo sapiens; identical to SEQ ID NO: 18369
  chr4:718960-718991
  hypo

SEQ ID NO: 67568 - DNA, 188 bp, Homo sapiens
  chr4:722181-722369
  hypo
agtaatctggggatggcgtagagtgcgtggggggtggcgtgcacagcgtgttaagtgtcgtaagtaatctggggatggcgtagagcgcgttggggggcagcgtgcatagcttctgtgcagactcgacaccacttcatgtccgggacttgagcacctgtggattttggtatcagcggcgtcctggaact

SEQ ID NO: 67569 - DNA, 20 bp, Homo sapiens
  chr4:722594-722614
  hypo
attcgttcggttggccgggt

SEQ ID NO: 67570 - DNA, 30 bp, Homo sapiens
  chr4:725080-725110
  hypo
ggggtcccaggcctcgatggcagtgcgggg

SEQ ID NO: 67571 - DNA, 30 bp, Homo sapiens
  chr4:736909-736939
  hypo
tcaacccctggtgacgggtggttctgcgcc

SEQ ID NO: 67572 - DNA, 126 bp, Homo sapiens
  chr4:738341-738467
  hypo
gacagtttggatttcatggtgcgctatgttctgtttgtgctaaaaggtgaaaccaaagcagacgacagttcaaacaaagaggccgcggaggagaagccggaggaggacaacgactaccaccgcagc

SEQ ID NO: 67573 - DNA, 20 bp, Homo sapiens
  chr4:741511-741531
  hypo
cctccgggacactcctgtat

SEQ ID NO: 67574 - DNA, 43 bp, Homo sapiens
  chr4:741911-741954
  hypo
gatgaagacagaaaaactacacggtcacagagatgcagtaaaa

SEQ ID NO: 67575 - DNA, 186 bp, Homo sapiens
  chr4:745650-745836
  hypo
ttctccatcatctgacgggcgcaggccccctcgctgccacccccactggtgggcactcagcctcaaggcacaggcctcctgggactggtggctcctctgaatcttcctgagagaggcaagtttagtcatcgctgagcaacgcaaaagcgtgtcgggtttatttactcacaacgatgtcttctaaac

SEQ ID NO: 67576 - DNA, 30 bp, Homo sapiens
  chr4:746252-746282
  hypo
cggccacagctgttccgctcttttccccca

SEQ ID NO: 67577 - DNA, 30 bp, Homo sapiens; identical to SEQ ID NO: 18371
  chr4:748931-748961
  hypo

SEQ ID NO: 67578 - DNA, 637 bp, Homo sapiens
  chr4:756872-757509
  hypo
gagactcactgagcacgggctgcctggagatcatggagaaaccaagtcaggacacggggggaagggagagaaggaaatggggcaacgctttttgctaagtttctatcgttttgtttgcttttctgtgtagcgaaacagaaaagatggatggtagctggggacagagcaggccgaggaagtccttggattttcatgtggaggtgtagcgggaagctgccggacagtggggctgcagggggtggggaagaggttggccatttcccagcgcagggctggttcctccagggaagagtgtgaggtttgcgctgctgctgcgttaaccgtgcctctgagcccccaacccagccactcaggcaggtggggctgcttcaattcatgccttccccagggaggaatctgaagaactgtctacatgatcagggaaacgcaaggaaaactgcgtggcaccacgcgtaccccatagaagggccagaatcccaagcactgacaacacattcgggaaacgccgggagcgcaggttcattcctgtgggaagtggaacccgcaggccctgtggagaacagcttggcagctgctgacaacacgaaacacactctcggcaaaccacccagcagccacacctcgtcatttacccact

SEQ ID NO: 67579 - DNA, 217 bp, Homo sapiens; identical to SEQ ID NO: 18373
  chr4:757736-757953
  hypo

SEQ ID NO: 67580 - DNA, 31 bp, Homo sapiens
  chr4:760152-760183
  hypo
gagtcaccttctgacacgagctccctctgct

SEQ ID NO: 67581 - DNA, 211 bp, Homo sapiens; identical to SEQ ID NO: 18374
  chr4:765528-765739
  hypo

SEQ ID NO: 67582 - DNA, 35 bp, Homo sapiens
  chr4:793058-793093
  hypo
atcacacccttttcatcggtcgcatttctacgggg

SEQ ID NO: 67583 - DNA, 140 bp, Homo sapiens
  chr4:793647-793787
  hypo
ctcaaaaaataaaaaataaaaagatcctctgtaataaaccataggcatatgtttccctgaattctgtgagttgctctaggaattaaacccaagaggggtcgcatgaaccccaactcgaagccggtcgttcagacattcta

SEQ ID NO: 67584 - DNA, 459 bp, Homo sapiens
  chr4:812188-812647
  hypo
ggcctcacaggtccccgggcccagcgtctgatgcacgtcctgcaatgctccctctgttttgcgcccacgctgaagtgccacaaacacctcttctctcctcagcaactctggtggctttgcagatcttcattagctcacctgggatgagacgctgacctgagctggagctggggtcctgcaaccatggccaaggccccccgtccacaccgccgaggccaggaaagccgcgccatgtgagtgacgggaagaggccgaatgagggccaaggattacaactgtcctggaaaccggcggctgcgccatctgccgccgagcttggcactgtttgggtcacttattggcacgtccacctcgcctgtctccacgcatcctctcctgaaagcgaggaccaggtgctgtattgaagagctgggcgctcggtccgcaggcaaggacagcagtgcccgcggccaaggacgg

SEQ ID NO: 67585 - DNA, 30 bp, Homo sapiens
  chr4:812872-812902
  hypo
tctgcgctccccgtgcgagtccagcagcgt

SEQ ID NO: 67586 - DNA, 298 bp, Homo sapiens; identical to SEQ ID NO: 40152
  chr4:819436-819734
  hypo

SEQ ID NO: 67587 - DNA, 31 bp, Homo sapiens; identical to SEQ ID NO: 3089
  chr4:824547-824578
  hypo

SEQ ID NO: 67588 - DNA, 30 bp, Homo sapiens
  chr4:828266-828296
  hypo
ccacgcacattggacgtgccagcacgagac

SEQ ID NO: 67589 - DNA, 260 bp, Homo sapiens
  chr4:829598-829858
  hypo
tggcctctgggctcagacacccggactgcgtcctcaggagtggagctccccgaggaaagagtgcctttgcttcccttgacgtgtcctgcactttgtgtcagccagcgcggcagcaagaacgagcacacggggacagaagctcatctgaacctgccggcccgtgtcggtgtccagcgcggaggcgctgtgtccgcagggcacctgcatcctcataagctggactgactgccgtggggcccggtgccccatgtccagtgcat

SEQ ID NO: 67590 - DNA, 220 bp, Homo sapiens
  chr4:841554-841774
  hypo
agacccggctcccacgtgcagaatggagcctcagtgactgtgggtagcactcaggccagtggccggctgggaagatggtgcatcctgggcctttcacgtgtgggtgtccgggtggcgccgtgcgtgaccctgtgcagccgtgtctgcgtgtgcgcaggtgtccgggtggcgccatgcgtgaccctgtgcagccgtctgcatgtgcgcaggtgtccgggta

SEQ ID NO: 67591 - DNA, 31 bp, Homo sapiens
  chr4:852609-852640
  hypo
agaaacgatgaggagacgggaaatgctcccg

SEQ ID NO: 67592 - DNA, 30 bp, Homo sapiens; identical to SEQ ID NO: 18377
  chr4:854459-854489
  hypo

SEQ ID NO: 67593 - DNA, 30 bp, Homo sapiens
  chr4:858284-858314
  hypo
aggccggcccaagacgcagctgcagcatac

SEQ ID NO: 67594 - DNA, 30 bp, Homo sapiens; identical to SEQ ID NO: 18378
  chr4:858799-858829
  hypo

SEQ ID NO: 67595 - DNA, 30 bp, Homo sapiens; identical to SEQ ID NO: 18379
  chr4:860823-860853
  hypo

SEQ ID NO: 67596 - DNA, 115 bp, Homo sapiens
  chr4:864980-865095
  hypo
aggcagaggggcaccgggcggggccgccatgtttcctgcaactccaggggaggccacgtgctcagagcagacgggacaacatcccacagctggagactccggcacccaggcaggc

SEQ ID NO: 67597 - DNA, 178 bp, Homo sapiens
  chr4:866139-866317
  hypo
agccggggccaacacgagcttccccctgcgcccgagcctctttgcgtgccgctgtctgtcgtcaggggtggcagggactgcacagcggtggcacagctggcgtggagatgtggaggaggcaacgtctgcagaggagcctgcaggcaccagcagagaatccgacggccaccgcagcgga

SEQ ID NO: 67598 - DNA, 30 bp, Homo sapiens
  chr4:866796-866826
  hypo
tcgcccaggcacggcgcaggctcaccacgc

SEQ ID NO: 67599 - DNA, 30 bp, Homo sapiens
  chr4:870910-870940
  hypo
ggcgtgatagatgacgatgagcacgtctcc

SEQ ID NO: 67600 - DNA, 248 bp, Homo sapiens
  chr4:872636-872884
  hypo
ctcccggagcttgtgcgggccaggcaggtgacaccacttctatggtgacggtgcagaccccatcttcccagccacaggacactgtggcccagctcagtcagcagggagccaggacagccggtccttcagccacaacaaataaatcctgccaacagcccgagtggccaaggaagcagattcagaaatgaaagagaaatcggctttctcagagtcagtgcggccaacaccttgaacggaggagagggccc

SEQ ID NO: 67601 - DNA, 112 bp, Homo sapiens
  chr4:877547-877659
  hypo
aggccctggttttccacggacacggccttgtgttgttcctggcatgacctcagggagccatgggaggccaggctggcgctgaccctgtccactgctgcgcctggaggtgctg

SEQ ID NO: 67602 - DNA, 39 bp, Homo sapiens
  chr4:881387-881426
  hypo
ctcatacaggcactcgcgcgcatgcgtacacatgcatgc

SEQ ID NO: 67603 - DNA, 30 bp, Homo sapiens
  chr4:882160-882190
  hypo
gtcggggccacccccgcacagacgcgccct

SEQ ID NO: 67604 - DNA, 136 bp, Homo sapiens; identical to SEQ ID NO: 18381
  chr4:882582-882718
  hypo

SEQ ID NO: 67605 - DNA, 30 bp, Homo sapiens
  chr4:887280-887310
  hypo
cagcagaagcacagcgcgctcggccccacg

SEQ ID NO: 67606 - DNA, 124 bp, Homo sapiens
  chr4:887621-887745
  hypo
ccagggtcctgccccacgcacgcattccaccgggacttacggatgaggctgtggaagaccgtgtactgcgtgtcgtgcggggggatcgagtacttcccattgactattcgaagtttcgctccat

SEQ ID NO: 67607 - DNA, 30 bp, Homo sapiens
  chr4:890194-890224
  hypo
ttaagtagggcgcacggagccaggcactgc

SEQ ID NO: 67608 - DNA, 30 bp, Homo sapiens
  chr4:890505-890535
  hypo
ccgctgctcatcttcggcctcagcgcgctc

SEQ ID NO: 67609 - DNA, 114 bp, Homo sapiens
  chr4:891956-892070
  hypo
ccacaagacagccccgtgaacttggcgtagacagagatgggacttcagggaaaacgaacgggtgtgagacacagccagggcccttcgcagacagcactcgcccagggccacggc

SEQ ID NO: 67610 - DNA, 30 bp, Homo sapiens
  chr4:897572-897602
  hypo
tccacagctccccacggaaactggagtgag

SEQ ID NO: 67611 - DNA, 30 bp, Homo sapiens
  chr4:898516-898546
  hypo
acgaaagggggcctcgagattccattttct

SEQ ID NO: 67612 - DNA, 225 bp, Homo sapiens
  chr4:899760-899985
  hypo
gccagggggcaagacgcccaagcgtcaccgaagcaacaaccgcgtcagcatcccagcagctgagctggcatgccgttaacgtgagaaccacatcggcatcccagcagttgagctggcgtgccgttaacatgagaactacattggcgtcccagcagccgaggtggcaagccattaacgtgagaaccacactggcatctcagcagccgagccggcgagccgttaacg

SEQ ID NO: 67613 - DNA, 30 bp, Homo sapiens; identical to SEQ ID NO: 18384
  chr4:903017-903047
  hypo

SEQ ID NO: 67614 - DNA, 30 bp, Homo sapiens; identical to SEQ ID NO: 18385
  chr4:903299-903329
  hypo

SEQ ID NO: 67615 - DNA, 310 bp, Homo sapiens
  chr4:905661-905971
  hypo
ctgaagtcagaatacttgaatcgaacccttacaattttagacgtcagagcggaagatgagggagagagcagtggacgaccgagagaaaggcagacagaggcaggaggagctgcaggagagggcggggacaaaggcaggcacaccggccacacacacctgaccacagcgacaccaaagtccatcccgcgcgtggcaggaggaggcagggccctcagggggctgtgcgcagggaggctgcggcgtggctgtgtccacccgaacccacactcaggcagccggcgggctctccgagtgaacagagctaggagag

SEQ ID NO: 67616 - DNA, 30 bp, Homo sapiens; identical to SEQ ID NO: 18387
  chr4:920592-920622
  hypo

SEQ ID NO: 67617 - DNA, 30 bp, Homo sapiens
  chr4:921622-921652
  hypo
gtgagcgcagccaccgcacttcaggctctg

SEQ ID NO: 67618 - DNA, 81 bp, Homo sapiens
  chr4:937751-937832
  hypo
tggagggtgcgattccgtttataccacattctaaaaaaggcaaaattggctgggtgcagtggctcacgcatgcaatcccag

SEQ ID NO: 67619 - DNA, 30 bp, Homo sapiens
  chr4:942642-942672
  hypo
ctgagcctgggggacgccgagaagtcatgg

SEQ ID NO: 67620 - DNA, 31 bp, Homo sapiens
  chr4:942935-942966
  hypo
gctgcccctttcagaacggggtcgctgaggt

SEQ ID NO: 67621 - DNA, 30 bp, Homo sapiens; identical to SEQ ID NO: 18388
  chr4:943582-943612
  hypo

SEQ ID NO: 67622 - DNA, 30 bp, Homo sapiens
  chr4:944262-944292
  hypo
atgacctttctcatcgtgacagtggcctgg

SEQ ID NO: 67623 - DNA, 30 bp, Homo sapiens
  chr4:947047-947077
  hypo
gggctctgtaccgacgacacgtcctgggca

SEQ ID NO: 67624 - DNA, 42 bp, Homo sapiens
  chr4:949384-949426
  hypo
tggggctcccccactccgcccctcgggcgtccctgtcctgtc

SEQ ID NO: 67625 - DNA, 1782 bp, Homo sapiens
  chr4:955123-956905
  hypo
ccagccgggctcagcggggaccggggacgcccaccctggacctggccctggggcgggagaggccagctgggctcagcggggaccggggacgcccaccctgggctcgcccgcccactcggccggcggctcaccatgtgcacgacgcccgtcacgcccacaacctccagcagcccgtcgtccatgcgtggcttctcaaacctggtgtcgctgtcggagccccacaggtcggcccccgagccccagctgccgcataagagagcgggcacagaggtgtaggtgcaggcaggacgagggctgagcctgcccatggccccgccgggcagagcctctggggagccccgcccgcgagcacctggggatgttgatgaagatgaggccttcaatactgggcagctccacctcctgccgctccacctgcagccggatctgcttgtgcaggctccgagagtgactgatcttctgcagccccacccgcacgtacacacccttgttgtgcagcctgcaggacggggcaggtcacccatcaccaggggaagccctaccccgccttaggcagcctccgggttccggcccctctgcctgttcctgctgggggacctgagggaggtatgccgttgacaggtggtagcccctgcggctccggtacctgcttgtgaacttgccaggctcctcttcccgtgcctggtggaagtccaggctcagctccgcgtcgatgccaatgccacagtagttactcatctgcacgatctggggacagggcgttcatctcccaggacccggccgccctcaccaggccccctgagctccccaacagctctgccggcaggcagagacaagagcaaggaccaccctggcaccaagccgagcacccaggagagggcagcatgggcaggtcctggccaggctctgtcgccagctggctcagcacaatccccagcagtggctactttctgtgtctccctcaactgcccgctttgcagaggggatgatgcgggcgcgtacacccgagtgtggctgggaagaggacgcccgttgtgacgcgtgtagcggggtcatatgcaggagcctggaaggcaccccacgccgggctgccctgtaccttggggggctctgcgtctgccgtgtcgttctctgcactgccagcctcgtgggcatccagcaggatggtccagcggtccatgagcacggcgtcggcctcgtccacagacagcagtacggagaacgggtcctcgccgctgtagcccgccccccagcggaggactcgaccaaggtcattccctgggacacaagcagacacagagcatctgtccacacccacccgcccatcagctgggtgcagaccccaccacgaggacagccagcccaggcctcggcaaaagctgcacaggaaggggtagaccctgaggccccctcctcggctgcacggctgagcccacctgtgcccaggggcaggatggccacagaaggctccgggcaggccagtcggtaccgtgtctcctccagggcgccaagcacccagcccacagtgccatcgccaccacacaccagcacccggaagcagggcacctgggagaacaggtggagcctagcgggagacaggaagtgtcctctaccagctgcgggcgcagcccatcccccacccaggctgcctcttccaagtgcccgtcctggccgtgtggaggacttcaaggtcccagcacgggatccccgtggagctcctgccggccgagacagctgtggcagcctcctggggcccttcccgcccctgctgctgccctggac

SEQ ID NO: 67626 - DNA, 292 bp, Homo sapiens
  chr4:957284-957576
  hypo
ggcactgaggacagccggctggctgcctggcactcccagcacaaaggcctcagacctgcccactgagctgcgtgtgaacagaccacacccgcctgggccatgcagcgcgagtccaggctggaaatccacgtgggactctgcgtggcactctgtgccagcgagaccaaggcctgtcccctggggggcctctggtgcacacctttggaggatggcggctcccaggccaccgcccacctacacagcagccgagaaaagctcttaactcacagggtggcacgcggcgtccctcgac

SEQ ID NO: 67627 - DNA, 31 bp, Homo sapiens
  chr4:958712-958743
  hypo
acctactgggcagcctcggatgagcgctgac

SEQ ID NO: 67628 - DNA, 30 bp, Homo sapiens
  chr4:960294-960324
  hypo
ccatcagcatcgtccgctggactgcagagg

SEQ ID NO: 67629 - DNA, 30 bp, Homo sapiens
  chr4:960820-960850
  hypo
ggacacgtaggccacgcccaccctgtgggg

SEQ ID NO: 67630 - DNA, 310 bp, Homo sapiens; identical to SEQ ID NO: 40154
  chr4:966932-967242
  hypo

SEQ ID NO: 67631 - DNA, 30 bp, Homo sapiens
  chr4:968588-968618
  hypo
tccaggcggaaagccggagcagaggccctg

SEQ ID NO: 67632 - DNA, 334 bp, Homo sapiens
  chr4:968830-969164
  hypo
tcatggcagtgaaccacggtgcaaactgcagctggcttctgaggaaaaactgtttaaggacatacctttctccatttaggagacagtggagagcatcaaaaacatcttaaaaaggaaaaccctcatctaccatttctgccagaactttctgctttctgacgcacacgttaattaaaatggcgggcaaagcatccttccagcaaacactccacggacttcctagaacgtcctccaaagccaccagcagcttctcgctgaaggggccttaaaactttgaatccgctctccctctccctctccctctccctctccctccacggtctccttccacggt

SEQ ID NO: 67633 - DNA, 30 bp, Homo sapiens
  chr4:976550-976580
  hypo
tggcctgtcgtggccgggtccgtgtgtctc

SEQ ID NO: 67634 - DNA, 33 bp, Homo sapiens; identical to SEQ ID NO: 18392
  chr4:982808-982841
  hypo

SEQ ID NO: 67635 - DNA, 30 bp, Homo sapiens
  chr4:984754-984784
  hypo
gggatgccccggcacgccccagctctgccc

SEQ ID NO: 67636 - DNA, 30 bp, Homo sapiens
  chr4:985222-985252
  hypo
taggcgatggcctgcggcaccaggatgatg

SEQ ID NO: 67637 - DNA, 30 bp, Homo sapiens
  chr4:989406-989436
  hypo
tgtgggattgaagccgagggtctcgcagaa

SEQ ID NO: 67638 - DNA, 39 bp, Homo sapiens; identical to SEQ ID NO: 18393
  chr4:995246-995285
  hypo

SEQ ID NO: 67639 - DNA, 74 bp, Homo sapiens; identical to SEQ ID NO: 3091
  chr4:996100-996174
  hypo

SEQ ID NO: 67640 - DNA, 361 bp, Homo sapiens; identical to SEQ ID NO: 40157
  chr4:1004428-1004789
  hypo

SEQ ID NO: 67641 - DNA, 251 bp, Homo sapiens; identical to SEQ ID NO: 18396
  chr4:1007047-1007298
  hypo

SEQ ID NO: 67642 - DNA, 30 bp, Homo sapiens; identical to SEQ ID NO: 18397
  chr4:1007642-1007672
  hypo

SEQ ID NO: 67643 - DNA, 368 bp, Homo sapiens
  chr4:1008573-1008941
  hypo
tgcaaggtggggaatcgggccagccgccccgtttccatctcggggccccactcctggaagggaaaataaatcactgtccccttggggggagggagggagccgtgaacaaagtcgcctttggctgggcctggaaacgccgaccgcagactcctttatccattgtgcgggaatcaatgggcctccgggctccctttcagccgcaggccccgcgctgcggccctgtcaggggaaatgttggtttttccccagtcgtggcctccagcccctggcttgcccagccctggcttgcccagccctggctcaggaactgcggccgtgctgggagaggcgggctgtgcccgcagactggaccccggctgctgcatgct

SEQ ID NO: 67644 - DNA, 30 bp, Homo sapiens; identical to SEQ ID NO: 18399
  chr4:1009793-1009823
  hypo

SEQ ID NO: 67645 - DNA, 30 bp, Homo sapiens
  chr4:1012454-1012484
  hypo
cagtgcgaggcagccggtcttcccaccagg

SEQ ID NO: 67646 - DNA, 465 bp, Homo sapiens
  chr4:1016331-1016796
  hypo
acggggacacacctggggcccgagagtcagccagcccccggcagaaagccttccttcggtgccctgccccacctcagctggctgcacctctgccaccatcccccaggtatcctgtcccgttcctgtccccgtcaggctccagcctcggagccttcctcccagcggagggcggagggtggagggcgggagccgaaggcagtggtcccacagaagggctggggcccgaggccttggcagggtgtgccggccgtcggctgtgactttgaggctcgggtttcggagttcagaggagccgccgggatgcgtggcctttctgttctcttctgcgcctggggcccgggcgctgggcttggacaggtgtccagagagacacgccctccatacctagggacccggcaccccgcctgctccgctgggctcctgggtgtggggccctcgggtggagctcctgggagctgggctggc

SEQ ID NO: 67647 - DNA, 31 bp, Homo sapiens; identical to SEQ ID NO: 18401
  chr4:1032331-1032362
  hypo

SEQ ID NO: 67648 - DNA, 31 bp, Homo sapiens; identical to SEQ ID NO: 40159
  chr4:1036591-1036622
  hypo

SEQ ID NO: 67649 - DNA, 182 bp, Homo sapiens
  chr4:1044471-1044653
  hypo
ggcctccgcctctgcgtgctttcctcgcatgctgagtgtctaacctcggcttctgggtttgctgctgctgtttcacagacagcaccccacacagggcagcttgaggatgccccgctgcttccctggttgtggataagccaggcagctggcggatggcgcggcacgagcgctggctgtgcctg

SEQ ID NO: 67650 - DNA, 30 bp, Homo sapiens
  chr4:1050981-1051011
  hypo
gcacccaggagggtcgacaacccaggccag

SEQ ID NO: 67651 - DNA, 98 bp, Homo sapiens
  chr4:1077031-1077129
  hypo
atgactacataaaagacgaagatgcaacaatgagcaaggactattttccaaatggtgaaatgagcaggaatgttctcaaaatgttaactgtaatggac

SEQ ID NO: 67652 - DNA, 277 bp, Homo sapiens; identical to SEQ ID NO: 18402
  chr4:1093368-1093645
  hypo

SEQ ID NO: 67653 - DNA, 208 bp, Homo sapiens
  chr4:1189020-1189228
  hypo
ctcaatgtcccactcccgcatctcctgcggtcccagggcgggtcccgctggtgtgtggccggcctcgcaggaaccacttcgctctcccccatccactactcccacaggcaacaggaccggccccctggcccgtcggtgggcgcatcagcttggtggccctggccccctgcgcctcaggggtccctcacaggccggccagcttccagca

SEQ ID NO: 67654 - DNA, 43 bp, Homo sapiens
  chr4:1201009-1201052
  hypo
cagagggggtggaggccggaggcctagacgcctgtaggggctg

SEQ ID NO: 67655 - DNA, 241 bp, Homo sapiens
  chr4:1201277-1201518
  hypo
agagaggccacccagaagagccgctgtttccatgtgccgcgcttacacatgctccagagggtccggctgcctaaccatgcgccgcgcttacacatgctccagagggtccggctgcctaaccatgcgccgcgcttacacatgctccagagggtccggctgcctaaccatgcgccgcgcttacacatgctccagagggtccggctgcctaaccatgcgccgcgcttacagatgcacctaacct

SEQ ID NO: 67656 - DNA, 521 bp, Homo sapiens; identical to SEQ ID NO: 18404
  chr4:1204210-1204731
  hypo

SEQ ID NO: 67657 - DNA, 31 bp, Homo sapiens; identical to SEQ ID NO: 18405
  chr4:1204980-1205011
  hypo

SEQ ID NO: 67658 - DNA, 30 bp, Homo sapiens; identical to SEQ ID NO: 18406
  chr4:1206135-1206165
  hypo

SEQ ID NO: 67659 - DNA, 397 bp, Homo sapiens
  chr4:1208722-1209119
  hypo
cttcggaacaggctcgcttttcatgcacttttgcaaaaagccctgcgggtggctctccctcggcttcgtggccagggctttcctgcagcccccccatttcattccaagaagtccacccagccacggtgcttggctgacagctgggcaggtcacggtggcttttctttggtgcactgctgcccattaaagcctcacacccaaggtcctcagggacggcagggctctgaccagcatccacgtgccacaccctgtcccctagaaggctccaaacccactgactctgtgaacaaaggaaggggcagcgggaacctggcctcatcctccttgtggctacaggctgctggggcagctagagtgggcgggtggcctctgacacgtgtgtacacacatgcacata

SEQ ID NO: 67660 - DNA, 136 bp, Homo sapiens; identical to SEQ ID NO: 18408
  chr4:1212169-1212305
  hypo

SEQ ID NO: 67661 - DNA, 727 bp, Homo sapiens; identical to SEQ ID NO: 18409
  chr4:1214806-1215533
  hypo

SEQ ID NO: 67662 - DNA, 416 bp, Homo sapiens
  chr4:1215812-1216228
  hypo
tagccaccacacacgcggattccacgctaagaacaacccagacagtgtgtgcacagcagagggcagatggggacatgcacaccctgggagagcctgagtggctggtgcccagcaccggccccgcctggagcatgaggctcttccacagagggtgggatggggctcagggacaagggcgaggggcggggcgggggacgggacgcaggtgttctgcagtcaagggtgccaggtgggcagccggggtggggtaggggtcccgtccacaaggtagaggctgcagcgtcagggggctcgtgtccctaaggacagaactgctctcctcagctcccgaggccgagggagcgctgacctggcctggttcatcacaagatcaccacagacagaggggcccgcgccgagagcgagggaagcagctg

SEQ ID NO: 67663 - DNA, 30 bp, Homo sapiens
  chr4:1217377-1217407
  hypo
cctcctgaggaacccgcgatctggggagac

SEQ ID NO: 67664 - DNA, 30 bp, Homo sapiens
  chr4:1218371-1218401
  hypo
gtctgtgtgtgccacgatgtcttgtgtgag

SEQ ID NO: 67665 - DNA, 50 bp, Homo sapiens
  chr4:1222606-1222656
  hypo
aagtggtaagtccccgcggcacacaagcacgtcggcggaggcaggcagac

SEQ ID NO: 67666 - DNA, 258 bp, Homo sapiens
  chr4:1222990-1223248
  hypo
ggtggaggaagtgccctaggccgaagaaccaggtgcagcactgggcacagggtggggatgtgtgtgcaccacctgcgcatccacccacacccaaacacatccacccgcacacgtccatcccacactcccgtgcatgacaacgcccacccacgggtgcagagatgctctgtgcgaacagccgtggctgaggacaccaggacatgcaggcctcgtccacatgggcatgtccgagtccccggagacaccagtgagcctccc

SEQ ID NO: 67667 - DNA, 30 bp, Homo sapiens; identical to SEQ ID NO: 18413
  chr4:1224231-1224261
  hypo

SEQ ID NO: 67668 - DNA, 30 bp, Homo sapiens; identical to SEQ ID NO: 18414
  chr4:1224484-1224514
  hypo

SEQ ID NO: 67669 - DNA, 488 bp, Homo sapiens
  chr4:1225294-1225782
  hypo
gaaacagaccccaggacgctcctggtggcagctggctcttgggggtcaggaaggggcccgccaagcccacctcctgccatgcagttctgccacctgcttctgtgctcaggactcgacgtcgcacttacctttccagacctcgtgcacaggggtggcttactctgtgaaactgctgctcacatcaggtcaccatcagggcagatgtttctctacgacacgcagccacatgcaggcccagggtggggctgggctgaagaccgcaggtttcagatttccagagaaactgccaaagcaccatcgagaccggcacggccgtttctatcccacatgaagggccaggcccaggctccctcagcacggctggtgcagggctcagcgcaggccaggccaggggttaccggcggtgcctgctgcacctgtgagaacccaggaggcgcaccccggttctcatacaccgctctgtctgtaccaaacgccaccgccctcat

SEQ ID NO: 67670 - DNA, 30 bp, Homo sapiens
  chr4:1232772-1232802
  hypo
tgtttcacgtaggacgcccccaaccctctg

SEQ ID NO: 67671 - DNA, 30 bp, Homo sapiens
  chr4:1233424-1233454
  hypo
gggcctgcagcacacgcctgcaggggacgg

SEQ ID NO: 67672 - DNA, 141 bp, Homo sapiens; identical to SEQ ID NO: 3096
  chr4:1243420-1243561
  hypo

SEQ ID NO: 67673 - DNA, 30 bp, Homo sapiens
  chr4:1244489-1244519
  hypo
gagctggggtcagacgagtcccaggcactc

SEQ ID NO: 67674 - DNA, 30 bp, Homo sapiens; identical to SEQ ID NO: 18417
  chr4:1245191-1245221
  hypo

SEQ ID NO: 67675 - DNA, 30 bp, Homo sapiens
  chr4:1245550-1245580
  hypo
ctctgtgccagccacgtgtgaaagaagaac

SEQ ID NO: 67676 - DNA, 445 bp, Homo sapiens
  chr4:1290581-1291026
  hypo
cggaccccactgcctcgagacgctcccatcactcggctcccgtgacaccatcctctgggctctccccacccctcgctgcatgtcctcacttgcctatgctgtcttctctagtcttggaggccttttgttttatgtcaccagccagccctccagaggttgtgtggcttcacagacggtctccaagctcctgtccccacactgctgccctccccaggcctctctccctgaggccatcccgtgtagtcacctcccggagctctcttcgcatgtctggaaggcagttcaaagatacgataccaggcgcaaaaccaaatgccgcatctcggccttggggccccagacgagccccagacctgccttactaagccacccttcccaagtcagttgacagcgatgtcccccggcacttgttcagtgacagccgagaactcggaggttttctcga

SEQ ID NO: 67677 - DNA, 585 bp, Homo sapiens
  chr4:1299050-1299635
  hypo
caagtggtccctgtggaaagccgctgcactaggtgagcccggccctggtgagggtgccttgtgagtggagcctgcttgtgctgctgtgccccgctgcttccaggcggcgcggccctccgtctgattgctggaggactcttcggtgtggacacaccgtggtttgtttacccatcctggtcaatggacaattggaactgtggtgaacaagcattcctgcacctgtatgtggatattgtatgtccatttttcttgggagtggaatggctgagtcatctggtaggtgtctttaccttttaaagaactaagcgctttttccagaaggatcatcagaactgctgccagcaagagtccaggtatcccggctccaccagcatgtggtggcggcctcttgacttggaactgttcttctgggtgccggggttctccagagaaacagagccagtggcacccacatgtgtgtgtgcgcacgcgtgtgtgggagtgtgcgtgcgtgcacgtgcgcacgcgtgcgtgtaaggagctgtgtcacaaagaattggctggtgcagttatcaaagctaagtcccgagccggagacccaggaga

SEQ ID NO: 67678 - DNA, 52 bp, Homo sapiens
  chr4:1304026-1304078
  hypo
ggggccttccccagtgggtctcgttgagctcgcttgcactggtcaggtattt

SEQ ID NO: 67679 - DNA, 30 bp, Homo sapiens
  chr4:1305765-1305795
  hypo
ggtgccctacgagacgctgaacaaacgctt

SEQ ID NO: 67680 - DNA, 162 bp, Homo sapiens; identical to SEQ ID NO: 18421
  chr4:1309533-1309695
  hypo

SEQ ID NO: 67681 - DNA, 111 bp, Homo sapiens
  chr4:1309944-1310055
  hypo
atctcaggcggggtgcgttttccgtgttttctgtggcaccctgtagaaacacgtggcacccttgccctctgtggctacagctgagcagacgctgggcggtgctgccctctg

SEQ ID NO: 67682 - DNA, 30 bp, Homo sapiens; identical to SEQ ID NO: 18423
  chr4:1310540-1310570
  hypo

SEQ ID NO: 67683 - DNA, 31 bp, Homo sapiens; identical to SEQ ID NO: 3097
  chr4:1310814-1310845
  hypo

SEQ ID NO: 67684 - DNA, 30 bp, Homo sapiens
  chr4:1316258-1316288
  hypo
catgacaacaagtcccggctccggaagatg

SEQ ID NO: 67685 - DNA, 685 bp, Homo sapiens
  chr4:1317014-1317699
  hypo
gagccaccgtgcccggccgagtaccgacttttgtagagaccaaaagaagcttaagaaatggactcctaaaggacaaaatttaaacctgcttattaaaaggcattgtcaccctaggggcttgcagaaatgttttaacttatgttaacacttctgcctccattagcaaaacttttctgtcttctaaactgagcgctgctttaacctcaccctggctgagtttggcagggtgcacgcagttaccagccaggagtgacacactgccactcagggccgccaaaacaagcacgaagcaaagacgggacgaaaaagtagagcggctagtagctcccctaaagagagtttggaccttggtatggaaaccctaaaaggaaagccagaattggtatgtaacctgcggccccactacacagtgccagccccacactccctcccagagagccggcacacacctcacagtgggaactctgccagggctgtttcctgtggatgtcagagggaagataggttcttggtgctgccaggatattcctgcaagccctaattacctgccggacagtgttgctggagggtgttggaggcttgccacgagcacacgacctgtctgaagctgctgtggggacaggcagggccaggactcggggccctgaatgcatgcctgggggacgagtgtgcctggtgttggatg

SEQ ID NO: 67686 - DNA, 30 bp, Homo sapiens
  chr4:1318830-1318860
  hypo
cccggtacgagatgcggccgagccagttgg

SEQ ID NO: 67687 - DNA, 30 bp, Homo sapiens
  chr4:1319077-1319107
  hypo
atttgtttgctgcacgtctgtgcgaaagcc

SEQ ID NO: 67688 - DNA, 92 bp, Homo sapiens
  chr4:1322318-1322410
  hypo
tggccctcagctcccgggcgagtgcccagcaggtgtgtttgccaggagggggcacctgtccatgcccacagaaacccgaccgcgactccata

SEQ ID NO: 67689 - DNA, 194 bp, Homo sapiens
  chr4:1323176-1323370
  hypo
tcataatgtctgagccgagctcagagctgtgccctctgcggcctcgtctgttgcaggggagcaggcaggtcccaggaagtgcgtgtccttcctcccgcaagcagacacgtgctgcctcgaagcctcagcagccagccgggcaggcatggcaaacaacaccccagtgtctcgggggcaggcgcagtgtgagctac

SEQ ID NO: 67690 - DNA, 97 bp, Homo sapiens; identical to SEQ ID NO: 18429
  chr4:1323653-1323750
  hypo

SEQ ID NO: 67691 - DNA, 81 bp, Homo sapiens
  chr4:1325022-1325103
  hypo
accctgcggggtcagccgtgtggactcacccccgactcccagtccctgtatgcaccctgcggggtcggccgtgtggattca

SEQ ID NO: 67692 - DNA, 31 bp, Homo sapiens
  chr4:1326207-1326238
  hypo
acttaaaaatgcaggccgggtgcagcggctc

SEQ ID NO: 67693 - DNA, 291 bp, Homo sapiens
  chr4:1330874-1331165
  hypo
tcctcccaccacagacagccccgagctcccgtgtgctgcacttgcgtggtgtctggatggtcggggtggggccgtgttgaggggcctcggatgcgtcgtgcagccttcactctgggaagtggcgcgcttcctctctcatcatctcagaggccgccatgggcattgatctaaaagcccgattttgatgtgttctggcagccggcagattaccattcagaatagttttcccgtgtgattaccaagaaccttgcctgtgactgactctgtcccgcctgtgactgactctgtccc

SEQ ID NO: 67694 - DNA, 1999 bp, Homo sapiens; identical to SEQ ID NO: 40166
  chr4:1331725-1333724
  hypo

SEQ ID NO: 67695 - DNA, 30 bp, Homo sapiens; identical to SEQ ID NO: 18434
  chr4:1334124-1334154
  hypo

SEQ ID NO: 67696 - DNA, 30 bp, Homo sapiens
  chr4:1334470-1334500
  hypo
caggtcccctcggccgaagcagaccctgtg

SEQ ID NO: 67697 - DNA, 158 bp, Homo sapiens
  chr4:1336857-1337015
  hypo
atccctatttggggacggtattagtttgctcggctgccgtaacagaagaccacggactagcgggtttaaacaatggacatttatttcttcacggttctagaggagatgctggcagggttggctcccggtgaggcctctcttcccggcttgcagacggc

SEQ ID NO: 67698 - DNA, 321 bp, Homo sapiens
  chr4:1338565-1338886
  hypo
aagcacggcaggtttagaaaacggatggggggtgttgagccagggaggtgagcgggtgcagaagtatttgctcagggtgagacatgagcagtggctggaaggaggcaaggaactctgtggatactggcagaagcttcccggcagagggatccgctccccagaggccgtgtggcagcaagagcaggctggagaagtcaaccggtgggatgcagggggcagcaaacacaggccacgacaggttttgccttgccctgggatgggagccgtcggaggattttgtgtagaggaatcctgtgatccgaccttagactttcaaaggtc

SEQ ID NO: 67699 - DNA, 78 bp, Homo sapiens; identical to SEQ ID NO: 18437
  chr4:1339093-1339171
  hypo

SEQ ID NO: 67700 - DNA, 34 bp, Homo sapiens; identical to SEQ ID NO: 18438
  chr4:1348026-1348060
  hypo

SEQ ID NO: 67701 - DNA, 30 bp, Homo sapiens
  chr4:1348563-1348593
  hypo
atccacgccgcccgcgacacactcaagctc

SEQ ID NO: 67702 - DNA, 30 bp, Homo sapiens
  chr4:1352772-1352802
  hypo
ctccggccggtgctcgtgctgaggctctcc

SEQ ID NO: 67703 - DNA, 249 bp, Homo sapiens
  chr4:1354333-1354582
  hypo
acccgtgctatggccgcgcccagaggctggcgcctgcttcccagaggctggcgttctggcccctgtgggccctggctgcactctccttccctgagaaggtcaggctgaagcagggtcctttcccgcccccgtgagccgagtgtgtgtgtgactcaccagagcccgggagcaaggacacaggcagctttcattttcccgagcccagagttagctttctccgcagagctcgggggcaggagctactaggtt

SEQ ID NO: 67704 - DNA, 133 bp, Homo sapiens
  chr4:1355306-1355439
  hypo
cagcaggttctgctcggccccgacagtgctgcccgccaggtgcccttcccgcacgcttgctgcagtcagccctgcaccgctccgccctccgtcctctcaaggtgcgtccctggcagccggagatgcacatgag

SEQ ID NO: 67705 - DNA, 30 bp, Homo sapiens; identical to SEQ ID NO: 18439
  chr4:1368951-1368981
  hypo

SEQ ID NO: 67706 - DNA, 30 bp, Homo sapiens; identical to SEQ ID NO: 18440
  chr4:1374643-1374673
  hypo

SEQ ID NO: 67707 - DNA, 30 bp, Homo sapiens; identical to SEQ ID NO: 18441
  chr4:1376361-1376391
  hypo

SEQ ID NO: 67708 - DNA, 47 bp, Homo sapiens; identical to SEQ ID NO: 40171
  chr4:1399585-1399632
  hypo

SEQ ID NO: 67709 - DNA, 153 bp, Homo sapiens; identical to SEQ ID NO: 40172
  chr4:1399665-1399818
  hypo

SEQ ID NO: 67710 - DNA, 164 bp, Homo sapiens; identical to SEQ ID NO: 40173
  chr4:1400175-1400339
  hypo

SEQ ID NO: 67711 - DNA, 30 bp, Homo sapiens; identical to SEQ ID NO: 40176
  chr4:1404431-1404461
  hypo

SEQ ID NO: 67712 - DNA, 30 bp, Homo sapiens; identical to SEQ ID NO: 18442
  chr4:1505443-1505473
  hypo

SEQ ID NO: 67713 - DNA, 30 bp, Homo sapiens
  chr4:1534918-1534948
  hypo
ctctttcgagtgcccgtcggcggctgagcg

SEQ ID NO: 67714 - DNA, 121 bp, Homo sapiens
  chr4:1537042-1537163
  hypo
gtgtgtgcgtgtgtgcgcacacaccatgtgaacatgcaagtgggtcatgcgtgtgactgtgtgcatgtgtgtctgagcgcatggtcaggtgcatgtgtgtccgtgtacatgtgtgcacgtg

SEQ ID NO: 67715 - DNA, 301 bp, Homo sapiens
  chr4:1541581-1541882
  hypo
aggtcctcagcgggcggcagccgtggtggccctaggaggccaccctgcccgagcacccgcttggccctgcggccgccgtcaggcctcagatgtcttacatattaatttcccgctgcagaacatttgccgagcgcagctcaaacccagttagctggattgatgaaggtggcaaaaggatacgacacacgctgattccaccttttcagcttcgattagctccggccgggagtctgtccccgtcagagctccatcacgcggccggcggagaactggggagggaccggccgcaacagtgcccagg

SEQ ID NO: 67716 - DNA, 139 bp, Homo sapiens
  chr4:1556471-1556610
  hypo
catttatttatgccccgcttgccgatgcctgcggctgaataacaactctgtgggtcccagcatagggtctgcggcatggagcctgcctggcatggcccaggcagccgccatcctcaccagccccggcccagccttgctc

SEQ ID NO: 67717 - DNA, 89 bp, Homo sapiens
  chr4:1556857-1556946
  hypo
tgagggagaagcacacgccgcccctgccctgtgagctggcgttccaggacagaatcggatatcaaacgagcacacggataccaagtaaa

SEQ ID NO: 67718 - DNA, 30 bp, Homo sapiens; identical to SEQ ID NO: 18444
  chr4:1578588-1578618
  hypo

SEQ ID NO: 67719 - DNA, 30 bp, Homo sapiens
  chr4:1585439-1585469
  hypo
tgaagcgttagtgtcgttcttgccggctca

SEQ ID NO: 67720 - DNA, 30 bp, Homo sapiens
  chr4:1594633-1594663
  hypo
cgaggtcctggctgcggggcccggggccgc

SEQ ID NO: 67721 - DNA, 364 bp, Homo sapiens
  chr4:1600695-1601059
  hypo
tctcctctctgtagcgtgcgcaggggtgcgtgcgggtgcagcaccgcgttccttccccggcccgcttccctcctggcctggcagacccttcgtcaccgaggccaggggatccagggtgccggagcgcagggccgtcggctccaaccccgcctggtacttcaccgaggccaggggatccagggtgctggagctcagggccgtcggctccaaccccgcccgggacttcgccgaggccaggggatccagggtgccggagcgcagggccgtcagctccaaccctgcctggtacttcaccgaggccaggggatccagggtgccggagctcagggccgtcagctccaacaactccgcccggtacttggcc

SEQ ID NO: 67722 - DNA, 30 bp, Homo sapiens
  chr4:1608268-1608298
  hypo
tgtgtcctgcctaccgcgtgactcagacaa

SEQ ID NO: 67723 - DNA, 30 bp, Homo sapiens
  chr4:1615312-1615342
  hypo
tccacaccgacgtgcgtggctatgcgtgtg

SEQ ID NO: 67724 - DNA, 335 bp, Homo sapiens; identical to SEQ ID NO: 18446
  chr4:1616405-1616740
  hypo

SEQ ID NO: 67725 - DNA, 30 bp, Homo sapiens
  chr4:1620024-1620054
  hypo
tgtctgagggtaggcgggtgagtgaatggc

SEQ ID NO: 67726 - DNA, 30 bp, Homo sapiens; identical to SEQ ID NO: 18447
  chr4:1621150-1621180
  hypo

SEQ ID NO: 67727 - DNA, 54 bp, Homo sapiens
  chr4:1621568-1621622
  hypo
cacttcatctgccctgcgatcatctaagctgtcctctctcgcctcatggtctcc

SEQ ID NO: 67728 - DNA, 30 bp, Homo sapiens
  chr4:1638195-1638225
  hypo
tgttgccccgttcacgggagatcccgtccg

SEQ ID NO: 67729 - DNA, 31 bp, Homo sapiens
  chr4:1640681-1640712
  hypo
gactgcagggagggggcgaggccccacctgc

SEQ ID NO: 67730 - DNA, 46 bp, Homo sapiens
  chr4:1642969-1643015
  hypo
ccagggcaggtgcaggcggcagccatggccccgaccagcccccacc

SEQ ID NO: 67731 - DNA, 479 bp, Homo sapiens
  chr4:1645865-1646344
  hypo
accaccaggctgcactacacacgcaccggggtggcggggacgctacgcaccttcaggggccaggtttccttccatttcaaaccacggcgttttgttttcattcagagtcgaccctctggactgactgctcggacccgacagatgctgtaagctcacgccgaggcctcggacgcgggactcgcactcgcgggcacagctgtgcggctagagcgtgaaaacagcaggctctgaacgcctctggacgacacagtcggtgcaggagaaaaaacttctgcccacagacacggcagctgtacagctcagcgcccaacagcgctagcgaaggccacacggaactgaaggggccacccacgctgtagagacggtggaaaccgaggcccacggggccgatgctggcctggactgcgccacccatccgcctcgcgccccctgtccctgggcgccagccccggggctccgtcccagctcctgctaccatc

SEQ ID NO: 67732 - DNA, 163 bp, Homo sapiens
  chr4:1656588-1656751
  hypo
cagagaagaccagccggatgctaacagccacatccagagaatcagccagcctcaccccagcaccgccctgtccagatctacgcccctctgagcccctggaaataagaaagcctcacctgggtcattttcaggaagtccaaggatgggcgtgtccacctggcgt

SEQ ID NO: 67733 - DNA, 100 bp, Homo sapiens
  chr4:1658843-1658943
  hypo
caccttccagaaagggcgcagcagacccctgggccccaccagctgaggagggagagacctggctgggcccgcaccctacacgagccgtcctgctcacaga

SEQ ID NO: 67734 - DNA, 313 bp, Homo sapiens
  chr4:1672853-1673166
  hypo
agccacagccatggcccggactcacctctgtcccagcgtcagagccaccagctcacagccacagcccggactcacctctgtcccaccgtcagagcccccagctcacagccacagccacagcccggactcacctctgtcccagcgtcagagccaccagctcacagccacagccacggcccggactcacctctgtcccagcgtcagagcccccagctcacagccacggcccggactcacctctgtcccagcgtcagagccaccagctcacagccacggcccggactcacctctgtcccagcgtcagagccaccag

SEQ ID NO: 67735 - DNA, 116 bp, Homo sapiens
  chr4:1684724-1684840
  hypo
ttcacgggacagcacggggaatcaactatcaagccacagaaggggatcaggactgccagtacccagcgcacaaggaggactcaaggaggcgggacaatggcgccggacgagggaaa

SEQ ID NO: 67736 - DNA, 243 bp, Homo sapiens
  chr4:1687243-1687486
  hypo
atgctgggggaggcatcggggctcccaggggtcaggctggggcctcccaacaggttctgggcctggtaaggctagtccggtgcaggctgcgaagccaggccagctgacaccaggactggctggagtcagcctcacctgtctggaagagtgggagtcccagcggggctggggaggggagaagggctggagcaggcgtccaggccattctcttcgctggggtccggtaatcccccacctgcaaca

SEQ ID NO: 67737 - DNA, 20 bp, Homo sapiens
  chr4:1688086-1688106
  hypo
agtctgtgcccctttaaagt

SEQ ID NO: 67738 - DNA, 30 bp, Homo sapiens; identical to SEQ ID NO: 40178
  chr4:1734223-1734253
  hypo

SEQ ID NO: 67739 - DNA, 333 bp, Homo sapiens; identical to SEQ ID NO: 18451
  chr4:1738684-1739017
  hypo

SEQ ID NO: 67740 - DNA, 140 bp, Homo sapiens
  chr4:1763038-1763178
  hypo
cactgcccatgcaacccggtgcgccttgtccaccctgtccgccctgcctgccctgcctgccccgtgtgccccacccaccccgtgcaccctgtgcaccccgtccacctcatctaccccgtgcaccccgaccaccccgtcca

SEQ ID NO: 67741 - DNA, 31 bp, Homo sapiens
  chr4:1764446-1764477
  hypo
atgcgtgtgtctggtgcgaggtgtgcatgtg

SEQ ID NO: 67742 - DNA, 130 bp, Homo sapiens
  chr4:1768299-1768429
  hypo
tagaggcaggggccctgtgggcggctgcgaaagcagggttcacccacccagttcgggccttagtgacccgcgctcagccacagccacagggcccttcagcaggtcgcccgaggcccctcccccacctcct

SEQ ID NO: 67743 - DNA, 369 bp, Homo sapiens
  chr4:1778328-1778697
  hypo
ggggccactcggctgcgagcccgccctgctgtcctcaacctcgaccctggcctcagggctcttgcaagctgtaccctgggcccgggtgatgcagggacctggccacagcccattcactgggtgtctctcagccccaccctcactggccactgtgcaggtggcctgggcctggctggccacgtgagcacagcactgcccgcgctaggatggcatccattattcacccacagcgctcgtccaggctgggctgggctcatgtctgctcacgggcatctgccactcctggagggcacatagcttgctgggccgggtgggcgacagagcctgcggtccgctccttgggcctccggcccagcccccccatcccac

SEQ ID NO: 67744 - DNA, 31 bp, Homo sapiens
  chr4:1780620-1780651
  hypo
ccaggttttcatgcagcgtggcccccaggac

SEQ ID NO: 67745 - DNA, 177 bp, Homo sapiens; identical to SEQ ID NO: 18453
  chr4:1781227-1781404
  hypo

SEQ ID NO: 67746 - DNA, 98 bp, Homo sapiens
  chr4:1782912-1783010
  hypo
tctttgccctgcctgccgggcagctcagaccaagccaagggcccaagggcggtaattctctctccccaggttctgcagtgtttttattttctgggcct

SEQ ID NO: 67747 - DNA, 59 bp, Homo sapiens; identical to SEQ ID NO: 18455
  chr4:1787675-1787734
  hypo

SEQ ID NO: 67748 - DNA, 564 bp, Homo sapiens
  chr4:1791208-1791772
  hypo
aggaggctctctctggcagctcgcctgccctgggttccaggtctccaagcctcggcctccctgcccacctccctgtcgggaaaggcggcagctgcctgcccggagtgctgtggggaacaggcggtgtggatctgagactgtgctgggaatgtcctctctgccgaaggcgcctctgccattttccgagtacctgcaagggagacgcaggagacgcgggtgtgagcggggccatgggcaacctgcggaggccctgcacccaggatgggcctccctcccaggcaccctctgccactcacccacgcaggccccagcaagccaggctgcccagctctgagtcaccgccagggctgggctgggccgggccgtcagccgcacgcgccgcttgtctcggcccctgcctcccatactcaccttcaggggggacccctgggtatgggcctcaggaggtgggtgggggtgcagggggagtgggtagggaggtgtaaaccggagtccagcagatgggaagttcctgtccggccggcacctgcttggagcctcctgcacatgcggaccctcaacagg

SEQ ID NO: 67749 - DNA, 20 bp, Homo sapiens
  chr4:1794935-1794955
  hypo
ggggaccgggcgggagcggg

SEQ ID NO: 67750 - DNA, 342 bp, Homo sapiens; identical to SEQ ID NO: 40181
  chr4:1794972-1795314
  hypo

SEQ ID NO: 67751 - DNA, 35 bp, Homo sapiens; identical to SEQ ID NO: 40182
  chr4:1795555-1795590
  hypo

SEQ ID NO: 67752 - DNA, 1181 bp, Homo sapiens; identical to SEQ ID NO: 40183
  chr4:1795964-1797145
  hypo

SEQ ID NO: 67753 - DNA, 62 bp, Homo sapiens
  chr4:1801891-1801953
  hypo
gcactcaggtggctgccgtggggtggatggacccggggtgagggcgccggggcacctgccac

SEQ ID NO: 67754 - DNA, 30 bp, Homo sapiens
  chr4:1803062-1803092
  hypo
tcatggccttcacacgcacctcggcccgca

SEQ ID NO: 67755 - DNA, 30 bp, Homo sapiens
  chr4:1803428-1803458
  hypo
agtttggcagcatccggcagacgtacacgc

SEQ ID NO: 67756 - DNA, 1047 bp, Homo sapiens; identical to SEQ ID NO: 18460
  chr4:1804645-1805692
  hypo

SEQ ID NO: 67757 - DNA, 257 bp, Homo sapiens
  chr4:1805920-1806177
  hypo
ctccagacaaggcgcgtgctgaggttctgagcccccttccgctcccagtggtgcctgcggctctgggccaggggcatccatgggagccccgtgggggggggggccaggccaggcctcaacgcccatgtctttgcagccgaggaggagctggtggaggctgacgaggcgggcagtgtgtatgcaggcatcctcagctacggggtgggcttcttcctgttcatcctggtggtggcggctgtgacgctctgccgcctgcg

SEQ ID NO: 67758 - DNA, 30 bp, Homo sapiens
  chr4:1806507-1806537
  hypo
tgtcgcccacgcggcgccaacctgcccctg

SEQ ID NO: 67759 - DNA, 511 bp, Homo sapiens
  chr4:1807096-1807607
  hypo
gccccttggggagggctgcttcggccaggtggtcatggcggaggccatcggcattgacaaggaccgggccgccaagcctgtcaccgtagccgtgaagatgctgaaaggtgaggagggggcggccaggggtgcagagcagggctgggggcgccgccgccgcctgacacaggccccccgctccgtgcacagacgatgccactgacaaggacctgtcggacctggtgtctgagatggagatgatgaagatgatcgggaaacacaaaaacatcatcaacctgctgggcgcctgcacgcagggcggtaggtgcggtagcggcggtggtgccggctgggcggccctcctgggcctggcagcccgtctgaggagcccgtgtccccagggcccctgtacgtgctggtggagtacgcggccaagggtaacctgcgggagtttctgcgggcgcggcggcccccgggcctggactactccttcgacacctgcaagccgcccgaggagcagctcaccttcaag

SEQ ID NO: 67760 - DNA, 240 bp, Homo sapiens
  chr4:1808361-1808601
  hypo
tgaaggagggccaccgcatggacaagcccgccaactgcacacacgacctgtgagtggcatccctggccctccactgggtcctcaggggtgggggtccctccggggctgggcgggggagggactggcagcccttcaggctgttcccgaataaggcgggaagcggcggggctcactcctgagcgccctgcccgcaggtacatgatcatgcgggagtgctggcatgccgcgccctcccagagg

SEQ ID NO: 67761 - DNA, 129 bp, Homo sapiens
  chr4:1814572-1814701
  hypo
gcctgttgcagtggctgttcacgtcaacagtgctcagccaaggcagtgaggacgaggatgagagccggggcagctgactgggcccgcgatgccgctcacaggagaggcgtctgcacacacctggcaact

SEQ ID NO: 67762 - DNA, 30 bp, Homo sapiens; identical to SEQ ID NO: 18462
  chr4:1827241-1827271
  hypo

SEQ ID NO: 67763 - DNA, 398 bp, Homo sapiens
  chr4:1828220-1828618
  hypo
caccttccccagctcccggtgctgcccgttcacagacgcgcttgtctccatgtctgctgctgtcacctggagtgctctctgaacaggatcatgcaggagtcacctctggggttccctgaggacccactgggggtgctatgggtgtgccgggttaggcctctcactgccatgcggcattctgcagcatgcgtgccctccttagccgaacccttcgcccactaagctgggctccgccagttgatcaggaatgaagatgctttctgtctgctttcttctccctgtcctcctgggggctggctggcctccgtttgatttcgctctggtggtctggagtctgtgcagcattttcagtgttgctctggggatcacgatacacaatccacggacgcagctcactg

SEQ ID NO: 67764 - DNA, 141 bp, Homo sapiens
  chr4:1835053-1835194
  hypo
caaaccactgacttctgactccggtgctgggctagcctggggaaaggtggcgtctggcctgtggacctctcctgcctgaaccagcaaagctgaggctgctgtctgctgggggagacgcccgggcccacaggctgctgcatg

SEQ ID NO: 67765 - DNA, 31 bp, Homo sapiens; identical to SEQ ID NO: 18465
  chr4:1840860-1840891
  hypo

SEQ ID NO: 67766 - DNA, 142 bp, Homo sapiens
  chr4:1844709-1844851
  hypo
ccccccgggtggcccgagctcacctaaaaggccatgtgtgtcgcataacttcacatcagctcctcctgcttccatcagctctctgtgcatggcctgacgccagcagcaaggcccgagctccggagcagactgttagagctca

SEQ ID NO: 67767 - DNA, 247 bp, Homo sapiens
  chr4:1902450-1902697
  hypo
gcaccagaaatcctcggcagtgccaacgggaagactccgagctgcgaggtgaaccgcgagtgttctgtgttcctcagcaaagcccagctctccagtagcctgcaggagggggtcatgcagaagtttaacggccacgacgccctgccctttattccagccgacaagctgaaagatcttacttcccgggtgtttaatggagaacccggcgcacacgatgccaaactgcgttttgagtcccaggaaatga

SEQ ID NO: 67768 - DNA, 80 bp, Homo sapiens
  chr4:1911666-1911746
  hypo
ccgttaaaaaaaaaaaaaattatttatcatgcttgggatttatggaccagtttgaatccgtgtatcttagtaatatactt

SEQ ID NO: 67769 - DNA, 31 bp, Homo sapiens; identical to SEQ ID NO: 18467
  chr4:1925938-1925969
  hypo

SEQ ID NO: 67770 - DNA, 30 bp, Homo sapiens
  chr4:1952708-1952738
  hypo
ggggtggggcgggacgagcctgcctgcagg

SEQ ID NO: 67771 - DNA, 286 bp, Homo sapiens; identical to SEQ ID NO: 18468
  chr4:1955050-1955336
  hypo

SEQ ID NO: 67772 - DNA, 273 bp, Homo sapiens
  chr4:1960081-1960354
  hypo
gtgctgggagtcagtcacatacggccagggctcagtgactgagccccaaacacgtagatcctgtacctcagagagcaagatggcggggcggcaggggagcttgccagttctgtgtttattccagtgagctcgagagccccagcaggaggaagtgcagccagggcagggctctgtgagagctccaggcccctcagggctgcctgcgctcagagctggtgcggcaagccgcatccccaggagcctcgtggccgttcctgacgagtgtttgtgata

SEQ ID NO: 67773 - DNA, 92 bp, Homo sapiens
  chr4:1960865-1960957
  hypo
actaagcaatcaacacgctttttctctcttcatcttacaatggcctggctggatacgtgtcagctcttgttcatcagcgatgtgcacagaca

SEQ ID NO: 67774 - DNA, 30 bp, Homo sapiens
  chr4:1961339-1961369
  hypo
cgcaggtgtgtcccgcgggcgagttctgcc

SEQ ID NO: 67775 - DNA, 30 bp, Homo sapiens
  chr4:1962827-1962857
  hypo
cacgcacacgagaacgacatcacccacttc

SEQ ID NO: 67776 - DNA, 30 bp, Homo sapiens
  chr4:1975503-1975533
  hypo
tccctgttcacacacgtggttttgtttgaa

SEQ ID NO: 67777 - DNA, 30 bp, Homo sapiens; identical to SEQ ID NO: 18471
  chr4:1976217-1976247
  hypo

SEQ ID NO: 67778 - DNA, 30 bp, Homo sapiens
  chr4:1976550-1976580
  hypo
ttgctaacacttgaccgaatatatcacttg

SEQ ID NO: 67779 - DNA, 546 bp, Homo sapiens
  chr4:1977056-1977602
  hypo
tgggcaatgaaaaaacggtctgccggtgtggagcctccaattgcagtggattcctcggggatagaccaaaggtaaggctgtggcgccctccttccccccaggctctgtgttggcattttgcactcctggagacctgtgtcccccgtgaacagcggcttcctccaggctggcttgttgccgggacaggtgggagcaagttccctgctgtgggctggggaggatggctctcaacaaaggccagtggttaagagttcctcactgaacgtgtttcctggggctgccagaacaatgcctcacagacgcgtggtttcgcagttctgggtgtgggcagggccgtgcgccctctgaaggttccttgggaggctctttcccaggcctgtctcccgttcctggtggcggccacagtccttgctgctccttggcttgtagcagcaccgcccaaccattctccctgcgaacatgactgttgacttgcccttcttataagagcactggtcctgttgacttagcgcctgccctgctaccgtgtgaccccatcttaacaga

SEQ ID NO: 67780 - DNA, 309 bp, Homo sapiens
  chr4:1980738-1981047
  hypo
cgccaggacacagacgtacaggcctcctcgggagggagcgcctccccaccactgagccatcctcagcagcgtccgctgcgtctgcactgatgaccgtctgagcccagctcagcgttcctggacaaacagcctcactcctcagcgttaccgccacacttgaatttctccgaatgtcaaggttccctcccactctatttttttaggttaaagttaattggcatatggaatgttttaatctcctctgaaatgtgtagcgtaggcttttcccaagggtcgctagaaactcgtcttcgcgttgccccctttctg

SEQ ID NO: 67781 - DNA, 30 bp, Homo sapiens
  chr4:1984935-1984965
  hypo
cggccgggggacctcgggggccaggtgtcc

SEQ ID NO: 67782 - DNA, 118 bp, Homo sapiens
  chr4:1986520-1986638
  hypo
gccagcagactcacctgggggcgtctcggagctggggatgtaggaggaggcgggaaccacgctgggcgtggagggaaggtagctcgtggagggcagcgcaggctcattgttcagggac

SEQ ID NO: 67783 - DNA, 768 bp, Homo sapiens
  chr4:1993709-1994477
  hypo
ccactgggcctactcttccaccggtgcgcagatgcaagaaaacctgaagggtgagaagccggggccaccactgctcccgcagaaagcctgcgggtgggaaatcctggggatgaggggcgtagagcaggcaggtgcccggcacagcagagcgcaggagcagggtggagtcacctgccgcgggggtgtgtgcctgggcagcagggggtggggcctgggacctggggcagcacccgtgacagctgagctggtgcctagtcaccatctaggcagggacggctgcctctgggtctggacggcgctgggagttggcgctcgtggagcctggaggtggccccgggatctggagtgaggccagggccttggggaggccatgggcgacgtgcgtggaggaagcaggcgcaccccgtgctccctcaatacctgggaggccagatccatccacaccagggcctgcttcggccacataaaccccctcccacgaggaaacgcagagagccaggccatggcgtgcctgtgcctctgccatgcgcccactgggctgctcacagtgtgagacagctgggctggctggcgctgggggtgaacaacagcgccctgccctgtccagacgccggggctgaaaccccagccccaggccttcctgacacccactccctgcgtcaggcgccagagacccgtcctacgagggctgcggccatcacgtccccgcgagcgccgcctcctggtggcctctgagtgggaggaccttccagcgcttccctcactgtc

SEQ ID NO: 67784 - DNA, 354 bp, Homo sapiens
  chr4:1994697-1995051
  hypo
ctcccgacgcccgcccgagctgagtgcgcgatgcggcagaagatgctacgtggctgcaggaagcgctgcgcacacgctgcctctggcagccgcacagcccggctgtttccagccagtgcggcctctccacagcagccccagggaaaccctacgcctgccaagaggcaagcgcgcggcattttataaaaatggtaaggataaaaaaagtcggggatgttaatttaaaacaaaaaggaccactgttgtggagtcaatgttttctctccagaacgcgcatgttgaagcctggctcgctctactggggcttcttgtaggaaaacgcttggctttcccgggcgcggtagctcatgtctg

SEQ ID NO: 67785 - DNA, 95 bp, Homo sapiens; identical to SEQ ID NO: 18475
  chr4:1999768-1999863
  hypo

SEQ ID NO: 67786 - DNA, 55 bp, Homo sapiens; identical to SEQ ID NO: 40187
  chr4:2042203-2042258
  hypo

SEQ ID NO: 67787 - DNA, 30 bp, Homo sapiens; identical to SEQ ID NO: 18476
  chr4:2045677-2045707
  hypo

SEQ ID NO: 67788 - DNA, 601 bp, Homo sapiens; identical to SEQ ID NO: 40193
  chr4:2061492-2062093
  hypo

SEQ ID NO: 67789 - DNA, 30 bp, Homo sapiens; identical to SEQ ID NO: 3113
  chr4:2062493-2062523
  hypo

SEQ ID NO: 67790 - DNA, 30 bp, Homo sapiens; identical to SEQ ID NO: 18480
  chr4:2065734-2065764
  hypo

SEQ ID NO: 67791 - DNA, 185 bp, Homo sapiens
  chr4:2066114-2066299
  hypo
ggcatcttggaccaccgcggctgtccatgacgctgccctgcccgccgccactggggaaggcccagccttgctcaccaagcacagaacctctgcagcagatcccggggccaggctccggccccgcctgcggccccagcgccactgcctgtggaggccccagctggccacggcgctgctttgctccg

SEQ ID NO: 67792 - DNA, 31 bp, Homo sapiens
  chr4:2171163-2171194
  hypo
tcactgtgagaggaggcggaaggaaagtcaa

SEQ ID NO: 67793 - DNA, 30 bp, Homo sapiens; identical to SEQ ID NO: 18482
  chr4:2252251-2252281
  hypo

SEQ ID NO: 67794 - DNA, 30 bp, Homo sapiens
  chr4:2252847-2252877
  hypo
gctatctgtgcgcacgcgctccacgctctg

SEQ ID NO: 67795 - DNA, 30 bp, Homo sapiens
  chr4:2272467-2272497
  hypo
tcgctgtagaagggcgtgacatggaacatg

SEQ ID NO: 67796 - DNA, 36 bp, Homo sapiens
  chr4:2278789-2278825
  hypo
ggccggattggcgtggcgcccgacacagaaggctca

SEQ ID NO: 67797 - DNA, 30 bp, Homo sapiens
  chr4:2299157-2299187
  hypo
gtcgccaggtggggcgcggtgggtggatgt

SEQ ID NO: 67798 - DNA, 30 bp, Homo sapiens
  chr4:2302607-2302637
  hypo
cggccaaacaggcccgggctcttccagatg

SEQ ID NO: 67799 - DNA, 184 bp, Homo sapiens
  chr4:2305643-2305827
  hypo
cccgctcccactgccccgcacaggcacgcggctcacaccaggggcgggatgggccggggctgcggcaggtgagctgagggcttggcactgcgcccatgtcacctgacaggcacccggaacatcagaaacagggaagcgggcccgctggcgcacattttctggtgcatgacgccccacagggcag

SEQ ID NO: 67800 - DNA, 30 bp, Homo sapiens
  chr4:2306532-2306562
  hypo
tcatgccccctgtccggtgggcgatcatct

SEQ ID NO: 67801 - DNA, 30 bp, Homo sapiens
  chr4:2306803-2306833
  hypo
gccagctggggactcgggcctggccagggc

SEQ ID NO: 67802 - DNA, 30 bp, Homo sapiens
  chr4:2332545-2332575
  hypo
gagacccagggcagcgggtgcgtggggact

SEQ ID NO: 67803 - DNA, 52 bp, Homo sapiens
  chr4:2337322-2337374
  hypo
caccgtgaggtggagacgccatggaccggcacccgcacgggacctggcacca

SEQ ID NO: 67804 - DNA, 31 bp, Homo sapiens
  chr4:2339950-2339981
  hypo
gccagtggctctgagacgtgaaggcttgtcc

SEQ ID NO: 67805 - DNA, 30 bp, Homo sapiens
  chr4:2343252-2343282
  hypo
ctcagggaacttgacgcagaaatctctggg

SEQ ID NO: 67806 - DNA, 31 bp, Homo sapiens
  chr4:2353586-2353617
  hypo
actcagggaaacacttcgtttatggttctgg

SEQ ID NO: 67807 - DNA, 31 bp, Homo sapiens
  chr4:2361256-2361287
  hypo
caggcaggtagagggccgactttgtggggac

SEQ ID NO: 67808 - DNA, 31 bp, Homo sapiens
  chr4:2362274-2362305
  hypo
ccagcagtgcctggggcgggagcaggagggg

SEQ ID NO: 67809 - DNA, 31 bp, Homo sapiens; identical to SEQ ID NO: 18483
  chr4:2387539-2387570
  hypo

SEQ ID NO: 67810 - DNA, 278 bp, Homo sapiens
  chr4:2396219-2396497
  hypo
ccctaggctggctgcgtttctcttcacggggtggttgaccgcatgagaagggtcatgaaccacaagttatgatggctccagctgtgtgcacataaggtcctaaaacatcaacgcctcctttctaacaaggcacatgcttccagctgctcgggctgctcggtcacaggcaggggcctgggtgtcgtgtcacacaggtctgcgatccgatcctgtgaacaggcaccactctgcgcagctgcatcgatgcctgactgcacgtgtgcgtgcttccattacac

SEQ ID NO: 67811 - DNA, 31 bp, Homo sapiens
  chr4:2411285-2411316
  hypo
cactccgctggctgctcgctgtccctccgat

SEQ ID NO: 67812 - DNA, 31 bp, Homo sapiens
  chr4:2426868-2426899
  hypo
ttgcttgttccttggacgctgtatctcctct

SEQ ID NO: 67813 - DNA, 45 bp, Homo sapiens; identical to SEQ ID NO: 18484
  chr4:2427612-2427657
  hypo

SEQ ID NO: 67814 - DNA, 30 bp, Homo sapiens
  chr4:2459497-2459527
  hypo
ctccctattccgtgccgaggctggtgctgt

SEQ ID NO: 67815 - DNA, 189 bp, Homo sapiens
  chr4:2459751-2459940
  hypo
gcctccctgattccacgttcccaaagagccaggaggcaccgccgccctcttctgcactcccggcctgaggcgcccagccgtctccctgtgccatggtctgacgctgtggctgcgcggggagggccggtgtggacgcctcttttctctctttgctcattgtctggttgactgagacgggaatcttggtat

SEQ ID NO: 67816 - DNA, 82 bp, Homo sapiens; identical to SEQ ID NO: 18486
  chr4:2524116-2524198
  hypo

SEQ ID NO: 67817 - DNA, 12 bp, Homo sapiens
  chr4:2524745-2524757
  hypo
ctcaaaaaaaaa

SEQ ID NO: 67818 - DNA, 31 bp, Homo sapiens
  chr4:2527906-2527937
  hypo
ttcattgtaaaatgaacgggaaagaaaactt

SEQ ID NO: 67819 - DNA, 30 bp, Homo sapiens
  chr4:2540194-2540224
  hypo
caggtgtgagccaccgcgcccggccgtttt

SEQ ID NO: 67820 - DNA, 32 bp, Homo sapiens; identical to SEQ ID NO: 18487
  chr4:2559964-2559996
  hypo

SEQ ID NO: 67821 - DNA, 30 bp, Homo sapiens
  chr4:2561616-2561646
  hypo
ctgcgtggcctgatcgggccgggtttttct

SEQ ID NO: 67822 - DNA, 37 bp, Homo sapiens
  chr4:2567249-2567286
  hypo
tgggattacaggcgtgagccaccgtgctcagccagag

SEQ ID NO: 67823 - DNA, 25 bp, Homo sapiens
  chr4:2567775-2567800
  hypo
tgcttttttttttttttgagacgga

SEQ ID NO: 67824 - DNA, 121 bp, Homo sapiens
  chr4:2568039-2568160
  hypo
ctgggattataggcgtgagccaccgcgcctggccaatggaaaattgctttttgatagaaggttgctgtgatgagcgttttgtaaatggacgtttaggccagttgcggtggctcacacctgt

SEQ ID NO: 67825 - DNA, 31 bp, Homo sapiens; identical to SEQ ID NO: 18489
  chr4:2571129-2571160
  hypo

SEQ ID NO: 67826 - DNA, 79 bp, Homo sapiens; identical to SEQ ID NO: 18490
  chr4:2622585-2622664
  hypo

SEQ ID NO: 67827 - DNA, 47 bp, Homo sapiens
  chr4:2626224-2626271
  hypo
gggattccccaggacggagaggcctctgccccggctgcttgatgcaa

SEQ ID NO: 67828 - DNA, 269 bp, Homo sapiens
  chr4:2626992-2627261
  hypo
aagattttcttcttcactcctcgcttggtggctcccagccagaggccggcagtggtgggaggctcgctctgggtgcacagacgctgccttcagacaccgcatgctcgtgcgaggcctgcagtgagcgcaggtatgtgacgtgtgtgccacgttgctcacacctgtccacaatgacatgcagacctgcatattggagctggacggagaaactgggctaatgtgacagacagcaacaagagtaaggcagttgcttcgctattgagagaaag

SEQ ID NO: 67829 - DNA, 30 bp, Homo sapiens
  chr4:2639531-2639561
  hypo
aggcattgaattcagcgctaaggacagtgc

SEQ ID NO: 67830 - DNA, 241 bp, Homo sapiens
  chr4:2639920-2640161
  hypo
tgtcttgtagctgaatcgtaagtcaggtcactgcctactcttctgttccccgggaactcctggagagcagcggactattgtagcaggaggtagtcttcgtgtcctcgtacctggcacagggcctgggcagcatgggcttggcatttcacctgcttattattacaagcacatttgtgggttccagcctggggctgggtatcagttacctggccctggtctcctgccacgtgcatttttcctg

SEQ ID NO: 67831 - DNA, 147 bp, Homo sapiens; identical to SEQ ID NO: 18494
  chr4:2640599-2640746
  hypo

SEQ ID NO: 67832 - DNA, 105 bp, Homo sapiens
  chr4:2672876-2672981
  hypo
ccccttcctccagcccgtgaggtgtcctcagtgcatgcactgtgctctcctggtcagccagcgagttgtggacagcttaagaagcccttccgtggcgctctcatt

SEQ ID NO: 67833 - DNA, 30 bp, Homo sapiens
  chr4:2686943-2686973
  hypo
gtgtaaggggaggaccgggtgccaagtagc

SEQ ID NO: 67834 - DNA, 221 bp, Homo sapiens
  chr4:2687341-2687562
  hypo
tcatcttaaccttttcgttactggggatacaactggaactcatttttgctcggatgcttagtgttgggaacctctcacgtgtgggcctcatgactcagtctgcggctcttgctcctcatgtcttgcacccatgttccatgtccgagtgggtgtgggtggtagaggacaggcgagtcacctagctcctggataaactcagtgtgtgcgcagtggaaagcagt

SEQ ID NO: 67835 - DNA, 209 bp, Homo sapiens
  chr4:2688474-2688683
  hypo
gtttaccagctgggccggcacaatgggactgctgctcaaagctagcagtttggcatctgtcacgggcttctgccttttacaagaaggtcctcaagaccaagaagtcttctacttgttactttttgtcaattacttctcagcaaagcagctcttagcttatcgctgctttgtagaaatgggtatctattgaaatacgtttttttattttc

SEQ ID NO: 67836 - DNA, 30 bp, Homo sapiens
  chr4:2688882-2688912
  hypo
gcttcctctctgctccgaagcactgtggaa

SEQ ID NO: 67837 - DNA, 892 bp, Homo sapiens
  chr4:2704072-2704964
  hypo
actttgtgtcatggttcgatgctccgggctcatctcgtgtcttctctctcccagccctgaaccagccatttctccaaggagccctcctctttcttcaacagtggtgttcagaaacccagacctggacactgccatatggcattgcttttaggccctctcagtcagcagagcaggaggagtgggggtgtgagcatgtgcacacgagcgcctgccacctacacacactaattgctatgtacaagccgtgagttcccacagatatcccagccccactcctgtgctacagtgagcgttctcccttccccgtccacctttgtaactccttagacagtaagaacctggaccccatcatccatggtgcctttactgacttgctgagtcctacaacacaggtaaagggttcagaagtccctgcccttacccgatggaaaactccgggcatgctttcggtatttgttcagttctttttgtctttagcctcagggtgtggtgattacactgaatttacaaatgacttaaattagttcttttcacctttagtacaattacgttattgattgaaaacacacctgattgcgtttttccatttgtgttccatttgttttctcccctacccagttcctctttttttttaatctgttcccacccactccctgtaggtaactaatcagtttcttatttgcttttcttttttacataaaaggtagtgtattatagacataatagtgacttctgggttcttttctacttcatatattctgggaatcactgcacatcagttcgtagagattgtcctcattctttctgcagcgacacggtactccatttaaagtgtacgatgatttctgcagtcactcttctttgtgcgagcgtttaggttgtttctaatgct

SEQ ID NO: 67838 - DNA, 30 bp, Homo sapiens
  chr4:2826405-2826435
  hypo
caagaagcaccgcacgtggttcttctcggc

SEQ ID NO: 67839 - DNA, 30 bp, Homo sapiens
  chr4:2827046-2827076
  hypo
tgccagctgggctgcgtctctctgctcctg

SEQ ID NO: 67840 - DNA, 30 bp, Homo sapiens
  chr4:2829010-2829040
  hypo
tatcagcctttccccgtaccccacggacaa

SEQ ID NO: 67841 - DNA, 29 bp, Homo sapiens
  chr4:2878139-2878168
  hypo
tagcttaggctgggtgcgtcggctcaagc

SEQ ID NO: 67842 - DNA, 76 bp, Homo sapiens
  chr4:2925325-2925401
  hypo
accctgacatttgtctctttacgaacacagtatttctgtctgttgaagcttcaccggggagagacctcctttactc

SEQ ID NO: 67843 - DNA, 30 bp, Homo sapiens
  chr4:2925912-2925942
  hypo
atgaatacaaataagcggctcaagtttgag

SEQ ID NO: 67844 - DNA, 196 bp, Homo sapiens; identical to SEQ ID NO: 18498
  chr4:2926276-2926472
  hypo

SEQ ID NO: 67845 - DNA, 110 bp, Homo sapiens
  chr4:2926879-2926989
  hypo
tcagcaccttttcccggttgaggctgtatgctcactcagctaggtggtatggcggcctttttatggacacctggcttctggaaggtagctgccaacgtggtacttgggga

SEQ ID NO: 67846 - DNA, 153 bp, Homo sapiens; identical to SEQ ID NO: 18500
  chr4:2932896-2933049
  hypo

SEQ ID NO: 67847 - DNA, 30 bp, Homo sapiens
  chr4:2941745-2941775
  hypo
tgagccacttgcttcgtgagaaggctcaca

SEQ ID NO: 67848 - DNA, 39 bp, Homo sapiens
  chr4:2957243-2957282
  hypo
cctctagtcacctgcacgccacggcgccccctctagtca

SEQ ID NO: 67849 - DNA, 17 bp, Homo sapiens
  chr4:2961295-2961312
  hypo
ggcgacagacaaagact

SEQ ID NO: 67850 - DNA, 31 bp, Homo sapiens; identical to SEQ ID NO: 18503
  chr4:3103815-3103846
  hypo

SEQ ID NO: 67851 - DNA, 31 bp, Homo sapiens; identical to SEQ ID NO: 18504
  chr4:3208226-3208257
  hypo

SEQ ID NO: 67852 - DNA, 247 bp, Homo sapiens; identical to SEQ ID NO: 18505
  chr4:3216984-3217231
  hypo

SEQ ID NO: 67853 - DNA, 30 bp, Homo sapiens
  chr4:3234799-3234829
  hypo
gagggcagcgcccccgcctcggctgtgggg

SEQ ID NO: 67854 - DNA, 30 bp, Homo sapiens; identical to SEQ ID NO: 18506
  chr4:3240606-3240636
  hypo

SEQ ID NO: 67855 - DNA, 225 bp, Homo sapiens; identical to SEQ ID NO: 18507
  chr4:3245230-3245455
  hypo

SEQ ID NO: 67856 - DNA, 823 bp, Homo sapiens
  chr4:3252196-3253019
  hypo
gcacaggcaaggtcacaggtgcggtgagggtcttgcagggtgtgaaggtcataggtgtgcggtgaaggtcacaggtgtggggtgatggttttgggtgtggggagggtcttgcacggagcgagggtggcagcaagagctggaagctgcagggggagaatggcagcagagagcacccggccctgtgggcggcctggacagggctgggcctggggctgccggagagcctgtcagcttccaggatgggagtggcctcactcagctgctccacctccgggtcaggcaggtgagcctggggcagagaggctgagagcacctgagccacttgtgggagaggccacccccactgcccccctcaggcgaggagccggcctccagcacagcagaagggaacccccagtccccagccctagtgggagtggggaagaggcccagcaaggccccggacagaccgccagcctgtgaggtctccgctttcagttgcgttgatttgattttttctgagccttgaaggaggggtccggggcctggccctgcccaaaggcccctaggcaggccccaaagccgggacctagggtgctgagcatgacggatgttgggtttgagcggctggcttgcgacgtgagggctgaggtgtgagcctgggtatcttcagaggttcggtggacacaggcagctgcccgcggccccactgttcccgtggcctcctagtcctgctcaggcacctggtgaggaagggacgcagagggcagtgggaggtggccacgactgttccagcaggctcccctctgactcaggaattcacgggcaccacctccctggctgg

SEQ ID NO: 67857 - DNA, 31 bp, Homo sapiens
  chr4:3267991-3268022
  hypo
cagtgtggggcacgcgcggccacacggggac

SEQ ID NO: 67858 - DNA, 30 bp, Homo sapiens; identical to SEQ ID NO: 18509
  chr4:3292371-3292401
  hypo

SEQ ID NO: 67859 - DNA, 30 bp, Homo sapiens
  chr4:3298499-3298529
  hypo
cccttggggagaggcgggagccatcctgga

SEQ ID NO: 67860 - DNA, 204 bp, Homo sapiens
  chr4:3310029-3310233
  hypo
agaggctgtgtcctcgacgcgagggattctgttcactgtcacaggactcagggcaggtttagatgtgaagcgtgttggctcggcgctcctcttgctgcaggcgggccgtggcactgaaatggcgaggcaccctccccgtttgcagattgtaagtcttggagcggggctagcgattcgtacttatttccgcgggcggctggggtg

SEQ ID NO: 67861 - DNA, 145 bp, Homo sapiens
  chr4:3310674-3310819
  hypo
gacgcggtcggcactcgcagcactgctgaatggcaggtgtccgctgaggggaaccgggcaggggaggagctgggacctgggaatggcaggtgtcctctgaggagagctgagcaggagaggagctgggactcgggaatggcaggtg

SEQ ID NO: 67862 - DNA, 30 bp, Homo sapiens
  chr4:3311031-3311061
  hypo
tctgctgaggagaaccgggtgggagaggag

SEQ ID NO: 67863 - DNA, 30 bp, Homo sapiens
  chr4:3311986-3312016
  hypo
tcctctgaggggaaccgtgtcggggaggag

SEQ ID NO: 67864 - DNA, 87 bp, Homo sapiens
  chr4:3313564-3313651
  hypo
actcagcctgtgtgacgtggtcggtgactcctgatgggaggtggcagtgctgtgcggcgagtggggaccttcgtgtcacatcccatc

SEQ ID NO: 67865 - DNA, 30 bp, Homo sapiens
  chr4:3318896-3318926
  hypo
cggacttcctgccacgtgttcatggtggac

SEQ ID NO: 67866 - DNA, 30 bp, Homo sapiens
  chr4:3319232-3319262
  hypo
agctcgagcagacacggccccggaggcagc

SEQ ID NO: 67867 - DNA, 31 bp, Homo sapiens; identical to SEQ ID NO: 18511
  chr4:3324702-3324733
  hypo

SEQ ID NO: 67868 - DNA, 30 bp, Homo sapiens
  chr4:3338126-3338156
  hypo
tatagcaggagatgcgaagatgtgagctag

SEQ ID NO: 67869 - DNA, 199 bp, Homo sapiens; identical to SEQ ID NO: 18512
  chr4:3345082-3345281
  hypo

SEQ ID NO: 67870 - DNA, 31 bp, Homo sapiens; identical to SEQ ID NO: 18513
  chr4:3363136-3363167
  hypo

SEQ ID NO: 67871 - DNA, 30 bp, Homo sapiens; identical to SEQ ID NO: 18514
  chr4:3363494-3363524
  hypo

SEQ ID NO: 67872 - DNA, 35 bp, Homo sapiens
  chr4:3368269-3368304
  hypo
gaggcagcagggcttgcggccgggatccaccaggg

SEQ ID NO: 67873 - DNA, 100 bp, Homo sapiens
  chr4:3375343-3375443
  hypo
tgactggtgctgggatcgcagggcgtgcacaccctgtgtgctgtggccgtgtgcctggcctctgcccgcctgtgtcctgctgtatcggtcagcttacctt

SEQ ID NO: 67874 - DNA, 30 bp, Homo sapiens; identical to SEQ ID NO: 18515
  chr4:3399234-3399264
  hypo

SEQ ID NO: 67875 - DNA, 286 bp, Homo sapiens
  chr4:3403231-3403517
  hypo
gaaagttaagtaactcgtaagttacttggtgaggaggggagttctcacgctgtccctgtgaagtccgagcacggtttttactgcggttttacagcggggggagtgtcttgcccagtgaggaaggagcggagctctgagtcagatccaaacagtgtgactctggaaccacgccgtgaaccggcacactgtggactaggtaacaccaggctgaggatccacctcctagaatacagcttgccatagagcagacatcccgtcagcacctgtgaatcgtgagaaggaggcg

SEQ ID NO: 67876 - DNA, 109 bp, Homo sapiens
  chr4:3413101-3413210
  hypo
ggtctgtgtgtgttctcgtgttaggcctgtctggctctgcgtgttcgggattgtggtctgtgtgtgttctcgtgttaggctggcctgctctggcgtcttgctcatcttg

SEQ ID NO: 67877 - DNA, 30 bp, Homo sapiens; identical to SEQ ID NO: 18517
  chr4:3413668-3413698
  hypo

SEQ ID NO: 67878 - DNA, 247 bp, Homo sapiens
  chr4:3415120-3415367
  hypo
atgagccgccgagccgacatgcgtggctgagggcttagctctggacactgtgcctgagagtttcgtgttgagaaggagcccacatgcagagcagtgtgcagtcacgggtgtgtgggcttcgcatccggaaggtgagcctcgtgcccccttcgactgagcacgctcccgagggcaccgtgggtcaggacgtaactcacgtggcatacgcggcgccccgcgcccagctgctttcgctctagcaagcctg

SEQ ID NO: 67879 - DNA, 148 bp, Homo sapiens; identical to SEQ ID NO: 18518
  chr4:3415797-3415945
  hypo

SEQ ID NO: 67880 - DNA, 30 bp, Homo sapiens
  chr4:3416834-3416864
  hypo
gtgtgagagggccgcgtgtgtgtgaggggc

SEQ ID NO: 67881 - DNA, 363 bp, Homo sapiens
  chr4:3417329-3417692
  hypo
tgtggcctggcttccaggcttcggggctgctttcgtctgctcgcaatgctcagagggcgctgctctcctgcactcccaccttgccaagaccaggtgtgtggcgacacacggcagtattgcccctgcgcagctgctgctgggctagcatcgcccgggtctttgggacactttaagtatccgtttaaacaatcgtagaggagcccgcgcagtgctgctgcattctggccacacttttatttatttattcaagcaagaggtatttactggggcccgtgagaacacatctgtagagcccgggggtgtcgggccttggcaggcagcaggagtgcggggagaggaagccttgccgggctgctcaggtgc

SEQ ID NO: 67882 - DNA, 30 bp, Homo sapiens; identical to SEQ ID NO: 18520
  chr4:3418055-3418085
  hypo

SEQ ID NO: 67883 - DNA, 270 bp, Homo sapiens
  chr4:3418656-3418926
  hypo
gtttgatagctacactcgctttctgaagtccccgctgtaccaggaatgcatcctggcggaagtggagggccgtgcactcccggactcgcagcaggtccccagcagcccggcttccaagcacagcctcggttcagaccactccagtgtgtccacgccaaaaaaggtgacctccccgaggctggcctcacgcccctgtgggttgtgtgtcatcagctgagagctgttctgtggggagtgaaaagaggccctgtcggcgtcttcaccagtggt

SEQ ID NO: 67884 - DNA, 200 bp, Homo sapiens
  chr4:3425118-3425318
  hypo
gaactggggggcacaccgaggccttgagggcggcctggggctgtgctgtagttctgctcgtgagactgatctcctaatgagggctgacatgagttggtagtgaattttttcatcccccaccaggctggatcttgttccgattaaccggtcagtgggactcaaggccaagcccaccaagcccgtcacggaggtgctgcggc

SEQ ID NO: 67885 - DNA, 30 bp, Homo sapiens; identical to SEQ ID NO: 18522
  chr4:3426135-3426165
  hypo

SEQ ID NO: 67886 - DNA, 30 bp, Homo sapiens
  chr4:3435510-3435540
  hypo
ccagcaccacgcaccgagaccgagaccatg

SEQ ID NO: 67887 - DNA, 30 bp, Homo sapiens; identical to SEQ ID NO: 18523
  chr4:3439080-3439110
  hypo

SEQ ID NO: 67888 - DNA, 160 bp, Homo sapiens
  chr4:3439562-3439722
  hypo
agaacgggctgggcacgctcaagaggggagtcacaccttccgcccgcagcccggacttgttcacagatgcctcatggaggctgcttccggaagcttggactgagggtgaggaggggcacgctgggattggggaccttggtggccacggagccgctggggc

SEQ ID NO: 67889 - DNA, 1015 bp, Homo sapiens
  chr4:3446162-3447177
  hypo
catacaggtgcgccacggggtgtgagccgtgccactgacccctgacgggtgtccctgtccacacccgagtgggaggaatggcctgaggtcacccagaaacaagggacaaggggtggaccccggccccgactccgctgtcgtggggcactgcgcggcccctggcccagctcctcggccctgcccccagcttgtctgagcagcccttgcctgaacgggggcacctgccacctgatcgtggccaccgggaccaccgtgtgtgcctgcccaccaggcttcgctggacggctctgcaacatcggtgagtgggtcagccccccggggtgccctggggcagtgccgggtggacccaccgtgggccggcctcactgcccctctgcccgcagagcctgatgagcgctgcttcttggggaacggcactgggtaccgtggcgtggccagcacctcagcctcgggcctcagctgcctggcctggaactccgatctgctctaccaggagctgcacgtggactccgtgggcgccgcggccctgctgggcctgggcccccatgcctactgccggtcagcaccacgccgctccaggccgccgcatgcggggcaggcaggatttgtcctggggagaggccccccggctccctaggacccaggcggggccagctccgtccagacaggccccggaacctctgcctgggaggctgcccgagggagggccactctcttcccactgctccaggtgcggggaaccgccctgctgggggttccgatgccccctccccatgccctcttcgaggggcagtgtgactccctgccagcccccacttatgcaccgcaggaatccggacaatgacgagaggccctggtgctacgtggtgaaggacagcgcgctctcctgggagtactgccgcctggaggcctgcggtgcgcggctggcggggggtgctgccttgggccccaccgaggtcacagcagttttccccgtgatcctcctagcccctccgcacacctggctactgcatct

SEQ ID NO: 67890 - DNA, 169 bp, Homo sapiens; identical to SEQ ID NO: 18525
  chr4:3447781-3447950
  hypo

SEQ ID NO: 67891 - DNA, 50 bp, Homo sapiens; identical to SEQ ID NO: 18526
  chr4:3448499-3448549
  hypo

SEQ ID NO: 67892 - DNA, 100 bp, Homo sapiens
  chr4:3449285-3449385
  hypo
cagaccttcggcatcgagaagtacatcccgtacaccctgtactcggtgttcaaccccagcgaccacgacctcggtgagctccggcgtgtcgtggctgcac

SEQ ID NO: 67893 - DNA, 78 bp, Homo sapiens; identical to SEQ ID NO: 18527
  chr4:3449841-3449919
  hypo

SEQ ID NO: 67894 - DNA, 30 bp, Homo sapiens; identical to SEQ ID NO: 18528
  chr4:3451201-3451231
  hypo

SEQ ID NO: 67895 - DNA, 150 bp, Homo sapiens
  chr4:3452961-3453111
  hypo
cccggcacatgataggttttctaactcaggttggccttgtattcctcgagtggacggtattgagctgaagtgtgagctggggtcttccctttgcccctcccacttgtgccctgcttgttcccgtcgtgctctgccgcgggaggctggcct

SEQ ID NO: 67896 - DNA, 31 bp, Homo sapiens
  chr4:3468343-3468374
  hypo
ccttccctcagcccccgcgtcaggacaggga

SEQ ID NO: 67897 - DNA, 329 bp, Homo sapiens; identical to SEQ ID NO: 18530
  chr4:3475058-3475387
  hypo

SEQ ID NO: 67898 - DNA, 30 bp, Homo sapiens; identical to SEQ ID NO: 18531
  chr4:3478049-3478079
  hypo

SEQ ID NO: 67899 - DNA, 30 bp, Homo sapiens; identical to SEQ ID NO: 18532
  chr4:3480303-3480333
  hypo

SEQ ID NO: 67900 - DNA, 96 bp, Homo sapiens; identical to SEQ ID NO: 18533
  chr4:3480575-3480671
  hypo

SEQ ID NO: 67901 - DNA, 30 bp, Homo sapiens; identical to SEQ ID NO: 18534
  chr4:3507190-3507220
  hypo

SEQ ID NO: 67902 - DNA, 97 bp, Homo sapiens
  chr4:3512377-3512474
  hypo
cccacacaacaggccgccacgcggcaatcaggagtctgccgctgatccacgcaaaagcctgggtgaatctcagatgctgagcgaatgtaagcagata

SEQ ID NO: 67903 - DNA, 112 bp, Homo sapiens
  chr4:3514612-3514724
  hypo
cggcgggctgtccacggaaatgccacggccaagagcccaggtccttcacgctggcctcttccctgccgggctgggctccccaatgccttcagagttcgttgtgccgagctct

SEQ ID NO: 67904 - DNA, 253 bp, Homo sapiens
  chr4:3515542-3515795
  hypo
agattctcacaaaaccctgctcgtgggcgccacctccctctccacatagaagcccgtggctcagggtgaataactcaccgaaggtcccttctctcagcggccctgacctctgccccaacggtgcgggtgcctcaggcagtgccacacggctttcttaaccaacaccgagctttgccgtggtcaggtgaagctaggtgcacgctagcattccatccccgcgtctcgcgggagcgccctgcaaaccccacatggt

SEQ ID NO: 67905 - DNA, 31 bp, Homo sapiens; identical to SEQ ID NO: 18536
  chr4:3516337-3516368
  hypo

SEQ ID NO: 67906 - DNA, 72 bp, Homo sapiens
  chr4:3528238-3528310
  hypo
acatccccacgaagcgtcaagagccggctgccttcccagtgtcccgcagcccgcgccgccttgtggcccaca

SEQ ID NO: 67907 - DNA, 31 bp, Homo sapiens; identical to SEQ ID NO: 18537
  chr4:3529879-3529910
  hypo

SEQ ID NO: 67908 - DNA, 30 bp, Homo sapiens
  chr4:3531930-3531960
  hypo
gcacaaagaccacccgggatgcactaccgc

SEQ ID NO: 67909 - DNA, 151 bp, Homo sapiens
  chr4:3588427-3588578
  hypo
cagcaacaacaaggaacgcagctgcagcagcgggggccctgggcaggcggcctgccctcacttaggccaccatgtgcctgtcgaagtgcgtaggagcctggagctgccatcactgctgctttataactgtgggcaccgaggttaaacagtt

SEQ ID NO: 67910 - DNA, 30 bp, Homo sapiens
  chr4:3643620-3643650
  hypo
ctcactgtagtgctcgggtcttgcctttgt

SEQ ID NO: 67911 - DNA, 31 bp, Homo sapiens
  chr4:3671160-3671191
  hypo
tgctccgggaggctcacggttcattctgcag

SEQ ID NO: 67912 - DNA, 33 bp, Homo sapiens
  chr4:3681905-3681938
  hypo
tcacacctgtgactgcgccggtgccccgtgcct

SEQ ID NO: 67913 - DNA, 100 bp, Homo sapiens
  chr4:3682489-3682589
  hypo
tctagagagtttgcccgcgccccacccagtttccccgttattagcgtgtgccgtttgcatggggcatgtgtcacagctactaacccgatacgcatgcatc

SEQ ID NO: 67914 - DNA, 31 bp, Homo sapiens
  chr4:3692094-3692125
  hypo
tctagtccctgggattcggcttgagggctac

SEQ ID NO: 67915 - DNA, 30 bp, Homo sapiens; identical to SEQ ID NO: 18539
  chr4:3748326-3748356
  hypo

SEQ ID NO: 67916 - DNA, 49 bp, Homo sapiens; identical to SEQ ID NO: 40208
  chr4:3768063-3768112
  hypo

SEQ ID NO: 67917 - DNA, 43 bp, Homo sapiens
  chr4:3776158-3776201
  hypo
cataattctgccaggcaggatcgatgcacccattttacagatg

SEQ ID NO: 67918 - DNA, 31 bp, Homo sapiens; identical to SEQ ID NO: 18540
  chr4:3808368-3808399
  hypo

SEQ ID NO: 67919 - DNA, 44 bp, Homo sapiens
  chr4:3810693-3810737
  hypo
agtgtggtagagagaccgtgggggtttttcgttctacatgtggg

SEQ ID NO: 67920 - DNA, 31 bp, Homo sapiens
  chr4:3826670-3826701
  hypo
atggaaagcacctccccgtcactgtggttcc

SEQ ID NO: 67921 - DNA, 30 bp, Homo sapiens; identical to SEQ ID NO: 40209
  chr4:3873083-3873113
  hypo

SEQ ID NO: 67922 - DNA, 173 bp, Homo sapiens; identical to SEQ ID NO: 40210
  chr4:3873315-3873488
  hypo

SEQ ID NO: 67923 - DNA, 65 bp, Homo sapiens; identical to SEQ ID NO: 18542
  chr4:3944639-3944704
  hypo

SEQ ID NO: 67924 - DNA, 31 bp, Homo sapiens
  chr4:3949947-3949978
  hypo
ctgcaccaagagagggcgagagagtcagtcc

SEQ ID NO: 67925 - DNA, 31 bp, Homo sapiens; identical to SEQ ID NO: 18543
  chr4:3951479-3951510
  hypo

SEQ ID NO: 67926 - DNA, 31 bp, Homo sapiens
  chr4:4199685-4199716
  hypo
atgttcttccacaggacgtagagcattgtgg

SEQ ID NO: 67927 - DNA, 22 bp, Homo sapiens
  chr4:4221402-4221424
  hypo
gacagagcgagactctgtctca

SEQ ID NO: 67928 - DNA, 37 bp, Homo sapiens; identical to SEQ ID NO: 18545
  chr4:4251227-4251264
  hypo

SEQ ID NO: 67929 - DNA, 20 bp, Homo sapiens
  chr4:4288387-4288407
  hypo
tttgagaaaggagtctcgct

SEQ ID NO: 67930 - DNA, 30 bp, Homo sapiens; identical to SEQ ID NO: 40216
  chr4:4388490-4388520
  hypo

SEQ ID NO: 67931 - DNA, 30 bp, Homo sapiens; identical to SEQ ID NO: 3122
  chr4:4389100-4389130
  hypo

SEQ ID NO: 67932 - DNA, 30 bp, Homo sapiens; identical to SEQ ID NO: 40218
  chr4:4389653-4389683
  hypo

SEQ ID NO: 67933 - DNA, 30 bp, Homo sapiens; identical to SEQ ID NO: 40219
  chr4:4389903-4389933
  hypo

SEQ ID NO: 67934 - DNA, 263 bp, Homo sapiens
  chr4:4417393-4417656
  hypo
cctgtagggcagggccgtttctgagccatctcgtatgccagccctgagcggggccgccactccacaggtgttggccgcatcaggtcttgcaggactctgctgggtgccgaggtgggagggaagaggggaacccttggtccgtttccctgagggatgacgagcagcagatggagaggacagcgtgaaggggcgtggcggtgaggctggaggggagtttgtctggcctgcagagcctccttcctgatgcacgcgctgctggtctg

SEQ ID NO: 67935 - DNA, 30 bp, Homo sapiens
  chr4:4417920-4417950
  hypo
tgaactcagctggtacggtgggcctggctc

SEQ ID NO: 67936 - DNA, 31 bp, Homo sapiens
  chr4:4475309-4475340
  hypo
gcgcccggtcggaaatctgacttttaagtct

SEQ ID NO: 67937 - DNA, 31 bp, Homo sapiens; identical to SEQ ID NO: 18548
  chr4:4487688-4487719
  hypo

SEQ ID NO: 67938 - DNA, 30 bp, Homo sapiens; identical to SEQ ID NO: 18549
  chr4:4668217-4668247
  hypo

SEQ ID NO: 67939 - DNA, 1081 bp, Homo sapiens; identical to SEQ ID NO: 40229
  chr4:4861383-4862464
  hypo

SEQ ID NO: 67940 - DNA, 156 bp, Homo sapiens; identical to SEQ ID NO: 18550
  chr4:5024065-5024221
  hypo

SEQ ID NO: 67941 - DNA, 192 bp, Homo sapiens; identical to SEQ ID NO: 40243
  chr4:5052364-5052556
  hypo

SEQ ID NO: 67942 - DNA, 1137 bp, Homo sapiens; identical to SEQ ID NO: 40244
  chr4:5052780-5053917
  hypo

SEQ ID NO: 67943 - DNA, 31 bp, Homo sapiens
  chr4:5448003-5448034
  hypo
gatttctgaccggatgcgatggctcacgcct

SEQ ID NO: 67944 - DNA, 31 bp, Homo sapiens
  chr4:5753889-5753920
  hypo
gggagatgccaacgtccgccgtccgctcctc

SEQ ID NO: 67945 - DNA, 31 bp, Homo sapiens; identical to SEQ ID NO: 18553
  chr4:5754867-5754898
  hypo

SEQ ID NO: 67946 - DNA, 401 bp, Homo sapiens; identical to SEQ ID NO: 3146
  chr4:5889212-5889613
  hypo

SEQ ID NO: 67947 - DNA, 796 bp, Homo sapiens; identical to SEQ ID NO: 40250
  chr4:5889852-5890648
  hypo

SEQ ID NO: 67948 - DNA, 237 bp, Homo sapiens; identical to SEQ ID NO: 18556
  chr4:5970095-5970332
  hypo

SEQ ID NO: 67949 - DNA, 31 bp, Homo sapiens; identical to SEQ ID NO: 18557
  chr4:6022304-6022335
  hypo

SEQ ID NO: 67950 - DNA, 30 bp, Homo sapiens
  chr4:6058355-6058385
  hypo
gtctgagcaggcccgcggggtcccaactgc

SEQ ID NO: 67951 - DNA, 259 bp, Homo sapiens
  chr4:6058774-6059033
  hypo
ctggcagaccctccacgcatgcggaaggctgacctcataccccgcagactggccagagccacactgacatgcttttgttcattccactctctctgcctgcgatgcccttcccacgtttctttgcctggtcgtatcctcttgcataagtcctgtgagcacacggcaccaagtccgtcttgtcgctgtggcaccctgagcctggcacagtgcctgtcacatggggacagggggactctgtgaatcccggaatggatggatg

SEQ ID NO: 67952 - DNA, 823 bp, Homo sapiens; identical to SEQ ID NO: 40259
  chr4:6271358-6272181
  hypo

SEQ ID NO: 67953 - DNA, 30 bp, Homo sapiens
  chr4:6303250-6303280
  hypo
ctggccctggtgggcgtgctgcagttcgcc

SEQ ID NO: 67954 - DNA, 31 bp, Homo sapiens
  chr4:6374029-6374060
  hypo
caatgctcagcaaccacgactttgcggtttt

SEQ ID NO: 67955 - DNA, 31 bp, Homo sapiens
  chr4:6423229-6423260
  hypo
gatactgagtgtcatccgctttgcaccaggc

SEQ ID NO: 67956 - DNA, 30 bp, Homo sapiens; identical to SEQ ID NO: 18559
  chr4:6536899-6536929
  hypo

SEQ ID NO: 67957 - DNA, 30 bp, Homo sapiens
  chr4:6579186-6579216
  hypo
aagggagagcagggcgtccaccaggccccg

SEQ ID NO: 67958 - DNA, 183 bp, Homo sapiens; identical to SEQ ID NO: 18560
  chr4:6586517-6586700
  hypo

SEQ ID NO: 67959 - DNA, 95 bp, Homo sapiens
  chr4:6588778-6588873
  hypo
gttgacccgtttggcgcctctgccacgacgcccaccctatttgcgctggcgggcttcaatgcccacctcggctcccggatcgactacgacctgaa

SEQ ID NO: 67960 - DNA, 41 bp, Homo sapiens; identical to SEQ ID NO: 18562
  chr4:6590874-6590915
  hypo

SEQ ID NO: 67961 - DNA, 31 bp, Homo sapiens
  chr4:6600202-6600233
  hypo
ccccatggtgagagctcggacaggtggcttc

SEQ ID NO: 67962 - DNA, 192 bp, Homo sapiens; identical to SEQ ID NO: 18563
  chr4:6600600-6600792
  hypo

SEQ ID NO: 67963 - DNA, 137 bp, Homo sapiens
  chr4:6616020-6616157
  hypo
gagcatccctggctggcgctacagctccaaccacacggagcactctcagaatctccggaaaggtgaggcaggtgccctggcgtctcagacctgctcctccctccctgagtcaaacaggccaccgggcccaccaccag

SEQ ID NO: 67964 - DNA, 20 bp, Homo sapiens
  chr4:6626826-6626846
  hypo
gactccgtctcaaaaaaaaa

SEQ ID NO: 67965 - DNA, 42 bp, Homo sapiens
  chr4:6658783-6658825
  hypo
agaccaggaatataaacgtatctttttttttttttttttaga

SEQ ID NO: 67966 - DNA, 243 bp, Homo sapiens
  chr4:6670024-6670267
  hypo
accttcacaaagtcccgccagggtcaaagggaggagacacagactccacctcttgatgggcatggcaaggttctggaagagcaggtgcaactgttagcaattgcattgtggccgtttcttgaaaatacaacgtgcaagacaccacgttttactgccccgcccggctagcagtggacgtggagacagctttgttgttgtggccgtgatgcgtcccacactccagtggctcgcgcttcctgtacc

SEQ ID NO: 67967 - DNA, 112 bp, Homo sapiens
  chr4:6686432-6686544
  hypo
tccaacccagctttcccgtgaacaggatggccaggctgtggctctgcggtcttcccaagggaaggaggaggcagggggcttgcacacccccaggcttcgccctactcctccc

SEQ ID NO: 67968 - DNA, 56 bp, Homo sapiens
  chr4:6695093-6695149
  hypo
tttggccccacaggggaggagcgagcgagattgacgtggaagctgggcctctgaag

SEQ ID NO: 67969 - DNA, 123 bp, Homo sapiens; identical to SEQ ID NO: 40267
  chr4:6717791-6717914
  hypo

SEQ ID NO: 67970 - DNA, 31 bp, Homo sapiens
  chr4:6724730-6724761
  hypo
actactccatgctgtgcgtgccccccttggc

SEQ ID NO: 67971 - DNA, 58 bp, Homo sapiens
  chr4:6726064-6726122
  hypo
atcacatgcccttgagcgacaaatccctatgtcctctgcacagcgtgacttggacact

SEQ ID NO: 67972 - DNA, 308 bp, Homo sapiens
  chr4:6733364-6733672
  hypo
gctcagttatgtctgccgagttcagctggcgtgcaggcactgccacaggccccgagaaaagaacggggtgcagagcaggggctgctttcagggacccgccgtgctagtgaaggtggaacggtaaagagggtcccgggtttaagggcgcgggcagtgatgggagcacagacccagtgaggcaggggagggtgagggaggccttctgcagagggggtaccctgcagacagagtcagggagagatcaagagacggggatggccaggagggcacagggctcactggccaggcaacatcgccattatttctgt

SEQ ID NO: 67973 - DNA, 42 bp, Homo sapiens
  chr4:6735825-6735867
  hypo
gtaacagcagctccagcgagcaaaggacggaaggaggggatg

SEQ ID NO: 67974 - DNA, 97 bp, Homo sapiens
  chr4:6738168-6738265
  hypo
gaaaataaacaaacaaataaataaaataaattaaaaagtacatttacagtgttgcgcagccatcacctcctcacccatctcccgaacttgttcaatt

SEQ ID NO: 67975 - DNA, 192 bp, Homo sapiens
  chr4:6748303-6748495
  hypo
gagatctggggagttctgggccgtccaccggcaaaggacaatggatctccaaggggtgcggccagcggatgggtgatggcatggatggagggtgggtgcatcaatgctggagcatcaactctgtgtgcccctgcggggagaatcgcccctgccgaagccccggctggtccaaaaccacgccagccgctttag

SEQ ID NO: 67976 - DNA, 171 bp, Homo sapiens
  chr4:6769433-6769604
  hypo
tctccccagagctaagtccaccgtctttggaatgagtgtttgggggtggcctgtccccctgccgcccgcccgggccagggagatggccaatgcacggcgggcgcacccctattccctcctcactcatgagtctggtgggacaactcatccggtcagtcatgatgagttgtc

SEQ ID NO: 67977 - DNA, 35 bp, Homo sapiens; identical to SEQ ID NO: 18567
  chr4:6786667-6786702
  hypo

SEQ ID NO: 67978 - DNA, 35 bp, Homo sapiens; identical to SEQ ID NO: 18568
  chr4:6786941-6786976
  hypo

SEQ ID NO: 67979 - DNA, 94 bp, Homo sapiens
  chr4:6883784-6883878
  hypo
gtgggactggctcccgtttctccttggtgagcccggggagccggcgcatcttgtgagtcgcgtctgtgcatggcgatccgctcctccggctctc

SEQ ID NO: 67980 - DNA, 30 bp, Homo sapiens; identical to SEQ ID NO: 18570
  chr4:6902917-6902947
  hypo

SEQ ID NO: 67981 - DNA, 30 bp, Homo sapiens; identical to SEQ ID NO: 18571
  chr4:6915960-6915990
  hypo

SEQ ID NO: 67982 - DNA, 30 bp, Homo sapiens
  chr4:6924638-6924668
  hypo
gcttctgggccaggcgtggtggctcatgcc

SEQ ID NO: 67983 - DNA, 212 bp, Homo sapiens
  chr4:6925273-6925485
  hypo
gggctttagaagaccggcacagcctccagtccgtggactcggggattcctaccctggagatcgggaacccggagcctgtaccctgcagcgcggtccacgtgaggaggaagcagtccgactccgacctcatccccgagcgggccttccagagcgcctgcgcgctgccatcctgtgcgccaccagctcctagcagcaccgagcgggaacagagc

SEQ ID NO: 67984 - DNA, 25 bp, Homo sapiens
  chr4:6942920-6942945
  hypo
ttttttttttgagatgcggtctcac

SEQ ID NO: 67985 - DNA, 157 bp, Homo sapiens
  chr4:6946475-6946632
  hypo
ctcatccctgcactggttccacgggactggctggacacagcgtcactggttcccagcacagctgacaccccttccaggaaccttctcactatccccggggcagaggtggccttccgggcatgcgtgctcctctcccgtctcctctgcagcttccttt

SEQ ID NO: 67986 - DNA, 179 bp, Homo sapiens; identical to SEQ ID NO: 18573
  chr4:6950155-6950334
  hypo

SEQ ID NO: 67987 - DNA, 31 bp, Homo sapiens; identical to SEQ ID NO: 18574
  chr4:6952006-6952037
  hypo

SEQ ID NO: 67988 - DNA, 21 bp, Homo sapiens
  chr4:6956614-6956635
  hypo
agcggccgtgcccggcctgga

SEQ ID NO: 67989 - DNA, 173 bp, Homo sapiens
  chr4:6956966-6957139
  hypo
ggagatctggaaagtatacctcggaagtgggatttagaggaagcatttaggttttgccttctctacctttggtgaataacaggattgctatgtcccttcaggaggaagcgtcttagcctcgctgggcctcggtgtcctgtccgtacggtggcggctgtaatacctttcttgta

SEQ ID NO: 67990 - DNA, 30 bp, Homo sapiens
  chr4:6957577-6957607
  hypo
tagcagcctcggacacgtaagtccgagtcg

SEQ ID NO: 67991 - DNA, 105 bp, Homo sapiens
  chr4:6964579-6964684
  hypo
atgtcagtcctgcctcctcatcgccctatacttgcctcccctgcacacacacacacacggtggctgctccatttgccagcagacgtgtgtagaacctactgcatg

SEQ ID NO: 67992 - DNA, 219 bp, Homo sapiens
  chr4:7000530-7000749
  hypo
gctgggattacaggcgtgagccaccgcgcctggccaactgaatcgtattcttctttgtgtactttcctgtctagatgttagactttgcaagcttactaaagggtggataatgcctgagccttctggagtccgtcaggtgtgaagtgagcgctggagctgatgctcgctctgcttcagggcggttttcctggtgtgttcgcagtgtgacaggaaaatcac

SEQ ID NO: 67993 - DNA, 84 bp, Homo sapiens
  chr4:7003854-7003938
  hypo
cacgccctcacggagcgtcagccagctggctggtgactggcttctgtgcggtgtggtcctacagaggaacgtgggggcccggaa

SEQ ID NO: 67994 - DNA, 191 bp, Homo sapiens
  chr4:7004174-7004365
  hypo
tttaaattaaaacctatggaccgtattgttttggattgggctaaaccgctgacgagtcagttacatgtttagacatgagtcttagacatttatccaaaccttggtattggctcgatttgtgtacattgtgtctgtcttgtattgtgaaccgcgcagtgtcagtggcccccgctagcactggtactcaggaa

SEQ ID NO: 67995 - DNA, 217 bp, Homo sapiens
  chr4:7006572-7006789
  hypo
ctctttgacatctgtcttgcccgagccaaggagaggtggcggtcccttagcacaggaggctctgaagtggagaacgaaggtagaatgtcttctaaaaccagcggactgctgtggtcaattatgtttgtcattctttattacatagtgaagaaagttgacgttaactacagtagagattgttgtggagtcataaaaagctccacgagaaaagggtttt

SEQ ID NO: 67996 - DNA, 31 bp, Homo sapiens; identical to SEQ ID NO: 18576
  chr4:7033477-7033508
  hypo

SEQ ID NO: 67997 - DNA, 109 bp, Homo sapiens; identical to SEQ ID NO: 18577
  chr4:7035496-7035605
  hypo

SEQ ID NO: 67998 - DNA, 154 bp, Homo sapiens
  chr4:7035947-7036101
  hypo
aaaaaaaaatatgagacgcagggaaggatgtgcgtagacgcggacagtggtcagaactgggtttcagactccagccttgtgaatgactcccaagcccttgtcagaaacaccctctaggggagggggcctttgcgagccttgttcttgtagggct

SEQ ID NO: 67999 - DNA, 30 bp, Homo sapiens
  chr4:7043062-7043092
  hypo
ggctagcgtggtggcgcttcagggattcca

SEQ ID NO: 68000 - DNA, 478 bp, Homo sapiens
  chr4:7047025-7047503
  hypo
gaacaaaccacttcttacagccgtagtcccggctgatgtttacgtttacttcttgccttgaccactttgggagcctccttgttcgttattccccctccaccccattcccctattccacacaccataaccggagcgagctttggaagcacaaagcgcctcacaccggcctcagtggcttttacttcaattaaggcagctttagaagtgttgagcaatgagatctcatctgttacctcccttgatcgttttatatttcttctacctagagtgctctccctgtaaatcatggcccaggattgagctttccacttaaatatcagtgcctcagagggcccttcccttcaccatcccagcacttacctctacgttagctgctaaggaggcgcagagccttggtggcatatctgtgcgtatctcaggacattttcccgacagcccttggcagttggctttggacggaccagtttgacttcagagc

SEQ ID NO: 68001 - DNA, 30 bp, Homo sapiens
  chr4:7048911-7048941
  hypo
agctgagggcaagtcgcagtggtggcagag

SEQ ID NO: 68002 - DNA, 36 bp, Homo sapiens; identical to SEQ ID NO: 18581
  chr4:7167401-7167437
  hypo

SEQ ID NO: 68003 - DNA, 30 bp, Homo sapiens; identical to SEQ ID NO: 18582
  chr4:7251436-7251466
  hypo

SEQ ID NO: 68004 - DNA, 31 bp, Homo sapiens
  chr4:7431090-7431121
  hypo
atttaccaggtcccatcgcctcttccgccct

SEQ ID NO: 68005 - DNA, 218 bp, Homo sapiens; identical to SEQ ID NO: 18583
  chr4:7432356-7432574
  hypo

SEQ ID NO: 68006 - DNA, 31 bp, Homo sapiens
  chr4:7445128-7445159
  hypo
ctaaagcccttctgagcgcacagccgcgaat

SEQ ID NO: 68007 - DNA, 30 bp, Homo sapiens
  chr4:7449966-7449996
  hypo
gaggtggaactgcggcgcagggcaaggggc

SEQ ID NO: 68008 - DNA, 30 bp, Homo sapiens
  chr4:7501551-7501581
  hypo
aatcggggaccgagccggcacaggtgggtg

SEQ ID NO: 68009 - DNA, 31 bp, Homo sapiens
  chr4:7528960-7528991
  hypo
ctcccacagacgtccacgtcctaatccccgg

SEQ ID NO: 68010 - DNA, 30 bp, Homo sapiens; identical to SEQ ID NO: 18584
  chr4:7543512-7543542
  hypo

SEQ ID NO: 68011 - DNA, 114 bp, Homo sapiens
  chr4:7600669-7600783
  hypo
tggctgttgttttccattgcacggtgccgatgcccttgcaggcggcagggttgaagcaagggctcttgaggaggcagccgggagaagtgggccgatgagaggttgcttgcctga

SEQ ID NO: 68012 - DNA, 281 bp, Homo sapiens
  chr4:7666009-7666290
  hypo
gcacatgtctcgggccgtctctggctccggctggagtctgaccgcctgggtcggcgcctctctcctgtagattttcggtacgtcacctgcgcaatccacaattgctccgagaagatgctgacagccccattcgcaggccccattgaccacgggtctctgaccgtgcaggacgattacatcttctttaaggtaaggttgcttctggggcttttggaaattggcaacaggtgacgtggcggatgacccgttcgcggcaaaaatggcatcgctcagaaaagagg

SEQ ID NO: 68013 - DNA, 537 bp, Homo sapiens
  chr4:7741248-7741785
  hypo
tccccgtctgacccacgccagtcctttgaggggtgcggttgaccctcacgttagagatgaagaagccaaggcccagccaggtgaaggatgggcgaggactcaggcaaggactcaggtgtgtctgggctgtgccgcgggtgctcccagccgtgtctcccggtgcccttgaggcggggcagctctgggtcctgggtcctcgacctgtctccttgactcctaaccagcccccacccgggacacccggctcaccccttggcactgacatccctatgcccccctctctcccactctcgcctcccggggcctcgccactctacgccctgcagcgcccactgccaggagggggcggagcctcagcccctctcgcacccccttgctgccgatgccgggggcgatccccacgcaggtcagtggctgtggcgggttggggccggcctgggcctcacctctcaggccctctggggcccactgcttgtgatggcaccgggagagcccactcctcaggcacccacctaggaaccgcggagaccccctgca

SEQ ID NO: 68014 - DNA, 70 bp, Homo sapiens
  chr4:7755967-7756037
  hypo
gaattgggccaagcagctgtgcggcacacttgggaagcagggctgtcccggctgattcttggtaaaagca

SEQ ID NO: 68015 - DNA, 43 bp, Homo sapiens
  chr4:7756595-7756638
  hypo
aaactgccaagggcttccctgcgaggctgggtcaccctggaga

SEQ ID NO: 68016 - DNA, 1059 bp, Homo sapiens
  chr4:7757466-7758525
  hypo
gggggttggaggagccatgctcggggcgtcagagggtaggggctgggagagcggggactctgcctgggggggatgcccgggtcccgctgacttcccggcgcctcctctggggagtcgccagagcgctgttttacacgtgtgaaggtcacacagaacgttctcagcacagagaaggtgctccgtcaatgtttgctgagtgaataaatgtgctctcttgctctaaatggtcattgcttggctgtgaactcgagggcagagcaggtggaattcatttttgtgctccggggcctgacagctagaaggggcttgggaatcatttgtgtagtgattttcagaataatgtcagggcctaaaactgtaacagcaaaatgcagcacctgctcccccagctcctccttctggggttggcgggtcaggacccgtggagggagggagcccagtgaccccaggggccacggcacccacggcagccacggcacccgtgctttccacagcaggccccagcagctttcggcctgcgctttgctgtcaaacttgtctgtcgcagttgtcccgggcagtaggtcctgcacaaagctgccccaggaggagtggagcagcaggaagaggcaattgtgcttgctcttggtcttgctctgaggcacttacttcccctgggggcagtcggctgcgtgctgccctcctgctgcgacttaggatctcacccgagggccaggagattggcttggtctgtgcaccatcgacccgagggccagaaggttggcttggtctgtgcacaattgacccgagggccagaaggtgggcttggtctgtgcaccatcgacccgagggccagaaggtgggcttggtctgtgcaccatcgacccgagggccagaaggtgggcttggtctgtgcacaatcgacctgagggcgagaaggttggcttggtctgtgcacaatcaggacggccctgagagcagagtggcggcagggctgtcatcccagtgccttcggggactgcgccgaggagccgggccgcatcccacgtggggtgactcgcacctgcccgtcggggccag

SEQ ID NO: 68017 - DNA, 30 bp, Homo sapiens
  chr4:7770624-7770654
  hypo
gctcttcttcaagacggccgcgctgttcac

SEQ ID NO: 68018 - DNA, 31 bp, Homo sapiens; identical to SEQ ID NO: 18587
  chr4:7775800-7775831
  hypo

SEQ ID NO: 68019 - DNA, 75 bp, Homo sapiens
  chr4:7789548-7789623
  hypo
gcgctgtggcttcctgcgctcggtcagtctcctgggtgccccggcactcccctggctctcgcggctcccccagcc

SEQ ID NO: 68020 - DNA, 45 bp, Homo sapiens
  chr4:7791291-7791336
  hypo
tccgtgcatctccccacgctccgcaccagccgctgctttccatcc

SEQ ID NO: 68021 - DNA, 35 bp, Homo sapiens
  chr4:7812694-7812729
  hypo
aggcaagaaatcagaacgtgcgtgtgagacagcac

SEQ ID NO: 68022 - DNA, 307 bp, Homo sapiens; identical to SEQ ID NO: 18589
  chr4:7813250-7813557
  hypo

SEQ ID NO: 68023 - DNA, 31 bp, Homo sapiens; identical to SEQ ID NO: 18590
  chr4:7828943-7828974
  hypo

SEQ ID NO: 68024 - DNA, 220 bp, Homo sapiens
  chr4:7844867-7845087
  hypo
gcagtttggtgtctttgatgacgcagagcaacttggtccactggccgaaccgcttcttccgcagcaggaaggcgcagattttggcgtccttgaccaggtccatggaggcctcctcggagggccactggtgccgggttttcttccccttcccatcctcctcctcttcatcatacgactcataagagctgctcatcgcatcggaatcataatctgtaaaaaa

SEQ ID NO: 68025 - DNA, 50 bp, Homo sapiens
  chr4:7967942-7967992
  hypo
gaataaggctggaggccgctcccctgcggagggaccgtaaaattaaactc

SEQ ID NO: 68026 - DNA, 31 bp, Homo sapiens
  chr4:7973586-7973617
  hypo
cacagggctggctgaccgggtgggcctcagg

SEQ ID NO: 68027 - DNA, 31 bp, Homo sapiens; identical to SEQ ID NO: 18592
  chr4:7984131-7984162
  hypo

SEQ ID NO: 68028 - DNA, 212 bp, Homo sapiens
  chr4:7992551-7992763
  hypo
aacagtacataaaagtcgtagaaagagtgaaacaataggaaagaacattagcagggaaaagagaatcccaaagcaaagtcattaataatattcaccaatctcccccagaagcaatgtgaaaagctaagaatctccacgtgatgatgagttctgcgcatatcagctctccaagcacatgcagagagcacgccagctaacgctctccttcccac

SEQ ID NO: 68029 - DNA, 191 bp, Homo sapiens
  chr4:8001654-8001845
  hypo
cagaggtcaaagtcaccgctggacattcaaggccgggcaccttgtgggcagaggactgtggctcacacagcatccgggtctgctttgtggacacctgacccatgaaccactcacttgggcagttcccatccgctcctgggtgcacgggcaggaggcttggaggctgtggcactgcacgggttcaggtcccc

SEQ ID NO: 68030 - DNA, 93 bp, Homo sapiens
  chr4:8005613-8005706
  hypo
tgcatattccatacctagggggtctcacgtctctaagcctgaggccaggtgccctgcccgtcccaccagatatcctcacgagattgacagtag

SEQ ID NO: 68031 - DNA, 30 bp, Homo sapiens; identical to SEQ ID NO: 18594
  chr4:8011534-8011564
  hypo

SEQ ID NO: 68032 - DNA, 150 bp, Homo sapiens; identical to SEQ ID NO: 18595
  chr4:8012067-8012217
  hypo

SEQ ID NO: 68033 - DNA, 262 bp, Homo sapiens; identical to SEQ ID NO: 18596
  chr4:8032212-8032474
  hypo

SEQ ID NO: 68034 - DNA, 201 bp, Homo sapiens
  chr4:8062546-8062747
  hypo
gccctgccggctccccgctgtggctgggctgctcgtgacctagcgagatgacactgtcaccaacctgttcacacccagcatgtgtgtggacatcgaagagggtagttccttgctctaggggaccaaacaacacattttaatttgtaccttgaagatacatctcttcgccttctgcaaacatctggccgcacctgacacata

SEQ ID NO: 68035 - DNA, 31 bp, Homo sapiens; identical to SEQ ID NO: 18597
  chr4:8063598-8063629
  hypo

SEQ ID NO: 68036 - DNA, 30 bp, Homo sapiens
  chr4:8130112-8130142
  hypo
ccccgtcataggatgcgttgcacctgcaca

SEQ ID NO: 68037 - DNA, 390 bp, Homo sapiens
  chr4:8153833-8154223
  hypo
gaccctcaccaagaagcgccatcatgatgcccccaaacgggccaggctttatccacaccaacactcagccacgcgttatgaggcagcaaccaatcccccacagccaccggctaaagcacgcaggcaggggataggcagacagcgcccgcctagccagggatacgcgtgttgcggctgagtcgggcacactggggttcaaatcccagcgctgccatttacaaatcacgtgacaccaggcaccagacgggactcgcaggcatttcttcctccgtaggtagagatgccaccggccgctccgagcagcgctgcgaggaccccgggaggaaacctatacgagcatctggcccagggccccagggcggcacttgatgagccgcagtctctgcgaca

SEQ ID NO: 68038 - DNA, 30 bp, Homo sapiens
  chr4:8158598-8158628
  hypo
tgctgtgcgcatcatcggctggggacaggg

SEQ ID NO: 68039 - DNA, 141 bp, Homo sapiens; identical to SEQ ID NO: 40281
  chr4:8160429-8160570
  hypo

SEQ ID NO: 68040 - DNA, 30 bp, Homo sapiens
  chr4:8220506-8220536
  hypo
acagaggaccgtgaccgcgtcctctttatg

SEQ ID NO: 68041 - DNA, 152 bp, Homo sapiens
  chr4:8237149-8237301
  hypo
ctcctttcaggtggcacagaacgtggccctgtacacaggcgaccccaacctggggctggagctgtttgaggcggctggagacatcttcttcgacggggcctgggagcgggagaaagctgtgtccttctaccgggtgagctggcctgtgggct

SEQ ID NO: 68042 - DNA, 30 bp, Homo sapiens
  chr4:8239205-8239235
  hypo
cggctgaacgagcgcgtggcctaccaccgg

SEQ ID NO: 68043 - DNA, 18 bp, Homo sapiens
  chr4:8296287-8296305
  hypo
cttctatccgtccgtccg

SEQ ID NO: 68044 - DNA, 31 bp, Homo sapiens
  chr4:8309965-8309996
  hypo
atgcctcaggggagagcggatcacaaatccc

SEQ ID NO: 68045 - DNA, 31 bp, Homo sapiens
  chr4:8354965-8354996
  hypo
gagagggaagagttgtcgtccatccagggcc

SEQ ID NO: 68046 - DNA, 298 bp, Homo sapiens
  chr4:8372556-8372854
  hypo
cccacaggagcatctcagctccgcagaaatgcccatcaacccttggggcactcccgtgaggccctgtcctccctttacctcgccgtcggctctgccaatcggtgagtccagaacaaagtcaggaggagcgatcacgtctaccagggcaactgcatcgtctttcagctgttggaaaacaaagcccagacacttggcacctcccgggaatttccatggtgaccaaagcataacagccccgtgtgtggttgccaggacccactagcaacgggtcacctgagcggcacgtgcggctctgctg

SEQ ID NO: 68047 - DNA, 39 bp, Homo sapiens
  chr4:8375723-8375762
  hypo
ggtgcatggcagggggcgcaggggcgagggggtgcctgg

SEQ ID NO: 68048 - DNA, 30 bp, Homo sapiens
  chr4:8376749-8376779
  hypo
acagagcactgagccgccccagcacggccc

SEQ ID NO: 68049 - DNA, 30 bp, Homo sapiens
  chr4:8378161-8378191
  hypo
tgacgctgctatgacgctgccccaaatctt

SEQ ID NO: 68050 - DNA, 30 bp, Homo sapiens
  chr4:8379223-8379253
  hypo
gctccaagcctcagcgttgtctcctgcgtg

SEQ ID NO: 68051 - DNA, 30 bp, Homo sapiens
  chr4:8385798-8385828
  hypo
gcggtggacacttcacggcagttacccgag

SEQ ID NO: 68052 - DNA, 262 bp, Homo sapiens
  chr4:8386103-8386365
  hypo
aatgtggaagtgaaaaagtatcgctgaaacaaactaggcaggaaaacgggcactgacgggcagtgaattctcttgctcggaatgcggctgctggcggcctgaggacacacccagcgtcaacaacctctgtcctcaagactctcccagaatcctgggtcaccacggcctttccatgtgcctcacaccagaaggactctcgaaggtgcccccagccgccctgtgcacccaatgactgcccctcgatctgccccctccccagctg

SEQ ID NO: 68053 - DNA, 112 bp, Homo sapiens; identical to SEQ ID NO: 18601
  chr4:8386731-8386843
  hypo

SEQ ID NO: 68054 - DNA, 174 bp, Homo sapiens
  chr4:8389737-8389911
  hypo
ccctttccaccaggcctcttgcgctcacctcccgtcattcacagcaggggaacgagatgcatgctcacatcgagatgagctcggcatgggctgggccctgctgcctccgcctcctgacacacccgtccatcgggggtccccatggctgcccccgcctttcactgacctcaattc

SEQ ID NO: 68055 - DNA, 122 bp, Homo sapiens; identical to SEQ ID NO: 18603
  chr4:8396395-8396517
  hypo

SEQ ID NO: 68056 - DNA, 173 bp, Homo sapiens
  chr4:8398722-8398895
  hypo
gagtggctgagaagcgaagagcgatggccacggccagctttaggttaaggatggccaggctcacgatggagacccggcccgaggacaggctccccagggacgctccaaagcgctgcctgacgtcctacgggagggacacagatgataagctcaagcccggctgcgcggccacc

SEQ ID NO: 68057 - DNA, 32 bp, Homo sapiens
  chr4:8455076-8455108
  hypo
cttcaggccaggcacggggctcacgcctgcaa

SEQ ID NO: 68058 - DNA, 91 bp, Homo sapiens
  chr4:8455167-8455258
  hypo
cctgggcaacatagtgaaaccccatctctgcaaaaaaaagaaaaacaaataagagaagcttcagttctggctcggacggccagtcatgtat

SEQ ID NO: 68059 - DNA, 95 bp, Homo sapiens
  chr4:8466216-8466311
  hypo
agccacagttgcctccgcacggggagctgtgtgtgtccgagagacttggtcacgaagcaggttgtgctgctcctcgttgacgtttcgttgctgag

SEQ ID NO: 68060 - DNA, 57 bp, Homo sapiens; identical to SEQ ID NO: 18607
  chr4:8473096-8473153
  hypo

SEQ ID NO: 68061 - DNA, 31 bp, Homo sapiens; identical to SEQ ID NO: 18608
  chr4:8477856-8477887
  hypo

SEQ ID NO: 68062 - DNA, 346 bp, Homo sapiens
  chr4:8483763-8484109
  hypo
ttgttaaggtgcgtgtcgaggtctgcaaagcttttgctaaacccttcactgtaaattttcttggggctcatcttgtttttcgccagttgcctcttctcttgccccttgttcagctctgcgtccctcttccagttccagcagctcatttgtcagttcttcaggaaccgcctggaggcactcctcaacggcatcctcctccaccctagactggagttgtttgccgtcctagccacagccgtgttgagttttgcagcctcctcatcctgggcaaatcctttgaagtcctgggtgaactcttgcgtgtcctcctctggatgccactcacgcacaccttggcaggcacacc

SEQ ID NO: 68063 - DNA, 31 bp, Homo sapiens; identical to SEQ ID NO: 18609
  chr4:8550061-8550092
  hypo

SEQ ID NO: 68064 - DNA, 31 bp, Homo sapiens
  chr4:8560622-8560653
  hypo
aggccttgaagctctccgtgaaggtgtacat

SEQ ID NO: 68065 - DNA, 43 bp, Homo sapiens; identical to SEQ ID NO: 40289
  chr4:8594309-8594352
  hypo

SEQ ID NO: 68066 - DNA, 31 bp, Homo sapiens; identical to SEQ ID NO: 3170
  chr4:8594372-8594403
  hypo

SEQ ID NO: 68067 - DNA, 30 bp, Homo sapiens
  chr4:8603056-8603086
  hypo
agggcggctgggtgcgcagaccctgccggc

SEQ ID NO: 68068 - DNA, 30 bp, Homo sapiens
  chr4:8605866-8605896
  hypo
gagctgctggtcatcgagttctccagccgc

SEQ ID NO: 68069 - DNA, 30 bp, Homo sapiens; identical to SEQ ID NO: 18612
  chr4:8608471-8608501
  hypo

SEQ ID NO: 68070 - DNA, 132 bp, Homo sapiens; identical to SEQ ID NO: 3171
  chr4:8609442-8609574
  hypo

SEQ ID NO: 68071 - DNA, 232 bp, Homo sapiens
  chr4:8615875-8616107
  hypo
gcccctcagctgcaggaggggcgtctgtggcgagtacctgctgcactcacctgcctgctgggcacttggctgacaccccgacgtcccggctgtctctgcgcggctgacaccccggcgtcccggctgtctctgtgcggctgacacccctgacgtcccggctgtctctgtgcggctgacacccctgacgtccccgctgtctctgtgccacaggcatgtccgatttcaactacct

SEQ ID NO: 68072 - DNA, 270 bp, Homo sapiens; identical to SEQ ID NO: 18615
  chr4:8621149-8621419
  hypo

SEQ ID NO: 68073 - DNA, 111 bp, Homo sapiens; identical to SEQ ID NO: 18616
  chr4:8647630-8647741
  hypo

SEQ ID NO: 68074 - DNA, 331 bp, Homo sapiens; identical to SEQ ID NO: 18617
  chr4:8739497-8739828
  hypo

SEQ ID NO: 68075 - DNA, 31 bp, Homo sapiens; identical to SEQ ID NO: 18618
  chr4:8770251-8770282
  hypo

SEQ ID NO: 68076 - DNA, 31 bp, Homo sapiens
  chr4:8842664-8842695
  hypo
atccccagacagcccacgtgtgagaggtggg

SEQ ID NO: 68077 - DNA, 203 bp, Homo sapiens; identical to SEQ ID NO: 3174
  chr4:8863323-8863526
  hypo

SEQ ID NO: 68078 - DNA, 39 bp, Homo sapiens; identical to SEQ ID NO: 3175
  chr4:8863856-8863895
  hypo

SEQ ID NO: 68079 - DNA, 154 bp, Homo sapiens; identical to SEQ ID NO: 40301
  chr4:8872918-8873072
  hypo

SEQ ID NO: 68080 - DNA, 207 bp, Homo sapiens; identical to SEQ ID NO: 40302
  chr4:8873773-8873980
  hypo

SEQ ID NO: 68081 - DNA, 24 bp, Homo sapiens
  chr4:9151887-9151911
  hypo
tttagtgaggctgggcgtggtggc

SEQ ID NO: 68082 - DNA, 210 bp, Homo sapiens; identical to SEQ ID NO: 3185
  chr4:9684932-9685142
  hypo

SEQ ID NO: 68083 - DNA, 208 bp, Homo sapiens
  chr4:9701509-9701717
  hypo
gtcctgagcacccagtcgatggaagacgagcaggatgactgtaaagaaggggaactggccccgtagtgtgccagcaactgtcctcagacctgacatttgtcagcccccagcacctgtgagggtgtgctgtctttgtcccatctcactgacaaagacactaggacacacagaggccaagcgacccctgaactcccgcagactgcagccc

SEQ ID NO: 68084 - DNA, 36 bp, Homo sapiens
  chr4:9784384-9784420
  hypo
ctacacgcgcatctaccgcatcgcccaggtgcagat

SEQ ID NO: 68085 - DNA, 31 bp, Homo sapiens; identical to SEQ ID NO: 18622
  chr4:10077116-10077147
  hypo

SEQ ID NO: 68086 - DNA, 30 bp, Homo sapiens
  chr4:10084710-10084740
  hypo
ccccgactcatccacggtcatcctggacac

SEQ ID NO: 68087 - DNA, 63 bp, Homo sapiens; identical to SEQ ID NO: 18623
  chr4:10086435-10086498
  hypo

SEQ ID NO: 68088 - DNA, 349 bp, Homo sapiens; identical to SEQ ID NO: 18624
  chr4:10087760-10088109
  hypo

SEQ ID NO: 68089 - DNA, 44 bp, Homo sapiens; identical to SEQ ID NO: 3186
  chr4:10089889-10089933
  hypo

SEQ ID NO: 68090 - DNA, 237 bp, Homo sapiens; identical to SEQ ID NO: 40315
  chr4:10090132-10090369
  hypo

SEQ ID NO: 68091 - DNA, 430 bp, Homo sapiens
  chr4:10120443-10120873
  hypo
ctggatgacagtctccgggtcacttagactccgttgtccgcctcccctcatctgtatcatctttgccttgggtactggcttcggagggtgttttcctgaaactcttacctgagatctacttggctgactcctgtgtccttcagaagtacttaattgctcaaatgttagttgatgagtgtcaccggtctcattttaaattgcaacttcaaccccttgcaaacactgcttctcattcccgcgttccctaactttaactctcaggaataaccctgacacctggaagatgctcctagggatgaccccactccccacccacaactgttaatcaggaaataacggatatgaaagtagctctgcgaactgaggagccgtggagaatgtacaaaacagattcctaaagtaagatacgcaggcccggcttgtaggccgc

SEQ ID NO: 68092 - DNA, 30 bp, Homo sapiens; identical to SEQ ID NO: 18627
  chr4:10145468-10145498
  hypo

SEQ ID NO: 68093 - DNA, 31 bp, Homo sapiens
  chr4:10412561-10412592
  hypo
agcctgagcgtgcctgcgtggcaccactcgg

SEQ ID NO: 68094 - DNA, 30 bp, Homo sapiens
  chr4:10447425-10447455
  hypo
tctcctttcgtatacgaaatgtagctgcag

SEQ ID NO: 68095 - DNA, 1013 bp, Homo sapiens; identical to SEQ ID NO: 40318
  chr4:10458335-10459348
  hypo

SEQ ID NO: 68096 - DNA, 23 bp, Homo sapiens
  chr4:10500108-10500131
  hypo
ccgtctcaaaataaaataaaata

SEQ ID NO: 68097 - DNA, 31 bp, Homo sapiens
  chr4:10575193-10575224
  hypo
taaagaccagctggcccggaaggagcaaatg

SEQ ID NO: 68098 - DNA, 43 bp, Homo sapiens
  chr4:10622764-10622807
  hypo
agtcaccaagaggtaagtggccgctgcaggccagacacttctg

SEQ ID NO: 68099 - DNA, 190 bp, Homo sapiens
  chr4:11374202-11374392
  hypo
ccaaaggctatgcgtgcgtagagtttgagaatccagatgaagctgagaaggcgctgaagcacatggatggaggacaaattgatggccaggagatcactgccaccgtcgtgctggccccctggcctaggccaacccccaggagattcagccctcccaggagaatgttgccaccaccgcctatgtggctcag

SEQ ID NO: 68100 - DNA, 30 bp, Homo sapiens; identical to SEQ ID NO: 40324
  chr4:11521627-11521657
  hypo

SEQ ID NO: 68101 - DNA, 30 bp, Homo sapiens; identical to SEQ ID NO: 18630
  chr4:13601191-13601221
  hypo

SEQ ID NO: 68102 - DNA, 30 bp, Homo sapiens; identical to SEQ ID NO: 3201
  chr4:13669550-13669580
  hypo

SEQ ID NO: 68103 - DNA, 63 bp, Homo sapiens
  chr4:15789215-15789278
  hypo
acttcaggaatgattacgaatctttgtaggtaaagcggcagaatgccacgtcctctcctggtt

SEQ ID NO: 68104 - DNA, 34 bp, Homo sapiens
  chr4:15789490-15789524
  hypo
attaacattgttgttccgccgtgcagggagcagt

SEQ ID NO: 68105 - DNA, 30 bp, Homo sapiens
  chr4:16077309-16077339
  hypo
cttctgggaaatcacgcggctgtaccacat

SEQ ID NO: 68106 - DNA, 139 bp, Homo sapiens; identical to SEQ ID NO: 3205
  chr4:16228990-16229129
  hypo

SEQ ID NO: 68107 - DNA, 186 bp, Homo sapiens; identical to SEQ ID NO: 40353
  chr4:16229291-16229477
  hypo

SEQ ID NO: 68108 - DNA, 30 bp, Homo sapiens
  chr4:16258198-16258228
  hypo
caccacaccgcgcacgcgagagaaagccga

SEQ ID NO: 68109 - DNA, 30 bp, Homo sapiens
  chr4:16380152-16380182
  hypo
ggtcccatcttgtcacgattgcccacttga

SEQ ID NO: 68110 - DNA, 30 bp, Homo sapiens
  chr4:17516535-17516565
  hypo
ctcctttatcattacgaggtccacaccagg

SEQ ID NO: 68111 - DNA, 36 bp, Homo sapiens
  chr4:17741678-17741714
  hypo
aaaaaatgtctggcagctgggcgtcatggttcacgc

SEQ ID NO: 68112 - DNA, 138 bp, Homo sapiens
  chr4:17818028-17818166
  hypo
ccaggggttggggagcctgagagaatctgcttataggaatgatattttttgaagtttttaactctcatgagaaggccaagatggctctattgcgctgtagtgagaaaaccgacttgcgtttgaaaacattgtcagagg

SEQ ID NO: 68113 - DNA, 30 bp, Homo sapiens; identical to SEQ ID NO: 3208
  chr4:18024246-18024276
  hypo

SEQ ID NO: 68114 - DNA, 54 bp, Homo sapiens; identical to SEQ ID NO: 18635
  chr4:19280789-19280843
  hypo

SEQ ID NO: 68115 - DNA, 30 bp, Homo sapiens; identical to SEQ ID NO: 40365
  chr4:21215998-21216028
  hypo

SEQ ID NO: 68116 - DNA, 29 bp, Homo sapiens
  chr4:21639111-21639140
  hypo
agaaaacaggccaggcgcggtggcttatg

SEQ ID NO: 68117 - DNA, 30 bp, Homo sapiens; identical to SEQ ID NO: 40368
  chr4:22358598-22358628
  hypo

SEQ ID NO: 68118 - DNA, 30 bp, Homo sapiens; identical to SEQ ID NO: 40369
  chr4:22458521-22458551
  hypo

SEQ ID NO: 68119 - DNA, 26 bp, Homo sapiens
  chr4:22477019-22477045
  hypo
tcccaagtgggagttaagctacgaga

SEQ ID NO: 68120 - DNA, 26 bp, Homo sapiens
  chr4:22477344-22477370
  hypo
gtctcggaaaaaaaaataaataaata

SEQ ID NO: 68121 - DNA, 287 bp, Homo sapiens; identical to SEQ ID NO: 40371
  chr4:22517044-22517331
  hypo

SEQ ID NO: 68122 - DNA, 426 bp, Homo sapiens; identical to SEQ ID NO: 40372
  chr4:22517554-22517980
  hypo

SEQ ID NO: 68123 - DNA, 34 bp, Homo sapiens; identical to SEQ ID NO: 18639
  chr4:24422942-24422976
  hypo

SEQ ID NO: 68124 - DNA, 34 bp, Homo sapiens; identical to SEQ ID NO: 18640
  chr4:24423215-24423249
  hypo

SEQ ID NO: 68125 - DNA, 25 bp, Homo sapiens
  chr4:24586891-24586916
  hypo
ctccgacttgaaagaaaaaaaaaaa

SEQ ID NO: 68126 - DNA, 31 bp, Homo sapiens
  chr4:24631209-24631240
  hypo
aagccctgcacttccccgcttctccctacac

SEQ ID NO: 68127 - DNA, 31 bp, Homo sapiens
  chr4:24670641-24670672
  hypo
ctcctggggtgggagccgattacaccaccgt

SEQ ID NO: 68128 - DNA, 610 bp, Homo sapiens; identical to SEQ ID NO: 40378
  chr4:24914264-24914874
  hypo

SEQ ID NO: 68129 - DNA, 31 bp, Homo sapiens
  chr4:25005691-25005722
  hypo
aagaacgtctcgtcgtcgatctgaaacagct

SEQ ID NO: 68130 - DNA, 177 bp, Homo sapiens
  chr4:25013893-25014070
  hypo
ctcccgcgggcttgccgcaatgctgaaattagttcaacacatctgatcaaagccacaacacacctgtaatgttgtcatagctccggaaattcatttcaatgtggtcccactccagcaccatgcagttctccatgctgggctgcgcgatggccacgtacacatcgttcttggagttga

SEQ ID NO: 68131 - DNA, 30 bp, Homo sapiens
  chr4:25014432-25014462
  hypo
gtaagacggacaggacgctgcacagcaaca

SEQ ID NO: 68132 - DNA, 185 bp, Homo sapiens
  chr4:25025016-25025201
  hypo
gacctaggacattgtccggtatcaactatgctgacacagatgtttcggcctcccatgtctgctccctcatctccttacccgataggctttaacttaggcagagcctctacttgtgggcgttccagaatcaagtgtttgcttggcctattgacaaccccctttgccaatatcggggcttgatgtga

SEQ ID NO: 68133 - DNA, 20 bp, Homo sapiens
  chr4:25360282-25360302
  hypo
aggccaaggcagctttccag

SEQ ID NO: 68134 - DNA, 139 bp, Homo sapiens
  chr4:25360421-25360560
  hypo
tctgtaaaaggtataattaccctgctaacgctgtacatatggcctgtgcctaggttggctcatgcccgggctcacttgcacccagagagagagtaaagccatgttgaaactgtctacaattcctcgagtctttttccag

SEQ ID NO: 68135 - DNA, 30 bp, Homo sapiens; identical to SEQ ID NO: 18642
  chr4:25371673-25371703
  hypo

SEQ ID NO: 68136 - DNA, 30 bp, Homo sapiens
  chr4:25507401-25507431
  hypo
tccacgctcttcgccgtggccagcatcctg

SEQ ID NO: 68137 - DNA, 534 bp, Homo sapiens
  chr4:25677737-25678271
  hypo
ccaacctcttgtgttgcagatcgccctgtgccactttttcttcaacatctccggcatcttgctgtggtacccgatcccgttcactcgcctgcccatccgcatggccaaggggctgggcaacatctctgccaagtatcgctggttcgccgtcttctacctgatcatcttcttcttcctgatcccgctgacggtgtttggcctctcgctggccggctggcgggtgctggttggtgtcggggttcccgtcgtcttcatcatcatcctggtactgtgcctccgactcctgcagtctcgctgcccacgcgtcctgccgaagaaactccagaactggaacttcctgccgctgtggatgcgctcgctgaagccctgggatgccgtcgtctccaagttcaccggctgcttccagatgcgctgctgctgctgctgccgcgtgtgctgccgcgcgtgctgcttgctgtgtgactgccccaagtgctgccgctgcagcaagtgctgcgaggacttggaggaggcgcaggaggggcaggatgtccc

SEQ ID NO: 68138 - DNA, 91 bp, Homo sapiens
  chr4:25681545-25681636
  hypo
gtatggcctttcagtgctgtgcgttctgccaacaactgcgctagtcaaaataataacatgttggttgggtgcggtggctcatgcctctaat

SEQ ID NO: 68139 - DNA, 31 bp, Homo sapiens; identical to SEQ ID NO: 18643
  chr4:25812477-25812508
  hypo

SEQ ID NO: 68140 - DNA, 30 bp, Homo sapiens; identical to SEQ ID NO: 18644
  chr4:25818925-25818955
  hypo

SEQ ID NO: 68141 - DNA, 30 bp, Homo sapiens; identical to SEQ ID NO: 40387
  chr4:25863674-25863704
  hypo

SEQ ID NO: 68142 - DNA, 101 bp, Homo sapiens; identical to SEQ ID NO: 3228
  chr4:25864189-25864290
  hypo

SEQ ID NO: 68143 - DNA, 26 bp, Homo sapiens
  chr4:26223327-26223353
  hypo
agtgtttgctgattgagtagacgagt

SEQ ID NO: 68144 - DNA, 205 bp, Homo sapiens
  chr4:26223412-26223617
  hypo
tagctagacgagaataattcaaatgttcctcgcataaagataaatacttaaggctgggtgcggtgactcatgccagtgcaatgctgtgtccccactcccaatgtgcggcccagcgctgaacgaattcaatccagagactggcagggcggtgagagggatggggggagggcaggagtgaggagacgaactgagaggtgctaatggg

SEQ ID NO: 68145 - DNA, 30 bp, Homo sapiens
  chr4:26320231-26320261
  hypo
acaaggcaacaaggcgagagcgcagagctg

SEQ ID NO: 68146 - DNA, 25 bp, Homo sapiens
  chr4:26730357-26730382
  hypo
gggcgtggtggctcacgcctgtaat

SEQ ID NO: 68147 - DNA, 24 bp, Homo sapiens
  chr4:26730621-26730645
  hypo
gcgagactccgtctcaaaaaaaga

SEQ ID NO: 68148 - DNA, 210 bp, Homo sapiens; identical to SEQ ID NO: 18646
  chr4:26823269-26823479
  hypo

SEQ ID NO: 68149 - DNA, 30 bp, Homo sapiens; identical to SEQ ID NO: 18647
  chr4:26856609-26856639
  hypo

SEQ ID NO: 68150 - DNA, 36 bp, Homo sapiens
  chr4:27486039-27486075
  hypo
caattaaaaacactttatggccgggcgcggtggctc

SEQ ID NO: 68151 - DNA, 157 bp, Homo sapiens
  chr4:35039894-35040051
  hypo
cgctgccccgctgccccgaccaagggtgccagattcctgggcttcaggaggagtctctgtgcagggccgcctggggccgtgtccccagggtctgtctggcgtcagggtgactgctgagccttctactcccgatggctcggcccggggagtgatccac

SEQ ID NO: 68152 - DNA, 799 bp, Homo sapiens; identical to SEQ ID NO: 3234
  chr4:36245408-36246207
  hypo

SEQ ID NO: 68153 - DNA, 140 bp, Homo sapiens; identical to SEQ ID NO: 3235
  chr4:36246257-36246397
  hypo

SEQ ID NO: 68154 - DNA, 524 bp, Homo sapiens; identical to SEQ ID NO: 3236
  chr4:37245836-37246360
  hypo

SEQ ID NO: 68155 - DNA, 210 bp, Homo sapiens; identical to SEQ ID NO: 3237
  chr4:37246489-37246699
  hypo

SEQ ID NO: 68156 - DNA, 30 bp, Homo sapiens; identical to SEQ ID NO: 3241
  chr4:37526315-37526345
  hypo

SEQ ID NO: 68157 - DNA, 38 bp, Homo sapiens
  chr4:37585277-37585315
  hypo
ctcgatctcctgacctcgtgatagcctggccttgttta

SEQ ID NO: 68158 - DNA, 87 bp, Homo sapiens; identical to SEQ ID NO: 3242
  chr4:37688563-37688650
  hypo

SEQ ID NO: 68159 - DNA, 30 bp, Homo sapiens; identical to SEQ ID NO: 40411
  chr4:37892178-37892208
  hypo

SEQ ID NO: 68160 - DNA, 30 bp, Homo sapiens
  chr4:38016031-38016061
  hypo
agtagccagcggggcgtcccgaaagagcat

SEQ ID NO: 68161 - DNA, 30 bp, Homo sapiens
  chr4:38016324-38016354
  hypo
ggcagccgggggtccgagagcccccgcccc

SEQ ID NO: 68162 - DNA, 50 bp, Homo sapiens
  chr4:38016578-38016628
  hypo
aactatgctcttcacggtaaaatatcacccagctcgtgcacagccccagt

SEQ ID NO: 68163 - DNA, 23 bp, Homo sapiens
  chr4:38198464-38198487
  hypo
caagactccgtctcaaaaaaaaa

SEQ ID NO: 68164 - DNA, 189 bp, Homo sapiens; identical to SEQ ID NO: 18654
  chr4:38278934-38279123
  hypo

SEQ ID NO: 68165 - DNA, 131 bp, Homo sapiens
  chr4:38313303-38313434
  hypo
gaggaattccatgcatctcctcgggcgtctagcaccgccagcgagcaagaacacacacctcattccctccgattaaaatgagtaaggcaaagggatgaaatgttcctttcggcactcactcaggtaaattg

SEQ ID NO: 68166 - DNA, 23 bp, Homo sapiens
  chr4:38570997-38571020
  hypo
gggtattggccaggtgcggtggc

SEQ ID NO: 68167 - DNA, 10 bp, Homo sapiens
  chr4:38623532-38623542
  hypo
gagcaagact

SEQ ID NO: 68168 - DNA, 22 bp, Homo sapiens
  chr4:38704219-38704241
  hypo
ttaccggcgtgagtcactgtgc

SEQ ID NO: 68169 - DNA, 207 bp, Homo sapiens
  chr4:38729966-38730173
  hypo
gttgaggaacaagggctggagcggtgtctccaaggtcacgaagctagtaagagtgggtatagatcgcagatgcagtggctggtcttaaccgttaagggagagctacgaagtcccacgtgtggacagtaagtactcagtaaaagtacactgttactgttactgctgctgccattgtgctggacagccggggaaagtgaggggcagaga

SEQ ID NO: 68170 - DNA, 30 bp, Homo sapiens; identical to SEQ ID NO: 18656
  chr4:38825649-38825679
  hypo

SEQ ID NO: 68171 - DNA, 615 bp, Homo sapiens; identical to SEQ ID NO: 3248
  chr4:38868923-38869538
  hypo

SEQ ID NO: 68172 - DNA, 87 bp, Homo sapiens; identical to SEQ ID NO: 3250
  chr4:39183809-39183896
  hypo

SEQ ID NO: 68173 - DNA, 18 bp, Homo sapiens
  chr4:39447434-39447452
  hypo
cccggcctggatttttta

SEQ ID NO: 68174 - DNA, 540 bp, Homo sapiens
  chr4:39447938-39448478
  hypo
ttgtttttcacagcccgagtctgtggcttcgtccccacagttcagcgatcctcatctgtacgtgtggaacgccactggcaacagactgttgcaccgagtggaaggggtgaggctgaaaacacgacccgctcaatgcacagattttgtaaacatcaaaaaacaacttgagatgttggcaagaatgaaagtcacccactaccggtttgctctggattgggcctcggtccttcccactggcaacctgtccgcggtgaaccgacaggccctgaggtactacaggtgcgtggtcagtgaggggctgaagcttggcatctccgcgatggtcaccctgtattatccgacccacgcccacctaggcctccccgagcctctgttgcatgccgacgggtggctgaacccatcgacggccgaggccttccaggcctacgctgggctgtgcttccaggagctgggggacctggtgaagctctggatcaccatcaacgagcctaaccggctaagtgacatctacaaccgctctggcaacgacacctacggggc

SEQ ID NO: 68175 - DNA, 154 bp, Homo sapiens
  chr4:39481995-39482149
  hypo
ggaggatgcgccgacgccccgagcgcccggccctccgcagcagcccggcagactgcctctgtcatcaggaccctccgtccacgtcccctgtgcggccagcgtcagagccatggcgatggaggagaggaagcccgagaccgaggcaacgagagca

SEQ ID NO: 68176 - DNA, 250 bp, Homo sapiens; identical to SEQ ID NO: 40426
  chr4:39529694-39529944
  hypo

SEQ ID NO: 68177 - DNA, 121 bp, Homo sapiens; identical to SEQ ID NO: 18662
  chr4:39623587-39623708
  hypo

SEQ ID NO: 68178 - DNA, 38 bp, Homo sapiens
  chr4:39629632-39629670
  hypo
aatcctaaaaaaaaggctaggcgtgggggctcacgcct

SEQ ID NO: 68179 - DNA, 98 bp, Homo sapiens; identical to SEQ ID NO: 18663
  chr4:39745201-39745299
  hypo

SEQ ID NO: 68180 - DNA, 40 bp, Homo sapiens; identical to SEQ ID NO: 18664
  chr4:39761180-39761220
  hypo

SEQ ID NO: 68181 - DNA, 255 bp, Homo sapiens
  chr4:39773068-39773323
  hypo
gggcaaccctggcccggttccgcgcgctgtttttttttaatcccctattttccccacccccgcggggccggaagcgccccccacacacgggcagagccagggcagcatgtaggcgcagggcgggagggtgtatagggcgcgctcgcgctggcggggccggctccacgtgggcgtaaaggggtaggggcgggagcggctcgtgcggtgtgttccaggcctcgcgcgcgcggcgacggcgtcggctaggactcaaac

SEQ ID NO: 68182 - DNA, 23 bp, Homo sapiens
  chr4:39787827-39787850
  hypo
gcgacagagcaagactgtctcaa

SEQ ID NO: 68183 - DNA, 80 bp, Homo sapiens
  chr4:39816676-39816756
  hypo
gctgggcaagaaaagacgagaaagttttcctgtcgatgtggcctcttggaggctgaactgtgtggcaatgtaactagaaa

SEQ ID NO: 68184 - DNA, 30 bp, Homo sapiens
  chr4:39827465-39827495
  hypo
gaagcctgcgcttctcagattcactactgg

SEQ ID NO: 68185 - DNA, 38 bp, Homo sapiens; identical to SEQ ID NO: 18665
  chr4:39913157-39913195
  hypo

SEQ ID NO: 68186 - DNA, 256 bp, Homo sapiens
  chr4:39937633-39937889
  hypo
aagacttctaattcgcgataaaaggaacctgacagaagcaaggcgcaaatggggagcagagaggactaaaaagcaaaaggaggaaacttatgagggtgataagttcactttaattgaagtgatggtttcaatgctgtgtatgtatgtcaaaacttgtcaggttgttattccccgacagcaattctctgacaccaaataggtgtcctacatttcaattcagttctgacactacccaccttagcgcagaaccccacag

SEQ ID NO: 68187 - DNA, 18 bp, Homo sapiens
  chr4:39946776-39946794
  hypo
gcataaaaatctaaatgc

SEQ ID NO: 68188 - DNA, 31 bp, Homo sapiens; identical to SEQ ID NO: 18667
  chr4:39953928-39953959
  hypo

SEQ ID NO: 68189 - DNA, 39 bp, Homo sapiens; identical to SEQ ID NO: 18668
  chr4:39964134-39964173
  hypo

SEQ ID NO: 68190 - DNA, 84 bp, Homo sapiens; identical to SEQ ID NO: 18669
  chr4:39972694-39972778
  hypo

SEQ ID NO: 68191 - DNA, 105 bp, Homo sapiens; identical to SEQ ID NO: 18670
  chr4:40161796-40161901
  hypo

SEQ ID NO: 68192 - DNA, 24 bp, Homo sapiens
  chr4:40394501-40394525
  hypo
agcgaaactccgtctcaaaaaaaa

SEQ ID NO: 68193 - DNA, 25 bp, Homo sapiens
  chr4:40492626-40492651
  hypo
attaaaaatacaaaaattagccggg

SEQ ID NO: 68194 - DNA, 84 bp, Homo sapiens
  chr4:40492770-40492854
  hypo
aagagagaaaaaaaatctaaataaatggaaagacactgcttgttcatgaatagaagactgaacgctgctaaaatgacaatactc

SEQ ID NO: 68195 - DNA, 31 bp, Homo sapiens; identical to SEQ ID NO: 18673
  chr4:40510717-40510748
  hypo

SEQ ID NO: 68196 - DNA, 30 bp, Homo sapiens; identical to SEQ ID NO: 40433
  chr4:40569239-40569269
  hypo

SEQ ID NO: 68197 - DNA, 40 bp, Homo sapiens
  chr4:40625665-40625705
  hypo
cacaggcatgaaccaccacgctcagctcttcactctccct

SEQ ID NO: 68198 - DNA, 30 bp, Homo sapiens; identical to SEQ ID NO: 40436
  chr4:40751828-40751858
  hypo

SEQ ID NO: 68199 - DNA, 495 bp, Homo sapiens; identical to SEQ ID NO: 40437
  chr4:40752078-40752573
  hypo

SEQ ID NO: 68200 - DNA, 41 bp, Homo sapiens
  chr4:40823879-40823920
  hypo
taactcaccatgcaggcggcctgcaccgcctcagacacgtt

SEQ ID NO: 68201 - DNA, 101 bp, Homo sapiens; identical to SEQ ID NO: 18674
  chr4:40857393-40857494
  hypo

SEQ ID NO: 68202 - DNA, 30 bp, Homo sapiens; identical to SEQ ID NO: 18675
  chr4:40888204-40888234
  hypo

SEQ ID NO: 68203 - DNA, 30 bp, Homo sapiens; identical to SEQ ID NO: 18676
  chr4:40921156-40921186
  hypo

SEQ ID NO: 68204 - DNA, 40 bp, Homo sapiens
  chr4:40983408-40983448
  hypo
gagacagagcaagccagaattaattcgaatccagaatgat

SEQ ID NO: 68205 - DNA, 31 bp, Homo sapiens; identical to SEQ ID NO: 40438
  chr4:41003481-41003512
  hypo

SEQ ID NO: 68206 - DNA, 189 bp, Homo sapiens; identical to SEQ ID NO: 18678
  chr4:41012739-41012928
  hypo

SEQ ID NO: 68207 - DNA, 31 bp, Homo sapiens; identical to SEQ ID NO: 18679
  chr4:41111870-41111901
  hypo

SEQ ID NO: 68208 - DNA, 89 bp, Homo sapiens
  chr4:41167663-41167752
  hypo
gcctcaagagacaagacgtcaatttataacccaaggtatgcccactatgaaactctctacacctggggagttttcggccacttttacaa

SEQ ID NO: 68209 - DNA, 31 bp, Homo sapiens; identical to SEQ ID NO: 3253
  chr4:41168397-41168428
  hypo

SEQ ID NO: 68210 - DNA, 35 bp, Homo sapiens
  chr4:41198149-41198184
  hypo
tggtcgacagagcaagactccgtctcaaaaaaaaa

SEQ ID NO: 68211 - DNA, 139 bp, Homo sapiens; identical to SEQ ID NO: 3254
  chr4:41216264-41216403
  hypo

SEQ ID NO: 68212 - DNA, 316 bp, Homo sapiens; identical to SEQ ID NO: 3255
  chr4:41218382-41218698
  hypo

SEQ ID NO: 68213 - DNA, 788 bp, Homo sapiens; identical to SEQ ID NO: 3257
  chr4:41259085-41259873
  hypo

SEQ ID NO: 68214 - DNA, 36 bp, Homo sapiens
  chr4:41317296-41317332
  hypo
acagacaatgtaggctgggcacggtggctcacgccc

SEQ ID NO: 68215 - DNA, 380 bp, Homo sapiens; identical to SEQ ID NO: 40444
  chr4:41362382-41362762
  hypo

SEQ ID NO: 68216 - DNA, 1058 bp, Homo sapiens; identical to SEQ ID NO: 40445
  chr4:41362780-41363838
  hypo

SEQ ID NO: 68217 - DNA, 30 bp, Homo sapiens
  chr4:41505266-41505296
  hypo
catctcggaattaaccgaatggccaggtct

SEQ ID NO: 68218 - DNA, 30 bp, Homo sapiens
  chr4:41643092-41643122
  hypo
gggtaattccatcccggccctcaaaaatgc

SEQ ID NO: 68219 - DNA, 512 bp, Homo sapiens; identical to SEQ ID NO: 40457
  chr4:41883399-41883911
  hypo

SEQ ID NO: 68220 - DNA, 71 bp, Homo sapiens; identical to SEQ ID NO: 40458
  chr4:41884450-41884521
  hypo

SEQ ID NO: 68221 - DNA, 31 bp, Homo sapiens
  chr4:41993804-41993835
  hypo
acctcctgaaagaagtcggaagttgcagtca

SEQ ID NO: 68222 - DNA, 32 bp, Homo sapiens
  chr4:41994107-41994139
  hypo
attgtaaaccttaggacgctgaggtgggtgga

SEQ ID NO: 68223 - DNA, 30 bp, Homo sapiens; identical to SEQ ID NO: 40462
  chr4:42119644-42119674
  hypo

SEQ ID NO: 68224 - DNA, 450 bp, Homo sapiens; identical to SEQ ID NO: 3265
  chr4:42152961-42153411
  hypo

SEQ ID NO: 68225 - DNA, 41 bp, Homo sapiens; identical to SEQ ID NO: 3266
  chr4:42153591-42153632
  hypo

SEQ ID NO: 68226 - DNA, 1123 bp, Homo sapiens; identical to SEQ ID NO: 40465
  chr4:42153881-42155004
  hypo

SEQ ID NO: 68227 - DNA, 2289 bp, Homo sapiens; identical to SEQ ID NO: 40466
  chr4:42398814-42401103
  hypo

SEQ ID NO: 68228 - DNA, 30 bp, Homo sapiens; identical to SEQ ID NO: 18691
  chr4:42429057-42429087
  hypo

SEQ ID NO: 68229 - DNA, 269 bp, Homo sapiens; identical to SEQ ID NO: 40467
  chr4:42657888-42658157
  hypo

SEQ ID NO: 68230 - DNA, 36 bp, Homo sapiens; identical to SEQ ID NO: 3270
  chr4:42659637-42659673
  hypo

SEQ ID NO: 68231 - DNA, 30 bp, Homo sapiens; identical to SEQ ID NO: 3271
  chr4:43770052-43770082
  hypo

SEQ ID NO: 68232 - DNA, 31 bp, Homo sapiens; identical to SEQ ID NO: 18694
  chr4:44520583-44520614
  hypo

SEQ ID NO: 68233 - DNA, 30 bp, Homo sapiens; identical to SEQ ID NO: 3276
  chr4:44833239-44833269
  hypo

SEQ ID NO: 68234 - DNA, 24 bp, Homo sapiens
  chr4:46067748-46067772
  hypo
tttttttttgagacagagtctcgc

SEQ ID NO: 68235 - DNA, 182 bp, Homo sapiens
  chr4:47427737-47427919
  hypo
tgagacgagtggctcggaagtgctcacgagcgtgagcgaccccaaggccaccatgtactcctatgacagcgccagcatccagtaccgcaagcccctgagcagccgcgaggcctacgggcgcgccctggaccggcacggggtacccagcaaggggcgcatccgcaggcgtgcctcccagctca

SEQ ID NO: 68236 - DNA, 30 bp, Homo sapiens; identical to SEQ ID NO: 3282
  chr4:47569090-47569120
  hypo

SEQ ID NO: 68237 - DNA, 29 bp, Homo sapiens
  chr4:47788255-47788284
  hypo
agaatagggcactcagcagggcgcggtgg

SEQ ID NO: 68238 - DNA, 31 bp, Homo sapiens
  chr4:48016911-48016942
  hypo
gggctaggtggctcacgcctgtaatcccagc

SEQ ID NO: 68239 - DNA, 151 bp, Homo sapiens
  chr4:48017181-48017332
  hypo
gagactccgtctcaaaaaaaaccaaaccaagccaaacaaacaaacaagcaaacaaaaagaagtctaagttttaaggcttgttatggaaaattggcataaatctccctcgctttcaactttcacctattccactctccgtggtgttccttct

SEQ ID NO: 68240 - DNA, 30 bp, Homo sapiens; identical to SEQ ID NO: 3284
  chr4:48226149-48226179
  hypo

SEQ ID NO: 68241 - DNA, 32 bp, Homo sapiens
  chr4:48378916-48378948
  hypo
cgcgcccggccgactttttttttttttttttt

SEQ ID NO: 68242 - DNA, 228 bp, Homo sapiens
  chr4:48496109-48496337
  hypo
tcccccagagttgtaaacaaacgagatgttcctgcccagtaaaacttcgccacgtggaccctaaacggccccaccgtcaagatttgtgcggtagatgcaaaggcaaacgcctgtcctgtgacagcactttcagcttcaaatacatcatttaggtgaaagtcagtgttgctgtgcatgcgctgatggagtagacgagtgagcttttccgtgcctctcctccacctctcc

SEQ ID NO: 68243 - DNA, 30 bp, Homo sapiens
  chr4:48502161-48502191
  hypo
cttcgttttcggaagcggactcagcttctt

SEQ ID NO: 68244 - DNA, 152 bp, Homo sapiens; identical to SEQ ID NO: 18701
  chr4:48572778-48572930
  hypo

SEQ ID NO: 68245 - DNA, 149 bp, Homo sapiens; identical to SEQ ID NO: 18702
  chr4:48678684-48678833
  hypo

SEQ ID NO: 68246 - DNA, 137 bp, Homo sapiens; identical to SEQ ID NO: 18703
  chr4:48679319-48679456
  hypo

SEQ ID NO: 68247 - DNA, 197 bp, Homo sapiens; identical to SEQ ID NO: 18704
  chr4:48679695-48679892
  hypo

SEQ ID NO: 68248 - DNA, 19 bp, Homo sapiens
  chr4:48848471-48848490
  hypo
gtgttggtagttggccggg

SEQ ID NO: 68249 - DNA, 45 bp, Homo sapiens
  chr4:48987267-48987312
  hypo
gcctgggctacagagcaggactccgtctcaaacacaacaaaacag

SEQ ID NO: 68250 - DNA, 20 bp, Homo sapiens
  chr4:52759861-52759881
  hypo
acaggcgtaagccaccgtgc

SEQ ID NO: 68251 - DNA, 22 bp, Homo sapiens
  chr4:52892694-52892716
  hypo
ttacaggcgtaagtcatcgcgc

SEQ ID NO: 68252 - DNA, 43 bp, Homo sapiens
  chr4:53201116-53201159
  hypo
atcttactttaaatacagatgcggaagttctaaataaaatgtc

SEQ ID NO: 68253 - DNA, 47 bp, Homo sapiens; identical to SEQ ID NO: 18706
  chr4:53230796-53230843
  hypo

SEQ ID NO: 68254 - DNA, 30 bp, Homo sapiens; identical to SEQ ID NO: 18707
  chr4:53522806-53522836
  hypo

SEQ ID NO: 68255 - DNA, 44 bp, Homo sapiens; identical to SEQ ID NO: 18708
  chr4:53587808-53587852
  hypo

SEQ ID NO: 68256 - DNA, 30 bp, Homo sapiens
  chr4:53690609-53690639
  hypo
tggcccgggtgtgccgagtggagaatgaag

SEQ ID NO: 68257 - DNA, 395 bp, Homo sapiens
  chr4:53739881-53740276
  hypo
atcactaattggactcgccaaaagacagactgtcgccttcaggaaaataaaaaaactttttttttttttttttaagaatcacagcaatccaagcaaagtacctcactgagtaggtatcaagacccttcaggcagaattccatcattctcgcaattagtgacagggacgctggttgtggaggagtatttggagtggtggcagaaaattgcatcggcatttccagcttgagtaggtcttatcttcttagcggatgctcagaagccaaggtctggatgcagtcggtcagttgcaaataacagctcaggaatgttaagtggcttcaggagtcgtgtggacagcacgattacctaacaacaggagagggcaaacacaccgcagggaattaggggggccaa

SEQ ID NO: 68258 - DNA, 30 bp, Homo sapiens; identical to SEQ ID NO: 18709
  chr4:53744058-53744088
  hypo

SEQ ID NO: 68259 - DNA, 33 bp, Homo sapiens
  chr4:54229704-54229737
  hypo
tctgtatgtttaaaaaaagggcgcggtggctca

SEQ ID NO: 68260 - DNA, 33 bp, Homo sapiens
  chr4:54229976-54230009
  hypo
gagagagactccgtctcaaaaaaaaaaaaaaaa

SEQ ID NO: 68261 - DNA, 40 bp, Homo sapiens
  chr4:54317440-54317480
  hypo
aagctactcattttcgatcgggggttgttttttttttttc

SEQ ID NO: 68262 - DNA, 31 bp, Homo sapiens; identical to SEQ ID NO: 18710
  chr4:54357937-54357968
  hypo

SEQ ID NO: 68263 - DNA, 31 bp, Homo sapiens; identical to SEQ ID NO: 18711
  chr4:54459311-54459342
  hypo

SEQ ID NO: 68264 - DNA, 38 bp, Homo sapiens
  chr4:54500676-54500714
  hypo
ctgggattacaggtgtgagccaccgcccccaggctcag

SEQ ID NO: 68265 - DNA, 31 bp, Homo sapiens
  chr4:54775816-54775847
  hypo
ataagaatcagatggccgggcggatcgcttg

SEQ ID NO: 68266 - DNA, 71 bp, Homo sapiens; identical to SEQ ID NO: 18712
  chr4:54858182-54858253
  hypo

SEQ ID NO: 68267 - DNA, 31 bp, Homo sapiens
  chr4:55021856-55021887
  hypo
accatatcggtatctacgttcagagcctaca

SEQ ID NO: 68268 - DNA, 1576 bp, Homo sapiens; identical to SEQ ID NO: 40521
  chr4:55523741-55525317
  hypo

SEQ ID NO: 68269 - DNA, 230 bp, Homo sapiens; identical to SEQ ID NO: 3297
  chr4:55561713-55561943
  hypo

SEQ ID NO: 68270 - DNA, 92 bp, Homo sapiens; identical to SEQ ID NO: 3298
  chr4:55564468-55564560
  hypo

SEQ ID NO: 68271 - DNA, 30 bp, Homo sapiens; identical to SEQ ID NO: 3299
  chr4:55565886-55565916
  hypo

SEQ ID NO: 68272 - DNA, 76 bp, Homo sapiens; identical to SEQ ID NO: 3300
  chr4:55569949-55570025
  hypo

SEQ ID NO: 68273 - DNA, 30 bp, Homo sapiens; identical to SEQ ID NO: 3301
  chr4:55573295-55573325
  hypo

SEQ ID NO: 68274 - DNA, 30 bp, Homo sapiens; identical to SEQ ID NO: 3302
  chr4:55589780-55589810
  hypo

SEQ ID NO: 68275 - DNA, 46 bp, Homo sapiens; identical to SEQ ID NO: 3303
  chr4:55592093-55592139
  hypo

SEQ ID NO: 68276 - DNA, 303 bp, Homo sapiens; identical to SEQ ID NO: 3304
  chr4:55593415-55593718
  hypo

SEQ ID NO: 68277 - DNA, 30 bp, Homo sapiens; identical to SEQ ID NO: 3305
  chr4:55594000-55594030
  hypo

SEQ ID NO: 68278 - DNA, 63 bp, Homo sapiens; identical to SEQ ID NO: 3306
  chr4:55595496-55595559
  hypo

SEQ ID NO: 68279 - DNA, 35 bp, Homo sapiens; identical to SEQ ID NO: 3307
  chr4:55598030-55598065
  hypo

SEQ ID NO: 68280 - DNA, 43 bp, Homo sapiens; identical to SEQ ID NO: 3308
  chr4:55599305-55599348
  hypo

SEQ ID NO: 68281 - DNA, 97 bp, Homo sapiens; identical to SEQ ID NO: 3309
  chr4:55602682-55602779
  hypo

SEQ ID NO: 68282 - DNA, 30 bp, Homo sapiens; identical to SEQ ID NO: 3310
  chr4:55604624-55604654
  hypo

SEQ ID NO: 68283 - DNA, 36 bp, Homo sapiens
  chr4:56213495-56213531
  hypo
cccttaagatgcatcttaggccgggcgcagtggctc

SEQ ID NO: 68284 - DNA, 36 bp, Homo sapiens
  chr4:56213650-56213686
  hypo
gcagggcttggtggcgtgtgcctgtagtgccagcta

SEQ ID NO: 68285 - DNA, 104 bp, Homo sapiens
  chr4:56222929-56223033
  hypo
gcaatggcgcgatcttggctcactgcaacctccgcctcctgggtagcctagagggatttttaaaacataaattactacctcacgtcactcatctgcccaaatgg

SEQ ID NO: 68286 - DNA, 35 bp, Homo sapiens; identical to SEQ ID NO: 3314
  chr4:56412389-56412424
  hypo

SEQ ID NO: 68287 - DNA, 30 bp, Homo sapiens; identical to SEQ ID NO: 18730
  chr4:56458607-56458637
  hypo

SEQ ID NO: 68288 - DNA, 1204 bp, Homo sapiens; identical to SEQ ID NO: 40542
  chr4:56501660-56502864
  hypo

SEQ ID NO: 68289 - DNA, 19 bp, Homo sapiens
  chr4:56508595-56508614
  hypo
ctaattggccgggcacggt

SEQ ID NO: 68290 - DNA, 30 bp, Homo sapiens; identical to SEQ ID NO: 40547
  chr4:56751724-56751754
  hypo

SEQ ID NO: 68291 - DNA, 27 bp, Homo sapiens
  chr4:56785799-56785826
  hypo
ctttgggaggccaaggcgggcggctca

SEQ ID NO: 68292 - DNA, 30 bp, Homo sapiens; identical to SEQ ID NO: 40548
  chr4:56915885-56915915
  hypo

SEQ ID NO: 68293 - DNA, 106 bp, Homo sapiens
  chr4:56936356-56936462
  hypo
cagggcagccagctccgtccctctcctctcctcccggttccacgccttctccacgttgtgctttgcctactctccttccacttcctctctccctatctgagtcctt

SEQ ID NO: 68294 - DNA, 21 bp, Homo sapiens
  chr4:56963539-56963560
  hypo
gagaatgtgacctgtcctcta

SEQ ID NO: 68295 - DNA, 20 bp, Homo sapiens
  chr4:56963619-56963639
  hypo
ggcctggttagtacttggat

SEQ ID NO: 68296 - DNA, 39 bp, Homo sapiens
  chr4:57051387-57051426
  hypo
gctgggattacaggcgtgagccagcgcacccggccttca

SEQ ID NO: 68297 - DNA, 32 bp, Homo sapiens
  chr4:57064131-57064163
  hypo
tgcacccagccgggtgatttttttttaattta

SEQ ID NO: 68298 - DNA, 90 bp, Homo sapiens; identical to SEQ ID NO: 18736
  chr4:57082784-57082874
  hypo

SEQ ID NO: 68299 - DNA, 30 bp, Homo sapiens; identical to SEQ ID NO: 18737
  chr4:57178036-57178066
  hypo

SEQ ID NO: 68300 - DNA, 30 bp, Homo sapiens
  chr4:57178303-57178333
  hypo
agacttctttggagcgattgtaccaaaact

SEQ ID NO: 68301 - DNA, 30 bp, Homo sapiens
  chr4:57180009-57180039
  hypo
gtccttttctccattcgcacgacagagtct

SEQ ID NO: 68302 - DNA, 413 bp, Homo sapiens
  chr4:57180269-57180682
  hypo
gcgaggacaagccaacgtggcacgaagaggaacccaatccgctggattccgaggaagagagaagacgccaagaagactactggcgagaactggaggccaagtgcaagcggcaaaaggcggaagcagccgagaagagacgcctagaggagcagaggctgcaggcgctggagaggaggctttgggaagagaacagaaggcaggagctcttggaggaggagggcgaggggcaggagccgcctctagaggcggaaagggcgccgcgggaagagcagcagcggagcctggaagcgccaggttgggaggacgcggagcggagggagcgtgaggagcgcgagcgcctggaggcggaggaggagcgaaggcgtctgcaggcccaggcccaagcggaggagaggcggcggctggaggaggac

SEQ ID NO: 68303 - DNA, 1875 bp, Homo sapiens
  chr4:57180918-57182793
  hypo
gcagctcagtgagcttctgaacgactttgaggagaggctcgaagaccaggaacgcctgaaacccgaaggacaaagagaacactccgaggagccaggtatttgcgaggagcagaacccagaggccgagcggcgaagagagcagcagggaaggagcggggatttccagggggccgatcgtcctgggcccgaggaaaagagagaagaaggggacacggagcctctcctgaaacaagaggggccggtggaagccgcgcagcctccggtggagaggaaagaagccgccgcccttgaacaaggccgcaaggtggaggagctgcggtggcaggaggtggacgagagacagaccatgccccggccctacacgttccaggtgtcctccggagggaagcagattctctttcccaaagtcaacctgagccccgtgacgcccgcaaaggacacggggctcaccgctgctccccaggaaccaaaggcccccaaagccagcccagtccagcacgccctaccgtcgtccctgagcgttccccacaccgccattctggtcacgggcgcgcagctctgtggcccggcagtcaacctgagccagatcaaggacaccgcgtgcaagtccctcctgggcttggaggagaagaagcacgcggaagccccagctggggagaaccctccccgaggccccggcgacgcgagggcgggcagcgggaaggctaagccccgccaggagtctcccagcagcgcgtccgcactcgcagaatgggcttccattcggtccagaatcctgaagaacgcagagagtgacccgcgcagcagcgagagggaccagttgaggcccggtgatgagtccactcccaggggccggtgtgattcccgcgggaaccaacggaagactccgccagtcaatgcaaagttctctattatgcctgcctggcagaaattttccgatggtggcacggagacctccaaacagagcacggaagctgaaagcatacgaaaaagacccatgctgggacccagcgaagagacagccccccagcctcctcctgctggtgttcgcgagctcgggaagggtccggagaagtcggagatgcaccgggagcccgcagacaccaccgagggatgcaaatttgccaaagacctcccgtctttccttgtcccaagccttccttaccctccgcagaaagtggtggcccacacagagttcacgacctcgtcggacagcgagactgcaaacgggatagcaaagccagaccctgtgatgccaggtggagaggaaaaagcctcaccgtttggaataaaattgagaaggaccaactattccttgcgcttcaactgcgaccaacaggcagaacagaagaagaagaagaggcacagcagcaccggagacagcgcggatgcagggccgcctgcagcggggagcgctcgtggagagaaagagatggagggtgtggccctcaagcatggtccatccctcccccaagagcggaagcaagccccttccacccggagggactccgctgaaccttccagcagccgctctgttcctgtggcccaccctgggcctccaccggccagcagccagaccccggctccggagcacgacaaggcagcaaacaaaatgccactggcacaaaagccagcactggctcccaagcccaccagtcagaccccaccagcatccccactttccaaactgagcaggccctacttggtagagctgctgtctcgccgagcggggaggccggacccagagccaagtgagccgtccaaggaggaccaggagagcagtgaccgccggccaccctcgcccccaggccccgaggaaaggaagggacagaagagggacgaggaggaagaggcgacagagaggaaacctgcttc

SEQ ID NO: 68304 - DNA, 30 bp, Homo sapiens
  chr4:57252456-57252486
  hypo
gcaacatacaggtagcgcagaagggtacct

SEQ ID NO: 68305 - DNA, 19 bp, Homo sapiens
  chr4:57274916-57274935
  hypo
ttcaaaaaaaaaaaaaaaa

SEQ ID NO: 68306 - DNA, 610 bp, Homo sapiens; identical to SEQ ID NO: 40552
  chr4:57396556-57397166
  hypo

SEQ ID NO: 68307 - DNA, 31 bp, Homo sapiens; identical to SEQ ID NO: 18742
  chr4:57400757-57400788
  hypo

SEQ ID NO: 68308 - DNA, 158 bp, Homo sapiens; identical to SEQ ID NO: 3320
  chr4:57521505-57521663
  hypo

SEQ ID NO: 68309 - DNA, 682 bp, Homo sapiens; identical to SEQ ID NO: 3321
  chr4:57521700-57522382
  hypo

SEQ ID NO: 68310 - DNA, 396 bp, Homo sapiens; identical to SEQ ID NO: 40556
  chr4:57522419-57522815
  hypo

SEQ ID NO: 68311 - DNA, 575 bp, Homo sapiens; identical to SEQ ID NO: 40557
  chr4:57687531-57688106
  hypo

SEQ ID NO: 68312 - DNA, 115 bp, Homo sapiens
  chr4:57812271-57812386
  hypo
cacaccactgcagatcctgggcgacaaagctagaccccgtctcaaaaaaaaagaatacgtcttaacgttttggatttgtttgaaaatgttcttcgttcttgggcctgtgagcctg

SEQ ID NO: 68313 - DNA, 90 bp, Homo sapiens
  chr4:57813164-57813254
  hypo
tagatggcttacagcaggcagcgcaagatccgtccaccccattcagataaagacagggatttcagggccgtggtccctcaagtcaatgaa

SEQ ID NO: 68314 - DNA, 44 bp, Homo sapiens; identical to SEQ ID NO: 18747
  chr4:57921950-57921994
  hypo

SEQ ID NO: 68315 - DNA, 30 bp, Homo sapiens; identical to SEQ ID NO: 3326
  chr4:57944966-57944996
  hypo

SEQ ID NO: 68316 - DNA, 1587 bp, Homo sapiens; identical to SEQ ID NO: 40562
  chr4:57975869-57977456
  hypo

SEQ ID NO: 68317 - DNA, 842 bp, Homo sapiens
  chr4:64214826-64215668
  hypo
ctccaccccatcctctggggccgcccttcctcggcgtccacggccccgcgggcagttacctgttctaggtgtttgtgccccccgactccggtaaaggtcctcagccccggcctgctacgtctcagctgctgcccgcgccaggtgagggctcagggctactggttggggctcccggcgcttggtgtctggctctgggagtgcgctgccgagaggattgggccggcaggcgttcggttccgggagggggcggcacgccgggaactgggcggcctaggctggctggttgtggcggtgacggcggctgtctctggggttctctgcccccagccggagccagtcggtgccctggcggtgagacgggcaagttgggctccctggcctcggggccaccccgactggggcggctggggcagagggacgatatttgctcactacccggtgtctgccgctcattctcaggaggatccgcccgctgtgactgctgagagggagtcgctgttggccagggtgaaccggccggccgagcatcagcccctggccgaacatgagggcaaagtggcagcgagggaggagaaggccaaggccaccaccagcgagggggcgcggggagagccatcctccctggtggtgcctacacgcagcatgccccaggtggctgtccccgtgaggcccttggcgctgcatctggcgcacaaggcgcgtgggcccgggggccctttcagcagggagccgcggtggccagtgccgccgctgctgcgggatccattggcctaggataccatggaggaggcggcagctggccctaaggaaaagcggcagccgcccctgctgctgcctaaggg

SEQ ID NO: 68318 - DNA, 173 bp, Homo sapiens; identical to SEQ ID NO: 40570
  chr4:66535574-66535747
  hypo

SEQ ID NO: 68319 - DNA, 617 bp, Homo sapiens; identical to SEQ ID NO: 3336
  chr4:66536013-66536630
  hypo

SEQ ID NO: 68320 - DNA, 30 bp, Homo sapiens; identical to SEQ ID NO: 18753
  chr4:68552347-68552377
  hypo

SEQ ID NO: 68321 - DNA, 218 bp, Homo sapiens; identical to SEQ ID NO: 18754
  chr4:70647969-70648187
  hypo

SEQ ID NO: 68322 - DNA, 30 bp, Homo sapiens
  chr4:71566509-71566539
  hypo
gacatgagcaacggcgcccggcctcaagtg

SEQ ID NO: 68323 - DNA, 17 bp, Homo sapiens
  chr4:71566848-71566865
  hypo
tgtttttttgagacaga

SEQ ID NO: 68324 - DNA, 76 bp, Homo sapiens; identical to SEQ ID NO: 18756
  chr4:71566924-71567000
  hypo

SEQ ID NO: 68325 - DNA, 39 bp, Homo sapiens
  chr4:71642191-71642230
  hypo
ttaattaaaaattaaagaggccgggagcagtggctcacg

SEQ ID NO: 68326 - DNA, 37 bp, Homo sapiens
  chr4:71706052-71706089
  hypo
gcgcagtgactcattcgtagtgactcattcttgtaat

SEQ ID NO: 68327 - DNA, 30 bp, Homo sapiens
  chr4:71706631-71706661
  hypo
ggttataaaaaaatcgttgggataatatca

SEQ ID NO: 68328 - DNA, 17 bp, Homo sapiens
  chr4:71729528-71729545
  hypo
tacaaaaagtttagccg

SEQ ID NO: 68329 - DNA, 16 bp, Homo sapiens
  chr4:71729664-71729680
  hypo
gcgacagagtgagact

SEQ ID NO: 68330 - DNA, 38 bp, Homo sapiens
  chr4:71756388-71756426
  hypo
ttacaggcatgagccaccatacccggctagtatcgtgt

SEQ ID NO: 68331 - DNA, 730 bp, Homo sapiens; identical to SEQ ID NO: 3339
  chr4:71767777-71768507
  hypo

SEQ ID NO: 68332 - DNA, 39 bp, Homo sapiens
  chr4:71774022-71774061
  hypo
gcatgagccactgtgcccggccctctttttttttttttt

SEQ ID NO: 68333 - DNA, 150 bp, Homo sapiens; identical to SEQ ID NO: 18761
  chr4:71857968-71858118
  hypo

SEQ ID NO: 68334 - DNA, 22 bp, Homo sapiens
  chr4:71894331-71894353
  hypo
cgagacagtcttgctccgtcgc

SEQ ID NO: 68335 - DNA, 23 bp, Homo sapiens
  chr4:71925576-71925599
  hypo
ggtttgctcgttaaatttattta

SEQ ID NO: 68336 - DNA, 84 bp, Homo sapiens
  chr4:71986659-71986743
  hypo
ggaaccagggcagcacgccgccctcgcgggccagcacgagttccgggtgggcacgcgctcggtaggtcccgcacttggagtggc

SEQ ID NO: 68337 - DNA, 39 bp, Homo sapiens
  chr4:72004453-72004492
  hypo
gtaaagaatcagtaagttggccgggcgcggtggctcacg

SEQ ID NO: 68338 - DNA, 37 bp, Homo sapiens
  chr4:74402450-74402487
  hypo
gtgatccgcccgcctcggcctcccaaagtgctgggat

SEQ ID NO: 68339 - DNA, 22 bp, Homo sapiens
  chr4:74468477-74468499
  hypo
aagtctgtgatgtccaaggcac

SEQ ID NO: 68340 - DNA, 22 bp, Homo sapiens
  chr4:74468798-74468820
  hypo
cgtctcaaaagaagaaagaaag

SEQ ID NO: 68341 - DNA, 344 bp, Homo sapiens; identical to SEQ ID NO: 40584
  chr4:74702405-74702749
  hypo

SEQ ID NO: 68342 - DNA, 30 bp, Homo sapiens; identical to SEQ ID NO: 3345
  chr4:74730215-74730245
  hypo

SEQ ID NO: 68343 - DNA, 210 bp, Homo sapiens; identical to SEQ ID NO: 18764
  chr4:75137754-75137964
  hypo

SEQ ID NO: 68344 - DNA, 143 bp, Homo sapiens
  chr4:75241343-75241486
  hypo
cctgaccagcgattcttaaggttaacaggatagtggatgtaatatttctctggagatagattttttattcattggatcgcattcactcttctaccctagtttgcaagtgtttgggagcagacgcatattgcaggaacatttga

SEQ ID NO: 68345 - DNA, 35 bp, Homo sapiens; identical to SEQ ID NO: 18766
  chr4:75949440-75949475
  hypo

SEQ ID NO: 68346 - DNA, 46 bp, Homo sapiens
  chr4:76394242-76394288
  hypo
tccagcatcctgttcccgtaggctgccaatcatctttttttttttt

SEQ ID NO: 68347 - DNA, 38 bp, Homo sapiens
  chr4:76553300-76553338
  hypo
attttttttttttttttgagacggagtcttgctctgtc

SEQ ID NO: 68348 - DNA, 38 bp, Homo sapiens
  chr4:76553577-76553615
  hypo
cgtgagccaccgcgcccggccttgaaattttttactca

SEQ ID NO: 68349 - DNA, 145 bp, Homo sapiens; identical to SEQ ID NO: 18767
  chr4:76554709-76554854
  hypo

SEQ ID NO: 68350 - DNA, 30 bp, Homo sapiens
  chr4:76602459-76602489
  hypo
gagatgactacatgcggctgggcgcagtgg

SEQ ID NO: 68351 - DNA, 30 bp, Homo sapiens
  chr4:76632510-76632540
  hypo
cttaagacaattatcggcagcgccgtggct

SEQ ID NO: 68352 - DNA, 145 bp, Homo sapiens
  chr4:76912702-76912847
  hypo
ctgaaaagaaccgtggcgctagataacactattccctcttaggaggaaaaaagagcaacgagggtcatataagttaatgtgtatgattttagatatgtttttattttggttttggttgtttcaacttagcgtgacccatacaagg

SEQ ID NO: 68353 - DNA, 38 bp, Homo sapiens; identical to SEQ ID NO: 18769
  chr4:76917506-76917544
  hypo

SEQ ID NO: 68354 - DNA, 39 bp, Homo sapiens; identical to SEQ ID NO: 18770
  chr4:77156170-77156209
  hypo

SEQ ID NO: 68355 - DNA, 941 bp, Homo sapiens; identical to SEQ ID NO: 40603
  chr4:77227270-77228211
  hypo

SEQ ID NO: 68356 - DNA, 37 bp, Homo sapiens; identical to SEQ ID NO: 18772
  chr4:77448699-77448736
  hypo

SEQ ID NO: 68357 - DNA, 31 bp, Homo sapiens
  chr4:77475935-77475966
  hypo
ctgttagcaaccaggccgcacagtaggagtg

SEQ ID NO: 68358 - DNA, 99 bp, Homo sapiens
  chr4:77596031-77596130
  hypo
cttaccttctccccactcatcctccccattccccccactcttcagcaactgtggcatactagtctctggtcttagggttcataccggctgccaggggtc

SEQ ID NO: 68359 - DNA, 62 bp, Homo sapiens
  chr4:77661924-77661986
  hypo
ctgagcggaggagcgtcggacagcggccgtggcccccagaggccggacgctcggctcctccg

SEQ ID NO: 68360 - DNA, 30 bp, Homo sapiens
  chr4:77662404-77662434
  hypo
aacgaggtggggatcgtggaggaggccgaa

SEQ ID NO: 68361 - DNA, 30 bp, Homo sapiens
  chr4:77662881-77662911
  hypo
ggggacctgcttagcggagcaaacggtgga

SEQ ID NO: 68362 - DNA, 165 bp, Homo sapiens
  chr4:78034395-78034560
  hypo
gcctgggctggggccggctgcaggctgcaggctgcctcgcgcggtgccggagtcctcggccaccgtccctgcccccgctcctgccgtggcttcggcctccaagcagttgaggggccgtgccagcgcctcggtcgccacggtcttagcttcggtgtccatgccagg

SEQ ID NO: 68363 - DNA, 31 bp, Homo sapiens; identical to SEQ ID NO: 18773
  chr4:78100428-78100459
  hypo

SEQ ID NO: 68364 - DNA, 106 bp, Homo sapiens
  chr4:78584405-78584511
  hypo
agaacaattaaaaagaattctcgcccggtcttgcactgggaagctatgcttgcacttgagccttcttcaaatctgtttctatcccaagtggcttatcaaaaaaact

SEQ ID NO: 68365 - DNA, 30 bp, Homo sapiens
  chr4:78692522-78692552
  hypo
ctttctatcaatatcgggaagaagaaaaca

SEQ ID NO: 68366 - DNA, 24 bp, Homo sapiens
  chr4:78727284-78727308
  hypo
aaaattaacttcaggccgggcaca

SEQ ID NO: 68367 - DNA, 30 bp, Homo sapiens
  chr4:78879938-78879968
  hypo
ctgtgtgagtcttagcgccaggggacacta

SEQ ID NO: 68368 - DNA, 49 bp, Homo sapiens
  chr4:78924252-78924301
  hypo
aaagtaagttctccaaatccacgaaaccgttccaggtactcattacagc

SEQ ID NO: 68369 - DNA, 631 bp, Homo sapiens; identical to SEQ ID NO: 40617
  chr4:78979945-78980576
  hypo

SEQ ID NO: 68370 - DNA, 134 bp, Homo sapiens
  chr4:79345198-79345332
  hypo
gagagccctgtcagtgatatacgactcacccgcattcaccgatttgtaggattttatgtactgtgataaaatgggttctgaatgaatgtattataaatcacgctaactgctgcgatataaaattattccactat

SEQ ID NO: 68371 - DNA, 179 bp, Homo sapiens
  chr4:79689599-79689778
  hypo
gttttcttttctctgctcacacgcagtgtcgtggcagcaggcacagtcttgagatgcagaaggacagcggcgagcttgtggacctgtacatgcggcagaaagtctctgctagtaaccgcgtcaccggtgccaagaaccatgcatccatccagatgaacgtggtggaggctgacaaggtc

SEQ ID NO: 68372 - DNA, 93 bp, Homo sapiens; identical to SEQ ID NO: 18776
  chr4:79702946-79703039
  hypo

SEQ ID NO: 68373 - DNA, 151 bp, Homo sapiens; identical to SEQ ID NO: 18777
  chr4:79828973-79829124
  hypo

SEQ ID NO: 68374 - DNA, 124 bp, Homo sapiens; identical to SEQ ID NO: 18778
  chr4:79832670-79832794
  hypo

SEQ ID NO: 68375 - DNA, 30 bp, Homo sapiens
  chr4:80978554-80978584
  hypo
ccagagccttatatacgttttaaaagtaac

SEQ ID NO: 68376 - DNA, 970 bp, Homo sapiens; identical to SEQ ID NO: 40622
  chr4:81105508-81106478
  hypo

SEQ ID NO: 68377 - DNA, 888 bp, Homo sapiens; identical to SEQ ID NO: 40623
  chr4:81123015-81123903
  hypo

SEQ ID NO: 68378 - DNA, 782 bp, Homo sapiens; identical to SEQ ID NO: 40624
  chr4:81124121-81124903
  hypo

SEQ ID NO: 68379 - DNA, 98 bp, Homo sapiens
  chr4:81205170-81205268
  hypo
gaatagtcaatgtgtggtcttcgaaagtgatgtcagcatagcagtccgggcctaaatgcaggctggcaaggtgtatcgtagacagggtgaaagggatg

SEQ ID NO: 68380 - DNA, 408 bp, Homo sapiens; identical to SEQ ID NO: 18781
  chr4:81307564-81307972
  hypo

SEQ ID NO: 68381 - DNA, 45 bp, Homo sapiens; identical to SEQ ID NO: 18782
  chr4:81605693-81605738
  hypo

SEQ ID NO: 68382 - DNA, 30 bp, Homo sapiens
  chr4:82098555-82098585
  hypo
ttttaaaaatctggtaagtttcggccaggc

SEQ ID NO: 68383 - DNA, 285 bp, Homo sapiens; identical to SEQ ID NO: 3377
  chr4:82135919-82136204
  hypo

SEQ ID NO: 68384 - DNA, 312 bp, Homo sapiens; identical to SEQ ID NO: 40634
  chr4:82136243-82136555
  hypo

SEQ ID NO: 68385 - DNA, 30 bp, Homo sapiens; identical to SEQ ID NO: 18785
  chr4:82350868-82350898
  hypo

SEQ ID NO: 68386 - DNA, 30 bp, Homo sapiens
  chr4:83265407-83265437
  hypo
tgagccaccgtgcccggccggcctccgatt

SEQ ID NO: 68387 - DNA, 30 bp, Homo sapiens
  chr4:83273342-83273372
  hypo
ttttaccccctccccgcacatttataaagt

SEQ ID NO: 68388 - DNA, 321 bp, Homo sapiens
  chr4:83323436-83323757
  hypo
tgcaaatgatctagacgcttgctggagttgacttgtttcatggtgagggctccttgaaacactggcaccaccaggtacttcaggtcggtggaagcaatctcttccaaatcttcatttcggctgaacaactcgagctgcgataacatttcggcagccttctcaaggagatccatccaggcccttgaacaccttctcctggactatccgggaatcggcaggttcagtcgctacttctacttcgtccagaatctgtttgccggtttccagcagctcggcggggggcagcgggagcagtagttcgtcttcagcagccatcttggg

SEQ ID NO: 68389 - DNA, 34 bp, Homo sapiens
  chr4:83448626-83448660
  hypo
agtgtgtttagctccacgacgaaaggtaccctct

SEQ ID NO: 68390 - DNA, 31 bp, Homo sapiens; identical to SEQ ID NO: 18787
  chr4:83496633-83496664
  hypo

SEQ ID NO: 68391 - DNA, 156 bp, Homo sapiens
  chr4:83551710-83551866
  hypo
tcatgttcaagcacatgacaacgtatatttgacgtattttagctatagcgattaaatcacatgtccacactctaatgttaaatcgtagtaatattgacttgaaaagttttttaggctgggcgcgctggctcccagctactcgggaggctgaggcag

SEQ ID NO: 68392 - DNA, 33 bp, Homo sapiens; identical to SEQ ID NO: 18788
  chr4:83700297-83700330
  hypo

SEQ ID NO: 68393 - DNA, 46 bp, Homo sapiens; identical to SEQ ID NO: 18789
  chr4:83808871-83808917
  hypo

SEQ ID NO: 68394 - DNA, 47 bp, Homo sapiens
  chr4:83839358-83839405
  hypo
gaaggaaagacttggcgctttggacagttcaacgtcagtatggtgtc

SEQ ID NO: 68395 - DNA, 30 bp, Homo sapiens
  chr4:84258456-84258486
  hypo
tactaatatggaaacggggggccgggtgtg

SEQ ID NO: 68396 - DNA, 86 bp, Homo sapiens; identical to SEQ ID NO: 40648
  chr4:84292569-84292655
  hypo

SEQ ID NO: 68397 - DNA, 36 bp, Homo sapiens
  chr4:84468674-84468710
  hypo
gattacaggcgtgagctactgcgcctggcctctgct

SEQ ID NO: 68398 - DNA, 28 bp, Homo sapiens
  chr4:84581095-84581123
  hypo
gtcaacaattgggggcttggccgggtgc

SEQ ID NO: 68399 - DNA, 31 bp, Homo sapiens
  chr4:85464134-85464165
  hypo
gctgggatcaaaggcacgtgagccaccgcgc

SEQ ID NO: 68400 - DNA, 385 bp, Homo sapiens; identical to SEQ ID NO: 40665
  chr4:85503525-85503910
  hypo

SEQ ID NO: 68401 - DNA, 909 bp, Homo sapiens; identical to SEQ ID NO: 40666
  chr4:85503985-85504894
  hypo

SEQ ID NO: 68402 - DNA, 31 bp, Homo sapiens
  chr4:85547362-85547393
  hypo
aataccacaggctgatcgtagaacccaactg

SEQ ID NO: 68403 - DNA, 31 bp, Homo sapiens
  chr4:85634474-85634505
  hypo
tagattttcatagttgcgtctaccctcccat

SEQ ID NO: 68404 - DNA, 150 bp, Homo sapiens; identical to SEQ ID NO: 3390
  chr4:85886792-85886942
  hypo

SEQ ID NO: 68405 - DNA, 640 bp, Homo sapiens; identical to SEQ ID NO: 40668
  chr4:85887144-85887784
  hypo

SEQ ID NO: 68406 - DNA, 476 bp, Homo sapiens; identical to SEQ ID NO: 40669
  chr4:85887986-85888462
  hypo

SEQ ID NO: 68407 - DNA, 31 bp, Homo sapiens
  chr4:85948837-85948868
  hypo
atatgtgaaacatggccgggtgcagtggctc

SEQ ID NO: 68408 - DNA, 162 bp, Homo sapiens; identical to SEQ ID NO: 18794
  chr4:86167316-86167478
  hypo

SEQ ID NO: 68409 - DNA, 47 bp, Homo sapiens; identical to SEQ ID NO: 40670
  chr4:86396142-86396189
  hypo

SEQ ID NO: 68410 - DNA, 161 bp, Homo sapiens; identical to SEQ ID NO: 18795
  chr4:86801947-86802108
  hypo

SEQ ID NO: 68411 - DNA, 102 bp, Homo sapiens
  chr4:87468462-87468564
  hypo
aggtgtggagggagaggcgctggggggaaccaggactgcgcgagttccgggtgggcgtgggctctgcggacccgcactcccagcagtcggccggccccaccg

SEQ ID NO: 68412 - DNA, 37 bp, Homo sapiens
  chr4:87797487-87797524
  hypo
tggctgcagcgcagcgacggccggggccgggagcggg

SEQ ID NO: 68413 - DNA, 40 bp, Homo sapiens; identical to SEQ ID NO: 18797
  chr4:87922649-87922689
  hypo

SEQ ID NO: 68414 - DNA, 30 bp, Homo sapiens
  chr4:87923914-87923944
  hypo
ctgttagcaggagccgggtccagggattct

SEQ ID NO: 68415 - DNA, 30 bp, Homo sapiens; identical to SEQ ID NO: 18798
  chr4:87968907-87968937
  hypo

SEQ ID NO: 68416 - DNA, 30 bp, Homo sapiens
  chr4:87986370-87986400
  hypo
agcaggtcacgtctacgtgagtggcggcaa

SEQ ID NO: 68417 - DNA, 144 bp, Homo sapiens; identical to SEQ ID NO: 18799
  chr4:87993063-87993207
  hypo

SEQ ID NO: 68418 - DNA, 84 bp, Homo sapiens; identical to SEQ ID NO: 18800
  chr4:87993506-87993590
  hypo

SEQ ID NO: 68419 - DNA, 41 bp, Homo sapiens
  chr4:88009707-88009748
  hypo
taatatagcatgctgtggggtcgcagattgctggtagagtt

SEQ ID NO: 68420 - DNA, 41 bp, Homo sapiens
  chr4:88010167-88010208
  hypo
tacaggtgtgagctgctgcgcccggccgcatgtcgagtatt

SEQ ID NO: 68421 - DNA, 30 bp, Homo sapiens; identical to SEQ ID NO: 18801
  chr4:88020841-88020871
  hypo

SEQ ID NO: 68422 - DNA, 182 bp, Homo sapiens
  chr4:88053370-88053552
  hypo
ttttctgtagtatgatagtcacgtgcagtttcacttctgtctttgttcatagcatgcgttgccagtccattttgaacatggcgatgtttcgttgtaaaaaagacatagcaataaagtattctcgtactcttaataaacacttcgagagttcttccaaagtcgcccaggcaccttctccatgc

SEQ ID NO: 68423 - DNA, 79 bp, Homo sapiens; identical to SEQ ID NO: 18802
  chr4:88258990-88259069
  hypo

SEQ ID NO: 68424 - DNA, 140 bp, Homo sapiens; identical to SEQ ID NO: 18803
  chr4:88296897-88297037
  hypo

SEQ ID NO: 68425 - DNA, 26 bp, Homo sapiens
  chr4:88377921-88377947
  hypo
aatacaaaaaaattagctgggcgtgg

SEQ ID NO: 68426 - DNA, 25 bp, Homo sapiens
  chr4:88378066-88378091
  hypo
cagcgagactccatctaaaaataaa

SEQ ID NO: 68427 - DNA, 30 bp, Homo sapiens
  chr4:88379301-88379331
  hypo
catttagagtgtttcgcatcagaataacat

SEQ ID NO: 68428 - DNA, 46 bp, Homo sapiens
  chr4:88899512-88899558
  hypo
catctggtctcactgtttttccgccttctttttttttttttttttt

SEQ ID NO: 68429 - DNA, 183 bp, Homo sapiens; identical to SEQ ID NO: 18804
  chr4:88941047-88941230
  hypo

SEQ ID NO: 68430 - DNA, 146 bp, Homo sapiens; identical to SEQ ID NO: 18805
  chr4:88957313-88957459
  hypo

SEQ ID NO: 68431 - DNA, 28 bp, Homo sapiens
  chr4:89292173-89292201
  hypo
tagagacggggttttgccatattggcca

SEQ ID NO: 68432 - DNA, 843 bp, Homo sapiens; identical to SEQ ID NO: 40685
  chr4:89377923-89378766
  hypo

SEQ ID NO: 68433 - DNA, 25 bp, Homo sapiens
  chr4:89378831-89378856
  hypo
cggcgcacctgagctgtcttttatc

SEQ ID NO: 68434 - DNA, 41 bp, Homo sapiens
  chr4:89660211-89660252
  hypo
atctgtttgaccagccggtacctgtcgtatagtggcttcat

SEQ ID NO: 68435 - DNA, 30 bp, Homo sapiens
  chr4:89798028-89798058
  hypo
accgcgcccagaccgcgtcacttctttatt

SEQ ID NO: 68436 - DNA, 27 bp, Homo sapiens
  chr4:89912577-89912604
  hypo
gactccgtctcaaaataaaaaataata

SEQ ID NO: 68437 - DNA, 32 bp, Homo sapiens
  chr4:90043370-90043402
  hypo
ttagaaattccaggggctggccgggcgcggtg

SEQ ID NO: 68438 - DNA, 12 bp, Homo sapiens
  chr4:90043641-90043653
  hypo
cactccagcctg

SEQ ID NO: 68439 - DNA, 22 bp, Homo sapiens
  chr4:90745218-90745240
  hypo
taacaggcgtgagccaccgcgc

SEQ ID NO: 68440 - DNA, 181 bp, Homo sapiens; identical to SEQ ID NO: 18809
  chr4:91052007-91052188
  hypo

SEQ ID NO: 68441 - DNA, 37 bp, Homo sapiens
  chr4:91052427-91052464
  hypo
aggcgtgagctaccacgcctggcttatattgcctttt

SEQ ID NO: 68442 - DNA, 30 bp, Homo sapiens
  chr4:91062076-91062106
  hypo
aagtgctgggattaccggagtgagccaccg

SEQ ID NO: 68443 - DNA, 17 bp, Homo sapiens
  chr4:91179361-91179378
  hypo
tttactcatttaaaaaa

SEQ ID NO: 68444 - DNA, 30 bp, Homo sapiens; identical to SEQ ID NO: 59735
  chr4:91281716-91281746
  hypo

SEQ ID NO: 68445 - DNA, 30 bp, Homo sapiens; identical to SEQ ID NO: 18810
  chr4:91640181-91640211
  hypo

SEQ ID NO: 68446 - DNA, 149 bp, Homo sapiens; identical to SEQ ID NO: 18811
  chr4:91640270-91640419
  hypo

SEQ ID NO: 68447 - DNA, 170 bp, Homo sapiens; identical to SEQ ID NO: 40702
  chr4:91760070-91760240
  hypo

SEQ ID NO: 68448 - DNA, 93 bp, Homo sapiens; identical to SEQ ID NO: 18812
  chr4:95127584-95127677
  hypo

SEQ ID NO: 68449 - DNA, 31 bp, Homo sapiens; identical to SEQ ID NO: 18813
  chr4:95257392-95257423
  hypo

SEQ ID NO: 68450 - DNA, 30 bp, Homo sapiens; identical to SEQ ID NO: 3418
  chr4:95293542-95293572
  hypo

SEQ ID NO: 68451 - DNA, 27 bp, Homo sapiens
  chr4:95461290-95461317
  hypo
tttttttttgagatggagtctcgctct

SEQ ID NO: 68452 - DNA, 86 bp, Homo sapiens
  chr4:95461556-95461642
  hypo
ccgcacccagcctattattcttttaataaagatgaggaagtagaggagcagtgcctaaataatttgtctaacgtcacacagccagg

SEQ ID NO: 68453 - DNA, 32 bp, Homo sapiens; identical to SEQ ID NO: 18816
  chr4:95578062-95578094
  hypo

SEQ ID NO: 68454 - DNA, 67 bp, Homo sapiens
  chr4:95636991-95637058
  hypo
acacttgctggcttcaagtctcgctctttgctcaatgagactgggcgtgaagctatttagcttctat

SEQ ID NO: 68455 - DNA, 38 bp, Homo sapiens
  chr4:99178270-99178308
  hypo
tgggattacaggcatgagccaccgcgcctggcccttat

SEQ ID NO: 68456 - DNA, 338 bp, Homo sapiens
  chr4:99399704-99400042
  hypo
cccctacaggagctacaaatacgagtaaccaggtaagaagagggttcaaccaaaaaatcactctgctcgtcccatgcacactctcggcatgatgtacagagtaggccaatagttcgctggcattcacttactgcgggatctttagtgcagcaggagaatggaacgccacatcgctctcgacttgcattggaatctgtgcaattgaagtaaatatttaggttccaatcatcagctccaaaagccccacagcactgccactagagcaaacaggaaagaattagaacatcccaacttggaggcaagcagtcacctacactcacacccgccgaacgacacca

SEQ ID NO: 68457 - DNA, 30 bp, Homo sapiens; identical to SEQ ID NO: 18817
  chr4:99430509-99430539
  hypo

SEQ ID NO: 68458 - DNA, 31 bp, Homo sapiens; identical to SEQ ID NO: 18818
  chr4:99835221-99835252
  hypo

SEQ ID NO: 68459 - DNA, 31 bp, Homo sapiens; identical to SEQ ID NO: 18819
  chr4:99836004-99836035
  hypo

SEQ ID NO: 68460 - DNA, 78 bp, Homo sapiens
  chr4:99936194-99936272
  hypo
agctaccacacactccaaatccgtcgcatgtgaagaacacttaagtggaaaggggacaatctgggcctctggcttacc

SEQ ID NO: 68461 - DNA, 18 bp, Homo sapiens
  chr4:99936331-99936349
  hypo
ttaaccaggcatttgcat

SEQ ID NO: 68462 - DNA, 30 bp, Homo sapiens; identical to SEQ ID NO: 18820
  chr4:99955879-99955909
  hypo

SEQ ID NO: 68463 - DNA, 30 bp, Homo sapiens; identical to SEQ ID NO: 40726
  chr4:100239303-100239333
  hypo

SEQ ID NO: 68464 - DNA, 888 bp, Homo sapiens
  chr4:100573737-100574625
  hypo
cagccacagaggccgcgctgctcctgaggaggctctgctccaccctggccccaacacccccacattttaagtccaggaaagttgaccagcgcccaaagcccacttcggagagcgtggtggaggactcccgggagctgatgttcagagcctcaaagtaggggtaagccaggctccggaaggcccgggaggtcaggttacgcacctctttgtccgcatcgtccagttcgctcacggcactggaggctccgctggagtagtccaccagctccttcgcccggatggccccgcacctggtttgcaggcgagcaggtacagcaatgaatttctttgcatggtcctgagccactgctgcagccgggttttgcttcagcgaacttgaattgtgttcagcagctgtagagacgcggaggctcatgtcgccttcatgcttggcagcataaataatgttttgctttgcacgcacgttgctaggctcatttatagcccgggaagccggtttgattgataggaggatctggcttgctgcactcccacagctgcttgcggcggcggctgctgcccctgaagctgcctccggggtctcaggcaagggctcagtcaggggggcagtgccaggcccagtgggtgggggagtggggccactgtcagaggggccactgcccacttcggtgctgctggtgtcgcggccactgcggcctgcattggggcgggccaggtcgctgcttgtagggctgggcgtccgggtggtgttggtgctgggagtggtgctgaggtagcagctgttgtcgtcgtcctcttcggtcagactggtgatgtcccctggggtctcgtcgctgccaccaaaggaagcataatccacgaacgagtagatcacgttgttgtcctcga

SEQ ID NO: 68465 - DNA, 81 bp, Homo sapiens
  chr4:100866006-100866087
  hypo
aacaggcgtgagccaccgcgcccagcctaatcagtatttttttaaagaggaattcttcacgttacaacataaatgaaactt

SEQ ID NO: 68466 - DNA, 231 bp, Homo sapiens; identical to SEQ ID NO: 3423
  chr4:100867971-100868202
  hypo

SEQ ID NO: 68467 - DNA, 30 bp, Homo sapiens
  chr4:102246960-102246990
  hypo
acagttaaaatgtgcgcattcattaacatg

SEQ ID NO: 68468 - DNA, 30 bp, Homo sapiens
  chr4:102266944-102266974
  hypo
ttatcatcccgtaggcggcgaagaggaggc

SEQ ID NO: 68469 - DNA, 44 bp, Homo sapiens
  chr4:102332862-102332906
  hypo
atttttaactctcatgtcaagtcacattgcggccttgcttcacc

SEQ ID NO: 68470 - DNA, 30 bp, Homo sapiens
  chr4:103240088-103240118
  hypo
tgtcctcgtgttcagcgcgttgacattttt

SEQ ID NO: 68471 - DNA, 30 bp, Homo sapiens; identical to SEQ ID NO: 40743
  chr4:103266892-103266922
  hypo

SEQ ID NO: 68472 - DNA, 28 bp, Homo sapiens
  chr4:103350982-103351010
  hypo
gggagcctgaggcaggagaatcgcttga

SEQ ID NO: 68473 - DNA, 200 bp, Homo sapiens; identical to SEQ ID NO: 18825
  chr4:103421131-103421331
  hypo

SEQ ID NO: 68474 - DNA, 43 bp, Homo sapiens; identical to SEQ ID NO: 18826
  chr4:103494438-103494481
  hypo

SEQ ID NO: 68475 - DNA, 28 bp, Homo sapiens
  chr4:103794986-103795014
  hypo
attggcaaaacaggccaggtacggtgtg

SEQ ID NO: 68476 - DNA, 82 bp, Homo sapiens; identical to SEQ ID NO: 18827
  chr4:103806370-103806452
  hypo

SEQ ID NO: 68477 - DNA, 24 bp, Homo sapiens
  chr4:103929957-103929981
  hypo
tttttttttttttttttgagacgg

SEQ ID NO: 68478 - DNA, 324 bp, Homo sapiens
  chr4:103941523-103941847
  hypo
tccagtaatagaatccgcgcttcctataaaagacaaaaacaactgttattggagaaagtgtaaacttcttagaaagacaaactgccctttcctatctaatgtttctcctgacactcaatgtttactcttgaacactgtattcctttttgcctcagtgcgttctgtaaagttaattcctctaccggagtgttctttttcttagtcatcatctaagatctgatccaaattaccgttccttcttgggtaacttaaatacgaaattatctttttattggttttgttgacgttgttgagacagggtctcactctattaccccggctgga

SEQ ID NO: 68479 - DNA, 808 bp, Homo sapiens; identical to SEQ ID NO: 40752
  chr4:103997330-103998138
  hypo

SEQ ID NO: 68480 - DNA, 30 bp, Homo sapiens; identical to SEQ ID NO: 3433
  chr4:104251138-104251168
  hypo

SEQ ID NO: 68481 - DNA, 82 bp, Homo sapiens
  chr4:104854485-104854567
  hypo
taaacagatattatcattaaccgtctccaggaataaattctaatttaaaagtgcatttaaaaaaagatcagccccgggcgcg

SEQ ID NO: 68482 - DNA, 471 bp, Homo sapiens; identical to SEQ ID NO: 40759
  chr4:106067030-106067501
  hypo

SEQ ID NO: 68483 - DNA, 296 bp, Homo sapiens; identical to SEQ ID NO: 3435
  chr4:106067840-106068136
  hypo

SEQ ID NO: 68484 - DNA, 278 bp, Homo sapiens; identical to SEQ ID NO: 3436
  chr4:106068587-106068865
  hypo

SEQ ID NO: 68485 - DNA, 30 bp, Homo sapiens; identical to SEQ ID NO: 40762
  chr4:106084762-106084792
  hypo

SEQ ID NO: 68486 - DNA, 147 bp, Homo sapiens; identical to SEQ ID NO: 3437
  chr4:106111515-106111662
  hypo

SEQ ID NO: 68487 - DNA, 4462 bp, Homo sapiens; identical to SEQ ID NO: 3438
  chr4:106155052-106159514
  hypo

SEQ ID NO: 68488 - DNA, 241 bp, Homo sapiens; identical to SEQ ID NO: 3439
  chr4:106159633-106159874
  hypo

SEQ ID NO: 68489 - DNA, 181 bp, Homo sapiens; identical to SEQ ID NO: 3440
  chr4:106160113-106160294
  hypo

SEQ ID NO: 68490 - DNA, 121 bp, Homo sapiens; identical to SEQ ID NO: 3441
  chr4:106161133-106161254
  hypo

SEQ ID NO: 68491 - DNA, 2722 bp, Homo sapiens; identical to SEQ ID NO: 3442
  chr4:106161373-106164095
  hypo

SEQ ID NO: 68492 - DNA, 231 bp, Homo sapiens; identical to SEQ ID NO: 3443
  chr4:106164711-106164942
  hypo

SEQ ID NO: 68493 - DNA, 178 bp, Homo sapiens; identical to SEQ ID NO: 3444
  chr4:106180761-106180939
  hypo

SEQ ID NO: 68494 - DNA, 108 bp, Homo sapiens; identical to SEQ ID NO: 3445
  chr4:106182910-106183018
  hypo

SEQ ID NO: 68495 - DNA, 162 bp, Homo sapiens; identical to SEQ ID NO: 3446
  chr4:106190751-106190913
  hypo

SEQ ID NO: 68496 - DNA, 377 bp, Homo sapiens; identical to SEQ ID NO: 3447
  chr4:106193707-106194084
  hypo

SEQ ID NO: 68497 - DNA, 3102 bp, Homo sapiens; identical to SEQ ID NO: 3448
  chr4:106196197-106199299
  hypo

SEQ ID NO: 68498 - DNA, 1602 bp, Homo sapiens; identical to SEQ ID NO: 3449
  chr4:106199358-106200960
  hypo

SEQ ID NO: 68499 - DNA, 35 bp, Homo sapiens; identical to SEQ ID NO: 18849
  chr4:106335455-106335490
  hypo

SEQ ID NO: 68500 - DNA, 215 bp, Homo sapiens
  chr4:106335549-106335764
  hypo
ccacccactcggcctggcaggctgcgctccgctcgtgctaagcctggatcccacgcatgccaagggcaagccaggtatggagtggcaaagggcaggcaactccgggcaccagcacaggcaccggctccctgcgaggctgcagctggaccaggcaaaccccgcaagtggcttccactagaggctccaggaaacacggtggcacttagaagcttgga

SEQ ID NO: 68501 - DNA, 30 bp, Homo sapiens; identical to SEQ ID NO: 18851
  chr4:106336030-106336060
  hypo

SEQ ID NO: 68502 - DNA, 58 bp, Homo sapiens
  chr4:106631891-106631949
  hypo
atgttagccatttgcgctgtcgatcactgttaattatgaggtcgggtttagctgaagg

SEQ ID NO: 68503 - DNA, 36 bp, Homo sapiens
  chr4:106689193-106689229
  hypo
aatttttttttttttttgagacggagtctctccctg

SEQ ID NO: 68504 - DNA, 35 bp, Homo sapiens
  chr4:106689468-106689503
  hypo
aagtcatcgcgcccggccaataatttttatattct

SEQ ID NO: 68505 - DNA, 30 bp, Homo sapiens; identical to SEQ ID NO: 18853
  chr4:107219812-107219842
  hypo

SEQ ID NO: 68506 - DNA, 219 bp, Homo sapiens; identical to SEQ ID NO: 18854
  chr4:108132181-108132400
  hypo

SEQ ID NO: 68507 - DNA, 44 bp, Homo sapiens; identical to SEQ ID NO: 18855
  chr4:108446494-108446538
  hypo

SEQ ID NO: 68508 - DNA, 31 bp, Homo sapiens
  chr4:108789574-108789605
  hypo
tcttaaagttgctgcccgccaggtgtggtgg

SEQ ID NO: 68509 - DNA, 30 bp, Homo sapiens; identical to SEQ ID NO: 40789
  chr4:108853189-108853219
  hypo

SEQ ID NO: 68510 - DNA, 82 bp, Homo sapiens; identical to SEQ ID NO: 18856
  chr4:108975406-108975488
  hypo

SEQ ID NO: 68511 - DNA, 30 bp, Homo sapiens
  chr4:109002142-109002172
  hypo
gcgcggcaggcctcccgagctccgctggca

SEQ ID NO: 68512 - DNA, 207 bp, Homo sapiens
  chr4:109002483-109002690
  hypo
tttgtttggaggcaacgctttccaaggaggctgagtccatcgcccgatggtgtggctggtccggccggggcacagcgcagagctcctacccgggactctctctgacacctagtgtgggagccaggcacactgcacagacagacacatggctgaggtatgcaccctcctagccaaccaaaaggcaagcagaggcgcacaggatgcaag

SEQ ID NO: 68513 - DNA, 169 bp, Homo sapiens; identical to SEQ ID NO: 18857
  chr4:109009507-109009676
  hypo

SEQ ID NO: 68514 - DNA, 531 bp, Homo sapiens; identical to SEQ ID NO: 40793
  chr4:109089486-109090017
  hypo

SEQ ID NO: 68515 - DNA, 1973 bp, Homo sapiens; identical to SEQ ID NO: 40794
  chr4:109092612-109094585
  hypo

SEQ ID NO: 68516 - DNA, 21 bp, Homo sapiens
  chr4:109099899-109099920
  hypo
gccaccgcgcccagcaactta

SEQ ID NO: 68517 - DNA, 25 bp, Homo sapiens
  chr4:109117462-109117487
  hypo
aagcgaaactttgtctcaaacaaac

SEQ ID NO: 68518 - DNA, 31 bp, Homo sapiens; identical to SEQ ID NO: 18859
  chr4:109295090-109295121
  hypo

SEQ ID NO: 68519 - DNA, 31 bp, Homo sapiens; identical to SEQ ID NO: 18860
  chr4:109680328-109680359
  hypo

SEQ ID NO: 68520 - DNA, 41 bp, Homo sapiens
  chr4:110314767-110314808
  hypo
atgcgtgagccaccgcgcccggcccctcctgtgtttttaac

SEQ ID NO: 68521 - DNA, 21 bp, Homo sapiens
  chr4:110344893-110344914
  hypo
tgaaagtaagcaggctgggca

SEQ ID NO: 68522 - DNA, 30 bp, Homo sapiens
  chr4:110352876-110352906
  hypo
gcacaaggcccgtgcgtctggggttcctgt

SEQ ID NO: 68523 - DNA, 30 bp, Homo sapiens
  chr4:110622406-110622436
  hypo
ccacgcccggcctgcgttaatatttaaaaa

SEQ ID NO: 68524 - DNA, 212 bp, Homo sapiens; identical to SEQ ID NO: 40807
  chr4:110651656-110651868
  hypo

SEQ ID NO: 68525 - DNA, 30 bp, Homo sapiens; identical to SEQ ID NO: 3472
  chr4:110686397-110686427
  hypo

SEQ ID NO: 68526 - DNA, 80 bp, Homo sapiens
  chr4:110735439-110735519
  hypo
taaaaagaccaacattcgttaaaatcaaattgcagcatttactaaactaaaagaaaaagaacaagtaaagtttcctctct

SEQ ID NO: 68527 - DNA, 20 bp, Homo sapiens
  chr4:110735818-110735838
  hypo
cgccccgcctacaaaggtat

SEQ ID NO: 68528 - DNA, 31 bp, Homo sapiens; identical to SEQ ID NO: 18863
  chr4:110974665-110974696
  hypo

SEQ ID NO: 68529 - DNA, 88 bp, Homo sapiens
  chr4:111019209-111019297
  hypo
aatatctgacctgcatcgtatctgtctacaagttagaaacattaaccgtgatagattcttcaagagttgaacacggacagaaaagaaa

SEQ ID NO: 68530 - DNA, 25 bp, Homo sapiens
  chr4:111042653-111042678
  hypo
accatcttggctaacacggtgaaac

SEQ ID NO: 68531 - DNA, 45 bp, Homo sapiens
  chr4:111096240-111096285
  hypo
atcaagacataagtatcggccagtcacagtggctcatgcctgtaa

SEQ ID NO: 68532 - DNA, 87 bp, Homo sapiens; identical to SEQ ID NO: 18865
  chr4:111097858-111097945
  hypo

SEQ ID NO: 68533 - DNA, 31 bp, Homo sapiens; identical to SEQ ID NO: 18866
  chr4:111109685-111109716
  hypo

SEQ ID NO: 68534 - DNA, 81 bp, Homo sapiens; identical to SEQ ID NO: 40810
  chr4:111117164-111117245
  hypo

SEQ ID NO: 68535 - DNA, 383 bp, Homo sapiens; identical to SEQ ID NO: 40813
  chr4:111119901-111120284
  hypo

SEQ ID NO: 68536 - DNA, 31 bp, Homo sapiens
  chr4:111135520-111135551
  hypo
agaaatagagagctaacggggtaaattcagc

SEQ ID NO: 68537 - DNA, 31 bp, Homo sapiens; identical to SEQ ID NO: 18868
  chr4:111147617-111147648
  hypo

SEQ ID NO: 68538 - DNA, 31 bp, Homo sapiens
  chr4:111214505-111214536
  hypo
agcatctctttggctccgcagccaaatggtc

SEQ ID NO: 68539 - DNA, 31 bp, Homo sapiens; identical to SEQ ID NO: 18869
  chr4:111320333-111320364
  hypo

SEQ ID NO: 68540 - DNA, 37 bp, Homo sapiens; identical to SEQ ID NO: 18870
  chr4:111383531-111383568
  hypo

SEQ ID NO: 68541 - DNA, 578 bp, Homo sapiens; identical to SEQ ID NO: 18871
  chr4:111508743-111509321
  hypo

SEQ ID NO: 68542 - DNA, 30 bp, Homo sapiens; identical to SEQ ID NO: 40819
  chr4:111539228-111539258
  hypo

SEQ ID NO: 68543 - DNA, 292 bp, Homo sapiens; identical to SEQ ID NO: 3483
  chr4:111543403-111543695
  hypo

SEQ ID NO: 68544 - DNA, 460 bp, Homo sapiens; identical to SEQ ID NO: 3484
  chr4:111543720-111544180
  hypo

SEQ ID NO: 68545 - DNA, 292 bp, Homo sapiens; identical to SEQ ID NO: 3485
  chr4:111544298-111544590
  hypo

SEQ ID NO: 68546 - DNA, 30 bp, Homo sapiens; identical to SEQ ID NO: 18875
  chr4:113199030-113199060
  hypo

SEQ ID NO: 68547 - DNA, 191 bp, Homo sapiens
  chr4:113276887-113277078
  hypo
gcccaaagagcaggcggaccccatccgtggggtaacagtttcctcctggagcacaaagcagcagactggaagtgggggcggaagtgcaccgcgctcaaccgcaactgcgcgcctcagtccgcgaagtctgaactgcctgacaaagggggacccggtggcagcgctcgactggagtcggttgaggtcctgag

SEQ ID NO: 68548 - DNA, 1938 bp, Homo sapiens; identical to SEQ ID NO: 40851
  chr4:113435423-113437361
  hypo

SEQ ID NO: 68549 - DNA, 1064 bp, Homo sapiens; identical to SEQ ID NO: 40852
  chr4:113437616-113438680
  hypo

SEQ ID NO: 68550 - DNA, 79 bp, Homo sapiens
  chr4:113559123-113559202
  hypo
tagcttctcaggaaaacgtgcatgtacctattaaaacattttgcgaggctgggcacggtggctcacgcctgtaatccca

SEQ ID NO: 68551 - DNA, 184 bp, Homo sapiens; identical to SEQ ID NO: 18880
  chr4:114417170-114417354
  hypo

SEQ ID NO: 68552 - DNA, 102 bp, Homo sapiens; identical to SEQ ID NO: 18881
  chr4:114528565-114528667
  hypo

SEQ ID NO: 68553 - DNA, 292 bp, Homo sapiens; identical to SEQ ID NO: 40865
  chr4:115520702-115520994
  hypo

SEQ ID NO: 68554 - DNA, 30 bp, Homo sapiens; identical to SEQ ID NO: 18883
  chr4:117520537-117520567
  hypo

SEQ ID NO: 68555 - DNA, 30 bp, Homo sapiens
  chr4:117626779-117626809
  hypo
gccatgtgtctgagcgagagcgtgactccc

SEQ ID NO: 68556 - DNA, 30 bp, Homo sapiens
  chr4:118497239-118497269
  hypo
cgcggtccatggaccgggccctcatgcgcg

SEQ ID NO: 68557 - DNA, 24 bp, Homo sapiens
  chr4:119275318-119275342
  hypo
tttaaataagccatctttagccgg

SEQ ID NO: 68558 - DNA, 39 bp, Homo sapiens
  chr4:119501590-119501629
  hypo
ctcccatagtgccgggataacaggcgtgagtcaccacgc

SEQ ID NO: 68559 - DNA, 334 bp, Homo sapiens; identical to SEQ ID NO: 3515
  chr4:120549977-120550311
  hypo

SEQ ID NO: 68560 - DNA, 1196 bp, Homo sapiens; identical to SEQ ID NO: 40882
  chr4:121843109-121844305
  hypo

SEQ ID NO: 68561 - DNA, 39 bp, Homo sapiens
  chr4:122165517-122165556
  hypo
gtgaaaacaaatactattggccgggcgcagtggctcacg

SEQ ID NO: 68562 - DNA, 18 bp, Homo sapiens
  chr4:122606040-122606058
  hypo
aaatatattttatggccg

SEQ ID NO: 68563 - DNA, 77 bp, Homo sapiens; identical to SEQ ID NO: 18889
  chr4:122615462-122615539
  hypo

SEQ ID NO: 68564 - DNA, 123 bp, Homo sapiens; identical to SEQ ID NO: 40889
  chr4:122685767-122685890
  hypo

SEQ ID NO: 68565 - DNA, 510 bp, Homo sapiens; identical to SEQ ID NO: 40890
  chr4:122686113-122686623
  hypo

SEQ ID NO: 68566 - DNA, 31 bp, Homo sapiens; identical to SEQ ID NO: 18891
  chr4:122854136-122854167
  hypo

SEQ ID NO: 68567 - DNA, 1902 bp, Homo sapiens; identical to SEQ ID NO: 40892
  chr4:122871294-122873196
  hypo

SEQ ID NO: 68568 - DNA, 35 bp, Homo sapiens; identical to SEQ ID NO: 18893
  chr4:122924454-122924489
  hypo

SEQ ID NO: 68569 - DNA, 30 bp, Homo sapiens
  chr4:123069703-123069733
  hypo
cttcagggaggccacgaaagccttatttaa

SEQ ID NO: 68570 - DNA, 308 bp, Homo sapiens
  chr4:123300365-123300673
  hypo
gctgtaggggggcacgggacagtaagggaggaggctgaactgcgcgattttacctggcttctccagaagggtaaggcggccagttggacccggtccttgtgttcggagaacagagtcacccaggcctcgaacgcctgcgatggtcggcgtctcttccctaggtgacgcaagacgcggagctcggctgcacgacgctggcgcaagcgcgggggcaagagcgccggcctccgagacggttagtgattggacgaagcagggcgcgggggcgcaagcccgggtcctgcaggggcgacgcgaggcctcttttg

SEQ ID NO: 68571 - DNA, 30 bp, Homo sapiens; identical to SEQ ID NO: 18896
  chr4:123664095-123664125
  hypo

SEQ ID NO: 68572 - DNA, 1323 bp, Homo sapiens; identical to SEQ ID NO: 40894
  chr4:123747725-123749048
  hypo

SEQ ID NO: 68573 - DNA, 223 bp, Homo sapiens
  chr4:124029141-124029364
  hypo
ggatgcctgggtgcagagtcacggctggacaactgcagtgagccccgccctcccaactcagtaggggccagggctcctgcccgttcgcagccttgacggcttggcagagcttgcaactctagccgcacctacccagtgcagcgggcgtcctcacagccgcgctccagacgggccgctgctgccatcattactcccaagtttcgggtcagaaataagtagaatt

SEQ ID NO: 68574 - DNA, 183 bp, Homo sapiens
  chr4:124036405-124036588
  hypo
tctggggcagatcgcgggccccaaacccagttgtcgggagcgccaggctgaacagtcactccgacgtggggtggatcctggggttgcagcgtcggtggcccgggctgagcctccagctgaggtgcaggaacttggagccgccagcagggtgggtgcggcgacagagtcgcttgccaggtctgg

SEQ ID NO: 68575 - DNA, 140 bp, Homo sapiens; identical to SEQ ID NO: 18899
  chr4:124106850-124106990
  hypo

SEQ ID NO: 68576 - DNA, 33 bp, Homo sapiens
  chr4:124313334-124313367
  hypo
tatttttttgaggcagagtctcgctctgcgccc

SEQ ID NO: 68577 - DNA, 1572 bp, Homo sapiens; identical to SEQ ID NO: 40897
  chr4:124317730-124319302
  hypo

SEQ ID NO: 68578 - DNA, 41 bp, Homo sapiens
  chr4:124335274-124335315
  hypo
tgaaaaacaatgtttgcaggccgggcgcggcagctcacgcc

SEQ ID NO: 68579 - DNA, 14 bp, Homo sapiens
  chr4:124335554-124335568
  hypo
tgcctcaaaaaaaa

SEQ ID NO: 68580 - DNA, 488 bp, Homo sapiens; identical to SEQ ID NO: 40900
  chr4:124426728-124427216
  hypo

SEQ ID NO: 68581 - DNA, 49 bp, Homo sapiens
  chr4:124468501-124468550
  hypo
agacgggataggcggcggcctgctgctgcgaaggcgcgaccacgtgacc

SEQ ID NO: 68582 - DNA, 169 bp, Homo sapiens
  chr4:124468771-124468940
  hypo
tccaggaggaaaaggcggagcgggttttatgggagctgctgcacaagtctgaacgcggaggctgcacacggggagggcaaagccgccctggcaggagcccgagctgcaggcctcggctgggaagcctgtccctcctgtccatttccctggctctcgcggtccctcgttt

SEQ ID NO: 68583 - DNA, 40 bp, Homo sapiens; identical to SEQ ID NO: 18905
  chr4:124533355-124533395
  hypo

SEQ ID NO: 68584 - DNA, 35 bp, Homo sapiens; identical to SEQ ID NO: 18906
  chr4:125038941-125038976
  hypo

SEQ ID NO: 68585 - DNA, 96 bp, Homo sapiens; identical to SEQ ID NO: 40902
  chr4:125633238-125633334
  hypo

SEQ ID NO: 68586 - DNA, 442 bp, Homo sapiens; identical to SEQ ID NO: 40903
  chr4:125633625-125634067
  hypo

SEQ ID NO: 68587 - DNA, 771 bp, Homo sapiens; identical to SEQ ID NO: 40905
  chr4:126237310-126238081
  hypo

SEQ ID NO: 68588 - DNA, 219 bp, Homo sapiens
  chr4:128651503-128651722
  hypo
acgtggctggaggccgttggagcgcctgcgcagcttttccgcacgcgcctcgccggcgcgcggctctctcagcgtcccaagagccactttctcgccagtacgatgctgcagcggttttccggttttccgcttcccttcatcgtagctcccgtactcatttttagccactgctgccggtttttatatccttctccatcatgcatcgtgagcctgcgaaaa

SEQ ID NO: 68589 - DNA, 197 bp, Homo sapiens
  chr4:128702502-128702699
  hypo
ttacagacaggcaacacatgccgatcaaaccaagagggagggcgctggaccacactgggctcttttttgaggaccacagggcagcggctggaggctaaagcacagacttggctggtgtgagtggcacacttaattaaggtcactttcctgtaaaactggtttccagagacaagggtcagcggcggggccagcatctt

SEQ ID NO: 68590 - DNA, 138 bp, Homo sapiens; identical to SEQ ID NO: 3539
  chr4:128703234-128703372
  hypo

SEQ ID NO: 68591 - DNA, 355 bp, Homo sapiens
  chr4:128764579-128764934
  hypo
ataatgcataaagatccactccgtgagaaaaaaaataaaaaatcacggaaattcacgggaatagcaaaagacaccccagatcccgaggaggaggaggtggacaggtggcccccatgatagtctctggctgataaaactgacactccagtacgtgagggggcagagagccagtttccgtgactcacctttccactagggatccgtgcaatccaggccgagggagaataacttgtttctctcaaaccctggagataacttggagagaggcgaagagacagagagacaccaggaaaagctgcagccattttcccggacttgggactgagatgaggacgcaatctttaaccctggctta

SEQ ID NO: 68592 - DNA, 33 bp, Homo sapiens; identical to SEQ ID NO: 18912
  chr4:128889076-128889109
  hypo

SEQ ID NO: 68593 - DNA, 32 bp, Homo sapiens; identical to SEQ ID NO: 18913
  chr4:128889348-128889380
  hypo

SEQ ID NO: 68594 - DNA, 40 bp, Homo sapiens
  chr4:128967287-128967327
  hypo
tgctgggattataggcatgagccaccgcgcccaaccagga

SEQ ID NO: 68595 - DNA, 17 bp, Homo sapiens
  chr4:129396160-129396177
  hypo
aaaagaactaggagggc

SEQ ID NO: 68596 - DNA, 43 bp, Homo sapiens
  chr4:129697833-129697876
  hypo
ctgccttagttccagacatcacgtacagacacaacaatgtgat

SEQ ID NO: 68597 - DNA, 53 bp, Homo sapiens
  chr4:129776886-129776939
  hypo
gctatgaagcccacccgtagcggaaccaagtgggtccacgttagctgtgctct

SEQ ID NO: 68598 - DNA, 63 bp, Homo sapiens
  chr4:130168456-130168519
  hypo
taagacagatgggtgcgcagcaagtgttcgcgacacaaccatttatgccgatagagtttgcag

SEQ ID NO: 68599 - DNA, 30 bp, Homo sapiens; identical to SEQ ID NO: 3551
  chr4:136732789-136732819
  hypo

SEQ ID NO: 68600 - DNA, 30 bp, Homo sapiens; identical to SEQ ID NO: 18917
  chr4:137849027-137849057
  hypo

SEQ ID NO: 68601 - DNA, 44 bp, Homo sapiens
  chr4:138974560-138974604
  hypo
aggaggctcccagagccagcaacggctgtgagggctgccagcat

SEQ ID NO: 68602 - DNA, 30 bp, Homo sapiens
  chr4:139177528-139177558
  hypo
acatacactcctgctcgtcaagctacagga

SEQ ID NO: 68603 - DNA, 17 bp, Homo sapiens
  chr4:139187569-139187586
  hypo
agaagcatagatctcct

SEQ ID NO: 68604 - DNA, 31 bp, Homo sapiens
  chr4:139707320-139707351
  hypo
cagagctgttcctattcggccatctttgtac

SEQ ID NO: 68605 - DNA, 30 bp, Homo sapiens; identical to SEQ ID NO: 3552
  chr4:139814386-139814416
  hypo

SEQ ID NO: 68606 - DNA, 28 bp, Homo sapiens
  chr4:139864070-139864098
  hypo
aactaggggctgggtgcggtggctcacg

SEQ ID NO: 68607 - DNA, 30 bp, Homo sapiens
  chr4:140036647-140036677
  hypo
gcagctgcagcatgcggagcccccgggcct

SEQ ID NO: 68608 - DNA, 103 bp, Homo sapiens; identical to SEQ ID NO: 3553
  chr4:140097253-140097356
  hypo

SEQ ID NO: 68609 - DNA, 41 bp, Homo sapiens
  chr4:140100685-140100726
  hypo
tagcctgggcaacgagagcgaaactccgtctcaaaaaaaag

SEQ ID NO: 68610 - DNA, 31 bp, Homo sapiens; identical to SEQ ID NO: 18920
  chr4:140134627-140134658
  hypo

SEQ ID NO: 68611 - DNA, 30 bp, Homo sapiens; identical to SEQ ID NO: 18921
  chr4:140225571-140225601
  hypo

SEQ ID NO: 68612 - DNA, 30 bp, Homo sapiens
  chr4:140229390-140229420
  hypo
aggcatgaaccaccgcgcccggcccattgt

SEQ ID NO: 68613 - DNA, 287 bp, Homo sapiens
  chr4:140357385-140357672
  hypo
accccgtggtcctggcgacatcggtctcacgtgtgggaagaccagtgtcctgtggagagaaaacagggttaggggtcggcagcctgggtcaggagccagaccacgcgagcggccgcacccagggagaggccgcggggcctgttggggctgggtttcaccgccgcacatgtgtcagcgtgcggtgagctgaggcccctggaggctctgggcgccgaatctcacccgctgccatggccaaagccggggggtgattttcaaccaatgccgggtggtttcttttttgatct

SEQ ID NO: 68614 - DNA, 30 bp, Homo sapiens; identical to SEQ ID NO: 40940
  chr4:140587132-140587162
  hypo

SEQ ID NO: 68615 - DNA, 41 bp, Homo sapiens
  chr4:140592641-140592682
  hypo
agacctactgctctgtcgcccgggctggagtgcagtggtgt

SEQ ID NO: 68616 - DNA, 30 bp, Homo sapiens; identical to SEQ ID NO: 18923
  chr4:140619764-140619794
  hypo

SEQ ID NO: 68617 - DNA, 83 bp, Homo sapiens
  chr4:140640070-140640153
  hypo
caaagctgctgtctcccgacctggggcaggaggggctgaggatacctctcttgggtaatagtccctctcggctgaagcagctc

SEQ ID NO: 68618 - DNA, 40 bp, Homo sapiens
  chr4:140641397-140641437
  hypo
gttctgtgccatcagccgtgacgttcgcatgctctggagg

SEQ ID NO: 68619 - DNA, 91 bp, Homo sapiens
  chr4:140701210-140701301
  hypo
ctagagccatgctgtccgaggcggtacccactatttacatttaaatttaataaaattaaaaattcatttctgcaggcgtgtcagccacttt

SEQ ID NO: 68620 - DNA, 532 bp, Homo sapiens
  chr4:140705005-140705537
  hypo
tgttgtgtgacagcccgggctgctgaacaccattttaacatgcagattgactcctcggaggctcttcattacgcatttagcggtctgttttcagactaaccagcatgtcagagaggcccgctatcctctttccacctgggtggaggaaatagctcactgactgtgggggagccacagatattaaaatgcatatgtttaccttcctgagcatccgcacacaacagctttctctgatgcaagagaagaaaaaagaagaaaggacccttggttctgaaatgcaaggaaaatggctagcaaaacaagcgagcctttgttgatgagagcagtcaacaaggccaggcccgcctgatgccgcccagctgcccgcaagccgacctgggagcgtccacacaagcactcctcttatcgacacacagaccctctctttctctctcacacagagcctgaagcattttaagcagaacacttccaatttcctgtttctaaaaccatcttgcctctccagtggcattccaagcgatcctggcgaggc

SEQ ID NO: 68621 - DNA, 36 bp, Homo sapiens
  chr4:140705887-140705923
  hypo
ttgggcctttgctatgcgctacgccttggccaagtc

SEQ ID NO: 68622 - DNA, 30 bp, Homo sapiens
  chr4:140745539-140745569
  hypo
tgggcatctctcagcgtctcccagttgctg

SEQ ID NO: 68623 - DNA, 142 bp, Homo sapiens
  chr4:140751842-140751984
  hypo
caggcgtgagccactgcgcctggcctacactgtgttaatttttaaggaggattaaaaaaaataagacacgatcctattatttctcctttcctcaagaaggcatgccaatgatcccatgaacaatcaccggcctcttacaaaa

SEQ ID NO: 68624 - DNA, 317 bp, Homo sapiens; identical to SEQ ID NO: 18926
  chr4:140754335-140754652
  hypo

SEQ ID NO: 68625 - DNA, 114 bp, Homo sapiens
  chr4:140781102-140781216
  hypo
gcaaggccggagtgaccggacgaaggcgtcgcgggaggggctagaggagcagccaccgagcctcgagtacccgggggcaggcgcgggcctcagcgagacgtgctgccgtttcta

SEQ ID NO: 68626 - DNA, 22 bp, Homo sapiens
  chr4:140785538-140785560
  hypo
aaatctttcatgggccaggtgc

SEQ ID NO: 68627 - DNA, 25 bp, Homo sapiens
  chr4:140865030-140865055
  hypo
ttttttttttttgagacggaatctt

SEQ ID NO: 68628 - DNA, 208 bp, Homo sapiens
  chr4:141007378-141007586
  hypo
ccatccgcacataggcgctacctcacaaatgtgtctgggtaagaccctgccccatcagcgtcccctgaaacttctcttccttgaatctcactttgataagcacacatgcttggactcaaacaggtcatctccagtatccatttctttcattttcttttgtcccacaatagagttaaacaatacactgtctcgtcgtccaaatgcttca

SEQ ID NO: 68629 - DNA, 38 bp, Homo sapiens; identical to SEQ ID NO: 18928
  chr4:141014854-141014892
  hypo

SEQ ID NO: 68630 - DNA, 31 bp, Homo sapiens
  chr4:141050717-141050748
  hypo
tgccagagagaccaaacgtgtagaaacgaaa

SEQ ID NO: 68631 - DNA, 31 bp, Homo sapiens
  chr4:141058427-141058458
  hypo
caccgcgcccggcctaaagaagattttttaa

SEQ ID NO: 68632 - DNA, 139 bp, Homo sapiens
  chr4:141067294-141067433
  hypo
gggattacaggtatgagccactgtgcccggccaccttttgagattttttaattaaatttctccaagaatagtatacacagcttgccatagtagtaacttcctgctcctatccatgcgtgcatgcggccctcagagaacg

SEQ ID NO: 68633 - DNA, 833 bp, Homo sapiens; identical to SEQ ID NO: 40944
  chr4:141071487-141072320
  hypo

SEQ ID NO: 68634 - DNA, 175 bp, Homo sapiens; identical to SEQ ID NO: 3561
  chr4:141072547-141072722
  hypo

SEQ ID NO: 68635 - DNA, 1220 bp, Homo sapiens; identical to SEQ ID NO: 40946
  chr4:141073195-141074415
  hypo

SEQ ID NO: 68636 - DNA, 772 bp, Homo sapiens; identical to SEQ ID NO: 40947
  chr4:141074619-141075391
  hypo

SEQ ID NO: 68637 - DNA, 31 bp, Homo sapiens
  chr4:141087175-141087206
  hypo
aataatgaaatatgttcgggattggctaaat

SEQ ID NO: 68638 - DNA, 30 bp, Homo sapiens
  chr4:141172880-141172910
  hypo
ctctggggagaatgcggcctcactggattt

SEQ ID NO: 68639 - DNA, 102 bp, Homo sapiens; identical to SEQ ID NO: 18935
  chr4:141207749-141207851
  hypo

SEQ ID NO: 68640 - DNA, 47 bp, Homo sapiens; identical to SEQ ID NO: 18936
  chr4:141207918-141207965
  hypo

SEQ ID NO: 68641 - DNA, 155 bp, Homo sapiens
  chr4:141266287-141266442
  hypo
tgcttgctaatggagcctggacgtgtgggcatgggcgctgaagaactaggaaagagtgagcaacgctctctggttggtagtgagagtgccggcaaccacacgagaggaccaacgtccccttgctcccaattgccgcctccttctcctttgttaga

SEQ ID NO: 68642 - DNA, 1036 bp, Homo sapiens; identical to SEQ ID NO: 40952
  chr4:141348028-141349064
  hypo

SEQ ID NO: 68643 - DNA, 592 bp, Homo sapiens
  chr4:141563898-141564490
  hypo
cagctcatagtcatctgatgtcggcagagatttgctgctcagctttccgctactgttgcagttcttccccctcttgcgggcgggcgacagggctctcgggggcgtgggtctgtttccacggcctgcgtgccaagcttccatgggactcctcgtgcctgtcctcggagtcccggcgccgctgcagcttcaccagctcatgctgcttctccttgtactggtgctggacctcggcccgccacattctgaagtccagttccaggacgtccatgtcctccacggaggacttcatggggtacatccgctcctccttcttgcgcatccagctgtacttattgtgggcttcagctcccgtgggagccgcaggttcttgagcgggtcccaccacgggcccatccagcacctccctcagcatgtggctgccggctgccagcaggctctccagtgagggccgagccaccagggcccgctccgcacctcccaccttcttgctcctcctctccagctccagctctgcgatctcgctcagcagggtgatgccgtgcagaaagctctgctccaagacaaggctctcggcagcttcctgcttctccaa

SEQ ID NO: 68644 - DNA, 102 bp, Homo sapiens; identical to SEQ ID NO: 18939
  chr4:141564741-141564843
  hypo

SEQ ID NO: 68645 - DNA, 95 bp, Homo sapiens; identical to SEQ ID NO: 18940
  chr4:141565181-141565276
  hypo

SEQ ID NO: 68646 - DNA, 707 bp, Homo sapiens; identical to SEQ ID NO: 40959
  chr4:141677254-141677961
  hypo

SEQ ID NO: 68647 - DNA, 31 bp, Homo sapiens; identical to SEQ ID NO: 3573
  chr4:141678190-141678221
  hypo

SEQ ID NO: 68648 - DNA, 1702 bp, Homo sapiens; identical to SEQ ID NO: 40961
  chr4:142053231-142054933
  hypo

SEQ ID NO: 68649 - DNA, 85 bp, Homo sapiens
  chr4:142134703-142134788
  hypo
gaactggggctgcgcctggcgatcacgggccagtgcaagttctgggtgggcgctggctcggcaggcccaccggcccacctggcag

SEQ ID NO: 68650 - DNA, 776 bp, Homo sapiens; identical to SEQ ID NO: 40964
  chr4:142557305-142558081
  hypo

SEQ ID NO: 68651 - DNA, 186 bp, Homo sapiens; identical to SEQ ID NO: 18944
  chr4:142677008-142677194
  hypo

SEQ ID NO: 68652 - DNA, 39 bp, Homo sapiens
  chr4:143073505-143073544
  hypo
gcgtgagtcaccgcacccggcacttttttttctttttaa

SEQ ID NO: 68653 - DNA, 197 bp, Homo sapiens; identical to SEQ ID NO: 18945
  chr4:143477971-143478168
  hypo

SEQ ID NO: 68654 - DNA, 75 bp, Homo sapiens; identical to SEQ ID NO: 18946
  chr4:144141583-144141658
  hypo

SEQ ID NO: 68655 - DNA, 482 bp, Homo sapiens; identical to SEQ ID NO: 40969
  chr4:144257017-144257499
  hypo

SEQ ID NO: 68656 - DNA, 190 bp, Homo sapiens; identical to SEQ ID NO: 40970
  chr4:144257936-144258126
  hypo

SEQ ID NO: 68657 - DNA, 301 bp, Homo sapiens; identical to SEQ ID NO: 3583
  chr4:144258374-144258675
  hypo

SEQ ID NO: 68658 - DNA, 125 bp, Homo sapiens
  chr4:144507007-144507132
  hypo
tcctgctctgactttctggagcgcacggcgatggatgatggttgggaaagatcagtgcctcttctccaaacacaaacctccacgtagcgagcactttcattgacgtgatattcagcatccccaaa

SEQ ID NO: 68659 - DNA, 30 bp, Homo sapiens
  chr4:146092115-146092145
  hypo
ctcttccctcttcacgagatgatcatggaa

SEQ ID NO: 68660 - DNA, 30 bp, Homo sapiens; identical to SEQ ID NO: 40983
  chr4:146102031-146102061
  hypo

SEQ ID NO: 68661 - DNA, 31 bp, Homo sapiens; identical to SEQ ID NO: 3587
  chr4:146102129-146102160
  hypo

SEQ ID NO: 68662 - DNA, 508 bp, Homo sapiens; identical to SEQ ID NO: 40985
  chr4:146402703-146403211
  hypo

SEQ ID NO: 68663 - DNA, 295 bp, Homo sapiens; identical to SEQ ID NO: 40986
  chr4:146403592-146403887
  hypo

SEQ ID NO: 68664 - DNA, 37 bp, Homo sapiens
  chr4:146449669-146449706
  hypo
aggcgtgagctaccgcgcctgaccataatgttcttta

SEQ ID NO: 68665 - DNA, 30 bp, Homo sapiens; identical to SEQ ID NO: 18954
  chr4:146559532-146559562
  hypo

SEQ ID NO: 68666 - DNA, 30 bp, Homo sapiens
  chr4:146682362-146682392
  hypo
gtggcggctgaagacgaaagggtgtgtggt

SEQ ID NO: 68667 - DNA, 30 bp, Homo sapiens
  chr4:146682649-146682679
  hypo
ccgtctggcagatccggcacttgtactcca

SEQ ID NO: 68668 - DNA, 30 bp, Homo sapiens
  chr4:146686221-146686251
  hypo
cacactcaaacatccgggtgatgaggtgta

SEQ ID NO: 68669 - DNA, 43 bp, Homo sapiens
  chr4:146825984-146826027
  hypo
cactggagggtttgtggcaagcgagtgttatgacatgacttat

SEQ ID NO: 68670 - DNA, 31 bp, Homo sapiens; identical to SEQ ID NO: 18955
  chr4:146853627-146853658
  hypo

SEQ ID NO: 68671 - DNA, 91 bp, Homo sapiens
  chr4:146853897-146853988
  hypo
ttacaggcgtgagccaccgcgctcagcttgtattttaaaccaacttctgacctcaggagaagcctgcatcgtcactccaccaacacacttt

SEQ ID NO: 68672 - DNA, 746 bp, Homo sapiens; identical to SEQ ID NO: 40994
  chr4:147559332-147560078
  hypo

SEQ ID NO: 68673 - DNA, 285 bp, Homo sapiens; identical to SEQ ID NO: 40995
  chr4:147560133-147560418
  hypo

SEQ ID NO: 68674 - DNA, 30 bp, Homo sapiens; identical to SEQ ID NO: 3601
  chr4:147576532-147576562
  hypo

SEQ ID NO: 68675 - DNA, 31 bp, Homo sapiens
  chr4:148463774-148463805
  hypo
ccttagaagcactcctcggtactcccataat

SEQ ID NO: 68676 - DNA, 34 bp, Homo sapiens; identical to SEQ ID NO: 3604
  chr4:148538934-148538968
  hypo

SEQ ID NO: 68677 - DNA, 20 bp, Homo sapiens
  chr4:148543379-148543399
  hypo
caccgcgcctggccgcagta

SEQ ID NO: 68678 - DNA, 100 bp, Homo sapiens; identical to SEQ ID NO: 18961
  chr4:148782278-148782378
  hypo

SEQ ID NO: 68679 - DNA, 29 bp, Homo sapiens
  chr4:148835301-148835330
  hypo
caaaaaaagaaatccgctttattgaggta

SEQ ID NO: 68680 - DNA, 31 bp, Homo sapiens
  chr4:148884819-148884850
  hypo
gaagaggcatttattccgtcacaattctaga

SEQ ID NO: 68681 - DNA, 31 bp, Homo sapiens; identical to SEQ ID NO: 18963
  chr4:148985416-148985447
  hypo

SEQ ID NO: 68682 - DNA, 31 bp, Homo sapiens; identical to SEQ ID NO: 18964
  chr4:149363505-149363536
  hypo

SEQ ID NO: 68683 - DNA, 127 bp, Homo sapiens; identical to SEQ ID NO: 3607
  chr4:149364526-149364653
  hypo

SEQ ID NO: 68684 - DNA, 662 bp, Homo sapiens; identical to SEQ ID NO: 41008
  chr4:149365596-149366258
  hypo

SEQ ID NO: 68685 - DNA, 38 bp, Homo sapiens; identical to SEQ ID NO: 18967
  chr4:149905344-149905382
  hypo

SEQ ID NO: 68686 - DNA, 30 bp, Homo sapiens
  chr4:150958769-150958799
  hypo
gatgaagtacagaaacgaggcttcacttac

SEQ ID NO: 68687 - DNA, 34 bp, Homo sapiens
  chr4:151020123-151020157
  hypo
ggcatgagccaccgtgcctggcctctcacactgt

SEQ ID NO: 68688 - DNA, 22 bp, Homo sapiens
  chr4:151029369-151029391
  hypo
aaccttcttggccgggcgcagt

SEQ ID NO: 68689 - DNA, 30 bp, Homo sapiens; identical to SEQ ID NO: 18969
  chr4:151156988-151157018
  hypo

SEQ ID NO: 68690 - DNA, 30 bp, Homo sapiens; identical to SEQ ID NO: 18970
  chr4:151177538-151177568
  hypo

SEQ ID NO: 68691 - DNA, 30 bp, Homo sapiens
  chr4:151435899-151435929
  hypo
tgcttgcattcgatccgaagtatattaact

SEQ ID NO: 68692 - DNA, 123 bp, Homo sapiens; identical to SEQ ID NO: 18971
  chr4:151897749-151897872
  hypo

SEQ ID NO: 68693 - DNA, 34 bp, Homo sapiens
  chr4:151960719-151960753
  hypo
tggctcttaacacgttcagcctggtataagaggt

SEQ ID NO: 68694 - DNA, 137 bp, Homo sapiens
  chr4:151974305-151974442
  hypo
tagagacaatggcccacttctcgatgtaccaaaggagggacccagcagagcccttagcataggaatgaatgcttcaccatccttctctaccgctagttctgatctcaagaataagtgacttcgaattaagaaacagg

SEQ ID NO: 68695 - DNA, 34 bp, Homo sapiens
  chr4:152157385-152157419
  hypo
gagaggtgcaagcgggagccggggctgcgcccgg

SEQ ID NO: 68696 - DNA, 31 bp, Homo sapiens
  chr4:152273414-152273445
  hypo
cataaagagtttgggccgggtgcgtggctca

SEQ ID NO: 68697 - DNA, 1079 bp, Homo sapiens; identical to SEQ ID NO: 41014
  chr4:152329808-152330887
  hypo

SEQ ID NO: 68698 - DNA, 31 bp, Homo sapiens; identical to SEQ ID NO: 18973
  chr4:152594486-152594517
  hypo

SEQ ID NO: 68699 - DNA, 30 bp, Homo sapiens; identical to SEQ ID NO: 18974
  chr4:153199808-153199838
  hypo

SEQ ID NO: 68700 - DNA, 37 bp, Homo sapiens
  chr4:153247350-153247387
  hypo
ctaagagtggcatctcgagaaccgctaacaactctgc

SEQ ID NO: 68701 - DNA, 30 bp, Homo sapiens; identical to SEQ ID NO: 3615
  chr4:153249370-153249400
  hypo

SEQ ID NO: 68702 - DNA, 30 bp, Homo sapiens
  chr4:153369672-153369702
  hypo
atcggagcagcaggtcgaacggctcaacct

SEQ ID NO: 68703 - DNA, 21 bp, Homo sapiens
  chr4:153454049-153454070
  hypo
ttttttggcaggacgcggtgt

SEQ ID NO: 68704 - DNA, 63 bp, Homo sapiens
  chr4:153460845-153460908
  hypo
ctgccaagggcaagtacggcgtggagtggcaaggcatgtgtgagcgagcgtgaggtctggcta

SEQ ID NO: 68705 - DNA, 30 bp, Homo sapiens; identical to SEQ ID NO: 41017
  chr4:153589912-153589942
  hypo

SEQ ID NO: 68706 - DNA, 98 bp, Homo sapiens
  chr4:153702686-153702784
  hypo
ccgaattggccatttcattgctgttctctcagagcggctacagattactatattttactgctgccttaattctgcttttctttcgtttgtcctgtggt

SEQ ID NO: 68707 - DNA, 18 bp, Homo sapiens
  chr4:153736902-153736920
  hypo
ttttttttttttgagacg

SEQ ID NO: 68708 - DNA, 152 bp, Homo sapiens
  chr4:153821325-153821477
  hypo
gggagggatcaaagggcgggaactaacactgtaaaaacatagaacaaaaaaggcgaaagactttttttgctaaaggtgagaaaatctccgcactcagaatgttaatgtatgtaattattcgataaagaattataagacgtcaccacagttct

SEQ ID NO: 68709 - DNA, 27 bp, Homo sapiens
  chr4:153860380-153860407
  hypo
caccacgcccagctactgtgtgtgtgt

SEQ ID NO: 68710 - DNA, 30 bp, Homo sapiens
  chr4:153863058-153863088
  hypo
aatagcctgcatggcgtcctttctacaccc

SEQ ID NO: 68711 - DNA, 87 bp, Homo sapiens; identical to SEQ ID NO: 18976
  chr4:153889784-153889871
  hypo

SEQ ID NO: 68712 - DNA, 30 bp, Homo sapiens; identical to SEQ ID NO: 18977
  chr4:153894777-153894807
  hypo

SEQ ID NO: 68713 - DNA, 252 bp, Homo sapiens
  chr4:153896020-153896272
  hypo
ctccagcccctcctaccggcccccgaacacccgccgctcccgcctctccctgggtccctctgctgaccgggagctgctgaccttcttggagagctccaccggcagccctgaggagcccaataagttccacagcctgccccggagcagcccccggcaggcccggcccacgatagcctgcctggagcctgcagaagtgaggcaccaggactccagctttgcacacaaacctcaggcctcggggggccaggagga

SEQ ID NO: 68714 - DNA, 552 bp, Homo sapiens
  chr4:153897168-153897720
  hypo
ccaagtccagcagaggcgccggctggaggcgaccagagctgtcatcccgggggccctcccagaatccccccagcagcacagatactgtgtggtcacgccagaactccgtgcggagggcctccacaggcgccgaagagcagaggctgccgcgggggagcagcggctccagcagcacccgtccggggagggacgttcccctgcagcccaggggttctttcaagaagcccagtgccaaaccactcaggaacctccccagacagaagcctgaggaaaataagacctgccgcgcccactccgagggccctgagagtcccaaagaagagcccaagaccccgtcagtgcccagcgtcccccacgaactaccccgtgtcccgagctttgcccggaacacagtggcctcctcctctcgaagcatgagaacagatcttcctcccgtggccaaagcccccggcatcactcggacagtgtcgcagcggcagctgagggtgaaaggggaccccgaggatgccgctcccaaggacagcagcactttgaggcgagccagcagtgccc

SEQ ID NO: 68715 - DNA, 30 bp, Homo sapiens; identical to SEQ ID NO: 18981
  chr4:153898094-153898124
  hypo

SEQ ID NO: 68716 - DNA, 241 bp, Homo sapiens
  chr4:153918911-153919152
  hypo
ctcaggacacccactctcaagcggtgcatccctgaggccctttcctctgcaccgatgctcggactctccgtgtgtgccattttgcagtggggtcacgctccacgtgttgttctgccactgcctttggtttctcgacactgcctcgtggacacgcagggagagcttgcagctggtgacaagctctccagcaggtgagtaatccagcagctctttctgcctcgaggtgagtgaggtaacctct

SEQ ID NO: 68717 - DNA, 328 bp, Homo sapiens
  chr4:153943298-153943626
  hypo
tgggaaggtccaggcacctcacgaggtaggtccaggtgactgggacacgggagggctccagacagccgctatttgccacacggaaccaaagcatttcactgttttaacaagcggttcagctggtccggagtatccctgctggctctcagccctaaagtggcgtgagggctgggcacgtcgacagcacttgatccgctccttccctctggaaatgcatttccttccattaccagaacagcctctcacagtttggcctgcctcttctcatgctatgtcgaaacaaagccacctgcctcccatgaaagacggcattgtttttccacctgag

SEQ ID NO: 68718 - DNA, 30 bp, Homo sapiens; identical to SEQ ID NO: 18983
  chr4:153985896-153985926
  hypo

SEQ ID NO: 68719 - DNA, 30 bp, Homo sapiens; identical to SEQ ID NO: 18984
  chr4:154036612-154036642
  hypo

SEQ ID NO: 68720 - DNA, 30 bp, Homo sapiens; identical to SEQ ID NO: 18985
  chr4:154076805-154076835
  hypo

SEQ ID NO: 68721 - DNA, 944 bp, Homo sapiens
  chr4:154216327-154217271
  hypo
tgggttgacaaacaccgcttgctcagagccacctgcgtgggcaggtgtagagtctccttctcgccggtggagggcactgccccgggctaggccccgccctgtgggacgagctcaccaggcctccggttttcccgcaggtcctccagtcgcagctggatactctgctccaggggcaggagagcattaagagctgcagcaacttcacagcgcaggccctcaaccatggcacggagaccgaggtcctactggtgaagaagcagatgagcgagaagctgaacgagctggccgaccaggacttccccttgcacccgcgggagaacgaccagctggatttcatcgtggaaaccgaggggctgaagaagtccatccacaacctcgggacgatcttaaccaccaacgccgttgcctcagagacagtggccacgggcgaggggctgcggcagaccatcatcgggcagcccatgtccgtcaccatcaccaccaaggacaaagacggtgagctgtgcaaaaccggcaacgcctacctcaccgccgaactgagcacccccgacgggagcgtggcagacggggagatcctggacaacaagaacggcacctatgagtttttgtacactgtccagaaggaaggggactttaccctgtctctgagactctatgaccagcacatccgaggcagcccgtttaagctgaaagtgatccgatccgctgatgtgtctcccaccacagaaggcgtgaagaggcgcgttaagtccccggggagcggccacgtcaagcagaaagctgtgaaaagacccgcaagcatgtacagcactggaaaacgaaaagagaatcccatcgaagacgatttgatctttcgagtgggtaaggagagggcttctgtgcccgacgcctgagctggcactggttaaggggtaactgggcacgtgtcattgcaaatagcaaca

SEQ ID NO: 68722 - DNA, 36 bp, Homo sapiens
  chr4:154247836-154247872
  hypo
agaaagataaacaaggctgggcgcagtggctcacgc

SEQ ID NO: 68723 - DNA, 24 bp, Homo sapiens
  chr4:154365083-154365107
  hypo
ccctgttctttttttcttttccgt

SEQ ID NO: 68724 - DNA, 240 bp, Homo sapiens; identical to SEQ ID NO: 41025
  chr4:154387494-154387734
  hypo

SEQ ID NO: 68725 - DNA, 83 bp, Homo sapiens; identical to SEQ ID NO: 41026
  chr4:154388113-154388196
  hypo

SEQ ID NO: 68726 - DNA, 41 bp, Homo sapiens
  chr4:154394645-154394686
  hypo
taagatttgcccaggggtggccgggcacagtggctcacgcc

SEQ ID NO: 68727 - DNA, 97 bp, Homo sapiens; identical to SEQ ID NO: 18988
  chr4:154410568-154410665
  hypo

SEQ ID NO: 68728 - DNA, 223 bp, Homo sapiens
  chr4:154420386-154420609
  hypo
tagtggtgcccagcctccagtcgctgtagctcagacatggcctcgggaggtttggaggatgcccagcgcttgtctgcccattgttgctgacctgccgcattgtgtgatatggctccatgtgcacatcttccatggatttatcagtcttgacaggagtcttccactttctgccagtgatgaaatagatctttatgatttttttttttttttttgagatgcgtct

SEQ ID NO: 68729 - DNA, 103 bp, Homo sapiens
  chr4:154420848-154420951
  hypo
ttacaggcgtgaaccgccgtgcccagccccttatgacattcttaccctgattggttattcagcttcagcttgagcacttcacgtgatgggaagttcacctttg

SEQ ID NO: 68730 - DNA, 127 bp, Homo sapiens
  chr4:154421942-154422069
  hypo
acacacgctcacacacgcgtgcatgcacacacacacaggcatgtgcacttttttcctagttgtgaaaatcgatggaatgactacatggcttagtctcctctttctccagagacgccgtttaatgatc

SEQ ID NO: 68731 - DNA, 22 bp, Homo sapiens
  chr4:154437983-154438005
  hypo
tattattcttttgagacggagt

SEQ ID NO: 68732 - DNA, 86 bp, Homo sapiens
  chr4:154454427-154454513
  hypo
cacccagcctccttcttaattcttttatttccacattggccacgttcaccccattataagtagggggactgcgtgtgggagtgggg

SEQ ID NO: 68733 - DNA, 22 bp, Homo sapiens
  chr4:154455868-154455890
  hypo
gccacggcgcctggccaggagt

SEQ ID NO: 68734 - DNA, 104 bp, Homo sapiens
  chr4:154469358-154469462
  hypo
tagcatacctcttctccgaccgtgttcaaaacaagtgaagagattgacaagaattaggcagatggagcccaaggcattactttatttttttttaatttcttttt

SEQ ID NO: 68735 - DNA, 144 bp, Homo sapiens; identical to SEQ ID NO: 18992
  chr4:154520338-154520482
  hypo

SEQ ID NO: 68736 - DNA, 30 bp, Homo sapiens
  chr4:154527117-154527147
  hypo
tggcagtggtgcacacgcctgaagtggact

SEQ ID NO: 68737 - DNA, 30 bp, Homo sapiens; identical to SEQ ID NO: 3622
  chr4:154607110-154607140
  hypo

SEQ ID NO: 68738 - DNA, 31 bp, Homo sapiens; identical to SEQ ID NO: 18994
  chr4:154681753-154681784
  hypo

SEQ ID NO: 68739 - DNA, 140 bp, Homo sapiens; identical to SEQ ID NO: 41032
  chr4:154709470-154709610
  hypo

SEQ ID NO: 68740 - DNA, 792 bp, Homo sapiens; identical to SEQ ID NO: 41033
  chr4:154709758-154710550
  hypo

SEQ ID NO: 68741 - DNA, 467 bp, Homo sapiens; identical to SEQ ID NO: 41036
  chr4:154713480-154713947
  hypo

SEQ ID NO: 68742 - DNA, 30 bp, Homo sapiens; identical to SEQ ID NO: 3629
  chr4:154714151-154714181
  hypo

SEQ ID NO: 68743 - DNA, 478 bp, Homo sapiens; identical to SEQ ID NO: 41038
  chr4:155254115-155254593
  hypo

SEQ ID NO: 68744 - DNA, 259 bp, Homo sapiens; identical to SEQ ID NO: 3641
  chr4:156297474-156297733
  hypo

SEQ ID NO: 68745 - DNA, 193 bp, Homo sapiens; identical to SEQ ID NO: 3642
  chr4:156297941-156298134
  hypo

SEQ ID NO: 68746 - DNA, 103 bp, Homo sapiens
  chr4:156676881-156676984
  hypo
gggattacaggcgtgagccaccgcgcccggccgattacaatacttttaatacttaacttaccaaagtaatttatttttattcgctgaaaatgtgagtcacttc

SEQ ID NO: 68747 - DNA, 306 bp, Homo sapiens; identical to SEQ ID NO: 41057
  chr4:157892474-157892780
  hypo

SEQ ID NO: 68748 - DNA, 77 bp, Homo sapiens
  chr4:157974482-157974559
  hypo
aatgctgaaattctagcgggctgcatttccagatctttctttccagaactttcttgatgagtcgctgattctgcttg

SEQ ID NO: 68749 - DNA, 23 bp, Homo sapiens
  chr4:159680361-159680384
  hypo
gtctccctctgttgccgaggctg

SEQ ID NO: 68750 - DNA, 738 bp, Homo sapiens; identical to SEQ ID NO: 41067
  chr4:159690016-159690754
  hypo

SEQ ID NO: 68751 - DNA, 42 bp, Homo sapiens
  chr4:159749468-159749510
  hypo
tcattaaaaacacaagtaggccgggcgcggtggctcacgcct

SEQ ID NO: 68752 - DNA, 30 bp, Homo sapiens
  chr4:159784661-159784691
  hypo
cggatgccactttcacgggtttgctgctca

SEQ ID NO: 68753 - DNA, 31 bp, Homo sapiens
  chr4:159790257-159790288
  hypo
cacggtgcaggaggaacgggagggaggaggc

SEQ ID NO: 68754 - DNA, 21 bp, Homo sapiens
  chr4:159927207-159927228
  hypo
gcctgaccctcttttaatttt

SEQ ID NO: 68755 - DNA, 20 bp, Homo sapiens
  chr4:160016975-160016995
  hypo
gactccgtctcaaaaaaaga

SEQ ID NO: 68756 - DNA, 30 bp, Homo sapiens
  chr4:160277127-160277157
  hypo
cccttcagagatcgcggatggtcgcacgat

SEQ ID NO: 68757 - DNA, 30 bp, Homo sapiens
  chr4:160310849-160310879
  hypo
cgggcgcggtggctcacgcctgtaatccca

SEQ ID NO: 68758 - DNA, 33 bp, Homo sapiens
  chr4:162799089-162799122
  hypo
gtaactgcgcccggcaccaatattctgtttttt

SEQ ID NO: 68759 - DNA, 30 bp, Homo sapiens; identical to SEQ ID NO: 3653
  chr4:163811945-163811975
  hypo

SEQ ID NO: 68760 - DNA, 112 bp, Homo sapiens
  chr4:164394801-164394913
  hypo
tgatggaatggatccgcaggcggttggctgtgtcccgcagcacctgcacggtcttcacgtcgggcttggcgtcgttggccatcatctctcttttgtcggtttggcaaagcaa

SEQ ID NO: 68761 - DNA, 569 bp, Homo sapiens
  chr4:165109362-165109931
  hypo
atatatacacaaatactttctcgatgccggccgagacagcacagacagaccgaccgaccgactggggtgtttcgcaattgtgagaggcgggtaaccgcgctgcgctcctgtgctgcggccggtggcttcattgcctgcgacgccctgcctctgctgcccgactggctggcaagatgaagctctccctggtggcggcgatgctgctgctactcggtgaggcgtggttcgaggacaaggaggaggacgtgggcacggtggtctgcgtcgacctggggaccacctactgctgcgtctgtgtgttcaagaccggctgcgtggagatcaccgccaacaatcagagcaaacgcatcacgcggtcctatgtgcccttcactcttgaaggggaatatctgatcggcgatgccgccacgaaccagctcacctccaatcccaagaacacggtctttgacgccaagtggctcatcggccgcacgtggaacgacctgtctatgcagcaggacatcaagttcttgcggttcaaggtagttgaaaagaaaactaaaccatacgttcaagttgatattggaggt

SEQ ID NO: 68762 - DNA, 17 bp, Homo sapiens
  chr4:165206912-165206929
  hypo
ttaattttattttttaa

SEQ ID NO: 68763 - DNA, 322 bp, Homo sapiens
  chr4:165850786-165851108
  hypo
taatttcagtggtgtgacaaccggagtgttgctactaaaattcctccctgggctgcatgagcggctgacagggcacggggagaaaacgattagcttctcccaggattggtgaagccaccgctgttggacaagtatagtcgtcgctggatctctgcaaagagactgtcgaagcggctgcggttcagcgtaaggtctgttagggagacctgaagccctgtgccaggaacgcagtgctcgcttagcccaccctgcagggatggctttccaggcgctgggtccagtgagaaaagcgtgtccggaattggttccttccggtgggttc

SEQ ID NO: 68764 - DNA, 30 bp, Homo sapiens
  chr4:165953178-165953208
  hypo
tgtgtgagggtttccgctctgcgccccgcg

SEQ ID NO: 68765 - DNA, 24 bp, Homo sapiens
  chr4:165953686-165953710
  hypo
caccgtgctcggccggattctgtt

SEQ ID NO: 68766 - DNA, 31 bp, Homo sapiens
  chr4:166035174-166035205
  hypo
atggtgtaagactccacgtgatcttcttttt

SEQ ID NO: 68767 - DNA, 30 bp, Homo sapiens
  chr4:166245531-166245561
  hypo
gttgtgaagcaactcgtctgcctgctttgt

SEQ ID NO: 68768 - DNA, 30 bp, Homo sapiens; identical to SEQ ID NO: 3660
  chr4:166513760-166513790
  hypo

SEQ ID NO: 68769 - DNA, 31 bp, Homo sapiens
  chr4:167457985-167458016
  hypo
tcttacagtgctgctgcgaggtaaaatgata

SEQ ID NO: 68770 - DNA, 23 bp, Homo sapiens
  chr4:169014730-169014753
  hypo
ggcaagagaatggcgtgaacccg

SEQ ID NO: 68771 - DNA, 23 bp, Homo sapiens
  chr4:169014812-169014835
  hypo
gcgagactccatctcaaaaaaca

SEQ ID NO: 68772 - DNA, 93 bp, Homo sapiens
  chr4:169105969-169106062
  hypo
tctacacagtctttagaacatcggcaggtgctaacttagaaaaccctttacctcagctgggcgtggtggctaatgcctgtaatcccagcactt

SEQ ID NO: 68773 - DNA, 44 bp, Homo sapiens
  chr4:169198693-169198737
  hypo
aatgaaaattccaggccgggcgcagtggctcacacccgtaatcc

SEQ ID NO: 68774 - DNA, 33 bp, Homo sapiens
  chr4:169224158-169224191
  hypo
aaaaaaattattcagccgggctcggtggctcac

SEQ ID NO: 68775 - DNA, 36 bp, Homo sapiens
  chr4:169315724-169315760
  hypo
ccgtgtcttgtaaatcgcactcgcggtaataccctc

SEQ ID NO: 68776 - DNA, 34 bp, Homo sapiens; identical to SEQ ID NO: 19010
  chr4:169358977-169359011
  hypo

SEQ ID NO: 68777 - DNA, 164 bp, Homo sapiens; identical to SEQ ID NO: 19011
  chr4:169377151-169377315
  hypo

SEQ ID NO: 68778 - DNA, 34 bp, Homo sapiens; identical to SEQ ID NO: 19012
  chr4:169562059-169562093
  hypo

SEQ ID NO: 68779 - DNA, 206 bp, Homo sapiens
  chr4:169667597-169667803
  hypo
cctgagacagaaaacccgtgtgacacagaatatgagtccttaagcaaaaggactgtcgtattcatccctgtgtctctggagctagcacagtccttagtgcattgtacatttgaacaaatgtttgagtgaataacaagcccgttctccattctggttaacttacgagtactgtaccaattttcttccctgggcggaaaaaattatga

SEQ ID NO: 68780 - DNA, 93 bp, Homo sapiens
  chr4:169744532-169744625
  hypo
tcagaaatccctttctcggcaaggtagttcacgcctagagtcccagcactttaagaggccaaggcaggtggatggatcacttgagctcaagag

SEQ ID NO: 68781 - DNA, 125 bp, Homo sapiens
  chr4:169751968-169752093
  hypo
gatatcagtaatgacggcaggatacagttacagtactaaaccctttaaacaagtggtctactggctattcaaaactagttagcatttattggcagttactgagtgaccacgttaccgaaacagcc

SEQ ID NO: 68782 - DNA, 151 bp, Homo sapiens
  chr4:169952681-169952832
  hypo
ctggaggccaccacacgcaccctggaggggcatcctggaggccaccgcacgcaccctggaggggcatcctggaggccaccgcacgcaccctggaggggcatcctggaaagcacctaggaatgtgcgagcttggccgcggctgtgcttgttc

SEQ ID NO: 68783 - DNA, 20 bp, Homo sapiens
  chr4:169978176-169978196
  hypo
ttagagcaggctcttgcgct

SEQ ID NO: 68784 - DNA, 79 bp, Homo sapiens
  chr4:169978255-169978334
  hypo
gctacagcgatcctcccacctcagcctccccaagtagctggaacagataacaggtgtgagccaccgcacctgatcccag

SEQ ID NO: 68785 - DNA, 186 bp, Homo sapiens; identical to SEQ ID NO: 19013
  chr4:170043183-170043369
  hypo

SEQ ID NO: 68786 - DNA, 215 bp, Homo sapiens; identical to SEQ ID NO: 19014
  chr4:170105280-170105495
  hypo

SEQ ID NO: 68787 - DNA, 24 bp, Homo sapiens
  chr4:170162086-170162110
  hypo
ttaaaactgcccaggccgggcgtg

SEQ ID NO: 68788 - DNA, 74 bp, Homo sapiens; identical to SEQ ID NO: 41091
  chr4:170192273-170192347
  hypo

SEQ ID NO: 68789 - DNA, 31 bp, Homo sapiens
  chr4:170211793-170211824
  hypo
gatttttaaatcacaccgtcagttgccacta

SEQ ID NO: 68790 - DNA, 77 bp, Homo sapiens; identical to SEQ ID NO: 19017
  chr4:170566082-170566159
  hypo

SEQ ID NO: 68791 - DNA, 76 bp, Homo sapiens; identical to SEQ ID NO: 19018
  chr4:170566218-170566294
  hypo

SEQ ID NO: 68792 - DNA, 38 bp, Homo sapiens; identical to SEQ ID NO: 19019
  chr4:170612104-170612142
  hypo

SEQ ID NO: 68793 - DNA, 71 bp, Homo sapiens
  chr4:170641909-170641980
  hypo
aagtctcgaaggaagcgagaacgaaatctctcattgtgtgccgtgtggctcaaaaccgaaaacaatgaagc

SEQ ID NO: 68794 - DNA, 216 bp, Homo sapiens; identical to SEQ ID NO: 19020
  chr4:170652115-170652331
  hypo

SEQ ID NO: 68795 - DNA, 42 bp, Homo sapiens
  chr4:170845920-170845962
  hypo
tttgcagtataagaatgtagccgaagggccgggcgcagtggc

SEQ ID NO: 68796 - DNA, 102 bp, Homo sapiens; identical to SEQ ID NO: 19021
  chr4:170865252-170865354
  hypo

SEQ ID NO: 68797 - DNA, 23 bp, Homo sapiens
  chr4:170903791-170903814
  hypo
tgttctggccaggcacggtggct

SEQ ID NO: 68798 - DNA, 30 bp, Homo sapiens
  chr4:170912645-170912675
  hypo
ttcagatgttagctcggtggacgtgacatc

SEQ ID NO: 68799 - DNA, 30 bp, Homo sapiens
  chr4:170913012-170913042
  hypo
ttcataatgagaggcggcagaggcacgctc

SEQ ID NO: 68800 - DNA, 21 bp, Homo sapiens
  chr4:170930251-170930272
  hypo
tgagctggacatggtggctca

SEQ ID NO: 68801 - DNA, 31 bp, Homo sapiens; identical to SEQ ID NO: 19023
  chr4:171014687-171014718
  hypo

SEQ ID NO: 68802 - DNA, 122 bp, Homo sapiens; identical to SEQ ID NO: 41103
  chr4:172735016-172735138
  hypo

SEQ ID NO: 68803 - DNA, 31 bp, Homo sapiens; identical to SEQ ID NO: 41104
  chr4:172735202-172735233
  hypo

SEQ ID NO: 68804 - DNA, 31 bp, Homo sapiens
  chr4:173298763-173298794
  hypo
ccacacgggagcccaccggttgtgggggagc

SEQ ID NO: 68805 - DNA, 42 bp, Homo sapiens
  chr4:173467909-173467951
  hypo
cttattagagtttttcaactccgctttatatatatatacgta

SEQ ID NO: 68806 - DNA, 1516 bp, Homo sapiens; identical to SEQ ID NO: 41105
  chr4:174089921-174091437
  hypo

SEQ ID NO: 68807 - DNA, 30 bp, Homo sapiens
  chr4:174157381-174157411
  hypo
ctatcagagagctggcgagcgagccccact

SEQ ID NO: 68808 - DNA, 19 bp, Homo sapiens
  chr4:174189980-174189999
  hypo
cacccggacacttgtttac

SEQ ID NO: 68809 - DNA, 389 bp, Homo sapiens; identical to SEQ ID NO: 41116
  chr4:174450337-174450726
  hypo

SEQ ID NO: 68810 - DNA, 724 bp, Homo sapiens; identical to SEQ ID NO: 41117
  chr4:174450751-174451475
  hypo

SEQ ID NO: 68811 - DNA, 30 bp, Homo sapiens; identical to SEQ ID NO: 41137
  chr4:175846410-175846440
  hypo

SEQ ID NO: 68812 - DNA, 149 bp, Homo sapiens; identical to SEQ ID NO: 19026
  chr4:175940747-175940896
  hypo

SEQ ID NO: 68813 - DNA, 30 bp, Homo sapiens
  chr4:177190406-177190436
  hypo
ccataaaagttcttcgcaaactcctattgg

SEQ ID NO: 68814 - DNA, 100 bp, Homo sapiens; identical to SEQ ID NO: 41143
  chr4:177240752-177240852
  hypo

SEQ ID NO: 68815 - DNA, 30 bp, Homo sapiens; identical to SEQ ID NO: 41148
  chr4:179699959-179699989
  hypo

SEQ ID NO: 68816 - DNA, 30 bp, Homo sapiens; identical to SEQ ID NO: 41152
  chr4:182872676-182872706
  hypo

SEQ ID NO: 68817 - DNA, 31 bp, Homo sapiens
  chr4:183081013-183081044
  hypo
atttatatgaaaaagacggaaagatttttga

SEQ ID NO: 68818 - DNA, 199 bp, Homo sapiens
  chr4:183626525-183626724
  hypo
atgtctgtattttatgatgtacgtatctgatgtctacactataccgaggattcaagccagtagcccggtgaaaatattatacggtactatttaatatgcctccaccaagcgcattgttgacagcggaaacaatgtgagttgttcatagccatacacatcagcaactgcttatatacagtgaaaccgacttgaccttccc

SEQ ID NO: 68819 - DNA, 31 bp, Homo sapiens; identical to SEQ ID NO: 3713
  chr4:183796433-183796464
  hypo

SEQ ID NO: 68820 - DNA, 160 bp, Homo sapiens
  chr4:183808103-183808263
  hypo
ggtggctgaggcagacggggccaggttggcgaggcacactgcacattcaggaaaggatggctgcagaagatgggagcggcccaggtgtccattggtgcgtgaatggctaaacaaaaggcagtatgtgaacacaatgggcgattcttcggccttcagatgg

SEQ ID NO: 68821 - DNA, 40 bp, Homo sapiens
  chr4:183808322-183808362
  hypo
ccagtcaaaaagagaaaattctgtacgattccacttatat

SEQ ID NO: 68822 - DNA, 196 bp, Homo sapiens; identical to SEQ ID NO: 19029
  chr4:183809395-183809591
  hypo

SEQ ID NO: 68823 - DNA, 31 bp, Homo sapiens; identical to SEQ ID NO: 19030
  chr4:183814349-183814380
  hypo

SEQ ID NO: 68824 - DNA, 30 bp, Homo sapiens
  chr4:183814913-183814943
  hypo
aggaacggtgacggcgacagccagggagcc

SEQ ID NO: 68825 - DNA, 30 bp, Homo sapiens; identical to SEQ ID NO: 19031
  chr4:183815698-183815728
  hypo

SEQ ID NO: 68826 - DNA, 318 bp, Homo sapiens; identical to SEQ ID NO: 19032
  chr4:183815956-183816274
  hypo

SEQ ID NO: 68827 - DNA, 204 bp, Homo sapiens
  chr4:183824598-183824802
  hypo
gtgtgtgtgtgaaaataaagacgagaaacgggggtgatgtggagaaacccgccgcatgcgtggaaaatgtgtgggctctgttctgtttccaccctgtgcccagagaggagggctctgctagaagaaaatgacagcgcaaaggaattctaccaaggtctggggagaaagtggtgggtcactcacgtaaaaggcagcccatcctgc

SEQ ID NO: 68828 - DNA, 31 bp, Homo sapiens
  chr4:184000059-184000090
  hypo
agctggagacattccccgccttccaccaagg

SEQ ID NO: 68829 - DNA, 2057 bp, Homo sapiens; identical to SEQ ID NO: 41165
  chr4:184019260-184021317
  hypo

SEQ ID NO: 68830 - DNA, 33 bp, Homo sapiens
  chr4:184051480-184051513
  hypo
gcgtgagccagcgctcccagccattcctaagta

SEQ ID NO: 68831 - DNA, 42 bp, Homo sapiens
  chr4:184160137-184160179
  hypo
gcactctaaaatattgcgcaacagaatgtgtttaaaacttaa

SEQ ID NO: 68832 - DNA, 44 bp, Homo sapiens; identical to SEQ ID NO: 19036
  chr4:184166140-184166184
  hypo

SEQ ID NO: 68833 - DNA, 31 bp, Homo sapiens; identical to SEQ ID NO: 19037
  chr4:184265808-184265839
  hypo

SEQ ID NO: 68834 - DNA, 31 bp, Homo sapiens; identical to SEQ ID NO: 19038
  chr4:184289494-184289525
  hypo

SEQ ID NO: 68835 - DNA, 30 bp, Homo sapiens; identical to SEQ ID NO: 19039
  chr4:184297616-184297646
  hypo

SEQ ID NO: 68836 - DNA, 31 bp, Homo sapiens
  chr4:184322586-184322617
  hypo
atcctgcactgagaatcgcatctgagtgcct

SEQ ID NO: 68837 - DNA, 188 bp, Homo sapiens; identical to SEQ ID NO: 41166
  chr4:184328289-184328477
  hypo

SEQ ID NO: 68838 - DNA, 43 bp, Homo sapiens
  chr4:184331271-184331314
  hypo
cattcttccatggggagtgaccgggccaaccatctctgtcatc

SEQ ID NO: 68839 - DNA, 38 bp, Homo sapiens
  chr4:184339995-184340033
  hypo
tatcaacacacttcatcgcaatccggaatgtgctgaac

SEQ ID NO: 68840 - DNA, 121 bp, Homo sapiens
  chr4:184375284-184375405
  hypo
ccacagactggtactggaggcttgcaggttggggaccccctgctctatggtgtagcatgaatttcacctgtgtcaatatagcagagatgagagtgatgacaattttcatccaatgatcctg

SEQ ID NO: 68841 - DNA, 29 bp, Homo sapiens
  chr4:184375704-184375733
  hypo
gcccggccgatcctgcttcttttatcccc

SEQ ID NO: 68842 - DNA, 134 bp, Homo sapiens
  chr4:184404651-184404785
  hypo
tccgccgcctcctccgagcgtttcaagaagctgcacgaaatcttccgcggcctccacgaagacctacaaggggtgcccgagcagctgctggggacggcggggaccgaagagaataagtcgatcagggattttga

SEQ ID NO: 68843 - DNA, 31 bp, Homo sapiens
  chr4:184546934-184546965
  hypo
tgacctggatgtcttacgtgctaccccaggc

SEQ ID NO: 68844 - DNA, 19 bp, Homo sapiens
  chr4:184582527-184582546
  hypo
ttttttttttttgagacgg

SEQ ID NO: 68845 - DNA, 31 bp, Homo sapiens
  chr4:184649712-184649743
  hypo
caggagtgaacgcctccgaactgtgtgtgta

SEQ ID NO: 68846 - DNA, 181 bp, Homo sapiens; identical to SEQ ID NO: 19042
  chr4:184667623-184667804
  hypo

SEQ ID NO: 68847 - DNA, 201 bp, Homo sapiens
  chr4:184670514-184670715
  hypo
ggcaattggcatcatccgaaatacagattttcaggaggagaaggattggtggactttgagatcatcaggccttgaagtgaacagaagaagagctgggccactctcatttgttcccacatcattactacatccacgtgttccttagcccatcagtcacagccagggagatggagtcacacgttcgtccgtgaacagatatta

SEQ ID NO: 68848 - DNA, 30 bp, Homo sapiens
  chr4:184675889-184675919
  hypo
caggcatgagccaccgcgccctgccggcag

SEQ ID NO: 68849 - DNA, 326 bp, Homo sapiens; identical to SEQ ID NO: 19043
  chr4:184678228-184678554
  hypo

SEQ ID NO: 68850 - DNA, 19 bp, Homo sapiens
  chr4:184685030-184685049
  hypo
gagccgctgcgccaggcct

SEQ ID NO: 68851 - DNA, 30 bp, Homo sapiens
  chr4:184921949-184921979
  hypo
attgcgaacttcgttcgatctacttgtctg

SEQ ID NO: 68852 - DNA, 31 bp, Homo sapiens
  chr4:184952936-184952967
  hypo
taacagggatggatcccgccttccctgcctc

SEQ ID NO: 68853 - DNA, 257 bp, Homo sapiens
  chr4:185121433-185121690
  hypo
acgtccggacccactcggcacatctgttggtgtgctgctctcccgagccatcgccgcgtttccttaccacactgttattactgcttgtgtgttggttaattacatgatctgtggtgcgtggaggcctctcaacaaaaggtggattcaagcatatgtaattggctatcgagtcactgtgaacctttttggcttcggttggggttagcacacctagttggccagaacctaattaacatcaattgcgcactcactaaatg

SEQ ID NO: 68854 - DNA, 38 bp, Homo sapiens; identical to SEQ ID NO: 19044
  chr4:185185201-185185239
  hypo

SEQ ID NO: 68855 - DNA, 387 bp, Homo sapiens
  chr4:185238061-185238448
  hypo
ttccacatctataacagagatcgtaatgcctacaacaccttctccccaccgttgatgtgaagattccatgagacggtgttagtggatcactttgtaaacgctaaaactccaggcaaacatctattgtcatttcttcaaacgaagggcccggcttcaaccacgtgtgtctacaaaaaaagggggcaagtttccatcaatactctaattacaaccaattgcatgcatttcccgtctgcccacatgggaagttaaacccctcaaagcacctttctattatttctgggggttcccctgggctgtgtcacacgtgttctggaataggttcccacgtacctgagcgtctgctcttcttccccgctcctgagcgaccaggactgccttcccagc

SEQ ID NO: 68856 - DNA, 17 bp, Homo sapiens
  chr4:185239349-185239366
  hypo
ggcgacagagtgagact

SEQ ID NO: 68857 - DNA, 125 bp, Homo sapiens; identical to SEQ ID NO: 19046
  chr4:185239991-185240116
  hypo

SEQ ID NO: 68858 - DNA, 37 bp, Homo sapiens; identical to SEQ ID NO: 19047
  chr4:185241302-185241339
  hypo

SEQ ID NO: 68859 - DNA, 43 bp, Homo sapiens
  chr4:185322204-185322247
  hypo
ggagagtgacttgtccagactcgcacagcttggagtatatgtg

SEQ ID NO: 68860 - DNA, 229 bp, Homo sapiens
  chr4:185344285-185344514
  hypo
tgtgtgttccatgggacatgacggtgttgctatgtgtgtgtagaccccgtgacgtcagtatgtgccaggtgtctcatccccgagtgaccagtcctgcacacgtggtggtggtacatgctgtgtatagacagacgcgccatgccagggcccaccatttgtacgtgtgtgcacaactctgcccatctgaaggaaggcaggagagatgagcgctgcttgacttcagaaaagc

SEQ ID NO: 68861 - DNA, 157 bp, Homo sapiens; identical to SEQ ID NO: 19049
  chr4:185352798-185352955
  hypo

SEQ ID NO: 68862 - DNA, 281 bp, Homo sapiens
  chr4:185353276-185353557
  hypo
gcctgtgtgtgaagacacattcgatccacactgttcgcagattctgtatctgtgaatttgcctactcactgaaatatatccacaacccccaaatcaatactcagatgcgttggtggtcactcggggacatgtgctgaattcaagtcatctgatgcacgtgttcccagctgaggctggacaaggccacactctgccttcccgctcttgctctcctatggcagacaagtgttcttttcacaggctacagagtgcgacatttgtcacatcgttgtgcttttttt

SEQ ID NO: 68863 - DNA, 31 bp, Homo sapiens; identical to SEQ ID NO: 19051
  chr4:185354512-185354543
  hypo

SEQ ID NO: 68864 - DNA, 171 bp, Homo sapiens
  chr4:185355393-185355564
  hypo
acagaaatcaggacattgtgtcgcgaccttgactctgccattgctggtgtgtgtccttgggctaatccctccatcttcccggcccacactttgatcatctagaaaaatgggacgttttaaacagatgattcctggggttatccatgatacgatgaatcataatctgatgtt

SEQ ID NO: 68865 - DNA, 103 bp, Homo sapiens; identical to SEQ ID NO: 19052
  chr4:185386796-185386899
  hypo

SEQ ID NO: 68866 - DNA, 58 bp, Homo sapiens
  chr4:185425791-185425849
  hypo
ggtcctcacccagcctggccacgctccagtggcatccgcagctctgctcttttcctca

SEQ ID NO: 68867 - DNA, 90 bp, Homo sapiens
  chr4:185426627-185426717
  hypo
gacacagacacagacactacacgtgtgcacacacagacgaatgaccatgtgaacacacagcaagaaagcagccacctgcaagctgccggg

SEQ ID NO: 68868 - DNA, 48 bp, Homo sapiens
  chr4:185480838-185480886
  hypo
gcctgcacctcagaagcggttgctgctgctgccgcggttgaaaccgcc

SEQ ID NO: 68869 - DNA, 163 bp, Homo sapiens
  chr4:185688831-185688994
  hypo
gaaccattaaaaacataagaacgttctgagagataacaaaagtcctgcctcaaaataaagagtaagtgaacactctttctggagattgctcatgcccctcgcgcctggccctggctgtgcggtccacgcaatgatacccaccgcagaggggctggtgttctct

SEQ ID NO: 68870 - DNA, 360 bp, Homo sapiens; identical to SEQ ID NO: 41180
  chr4:185747617-185747977
  hypo

SEQ ID NO: 68871 - DNA, 29 bp, Homo sapiens
  chr4:185767488-185767517
  hypo
caggcgtgagccaccgtgcctggccgctt

SEQ ID NO: 68872 - DNA, 70 bp, Homo sapiens; identical to SEQ ID NO: 19055
  chr4:185873078-185873148
  hypo

SEQ ID NO: 68873 - DNA, 4 bp, Homo sapiens
  chr4:185886290-185886294
  hypo
gcca

SEQ ID NO: 68874 - DNA, 217 bp, Homo sapiens; identical to SEQ ID NO: 41184
  chr4:185939324-185939541
  hypo

SEQ ID NO: 68875 - DNA, 30 bp, Homo sapiens; identical to SEQ ID NO: 19057
  chr4:186044812-186044842
  hypo

SEQ ID NO: 68876 - DNA, 79 bp, Homo sapiens
  chr4:186066015-186066094
  hypo
ctggaggggtaacctggccaacgtgatccgttacttccccacccaagctctcaacttcgccttcaaggacaagtacaag

SEQ ID NO: 68877 - DNA, 69 bp, Homo sapiens; identical to SEQ ID NO: 3724
  chr4:186130482-186130551
  hypo

SEQ ID NO: 68878 - DNA, 30 bp, Homo sapiens
  chr4:186143641-186143671
  hypo
taggtttacagcgccgtatacccctccctc

SEQ ID NO: 68879 - DNA, 131 bp, Homo sapiens
  chr4:186150228-186150359
  hypo
gaggccatgaaagactagcaacgcccgcggtgtggttgtggaatttttgtaggtggaacactaacactcctggagtgaagcagtggagatctcatctgtgggcgtggtacgacagagggccagggcacaag

SEQ ID NO: 68880 - DNA, 159 bp, Homo sapiens
  chr4:186203942-186204101
  hypo
gcacttttgatcaagggaaagcgtacaaacatcagccctcctgattcttgaaccgaactcagcacttgcaaagtcgtatcctcctctggagaaagaaaaccgagtgagtgccaggtaactctggaagcccgtgtccccgtgtcctcatggatagccagc

SEQ ID NO: 68881 - DNA, 96 bp, Homo sapiens; identical to SEQ ID NO: 19059
  chr4:186319409-186319505
  hypo

SEQ ID NO: 68882 - DNA, 14 bp, Homo sapiens
  chr4:186347895-186347909
  hypo
tagtggcgggccgg

SEQ ID NO: 68883 - DNA, 137 bp, Homo sapiens; identical to SEQ ID NO: 19061
  chr4:186348208-186348345
  hypo

SEQ ID NO: 68884 - DNA, 40 bp, Homo sapiens; identical to SEQ ID NO: 19062
  chr4:186348625-186348665
  hypo

SEQ ID NO: 68885 - DNA, 30 bp, Homo sapiens
  chr4:186356187-186356217
  hypo
cccacccccggaaccgtaggcatttaatac

SEQ ID NO: 68886 - DNA, 883 bp, Homo sapiens; identical to SEQ ID NO: 41196
  chr4:186455991-186456874
  hypo

SEQ ID NO: 68887 - DNA, 31 bp, Homo sapiens
  chr4:186580879-186580910
  hypo
agtccttattaagacacggtgagatatttga

SEQ ID NO: 68888 - DNA, 35 bp, Homo sapiens
  chr4:186933525-186933560
  hypo
gtaaaggagcccagtgcgagcgaagaaggactcag

SEQ ID NO: 68889 - DNA, 238 bp, Homo sapiens; identical to SEQ ID NO: 41198
  chr4:187026655-187026893
  hypo

SEQ ID NO: 68890 - DNA, 43 bp, Homo sapiens
  chr4:187027797-187027840
  hypo
tcatgtcaatatgaaaacaagcggccgggcacggtggctcacg

SEQ ID NO: 68891 - DNA, 42 bp, Homo sapiens
  chr4:187028079-187028121
  hypo
ggcgacagagagagagactccgtctcaaaaaaacaacaacaa

SEQ ID NO: 68892 - DNA, 31 bp, Homo sapiens; identical to SEQ ID NO: 3727
  chr4:187066081-187066112
  hypo

SEQ ID NO: 68893 - DNA, 30 bp, Homo sapiens
  chr4:187109222-187109252
  hypo
tactaaactttcaacgctcagcctaggcaa

SEQ ID NO: 68894 - DNA, 180 bp, Homo sapiens
  chr4:187206901-187207081
  hypo
ataaaatggcagaaagcgggtatgatattgccttgttgaaactggaaaccacagtgaattacacaggtacggagaattttatccggaaagttgtctccaatggtgaactggataaaatgtttaacactactagacttacggcctgaccctgccaatctctccatgcgttatcatcatgaa

SEQ ID NO: 68895 - DNA, 30 bp, Homo sapiens
  chr4:187313058-187313088
  hypo
tcagacagcagcgatcgtggctgttgagga

SEQ ID NO: 68896 - DNA, 37 bp, Homo sapiens
  chr4:187509899-187509936
  hypo
gacatgggcatgctctcgacagcgggcgcctcgaagt

SEQ ID NO: 68897 - DNA, 200 bp, Homo sapiens
  chr4:187527078-187527278
  hypo
cttttaatactgatagcgacttcttgaattctacgtttcccatttttctagaaagaaacctttggataagaaagaaaagcaacagaggccaatggaaaagctcatttcaaagaaccccaggaccaccttggcactcgaagcccacctggataatgacactgtagtttcccctggagaagacgggcgcgttgtcattgaca

SEQ ID NO: 68898 - DNA, 178 bp, Homo sapiens; identical to SEQ ID NO: 19064
  chr4:187550653-187550831
  hypo

SEQ ID NO: 68899 - DNA, 31 bp, Homo sapiens
  chr4:187552633-187552664
  hypo
tggtatcgtagtgtctcgcctcccagctgat

SEQ ID NO: 68900 - DNA, 30 bp, Homo sapiens; identical to SEQ ID NO: 41200
  chr4:187639298-187639328
  hypo

SEQ ID NO: 68901 - DNA, 1340 bp, Homo sapiens; identical to SEQ ID NO: 41205
  chr4:187647033-187648373
  hypo

SEQ ID NO: 68902 - DNA, 31 bp, Homo sapiens
  chr4:187680707-187680738
  hypo
cgccctcgggcccttccgggccgcttgcttt

SEQ ID NO: 68903 - DNA, 268 bp, Homo sapiens
  chr4:187762169-187762437
  hypo
gatgttcaagtgcacaggtcacgggtaaggacggaggcatagattaatccggcccctcactgccccgaggaacccaggatctggcacggtcctcggcatgctcatgctgcagtgaatgagcgagtgagagtgaactgacaggcgcggggaggaagaggctgaagcacgcttcacttgcccgcagttttgtgagggcggggtctgtaggccggaaaggaattcttcaccccggaagtgaatgcttgtcgcatgcattaaatagcctgat

SEQ ID NO: 68904 - DNA, 43 bp, Homo sapiens
  chr4:187796039-187796082
  hypo
aatcctccttattgccaataggataagtcgtcctattttccca

SEQ ID NO: 68905 - DNA, 273 bp, Homo sapiens
  chr4:187840672-187840945
  hypo
tcagcgagaggcaggcgccagccgctctgcccaggcctgccccgcgctgcacatgattcagtgggttggggtgaggtagggtgtggaagcaacacaggaatgggtcacgaatagcaaatagtctctttccaaaaggagatcatgtacagacattgtactgggtctttgggaatgccgcaggggatcctgcgggaacagcgagaaagagggagagaggggctcgcagttacaaaagaaggttcgggtggcgttaggaggcggcagggacgtagc

SEQ ID NO: 68906 - DNA, 31 bp, Homo sapiens; identical to SEQ ID NO: 3733
  chr4:187855389-187855420
  hypo

SEQ ID NO: 68907 - DNA, 31 bp, Homo sapiens; identical to SEQ ID NO: 19067
  chr4:188428284-188428315
  hypo

SEQ ID NO: 68908 - DNA, 31 bp, Homo sapiens
  chr4:188593959-188593990
  hypo
tgtcagaagccataatcggtgtgtgctaccc

SEQ ID NO: 68909 - DNA, 31 bp, Homo sapiens; identical to SEQ ID NO: 19068
  chr4:188682666-188682697
  hypo

SEQ ID NO: 68910 - DNA, 30 bp, Homo sapiens; identical to SEQ ID NO: 19069
  chr4:188858956-188858986
  hypo

SEQ ID NO: 68911 - DNA, 95 bp, Homo sapiens
  chr4:189100359-189100454
  hypo
gggttcaggccctacagcctgccatgcctgagtttcccctccgctgcgggctcctgcgcggcccgagcctgccctacgagcgctgtcccctgctc

SEQ ID NO: 68912 - DNA, 524 bp, Homo sapiens; identical to SEQ ID NO: 19071
  chr4:189552364-189552888
  hypo

SEQ ID NO: 68913 - DNA, 224 bp, Homo sapiens
  chr4:189717744-189717968
  hypo
ctttgcacctcacagaccctgcgcccatcacagacgccgcgcccctcacagacgccgcgccgcacctcacagacgccgcgccacacctcagaccctgcgccgcacctcacagaccctgcgccctacatcacagacgccgcgccacacctcacagacgccgtgccacacctcacagaccctgcgccccacctcacagacgccgcgccacacctcacagaccccgc

SEQ ID NO: 68914 - DNA, 30 bp, Homo sapiens
  chr4:189718329-189718359
  hypo
tacgtcacagacgccgcgtagcacctcaca

SEQ ID NO: 68915 - DNA, 285 bp, Homo sapiens; identical to SEQ ID NO: 19072
  chr4:189956759-189957044
  hypo

SEQ ID NO: 68916 - DNA, 30 bp, Homo sapiens
  chr4:190095515-190095545
  hypo
aatcaccttgtcttccgtgactgtgacaat

SEQ ID NO: 68917 - DNA, 225 bp, Homo sapiens; identical to SEQ ID NO: 19073
  chr4:190345361-190345586
  hypo

SEQ ID NO: 68918 - DNA, 744 bp, Homo sapiens; identical to SEQ ID NO: 19074
  chr4:190462466-190463210
  hypo

SEQ ID NO: 68919 - DNA, 150 bp, Homo sapiens
  chr4:190509468-190509618
  hypo
caggccccctccttttcgaagatctttctttccatgcttttgcctgacttcatggctcctcgctccccgcatcacgccgtggtggtgcctggatgcgtgacgatgtactgaccacattctgcggcaatcactgttcgtgaagctgcctcc

SEQ ID NO: 68920 - DNA, 44 bp, Homo sapiens
  chr4:190767153-190767197
  hypo
ttgaactatggttccgtgctgtgtccctcggctctctcccattc

SEQ ID NO: 68921 - DNA, 29 bp, Homo sapiens
  chr5:97648-97677
  hypo
acggaatcgcacaatatatagggttgtgt

SEQ ID NO: 68922 - DNA, 533 bp, Homo sapiens
  chr5:139616-140149
  hypo
tcttcctgcacccaggctggccgctgtgcgcccatgagaaggtggtggtgcagctggcgtccctgcacggagtcaggctccagcccggggacttctacctgcaggtcacgtcggcggggaagcagtcagctagactggtcttgaaatgcctgtcccggctgggaagaggcacagaggaagtcaccgtccctgaggccatgtatggctgtgtcttcacgggggcgttcctggagtgggtgaaccgggagcggcgccatgtccccctgcaaacctgcttgctgacctcaggcttggccgtccaccgagccccgtggagcgacgtcactgaccctgtctttgtccccagccctggagccatcctgcagagctactccagctgcacaggtcctgagcggctgcccagcagcccctcagaggccccagtccccacccaagccacagcaggcccccatttccagggaagcgcctcttgccccgacaccctgacctcaccctgccgccgagggcatacgggcagcgaccagctcaggcac

SEQ ID NO: 68923 - DNA, 532 bp, Homo sapiens
  chr5:142772-143304
  hypo
cacatgcctcacacaatcacacgtgccagagttacacataccacacatgcacgcgcagtcacacaccacatgcagtcacgcatgctgcactttgagcagatgagtagggatgagatgacctgttcctcctgaggcgtctgcaggtagtgagcatgtctgtgagctggagactccgtctccgtgatgacgccgcgtgtccgtgatgacgccgcatgccctgtgcagtgggacatgctttcacttcccgtgtgaactgggacaagttttctcggaaccccctactttcatgcgtgtttttgtcccatggttcatagcaagctgagcatagcagctgctttcaacgcgcaggaaaaccttcatctttgacacggcctctttcctttgtccagacgttcttgcatcctcagcctgtgtcagcacagacggcggcagcctccattgccacaaccccagcgggccttccgatgtgcctgcccggcagccacaccccgagcaagaagggtggccacccggcacaggagacttccccagc

SEQ ID NO: 68924 - DNA, 31 bp, Homo sapiens
  chr5:156162-156193
  hypo
ttattcctccccatcccgtgcaggaagtcgc

SEQ ID NO: 68925 - DNA, 121 bp, Homo sapiens
  chr5:164482-164603
  hypo
actgatctgacaggaggcggagctcacacagtaatgatgtgactgggggcggagttcacccagtaatgctgtgacagggggcggggctcacagtaatgttgtgacggagcagagctcacac

SEQ ID NO: 68926 - DNA, 121 bp, Homo sapiens
  chr5:164902-165023
  hypo
tctgacggggcggagctcacacactaatgctgtgacggagcggagctcacactaatgctgtgacagggggcggggctcacagtaatgctctgacggggcggagctcacacagtaatgctgt

SEQ ID NO: 68927 - DNA, 31 bp, Homo sapiens; identical to SEQ ID NO: 19076
  chr5:174970-175001
  hypo

SEQ ID NO: 68928 - DNA, 30 bp, Homo sapiens
  chr5:181711-181741
  hypo
tgtgcagtgataagcgaccgggctcccaaa

SEQ ID NO: 68929 - DNA, 30 bp, Homo sapiens; identical to SEQ ID NO: 41212
  chr5:188656-188686
  hypo

SEQ ID NO: 68930 - DNA, 151 bp, Homo sapiens
  chr5:192514-192665
  hypo
ttctccacgctgaccgggaagatcccgacgctgcttgggtgagtcttggggaggggactgagggcgggctggtggctgcagaggcaaggagagatcgtccaggggcctgctcatgtccaaggccatgaggctacacggcctccagcctctc

SEQ ID NO: 68931 - DNA, 30 bp, Homo sapiens
  chr5:203686-203716
  hypo
ctctcatactgccacgtgggctctatgagc

SEQ ID NO: 68932 - DNA, 116 bp, Homo sapiens
  chr5:230940-231056
  hypo
ggtccagatgtgggccgctgtgtgcagtcactgctctctattgtttccagaggctacgggcgcacctacttcagctgcacgtctgcccacaccagcactggcgacggcacggccat

SEQ ID NO: 68933 - DNA, 123 bp, Homo sapiens; identical to SEQ ID NO: 19078
  chr5:233692-233815
  hypo

SEQ ID NO: 68934 - DNA, 48 bp, Homo sapiens; identical to SEQ ID NO: 19079
  chr5:235347-235395
  hypo

SEQ ID NO: 68935 - DNA, 31 bp, Homo sapiens; identical to SEQ ID NO: 19080
  chr5:236678-236709
  hypo

SEQ ID NO: 68936 - DNA, 93 bp, Homo sapiens
  chr5:279480-279573
  hypo
ttaggctcttgattttccccacgagatatgcgtgccccagggaacggcggctctggctgtggaatgagaggcgtgtggagcaggcatggttcc

SEQ ID NO: 68937 - DNA, 30 bp, Homo sapiens
  chr5:285749-285779
  hypo
ggttggtgcagctggcgacccgggtgggag

SEQ ID NO: 68938 - DNA, 68 bp, Homo sapiens
  chr5:286416-286484
  hypo
ttgagggccatgcagctggagacccatgggggagctgatgttgttttgagagccgtgcagctggagat

SEQ ID NO: 68939 - DNA, 30 bp, Homo sapiens
  chr5:306771-306801
  hypo
gtggaagtacatcacggactggcagaacgt

SEQ ID NO: 68940 - DNA, 471 bp, Homo sapiens
  chr5:309028-309499
  hypo
cacattccagcactcaccacccggcaccgggacagctgactcagcacgtgccgtttaggttgctgtaaacagccggtgagattctcccctctggtgggcagtgcgtgtctgacaaaggcagtcgggcggagaacagttcctccgctgtggtcctttgccactgtaccaggcccccaagagctggggggagccccagggagcctcagcctgttgagtgggggcagctggtttgtcctccgaggtggaagaggtgatttctgaggaggtcatgctccgcttggctcgttcacagcatttcagagagtccgaaagaggagaaagaccttggcaaggggtgtgtcaggggtgggcccagggacgctggtggcctcatgtggactgactttcatgaacagaaactcagaaacagttgcttctggattttggcttctcagataaacattctttttgtagttcgtttgttcatccctc

SEQ ID NO: 68941 - DNA, 100 bp, Homo sapiens
  chr5:310602-310702
  hypo
agtaaggatatgccacagtcacgaaggcagtgggatttcgagggagggaagggaaggcggcaggcggggcatgccctccggggtgcccgaacacacctgc

SEQ ID NO: 68942 - DNA, 119 bp, Homo sapiens
  chr5:314538-314657
  hypo
cggatatattcagacgttacgacacggatcaggacggctggattcaggtgtcgtacgaacagtacctgtccatggtcttcagtatcgtatgaccctggcctctcgtgaagagcagcaca

SEQ ID NO: 68943 - DNA, 30 bp, Homo sapiens
  chr5:317825-317855
  hypo
gaggtgcaggtgcacgccgtacaccctcac

SEQ ID NO: 68944 - DNA, 442 bp, Homo sapiens; identical to SEQ ID NO: 41214
  chr5:343970-344412
  hypo

SEQ ID NO: 68945 - DNA, 83 bp, Homo sapiens; identical to SEQ ID NO: 41215
  chr5:368380-368463
  hypo

SEQ ID NO: 68946 - DNA, 30 bp, Homo sapiens
  chr5:370337-370367
  hypo
aagccccgtcctcccgggccctcgctggtg

SEQ ID NO: 68947 - DNA, 30 bp, Homo sapiens; identical to SEQ ID NO: 41216
  chr5:372537-372567
  hypo

SEQ ID NO: 68948 - DNA, 266 bp, Homo sapiens; identical to SEQ ID NO: 41217
  chr5:373103-373369
  hypo

SEQ ID NO: 68949 - DNA, 286 bp, Homo sapiens; identical to SEQ ID NO: 41219
  chr5:374578-374864
  hypo

SEQ ID NO: 68950 - DNA, 154 bp, Homo sapiens
  chr5:375540-375694
  hypo
aagggctgtgtctccctaacccgcggaagtgggcagatccggtgaagcatggccgcctgggctgtgccacgccgggaccccggcacaggctgcccaccgtgaaggacggtgtgctggccttaaggtgccatgcgtgatgacagtttttatgcca

SEQ ID NO: 68951 - DNA, 268 bp, Homo sapiens; identical to SEQ ID NO: 41220
  chr5:377104-377372
  hypo

SEQ ID NO: 68952 - DNA, 30 bp, Homo sapiens; identical to SEQ ID NO: 41221
  chr5:393543-393573
  hypo

SEQ ID NO: 68953 - DNA, 31 bp, Homo sapiens
  chr5:397105-397136
  hypo
agcccctgaccatccacgttagcccctgacc

SEQ ID NO: 68954 - DNA, 30 bp, Homo sapiens; identical to SEQ ID NO: 19085
  chr5:427605-427635
  hypo

SEQ ID NO: 68955 - DNA, 203 bp, Homo sapiens
  chr5:427952-428155
  hypo
tgtttggacagaagaagaaggcgccgtcaggagccatgctcccgccgcggctgtcgctgttctgcattgcggcacccgttctcctcccctccgcagcggagatgaaaatgaggagcgcgctcctgagggcaaaacccagagcagacaccgcagccaccgcggatgcaaagtgagtaagactcgcccttcacagccacatggtg

SEQ ID NO: 68956 - DNA, 164 bp, Homo sapiens
  chr5:447731-447895
  hypo
cagtcgctggcagacgtcagcaaggactggaggcagagcatcaacaccattgagagcctcaaggacgtcaaagacgccgtggtgcagcacagccagctcgccgcagccgtggagaacctcaagaacatcttctcaggtaccagccagacgccgaggcacttgcc

SEQ ID NO: 68957 - DNA, 373 bp, Homo sapiens
  chr5:453927-454300
  hypo
tctgacaagatgtggcttgtccgccacctggaaattataaggaagtacgtcctggatgacctcattgtcgccaaaaacctgatggttcagtgctttcctccccactatgagatctttaagaacctcctgaacatgtaccaccaagccctgagcacgcggatgcaggacctcgcatcggaagacctggaagccaatgagatcgtgagcctcttgacgtgggtcttaaacacctacacaaggtaaagctaacctggcgcctgtgttggctcttaggtagaagccgtgtgtgagaggggcctgcagctgcttgctggagagccgacctcagggtgttgctctgggcaggtgctccgagcccacagccttggtttcc

SEQ ID NO: 68958 - DNA, 45 bp, Homo sapiens; identical to SEQ ID NO: 19087
  chr5:457005-457050
  hypo

SEQ ID NO: 68959 - DNA, 191 bp, Homo sapiens
  chr5:462212-462403
  hypo
ggagcggtggaggccggcctgcccagccgctgtgttgaacctgaaccctttccttgcagggaatccatagtcagtttaaaaagaaagtatttaaagaatgaagtggaagagggtgtgtctccgagccagcccagcatggacgggattttagacgccatcgcgaaggagggctgcagcggtttgctggagga

SEQ ID NO: 68960 - DNA, 166 bp, Homo sapiens; identical to SEQ ID NO: 19089
  chr5:463462-463628
  hypo

SEQ ID NO: 68961 - DNA, 63 bp, Homo sapiens
  chr5:464585-464648
  hypo
tgctcagaattcagcatccagcgagtccctccgtgagtgaacgttcacttgttgtcctatcag

SEQ ID NO: 68962 - DNA, 1062 bp, Homo sapiens
  chr5:465062-466124
  hypo
cccgctcctcctctgcggtgagatgccagagccgtggcggagcgaggaggagtgggctcagagcctccggggagccaccgggagccccagcctgggtttcaatgagggtgctcctggccgccagagccgtggagcctgccgctgaccgcgcgtgtctccccagaggatgacggccgaggcgcaccggcgcgtggtggtggagtacctgcgggcggtcatgcagaagcgcatttccttccggagcccggaggagcgcaaggagggtgccgagaagatggttagggaggcagagcagctgcgcttcctgttccggaagctggcgtccgtgagtgtcgcgcaggtccgggctggagaaggcctgtcgctccgcggccctgttcagcctccaccccgggactcgggccagtagatgggagtgtgtcgtgtgtttgtcaggcggggggagcctgggtccaggtcctgcctgaccttgtggttggacacgaatgtccacagaggtagacgcgccggccccgccggcttcccgaggccgcccacagctccctgacggacgcttcccagtctgtcctgcgctgcgaggtgctggctgcctcccacggtctcgccctcaccccagacccctggccctgtcactgagctttcagagtagatcctgaggagtcaggtgaagagggaggttcccagtcaggaaggggctcagccagaatccagctgctcccagcgccgcgggacagccgagggcggctcctcacattgctgctgccttccagggtttcggggaagacgtggacggatactgcgacaccatcgtggctgtggccgaagtgatcaagctgacagacccttctctgctctacctggaggtctccactctggtcagcaagtatccagacatcaggtaagggatgcacgtcttagaatcctgccttagaatcctggagtggagcggcaggtccctccttctgtctggggcgggtggggctcctggttcgcaagttcagccctgcagcacggcaagggttcaggtgcggcacagcggggcccaggcgcagggagcagagc

SEQ ID NO: 68963 - DNA, 83 bp, Homo sapiens
  chr5:466514-466597
  hypo
agccgcgtcacctccgtcccatcatctcgctggttaaacgtggaaaaacggggtcttgagctctccacggtctcccctctggt

SEQ ID NO: 68964 - DNA, 30 bp, Homo sapiens
  chr5:467006-467036
  hypo
caagtagcctccgccggcctgccctgctcg

SEQ ID NO: 68965 - DNA, 1688 bp, Homo sapiens; identical to SEQ ID NO: 41222
  chr5:472579-474267
  hypo

SEQ ID NO: 68966 - DNA, 281 bp, Homo sapiens
  chr5:476597-476878
  hypo
gaggaagccgccccacggggtccctgcggggtcctccagcccccagcccgcagtgcccacctcctgccgcggcttgtacaggtactgctgtagcgtgtggtgcgtgaccatgtcctccgcgtcccggatgctccgccgtcgctgctccagagactgcatgtccaggcagacagcgctgacattttctctcctgcgtggggaccagcgctgagccatacaggctccctcagggtggggtctcttgcgcgcccctcgccttcccacggcgggcatctggccct

SEQ ID NO: 68967 - DNA, 41 bp, Homo sapiens; identical to SEQ ID NO: 19093
  chr5:481006-481047
  hypo

SEQ ID NO: 68968 - DNA, 481 bp, Homo sapiens
  chr5:488123-488604
  hypo
ctgtgggtccaaagtcacagacgctctggggaccaggagggcgggatttcaacagcgccatcattaaccctgaagctatggagtgggcgggcagggcctgggaactgtggaagatacaaagaagcctcgcgaaagctgccagtcgttctgagctgggaggaaggaggtggagggacgggacgcccccgggaggggagtttgaggacagggtttcacgccctcctttgctgactgaccgatggggggtgagacggggcccaggcctcccacggctcgcccgctctggagcggtggctccgttgctcaccacggtgactgcgtcgttcagcagcgactccccgaagacgatgatgaacaggacctcgttgacatggacctcctcaaacacggccaggacggccaccgggtccacagccgccatgaggctgccaaacaggaggaagtccagcagcccaatctgcaggtcgcctggaagacaagc

SEQ ID NO: 68969 - DNA, 30 bp, Homo sapiens
  chr5:490642-490672
  hypo
gccacggagtgtgcccggctctcaaaggag

SEQ ID NO: 68970 - DNA, 1146 bp, Homo sapiens; identical to SEQ ID NO: 41223
  chr5:491032-492178
  hypo

SEQ ID NO: 68971 - DNA, 31 bp, Homo sapiens
  chr5:492757-492788
  hypo
ctggatggacggtggtcgggggggggcctct

SEQ ID NO: 68972 - DNA, 74 bp, Homo sapiens
  chr5:500506-500580
  hypo
ggggtggcaggagacggggacgggaccctccagggacacaggaaacacacaccaagcacggagaggccaggcgg

SEQ ID NO: 68973 - DNA, 194 bp, Homo sapiens
  chr5:508170-508364
  hypo
attcggcttcttggcgcccgcccctcacaccagtggagccaggggaaggggtgaccagtgctcaggcgcggagcccagctatggaatcacaagcagcccagagcgcgcccgggatggagatgccgcagggagacgcaggcctcaggatggagtagccgcaggcagacgcagtcctcagcgcgccagggatggag

SEQ ID NO: 68974 - DNA, 259 bp, Homo sapiens
  chr5:510097-510356
  hypo
gagcaaggatgggggaggcttcgggagaagaggggctccaacgatgtggaggagaatgtgttggggagacaggtgctgggctggaccggggagccgctggaggcctgggggcattggaagcaggaggatccgtgggtgcttgggcccctggcggagcgcggcagcttgttgggagctgggagcagagccacttactgtgagctcagagaggctgccaagagcagcgacagagaccatcgttccctccaggcaaagccag

SEQ ID NO: 68975 - DNA, 23 bp, Homo sapiens
  chr5:523779-523802
  hypo
tgctgggtttcatgcgggtagca

SEQ ID NO: 68976 - DNA, 250 bp, Homo sapiens; identical to SEQ ID NO: 41225
  chr5:524112-524362
  hypo

SEQ ID NO: 68977 - DNA, 30 bp, Homo sapiens; identical to SEQ ID NO: 41226
  chr5:530631-530661
  hypo

SEQ ID NO: 68978 - DNA, 165 bp, Homo sapiens
  chr5:532004-532169
  hypo
tgttcagtcaatcttagctcacgctggatcccagatctgtccctccccaggagcgctcagctctccactctgccccatcctgcagcttcggctttgactcagacaggccgggagatccctggtatttctggtcagatgcctgccgtggggagaagaagaaaactc

SEQ ID NO: 68979 - DNA, 30 bp, Homo sapiens
  chr5:535470-535500
  hypo
tgtccctttgcagtcggacatcattgcggg

SEQ ID NO: 68980 - DNA, 78 bp, Homo sapiens
  chr5:537334-537412
  hypo
gctgcacaggtgggcgatgctttgctccggccggctcacctccccgatgaaagcccgctcaacggcatctgcagggca

SEQ ID NO: 68981 - DNA, 30 bp, Homo sapiens
  chr5:537679-537709
  hypo
tgcgggtccctacccgggtttcatctgata

SEQ ID NO: 68982 - DNA, 133 bp, Homo sapiens
  chr5:538680-538813
  hypo
ccatcacctgtgcctgcctgacgatgccgcctcagccgcccagggctccctcagggaaaacgtcgccaagcaccgacggctcaagggagtaaccgcgcctctgggagatggcgtccctgacttggctgtggca

SEQ ID NO: 68983 - DNA, 1039 bp, Homo sapiens
  chr5:554298-555337
  hypo
tggcaaggaaaataaacgagccgttacctttcaccaaatcgcactgtattttattcatttagggtgtacacacctatctgctcttcaaaggaattttgggcagattgtaaaattacgctcaacatacagcaaggcgactataaatacaaaagcagcactgaggtgctggtgctgcgggtgggtcacgggataaaccaggcgtggggtctgggtcacgggatgacccgagggtgggtcacgggataaaccaggggtggggtctgggtcacaggatgacccgggggtgggtcacgggataaaccaggggtggggggctgggtcacgggatgaacggggggcgggtcacaggatgaaccgtgggcgggtcatgggataaaccagggtggggtctgggtcacaggatgacccgggggtgggtcacgggataaaccaggggtggggggtgggtcacgggatgaacggggggcgggtcacaggatgaaccgtgggtgggtcatgggataaaccagggtggggtctgggtcacgggatgaacggggttgggggctgggtcacgggatgaaccggggggtgggtcacgggatgaacggggggggggtgggtcacgggctaaaccggggttgggggtgggtcacgggatgaacggggttgggggctgggtcacgggatgaacggggggtgggtcacgggatgaacagggggtgggtcacgggataaaccggggtggggggctgggtcatgggatgaacggggggtgggtcacgggatgaaccggggtggggggtgggtcatgggatgaaccggggtggggggctgggtcatgggatgaaccggggtggggggctgggtcatgggatgaacgggggggtgggtcacgggatgaaccggggtgaggggtgggtcaccggatgaacgggggtgggtcatgggatgaaccaggggtttccgaggtcgcaggcggcttccttgccccgtgacctggctggggctgcttaacttatgagcagttcggcttcctcgcgggcgccggggcggtgct

SEQ ID NO: 68984 - DNA, 30 bp, Homo sapiens
  chr5:555659-555689
  hypo
caggtgtgagtccctcgagccctccgcata

SEQ ID NO: 68985 - DNA, 221 bp, Homo sapiens
  chr5:559380-559601
  hypo
actgttcggatttcacgtctccttgattgacagcttatgttttgcgaggaaattgttcgttttgtatgtgtgcatctgtacatgcgttatgcacgcgggacacgcacacggagataccgagtttccgccgggtccctttgctcccatttctgtttccaacatcaaccatttgtgcttctcttttttcgtgccagcgtgtcgtgttgtctgtttcattattt

SEQ ID NO: 68986 - DNA, 319 bp, Homo sapiens; identical to SEQ ID NO: 19103
  chr5:600956-601275
  hypo

SEQ ID NO: 68987 - DNA, 30 bp, Homo sapiens; identical to SEQ ID NO: 19104
  chr5:602422-602452
  hypo

SEQ ID NO: 68988 - DNA, 30 bp, Homo sapiens
  chr5:608783-608813
  hypo
ccctgtgaggaacccgggatagaacctggg

SEQ ID NO: 68989 - DNA, 30 bp, Homo sapiens
  chr5:609251-609281
  hypo
ttcccggcttctctgcggctctgtgctttt

SEQ ID NO: 68990 - DNA, 30 bp, Homo sapiens
  chr5:609584-609614
  hypo
agcagggcggcatatcgaatctcggtgccc

SEQ ID NO: 68991 - DNA, 52 bp, Homo sapiens; identical to SEQ ID NO: 41228
  chr5:612240-612292
  hypo

SEQ ID NO: 68992 - DNA, 17 bp, Homo sapiens
  chr5:613502-613519
  hypo
ttagacggagtctcact

SEQ ID NO: 68993 - DNA, 30 bp, Homo sapiens
  chr5:619721-619751
  hypo
cattatggaggccacgtctgacaccagctc

SEQ ID NO: 68994 - DNA, 30 bp, Homo sapiens
  chr5:620319-620349
  hypo
ttgagcctgactaccgcctttttgttgtgc

SEQ ID NO: 68995 - DNA, 190 bp, Homo sapiens
  chr5:623329-623519
  hypo
agaaggagcacaaccgtctccccgcatgtgagagatgcttcctgcagtggcgctggcagtcagaggcgctgcgggaaccacggaggtgcggggccccgggacggcctgctgccctgcgtggtgcctcctggagtgggctcggtccttggctccgcgtgggtcatggaaaggccccggtggtggaggaggc

SEQ ID NO: 68996 - DNA, 78 bp, Homo sapiens
  chr5:633980-634058
  hypo
tgcgagtgggacctcggcaggcctcccgggagcacgagcttcagccagaaggggcgtgaggccgactctcgtggttcc

SEQ ID NO: 68997 - DNA, 31 bp, Homo sapiens; identical to SEQ ID NO: 19108
  chr5:638628-638659
  hypo

SEQ ID NO: 68998 - DNA, 31 bp, Homo sapiens; identical to SEQ ID NO: 19109
  chr5:638894-638925
  hypo

SEQ ID NO: 68999 - DNA, 566 bp, Homo sapiens
  chr5:640117-640683
  hypo
tgagcttgccatcgtcggtggcggggggactgtcccaggcccaggccactgtcccagtgtggagttgccagctgtcgtctgcatggtggtttccacacagggcagtcggtgcttgtggaaggcgcagcgagttgtggcggcgccactgaaaccttgagacgtggcggcccctggttgccccttttcttggaggtcacctcttctctttcttcagttcccaccctgcccgtgtgtggacgcacagagcctgaggtggttttgtggcgccaacacccctttcccctctccctacctgtcgtctttttgaggcatcgtctgtgtgattcaaaacatactgagccgattttgtttacatttcatcctttaagcctaagtgctaatgtaatatttggttttcactcctagctcaggcaagacacatcttgtcatctgttgaagaattcacagcagctcaggacagctctgcgatggtgggtgaagatgtcggctccctggctctggagagtaagtccctgcaaagccgccttgctgagcagcagcagcagcacgcccgggagatgagcgag

SEQ ID NO: 69000 - DNA, 30 bp, Homo sapiens
  chr5:645301-645331
  hypo
tctgtcccaaccagcggtggcctttgcggc

SEQ ID NO: 69001 - DNA, 98 bp, Homo sapiens
  chr5:646056-646154
  hypo
gtcactcctgctcccgttggcgccctgtgtggatggtgaattcggcttccttacactgtgggagcgtcactcttgctcccatcggcggcctgtgtgga

SEQ ID NO: 69002 - DNA, 146 bp, Homo sapiens; identical to SEQ ID NO: 19112
  chr5:653037-653183
  hypo

SEQ ID NO: 69003 - DNA, 30 bp, Homo sapiens
  chr5:663624-663654
  hypo
cccccagccctcagcggaccatgctggctg

SEQ ID NO: 69004 - DNA, 30 bp, Homo sapiens
  chr5:666692-666722
  hypo
cttggcagcatgggcgcaggcccacgcctc

SEQ ID NO: 69005 - DNA, 96 bp, Homo sapiens; identical to SEQ ID NO: 19113
  chr5:667281-667377
  hypo

SEQ ID NO: 69006 - DNA, 681 bp, Homo sapiens; identical to SEQ ID NO: 41229
  chr5:676622-677303
  hypo

SEQ ID NO: 69007 - DNA, 585 bp, Homo sapiens; identical to SEQ ID NO: 19116
  chr5:677570-678155
  hypo

SEQ ID NO: 69008 - DNA, 36 bp, Homo sapiens; identical to SEQ ID NO: 3744
  chr5:693797-693833
  hypo

SEQ ID NO: 69009 - DNA, 146 bp, Homo sapiens
  chr5:750520-750666
  hypo
cctgcctccatcctcacgaggccccctcccctctgcgtctctcctttctcttacaagcacactcgtggctagatttgggctccctgggacatcccagcatgaccctcccacctcagatattaagtcacagccgcaggcccatttcc

SEQ ID NO: 69010 - DNA, 41 bp, Homo sapiens
  chr5:760083-760124
  hypo
gccgtcctgagcccagcgccggccagcgggaggggcagcat

SEQ ID NO: 69011 - DNA, 30 bp, Homo sapiens
  chr5:851411-851441
  hypo
gttctgaacacgctgcggctgctcctggcc

SEQ ID NO: 69012 - DNA, 216 bp, Homo sapiens
  chr5:851706-851922
  hypo
tcttgcagtcgtgaacgtccatgatacagtggctctgcgctgcctttggtggctcctccctggtcctctaaatgtgacaccaggcggatgcggggccacaggaccctggggcttgagtcacacaagaatgtctctgggagacccgagagactcacagttatgaaacaggaccatggttctttggccgggcgcgggggctcacgcctgtaatcccag

SEQ ID NO: 69013 - DNA, 30 bp, Homo sapiens; identical to SEQ ID NO: 19119
  chr5:853432-853462
  hypo

SEQ ID NO: 69014 - DNA, 30 bp, Homo sapiens
  chr5:865590-865620
  hypo
gagccgccgcgctccgcctgtgcttcgtgc

SEQ ID NO: 69015 - DNA, 154 bp, Homo sapiens
  chr5:873760-873914
  hypo
ctcctggcccaccttgcttggcgccctgcaaatacacacgtcctttctatgacaaaacctcggcatgggtgtctgggtttactgcaccaggcatgtggaccccagttcatctgtaacaagcacagatgaaaccgtcaggtcaagggactgaccc

SEQ ID NO: 69016 - DNA, 205 bp, Homo sapiens
  chr5:876061-876266
  hypo
cgtgcagagaagcacgcagatcctgacgaggagccggcagcagagtccctgcgacagctcctcgtccccgaaagcctggtcaggctgcaggctcttcccgccagcagcaccccaagggcacctgccccccaaccccggtgcgagtgcagcccacctgcttcagctggaagagcgtcctagagtggtctccgcctgtgatctggtc

SEQ ID NO: 69017 - DNA, 30 bp, Homo sapiens
  chr5:880802-880832
  hypo
caacactgtcctgacgtcatcatctaacag

SEQ ID NO: 69018 - DNA, 30 bp, Homo sapiens; identical to SEQ ID NO: 19122
  chr5:881622-881652
  hypo

SEQ ID NO: 69019 - DNA, 257 bp, Homo sapiens
  chr5:881856-882113
  hypo
gccacctggcctgagaagagccggacgtttgtgtgggggcagctccccaccgcggatccatgcaaagtctcagagcccacaggatggccagggccctgggggagaggcggaaggtcagctcaatgggacacggagttgatacgaagattaggagacaagtcctcacggcgcagatacaaaactgaaagggaagaagtgggcggaacccacggggcacgagggaactggaagtttccgtgtaaaaacagttttcaacc

SEQ ID NO: 69020 - DNA, 171 bp, Homo sapiens
  chr5:883996-884167
  hypo
cacacagagagtctggggccacgtggcaccctctctcggtggccacagagcactaccttgccgcctgggaggaaccggttgatcctgtcccgagcttcgtcagctgcgtgctccaccagcgccagcacgtgctcctctgcggtactgtccgtcaagctgcaggcattccct

SEQ ID NO: 69021 - DNA, 136 bp, Homo sapiens
  chr5:884915-885051
  hypo
gagtcacagccccatgagctccgcagggaggggctccactcaggcacctgcgtgagcccattaccgatgcgcactgctgtgacactaggtgaaggtgactgcctgagctcggcacgctctcctgcctgcagactga

SEQ ID NO: 69022 - DNA, 92 bp, Homo sapiens; identical to SEQ ID NO: 19124
  chr5:885338-885430
  hypo

SEQ ID NO: 69023 - DNA, 38 bp, Homo sapiens; identical to SEQ ID NO: 19125
  chr5:886373-886411
  hypo

SEQ ID NO: 69024 - DNA, 397 bp, Homo sapiens; identical to SEQ ID NO: 19126
  chr5:887037-887434
  hypo

SEQ ID NO: 69025 - DNA, 165 bp, Homo sapiens
  chr5:888863-889028
  hypo
aacatgtcctatttacgccagcgcagtaacttagaaagaaaagaaacagacttctaacagcgtgcaacctgacctagtttctagaccaaagcacagagaaaacgttcacgaccaatcatttccttaatgctgtgtctgtaaaacatcatccgaacacagaaacac

SEQ ID NO: 69026 - DNA, 274 bp, Homo sapiens
  chr5:891192-891466
  hypo
acaggacacggtgccgacccctcatttacaacgatgagctgtgaacaccaggagagtctctaaaagtgcacccttgcctggctgtgtccggcacgctcggactggccgatctgggggcggctccacctccaccttcttcccaggatcaaagtcgtcagcctctccctccgtgtcacagtgctccctctctcgcttccgcttcttctcttcctgggcggcagagtcaagggagtgagaaaggcaggagtaggcgggatccggacaggtctgccca

SEQ ID NO: 69027 - DNA, 193 bp, Homo sapiens; identical to SEQ ID NO: 19127
  chr5:902317-902510
  hypo

SEQ ID NO: 69028 - DNA, 30 bp, Homo sapiens
  chr5:909229-909259
  hypo
tggctgtcccctgctcgccctgctggccca

SEQ ID NO: 69029 - DNA, 101 bp, Homo sapiens; identical to SEQ ID NO: 19128
  chr5:909582-909683
  hypo

SEQ ID NO: 69030 - DNA, 187 bp, Homo sapiens
  chr5:912351-912538
  hypo
ggtaccagtcagtgtaggggacgtcagtgaccggctgtgtttacctggctggctgcacaaaccttagttctcagcttaccccgggcttttccaatgccctgcctctcgggggcctgtatccttacctgaaagaggaaacatcacgggcgtagtatgggcctggttttggtcacggggtccacatgac

SEQ ID NO: 69031 - DNA, 229 bp, Homo sapiens; identical to SEQ ID NO: 19130
  chr5:913179-913408
  hypo

SEQ ID NO: 69032 - DNA, 30 bp, Homo sapiens
  chr5:916130-916160
  hypo
ggtctcagcctcgccggagattccgcttag

SEQ ID NO: 69033 - DNA, 140 bp, Homo sapiens; identical to SEQ ID NO: 19131
  chr5:919455-919595
  hypo

SEQ ID NO: 69034 - DNA, 31 bp, Homo sapiens; identical to SEQ ID NO: 19132
  chr5:936463-936494
  hypo

SEQ ID NO: 69035 - DNA, 151 bp, Homo sapiens
  chr5:948028-948179
  hypo
ggcaaccccccacccccgccacccctccacctcaacacacacaccaggaggatgtgaaaagcttctttcttcacactgcgaggctttttgggggagcagggtggctccgagctgccctgaggatggattgagagggcggggcggggagggg

SEQ ID NO: 69036 - DNA, 135 bp, Homo sapiens
  chr5:961623-961758
  hypo
tcacccccagtgctggcaggtcgcggctcctcgtggctgtgggccggacgtctcctcaccatgagggcctctccacgcagggccccgcacgcagtggctggcttccttcaggacgagtgacccaaggcagacaga

SEQ ID NO: 69037 - DNA, 31 bp, Homo sapiens; identical to SEQ ID NO: 19133
  chr5:962517-962548
  hypo

SEQ ID NO: 69038 - DNA, 30 bp, Homo sapiens
  chr5:979354-979384
  hypo
acacgcatgcacatgcgcacacatgtacac

SEQ ID NO: 69039 - DNA, 50 bp, Homo sapiens
  chr5:993217-993267
  hypo
gtttgccctgaggacccttgtcgagtcccgggacaccatgaaggagaatc

SEQ ID NO: 69040 - DNA, 117 bp, Homo sapiens
  chr5:1003042-1003159
  hypo
gggactcctggaaggcagcttctcaccgtcactgccgtctgccctgctacatgtgacggctgtgtttcacatgttcaccggtgtgtacgcccgggtgtgcttcgaactgagaagcca

SEQ ID NO: 69041 - DNA, 31 bp, Homo sapiens; identical to SEQ ID NO: 19134
  chr5:1013562-1013593
  hypo

SEQ ID NO: 69042 - DNA, 243 bp, Homo sapiens
  chr5:1027768-1028011
  hypo
ttaggtcatgtcccagagggccgtgacttcactgtggacacccgtgtgtttcccaccgggcgttccaccagagctgtggccaacagctgccctcacgaggcccaggaggggacagcgcctccttgcatttgcgagacctgggaaaggtgcctggccgtgcccacctgtccactgggaagaggacatcgcccgctccaggtggctcccagaggtgcctgcaccggcacttccaggttgaaggcc

SEQ ID NO: 69043 - DNA, 189 bp, Homo sapiens
  chr5:1028334-1028523
  hypo
cgtggacggtggcctcggggtggttggctcacagaccagggtggccttcctgagcatcccgtagggccgtgggacctgaagcaaaggctacctgttgttgacgccgtgtgacagacgcctgctgctcatgcagctgcgaggctatgggttctggtcccggaggcctccgtgggttggggtcagaccctc

SEQ ID NO: 69044 - DNA, 240 bp, Homo sapiens; identical to SEQ ID NO: 19135
  chr5:1029656-1029896
  hypo

SEQ ID NO: 69045 - DNA, 37 bp, Homo sapiens
  chr5:1031040-1031077
  hypo
caacaatattcagcctcggcagcgccaccttagtgcc

SEQ ID NO: 69046 - DNA, 249 bp, Homo sapiens
  chr5:1031560-1031809
  hypo
cccatccctcccgcccgcctgcccgagagctgcctgctctcaggaaatgctccagggcggtgtgtgctgggccgaggggctccgcacctccaccactgcgcaaggcccctgccctgaccacaggtctgtctccttctctgtgtcctgaaggctgcagattattcatgagaaccatgtgagcttcggctcagctgaaacaccgctgggatgtgtttgaagtttttccccattttccgtaactggtctcgg

SEQ ID NO: 69047 - DNA, 192 bp, Homo sapiens; identical to SEQ ID NO: 19137
  chr5:1032281-1032473
  hypo

SEQ ID NO: 69048 - DNA, 30 bp, Homo sapiens
  chr5:1032886-1032916
  hypo
gtcccagctcaggctcgacgtgcacctgtc

SEQ ID NO: 69049 - DNA, 428 bp, Homo sapiens; identical to SEQ ID NO: 19138
  chr5:1033253-1033681
  hypo

SEQ ID NO: 69050 - DNA, 30 bp, Homo sapiens
  chr5:1033954-1033984
  hypo
agggcacagggcttccgtttcccgggaggg

SEQ ID NO: 69051 - DNA, 465 bp, Homo sapiens
  chr5:1034277-1034742
  hypo
ccttccccctgtggagttgggcgtgttggcgtgggtaggaggcgaggtcccggcccccacgtccccccacaggcactccagtgcgatgtctcggtggaggaggacgaccgccaggagtggacgttcacgctctatgactttgacaactgcgggaaggtcaccagggaggtaggtgagcttgtgtttgcgtcaggtccacagtagtagacagacggggcagacagactgtgctggcctcgcgatacctcagggggcaggaggggacctgcctgctgcgaggtcctcatgccagctgggcttgcgtctccccagggcccagttcacgtgtgtttctgggccgagcctgcgccgcccatttctgcggctgtgcttcccacactgcaaggctgccctcagggcactggaggcgctcacagggccacctgggcagacccaggctgctccgagaagatgcctgtgttggtt

SEQ ID NO: 69052 - DNA, 404 bp, Homo sapiens
  chr5:1036738-1037142
  hypo
ggtgtgtgtatgtggcggatgcgggggtgcctggttcaaagtgagatggaagacattgggtttgcattcagggaaaccctgccttggggtgagaagtcagtattttagggtggaatcaccggctcagtcagcagagggggtcgtccagtagtgtggatggccggcagtgtggacaacaggcagtgtggacggcagggcaggcagtgtggacaacagacagtgtcgacagcaggcagtgtggatggcaggcaggcagtgtggatggcgggcagtgtggatggcagccaggcagtgtggacggcgggcagtgtggatggcaggcgggcagtgtggacggcgggcagtgtggacagcgagcagtgtggatggcaggcaggcagtgtggatggcgggcaatgtggatg

SEQ ID NO: 69053 - DNA, 30 bp, Homo sapiens
  chr5:1037559-1037589
  hypo
agggtttaggggatgcgaatcctgggggcg

SEQ ID NO: 69054 - DNA, 30 bp, Homo sapiens
  chr5:1037838-1037868
  hypo
agtgggccctgggccgtttctgaggagatg

SEQ ID NO: 69055 - DNA, 990 bp, Homo sapiens
  chr5:1039233-1040223
  hypo
tgctggggagagggagaggctcgcgctgggtgcggctcagaacacggggacttgcacattcacggtcccaacactcacggggcgacttctgtgacatgtcagctttggagaaaggtgtgtcctgcaagggtcaggagacggttgcaggccagaaggacgtcccagtgacgtttcggagtcttgcagcctgcaggggtccatgtggttacccggaacaggaaccgtgggggtgctttccgggacccagggggcccgtgccaatgtttctgagtcttggagcctgcaggggtccacgtgtttaccctgaacaggaacatgcgggtgttttccggaatctggcgaggccgcgcggcagttttgcatttacattccttgttttgtttttaaggataaagcggtgctgggtggggtctgtgggaggggtttgagccatggcggaagatccctggtgaatggcttggatgtttgtcgcctccgagtctcatgctgagacgtgatccgtggtgctgggtggggtctgtgggaggggtttgagccatggcggaagatccctggtgaatggcttggatgtttgtcgcctccgagtctcatgctgagacgtgatccgtggtgctgggtggggtctgtgggaggggtttgagccatggcggaagatccctggtgaatggcttggatgtttgttgcctccaagtctcatgctgagacgtgatccgcagtgctgggtggggtctgtgggaggggtttgagtcatgaggacagatccctggtgaatatggcttggcgcccttgccgtggtgatgagtgagctctcattcggtgtttgtgggagatctggttctttagagcaagggccacaacccccaggctgtggactgctactggtttgtggcctgttaggaacgggcctcacagcatggggtgggcggtggtgagtgagcatgagtgcctgagccccgcctcctgttagatcagaggcgggattagatcctg

SEQ ID NO: 69056 - DNA, 30 bp, Homo sapiens
  chr5:1041013-1041043
  hypo
gcagctctacctgccgtttggcccagtctt

SEQ ID NO: 69057 - DNA, 190 bp, Homo sapiens
  chr5:1045514-1045704
  hypo
atgggtgagttagtgtgtgaacgagtgggcgagttagtgtgtgaatgggtgagttagtgtgtgaatgagtggctgaacgactgtgaatgggtgtgtgaacgagtgggttagtgtgtgaatgaatgggtgagttcgtgtgtgaatgagtgggtaagtgtgtgaatgagtcgggttagtgtgtgaatgtatg

SEQ ID NO: 69058 - DNA, 79 bp, Homo sapiens; identical to SEQ ID NO: 19142
  chr5:1046856-1046935
  hypo

SEQ ID NO: 69059 - DNA, 18 bp, Homo sapiens
  chr5:1046994-1047012
  hypo
tgggttagtgtgtaaatg

SEQ ID NO: 69060 - DNA, 260 bp, Homo sapiens; identical to SEQ ID NO: 19144
  chr5:1049742-1050002
  hypo

SEQ ID NO: 69061 - DNA, 558 bp, Homo sapiens
  chr5:1050398-1050956
  hypo
gctggtcagccctgacgctcctgctagaaaaggggcggccagtacattttctccagctgtctttcatgctgaatgagactcaagagattcttcaacgtactcagatttcataggattttatttttctactaacacagacagacagggaaacctacaaaaggaaacggagtcaattgtaaatggctgtagttactggttacacggagttgacaacacaaaggatgcctggtgcttgcgtgcagaggctgcagcccagggcgggggcagagctgagccctcaggaggtggtttcgtgtgcagaactgagcggccctcagaagcagggctgttttccagccaccaaccaacgttcagagccagcaccatgtggccgctgtgcctctagcctgctctcctccaggtgcaggggacacaggacctgccggccccatccagacatggaggagcgttttgctgcttaactcatgcttagccaaggcaggcagaggctgtgggaactgctgagccccgctgtgatgtctgggacacgctctgggcagcagccgtcactctacagca

SEQ ID NO: 69062 - DNA, 222 bp, Homo sapiens; identical to SEQ ID NO: 19146
  chr5:1051291-1051513
  hypo

SEQ ID NO: 69063 - DNA, 1257 bp, Homo sapiens
  chr5:1051901-1053158
  hypo
cacacgagggtgacacgggcatggacagagtcctccagcttcagtgccttgaggtacagaaacacaaagacagtcaaggaacagagtgactcggaggtgaccggggccctgagcggagccatggccagggctgacgtttcaccttcatcatcagggacagcttcagctccgggtgctcttccaagaatgttctggatggggtagaaatgcaacctaaccactgggtaaatccagccaaggaaaagaacttccagaaaccaaggcaagggctcactggcttcttgtgacctgcgagaagatctggccacgtccaggtcactccggtagcagcgtctgccctcagatgcaaggaaatcgtccagccacgccctgatttgctgagcctgttaaggctgaacaggagagccctaggtgacgggcctagaaacttccgtaggaagccccatgggcagcttgggcggcatcactgggggacaggtgtgtctgccgtctgtttccctgggccaagcccaggcccaggctgcccacgccgtcctccgtgcctgtcccagagtgccgtgatgctgttgggcattaggagtagatggtgatcacctcccggccgccacccctgaccaggaggactctgttcagcccctcggtcaggacttcaagaaactccatgtctgtggtcaacagagttaaggccacagctgatcttacctgagcgtgtgtagctgaaatcgtgataggagtgaggtttatcctctcctggttagctaagatttggtttgagaaacccagagccaaggtgaaaagagaggtggggattagagagaccccccaggcggggaggagcagggcaggggagagaggggccagtgctcgggaaagagagggagcaccgtggccacagggaggacgagcagagacagcgacacagcccacggtgctgaccccacccgacagggaaccccagccacgggactgggtcctcaccagcctacaggggacctgggccacggattccgatcaggacgcatggaggacatgccctcactggccccagttcttggtgccaacctggcagggatgtgccaggcgtcaccctgtctgtgccaatacgcccagatgcactgcggagttctccttccaaagcacaaattcccaaagctgcgaccaattgtggccttaaagccgagagctgggctcctcacctcccaccgttgtcggcgcagggtggggctgagccccagcggaggtcccagaatgcacagc

SEQ ID NO: 69064 - DNA, 1649 bp, Homo sapiens
  chr5:1053385-1055034
  hypo
acccacaaacccaggtcttagcgagaagccaccagggggtgcccgcacgctcagcaggcacactgcaagaaaggatacagttctcgtctccctgccggtttttgggaggacctggcatgttgagcaggaccagctgcgcatcctgggacttgttgaggacgacgccattgagcttcacagccgtgtgcatccgcctgacgttggactggtccctgcaggggaggtgggcacggtcagcgggcggcgggtgcaccccacgctccggacacgaggctgagctgagccctgatgagctgcattcacacgtgttggaaagggctgtgtgagtcaggatcaggcggattctctgaccctgaaggatgcagaagtggcggctccgagcgaaaggcgctgactgcagccagggcgggcgttcagcagcgggatgctttggcctccagggacctagaactcagcccactaaggctgccaagcttctaagggctacagtcacacaacacaaaccgcaagcgctttcctaactacatctacatctgcaaagcaggcagaacagtggaagccgtctgggtggcccatgtgcctgacgccttcaaggctgacacgcttctcttgacatctacatcatcgcccctaaaccccacgtcagacactgccaaacacagacccgtcaggctgggcacacatggcctcctctccgagggtcctgatacaactgggtccaaggggccggaagctcaggaaggaaaggcccagagtcccccacaccggcctgtgcagccgttgctgctgaagctcccaggcctgacaaggacagggtatgccgaggactcagctggaggcacaggccctcagtggccactactgggtcccctcctacggcccaccctgcccctgtctggccaagggctaaaggacaagcacttccaccgtgtggccgtccagcccccgccttccgtcctcacaacgcagctctgctccacgaccctccctgtctgctctctgaagctgctgtggccggtccatgtctcaaagcgtccctggcggcctgggcccggccacagccccacaggaggctccccaaccaagtaggtttggggacactgcagaatcatgctgtgaggtgctcaggcccttgcgggacagagcttatctccctcctctaccccacggtcccctcctaggcaggcccctaaactgcagcagaactggcgttccaggaggccacctggggaaacgctgggcggaggggagcacttgcgtttctgtgttggaaaaacccggcccgtgtgtggacttgaaagtcggagcgggtctcaggccagctgcagccgtgcggtcgtgactgtggccccctgggggaggtcaccagcgccctggacgcagaggggcggcggcggacagacagaggccgcccatgcagggtcatggagaggccccacggacgctatccaggctcacgccctttgatccgcttgacgcttaagccacataaacgtgatcataaccaccaatttccaggaggaacacagggagagaccttctatcttctctccagcctggtctaattacagatggggtctctgtccacagcacagtcaaggggctttcgtgccaggaacttggaactttgaattcgacttctggataga

SEQ ID NO: 69065 - DNA, 2785 bp, Homo sapiens
  chr5:1055405-1058190
  hypo
gcacacagacatgcacactaacgtacgtggacgtgcacacaggcaggtacacgtccaccggcaggtgcgctgacaggtacatgcgagcacgcacacaaacagacatccgttaagtgtgctcccggggacgtcacagtaagccacgcacatctcacgcccgcactgcccagaagaggtcagggccgacctccagatcttcggagggcttctcccagcccaaccccgagaaactgctgggccaagagagtcaatgccatcccagacgcacgccacacatgaatacaaagcccacgcgttgtccattctggcccaccttctcctgaccctacaggcctgtggggacctgcccccgccccgaccaaggggaggcaagccccggcgctgggaggaggcacaggtgccactgagggtccccgagtgtgtgtgcctgtgcatgtgtgtgtcaaaccctactcctgggtctacgtcgttcttcggctttaattaacacgctattctgaaggcactttcagatttacagaacggagcaggaagtacagggattccctgcacgcctcgcacatagctgcacagtttcttgagtctgattaattcaggtttcggggttaaagataaaaagggaagggaagtgtggccactcagccaaggcgttcctcactcaggcaccaggcactgcctgcccacaaggaaaacatggcccaggcggttactggcgggggcaggcaggggacagagacggcatcgaggactcccagggagcaccctgggggtccgtccagggtacaccctcccacctgccccggagctcagacgcaggtagctcctgccgagggtccgaccacacagagaactgatctgcacccctctccgcctggaggctggacagctttaacatggaaggcattccaggtgggaacgcgactcagctagcgcctgacccagaaggacgtggatggactcactgacgggccctgcgaggcgcacgcctcccctccactccggagcggctcggacacctcccaggtctcagttcctgggcctcacttaggaagaggcttcaggcgtgtgctggagccaccgtgaacagaggggagcgaaggcaacaggaaactgacgtgggagccgcagcagctctgggtgagctctggctgtacgcggacgcacacaagccaccgtgcacggggcaggcacaggcctagaacacgcgcacagacacacgcaggccacacacacacaggcatgcagggcaaccgggcccggaaggcgacctggttgtagcgagtggacttacaggtttccccattctctatgcaggagaaaaaaacaagagtgtgttactgacttcaggagagagcaccaggctgttccagatcgcatggctgcccaggaggacgccgcctcatcccaccccacagggcccaggagcccccagcccttcctgagaacctggctttagggtctggctctgaccccgggtgagaggtgtctcttgcgctctcatctggaactcagaggctgcgtctgcagaaccaaacccacacccgcaaggaccctgtacagccctggtgttcgcagcccaaggccacaggtgggagccttggcgtagggcaggccctaaggcccgacagcagcctgaactacccacagggtgaaggccaggaattctgtgcccagcggcacaagcctcctcgcctccatggaacagacccatctgcctgctgcagtgaggcttgcctgagtaaagcaggcctggccgcagggctgacttcagggctggcccaggtaccaggaggactgctcgtcacccagctgtggggttaacatcaggacccaccctaggtcctacaaggacccctcagcgcttggcactagaaggacccctcagcgcttggcactagaaggacccctcagcacttggcacccaggtcttacaaggactcccggccttggcactagaaggatccctcagcgcccggccacagggctgaactcagggcccggccttggcaccaaaaggacccctcagtgcccactcaggcggctccctgttctctaacgggcccactggcctgcagggttgccccgaagctcttcagtggtcagggaagggactctgtcctcactgccgggccagcactgccaggatctgttccccccaggccacacgcacggacactcacggcttcatgctgaagaggtctttgaaaccagataggctggtgtctctgctcctgtacttctcagcgatcagcttctccctggtccaggtcatctgcaccttgtctggcgtaggcggcgcttgggtcctggctgccgccgcggtgtgggacgcggtgttcctgtcgtggatcagctgggcctggcgggcccgggacttggtgagaccagccggtctcaaaactcctctgggcgagagcgacccgggatgccaggccggaggtgagggcagctcacagaacctgaagggccctgtgtgcctgacccgggacccagcctggcgtcccacactggtcctgcgccgcccccgtgactgcctccctcctcccaggcttcccgaccaaacgctcaccccctcaccttcccgccctggccctgaactggaaaggccccatgaccccgtactgacaggaggtgacacgtgctggcagagtctccccctcacctgacggggctccacacacgtgttcaccccagaccacctgctcgcccacacgaccagcacgcaggcgtccccgtctcagggaggcttggggcaggtggggccgtaccagcatccaggccctgt

SEQ ID NO: 69066 - DNA, 347 bp, Homo sapiens; identical to SEQ ID NO: 19152
  chr5:1058826-1059173
  hypo

SEQ ID NO: 69067 - DNA, 469 bp, Homo sapiens; identical to SEQ ID NO: 19153
  chr5:1059425-1059894
  hypo

SEQ ID NO: 69068 - DNA, 217 bp, Homo sapiens; identical to SEQ ID NO: 19154
  chr5:1060377-1060594
  hypo

SEQ ID NO: 69069 - DNA, 566 bp, Homo sapiens
  chr5:1060647-1061213
  hypo
cgagccgccctgagcggtgggaaaggccacgcgtcccgggccccacaggccccctctggctctcaggccccccgcccagtggccaggaaggtgtgagcgcacgatgggcagtcacgccgcacacacgctctgctcatgtccctccccgggaccctccgaccgggcacaagggcagctgtgagggcaaggccacagccacaaaccaacctggcacacacggctcagggcgaggcactgccccatggggctgcatgatccacgctcacaggtgtcattgtctatgctcaggggggcttggcaccatgggaaacccacccagaacacatggagaagccacagcacaacctcagcgcccgccatgcaggaccctgggtctcacccattgcacccaccgtgcgggacccctgcgcctcacccggaacatccacagtgtgggactgctgcgtctcacccactgcacctgccgtgcaggatccctgagtctcacccgccgcacccgccgtgcgggatccctgagtctcacccgccgcacccgccgcacctgccgcatccgccatgcggaaccc

SEQ ID NO: 69070 - DNA, 220 bp, Homo sapiens; identical to SEQ ID NO: 41236
  chr5:1061581-1061801
  hypo

SEQ ID NO: 69071 - DNA, 30 bp, Homo sapiens; identical to SEQ ID NO: 19157
  chr5:1062593-1062623
  hypo

SEQ ID NO: 69072 - DNA, 841 bp, Homo sapiens; identical to SEQ ID NO: 19158
  chr5:1062886-1063727
  hypo

SEQ ID NO: 69073 - DNA, 2199 bp, Homo sapiens; identical to SEQ ID NO: 41237
  chr5:1064041-1066240
  hypo

SEQ ID NO: 69074 - DNA, 290 bp, Homo sapiens
  chr5:1066840-1067130
  hypo
tgggaggaagagactgcgtggaggcacaggcgcccagggtcgcccgggggcccaggagctggaggaggcaggaggatcctcccgggagactctggaggcagcgtggcctgcggtctccttcatctcagactcctgggctccagaactaggagagaacagacgccctttgctgtgagccgtgtggtctgtgtcccatcacagcagccccgggccactcagggatcagagccaccacctgcctcctttgccgagattccagcagcccctacgtcagcctgactggtatcctc

SEQ ID NO: 69075 - DNA, 31 bp, Homo sapiens
  chr5:1067373-1067404
  hypo
ggcaccagccagcaagcggaggcaggggccc

SEQ ID NO: 69076 - DNA, 95 bp, Homo sapiens; identical to SEQ ID NO: 19162
  chr5:1068168-1068263
  hypo

SEQ ID NO: 69077 - DNA, 1376 bp, Homo sapiens
  chr5:1068665-1070041
  hypo
ccaaaggcagccaagggaaggcggggcctgcggctggctccagccctcgcaaccaatgcagctaagtcacagccaaaggctcgctgagagcagcgggggcagggtgcgctcgtcctcccgtccgcaagagcgggctcctgtctgaggctgccccagaccccccagccgaagggctgtcggacggagaggatctgcctgtgagctccgttaacgtgagagtataagtgagcgcagctcttcccatggccgtgaagactgtggcagagcgtggcagggggtcccgtcatcccccagtcactgcaatccctgccctgtccctcgtgcgcacagacgcgccctcacacacctccagggaggccaggcagtgccaggattcttagaatccacgccagcagggcagttccaactccgggattcctcctaagagcattccagcatgggataaggaacacggaaagggacatatggggaccaggaccgtgaacatccccccgaaaaccacgatacctaaatccacgggttcacagtcaatagcagctaacgcctgaacccgtggtgagccatgacgccgccgtcagggaaagggaaggcccagagcatctcctgtcttccctgggaaggcgaacctgtgcaacagcctgagaaggtggccatccacgtggccaacgtggcgggagcggcgggggccattttttacctccatgggatcctggccctaggccacaccacctgaggctgctaccatccacgtgcccacagccctcttgagcagggttcccacccctaggctgaccggcccagacctggacgggcctcagtgcggctgtggttgtgcagagaaacggaccggggaggcggtggggggcggctgcagatgcctggacacacccacaaggtcccagtgggggcctggcagcagggagctggctcccaacccacagcaaggacagagggggcacccgcatgggagggacctcggacacacaccactgcaacaggcacgtggtataggccccacagactcccacacacatgagggggaaggaggaggctcgaggcgcccacggcagccagccctgcctgggaatgaggtgcccttggcatgaaaatcacgcaggtgggcactcaaaagctccctgctttagcaagaaatacagaagtaactccaggtgacgtgacgtgacgtgacgtgatgggaccccacaggctttcatcgtgtcatcattccgtttctggatagtgtgaagcttcccataagaagtttgaaaatcagagaaatgaagacacaaagtctcagaccccgatgtcctggggcagccgactgcagcagcagggctcagagctggcaccagcatgctacacgcccggggcactca

SEQ ID NO: 69078 - DNA, 581 bp, Homo sapiens
  chr5:1073455-1074036
  hypo
cagaaccatgattacggctctggacggggctcacccatggcgggaggaggcggtcccagggttcgcccttggaaagctaatggccctcacacctcccaagcttcccggggtgcggctggtgctcccaggccttagcgcgctgctctgagctcaaagccaccgccacggctaaaacacagcagcgccacgcacagcaccgtgttgacacgctgcgatgaggacatgccagggcacgtttcctgtgcagctggggtgggaaagaggcctggcccccagaccccgcccggcccacctcctcggcccgctgagcctccatgtgcttgtccaggtacgtcccctccagcaccgagcccacgatggtcaggcccttgccggccttcagctgcgacgtgaaggacagcaggcgggggtgcttcacggcctgctccgcgtccaggttcagcatcaccagcacctggggcctgcagccagggtggggcggctgttaccacggcaacgcttaccagggcacggcccatcaacaggcagggcagatgggacgggcggggcacacgacacaggtgggacgggagatacatgac

SEQ ID NO: 69079 - DNA, 608 bp, Homo sapiens
  chr5:1074601-1075209
  hypo
caaaggtccccactcaaaggccgacctcagaaacagctcttctgtgcgtctgaggaccacggggcatgggcggtgctcacctccagttcttggtgtgggggggaccgtgctccacgcgcagcagggcgtagcgggcggcgttcagggataggccacggatgccatcgccccactccttctcggccctgtgggaaaggaagtcggggtttgtccagccgcgtacctggaggctcctctcccacctgggaaaggggacttctgggggcaggtgagttggggcaaacaggacccccaggaaaagtccctggatgaggagggaggcctccatgcccacccttgccctgaagggagcccgtcctaggagccaccgggtcagagggtgctgtggctgtggagggaacgaggtctacgtccagcatgcgtgaggtgccttcctcacaggacgggggacaggaggcccatgacagggaagtggctggaccccgggcacgaggcgggtgcaggtggagggagggtgggtgctggggcacggggaaggacgcctgtggctgccgagtgagtacagacacaacctggggacacctcgcgagacacgtagcaggaatagt

SEQ ID NO: 69080 - DNA, 5033 bp, Homo sapiens
  chr5:1075471-1080504
  hypo
ctgacagcgcttacccgcggtactcgatgtacttgtagatgcagccagcgatgagcatggcggacagcgcgtagtaccaggagcagatgaacatcagcgccaggcacaggctcatacccagaaaggacagggtcctgggggcggggcaagtggctcggggcggcccaacgccatgcagcccccacacctcagccaccaccacacggacactgcccctccctcagtaaaactctctgttaacactaggaaaacagtcactgacgcctgacgaccatggctgtactcaaccacctctgaggggtgacgtggctccctgggcccctgtgggagctgtcactccaaaacccagtacatagctccagctcccagcgtgcacacagcacctcggctgtgcatgcaacaaggggctgaagcgtccacccagcgcctgattcctggggaggggagttaagaagacccacagccctgatgggctacgccccaagcctgggaaggctgggctgaccacgggaggtacaaggcacatgcagacacctgggcatcctcgtaaccagaggccttcctcaggtgcagtctcatcagctgcgcaggggcttactccgcaaaggaacagtcaaggacgcgctggggtcttcaggcccagagcagctggccttgtagaggcacccagtgtcccagcctgtggggctcctgacgcctgtgctgagcggcctcaccagtggcagaggcacccagtgtcccagcctgtggggctcctcacgcccgtgctgagtggcctcaccagtggtagaacttgaagcgtggacgccagttgggggtacgtagcagggtctgcacggcgcaggccaggttcacgaacaggtagcacatgaggaagaacctgcagggacggccggccactgatacgggcccactgggcccccctgagcccccagtcactgccacctgggagaccacccttgtcactgtccctcccacctgcgccttgtctccccatgtctgtctctgcacgtgagctgactcagactgattccgaatcaggccccctcaggttccagccatcctgtgaccacctggtccatcaagagatgggccatcgtcccttccccagcagccgtctgtccagccacactgtccctggctgaccccagcgggcggctgcctggaggcctgtgtacttgtcttccccggcgcaactcccttcccggcaggatcctgactgcccacagctggccatgcctgtctactgcttgtcctgagcaggacctcccatccacactgccccacgctccaggcccatacacccatccccaggtccccgtcctgtgggggctcacatggagaggatcggggccacgctgtccagagaggcgatgaggatgccagtctcgcagatgaggactgtcagcagcagcgcccacgtgggctccccgttggccttcccgtggccaaacacctgcagggagaagggcaggaagatggggcagatgacaccacccttttaggagagaagctgcaggctggtcaggtctagcccagatgaatcttaaagacacagaccagcagaaacgcctttcacagtaggtccccgggacatcacgcggctggcctgggaagaagccctgacaaagggctgcagcccaggaggcttcagagctgtgcctacgcccggcttgcctgcaacctgtgtggccccagcctgcccccccgcctcagtttccccgaccacacaacacaggaccagcgtctccagggcactcgcggttccccagaccctgtggtgacctttctcatcaggccaccctcacctcccagaagctgaggcccacggggcctgtgtgcctgtccccttcctggacaccatgccctaggcccggctgggactgaagatgcaaccacacaaaggccctgcgggtcggcaccctgccgagggaccagcgacgggcaaggatggctctgccatccacgaccttcccacagctgcccctgggcccaggtagcaggaggagccacaatcggcagctctgggcacagcacacggacaggacccatgcgggcgtccgtgcaatcctcagagcagccacacacactggctgcaggtggctggtgacgccacctcccacgggctgaagagctcagccacacagagaaagatgtggcaggcaggcagagggcttctgaccagacaacagaccaggcacctctggacacgtggctgtgggccctcacagccgctcctgacacacccggggccgagctcggagggacctgcaggcaggagggctagaattgcctctgcccaccacccacctcccaccactcccatgctctgtgcagtggccaggggcagaatgaccaccatggggtccaagccgcgggcatgcgtcccacacacggcactgtgaggatcccgcaggggaggagagcccccgaccctgaccttccagggtccccccgacgagggtgcgggactcacctgcaggaaggggacgatgccgtcacgggcaatggcctgcagtaggcgcggtgcccccgtgaggctctgcaggccggcaccgcaggtggagaagaaggagccgatgacgatgacccagggggagggccaggccagcatgccgatgaccaggttcccctgcagggcctccccgaacctgcaggcaggcgggcaggcgggcgggcggctttcagaagtgagcctgagtcagacaaaatgtcttctcccacccagagcgaggggcccagtgcagtgggggcgactccttggaaagctgaggcccggcctccagtccccgttggctgaaacctccaccaggctctgcccagcatggccagaatgctctggagggtcttcagcgggggagggggtcctgctcacctcagggtcgctcttgggagcagggaagacccagcctggcatcagcttcagtcagggaccacccaggacccccggggccttggggctgccagacacgcacaccccatgaggatgcagggtcagtgatgacctgcctgggaccccactacttctccacttgccagcagggctgagggatctcccagggccaagcctcacccgtccacacccctgtggcctccccaggaagggcctgcgcccccagccgcatcagggcttggagttggctctgaacggttccccaggccctaggctccagcggaagagacgacacatcagaccaagggatcccaaccctgggaccaggacgccttcagctctgcacgcggacatgaagtcctagggcgatgtaatttcaaagccgaattcatcctcaggaaaacccttgaagactacaggctttgcacgaaaactgcaggtggaaacgtacttatctcgtaagaccacgccttcaatgcaggccccaaacagcacaatgcaggagagatccacagccctcgtcaaggaaaggcaggtccgtgggtgcagggtcctcaggtacggggggtggggtggggtggggtggggtgggtggggagatgcactggccagcgggccgcaggatccaggtgggcggggaccgttctgcatcccatcccatcccgggcacgtcctgtcccccgtgtcctcagcgcaccctcctggggctctgtccagcgccacagaacggggccctggggtggtggacacacacctggcctggtgcttgaccgccagggattggcaggggaccatgctgaggggacaatgctcggctggaaagaggcagccttgggattgagaagccagaggccccgcgggcccagcctgccggcggcacaccccacacaccgctgcgcatcactgtccacacgcggcagggtgactgcttctgttttctctacgatcgcatcacacagtggtgaagaagccagggtcctgacagcagcccttgccccgtctcccagggaggatgacgtggtgagagcacagcctaacctgggaagtcacatgctggtggccgagggtatgatgctgagccggggagggcatgggggcctccccccaggcagaggctggaaccctcgcctgcacccctccaaggatacagatgaaagacgtcgtcactatggccaggatggtccccgtggggatggacttctgtgcatccttgaggtccccggaccggtttgaacccgccatgatacctgtgaacatggaaaatgctgcaaagacccatctgaggagtcagtgccatgtgatggcagcccctgcccagaaagctggaaaggcggtctctggggagaccccgagcgtgagctgcagccgaggctgcagtccaagctccgccagcccacgctgcaatactgcggctgaggggatgcgggcccaggcacgcggatgagcacccacgtctactgctcccctggatccgaggacgagaaccgaccccgtcactgacccccacgccccccacacccagggcttctctggagcctgtgttaatcccatggccaagggtcagcccagagacggtgctgagcaatggctcacaggcccccaggacctaaggactttgggaatgagatcctagaacgactcagcccagccagccaggccagcagacgctgcgacccctcccgctgtggcaccaccttgctctagggagccacggccggggatgtttccacacaatcggctcctacaaagctctgggaagccgggtcggtgggggccacttcacgcctggctcggtcccatccaaggcgcagcctgaagcacccattgctcggggtggcctgggaggcagcagagcccacaatccagtgccgcggagacacccggagccacgcagaggctctgcccccacgccctccacccgcggctcagagacacccggagccacgcagaggctctacccccacgccctccacccgcggcgcggagacaccaggagccacgcagaggctctgcccccacgccctccacccacggcgcggagacaccaggagccacgcagaggctctgcccccacgccctccacccacggcgcggagcgcactcagacggacgggggaggctggagcggaggtacagggag

SEQ ID NO: 69081 - DNA, 94 bp, Homo sapiens; identical to SEQ ID NO: 19171
  chr5:1081413-1081507
  hypo

SEQ ID NO: 69082 - DNA, 1321 bp, Homo sapiens
  chr5:1083625-1084946
  hypo
agcttgctgaccatgacggaggctgtctccctgccacaccgtgtttggcttctatggctctgccaggggtgtgtacagggacccccaggctcatcagcagcagctgggaaggggctcggccaggcaggaggaattggggccctgagagtgactctaaggcgagagcagccaccagggccagcgcctgctgcccccgccaccccccagctccagctgcagccctgtgagcctcacccaggaagacaccactggccgcgcccgggatgccctggatttcggtgacgttgttctggatgaagtactcgtcacaggcggcgctgggctgggagccgttgcagaagaggccccagagcgcggaggtggctgagttgttgtggatgccgtaggccttgacgcaggcatcgaagctgcgccgtgacagcgtgcggttccccaggaggcagaccctgggcgggacagggaggcacggcacgtgtgctgccaccgaagtggcttttactgccccacccagctcccccaacgggcacccatggtgtcgcccgcgagtggctcctggcaccctgcacctcccaagacaggaaggccacagatcacgccagggaccgggcccaggccaggctgcagcaggaatgcaagggccagggatcacactggggaccggggactggggaccagggaccggggaccaggccaggctgcagcaggaacgctgtactgtacagccgtcccctcatccatggttcggccacccgtggtccaaacgtgctaaatgaagcgttctagacgtaaacaattcacacgttttccaccgcgcggtgccgagtagtgaggtggaacccagcaacctccccccgcgccagcacagccacgctgcagccgctccctccccgaggccctcggcggcgtcctggccgggtcagctgtcacaatctcagtgtctgagttcaagccaccctcgtgccacgtgccaacggccaagagcacaggagtgccgcccccgacgtataagccaggcctgtacgtggaaaacagtctacacagggccgtagcgtcaagcatcggcagggggtctcaggacgggtccccgagggggagggcagctgtgcttccctaaaacgggcttgtggggttgcagctgttctgcctccctctgttttgaggcctctatgaggctgttccttcaggggctccctccacgcagagacggcaaaaccgcgggagcctcaaggggcttggctgctggccctttctggacctgctccctgcgggctctggtggccactcccatgttccaggaccctgggccgcctcccagctgctc

SEQ ID NO: 69083 - DNA, 1659 bp, Homo sapiens
  chr5:1085199-1086858
  hypo
gcccacgggggttcccgccacggtcacacccagcccaccccttgcggggagctcggcgtcaaggatgatggacgagaggcgggcagagcccatgggacctggccccagccccacacccacccacggctcagaggccccgagactcacgggatgtccggggggtcgaaggcagacttgatgacgccggcatagatggccaggatggacagcacgacgcaggccaggaagaccagcgccagcttgttgacatacttgacgcccacgaagaccaccagggccatgagcacgagcgtgcacgtgccgtacacacgcatgttgtgcagcatggcggccgcctcgccacctgcagcctccgcctggaagatggccgcacccggggagatgtacgtctgtgggaacaaggccggtcgggaggccgtccccggacacaactccccagtgcccgtccctcccgcaagcccccagcgccacacaggggcctcctcccaacaggtgccggggccatcgggacgcatccgtgctggacggagcccgcgggggtcagcgcacaggcaagggacggagcccgcgggggtcagcgcacaggcgagggacggagcccgcgggggtcagcgcacaggcgagggacggagcccgcgggggtcagcgcacaggccatggacagccaggggcctgaacgtttcccaggaaccacccgggagccttagagtaaagcaacttcaggacccggggcatccgcatgtccgcactcaaaagaaacaccttctgctaagaggaatgtgactgctgcccagagagctcggcccaccccggctggacgtcctggacacacacagggtctgaccacgccggcggggggcaacctctgttctgcccagattcaagggaagggacggagacgtgagacagtgctgctcagctccctcaagaccaggacaggactggggtgcagcaggcatggagggcatggcacccacccccaccaaaggggatcctgggagtgcggcagccacggcacccggggcaggtggaaagatggagggacatggccaggggactcgggttgggacgggtgtgggtgcgaccccactgaaaggtttcagaaccttcttggccatgtggctctcttcaggaacccaggaggccaggaaccaggtctggcagcagagggaggggcagaaagactggggacaggggctcaggtgagcgtctctgaagccctgcagggacagcgggtttcagaacctcagcaggaaggacagcacccgtcggccagagaagggcggttcccgtccccacgaggaccaaggaactcaggccacagctctcagctgtgctcaggtgatgtgggacatgctttgagcatgcctgttttgagaaggtgatgacatcacctggttgtacattgctgggctctgggaccctcggccaagtgcccagatcaggcagagaagaggctgggatcctggcaaaaggttcttctaagccgagttccagccctgctcctaaaacagctccgactgcaggactgcacctacgcggggctcagatctacagtccagatgtctacccagctcatgccaggcacgcctcacggagggcagcaatggtgctcaagggggacacaggtcgctgctgagtggacgctgcccagtggct

SEQ ID NO: 69084 - DNA, 294 bp, Homo sapiens
  chr5:1087080-1087374
  hypo
gcagaggccgacagcgcctccaaactcgggtcccagcgagcgcgatatcatgtagtaggacccgccagctgcggagacaaaggcggcagccgcgggtcaggggcgcacttggactcggacccgaggtgcggtctgcgctgccattcacgggcaaaggagggcctgtctctgcgaaggcagcgtgtagaccctcgtccacccgcaaagcagcacatggagacgcttccacggtgaactctcccctcccgaggctcggcacacgttccacaccaagagcacgcgctctcatggaca

SEQ ID NO: 69085 - DNA, 1683 bp, Homo sapiens; identical to SEQ ID NO: 19176
  chr5:1087613-1089296
  hypo

SEQ ID NO: 69086 - DNA, 242 bp, Homo sapiens; identical to SEQ ID NO: 19177
  chr5:1090421-1090663
  hypo

SEQ ID NO: 69087 - DNA, 58 bp, Homo sapiens
  chr5:1091173-1091231
  hypo
aggcctgctggggtcacgggccctggtccctccacgactgaaacgcaggcagcatcag

SEQ ID NO: 69088 - DNA, 282 bp, Homo sapiens
  chr5:1091613-1091895
  hypo
acacaaactccagcacacaggcggacagacagggaaggcctgtggctcctgagttttggtgccagagtaccagcctgagcccatgaggcctcaaggtagtgcccagcatgcgtgaaaccccagaaaggtgctgagtgctgagcccggcaatacccagttccacagcgtccacgtgcggaaaggtactgagtgctgagcccggcacaccaccacccaattccgcggcgtccacgtgcggcacggcaatacccagttccgcagcgtccacgtgcagaaaggtgc

SEQ ID NO: 69089 - DNA, 38 bp, Homo sapiens; identical to SEQ ID NO: 19179
  chr5:1092773-1092811
  hypo

SEQ ID NO: 69090 - DNA, 186 bp, Homo sapiens
  chr5:1094018-1094204
  hypo
ggggttcccgtggggccggagcaccctagatccaggaaggagcccagaaggcaccagccgaggagcacgtcccagctcaagtgcgggactgggcccccgccacagccttcaggacagggaggccccagttccttccacgtggtgtccagtcctgtgggaggccccggcctgggggcccccaggggc

SEQ ID NO: 69091 - DNA, 462 bp, Homo sapiens
  chr5:1094547-1095009
  hypo
catttcccagggtgcacgctagtcccaggacacatgctagccccaatgcgcaagctatccccagaacacaagctatccctaggacacaagctatccccagaacacacgctagctccagggcatacgctatcccccacacacatcatcattgaagacaaagcccctgaaagcctcggcaagtgagctgttcagcccagggcaagggtacctccctctggcgttgaaaatctctcattcagccaaatgtgggcaaaattctcactcttaaaagtcggggtggcacctcctagccttgctgcttaatccgccatttcggagggacacagaggacttcccactgttccctgttgaggacgccgcccacaggctctctaggtaaatgagcccctcctgagtctttcaggaaggctgggccggcgacccctccatggggctgagcccaggcttcgaaccagggggtaa

SEQ ID NO: 69092 - DNA, 418 bp, Homo sapiens
  chr5:1095612-1096030
  hypo
ctgggaacgaccaagccgggacccttcctaggggtgctcggcccatccttgcccagtccaccctagccctgcacagaatggtgtgggaccctgagggtgcagaagaaacggtcaaggcaggatgcgaggtggccggaggagggcaggccaagacctcatcactgcaccaaacaaccccagctgggagggtgggcattctctatgggacatttcagatgtgccagagcccactggcggccaccctggctggctgacaggcaccagccgcaggagtggtgggttccagccgtgccagcaaagagggcatcgccgtctgggggcaggcgggcagcacgtgctcccagtagggtgcctggggcggaaagcacagccttcagggtgtgcaggtccttggtgcgaccatgagtgactgcagatg

SEQ ID NO: 69093 - DNA, 1021 bp, Homo sapiens; identical to SEQ ID NO: 41238
  chr5:1111380-1112401
  hypo

SEQ ID NO: 69094 - DNA, 30 bp, Homo sapiens
  chr5:1114067-1114097
  hypo
gtgcagggctcccgtcgcacatccaagctc

SEQ ID NO: 69095 - DNA, 254 bp, Homo sapiens
  chr5:1114642-1114896
  hypo
ctggggttaaatgtgcgttgtgtgactttcagtgctctcttcctacccacctccatccctctgtccttttctgtacccggcacctgttgtaggaagtggccctcggacacgtggaggtacccgaggcctgggttggagctgcatctttcggtgcaggcctctgcgtctcctggaagtgggcacctggagccaggggactgctgggatccgggtccagtcccctggcaaggccgggggctcgcagagggagccac

SEQ ID NO: 69096 - DNA, 368 bp, Homo sapiens; identical to SEQ ID NO: 19184
  chr5:1115141-1115509
  hypo

SEQ ID NO: 69097 - DNA, 30 bp, Homo sapiens; identical to SEQ ID NO: 19185
  chr5:1115732-1115762
  hypo

SEQ ID NO: 69098 - DNA, 130 bp, Homo sapiens; identical to SEQ ID NO: 19186
  chr5:1116659-1116789
  hypo

SEQ ID NO: 69099 - DNA, 43 bp, Homo sapiens
  chr5:1119924-1119967
  hypo
tgtgatgggcaggctggggggcggtgcccagctttgggccctg

SEQ ID NO: 69100 - DNA, 363 bp, Homo sapiens
  chr5:1120338-1120701
  hypo
acacttctctttctcagaagacgctctcaagggcaggggagcaagcccgggtgcagctgggtgggcacctgccgtccacagggcccccccaccggcagtgtccggatcacacgaagacggcttacagaccagcaaggaaacgctgaacccggaggacaagagggcaaagacttgaactaacatggaggagcacgtggagatgccacctcgccgggggacgcgcgccgtcggcagtgtgccggggacaccacggtgtgctggccagatgctcacagccgctgtacctccccacacaactggaggtccgtggaatgcacggccactgtggaaaactccagacacgcctccatcaccacccagaaa

SEQ ID NO: 69101 - DNA, 32 bp, Homo sapiens
  chr5:1121006-1121038
  hypo
gaacggccacgcttcgacgcgaagggctcctg

SEQ ID NO: 69102 - DNA, 31 bp, Homo sapiens
  chr5:1121381-1121412
  hypo
aggcctggactttacacgtggagttccctgt

SEQ ID NO: 69103 - DNA, 49 bp, Homo sapiens
  chr5:1122643-1122692
  hypo
tgtccgacggacgaaccgcattcccacagctgtgcgtccaccttcacca

SEQ ID NO: 69104 - DNA, 160 bp, Homo sapiens
  chr5:1124658-1124818
  hypo
aatggttcctgatggaaacaccgaaatccagagctcagagaacacggactggcggggcaggcggcagagccttgcggcgctggacacattgaacactcagcgcccagcacaggggagggaggccctggagtccctgatcgcagcagacctggaccatcaa

SEQ ID NO: 69105 - DNA, 31 bp, Homo sapiens
  chr5:1129214-1129245
  hypo
ccctctcctcaaacctcggtcacagctgctg

SEQ ID NO: 69106 - DNA, 146 bp, Homo sapiens
  chr5:1129555-1129701
  hypo
tccgggcttcccctagcgtaagggacagaaccaggcgccctcccctcctggccccctcagctttcctgtgacgcccaggaccaggaccaggaccagggaaaccacagcgtcccaggcgacagggtggagggcggctccaggagccc

SEQ ID NO: 69107 - DNA, 71 bp, Homo sapiens
  chr5:1140154-1140225
  hypo
cccaggtctcagggcatcaaacgctccgaggtcggtgaccaggcaccaccgccttggcctcaaccagcacc

SEQ ID NO: 69108 - DNA, 385 bp, Homo sapiens
  chr5:1143149-1143534
  hypo
gcaccacagagcttacggctccatctgtgacacgggccttccttccctgagggccccaacacagcctcctgggcaacatgcccctccatccgcagggtcagaagccgcagctcaaggatcacctgcggaaggtggcatttcccaagaccggagcttcccgacatcccgccacctcccgcagcgctggtgccagtcctgtcggataaggggcaagtgtaagaccggcctcatcagctccagcaattgtaacaaagcgccatgggcgggggcttcaacactagaaattgttccctcgcagcctgggggctggaagtcccagaccaaggggctgctgggcggtttctcccaaggcctattcatggcccgcagacggtggcttctcctg

SEQ ID NO: 69109 - DNA, 210 bp, Homo sapiens
  chr5:1143880-1144090
  hypo
ctcagtaccaaccagcaaacccgtggctgcaccggggccagcagacactctcgggcagagtgctgggcaccctggcctcctgggcaccctggcgcttggcaccctggcctcctgggcaccctggcgctgggaaacctggcctcctgggcaccctggcgctgggaaacctggcctcctgggcaccctggcgctgggaaacctggcctcttg

SEQ ID NO: 69110 - DNA, 31 bp, Homo sapiens
  chr5:1149269-1149300
  hypo
gatcctatgatgctaccgtgtgagcttctga

SEQ ID NO: 69111 - DNA, 323 bp, Homo sapiens
  chr5:1154637-1154960
  hypo
gcacacacatagacacacacacggacacacacaggcgtggacactcacatggctcccggcagtgctgcaggaggtcagcacagagacgtgctgaggagcctgagatgctcgctcctctgggccatcgcgtgtaaaggctgccctcgctgtggactctcacatgtgtgacatacatgaacaggcgaaacggacacgcacggcccccacacacgtgagctgggtcccccagggcccgtcggagcccttctgcctgggacctgcctcatccccggcccctcacagggcaagacatcgcagtaaccgcaggtcttcagagcagccta

SEQ ID NO: 69112 - DNA, 87 bp, Homo sapiens
  chr5:1177290-1177377
  hypo
cagcccacccacagcgtggctcccaccgcccccggggttgcccacggcggggatcccaccacccctcgggccgcccatggcagggct

SEQ ID NO: 69113 - DNA, 191 bp, Homo sapiens
  chr5:1193753-1193944
  hypo
atctcccctcgtgggcgcttacctcggagaactccgggcatgaatgtgcgaaaggcaggaacagacgtccacggcggctttcatcctcatggcgcaaacgggacccctaccgtcagcaatggagccgtgaaggagctgcagccgtggacctggagcaggcacagcgagccagggtgcgaggcccggacagc

SEQ ID NO: 69114 - DNA, 228 bp, Homo sapiens
  chr5:1201776-1202004
  hypo
cgtgctgcccaaccccggcctagacgcccggatcccgtccctggctgagctggagaccatcgagcaggaggaggccagctcccggccgaagtgggacaacaaggcgcagtacatgctcacctgcctgggcttctgcgtgggcctcggcaacgtgtggcgcttcccctacctgtgtcagagccacggaggaggtaggctggccgggcggggctgcgggcgaggccgtgg

SEQ ID NO: 69115 - DNA, 415 bp, Homo sapiens
  chr5:1207165-1207580
  hypo
ccatagcagggtgctcgggttcaggtaggagacgcactgcgcggtgccaggccagcctcggaagccgggcgccacggcctgcactcacctctgctgttccctgaccctcgtccttctccaccttcgagtgaaggacccaccggtgtccacgctgccctggccggatgggagccctgccaaggctgtgtccctcctcgccctctgccgagcaccttgggcaccgtcatgatgcccaggagtggctgcacctcatcctgtgtgtagcctgggggccttgtggctgagctgggaggccgtacgtccacccgcagagggagcggtcagggcagcccgcttggccgggcgagtggagttcatgggcgcggccaggccccttctctgggtgctggctgccgctgagctctgagaggaagct

SEQ ID NO: 69116 - DNA, 181 bp, Homo sapiens
  chr5:1212475-1212656
  hypo
gctcaacatctccacgtccatcagcgactcgggctccatccagtggtggatgctgctgtgcctggcctgcgcatggagcgtcctgtacatgtgcaccatccgcggcatcgagaccaccgggaaggtactgcatgggcccggccaggctgcaggtgctccagagggcgggtgcgggcagccc

SEQ ID NO: 69117 - DNA, 118 bp, Homo sapiens
  chr5:1213549-1213667
  hypo
cccatcccacatgtcccgccctccgcaggccgtgtacatcacctccacgctgccctatgtcgtcctgaccatcttcctcatccgaggcctgacgctgaagggcgccaccaatggcatc

SEQ ID NO: 69118 - DNA, 288 bp, Homo sapiens; identical to SEQ ID NO: 19193
  chr5:1215722-1216010
  hypo

SEQ ID NO: 69119 - DNA, 30 bp, Homo sapiens; identical to SEQ ID NO: 19194
  chr5:1217065-1217095
  hypo

SEQ ID NO: 69120 - DNA, 40 bp, Homo sapiens
  chr5:1218546-1218586
  hypo
gagcagaaggcgtccgggtggttgcgccttggtggttctt

SEQ ID NO: 69121 - DNA, 119 bp, Homo sapiens
  chr5:1221115-1221234
  hypo
ccatgaccaggagggagggatcgggccctggcaaggggaggccgggcacctcgcagcacaccatctgttcgggtagcagaacgtacagaaagcttagcgagttgaagcccagctggtag

SEQ ID NO: 69122 - DNA, 819 bp, Homo sapiens
  chr5:1232523-1233342
  hypo
cctcctggatgagaggtggggcgggggcgggtccatgcctgtggtacggaagcggccaggccaggccggcgggtggggtggcagggagcccttgggtgtgtgtgagaagcagcggtgactcggggagaattagagatggagaacatgtgtgccaggacatcccggaaggacctggaagctggtgttgccattcacatgtgaggtgtgagggaggcctggctttcagctgcgcccttcagcatgtgttattttatgttgttattttgttttattctcactgcttctgggcagagggagctgggaaggagccccggggccacctgacatggtccctgtccacagggctgggctgtgtcacgctgtccttcctgatcagcctgtactacaacaccatcgtggcgtgggtgctgtggtacctcctcaactccttccagcacccgctgccctggagctcctgcccaccggacctcaacagaacaggtgagctgggcgccgcctgctgtgtgggtccgtgcacggccgagagaggcatgtgctgcagcgtgtccagcatcagagcagctgcgggtggcggatgctcaccgcggggggagggccggggaaccggttgctctgtgtgcacatgcacgcgcctcggtctccccaggagcacacgtgcagtccagttcttatgacctccacgctgtgctgtgcttccctgccaggtccggaccaccgaggtccccttgcagccatgtgcatggcgtggtcatgcgagggcactgctgttgttagatttaagacgttaggtcggacgccgtggctcacgcttgtcaaccc

SEQ ID NO: 69123 - DNA, 106 bp, Homo sapiens
  chr5:1253818-1253924
  hypo
ggcctggctgtgggcgggtggccatcagtccaggatggtcttgaagtctgagggcagtgccgggttggctgcggcctccagggcagtcagcgtcgtccccgggagc

SEQ ID NO: 69124 - DNA, 69 bp, Homo sapiens
  chr5:1264514-1264583
  hypo
tcacctggagtagtcgctctgcacctccagggtccgggtatccagcagcaggccgcaccaggggaatag

SEQ ID NO: 69125 - DNA, 30 bp, Homo sapiens
  chr5:1265837-1265867
  hypo
tgaaaccacccctggcggccacattttctg

SEQ ID NO: 69126 - DNA, 30 bp, Homo sapiens
  chr5:1266125-1266155
  hypo
ggaacgtgaccgcagcgaacgctgtgggcc

SEQ ID NO: 69127 - DNA, 30 bp, Homo sapiens
  chr5:1271085-1271115
  hypo
ggagccggagggggcgggggccagaaaagg

SEQ ID NO: 69128 - DNA, 30 bp, Homo sapiens; identical to SEQ ID NO: 19199
  chr5:1272060-1272090
  hypo

SEQ ID NO: 69129 - DNA, 72 bp, Homo sapiens
  chr5:1272311-1272383
  hypo
gacggcatccctcagcgggctggtctcctgcaggtgagccacgaactgtcgcatgtacggctggaggtctgt

SEQ ID NO: 69130 - DNA, 30 bp, Homo sapiens; identical to SEQ ID NO: 19200
  chr5:1277209-1277239
  hypo

SEQ ID NO: 69131 - DNA, 370 bp, Homo sapiens; identical to SEQ ID NO: 41241
  chr5:1279434-1279804
  hypo

SEQ ID NO: 69132 - DNA, 30 bp, Homo sapiens
  chr5:1282969-1282999
  hypo
tggcgaactcaccccggacctgcagcatcc

SEQ ID NO: 69133 - DNA, 30 bp, Homo sapiens
  chr5:1286244-1286274
  hypo
aggaacgctggccacgtggtgctccagaca

SEQ ID NO: 69134 - DNA, 246 bp, Homo sapiens; identical to SEQ ID NO: 41242
  chr5:1294070-1294316
  hypo

SEQ ID NO: 69135 - DNA, 229 bp, Homo sapiens; identical to SEQ ID NO: 3754
  chr5:1295213-1295442
  hypo

SEQ ID NO: 69136 - DNA, 30 bp, Homo sapiens; identical to SEQ ID NO: 41246
  chr5:1296240-1296270
  hypo

SEQ ID NO: 69137 - DNA, 30 bp, Homo sapiens; identical to SEQ ID NO: 41247
  chr5:1297472-1297502
  hypo

SEQ ID NO: 69138 - DNA, 30 bp, Homo sapiens; identical to SEQ ID NO: 19202
  chr5:1318533-1318563
  hypo

SEQ ID NO: 69139 - DNA, 30 bp, Homo sapiens; identical to SEQ ID NO: 41248
  chr5:1322071-1322101
  hypo

SEQ ID NO: 69140 - DNA, 169 bp, Homo sapiens; identical to SEQ ID NO: 19203
  chr5:1326227-1326396
  hypo

SEQ ID NO: 69141 - DNA, 279 bp, Homo sapiens
  chr5:1330257-1330536
  hypo
cttccagaacactgaggccatcgggaacaagcacacaggcttccacagaaggtctcaggtcccggggctgaaagcctttcctgagtgcgtggaggcacatggacctcagacagttcaggtcactgcccggaactcacctcaatggcggctccaacacccgccgggaccagcaccagcaggctcgtctgctcgtccagcaggaacagaaagatgaccacggtgctgaagcagcgccagagcactggggacaggatggtcgggctgggagggggtgcaggg

SEQ ID NO: 69142 - DNA, 271 bp, Homo sapiens
  chr5:1331485-1331756
  hypo
acacgcccaggcctgcgctggtcggggaaggaacaccggcgggaggacggggcgagggaaccaagacaggggatgtgaggccccagccctgctcagcgcccatgagcagccgggaaggctcgagaggtccatgcatctcactctccacagcccagacccagaccccatgcacgccagagtccgcagccaggccctgagctgtgcagccgctggaggccctgagccgtgcagcctctgatggtcccaccacaattgccgcaacggctccctg

SEQ ID NO: 69143 - DNA, 30 bp, Homo sapiens
  chr5:1335181-1335211
  hypo
cagggagtacacggcgtcctgcatgtggat

SEQ ID NO: 69144 - DNA, 31 bp, Homo sapiens
  chr5:1341689-1341720
  hypo
ctggagccctagacatcgcccacctgtgtgg

SEQ ID NO: 69145 - DNA, 235 bp, Homo sapiens
  chr5:1342378-1342613
  hypo
ggaagggcagcagccacgagggctccaggtgcctcggcccacactactggaacctcagaaatttaatgtgggtagtttttttgggtgttgtagttttaaggataaaaagatgatcagccacaaaggactgactttcaaggctgtcagtcctgactgtgtggcatccagcacgagctgaggaaaggcccggcgagctgctacaactgtaggcctcggaccaggtgcctggctcttc

SEQ ID NO: 69146 - DNA, 30 bp, Homo sapiens; identical to SEQ ID NO: 41249
  chr5:1344442-1344472
  hypo

SEQ ID NO: 69147 - DNA, 435 bp, Homo sapiens
  chr5:1346148-1346583
  hypo
aggcacccgaggccgcgtgcaggggcggtcctgggccaccaacccctggaagctgggccaggagcttcggagccatccgaggcttttttcgctcctctcactctcatgcacctagttaccctccccacagagtcttctcacggcgcggttttcggctaccattgcagtggtgtctgactacacccagtgcctctatcgttcccccctcagtctgttctcgcttcttggcaaacctgtccttggaaagccctctgctgactcctgttaccctgatcaaatgcatcctcctcaggaggctcgtgagccctttgcagggtggcccaagaggcatcacgccctgctctccagccactcttggggtcccctacagggccaggcgtcccacaccagcagcgggtgctggtcctgccacagtctgtgcgacacgtgaatgaa

SEQ ID NO: 69148 - DNA, 40 bp, Homo sapiens; identical to SEQ ID NO: 19206
  chr5:1381048-1381088
  hypo

SEQ ID NO: 69149 - DNA, 100 bp, Homo sapiens
  chr5:1381147-1381247
  hypo
aggcttaggcgtgttgtcacagcagcccgaatggactccagcagcagagcagccagggctgcacgtggtgcgtgaacacacccgccgccctcctcctcct

SEQ ID NO: 69150 - DNA, 354 bp, Homo sapiens
  chr5:1409807-1410161
  hypo
agaaggcgaagccggcgatggtacgtacgttggtgacgcagaacagggacaggaggaaggtcgccaggacgatgaagagcgtgaagagctcacggtgtctgtgcagcagctggaactcatcgatgagcccggtgatcactgactccataccacccatctgcacacagagcacagggtcgggctgcaggctggcggcgctcctgaccgcagcctgggccaagacctacttgtcacccagtggacgcacacccggggatggacacggaacaggggccacatggccgtccagggtgcaggatgcctggtagtgaggacagctgttggcgagggcttctatggcggcacgaccgcagg

SEQ ID NO: 69151 - DNA, 229 bp, Homo sapiens
  chr5:1416087-1416316
  hypo
cagctcacaggtttgcgggttcagtggatccgccctgttctcatccagggacaccctatttctggaagtcagcgacctctccctagtattgatgaggcccctgcctggccctgctaggggctcacctgtagcagttgttggtgaacttgttgtagctggagaaggcgatcagcaccccgaaccccacgcccagggagaagcacacctgggtggccgcgtcaatccaaac

SEQ ID NO: 69152 - DNA, 30 bp, Homo sapiens
  chr5:1416988-1417018
  hypo
gtcctaacaaccctcggaacagcacagatt

SEQ ID NO: 69153 - DNA, 242 bp, Homo sapiens
  chr5:1439037-1439279
  hypo
gccctcagatactctccaacacggaccacggtgcaagctcagcatcgcttacgactgcaggctcagaggcagcactcctctctgaaacacgtccgtgccgctggccagggccaggcaggacacaggtaacgcgtgtgtcttgaactgttagcctgggttcactgcaacgccggatttgacacgcgcccctgtctgtctgtaacaacaggcctgggtcttccgttggctgctgcattcttcca

SEQ ID NO: 69154 - DNA, 371 bp, Homo sapiens
  chr5:1462597-1462968
  hypo
gagtggtgtccgcacggctgtcaccagacatcctcatcaccctccgcaccgcacagcccagcgtctccttccacaagcaaaagactgcggctcctctctctgcaggaaggtcagccatactcgggtggcagcgtgacgccagtcaccatggaaaccagggctgacaggaagatgcagccgcttccagcagggacctggcctgagggcaagggaggagcggcacggcggcggctgccttgcgcttccagctcgggccctgctcatttgaacaatatccaacctcggactggagtttaggctacagtgaaatggattacgttatgccgaaacagaaacatcaaactgccaacgtttataaaaaaagaggggac

SEQ ID NO: 69155 - DNA, 30 bp, Homo sapiens
  chr5:1463686-1463716
  hypo
gcccagaggtcactcgcaaagaggctcatg

SEQ ID NO: 69156 - DNA, 237 bp, Homo sapiens
  chr5:1467131-1467368
  hypo
tggacacgggggactcgaacttccatgtggagccatgcagcagggccctgtgccttggatctggccccctccaggtgcctcgtggacacacagcagatgcttctcgggcaagggctcagacgctgcccaccccacccgtgatagctcagcaaaccaaccagcacctgtggctgccactgggaggccgcggaagggtcctgcctgggccacgggcgagcgcggcgcaagcttgggctg

SEQ ID NO: 69157 - DNA, 30 bp, Homo sapiens
  chr5:1467599-1467629
  hypo
caggtgtggaagcggcggctccggccctct

SEQ ID NO: 69158 - DNA, 160 bp, Homo sapiens
  chr5:1468059-1468219
  hypo
ctcctgctgcagcgcgctgtgatcttgtgagcgtttgctccaccctccgagaagtgggctgcctgggaggggcgtcgcctctcttcagggaggggctgcgccttcacctccaccggctcctccttgcggtgctcagggaagaaacgctgacgcctccagc

SEQ ID NO: 69159 - DNA, 291 bp, Homo sapiens
  chr5:1476430-1476721
  hypo
ttgagtggagctttgcgggacagagactgccgggcccatttctaccctcggacacatgctttgggagggagaggatgggaacgtgagggaacgggccgcccagctgaatcttcagggtgtcagcggagtgtgaacaaagtggctcggaggtcagagccaggcacactctgatgggcccggccgtggctgtgttcccctctgggctctctggagaggcgagttcccagccatgccccgacctgctgcagcaggagcctgggggtggggccggtggaccgaggctgatgtggc

SEQ ID NO: 69160 - DNA, 30 bp, Homo sapiens
  chr5:1483853-1483883
  hypo
cacgagctggaaggcgtctgtggagggaca

SEQ ID NO: 69161 - DNA, 96 bp, Homo sapiens; identical to SEQ ID NO: 19210
  chr5:1490330-1490426
  hypo

SEQ ID NO: 69162 - DNA, 73 bp, Homo sapiens
  chr5:1497220-1497293
  hypo
aggggtgcaaaacatccaccacgctcgccaagagagtctggaagaacagggcgctgaggagcatcaaagaaca

SEQ ID NO: 69163 - DNA, 30 bp, Homo sapiens
  chr5:1501094-1501124
  hypo
gcagcccaagaggccgtccactcacagcct

SEQ ID NO: 69164 - DNA, 31 bp, Homo sapiens; identical to SEQ ID NO: 19211
  chr5:1511331-1511362
  hypo

SEQ ID NO: 69165 - DNA, 203 bp, Homo sapiens; identical to SEQ ID NO: 19212
  chr5:1517523-1517726
  hypo

SEQ ID NO: 69166 - DNA, 30 bp, Homo sapiens
  chr5:1538509-1538539
  hypo
cggtccagggccctcgccaccatcacctga

SEQ ID NO: 69167 - DNA, 209 bp, Homo sapiens; identical to SEQ ID NO: 19213
  chr5:1546877-1547086
  hypo

SEQ ID NO: 69168 - DNA, 272 bp, Homo sapiens
  chr5:1548855-1549127
  hypo
ggcagataaacagcgcgatcggaggggttgataaaggtgtgatcggaggggctgataaacgttgcacaatgttgcctgtttttctacattgtcgctgtttctcagaaagtgccctcaggcgatgacactcaagagccctcctcactgcaggctacaggtgtctccctggagaactgcggaggggctctatagcacggaccctgcccgtgtcatgggcatacagaagaatccgtgcaggcttcccaacgggcgggatcctgatgaggggctgg

SEQ ID NO: 69169 - DNA, 58 bp, Homo sapiens
  chr5:1549946-1550004
  hypo
aaatgtggaccagagtgggagcggatcacagggagccgccaccttctcctagagtccc

SEQ ID NO: 69170 - DNA, 115 bp, Homo sapiens
  chr5:1550653-1550768
  hypo
tccctgggatcaggctgtttccgtccgcactagaaatgggccctgtgcaggcagggacgagggctcagtgggtacctggcatggtcatccctccgcaaatgtcagtggaggcaat

SEQ ID NO: 69171 - DNA, 239 bp, Homo sapiens
  chr5:1551579-1551818
  hypo
acagctcatgaacaggagactcgctgagaggagacctaccgggccacggagacagggcacctgccgtgctggagctggctggggtaccgaagctgcaatgggcacccggcctggagctggctggggtaccggagctgcagcgggtgccccgctggggatggatgcacctctctcccctcgactgaggaagggagcaggtctgaccaggcctagagcccgtgactgctgggcagtcacac

SEQ ID NO: 69172 - DNA, 164 bp, Homo sapiens
  chr5:1554245-1554409
  hypo
ggacacatcctatgaggacagcggctcccaggaggcctccagaggctgggaggcctttcaacgcgaggatcttactggccacaggtgctgctcaaacgaacgctccgaaagtctcagcaggtgagagcgcaagtctcagtgccggaaactgctgtgctgggggt

SEQ ID NO: 69173 - DNA, 30 bp, Homo sapiens
  chr5:1565207-1565237
  hypo
gcccctccatgcagcgccgccctctgtgca

SEQ ID NO: 69174 - DNA, 31 bp, Homo sapiens
  chr5:1588247-1588278
  hypo
tatatcaggttctccacggccccatggctaa

SEQ ID NO: 69175 - DNA, 145 bp, Homo sapiens; identical to SEQ ID NO: 19214
  chr5:1641261-1641406
  hypo

SEQ ID NO: 69176 - DNA, 198 bp, Homo sapiens
  chr5:1702204-1702402
  hypo
tgcttaggggcctggctgccacgctgagagctttctggtcaagccacgctagcattgagctctgaactcaagcctggagcccgatggggagctcgaacccattgtgccgatgcgtcattgaaagttacacgcgtgcccaggactggacaacaggttgaagcgatgtccgatttcttcgatcctaatggtctgtcaaag

SEQ ID NO: 69177 - DNA, 135 bp, Homo sapiens; identical to SEQ ID NO: 19215
  chr5:1704596-1704731
  hypo

SEQ ID NO: 69178 - DNA, 576 bp, Homo sapiens; identical to SEQ ID NO: 19216
  chr5:1729753-1730329
  hypo

SEQ ID NO: 69179 - DNA, 30 bp, Homo sapiens
  chr5:1745627-1745657
  hypo
ctggctggccgcacccgcatttccgtgtcg

SEQ ID NO: 69180 - DNA, 977 bp, Homo sapiens
  chr5:1746348-1747325
  hypo
atctgagatcctacactcagccgggggcccacggtgtagcgggtcgtcagccgggccccgggccttctgggcagcaagggccctggcaggaccctgagggctgggccaaggagggcagttcgctccggggcacctgtcaggggccccacacggctgcttttaggccaggggtggcaaagacgctgctgccgcctgctctgggctcggctcccatggctgtgaaggaccctcgtcactccccgtcgcctgcctgggctgcccggggaccctcctgctgcgtcagcacagagcctggaaccgcggccaaggcaggaagctcccctgtgaaggcaccaagcacggcagacgccctcacatcgccggggcccgtttccctgtggacgggaagtgggaacgtgacgtggacgtgacgtgggaacgtaacgtgacgtgacgtgacgtgacgtggcatggcgcgaggacagcgcggcgggagcggcgcctcagatccagcagggagggagacgaaaggcggatggaagaggggcccccggaccccgcccctcgaggcttgtgtgccgccctggctgcggcgttctgggcgacgggaaacagagtcaggacacagaccagggagggccggggcagagccagggcacctgcgggcgaggacggctgggtgctgggtccccggcgtcagggcgcaatgccgcctgctgggcgtcaccctttcccagggctgctgggacacgtggccgcagctgcttggctcaccacagcggaagtcggtctctctcatcctggagtccgcgcggctgagggcgaggtgtccttccgggggccctgaggggctctgtccccggcctctcccctcggcgcccctgcccggccaagcattgcgccaagcccacccccacctcacgtggcggcctcctccccggcttggggacttctctctgtcacttgcaaaaacacgcgtccttggatttagggccctc

SEQ ID NO: 69181 - DNA, 51 bp, Homo sapiens
  chr5:1752558-1752609
  hypo
gacagagcagggtgtggagtgcgtcttagcgcagaggagtgccactttgct

SEQ ID NO: 69182 - DNA, 576 bp, Homo sapiens
  chr5:1769197-1769773
  hypo
cgctggacctcaccacaggaccgcaccgctggaccgcaccgctggaccgcaccgctggaccgcacggcaggaccgtaccgctggacctcaccacaggacctcaccacaggacctcaccgctgggccgcaccgcaggaccgcaccgctggaccgcaccaccgtcctggcaggtgagcgtggagcctggcgctccctggcgacgaccctggtcagacttccaggagcgcccctgcgggtaaagtcacatgtacgctctgttctgggctcagcaaccgagtcgtaggagagacggagtggcctggggccaggtcctgagtccgaggagcagctgtctgggctctcccttggccacgaagcagctcacaccgagggcaggagcagaggcctcccggccccgggcggaaccccgcaggagggcctccctgaggccaacgtctctggcgccacctcccgcagtgttcgctggagcccgcggccatgcagggccacacggacccgggggctgcgcagaactggggccctcgtgcaccgtgggtgggaatggaacgtggcgccgctgctgtggaaaaccaaagg

SEQ ID NO: 69183 - DNA, 328 bp, Homo sapiens; identical to SEQ ID NO: 19218
  chr5:1786633-1786961
  hypo

SEQ ID NO: 69184 - DNA, 97 bp, Homo sapiens
  chr5:1794527-1794624
  hypo
cgctggccgagtgcccgctgcaggctgggctggtgggagacgtacggacacaaacacggctgggaagcaggctctgcctccacgcagcatgctcatc

SEQ ID NO: 69185 - DNA, 30 bp, Homo sapiens
  chr5:1795124-1795154
  hypo
aagaacgaatgcaccgcgtggagtgcttcc

SEQ ID NO: 69186 - DNA, 30 bp, Homo sapiens
  chr5:1804560-1804590
  hypo
cagctcacccagggcgtcctggttgtgacc

SEQ ID NO: 69187 - DNA, 227 bp, Homo sapiens
  chr5:1808310-1808537
  hypo
cttgtcttgaagcaacctgggcgtcctttagggggtgtttgagacgcgggcggtgcgatgtgcgccatggctgctctccagagcttttgtgtggcttcccgcttctgcatgctcctcctcctgagcttccctcccaaatacgccatctttatagtggagtgaaggcaatcggattttaaaagaaatcttctggatggataagaaccgtgggtctttgcttcctttag

SEQ ID NO: 69188 - DNA, 30 bp, Homo sapiens
  chr5:1809066-1809096
  hypo
ggtattctacagtgtcgatgatccagctgg

SEQ ID NO: 69189 - DNA, 480 bp, Homo sapiens
  chr5:1809356-1809836
  hypo
ttaacaagagatggcgtgcgggctgctgtgacggttctcccttgattccctcgtgaagtgcagcagcgctcttcagtttttctcacctttccccaggtgaaagcaggtgagaatggagccttgagtctgaacccagagcggggctttgtgttgtggctgggtgtgttcactgccggagcttggccgtgtgaacccggagccgggctctgtgtcgtggctgggtgtgttcactgctggttctttgtattcctgcggttgcactgagctcctggagccagacgtttgctggtgatgggcggtcagggtcacccttgagctgcgcacactaaatgacgggagggcatcccgcgtcagtcgccagtgtcgaggcgtcagcagccctccctgcagggaggtggccggtctctttgactgccgtgatcggggcctggcagtttgttagtgcggcctttgtgacacgttgtcacttaggcagacacc

SEQ ID NO: 69190 - DNA, 117 bp, Homo sapiens
  chr5:1813757-1813874
  hypo
gcacacaagcaggacgtgaagttaccagagtctttcccgcacatgcctatgagtcataaatgaccaggtggaagacacagtggatgaggagacccagtgtacggtagcagcaaacaa

SEQ ID NO: 69191 - DNA, 186 bp, Homo sapiens; identical to SEQ ID NO: 19220
  chr5:1815266-1815452
  hypo

SEQ ID NO: 69192 - DNA, 30 bp, Homo sapiens
  chr5:1816078-1816108
  hypo
ggggaagctgagcacgtgaagctcgctggt

SEQ ID NO: 69193 - DNA, 99 bp, Homo sapiens
  chr5:1826982-1827081
  hypo
tcccaagacggagccgcccaacctttagcgtgtctgcttccagatggggaggcccagtccctgtggaagtgactgctctcccgcggcccagcctcggga

SEQ ID NO: 69194 - DNA, 30 bp, Homo sapiens
  chr5:1827692-1827722
  hypo
actgcgtagatgaaccggctggtagcacac

SEQ ID NO: 69195 - DNA, 31 bp, Homo sapiens
  chr5:1840310-1840341
  hypo
tgagcccttccccctgcggtgtcccacgtga

SEQ ID NO: 69196 - DNA, 174 bp, Homo sapiens
  chr5:1858631-1858805
  hypo
ggtgaagtgtggaatgggactcgctgacgaaagcccactcctccctgggccaggaggggcgcggggcccagggccggtgtggctggacgggggcctcccaggtggacgggcaggggggctctgagagcagctgccgggatgggaggcggatgcgtctgcctgctctgtccaggc

SEQ ID NO: 69197 - DNA, 1635 bp, Homo sapiens; identical to SEQ ID NO: 3760
  chr5:1874671-1876306
  hypo

SEQ ID NO: 69198 - DNA, 283 bp, Homo sapiens; identical to SEQ ID NO: 3761
  chr5:1876637-1876920
  hypo

SEQ ID NO: 69199 - DNA, 502 bp, Homo sapiens; identical to SEQ ID NO: 41268
  chr5:1882419-1882921
  hypo

SEQ ID NO: 69200 - DNA, 485 bp, Homo sapiens; identical to SEQ ID NO: 3767
  chr5:1883131-1883616
  hypo

SEQ ID NO: 69201 - DNA, 888 bp, Homo sapiens; identical to SEQ ID NO: 41270
  chr5:1883879-1884767
  hypo

SEQ ID NO: 69202 - DNA, 462 bp, Homo sapiens; identical to SEQ ID NO: 41273
  chr5:1886379-1886841
  hypo

SEQ ID NO: 69203 - DNA, 148 bp, Homo sapiens; identical to SEQ ID NO: 41274
  chr5:1886997-1887145
  hypo

SEQ ID NO: 69204 - DNA, 35 bp, Homo sapiens; identical to SEQ ID NO: 3770
  chr5:1887546-1887581
  hypo

SEQ ID NO: 69205 - DNA, 108 bp, Homo sapiens; identical to SEQ ID NO: 3771
  chr5:1887655-1887763
  hypo

SEQ ID NO: 69206 - DNA, 43 bp, Homo sapiens
  chr5:1900862-1900905
  hypo
attggtttgtgtactgttttgcggttgttccttcatgataatc

SEQ ID NO: 69207 - DNA, 99 bp, Homo sapiens; identical to SEQ ID NO: 19229
  chr5:1910373-1910472
  hypo

SEQ ID NO: 69208 - DNA, 234 bp, Homo sapiens
  chr5:1911954-1912188
  hypo
ggcagggagtgaggaggtccacggtgtgctctcggggctggtacgagaatccgcacatggggcggtggggctcatgttacattgggtgcatcgcgtaacctcattttaacagctgggcttcaccacgtcgtggcacgtcagagctccgtgccttctcgctgccaagggatgtccacgtgtggccgggctcacggcgcgtctcactcaccaggcgaggtcacttgggttgtttgt

SEQ ID NO: 69209 - DNA, 43 bp, Homo sapiens
  chr5:1914051-1914094
  hypo
tgagtagagcctggagagatgcgattaaactgctagtctcctt

SEQ ID NO: 69210 - DNA, 331 bp, Homo sapiens
  chr5:1922812-1923143
  hypo
ctctgagggactcaccgctgctgctcagggacccctcctcccattctggaaaccatcggcaaaacctcagcagaccacggggccattactgtgggctccggtttccagccactgcacttccagacttttctcttcggagccagtgggaatttagcaaatgactggatggggtctgggcaaccaggcatcacgaggcgccttctccttccactcggtggagcagggtctccagtgaatgcggcgtccacgcctgatcggggctcctgccagggcggccatgcctgctgctagagcctctgagaaaacagccgcctcctccccttcccatggc

SEQ ID NO: 69211 - DNA, 155 bp, Homo sapiens
  chr5:1923519-1923674
  hypo
cgaaaatgcattcatactgaacgtgccgtcttgggcttgatgctttgcttgttggtttggttttcgcgcatttctataaacttaaacacactgtgtgactgaaagcccgtccccagtaacgtacgtatggagacgcctagtgcctgtctgctgtc

SEQ ID NO: 69212 - DNA, 30 bp, Homo sapiens; identical to SEQ ID NO: 3772
  chr5:1930949-1930979
  hypo

SEQ ID NO: 69213 - DNA, 50 bp, Homo sapiens; identical to SEQ ID NO: 41278
  chr5:1931236-1931286
  hypo

SEQ ID NO: 69214 - DNA, 132 bp, Homo sapiens; identical to SEQ ID NO: 3774
  chr5:1931444-1931576
  hypo

SEQ ID NO: 69215 - DNA, 349 bp, Homo sapiens; identical to SEQ ID NO: 41280
  chr5:1931617-1931966
  hypo

SEQ ID NO: 69216 - DNA, 211 bp, Homo sapiens; identical to SEQ ID NO: 19235
  chr5:1951557-1951768
  hypo

SEQ ID NO: 69217 - DNA, 66 bp, Homo sapiens
  chr5:2006865-2006931
  hypo
ggctgaggatgtctgggactccggtcaccaccggtcctgcgtaacgacatctccacatttggtgta

SEQ ID NO: 69218 - DNA, 444 bp, Homo sapiens; identical to SEQ ID NO: 41281
  chr5:2038418-2038862
  hypo

SEQ ID NO: 69219 - DNA, 52 bp, Homo sapiens
  chr5:2041344-2041396
  hypo
gcttagtgttggtgacggtgcagcggcacagcccgtccgtgggtggctggtg

SEQ ID NO: 69220 - DNA, 329 bp, Homo sapiens
  chr5:2052997-2053326
  hypo
agcattctggggagccggtgcctcgggctgcccgccaccaggaagttgccccgttgctccccacgtctcctcccgccatcatcttttctgtcctggttctcccccagtagcctgttggcccatgcagctggttgaagcatcggtgctgcaagtgcttgctggtttaggtgacgcaggtcagttttagctgcgacgagaagccaccctggacttttaaaaacgagatgctctggtgacagttgcttccagtctgagatgagttagcttctcgtttctgagatccagccacacagattttgggcacgtgaggtggccggctctgccattgg

SEQ ID NO: 69221 - DNA, 31 bp, Homo sapiens; identical to SEQ ID NO: 19237
  chr5:2094834-2094865
  hypo

SEQ ID NO: 69222 - DNA, 455 bp, Homo sapiens
  chr5:2112033-2112488
  hypo
atttatttattttgcaaaagccgccttttgaaagccggagtgcagtgcggactggctgaggccggggcccaggcgcgcgcctccttcctgcaggcggcccggggcatcgatcgcgcggggcgtaatgaaccctaataacagctctatcaccgcccgcccgccaattggcccgggtgccctccaaattagccacaaagaagccagtctgtcaatattaattccgccgcggagattacttgttgtgggagaacaaaggtgttctggcttgagctgaacaacttaactccttgtctcataaaatttaagctgctattgatcgcctccttgcattgtgtgaggattaaacacgtgcgcgtgcacatccaggcacacgcgcgcacacactcggggcgcccggccccgctcaggcagccgccccacctcctcgcctacccggaatcattcagcaacgtgga

SEQ ID NO: 69223 - DNA, 30 bp, Homo sapiens; identical to SEQ ID NO: 19239
  chr5:2137065-2137095
  hypo

SEQ ID NO: 69224 - DNA, 166 bp, Homo sapiens; identical to SEQ ID NO: 19240
  chr5:2155743-2155909
  hypo

SEQ ID NO: 69225 - DNA, 30 bp, Homo sapiens; identical to SEQ ID NO: 19241
  chr5:2180403-2180433
  hypo

SEQ ID NO: 69226 - DNA, 31 bp, Homo sapiens
  chr5:2181885-2181916
  hypo
ccccagggcctggcaccgcagggggtattgc

SEQ ID NO: 69227 - DNA, 28 bp, Homo sapiens
  chr5:2221989-2222017
  hypo
aaaatgttatatttggccaggcggggtg

SEQ ID NO: 69228 - DNA, 96 bp, Homo sapiens; identical to SEQ ID NO: 19242
  chr5:2225527-2225623
  hypo

SEQ ID NO: 69229 - DNA, 418 bp, Homo sapiens
  chr5:2261256-2261674
  hypo
ctctcaaatggaaacacctgacgttgcaccagatctcagatgcgaagggcgggggtccctccagtgaggactcccaggggaccgagttttccacctgcgttctagatgttctccgtgaaagcatcacgtggtgtcccggtgaggggcctggctgagtgggcatcggcttgagcgcctggagcttgctggagaagagactcatgggcaccaccgggcccaccatgcagacttcagggaaagagagcagccggaatgcgttttaaatcctgcctgagagcgtggatgctacaggactcctggcgtggggaacccggcatctgtgtatgtgcccgtgggcatgtggtcagcgaggcaaccctcacaggaccacgaggccctggtcggacacaggctgcccgcagccccttcccacaggagc

SEQ ID NO: 69230 - DNA, 258 bp, Homo sapiens
  chr5:2369536-2369794
  hypo
atgcaaacacatgcacgggtaggcatgcacagaacacacatgcaaacacatgcacaggcatgcatgcacagaacacacatgcaaacacatgcacgggcacgcatgcacacacagacacagggcattcctcccgcctcaggcaccctggccaatgacagcatcagttgtcgattcgcgtggatccctccactagcgaccattctcacaaccttcacatttaactttgaatttcttccccatgaacggggctgccagatg

SEQ ID NO: 69231 - DNA, 128 bp, Homo sapiens
  chr5:2374869-2374997
  hypo
gccagggctctatttggccttcgcaagctcaagaaagccacctatgggagcacgttgtttgtgtaaaccccctgctcatctctacagggctgccggcgaggggagccgctctctctgcagggcttgcc

SEQ ID NO: 69232 - DNA, 56 bp, Homo sapiens
  chr5:2495119-2495175
  hypo
ggttgaaggaaaccagcatgccgtccttgctatccggtccaagtcaaaagtctctt

SEQ ID NO: 69233 - DNA, 214 bp, Homo sapiens; identical to SEQ ID NO: 19243
  chr5:2541475-2541689
  hypo

SEQ ID NO: 69234 - DNA, 49 bp, Homo sapiens
  chr5:2542211-2542260
  hypo
cacctcctgatgggacaaaagcgaaagcgcccacaggcaaggtggtggt

SEQ ID NO: 69235 - DNA, 30 bp, Homo sapiens; identical to SEQ ID NO: 41282
  chr5:2544169-2544199
  hypo

SEQ ID NO: 69236 - DNA, 95 bp, Homo sapiens
  chr5:2547236-2547331
  hypo
tgcctcagccatcagcgctgaatatcattaataccttcccactgttaaatcgatcactgtcatccccggatgccggcgtgcggcggggcacatgg

SEQ ID NO: 69237 - DNA, 30 bp, Homo sapiens
  chr5:2557302-2557332
  hypo
agtgtgagtaaaggccgtcatcctcgagcc

SEQ ID NO: 69238 - DNA, 30 bp, Homo sapiens
  chr5:2557845-2557875
  hypo
actgtgagcagcatccggagtgcagcgtgg

SEQ ID NO: 69239 - DNA, 30 bp, Homo sapiens
  chr5:2564567-2564597
  hypo
tgcagggagcacggcggctggcggtaacgc

SEQ ID NO: 69240 - DNA, 301 bp, Homo sapiens
  chr5:2668650-2668951
  hypo
accaacatgctctgaaggcagcgcccaaaacacagggagagcgcaggctcatcaggacccaggcgcgtgttttagagcatggccttgccgtgccacacataacgcccactgttaatggcattaacagagggcaggggcgccggggaggaggggaagggtgaagacgcagagaagtgagcgagaggtctcagcagacgaagctggagcgcccactcataatttccacattggccattggtgcctcgcacctgctgttactcctccttcacctccctgtcccgggtcccccaggctcccagag

SEQ ID NO: 69241 - DNA, 87 bp, Homo sapiens
  chr5:2669178-2669265
  hypo
ggacttcagccatcatgacaacgtcagatgactgcggttctcctcagtttcgcctaaaattctcacggaagataaactcacatatga

SEQ ID NO: 69242 - DNA, 201 bp, Homo sapiens
  chr5:2708349-2708550
  hypo
ccctgtccccagcattcacaccgcagcctcagccgtctcaggacgagccgtctgagtgcaccatgagcagcttgcaccacggcgatctctacacacttgcaatgccaggttgtccttcccggatacaggacagctgccatccggggcagtgtacccacaggtgtttcccgtagagacaccggcccctccccagggcttcat

SEQ ID NO: 69243 - DNA, 127 bp, Homo sapiens
  chr5:2708902-2709029
  hypo
tgttcccaccttcctatcctgcgctctcctcaccactctttgcttccagggcacggctctggtccatcgggtctccactccttgctgccacacccttggagacagcgagtgtctcagcaggatcact

SEQ ID NO: 69244 - DNA, 110 bp, Homo sapiens
  chr5:2808977-2809087
  hypo
gacttctggggactccgtgtggtagggagcatccttctcactcttctcagaccagagcctgcggtatgagggcgtgacggtgctagctgccaccacgtattctgttacca

SEQ ID NO: 69245 - DNA, 30 bp, Homo sapiens
  chr5:2890263-2890293
  hypo
atcgcggctccacggcggctggaatgcaat

SEQ ID NO: 69246 - DNA, 139 bp, Homo sapiens
  chr5:2890785-2890924
  hypo
aaagcttctttgattgtcaaacgtcgttactaagtccaagtttaagacatctgccgctctaccttacacaccacgcacaggccgcaaggccaccgggaaatgatgaaaacatgaatgcgggcagcattgctgtggtgtt

SEQ ID NO: 69247 - DNA, 30 bp, Homo sapiens
  chr5:2894642-2894672
  hypo
gaccctggatagctccggatcccgtgcgta

SEQ ID NO: 69248 - DNA, 390 bp, Homo sapiens
  chr5:2896878-2897268
  hypo
ctcagggtgcatgggcgtttgctgaagctacacgtccagggactccttcccactgaggggtcgcgggtgctgtcttgtgggggcaatgttcgctcagactccatggatgcgtggccagacccttgtggaccccagctctgctggcttctgatagcagggcatcggggagttagactggagcttcatttcctcttctttaacatggcatctcacgggtgtcgtaagcatgagattaggcgaagttattcctgtggagttgctgactccacccctggtgtgtagtcaccggtgccccttccttctctgggctcagacagcagcctcaggtgggctctgactcctcccagaagaaaactgtcaaggatgccgcgcccccggctctgggccccg

SEQ ID NO: 69249 - DNA, 53 bp, Homo sapiens
  chr5:2903648-2903701
  hypo
ggtgtcagcagacatctcacccgacatgagccgctctgctcttgctttcatgc

SEQ ID NO: 69250 - DNA, 116 bp, Homo sapiens
  chr5:2904032-2904148
  hypo
tgtggaggcaaaggaaatgggcgaaggacgggcatctgctgccagcctgcatagacagtggggctccgggtccaggaggaggctgtggctgtggcgggtgcctcctggccccctgt

SEQ ID NO: 69251 - DNA, 30 bp, Homo sapiens; identical to SEQ ID NO: 19244
  chr5:2990181-2990211
  hypo

SEQ ID NO: 69252 - DNA, 155 bp, Homo sapiens
  chr5:3027281-3027436
  hypo
ccccttgttggtcttgcatggcggggaggagcccccaagacagcgtgtgttgaaggtcaccacgtctcagtccaccggtgaggggcagtgcccccagcgacatgcggtgttttaagcaggtctgacccctggccgcctccacatgtgcacaccca

SEQ ID NO: 69253 - DNA, 153 bp, Homo sapiens
  chr5:3028122-3028275
  hypo
aggtgtggtctcctctctgtgcggagcctcctcaccttgctctgggctcgtggccgtggctcttctctccatctggagccgcctcgcctccctgcgcactcgtggccatggctctcctctttgtgcggagccgcctcaccttgctgtgcgctc

SEQ ID NO: 69254 - DNA, 85 bp, Homo sapiens
  chr5:3031837-3031922
  hypo
ctttggctgccaggggttcagcggggaggcagtgagcaggccaagcaccgagggtttcgagggtggtgaaactgttccaagcgac

SEQ ID NO: 69255 - DNA, 100 bp, Homo sapiens
  chr5:3031981-3032081
  hypo
agagggacccgcatgtgcactgcggcctttgggtgacaatcacccgtcactgtggctcatcccttgtgaccaagctgccgcacagagcagggtgttgata

SEQ ID NO: 69256 - DNA, 83 bp, Homo sapiens
  chr5:3042021-3042104
  hypo
aagaggagattgaagattttccgcatcctgggactccaggccgaatcactttgtgtggcctcggagggaacacctatccaatg

SEQ ID NO: 69257 - DNA, 137 bp, Homo sapiens
  chr5:3051521-3051658
  hypo
cactcaaaccccttctgctgacgggcagtcctgcgcagtggggagacacccaggaagcaggctcagaacaagtcaggccggaggccatggttccgccggtgcattcagggagtttcgctggaggatttccaggtggc

SEQ ID NO: 69258 - DNA, 33 bp, Homo sapiens
  chr5:3098403-3098436
  hypo
gttttcccagattaggctgggcgcagtggatca

SEQ ID NO: 69259 - DNA, 93 bp, Homo sapiens
  chr5:3114548-3114641
  hypo
ggaactgcacccacacaaggccgctggtgctgccacgtgtgtggggcagatgggatcccaggagcactttgcgagtgtccccctccctaaaca

SEQ ID NO: 69260 - DNA, 360 bp, Homo sapiens
  chr5:3155669-3156029
  hypo
cacaacacctcagcgcggtggtgtgtcttttaacccacgtgtttgggtgggaatgcctgtgaggagcactgtttggggctgctctgtcagaccctggcacactctcagggccgccttgcacgaaccagccctgccccctcagggaggagcatcgggaaagctgaggcaagcgcagggtccagttgatcacagtgccgttgcccaccaggcactggctttgcctgtcatgaggctctggactcagcgtctcaggcatccacacatcagccaggaagggtggatggggcactcgaggctatgtggggcttgaagaccatgacagaggcgctggcccagagcgggcacagccagggtgcagca

SEQ ID NO: 69261 - DNA, 56 bp, Homo sapiens
  chr5:3203777-3203833
  hypo
gagcatccagtccctagcaatcgcatttaagcaccgggtctgtagtctctctgctg

SEQ ID NO: 69262 - DNA, 115 bp, Homo sapiens
  chr5:3212679-3212794
  hypo
ggaagggagggcttgaggcatcgcagaaggaagggtgccgaggggcagtacccaggtggaggaaggtggtgctgactcttcagttttggggagcgagacatccctgtgagaaggt

SEQ ID NO: 69263 - DNA, 87 bp, Homo sapiens; identical to SEQ ID NO: 19245
  chr5:3221101-3221188
  hypo

SEQ ID NO: 69264 - DNA, 359 bp, Homo sapiens; identical to SEQ ID NO: 19246
  chr5:3282931-3283290
  hypo

SEQ ID NO: 69265 - DNA, 765 bp, Homo sapiens
  chr5:3324687-3325452
  hypo
atcctcctcctgacccggcgcggtggggctgggtcccaggctggctccccgccctccctcctactgtgatcccaggaccctcggccaccgcccttcctgcccaggcccgtcctgggacccgggtggccctcgtcatagaaggctgtgttgcccccagcaagagcaaagccaccgctccacgcctgcccggggaattggtggccgagcttatctgggaccactggtccacgcgatgccccgtgacgggccaggaagggttcaggcttggaaatgtcggacggggacgactctgggccttgctggttggtggagctgggagcagcttcattctcctctgactgtgtggacacagccctcaaggggagagggccgcatccctgttccccgccttcctcgccatgactggacgcagcggggcgccctgtccctgcctggagctcttccagctcagggccccatcagcgccaccaccttggactgccgccatccagggcgcagggcccgctgccccacacctgagggacacagccaggctttctgcttggcctgctgttctctacgtctcacaggcgtcttgctttccaccatgcaacttcacaatctgcccaaatgtccttttattaaaactagtcgacaaagtcccaaagccctagctgttcggcgtgtgtgtgtgtgtgtgtgagcgcgcgcgtgcgtggggttaagtgtttccataattgcatctctcttgaaaatcaaaacagaacaaaccgtgctttatgtacg

SEQ ID NO: 69266 - DNA, 172 bp, Homo sapiens; identical to SEQ ID NO: 19248
  chr5:3326307-3326479
  hypo

SEQ ID NO: 69267 - DNA, 231 bp, Homo sapiens
  chr5:3339350-3339581
  hypo
gggggtgagaattaacgctggcgatgcggtaattaccgtaattaccagactcaacaattgttcattatctgagacttcacgtcttcaaacagttggagacatgacctgcgagaggccggtctgcgttgctttcatggtgctgtcctgggatgccagtgtcagttccggggtctgtgcacttggcacaggggttcatgcgggtcggggtccgtgtggcgtgaggggctccac

SEQ ID NO: 69268 - DNA, 267 bp, Homo sapiens
  chr5:3454258-3454525
  hypo
tggacatcacccactaacacacgctcccgctagcacggcaggcgtcacccactaacacacgctcccgctagcacggcgggcgtcacccactaacacacgctcccgctagcacggcgggcgtcacccactaacacacgctcccgctagcacggtgggcgtcacccactaacacacgctcccgctagcacggtgggcgtcacccactaacacacacggcagccctggactcttctttcctggatgtccgagggaattccccagagggat

SEQ ID NO: 69269 - DNA, 46 bp, Homo sapiens
  chr5:3489719-3489765
  hypo
ggtatacacagccccatatgccggcgacagtgatacaagtgtaatt

SEQ ID NO: 69270 - DNA, 920 bp, Homo sapiens
  chr5:3535477-3536397
  hypo
ctctcagtgggaccttcctcccggaagagcgttcgcgtgtaaaatgtgttgtgtaccattcttcaccacgatactaaggcagagaatgcagtgagtggaagagagcgtgcaataagcataggcatgcacgtgtctcccctaatgcacatgcagcgacttctctcccgcgagcttatgggaaacgccctgcgcagctgaccagtcatccgacgttgcggagagcagcgtgggtccgagggaaggctgcggccggggacgcccagactggaggccttgtctgccccacccagcctcggacttctcaggcttctcggcccgagggagaaacattttgaaattctttaagaagcaagttttccgtgggctgagtggacttctagggccctgaccacactgacctgggcttgtcgagctctgcccgcaggcccctcgaggtctgggtttcggccccatggccgtggctgtgcttggaaggccccgggagcagccagggagcgcggtgcctgccctccacggcggccgcctgcggggaacagggcagcgtccagcaggcggaaggcgagtgaggcagagtgaagcacacagagccaaaccatatcaccgccaccccgtgtgactgaggtcagggcttgcctttgaggcccagggtcagctggggactagcaggagctctaatctcgcgctgcgtcagggcgggaactgcaagaggccgcccccggcaggccgcgcatgcgcactcccgcgcgcacgctcacccgcgctgacccggctacgctggacccaggtgcggggacccaggtgcgctggacccaggcgtgcgccaccgccacctcctgcgcctacaccccgagagcggccgccgccagcagtggcatccgggctgtcccaagtcatccttcgtctgtttcagtgtctttatg

SEQ ID NO: 69271 - DNA, 258 bp, Homo sapiens; identical to SEQ ID NO: 41302
  chr5:3590399-3590657
  hypo

SEQ ID NO: 69272 - DNA, 748 bp, Homo sapiens; identical to SEQ ID NO: 41303
  chr5:3590803-3591551
  hypo

SEQ ID NO: 69273 - DNA, 313 bp, Homo sapiens; identical to SEQ ID NO: 41309
  chr5:3595055-3595368
  hypo

SEQ ID NO: 69274 - DNA, 252 bp, Homo sapiens; identical to SEQ ID NO: 41310
  chr5:3595849-3596101
  hypo

SEQ ID NO: 69275 - DNA, 258 bp, Homo sapiens
  chr5:3627872-3628130
  hypo
cacctctcctccactccctttcgggtgctgcactcctggcctgtccgccggacctggacctgcagccgccatgctcaccgagaccttcatttctgcagatccgacggtgtgtggcgcctcttctcctgactcagcttctccatcgcatctggcacacttggcctctctggccccgtagcgggaaagcatgatttagatgtggcttctgggcttgcctacaccctagctgtccttcccgctcactggccatctacctcc

SEQ ID NO: 69276 - DNA, 219 bp, Homo sapiens
  chr5:3659550-3659769
  hypo
agtaagagcagtgcttcaaaacggcctagagggtgctcactcagccccagcccggcagcctctgaaggcctctgggaggctggtctgtggtgtgggccacagactcggctccgataagagcagtgagagagcagcacgttggatgacgagcgcagattcaaggaatggaatttacgttgcccagtgccagcaaattccgagaagtaatacattttatta

SEQ ID NO: 69277 - DNA, 131 bp, Homo sapiens
  chr5:3740786-3740917
  hypo
gggcccctccacaatcttcagcgccgcgtccctgcaggtccacatgtcccccgcgggccctcccctggtttccgatgcccatcacccaacctcttctgtgtcctcagcccggggtgggggtgcagcccctg

SEQ ID NO: 69278 - DNA, 25 bp, Homo sapiens
  chr5:3759541-3759566
  hypo
aggcgtcagccaccaagaggttttc

SEQ ID NO: 69279 - DNA, 832 bp, Homo sapiens
  chr5:3761113-3761945
  hypo
acacctgagccagaacatgcccgctgaatgcggctctagcagctgtcgtgggccttcagagaggaagaatcttaaggcgcgtccaagacaagcggagtcgaggactccgtttcggggaggtttacctgaaaagctgtgtggaaaaacccgactgcgactttcaagcttgtgcttcacaacccaggagccgtgcattatgtccatgtgttcagatgcaagatgctcagaccccaggaaaaagggaattcggtgtaaagaaaaaaggactcttagcatggtccagtattaggacagtaacaccctgtgtgtgtgcacgtgccctccctccatctccctggcctttgcgtctctgtgtgggtgcacatgccctccctcctccctccatctccctggcctttgcgtctctgagtgggtgcacatgcgctccctccatctccgtggcctttgcgcctctgtgtgggtgcacatgcgctccctccatctccgtgggctttgcgtctctgtgtgggtgcacatgccctccctcctccctccatctccgtggcctttgcgtctctgtgtgggtgcacatgcgctccctccatctccgtggcctttgcgtctctgtgtgggtgcacatgcgctccctccatctccgtggcctttgcgtctctgtgtgggtgcacatgcgctccctccatctctgtggcctttgcgtctctgagcgggtgcacatgccctccctccatctctgtggcctttgcgtctctgagtgggtgcacatgcgctccctccatctctgtggcctttgcgtctctgagtgggtgcacacgttctttttctatcttgatgg

SEQ ID NO: 69280 - DNA, 30 bp, Homo sapiens
  chr5:3932173-3932203
  hypo
cattcatttgcacaacgagcgcactttgaa

SEQ ID NO: 69281 - DNA, 30 bp, Homo sapiens; identical to SEQ ID NO: 19255
  chr5:3999796-3999826
  hypo

SEQ ID NO: 69282 - DNA, 18 bp, Homo sapiens
  chr5:4143932-4143950
  hypo
acataaaatgaaaaagaa

SEQ ID NO: 69283 - DNA, 870 bp, Homo sapiens
  chr5:4144249-4145119
  hypo
aaaaaaaaaagaaagaaaaggtgactgtagtgaagaaatacatttccaagtcctctcaaagccgtgatattctatgcaagcaacattcatagaagcacagcttactacatgtgttctgtgtgccgtgctcttgcgtgcacctggaatgccaactgcacagtttactgtgtcctgtgtgccgtgctcttgtgtgcatgcagaatgctgaccgcacagttactaagtgttctgtgttccgtgctctcgtgtgcacgtggaatgtggaccacacagctaagtgtgttctgtgtggcatgctctagtgtgcgcatggaatgctgactgcacagcttactacgtgtgttctgtgttccgtgctctcacatgcatgcggaattctgacggcacagcttactaagtgtgttcggtatgccacacacttgtgtgcatgcggaatgctgactgcatagcttactatacgtgttctgtgtgccccactctcctgtgcatgtggaatgctgactgcatagcttactatgtatgctctgtgggctgtgctctcatgtgcacgtggaatgctgaccgcacagcttactaagggcgtcctacgtgcggtgctctcatgcacatgcacaatgccgatggcacagcttactaagtgtgtactgtgtgctctgctctcgtgtgcacgtggaatgctgactgcacagcttactacatgtgttctttgtgccacgctctcatgtgcgtgcacaatgatgactgcacagcttactacgtgtgttctgtgtgccgtgctcttgtgtgcatgcagagtgctgaccgcacagcttactacgtatgttctgtgtgccacactcttgcctgcacgtggaatgctgactgcacagc

SEQ ID NO: 69284 - DNA, 31 bp, Homo sapiens
  chr5:4442308-4442339
  hypo
gcgagactccgtctcaacaacaacaacaaaa

SEQ ID NO: 69285 - DNA, 507 bp, Homo sapiens; identical to SEQ ID NO: 19257
  chr5:4581089-4581596
  hypo

SEQ ID NO: 69286 - DNA, 170 bp, Homo sapiens; identical to SEQ ID NO: 3799
  chr5:5139753-5139923
  hypo

SEQ ID NO: 69287 - DNA, 424 bp, Homo sapiens; identical to SEQ ID NO: 3801
  chr5:5140031-5140455
  hypo

SEQ ID NO: 69288 - DNA, 132 bp, Homo sapiens; identical to SEQ ID NO: 3802
  chr5:5140527-5140659
  hypo

SEQ ID NO: 69289 - DNA, 49 bp, Homo sapiens; identical to SEQ ID NO: 3803
  chr5:5140708-5140757
  hypo

SEQ ID NO: 69290 - DNA, 142 bp, Homo sapiens; identical to SEQ ID NO: 3804
  chr5:5140849-5140991
  hypo

SEQ ID NO: 69291 - DNA, 391 bp, Homo sapiens
  chr5:5303188-5303579
  hypo
agggaggtgagaaacagcaggcgcagggagactccggtaggaatgctcacccaggaaaggtggaactgaaaataacggcacacacacgaccgtggctgggaaatcgcgccgctgcctccacatcagatgtggggccgcttctatcagagtgatggagccatccctcaccgaggtctctttgtccctgcccagctggtccgtggggaactggagtgcctgcagtcggacgtgtggcgggggtgcccagagccgccccgtgcagtgcacacggcgggtgcactatgactcggagccagtcccggccagcctgtgccctcagcctgctccctccagcaggcaggcctgcaactctcagagctgcccacctgcatggagcgccgggccctgggca

SEQ ID NO: 69292 - DNA, 30 bp, Homo sapiens
  chr5:5418612-5418642
  hypo
cactgaaatgcccaccgtatccagtatgca

SEQ ID NO: 69293 - DNA, 30 bp, Homo sapiens; identical to SEQ ID NO: 19264
  chr5:5419057-5419087
  hypo

SEQ ID NO: 69294 - DNA, 72 bp, Homo sapiens
  chr5:5652237-5652309
  hypo
aaatagttacttcccattccccgtagctatagccaccaccaatctgttttcgttctctaaggattagcctcc

SEQ ID NO: 69295 - DNA, 39 bp, Homo sapiens
  chr5:5907760-5907799
  hypo
ttaaagaatcaataaggcagccgggtgcggtggctgatg

SEQ ID NO: 69296 - DNA, 277 bp, Homo sapiens
  chr5:6228484-6228761
  hypo
cactgctgttccaccagtgaacgtgtgtccagccaagatcactgtccccgccaccctctggcaccgcggtccctcccgcagctccagccatcactggaatagagcgatggccgggaacggctcctgtgcctgctcctctctcgggcctcggcagcagttgctggttctctcaaccctgactacacgcctataatctgtttactaagggatattggcggatactgactcccttatctccccttatatctaaatgaacgcaagatgtaaatataacaat

SEQ ID NO: 69297 - DNA, 45 bp, Homo sapiens
  chr5:6420182-6420227
  hypo
gtgtattaatgtcctggcacacgcggcaaagtatcatggactggg

SEQ ID NO: 69298 - DNA, 881 bp, Homo sapiens; identical to SEQ ID NO: 3806
  chr5:6448768-6449649
  hypo

SEQ ID NO: 69299 - DNA, 30 bp, Homo sapiens; identical to SEQ ID NO: 19266
  chr5:6582527-6582557
  hypo

SEQ ID NO: 69300 - DNA, 30 bp, Homo sapiens
  chr5:6592192-6592222
  hypo
gcaccccgtgggacccgctggggcctgtca

SEQ ID NO: 69301 - DNA, 31 bp, Homo sapiens; identical to SEQ ID NO: 19267
  chr5:6625963-6625994
  hypo

SEQ ID NO: 69302 - DNA, 30 bp, Homo sapiens
  chr5:6629623-6629653
  hypo
agcatttcttatcccgtctctgcgcttcta

SEQ ID NO: 69303 - DNA, 31 bp, Homo sapiens; identical to SEQ ID NO: 19268
  chr5:6675044-6675075
  hypo

SEQ ID NO: 69304 - DNA, 30 bp, Homo sapiens
  chr5:6749332-6749362
  hypo
tagggcactcgtctcggtaccgtctccatt

SEQ ID NO: 69305 - DNA, 30 bp, Homo sapiens; identical to SEQ ID NO: 19269
  chr5:6756258-6756288
  hypo

SEQ ID NO: 69306 - DNA, 88 bp, Homo sapiens
  chr5:6758953-6759041
  hypo
tcgtgaccagcttccgtgtgttccttttgatttgcccagggtctcgagtgccacctctctaccctgtgagatacgcagaggaccctgt

SEQ ID NO: 69307 - DNA, 73 bp, Homo sapiens
  chr5:6762499-6762572
  hypo
gctgtgcctcccctgcgggtggaagtcttggcccctggacccggcattcgaggccttccgagacattctgccc

SEQ ID NO: 69308 - DNA, 25 bp, Homo sapiens
  chr5:6765598-6765623
  hypo
cccaaagtgccgtgtgccaccatac

SEQ ID NO: 69309 - DNA, 181 bp, Homo sapiens
  chr5:6846244-6846425
  hypo
cagtcccccctccccgccacccccgaggccttgggttcgtccggagcttctagaaggtttgcagtcccccctccccccaagccccgaggccttgggttcgtccggagcgtctagaagggtcccccctcccctccacccccgaagccttgggtccccagagcgcgcccagggcttttttttt

SEQ ID NO: 69310 - DNA, 30 bp, Homo sapiens
  chr5:6857838-6857868
  hypo
tgactgcagagtccacgtctcaaccgtgaa

SEQ ID NO: 69311 - DNA, 30 bp, Homo sapiens
  chr5:6858212-6858242
  hypo
aatgggctttgcagccggaatgggaccaca

SEQ ID NO: 69312 - DNA, 37 bp, Homo sapiens; identical to SEQ ID NO: 19273
  chr5:7704692-7704729
  hypo

SEQ ID NO: 69313 - DNA, 43 bp, Homo sapiens
  chr5:7802431-7802474
  hypo
ggaatgccttcggctcctgaacgagatcatcgctgactttgat

SEQ ID NO: 69314 - DNA, 27 bp, Homo sapiens
  chr5:7811594-7811621
  hypo
cagagcgagactctgtctcaaaaaaaa

SEQ ID NO: 69315 - DNA, 148 bp, Homo sapiens; identical to SEQ ID NO: 19274
  chr5:7825239-7825387
  hypo

SEQ ID NO: 69316 - DNA, 30 bp, Homo sapiens
  chr5:8158300-8158330
  hypo
gcgagactcggtctcaaaaaaaaaaaaaaa

SEQ ID NO: 69317 - DNA, 79 bp, Homo sapiens
  chr5:8424506-8424585
  hypo
tataattccctgtggttgcatcgatgctgttgaatgtgtccacagtttgtgccttttttcgtttgttttttctgagacg

SEQ ID NO: 69318 - DNA, 19 bp, Homo sapiens
  chr5:8424884-8424903
  hypo
gtagtatgcttgggataaa

SEQ ID NO: 69319 - DNA, 93 bp, Homo sapiens; identical to SEQ ID NO: 19275
  chr5:8649802-8649895
  hypo

SEQ ID NO: 69320 - DNA, 196 bp, Homo sapiens
  chr5:9040383-9040579
  hypo
tcaggaatttaaaatgtgaaccgcaaagtttcaccaggacttccaaacagcccaggcctaaggaagagcggctttatgaaggagtttccaagacaggtgagagatcacactgtgaaagtccaacatgtgagggttcacgcgataagcgtggagtacagagccagaacatgtgaacggtagctacacagtgatggac

SEQ ID NO: 69321 - DNA, 200 bp, Homo sapiens
  chr5:9051991-9052191
  hypo
gaaattagagtcaaacacacacggccggctctccgtggtgttcccggagcactggctgcccatggggaacaggaggatgcactggcgggcgcggacttggacgccagaggcttcacactcagaccagtccgaccactccgaccagctctctgcagagaccagaaaaggggagatggggcggaatggccagtaagctcaat

SEQ ID NO: 69322 - DNA, 63 bp, Homo sapiens
  chr5:9054170-9054233
  hypo
gctgtgcagtaggtgaggtgccgcttacctgggcagggctgcgtgttgcagagtgcctcttct

SEQ ID NO: 69323 - DNA, 156 bp, Homo sapiens
  chr5:9066590-9066746
  hypo
tcttcccacttccagcaaattcggatcagccaggcgggctttgcatgtgtatcggaatcgttgctcatagtggccgccgttgtcagagatgttgacaggtgtccagggtgtccagggcgtggtcttcttcagctcaggacacgggttggtgttgca

SEQ ID NO: 69324 - DNA, 30 bp, Homo sapiens; identical to SEQ ID NO: 19277
  chr5:9069767-9069797
  hypo

SEQ ID NO: 69325 - DNA, 256 bp, Homo sapiens; identical to SEQ ID NO: 19278
  chr5:9119014-9119270
  hypo

SEQ ID NO: 69326 - DNA, 403 bp, Homo sapiens
  chr5:9122691-9123094
  hypo
taaatgatgtcccaaactcctcgagaatctgagtttaatacacagcagcacaactggcgtgttctgagcggcacacctggaacagttggcgatctccatgccagggccctcgcactgccagccaccacactgcggggccgggctgtcgcaggagcgggttcgacagaggcaggatcccacggcgctgccatctgtgtgcgtgcaaggcgtccacggagaccacacaccaaagtgcccatccacggtgagattcctggtctaggaagcaaaaccaagcagaggtgtcagaaaaggttaaagctgaacacataatggagtaaaaattaaaaatccctcataagacaatcaaaactcctctagaatttgttgttgttgttgctgcagttagaaaaagggccaggcg

SEQ ID NO: 69327 - DNA, 156 bp, Homo sapiens
  chr5:9136511-9136667
  hypo
catatgaaaaggtgcagacagcgtgacagtgtgactgaggatcgccaggggagcatggctcccatgggcagcattttcagaggatggagaaggtgggcactcaccggacacgcagagatgctctgttcccactgcgtcatgctcaggctctcctcc

SEQ ID NO: 69328 - DNA, 71 bp, Homo sapiens
  chr5:9183701-9183772
  hypo
aagtaaggctgagagaacctgcggttgaacttacgacctgaccaatgagcggtccttctctgttgtctgag

SEQ ID NO: 69329 - DNA, 42 bp, Homo sapiens
  chr5:9330246-9330288
  hypo
aaaaaaatacagatgggaggccgaggtgggcggatcgccagg

SEQ ID NO: 69330 - DNA, 31 bp, Homo sapiens
  chr5:9366779-9366810
  hypo
gtgagccaccgctcccagccacaataaagaa

SEQ ID NO: 69331 - DNA, 31 bp, Homo sapiens; identical to SEQ ID NO: 19280
  chr5:9458300-9458331
  hypo

SEQ ID NO: 69332 - DNA, 86 bp, Homo sapiens; identical to SEQ ID NO: 19281
  chr5:9497475-9497561
  hypo

SEQ ID NO: 69333 - DNA, 43 bp, Homo sapiens
  chr5:9498628-9498671
  hypo
cagactactgtatggatgctacgtggaaggtggttgatcattg

SEQ ID NO: 69334 - DNA, 145 bp, Homo sapiens
  chr5:9725135-9725280
  hypo
cacatgggccacctgagtcaccgagctgcctaaaatccgtagtgtacaggtgatgagggggactcctgagagaagggggtgaactaggtgatggcatcctagtgagaggtgacagcgtgctggcagtggtgacagcgagcccttg

SEQ ID NO: 69335 - DNA, 30 bp, Homo sapiens
  chr5:10150315-10150345
  hypo
gttgcttcgagtaagcggaagagatgatag

SEQ ID NO: 69336 - DNA, 26 bp, Homo sapiens
  chr5:10252571-10252597
  hypo
caggcattgactgggcgcggtggctc

SEQ ID NO: 69337 - DNA, 218 bp, Homo sapiens
  chr5:10256072-10256290
  hypo
ctggtgccttgttagaagaagcggagcaattgctagaccgaggcattcacccaatcagaatagccgatggctatgagcaggctgctcgtgttgctattgaacacctggacaagatcagcgatagcgtccttgttgacataaaggacaccgaacccctgattcagacagcaaaaaccacgctgggctccaaagtgtacgtttcagtagatgatatgatt

SEQ ID NO: 69338 - DNA, 191 bp, Homo sapiens
  chr5:10278514-10278705
  hypo
cccacatggaccatgccgatatcctacccacaccgacccctctcagtcacagcgtgagtccccggggctcatgcctgcttgctctaaaccccccagttagaacctccaggggaaacctgcatagatgacaccctgggccccagtgaaggctttggctcatagctccctctctctctcgttctccaccttct

SEQ ID NO: 69339 - DNA, 41 bp, Homo sapiens
  chr5:10283589-10283630
  hypo
ctataaaaatcagtttttggccgggcgaggtggctcacacc

SEQ ID NO: 69340 - DNA, 31 bp, Homo sapiens; identical to SEQ ID NO: 19282
  chr5:10296893-10296924
  hypo

SEQ ID NO: 69341 - DNA, 57 bp, Homo sapiens
  chr5:10322103-10322160
  hypo
agtgggaagagtcattcgagatccctgcagcattgggactcccgtttgcctacagtc

SEQ ID NO: 69342 - DNA, 24 bp, Homo sapiens
  chr5:10325892-10325916
  hypo
ttttttttttttgagacggagtct

SEQ ID NO: 69343 - DNA, 30 bp, Homo sapiens
  chr5:10339280-10339310
  hypo
taagtgaggcattcacggagattcaatgga

SEQ ID NO: 69344 - DNA, 158 bp, Homo sapiens
  chr5:10352279-10352437
  hypo
catgtaacatctgatcggcccggtctttgcccctagtatcagcaggccaatacgtgctctgctacaggtcttacagggagggtgagctcttggagttggatcagaaggagaggggctggggaaagatcgtcttcaaattgtttctttggcggtagtat

SEQ ID NO: 69345 - DNA, 155 bp, Homo sapiens; identical to SEQ ID NO: 41343
  chr5:10441402-10441557
  hypo

SEQ ID NO: 69346 - DNA, 30 bp, Homo sapiens; identical to SEQ ID NO: 41344
  chr5:10441605-10441635
  hypo

SEQ ID NO: 69347 - DNA, 123 bp, Homo sapiens
  chr5:10453753-10453876
  hypo
tcctgctccctgcatctatggcgggggcgtggcttgtggcaggtgtactctctgtgctgtttacatttatttatcttagaaatcactctagtcaaattcatcgagttgaagatctctaaaaag

SEQ ID NO: 69348 - DNA, 31 bp, Homo sapiens
  chr5:10477381-10477412
  hypo
gttaacccacatttaccgagggccactgacc

SEQ ID NO: 69349 - DNA, 31 bp, Homo sapiens
  chr5:10483795-10483826
  hypo
ctgtcctgaatgtttcgcgggcactgagtcc

SEQ ID NO: 69350 - DNA, 107 bp, Homo sapiens; identical to SEQ ID NO: 19284
  chr5:10486100-10486207
  hypo

SEQ ID NO: 69351 - DNA, 41 bp, Homo sapiens; identical to SEQ ID NO: 19285
  chr5:10548512-10548553
  hypo

SEQ ID NO: 69352 - DNA, 371 bp, Homo sapiens; identical to SEQ ID NO: 41348
  chr5:10564287-10564658
  hypo

SEQ ID NO: 69353 - DNA, 427 bp, Homo sapiens; identical to SEQ ID NO: 3820
  chr5:10564800-10565227
  hypo

SEQ ID NO: 69354 - DNA, 489 bp, Homo sapiens; identical to SEQ ID NO: 3821
  chr5:10565262-10565751
  hypo

SEQ ID NO: 69355 - DNA, 37 bp, Homo sapiens
  chr5:10618605-10618642
  hypo
gccgtggccagagcaccgccgccgggcagcccgggct

SEQ ID NO: 69356 - DNA, 108 bp, Homo sapiens
  chr5:10702259-10702367
  hypo
tggaatttgttgtgtgcccagcgcctggcacatggtctggtgcgcacacatactcaacaaatgctttgagcaccaaatgacatcaccggtcagcgaccctcagcttag

SEQ ID NO: 69357 - DNA, 30 bp, Homo sapiens
  chr5:10788704-10788734
  hypo
ctgaacatcctctgcgtcatgcttttcatt

SEQ ID NO: 69358 - DNA, 19 bp, Homo sapiens
  chr5:10864368-10864387
  hypo
tttttgtttttgtttttga

SEQ ID NO: 69359 - DNA, 101 bp, Homo sapiens; identical to SEQ ID NO: 19292
  chr5:10936741-10936842
  hypo

SEQ ID NO: 69360 - DNA, 30 bp, Homo sapiens
  chr5:11014893-11014923
  hypo
catgacagatggcgccgaattctgttccac

SEQ ID NO: 69361 - DNA, 31 bp, Homo sapiens; identical to SEQ ID NO: 19293
  chr5:11069013-11069044
  hypo

SEQ ID NO: 69362 - DNA, 40 bp, Homo sapiens
  chr5:11074313-11074353
  hypo
acccatatcccagaacgttctgtcacgtgccagccattag

SEQ ID NO: 69363 - DNA, 79 bp, Homo sapiens
  chr5:11130728-11130807
  hypo
ttaactgtgagcctaattgtgcgggtggccctttgtgctccacaaacactcacgtgccgctcacagttgttctttccta

SEQ ID NO: 69364 - DNA, 23 bp, Homo sapiens
  chr5:11203563-11203586
  hypo
ttttgtttttagacagagttgcg

SEQ ID NO: 69365 - DNA, 22 bp, Homo sapiens
  chr5:11203765-11203787
  hypo
cgtgagccactgtgccaggcct

SEQ ID NO: 69366 - DNA, 29 bp, Homo sapiens
  chr5:11698401-11698430
  hypo
tttttttttttttttttgagacggagtct

SEQ ID NO: 69367 - DNA, 19 bp, Homo sapiens
  chr5:11724147-11724166
  hypo
cagagcaaggcttcatttc

SEQ ID NO: 69368 - DNA, 401 bp, Homo sapiens; identical to SEQ ID NO: 19295
  chr5:12794951-12795352
  hypo

SEQ ID NO: 69369 - DNA, 33 bp, Homo sapiens
  chr5:13416578-13416611
  hypo
gttatggccccatgaaaatcacgtcaaccgagg

SEQ ID NO: 69370 - DNA, 81 bp, Homo sapiens
  chr5:13884613-13884694
  hypo
agttcataatgtttaaaattacgagaaggcactaaataaacggtggatatggccaagtgcggtggctcacgcctgtaatcc

SEQ ID NO: 69371 - DNA, 30 bp, Homo sapiens
  chr5:13946233-13946263
  hypo
aattcattacatcgccgattatctttcatt

SEQ ID NO: 69372 - DNA, 31 bp, Homo sapiens
  chr5:14046165-14046196
  hypo
catgagccactgcgcccggccccacattttt

SEQ ID NO: 69373 - DNA, 27 bp, Homo sapiens
  chr5:14092559-14092586
  hypo
cataataaaaatgcatctaggcggccg

SEQ ID NO: 69374 - DNA, 100 bp, Homo sapiens
  chr5:14122605-14122705
  hypo
aaagtctcctgtaactcggttgtgaagggcatgggggctacagaggaaaacacatgcataaagggccagagtgtaaatagtttggtgtgatggaaagcgt

SEQ ID NO: 69375 - DNA, 576 bp, Homo sapiens; identical to SEQ ID NO: 41358
  chr5:14142659-14143235
  hypo

SEQ ID NO: 69376 - DNA, 648 bp, Homo sapiens; identical to SEQ ID NO: 3832
  chr5:14143456-14144104
  hypo

SEQ ID NO: 69377 - DNA, 124 bp, Homo sapiens; identical to SEQ ID NO: 3833
  chr5:14144285-14144409
  hypo

SEQ ID NO: 69378 - DNA, 17 bp, Homo sapiens
  chr5:14152780-14152797
  hypo
cacgctttttaagagtc

SEQ ID NO: 69379 - DNA, 41 bp, Homo sapiens
  chr5:14173629-14173670
  hypo
tcttaagtgttctgtgagccgctaataaaaatcaccttgtc

SEQ ID NO: 69380 - DNA, 94 bp, Homo sapiens
  chr5:14253720-14253814
  hypo
tgattacgggcatgaactcccgcacctggccagtgctgggattcttgatcaaaagtgtttgaagactatgcccttaaagcggcaattctcaaag

SEQ ID NO: 69381 - DNA, 43 bp, Homo sapiens
  chr5:14269455-14269498
  hypo
tgaattctgctatattcctcccgaagatgttgattttgttgct

SEQ ID NO: 69382 - DNA, 182 bp, Homo sapiens; identical to SEQ ID NO: 19300
  chr5:14273914-14274096
  hypo

SEQ ID NO: 69383 - DNA, 87 bp, Homo sapiens
  chr5:14286805-14286892
  hypo
ctttatggtacaagggagggacgagaaggagctgagcacagtgtgctccttcccctgcctccgcacgtgtccagcaggggagggaag

SEQ ID NO: 69384 - DNA, 31 bp, Homo sapiens; identical to SEQ ID NO: 19301
  chr5:14289049-14289080
  hypo

SEQ ID NO: 69385 - DNA, 191 bp, Homo sapiens; identical to SEQ ID NO: 19302
  chr5:14303325-14303516
  hypo

SEQ ID NO: 69386 - DNA, 42 bp, Homo sapiens
  chr5:14315627-14315669
  hypo
gggattacaggcgagagacaccacacccggcctgcttactag

SEQ ID NO: 69387 - DNA, 20 bp, Homo sapiens
  chr5:14317793-14317813
  hypo
tggtaaattcaaaagacgtt

SEQ ID NO: 69388 - DNA, 192 bp, Homo sapiens
  chr5:14319945-14320137
  hypo
aaacatggttaattttggtttcgaggttaattttttcccctcttaataagcgggggccaattcataacttctgtgtagaaggcattttggatggtagtcaggcgtggcgggaaaggtggttgaagctgctgtgtgtagcacacttaccgtgcttccaatttagagctgggcggggaattgggaagacctgct

SEQ ID NO: 69389 - DNA, 106 bp, Homo sapiens; identical to SEQ ID NO: 19305
  chr5:14325451-14325557
  hypo

SEQ ID NO: 69390 - DNA, 22 bp, Homo sapiens
  chr5:14327555-14327577
  hypo
agccaccgcgcctggccagaaa

SEQ ID NO: 69391 - DNA, 443 bp, Homo sapiens; identical to SEQ ID NO: 19307
  chr5:14328241-14328684
  hypo

SEQ ID NO: 69392 - DNA, 316 bp, Homo sapiens
  chr5:14332849-14333165
  hypo
acagtggaaaacttcatctctcggagcctcggttttccttgctgtaaaatgatacctaacacctaccttcaccgagtcgctgtgatgagaatacatgtagaaatgcctgacacccagcaggcgcttgtggtgctgtctttgcctagaacagtacgatcattcagattattcagatcttttggtgaatactagccttgtgtttacgttttgggacaagagccactagaagccaaatgcgcctgcgactttgcccttcctgcagtcttcagctgcaggaccagtttttactaaagacggccagaggctgtatttggaa

SEQ ID NO: 69393 - DNA, 30 bp, Homo sapiens; identical to SEQ ID NO: 19309
  chr5:14333434-14333464
  hypo

SEQ ID NO: 69394 - DNA, 160 bp, Homo sapiens
  chr5:14338463-14338623
  hypo
cttccaggacccctcccgctcaacacagtatcccctgatccagaactttctggcacctttgagacaaggatgggcgtggttagccgctctcccttgcaccttctagagctccctctacatgcacctgttaacggcagttgtcatgcgtgtgattgtgtgt

SEQ ID NO: 69395 - DNA, 156 bp, Homo sapiens; identical to SEQ ID NO: 19311
  chr5:14349006-14349162
  hypo

SEQ ID NO: 69396 - DNA, 31 bp, Homo sapiens; identical to SEQ ID NO: 19312
  chr5:14368814-14368845
  hypo

SEQ ID NO: 69397 - DNA, 143 bp, Homo sapiens
  chr5:14369626-14369769
  hypo
ctgaaggtaggggcagcgctgcgggacagtgcacccatcagaggcttcctgcctgccaggtgcgcgtggcacagtcatcgcttcccaagggagcctgccccacacctcttgcctgctgtggaatgtaacggggcagtgtcgca

SEQ ID NO: 69398 - DNA, 176 bp, Homo sapiens; identical to SEQ ID NO: 19313
  chr5:14378047-14378223
  hypo

SEQ ID NO: 69399 - DNA, 103 bp, Homo sapiens; identical to SEQ ID NO: 19314
  chr5:14381248-14381351
  hypo

SEQ ID NO: 69400 - DNA, 264 bp, Homo sapiens
  chr5:14390711-14390975
  hypo
gaggcagacaggtgaacgtgcggtcatgctgtccaaagcccacagccagctctgcacgcgtgactgtggaaagagaggactggtgctcagcccgacgtgtcggggtcggggaggctgctgcagctgcatgctgtcagaacgatgtgtttcttatttcagtagctttctttttaaaatagagtctcttcaactcgaggcttaaatttccgttatccatactgcttcttttctatatgaaagtttatcatgcgttgacttgttatg

SEQ ID NO: 69401 - DNA, 30 bp, Homo sapiens
  chr5:14405459-14405489
  hypo
catgcgagaagccctcggctaggcacaggg

SEQ ID NO: 69402 - DNA, 173 bp, Homo sapiens
  chr5:14406001-14406174
  hypo
gaagtcatccaggagcggacgatccacctgaagggagccctgaaggagcccattcacatccctaagaccgctcccgccacaagacagaagggaaggaggtgcgtgtctgggcgccactggaggtttgtggatgtgggagggaggggcgaggcggtgttagctcaccctgcttc

SEQ ID NO: 69403 - DNA, 436 bp, Homo sapiens
  chr5:14409997-14410433
  hypo
attgcctctccagccccgctcctgggaggctctttcttactgaggaccgcagcctgccacgcagcaacactcaccctggtattctcatggttaaccatcttgaaggaatgacactccagactcagtttcttaaacagacctggcgaattttcttaatgccacttgctgagagcatcggtccttagtaggctctaaagcacagaaaggatgaaatgtcgtgtcgtgagaacagaaccacagcgggtgtcttactccgttctggagacctgcatttgggattaaacggcgtatgagacttgccaataagtcagaatttggaatttggagaggacgtacccatgcggccttacaaacaagaaggtgcacgtttgctgcccacgtgtgcctgcgtttgtgtgtgctctgcttatgtgacgttttctcttagccatctccc

SEQ ID NO: 69404 - DNA, 30 bp, Homo sapiens; identical to SEQ ID NO: 19318
  chr5:14418155-14418185
  hypo

SEQ ID NO: 69405 - DNA, 146 bp, Homo sapiens
  chr5:14420064-14420210
  hypo
gtggttcactgtgcatcgcccactccagaagtagcatggaaatggagggcatcttcaaccacaaaggtaggaatcagtggggcatgggtggcagacccctactggaagtggccctggagcgctctgtctccgcgcctctcctgcct

SEQ ID NO: 69406 - DNA, 169 bp, Homo sapiens
  chr5:14426764-14426933
  hypo
cggtagagaaagcagcgagtctccgcagatggccggcactgagagccagcaagaagcggaggagatgggccttcagcagggggttgcggggggagctttaaactgagccctgtaaacatggcagaactgctcagtgggagactctcagcacagacggtcatggggaagt

SEQ ID NO: 69407 - DNA, 328 bp, Homo sapiens
  chr5:14427573-14427901
  hypo
ccagcacgggggatacgccggtgctgtttccctgctcagaatacaaccagttaccagaaacgacctcacccctccaaccactttccaaggtgccaggacagagaagcccttcactggcccacccagggcagttgacagagggatgccctccttggaggggagcctcacctctacccacagggccgcggccttgtcctggattctcaccggggcagtcacgtcaggatggagaggtcccatgtcagccagttctttggtgggggtcatgtagtctgaaatgacctgccgatggtccaggctgagccagggaagccgagcctgggtgcct

SEQ ID NO: 69408 - DNA, 40 bp, Homo sapiens
  chr5:14431086-14431126
  hypo
ctgggattacaggcatgagccactgcgcctggcctgaatt

SEQ ID NO: 69409 - DNA, 106 bp, Homo sapiens
  chr5:14435286-14435392
  hypo
ggctgagtacagcagggttttattgggtgaaaagggaaaaaaagggggaaagaaggatcctccacgaggccggactccctgctagagcacccgcagtttgaatccc

SEQ ID NO: 69410 - DNA, 30 bp, Homo sapiens
  chr5:14441137-14441167
  hypo
cgagggagaggcgcgcgctgggccgggccg

SEQ ID NO: 69411 - DNA, 137 bp, Homo sapiens
  chr5:14441379-14441516
  hypo
tggacacgctggactcgctgtcctctgtcagttcagcctactgcagcggcgggcagccgggcacctgcaagtactggatcctcgacctaggtacacaagctctctgcagatgctcgggctggcgctgctttctctct

SEQ ID NO: 69412 - DNA, 161 bp, Homo sapiens
  chr5:14454340-14454501
  hypo
attgatctttcatggtatttctcaggtcagttctgtcctgagcccccaccccgacactgctttacatgacaggcagtgttcacgtacacttagtctggactctgccttctgagacagcaaagcagtaacacaagtgagagatgagtcgctagaagggttgc

SEQ ID NO: 69413 - DNA, 318 bp, Homo sapiens
  chr5:14459374-14459692
  hypo
ttcacctgcagcagggaatggcgtccagagccagagaggcagtgcagcccctacaggtatctgtgcaaaggagtagctcacaagattacttgacttgagaagatagcaagcacagtgaatgatcaccattgtcaccgttctgctttctaaagttggtcacttcattccatgccaccgtggtggagcccctgagccaagagctcaggaaggggcccagcagctttcacgctcactggtgtgcgagttgtacagtagacgtcacacaagtccatggattggctgagtgtctgctgtcacccaaatttcagatttttgaat

SEQ ID NO: 69414 - DNA, 156 bp, Homo sapiens
  chr5:14460338-14460494
  hypo
ttaaaatgtggtggcgtttttgttcattgttgctgatatttacttcagcacatgtggtaagtttctcaagactgtgagcaaagtcccggtgtgccgccgtggcctggccgtgaacaggaaagaggctgagggccgctcctccgagagccccaccag

SEQ ID NO: 69415 - DNA, 30 bp, Homo sapiens
  chr5:14460838-14460868
  hypo
aatctggctgataacgatgctggtcttcag

SEQ ID NO: 69416 - DNA, 269 bp, Homo sapiens
  chr5:14461123-14461392
  hypo
gcagactcgctctccgtctccagcaatgacgccagtccacccgcatccgtggcttccctccagccccacatgatcggggcccagagctcgccgggccccaagcggccgggcaacaccctgcgcaagtggctcaccagccccgtgcggcggctcagcagcggcaaggccgacgggcacgtgaagaagctggcgcacaagcacaagaagagccgcgaggtccgcaagagcgccgacgccggctcgcagaaggactccgacgacagtgcggc

SEQ ID NO: 69417 - DNA, 188 bp, Homo sapiens; identical to SEQ ID NO: 19323
  chr5:14485222-14485410
  hypo

SEQ ID NO: 69418 - DNA, 30 bp, Homo sapiens
  chr5:14487253-14487283
  hypo
aggaaagacctttgcggaagccagttggta

SEQ ID NO: 69419 - DNA, 123 bp, Homo sapiens
  chr5:14487502-14487625
  hypo
gttcctccctcaccccgcggcgtgctccttggcgccctgacccagtctctcccgctgtcttgtcttacagccttgacatcgccaatcgagtaccagaggaaccacagcgggggcggcggcggc

SEQ ID NO: 69420 - DNA, 710 bp, Homo sapiens; identical to SEQ ID NO: 19324
  chr5:14487988-14488698
  hypo

SEQ ID NO: 69421 - DNA, 184 bp, Homo sapiens
  chr5:14489507-14489691
  hypo
tttcagttaggttggacgtgctaggtaggcaggtatgctaggcgggtgagcatagatttgagtccagtgtggggtggtggggagatgcagtcaacccagtgacgggctatacccgtcagcacttagttggatactcagtatccaggtgtggccttatagctgtgaccctcgctgaatctgccag

SEQ ID NO: 69422 - DNA, 169 bp, Homo sapiens
  chr5:14492757-14492926
  hypo
tctaccaaggagaggtcgttcaaattctggccagcaaccagcagaacatgtttctggtgttccgagccgccactgaccagtgccccgcagctgagggctggattccaggctttgtcctgggccacaccagtgcagtcatcgtggagaacccggacgggactctcaagtg

SEQ ID NO: 69423 - DNA, 176 bp, Homo sapiens; identical to SEQ ID NO: 19327
  chr5:14493320-14493496
  hypo

SEQ ID NO: 69424 - DNA, 538 bp, Homo sapiens
  chr5:14498252-14498790
  hypo
cgttgttcttagatgtcgagtctgtggccgccccaaagcctcaattacctggaagggccctgaacacaacaccttgaacaacgatggtcactacagcatctcctacaggtgagggaggcccactcctggtgggtttcgctggctgggagcaccatcttgtcacttggcaactggaaattcctccttcacggatggatttctttggctgccttcggcactccacttcttccgtgagagcccatttcacgcctgggtgtacagctcctcatcagcacttgagctcctgccttcccttgatcctgaaggaggaggccagcgctgatggccacgtgctcagcttttctgatgcgcagtgtgttcccatctgtgccgcagtgacctgggagaggccacgctgaagattgtgggcgtgaccacggaagatgacggcatctacacgtgcatcgctgtcaatgacatgggttcagcctcatcgtcggccagcctgagggtcctaggtaagcaccgtgcaacgaggattctacgtgacccagtgggg

SEQ ID NO: 69425 - DNA, 145 bp, Homo sapiens
  chr5:14501758-14501903
  hypo
attggacatggtttaaggaaacgcattcccagtgacaacctggggagaggtgaggaagcccacgtgaagatagggatgggcagatgctcggcctgggctggactgcaggtcaggtgagcgggccgaaagaggggagaggaaacta

SEQ ID NO: 69426 - DNA, 142 bp, Homo sapiens
  chr5:14502170-14502312
  hypo
aaccatgtaaaaccctgtggacgttaagtaaatactgtggactcttgatctctcacggctgtgaaaggaggcgtggggaggagagagcaacttagcctcgaggtggtgcggccaggtgaacggggaggaccatctgtagcag

SEQ ID NO: 69427 - DNA, 99 bp, Homo sapiens
  chr5:14504055-14504154
  hypo
cacacccccacaggggcgaggctgaggcagtgaccacagcagacgcacctttcaaacgtgcagggaaaggtggctgacgggaggcgtgagcagccatcc

SEQ ID NO: 69428 - DNA, 31 bp, Homo sapiens; identical to SEQ ID NO: 19330
  chr5:14504531-14504562
  hypo

SEQ ID NO: 69429 - DNA, 31 bp, Homo sapiens
  chr5:14505470-14505501
  hypo
tagctttgaaaaatgtcgattcctccttttt

SEQ ID NO: 69430 - DNA, 370 bp, Homo sapiens
  chr5:14507311-14507681
  hypo
ggttctggaagctgtccggtacctgcacaactgcaggatagcacacctggacctaaaggttggtgaggccccgggcaggtgaaggggggtctgagcacaccggcttggccatgcgggacacagagccccctctgaagccaggccaggagcccccaagtgactagggacaaaaagggtgggtggggcagcgcagacactgattgctaatctctctctctaagcgtttgcgttcagtgatgcacacggtcaggagcacactgggtaaaacgccggagccctcccagccttccacgactttcagaaagtccccatgagttttgcccggtgggtgtggcgggtgcagtggtagcttaggcgggaaagagagcat

SEQ ID NO: 69431 - DNA, 143 bp, Homo sapiens
  chr5:14508325-14508468
  hypo
tcctgcaggaggaccccgccaagcgtccctcggctgcgctggccctccaggagcagtggctgcaggccggcaacggcagaagcacgggcgtcctcgacacgtccagactgacttccttcattgagcggcgcaaacaccagaat

SEQ ID NO: 69432 - DNA, 31 bp, Homo sapiens
  chr5:14509070-14509101
  hypo
ataaaatagaatgaatcgttttgctctgatg

SEQ ID NO: 69433 - DNA, 77 bp, Homo sapiens
  chr5:14523712-14523789
  hypo
tatgacacctattagaataaccgcatccagaaccctgataccaccagacgctggtgagaatgtggagccacgggcac

SEQ ID NO: 69434 - DNA, 26 bp, Homo sapiens
  chr5:14555335-14555361
  hypo
tttttttttttttttttgagacggag

SEQ ID NO: 69435 - DNA, 138 bp, Homo sapiens
  chr5:14681596-14681734
  hypo
ttcacctccatacggcgagtccgtggtgataattactgtgcactgagggccacgctgttccaggccatgagccaggctgtggggctgccgccctggctgcaggacccggagctcatgctggtacgctgctgctgcagg

SEQ ID NO: 69436 - DNA, 30 bp, Homo sapiens
  chr5:14710775-14710805
  hypo
atggtttcgaactccgtggcggaagggaaa

SEQ ID NO: 69437 - DNA, 30 bp, Homo sapiens
  chr5:14713028-14713058
  hypo
tctcccacaaagcccgccaggagggagccc

SEQ ID NO: 69438 - DNA, 278 bp, Homo sapiens
  chr5:14726309-14726587
  hypo
ataacactatgctgtcttgctcgactttccagagagagctgacgcagccataaggaatgctgtttggccttttgtttcttagtgccagactgcaccagctgcatgcacgtaaggaaggaggacagttcacgaagggtttcacaggtcatggtcacgactctggctttcactcggagggatgtgagagccatggcaggttgtgggtggaggagaggcagggcaagcaggggaagggctgaatcaaggatcctcgtcacggctactgtgaccatccaggt

SEQ ID NO: 69439 - DNA, 30 bp, Homo sapiens
  chr5:14727021-14727051
  hypo
aagccacgtgttcccgatacagcacgtgag

SEQ ID NO: 69440 - DNA, 40 bp, Homo sapiens; identical to SEQ ID NO: 19333
  chr5:14774553-14774593
  hypo

SEQ ID NO: 69441 - DNA, 39 bp, Homo sapiens; identical to SEQ ID NO: 19334
  chr5:14774712-14774751
  hypo

SEQ ID NO: 69442 - DNA, 96 bp, Homo sapiens
  chr5:14780931-14781027
  hypo
aaaagacaactcctccgtctacagcttcaatgatctcattatacttacgatgacatcaaggaaactgaccattgtagtagacgaaatctagtttta

SEQ ID NO: 69443 - DNA, 30 bp, Homo sapiens
  chr5:14838693-14838723
  hypo
ccctgggggaccccacgcctgcttgggggc

SEQ ID NO: 69444 - DNA, 35 bp, Homo sapiens
  chr5:14839000-14839035
  hypo
tgttggccaaggaaccgactcgctatccacgtgaa

SEQ ID NO: 69445 - DNA, 111 bp, Homo sapiens
  chr5:14849839-14849950
  hypo
catagctgtgccggacgatccctctgccctggatgagaatacacacttgttaagtcacattgtcatccaggcagacgctgcttgtcacggtcactcggatgtgcatcctca

SEQ ID NO: 69446 - DNA, 30 bp, Homo sapiens
  chr5:14874817-14874847
  hypo
catcttgacccaaacgtgaaatgttgcctt

SEQ ID NO: 69447 - DNA, 30 bp, Homo sapiens
  chr5:14904817-14904847
  hypo
tgccttcttctcagcggtggttcctggggc

SEQ ID NO: 69448 - DNA, 40 bp, Homo sapiens
  chr5:14934637-14934677
  hypo
ttagcagggcatggtggctcacgcccgtaatcccacagtt

SEQ ID NO: 69449 - DNA, 45 bp, Homo sapiens
  chr5:15343331-15343376
  hypo
aaatagtcacttgcccaaggccgtaaaatgttgagccaggaaagc

SEQ ID NO: 69450 - DNA, 30 bp, Homo sapiens
  chr5:15346555-15346585
  hypo
ctacctatcggatactatgttcagtaccag

SEQ ID NO: 69451 - DNA, 372 bp, Homo sapiens; identical to SEQ ID NO: 41367
  chr5:15499744-15500116
  hypo

SEQ ID NO: 69452 - DNA, 118 bp, Homo sapiens; identical to SEQ ID NO: 3839
  chr5:15500570-15500688
  hypo

SEQ ID NO: 69453 - DNA, 208 bp, Homo sapiens; identical to SEQ ID NO: 3840
  chr5:15500735-15500943
  hypo

SEQ ID NO: 69454 - DNA, 17 bp, Homo sapiens
  chr5:15519156-15519173
  hypo
aatctgggccctgcagc

SEQ ID NO: 69455 - DNA, 30 bp, Homo sapiens; identical to SEQ ID NO: 19339
  chr5:15928351-15928381
  hypo

SEQ ID NO: 69456 - DNA, 873 bp, Homo sapiens
  chr5:15936620-15937493
  hypo
catggcaaacagatttccatccgctacctggacatgacggactgcttcgtgctggaggacgaaggcctgcacaccatcgcggcgcactgcacgcagctcacccacctctacctgcgccgctgcgtccgcctgaccgacgaaggcctgcgctacctggtgatctactgcgcctccatcaaggagctgagcgtcagcgactgccgcttcgtcagcgacttcggcctgcgggagatcgccaagctggagtcccgcctgcggtacctgagcatcgcgcactgcggccgggtcaccgacgtgggcatccgctacgtggccaagtactgcagcaagctgcgctacctcaacgcgaggggctgcgagggcatcacggaccacggtgtggagtacctcgccaagaactgcaccaaactcaaatccctggatatcggcaaatgccctttggtatccgacacgggcctggagtgcctggccctgaactgcttcaacctcaagcggctcagcctcaagtcctgcgagagcatcaccggccagggcttgcagatcgtggccgccaactgctttgacctccagacgctgaatgtccaggactgcgaggtctccgtggaggccctgcgctttgtcaaacgccactgcaagcgctgcgtcatcgagcacaccaacccggctttcttctgaagggacagagttcatccggcgttgtattcacacaaacctgaacaaagcaaatttttttaaaagcagcgtatgtaagcaccgacacccactcaaaacagctctttcttccgggaaggttattaggaatctggcctttatttttcctcatttctcatgggcaacagaggccaaagaaacgaagcaagacaaacagcaaac

SEQ ID NO: 69457 - DNA, 43 bp, Homo sapiens; identical to SEQ ID NO: 19340
  chr5:16032774-16032817
  hypo

SEQ ID NO: 69458 - DNA, 162 bp, Homo sapiens; identical to SEQ ID NO: 3841
  chr5:16178990-16179152
  hypo

SEQ ID NO: 69459 - DNA, 140 bp, Homo sapiens; identical to SEQ ID NO: 3842
  chr5:16179266-16179406
  hypo

SEQ ID NO: 69460 - DNA, 30 bp, Homo sapiens; identical to SEQ ID NO: 41375
  chr5:16187512-16187542
  hypo

SEQ ID NO: 69461 - DNA, 76 bp, Homo sapiens
  chr5:16467045-16467121
  hypo
cagagcaagattccatctcaaaagaaaaagaaaacatgaacttcaaatgcttggggaggtcgtagatttcatccac

SEQ ID NO: 69462 - DNA, 36 bp, Homo sapiens
  chr5:16503481-16503517
  hypo
taaataattccatagaccaagcgcagtggctcacac

SEQ ID NO: 69463 - DNA, 31 bp, Homo sapiens
  chr5:16537287-16537318
  hypo
tgtttaatccacactgcgacctcccaattaa

SEQ ID NO: 69464 - DNA, 293 bp, Homo sapiens; identical to SEQ ID NO: 41377
  chr5:16616790-16617083
  hypo

SEQ ID NO: 69465 - DNA, 205 bp, Homo sapiens
  chr5:16668249-16668454
  hypo
caccacactgtattttcgtgttttgaagaaaaatattcaaagaaaatgacctggtcaaaggcatgaggaaatggggtcctgtttttctgttttgtcaagaccatgaataaaaagatgaacttgctttgcctcttacctcactggtttcaaagagcagctccctctcatcgaccacgatcttatacgtattcgccaggggtgcccc

SEQ ID NO: 69466 - DNA, 385 bp, Homo sapiens; identical to SEQ ID NO: 19343
  chr5:16670786-16671171
  hypo

SEQ ID NO: 69467 - DNA, 37 bp, Homo sapiens
  chr5:16671881-16671918
  hypo
agtgttttcagagagccgcattcgaattagtaccagc

SEQ ID NO: 69468 - DNA, 5 bp, Homo sapiens
  chr5:16674320-16674325
  hypo
aatcc

SEQ ID NO: 69469 - DNA, 31 bp, Homo sapiens; identical to SEQ ID NO: 19345
  chr5:16679600-16679631
  hypo

SEQ ID NO: 69470 - DNA, 35 bp, Homo sapiens
  chr5:16680074-16680109
  hypo
tgctgggtgggggtgtcgatcggggccttggtgtc

SEQ ID NO: 69471 - DNA, 312 bp, Homo sapiens; identical to SEQ ID NO: 19346
  chr5:16681934-16682246
  hypo

SEQ ID NO: 69472 - DNA, 804 bp, Homo sapiens
  chr5:16701009-16701813
  hypo
tgcaacaggggtgggtgtgaccggccacccatttcactgggacacgccaggcaggtacttaccgaggactgcgccccctcagagctgaaccggtaggcacccgagctgttgtaggtccccacagagcagcggtagtcgggggaccactggctgccgtaggagttggagaaggtcacgctgctgccggaagtgatggcaccgtcctcatagtcatcctggtcgtagtcgtagtcgccgtctggggagggcaagtccccagcgttctggggcatgcagtaggtggactcgccgctggaggagttgtgtaggctcccggagtcctgcactgatggggcgagcagcaccgtgctgtccgcactggggctggtgggcaccaccgtgtcgttcatgtatgggtcctcctctgaagagtcatcgctggtccggatgccacttgttcgctggtctgagtggccgtgctcgctggggttgggggagtccttgaaggcgtcgtcgtcggcttcgaagccctcatcgacctcctcctctgggtagggctggctgaagttgaagttgggcttctcctcgcatgcgctctcagccagctcgctggaaaattcgcttcccaccgacagggaccgctcgatattccggacacactcgtcgatctcgtcgaaattgagggactcgaggaactcctgggccgccctgcacgcttcctcctccagcctgcggagctcctggtcccgccgctcctgcagcttctgcagggaagcctcggtcagcgacagctcctgctgctccttcatgcgctgcaggtcctcg

SEQ ID NO: 69473 - DNA, 32 bp, Homo sapiens; identical to SEQ ID NO: 19348
  chr5:16729561-16729593
  hypo

SEQ ID NO: 69474 - DNA, 31 bp, Homo sapiens; identical to SEQ ID NO: 19349
  chr5:16729832-16729863
  hypo

SEQ ID NO: 69475 - DNA, 249 bp, Homo sapiens
  chr5:16744496-16744745
  hypo
gtgatgaggcctgggcgaaacctgggtgcacacctttgatctattgtatcggtggcttcatggctcctctgcacctgggtggctgtgcgatacccttcccatgccaacgggattatggtgtatcataatgtgctagacccagagcaccccgacaccctgggtctcagcaggcgcggcgcagggcttcctgtgcccttggtgcaggacatgaaggactgagtcacccaggccctgcgggtaactaagcag

SEQ ID NO: 69476 - DNA, 135 bp, Homo sapiens
  chr5:16750562-16750697
  hypo
tagattcttcaaccccagatgcgcgttctggggttcaaacacttggcaaggaggagaggcagcctgccgtagcagccagggcgggtaaagggggtgtgctcccactagcccggcgagtgtgtgagtctttatgcc

SEQ ID NO: 69477 - DNA, 162 bp, Homo sapiens
  chr5:16766143-16766305
  hypo
caggagtgtctagtaacgcaagatcagatggcaaagcgtgtgtacctgttgaacattgagaggcgtgaggatctcttctcccctgaggaacattgatctctgggtcaaagcatctgtgagctgtgttgggtccagcccaagtaactccgcagatctgcccaa

SEQ ID NO: 69478 - DNA, 30 bp, Homo sapiens
  chr5:16779162-16779192
  hypo
ttcctgatcgtgtgacaagaccccaggttt

SEQ ID NO: 69479 - DNA, 312 bp, Homo sapiens; identical to SEQ ID NO: 19350
  chr5:16794679-16794991
  hypo

SEQ ID NO: 69480 - DNA, 43 bp, Homo sapiens
  chr5:16814252-16814295
  hypo
tttatttattttttcctgagacggagtctcgctctgtcaccca

SEQ ID NO: 69481 - DNA, 43 bp, Homo sapiens
  chr5:16814534-16814577
  hypo
gcgtgagccactgtgcctggccgttttgtttttttaagttggt

SEQ ID NO: 69482 - DNA, 33 bp, Homo sapiens; identical to SEQ ID NO: 19351
  chr5:16816657-16816690
  hypo

SEQ ID NO: 69483 - DNA, 28 bp, Homo sapiens
  chr5:16870696-16870724
  hypo
ctttgggtaaaataaaaatttcgcagca

SEQ ID NO: 69484 - DNA, 1485 bp, Homo sapiens; identical to SEQ ID NO: 41380
  chr5:16935457-16936942
  hypo

SEQ ID NO: 69485 - DNA, 34 bp, Homo sapiens; identical to SEQ ID NO: 19353
  chr5:16952527-16952561
  hypo

SEQ ID NO: 69486 - DNA, 121 bp, Homo sapiens
  chr5:16964572-16964693
  hypo
ccgaagtgttgggattacaggcgtgagccacgacattttcatttaaaatgggcattgtgcgatataatatgaatgttgaggccgagcgtggtggaggttgcagtgagccaagatcgcgcca

SEQ ID NO: 69487 - DNA, 12 bp, Homo sapiens
  chr5:16969994-16970006
  hypo
atcctggccaac

SEQ ID NO: 69488 - DNA, 20 bp, Homo sapiens
  chr5:16970185-16970205
  hypo
tctcaaaaaaaattgactta

SEQ ID NO: 69489 - DNA, 33 bp, Homo sapiens; identical to SEQ ID NO: 19356
  chr5:17032023-17032056
  hypo

SEQ ID NO: 69490 - DNA, 36 bp, Homo sapiens
  chr5:17159690-17159726
  hypo
attgggattacaggcatgaaccgctgtgcttagctt

SEQ ID NO: 69491 - DNA, 36 bp, Homo sapiens; identical to SEQ ID NO: 19357
  chr5:17161189-17161225
  hypo

SEQ ID NO: 69492 - DNA, 232 bp, Homo sapiens; identical to SEQ ID NO: 41383
  chr5:17217632-17217864
  hypo

SEQ ID NO: 69493 - DNA, 942 bp, Homo sapiens; identical to SEQ ID NO: 41384
  chr5:17217991-17218933
  hypo

SEQ ID NO: 69494 - DNA, 17 bp, Homo sapiens
  chr5:17235666-17235683
  hypo
ggcctgctctttatgtt

SEQ ID NO: 69495 - DNA, 27 bp, Homo sapiens
  chr5:17250714-17250741
  hypo
ttttattttagttttttgagacggagt

SEQ ID NO: 69496 - DNA, 670 bp, Homo sapiens
  chr5:17275348-17276018
  hypo
gaagaagggctacaatgtgaacgacgagaaagccaaggagaaagacaagaaggccgagggcgcggcgacggaagaggaggggaccccgaaggagagtgagccccaggcggccgcagagcccgccgaggccaaggagggcaaggagaagcccgaccaggacgccgagggcaaggccgaggagaaggagggcgagaaggacgcggcggctgccaaggaggaggccccgaaggcggagcccgagaagacggagggcgcggcagaggccaaggctgagcccccgaaggcgcccgagcaggagcaggcggcccccggccccgctgcgggcggcgaggcccccaaagctgctgaggccgccgcggccccggccgagagcgcggcccctgccgccggggaggagcccagcaaggaggaaggggaacccaaaaagactgaggcgcccgcagctcctgccgcccaggagaccaaaagtgacggggccccagcttcagactcaaaacccggcagctcggaggctgccccctcttccaaggagacccccgcagccacggaagcgcctagttccacacccaaggcccagggccccgcagcctctgcagaagagcccaagccggtggaggccccggcagctaattccgaccaaaccgtaaccgtgaaagagtgacaaggacag

SEQ ID NO: 69497 - DNA, 26 bp, Homo sapiens
  chr5:17321854-17321880
  hypo
attaattttactggccaggggcggtg

SEQ ID NO: 69498 - DNA, 379 bp, Homo sapiens; identical to SEQ ID NO: 19361
  chr5:17354379-17354758
  hypo

SEQ ID NO: 69499 - DNA, 113 bp, Homo sapiens
  chr5:17491436-17491549
  hypo
gagtgcaaggtttcccaggagcgtgggctctccggcaccctctccacggaggcggcgggccagctgcatgtctcggggcataattgtgacgcgcctggcatggatggcacaca

SEQ ID NO: 69500 - DNA, 157 bp, Homo sapiens
  chr5:17512035-17512192
  hypo
atagggggaccaggtaggcctcgctgttctcctgaagtcgccagtggccgcacattggaagcgcaggtctgggttgatggcctgggtgatctcacgcattaggcattggaaggtcagcttgtgcagaagcagctgcgtggacttatggtacttcctg

SEQ ID NO: 69501 - DNA, 160 bp, Homo sapiens; identical to SEQ ID NO: 19362
  chr5:17670363-17670523
  hypo

SEQ ID NO: 69502 - DNA, 43 bp, Homo sapiens
  chr5:17670807-17670850
  hypo
agttgagatctgtgcagaagacgcaaccccactcttagcccct

SEQ ID NO: 69503 - DNA, 19 bp, Homo sapiens
  chr5:17719751-17719770
  hypo
atggatttgtggcctgagt

SEQ ID NO: 69504 - DNA, 17 bp, Homo sapiens
  chr5:17778589-17778606
  hypo
tgccagtccatgttctt

SEQ ID NO: 69505 - DNA, 29 bp, Homo sapiens
  chr5:17779501-17779530
  hypo
tgggccgggcgcagtggctcacgcctgta

SEQ ID NO: 69506 - DNA, 77 bp, Homo sapiens; identical to SEQ ID NO: 3853
  chr5:17987027-17987104
  hypo

SEQ ID NO: 69507 - DNA, 17 bp, Homo sapiens
  chr5:17987223-17987240
  hypo
ctcgcctgccactcacc

SEQ ID NO: 69508 - DNA, 45 bp, Homo sapiens
  chr5:18034220-18034265
  hypo
tgtccttttaaaaaaagattccggccgggcgcggtggctcgcgcc

SEQ ID NO: 69509 - DNA, 67 bp, Homo sapiens
  chr5:18119292-18119359
  hypo
ccaagggaggcagtgagtgagcgtgccacccagcaggagaaactgcgcttttgctgtggaactgtgt

SEQ ID NO: 69510 - DNA, 37 bp, Homo sapiens
  chr5:18380065-18380102
  hypo
ataatctgacttcaggctgggcgcagtggctcacgcc

SEQ ID NO: 69511 - DNA, 170 bp, Homo sapiens; identical to SEQ ID NO: 19366
  chr5:18482070-18482240
  hypo

SEQ ID NO: 69512 - DNA, 32 bp, Homo sapiens
  chr5:19289323-19289355
  hypo
ctgtcaagatcataaactggccgggcgcggtg

SEQ ID NO: 69513 - DNA, 31 bp, Homo sapiens
  chr5:22983782-22983813
  hypo
actctttttttttttttgagacggagtctcc

SEQ ID NO: 69514 - DNA, 95 bp, Homo sapiens
  chr5:23726882-23726977
  hypo
atgcatggtaatacgcaaatacgttgcatacattaactatgtgaatgacagaagaaagaatttgcgtaaaaacaacaaagctatgtgatgtgatt

SEQ ID NO: 69515 - DNA, 30 bp, Homo sapiens; identical to SEQ ID NO: 19367
  chr5:24710956-24710986
  hypo

SEQ ID NO: 69516 - DNA, 18 bp, Homo sapiens
  chr5:25901086-25901104
  hypo
acttatgaaatatcagct

SEQ ID NO: 69517 - DNA, 43 bp, Homo sapiens
  chr5:26324222-26324265
  hypo
caaggttgctgctggaccagccgtacctcaaacacctttcaca

SEQ ID NO: 69518 - DNA, 34 bp, Homo sapiens; identical to SEQ ID NO: 19368
  chr5:27121726-27121760
  hypo

SEQ ID NO: 69519 - DNA, 34 bp, Homo sapiens; identical to SEQ ID NO: 19369
  chr5:27121939-27121973
  hypo

SEQ ID NO: 69520 - DNA, 230 bp, Homo sapiens
  chr5:27523814-27524044
  hypo
tgatgatactggcctggactccgcacctgctgaggatgagcccctcgaggagcggcgcggggtgtgtgggagaacaatcacgggctccggccaccgtgcacagccacgcacaccggctagcacagtggggagggcagctccaggtgcctgcacacgtgccggctgcgtgcaaggctcctgctgaaccggatgtactgcacacggcttccgctgcaggcacctgcatctgg

SEQ ID NO: 69521 - DNA, 30 bp, Homo sapiens; identical to SEQ ID NO: 3856
  chr5:28974970-28975000
  hypo

SEQ ID NO: 69522 - DNA, 122 bp, Homo sapiens; identical to SEQ ID NO: 3857
  chr5:29296853-29296975
  hypo

SEQ ID NO: 69523 - DNA, 18 bp, Homo sapiens
  chr5:29297094-29297112
  hypo
gtcacctctcagggggac

SEQ ID NO: 69524 - DNA, 56 bp, Homo sapiens
  chr5:29379761-29379817
  hypo
gagtttattcaaaaacactctcgcaatggggaaacgctctaacctcaagatctgca

SEQ ID NO: 69525 - DNA, 22 bp, Homo sapiens
  chr5:29628060-29628082
  hypo
cgcaccctggcctagtgacttc

SEQ ID NO: 69526 - DNA, 30 bp, Homo sapiens; identical to SEQ ID NO: 3858
  chr5:30298760-30298790
  hypo

SEQ ID NO: 69527 - DNA, 33 bp, Homo sapiens; identical to SEQ ID NO: 19374
  chr5:30864344-30864377
  hypo

SEQ ID NO: 69528 - DNA, 89 bp, Homo sapiens
  chr5:31410340-31410429
  hypo
tgtgtataatcctttcgttaactataataggattatttacaatgctgccagaccatatcggaaactgcaaaagacgacatttgtccgca

SEQ ID NO: 69529 - DNA, 31 bp, Homo sapiens; identical to SEQ ID NO: 19375
  chr5:31454672-31454703
  hypo

SEQ ID NO: 69530 - DNA, 27 bp, Homo sapiens
  chr5:31575925-31575952
  hypo
gactccgtctcaaaaataaataaataa

SEQ ID NO: 69531 - DNA, 47 bp, Homo sapiens
  chr5:31599716-31599763
  hypo
aacacaagccttgaggatggccgcacgggaaccagtgactacaaaca

SEQ ID NO: 69532 - DNA, 30 bp, Homo sapiens; identical to SEQ ID NO: 41397
  chr5:31639684-31639714
  hypo

SEQ ID NO: 69533 - DNA, 26 bp, Homo sapiens
  chr5:31654177-31654203
  hypo
accgcgcctggccccaatatatgttt

SEQ ID NO: 69534 - DNA, 43 bp, Homo sapiens
  chr5:31662737-31662780
  hypo
atcccctttctttttttgagacggagtctggctctgtagccca

SEQ ID NO: 69535 - DNA, 32 bp, Homo sapiens; identical to SEQ ID NO: 19376
  chr5:31670493-31670525
  hypo

SEQ ID NO: 69536 - DNA, 31 bp, Homo sapiens; identical to SEQ ID NO: 19377
  chr5:31670824-31670855
  hypo

SEQ ID NO: 69537 - DNA, 32 bp, Homo sapiens; identical to SEQ ID NO: 19378
  chr5:31724693-31724725
  hypo

SEQ ID NO: 69538 - DNA, 156 bp, Homo sapiens
  chr5:31750620-31750776
  hypo
tgtgcaagtgcatgtgtaacacgagggtccgccaaggatgggtgccgcgagggtgaggagtgtggtcctgaggggcgccgctccagggaggatatttgggaaggtccgagtgggtgctgtgacgggcagatccacggatagtttcaggcagaggga

SEQ ID NO: 69539 - DNA, 43 bp, Homo sapiens
  chr5:31758532-31758575
  hypo
gaaatggaccacaaaggagcacgtccaggccctaccctggggg

SEQ ID NO: 69540 - DNA, 19 bp, Homo sapiens
  chr5:31760732-31760751
  hypo
tttgttaagtgagaggcca

SEQ ID NO: 69541 - DNA, 43 bp, Homo sapiens
  chr5:31797548-31797591
  hypo
aaccctgtctgggattacacacgcctgggattacaggcgcctg

SEQ ID NO: 69542 - DNA, 42 bp, Homo sapiens
  chr5:31797710-31797752
  hypo
attacaggtgtgagccaccgcgcccagccttgcatttctttt

SEQ ID NO: 69543 - DNA, 31 bp, Homo sapiens; identical to SEQ ID NO: 19379
  chr5:31802727-31802758
  hypo

SEQ ID NO: 69544 - DNA, 1237 bp, Homo sapiens; identical to SEQ ID NO: 3861
  chr5:31854441-31855678
  hypo

SEQ ID NO: 69545 - DNA, 30 bp, Homo sapiens
  chr5:31889061-31889091
  hypo
tagaccaacctccgtcggcttcagtttctc

SEQ ID NO: 69546 - DNA, 58 bp, Homo sapiens; identical to SEQ ID NO: 19381
  chr5:31908393-31908451
  hypo

SEQ ID NO: 69547 - DNA, 29 bp, Homo sapiens
  chr5:31929659-31929688
  hypo
aaagagcagtggaaggccaggcgcagtgg

SEQ ID NO: 69548 - DNA, 30 bp, Homo sapiens
  chr5:31964786-31964816
  hypo
tggttggtacaaaactaattgcggtttttg

SEQ ID NO: 69549 - DNA, 29 bp, Homo sapiens
  chr5:31965115-31965144
  hypo
ccgcgcccggccagtttttttgccatttt

SEQ ID NO: 69550 - DNA, 30 bp, Homo sapiens
  chr5:31985884-31985914
  hypo
aattaaaattgaacttctggccgggcgcag

SEQ ID NO: 69551 - DNA, 33 bp, Homo sapiens
  chr5:32012490-32012523
  hypo
tttttttttgttttttagagacggagtcttgct

SEQ ID NO: 69552 - DNA, 26 bp, Homo sapiens
  chr5:32042021-32042047
  hypo
aaaaaaaaaaacatcaattgccgggc

SEQ ID NO: 69553 - DNA, 30 bp, Homo sapiens
  chr5:32089755-32089785
  hypo
cccaggccgactggcgaaaaaggaggcaac

SEQ ID NO: 69554 - DNA, 30 bp, Homo sapiens
  chr5:32090858-32090888
  hypo
caagggctctgattcggaactaaagaaatc

SEQ ID NO: 69555 - DNA, 17 bp, Homo sapiens
  chr5:32156721-32156738
  hypo
ggcgggggggatggttt

SEQ ID NO: 69556 - DNA, 29 bp, Homo sapiens
  chr5:32282176-32282205
  hypo
ccacactgtactcaatcatcacgagcatc

SEQ ID NO: 69557 - DNA, 102 bp, Homo sapiens
  chr5:32314456-32314558
  hypo
ctgggtggcagagcaagactgtgtctcaaacagaaaaaaaaaagtgtcaaatcaagtgttaacaaggcagtgaggaataagtttgagcgtttgataataaaa

SEQ ID NO: 69558 - DNA, 45 bp, Homo sapiens
  chr5:32333127-32333172
  hypo
gggattacaggcgcgagccaccgcgcccagcctacacctggtttt

SEQ ID NO: 69559 - DNA, 19 bp, Homo sapiens
  chr5:32424370-32424389
  hypo
gggcgtggtggctcacgcc

SEQ ID NO: 69560 - DNA, 18 bp, Homo sapiens
  chr5:32424628-32424646
  hypo
ctccgtctcaaaaaaaaa

SEQ ID NO: 69561 - DNA, 31 bp, Homo sapiens; identical to SEQ ID NO: 19389
  chr5:32443798-32443829
  hypo

SEQ ID NO: 69562 - DNA, 229 bp, Homo sapiens
  chr5:32445348-32445577
  hypo
gcacaccctaaacatccctcccggacatacctcttgctataccctttcctcgacctgcacccactccctgagccatccggcgtatatcggtcacccagcagggtgtcaggcagtgttgtaggtgctggagatacggcagagaacaaaacaaagtccctgttcccgtggagtttacgttctaggagcgggtatatgtcagccaacagccggtagccaaaacacagaaatt

SEQ ID NO: 69563 - DNA, 34 bp, Homo sapiens; identical to SEQ ID NO: 19391
  chr5:32446097-32446131
  hypo

SEQ ID NO: 69564 - DNA, 30 bp, Homo sapiens; identical to SEQ ID NO: 41401
  chr5:32567716-32567746
  hypo

SEQ ID NO: 69565 - DNA, 1128 bp, Homo sapiens; identical to SEQ ID NO: 41402
  chr5:32709849-32710977
  hypo

SEQ ID NO: 69566 - DNA, 1065 bp, Homo sapiens; identical to SEQ ID NO: 3865
  chr5:32711036-32712101
  hypo

SEQ ID NO: 69567 - DNA, 812 bp, Homo sapiens; identical to SEQ ID NO: 41404
  chr5:32712289-32713101
  hypo

SEQ ID NO: 69568 - DNA, 38 bp, Homo sapiens
  chr5:32754967-32755005
  hypo
atttctttttttcttttgagacggagtcttgttctgta

SEQ ID NO: 69569 - DNA, 38 bp, Homo sapiens
  chr5:32755244-32755282
  hypo
cgtgagccaccgcgcccggccaagagatttaatttctt

SEQ ID NO: 69570 - DNA, 36 bp, Homo sapiens; identical to SEQ ID NO: 19395
  chr5:32764593-32764629
  hypo

SEQ ID NO: 69571 - DNA, 360 bp, Homo sapiens
  chr5:32782524-32782884
  hypo
tgggtgggatagtgccttatccgatgaacaaagcaaaagccgggaattccgagattattccttttccacgagggggtagtgactgaagaatcctaggggcagcactgacagggctgggccttcagtgagtgcagagcccaggggacaccactctcaccgcttcccacatcctgctctggcacgaccgctcttaatgctctcttgagagcaccatcagcgacttcaaatcttgacttgtgaagtccccagaacacaccatgaccatcagtgtggacaaccgaggaacgtgcccaatgtaccacgcttttctgaagcacttgctgtccttgccctggagacggtgatttgatgaaatgccca

SEQ ID NO: 69572 - DNA, 112 bp, Homo sapiens
  chr5:32793678-32793790
  hypo
cccttttctgtacaccgcccctctctaaagggtcccgataagggccgagaaagggacagtgatagccacattgcctctgaagctttcagagggcctgcgcagctttactcaa

SEQ ID NO: 69573 - DNA, 29 bp, Homo sapiens
  chr5:32835693-32835722
  hypo
catgcagtaggcaatcggtaaatatttct

SEQ ID NO: 69574 - DNA, 29 bp, Homo sapiens
  chr5:32836021-32836050
  hypo
tgcccggcggtaaatatttctcataaaag

SEQ ID NO: 69575 - DNA, 24 bp, Homo sapiens
  chr5:32841608-32841632
  hypo
ctcgcctggcctaaaatggaattt

SEQ ID NO: 69576 - DNA, 30 bp, Homo sapiens
  chr5:32847924-32847954
  hypo
cgcctccatgcctgccggctacactgcatt

SEQ ID NO: 69577 - DNA, 74 bp, Homo sapiens
  chr5:32855653-32855727
  hypo
ttagtactttaagtatgttttcgttattgtgagcaaatacccacaacgttttcgtcttgcagatctgaaactct

SEQ ID NO: 69578 - DNA, 23 bp, Homo sapiens
  chr5:33006154-33006177
  hypo
aaaagaccattcttggccaggcg

SEQ ID NO: 69579 - DNA, 35 bp, Homo sapiens
  chr5:33035690-33035725
  hypo
gagccaccgcgcccggcccccagcctaatgtttaa

SEQ ID NO: 69580 - DNA, 440 bp, Homo sapiens; identical to SEQ ID NO: 19400
  chr5:33162234-33162674
  hypo

SEQ ID NO: 69581 - DNA, 42 bp, Homo sapiens; identical to SEQ ID NO: 19401
  chr5:33234416-33234458
  hypo

SEQ ID NO: 69582 - DNA, 303 bp, Homo sapiens
  chr5:33297913-33298216
  hypo
atgctgttttaatgacggcctgggtgcaggcgggccccaagtgacgactgggcaaagttttatagtctcctgtaaacagtaagtgtcacagtccgatgtaactgctacgttgtacccggatggcctttttctggatcttcgtgtcttccggccagggtaggtgtcttcccccggctctcttcctgcttctgctatcgcgcaccctgctggcgcaccctgctggcgcaccctgctggcgcaccctgctggcgcaccctgctggcgcaccctgctggcgcaccctgctggcgcaccctgctggcg

SEQ ID NO: 69583 - DNA, 39 bp, Homo sapiens; identical to SEQ ID NO: 19402
  chr5:33311278-33311317
  hypo

SEQ ID NO: 69584 - DNA, 180 bp, Homo sapiens
  chr5:33502052-33502232
  hypo
cccggagcaggcgccgccgccagtgagaacccgggccctgagccgggcggtagtttgctggggctgagtctggggcgcgcaggccctgacctccgccctctgagctctcccatcgcaggtgaccatggggaaagtgttggcagtcagctccctgcctgcagggccgccgccaccacctgt

SEQ ID NO: 69585 - DNA, 121 bp, Homo sapiens
  chr5:33509453-33509574
  hypo
aatttcttgctttttttggttgttgttcgtttctttttttaaaggctgaatagtaccgtattctattgtatgtatgtataccaccttttaaaaatctattcattcaggctgggcgcggtga

SEQ ID NO: 69586 - DNA, 40 bp, Homo sapiens
  chr5:33724925-33724965
  hypo
gattacaggcgtgagccaccgcacccggccaacagcttct

SEQ ID NO: 69587 - DNA, 19 bp, Homo sapiens
  chr5:33927746-33927765
  hypo
gactccatctcaaaaaaaa

SEQ ID NO: 69588 - DNA, 597 bp, Homo sapiens; identical to SEQ ID NO: 41407
  chr5:33936114-33936711
  hypo

SEQ ID NO: 69589 - DNA, 342 bp, Homo sapiens
  chr5:33984386-33984728
  hypo
cggccccacctggaccggcagtggtcgctggccgatccgaccacgggctgcagcaggaatcccaggatggggctgaggaaccacacaatgctgtacaggctgctgggcagacctacgctgagcaggactggggtcacatacgctgcctccaccgcgtagcagaactctcttccgaacatggccatgctgtgcatgatgagtctgctggtgggtcttttaggcggctccacagagtcaaaggggccatcatcagctagggatttatagatgtggcggccagcctgcccactgttgctacccatggccactgggagaggaaccttcctgcgagcccaccacctc

SEQ ID NO: 69590 - DNA, 92 bp, Homo sapiens
  chr5:34147859-34147951
  hypo
ctcagcatcacacaacagattcgtgtaacagacttgtatatgtaccctcatatctaaactaaaagttgaaattaaaaacaaaaacaagggcg

SEQ ID NO: 69591 - DNA, 127 bp, Homo sapiens
  chr5:34491442-34491569
  hypo
tagtgtctgccctctgggagtcggctttttctaagctgaatgcatgcagcagacatgcagaatagaccgtgggtgagccagacgctggggggatggcagggacagcgggagcaggcagcctgtctca

SEQ ID NO: 69592 - DNA, 183 bp, Homo sapiens
  chr5:34530161-34530344
  hypo
caagttctttctgctctgccacgctctccccgcatagatcagcgctcagaagctaaaggaggatgcagagcctggactgagaggacacaggcagacgcagaccagacatactgacttggctctccctcctcagcaagtagcaactggccaaataccacacacgaataacaaacaccttgcatt

SEQ ID NO: 69593 - DNA, 84 bp, Homo sapiens; identical to SEQ ID NO: 19407
  chr5:34551766-34551850
  hypo

SEQ ID NO: 69594 - DNA, 2 bp, Homo sapiens
  chr5:34586743-34586745
  hypo
ca

SEQ ID NO: 69595 - DNA, 164 bp, Homo sapiens
  chr5:34591002-34591166
  hypo
gctgggattacagacgtgaaccactgtgcccaattttcctgcttcttcctaatctcttttcctccctctgaggatgaggataattcccaaagatgctaacaaagctgtgaatgtggaggaaccagaattttgctctgcgtctagggcaacgttttatttggttg

SEQ ID NO: 69596 - DNA, 31 bp, Homo sapiens
  chr5:34702683-34702714
  hypo
agcccattatggaccccgttcacattagcat

SEQ ID NO: 69597 - DNA, 34 bp, Homo sapiens
  chr5:34736209-34736243
  hypo
tataagaaaaattcagctgggcgcggtgactcac

SEQ ID NO: 69598 - DNA, 35 bp, Homo sapiens
  chr5:34756420-34756455
  hypo
gcttccttttaagggtcgatcgtaaagctgttaat

SEQ ID NO: 69599 - DNA, 31 bp, Homo sapiens; identical to SEQ ID NO: 19409
  chr5:35044505-35044536
  hypo

SEQ ID NO: 69600 - DNA, 24 bp, Homo sapiens
  chr5:35494252-35494276
  hypo
tttctataacaatgatggcatcgg

SEQ ID NO: 69601 - DNA, 43 bp, Homo sapiens
  chr5:36036119-36036162
  hypo
caagagttagaatgtatgatccgttctatatgatgcaccaaag

SEQ ID NO: 69602 - DNA, 43 bp, Homo sapiens; identical to SEQ ID NO: 19410
  chr5:36240987-36241030
  hypo

SEQ ID NO: 69603 - DNA, 25 bp, Homo sapiens
  chr5:36868344-36868369
  hypo
atttatttttttgagacggagtttc

SEQ ID NO: 69604 - DNA, 30 bp, Homo sapiens; identical to SEQ ID NO: 19411
  chr5:36962813-36962843
  hypo

SEQ ID NO: 69605 - DNA, 28 bp, Homo sapiens
  chr5:37014313-37014341
  hypo
ggagaccgtggagagggagagggagagg

SEQ ID NO: 69606 - DNA, 20 bp, Homo sapiens
  chr5:37042244-37042264
  hypo
aagtccaaaatgggctgggc

SEQ ID NO: 69607 - DNA, 107 bp, Homo sapiens
  chr5:37052538-37052645
  hypo
tgtaaggggtttcagacaagacgagtcctctagcgctttgtgttcacacctttactccatgatccgtggaaaccgccaacacagacgagcctttcttatttctttac

SEQ ID NO: 69608 - DNA, 32 bp, Homo sapiens
  chr5:37230261-37230293
  hypo
agcgaaactccgtctcaagaaaaaaaaaataa

SEQ ID NO: 69609 - DNA, 17 bp, Homo sapiens
  chr5:37285709-37285726
  hypo
tcagggtctcaatctgt

SEQ ID NO: 69610 - DNA, 29 bp, Homo sapiens
  chr5:37292318-37292347
  hypo
attttttttttttttttgagacggagtct

SEQ ID NO: 69611 - DNA, 29 bp, Homo sapiens
  chr5:37334962-37334991
  hypo
ttaaaaagtattttactggctcggcgagg

SEQ ID NO: 69612 - DNA, 39 bp, Homo sapiens
  chr5:37338511-37338550
  hypo
cttttttttttttttttgagacggagtctcgctgtcacc

SEQ ID NO: 69613 - DNA, 38 bp, Homo sapiens
  chr5:37338789-37338827
  hypo
agccactgcgcccaaccgaacatcaatctttataaaca

SEQ ID NO: 69614 - DNA, 19 bp, Homo sapiens
  chr5:37375180-37375199
  hypo
gtaagccaccatgcctgac

SEQ ID NO: 69615 - DNA, 30 bp, Homo sapiens
  chr5:37378035-37378065
  hypo
caatcctgagcacacgattagccttgtaaa

SEQ ID NO: 69616 - DNA, 30 bp, Homo sapiens
  chr5:37696760-37696790
  hypo
acaggtacacacacacgcgcgtgcacacac

SEQ ID NO: 69617 - DNA, 412 bp, Homo sapiens; identical to SEQ ID NO: 3884
  chr5:37839807-37840219
  hypo

SEQ ID NO: 69618 - DNA, 95 bp, Homo sapiens; identical to SEQ ID NO: 3885
  chr5:37840267-37840362
  hypo

SEQ ID NO: 69619 - DNA, 280 bp, Homo sapiens; identical to SEQ ID NO: 3886
  chr5:37840529-37840809
  hypo

SEQ ID NO: 69620 - DNA, 28 bp, Homo sapiens
  chr5:38175624-38175652
  hypo
ctcccccgactgatgtccttcttatagg

SEQ ID NO: 69621 - DNA, 34 bp, Homo sapiens
  chr5:38198896-38198930
  hypo
aattggaaggtgcaggccaggcgcggtggctcac

SEQ ID NO: 69622 - DNA, 30 bp, Homo sapiens; identical to SEQ ID NO: 3892
  chr5:38353672-38353702
  hypo

SEQ ID NO: 69623 - DNA, 30 bp, Homo sapiens
  chr5:38462439-38462469
  hypo
tttcttccctggcccgctgtcaccttcagg

SEQ ID NO: 69624 - DNA, 37 bp, Homo sapiens
  chr5:38635819-38635856
  hypo
gtgagccaccgtgcccggcctggaagtcagctacttt

SEQ ID NO: 69625 - DNA, 30 bp, Homo sapiens
  chr5:38949648-38949678
  hypo
atttcaagtcatatcgggtaacaaggagct

SEQ ID NO: 69626 - DNA, 43 bp, Homo sapiens; identical to SEQ ID NO: 19416
  chr5:39053666-39053709
  hypo

SEQ ID NO: 69627 - DNA, 103 bp, Homo sapiens; identical to SEQ ID NO: 19417
  chr5:39209362-39209465
  hypo

SEQ ID NO: 69628 - DNA, 30 bp, Homo sapiens; identical to SEQ ID NO: 41443
  chr5:39394973-39395003
  hypo

SEQ ID NO: 69629 - DNA, 88 bp, Homo sapiens
  chr5:39576391-39576479
  hypo
atcaaagaacaagagatactacggaataaatttaataaaaaacatatcagacatgggctgggcgtgatggctcacgcctgtaatccca

SEQ ID NO: 69630 - DNA, 27 bp, Homo sapiens
  chr5:39627301-39627328
  hypo
cagagcgagactctgtctcaaaagaaa

SEQ ID NO: 69631 - DNA, 229 bp, Homo sapiens
  chr5:39665679-39665908
  hypo
gcatggagccagtgcttgtgccggtcggtgtctggagctgcctgcctcacttcagcagctggtgcgcctggctgtgtgccgtggccggattctgcgcttgtttgctcacacacccttcgccactccacgcctagcccaccctcggtgggcatgggatctgggctggtagtgcaaaccgagcgcagcccgctggaccccgagtgggcgcgagtgaaactcaagcagaggc

SEQ ID NO: 69632 - DNA, 370 bp, Homo sapiens
  chr5:39721485-39721855
  hypo
gtttttcagttcattcataaacgttgcatggttttctttccatccagccttgatagcacagggcggctcttcgaaagtgacgagcatatacctgtctcctctgctggcagggtcccgggcacggagccgagggactagaggaggaacagggcgagcgagagggaagcacagaggcgaggttaccaggcggaaaaggggcgcccagcggccccgccgcctccacagtaccgcacacgcagcggccacccctccacgcggtcccccacacacagatcgctccccacgcacagcactggggcgggagcccggcccaggcctagccctcctcgcagcgcccgcccgccctcgcgttgggggaggggagggaggg

SEQ ID NO: 69633 - DNA, 124 bp, Homo sapiens; identical to SEQ ID NO: 19418
  chr5:39740637-39740761
  hypo

SEQ ID NO: 69634 - DNA, 17 bp, Homo sapiens
  chr5:39787722-39787739
  hypo
taaacttaactacttaa

SEQ ID NO: 69635 - DNA, 41 bp, Homo sapiens
  chr5:39802882-39802923
  hypo
aaaaccaaattgcaggccaggcgcggtggctcacgcctgta

SEQ ID NO: 69636 - DNA, 41 bp, Homo sapiens
  chr5:39803162-39803203
  hypo
gactgcgtctcaataacaacgccaacaaaaaaccaaattgc

SEQ ID NO: 69637 - DNA, 224 bp, Homo sapiens; identical to SEQ ID NO: 19420
  chr5:39808821-39809045
  hypo

SEQ ID NO: 69638 - DNA, 30 bp, Homo sapiens; identical to SEQ ID NO: 3900
  chr5:39851507-39851537
  hypo

SEQ ID NO: 69639 - DNA, 21 bp, Homo sapiens
  chr5:40015551-40015572
  hypo
gaaaacaaatggttaagtcaa

SEQ ID NO: 69640 - DNA, 391 bp, Homo sapiens
  chr5:40066712-40067103
  hypo
aaagtctgagtcctgtgctctcgctgtcctccccagacagcatgagcttcaccattcctccaccttctgcaccaactaccggtccctgggctccgtccagccgcccagctaccgcgcccgaccgctaaccagcgcggccagcttctaggcaagcgccgggggctctggttcccggatctccgtgttccgctccaacagcttcctgggtggcttggggtccgggagtctggcggcagggatggccggggtctggcaggaatgggaggcatccagaactaaaaggagaccatgcaaagcctgagcgacagcctggcctcctacctggaaagagtgaggatcctggaggcggagaaccggaagctggagagcaaaatccgggagcacctgtaga

SEQ ID NO: 69641 - DNA, 30 bp, Homo sapiens
  chr5:40067282-40067312
  hypo
gtggagtgcgacatccatggggttcattca

SEQ ID NO: 69642 - DNA, 166 bp, Homo sapiens
  chr5:40775146-40775312
  hypo
ataatatattttgtaacgattaattacattaagatacatattcaaagtatttgtataccctggaagcataagtctgaggattatgagttctgggggctcaagccaattccgtcattaataaatcacgttactgtgagcaatcatataagccgcgaggctcagtatc

SEQ ID NO: 69643 - DNA, 20 bp, Homo sapiens
  chr5:40808197-40808217
  hypo
agactctgtctcaaaagaaa

SEQ ID NO: 69644 - DNA, 43 bp, Homo sapiens
  chr5:40823269-40823312
  hypo
tattaaaatgatatttgggaccgggcgcaatgactcatgcctg

SEQ ID NO: 69645 - DNA, 51 bp, Homo sapiens
  chr5:41588036-41588087
  hypo
ccagcttcccagctcccccaacgcttggccgcaggacatggcaggaaagct

SEQ ID NO: 69646 - DNA, 623 bp, Homo sapiens; identical to SEQ ID NO: 41453
  chr5:41870188-41870811
  hypo

SEQ ID NO: 69647 - DNA, 40 bp, Homo sapiens; identical to SEQ ID NO: 19424
  chr5:41991876-41991916
  hypo

SEQ ID NO: 69648 - DNA, 40 bp, Homo sapiens; identical to SEQ ID NO: 19425
  chr5:41992155-41992195
  hypo

SEQ ID NO: 69649 - DNA, 43 bp, Homo sapiens
  chr5:42140561-42140604
  hypo
aaaacagaccaaagagtccatcgctgatcatgcagacatgtaa

SEQ ID NO: 69650 - DNA, 772 bp, Homo sapiens; identical to SEQ ID NO: 3910
  chr5:42424336-42425108
  hypo

SEQ ID NO: 69651 - DNA, 442 bp, Homo sapiens
  chr5:42468657-42469099
  hypo
ttctttcttaagcaccatggacggctgcgtctcctctttcctgtcaaccacgccaacgctggagggcagcgggttcttgctgtctttctgggactccttgcgcagctagctatttgcctgccgccttggagttggtctgggtcgcagcctgagctgccgctcttggccccagagacgccgcccccgccagcttcttttttcttgttctctcctgccttcagcacctcgaaggggtccgattagttgtcaaataactggtcgaatcggttggtgaccaggcagctgaagccttcctgtaactgcccaggcatgatggttgctcggcggcacattcctccacggattgcagcgggctgcgccgagccaagagcgcgtgcttcagctcttcccagaagatcgaagaacaatttttttgaaatccgcctgtaaatgtcaggcaagg

SEQ ID NO: 69652 - DNA, 37 bp, Homo sapiens; identical to SEQ ID NO: 19427
  chr5:42476008-42476045
  hypo

SEQ ID NO: 69653 - DNA, 23 bp, Homo sapiens
  chr5:42575841-42575864
  hypo
aaaaggtaaagaggggctgggcg

SEQ ID NO: 69654 - DNA, 141 bp, Homo sapiens
  chr5:42582810-42582951
  hypo
acaccctctttgggggctctgcggtttctgtcatctccatgctcccaggcgtcaccacattcccctcgtccagatgcagttgcccacggtggaagccatttgcgtacatcagatgcagccgcaggcttgcatggagctggt

SEQ ID NO: 69655 - DNA, 38 bp, Homo sapiens
  chr5:42638259-42638297
  hypo
ctcgaactcctgacctcgtgatctgcccccctcagcat

SEQ ID NO: 69656 - DNA, 35 bp, Homo sapiens
  chr5:42760112-42760147
  hypo
ctacattgtccaggcagggcacggtggctcactcc

SEQ ID NO: 69657 - DNA, 32 bp, Homo sapiens; identical to SEQ ID NO: 19428
  chr5:42984042-42984074
  hypo

SEQ ID NO: 69658 - DNA, 31 bp, Homo sapiens; identical to SEQ ID NO: 19429
  chr5:42984313-42984344
  hypo

SEQ ID NO: 69659 - DNA, 44 bp, Homo sapiens
  chr5:43120110-43120154
  hypo
tacaagcgtgagccaccgcgcccgcccacatctcttcttacagg

SEQ ID NO: 69660 - DNA, 106 bp, Homo sapiens; identical to SEQ ID NO: 19430
  chr5:43147786-43147892
  hypo

SEQ ID NO: 69661 - DNA, 39 bp, Homo sapiens
  chr5:43215532-43215571
  hypo
gcccatctttttttcttttttcgagatggaatctggctc

SEQ ID NO: 69662 - DNA, 119 bp, Homo sapiens; identical to SEQ ID NO: 19431
  chr5:43233243-43233362
  hypo

SEQ ID NO: 69663 - DNA, 90 bp, Homo sapiens
  chr5:43387665-43387755
  hypo
ggtatagatatttccacgcttctttttgaaccttttcttttgtttttctttgcctttttgttgttgtggtggtggtggttttttgagacg

SEQ ID NO: 69664 - DNA, 247 bp, Homo sapiens; identical to SEQ ID NO: 3935
  chr5:43557518-43557765
  hypo

SEQ ID NO: 69665 - DNA, 30 bp, Homo sapiens
  chr5:43558844-43558874
  hypo
tacgtgtggctcttcggtgtacggaaagtt

SEQ ID NO: 69666 - DNA, 30 bp, Homo sapiens; identical to SEQ ID NO: 41492
  chr5:43603628-43603658
  hypo

SEQ ID NO: 69667 - DNA, 24 bp, Homo sapiens
  chr5:43749408-43749432
  hypo
accggagctgttcctattcggcca

SEQ ID NO: 69668 - DNA, 32 bp, Homo sapiens
  chr5:43950020-43950052
  hypo
agtaaatttaaaaggaggacccgggccgggcg

SEQ ID NO: 69669 - DNA, 30 bp, Homo sapiens; identical to SEQ ID NO: 41496
  chr5:44706482-44706512
  hypo

SEQ ID NO: 69670 - DNA, 49 bp, Homo sapiens
  chr5:44708953-44709002
  hypo
gtatgtgtctgtgtgtgcatgcgcgcacgtttgcacatgggtgtgtgtt

SEQ ID NO: 69671 - DNA, 30 bp, Homo sapiens
  chr5:44811217-44811247
  hypo
ccaaacaaccagattcgaatatccaagcaa

SEQ ID NO: 69672 - DNA, 80 bp, Homo sapiens; identical to SEQ ID NO: 19433
  chr5:45196606-45196686
  hypo

SEQ ID NO: 69673 - DNA, 45 bp, Homo sapiens; identical to SEQ ID NO: 19434
  chr5:45225671-45225716
  hypo

SEQ ID NO: 69674 - DNA, 391 bp, Homo sapiens; identical to SEQ ID NO: 41501
  chr5:49736586-49736977
  hypo

SEQ ID NO: 69675 - DNA, 222 bp, Homo sapiens; identical to SEQ ID NO: 3944
  chr5:49737098-49737320
  hypo

SEQ ID NO: 69676 - DNA, 34 bp, Homo sapiens; identical to SEQ ID NO: 19437
  chr5:49903304-49903338
  hypo

SEQ ID NO: 69677 - DNA, 1 bp, Homo sapiens
  chr5:51793954-51793955
  hypo
t

SEQ ID NO: 69678 - DNA, 18 bp, Homo sapiens
  chr5:52182856-52182874
  hypo
cctcggcctccctgaaat

SEQ ID NO: 69679 - DNA, 30 bp, Homo sapiens
  chr5:52780886-52780916
  hypo
aggttgggagaggccggtgttccctctgtg

SEQ ID NO: 69680 - DNA, 30 bp, Homo sapiens
  chr5:52858116-52858146
  hypo
ttagcccttcctcccgtacagattataggg

SEQ ID NO: 69681 - DNA, 30 bp, Homo sapiens
  chr5:52888052-52888082
  hypo
attacaggtgtgagccgctgcgcccggcat

SEQ ID NO: 69682 - DNA, 120 bp, Homo sapiens
  chr5:52941753-52941873
  hypo
ctacaggctcttctgcgagcaaacagtctcttcagaaaataccaatgctttgttggacaaaagggcgtaaattttttttacgatccttttccactgtctccactacgtccccctaaataa

SEQ ID NO: 69683 - DNA, 31 bp, Homo sapiens; identical to SEQ ID NO: 19439
  chr5:53593991-53594022
  hypo

SEQ ID NO: 69684 - DNA, 41 bp, Homo sapiens
  chr5:53959227-53959268
  hypo
gtgctgggattacaggcgtgaaccaccgcgcctggccagat

SEQ ID NO: 69685 - DNA, 140 bp, Homo sapiens
  chr5:54069073-54069213
  hypo
tccttacgttgtgcacgctgtgtttgtctacatgtatctgtgctcctcgggtctaatgttacccatctacctgattctttctttttttccggttttgttttttttttttgggttttttttttttttttttgagatggagt

SEQ ID NO: 69686 - DNA, 108 bp, Homo sapiens; identical to SEQ ID NO: 3959
  chr5:54469035-54469143
  hypo

SEQ ID NO: 69687 - DNA, 99 bp, Homo sapiens; identical to SEQ ID NO: 19442
  chr5:54665638-54665737
  hypo

SEQ ID NO: 69688 - DNA, 33 bp, Homo sapiens; identical to SEQ ID NO: 19443
  chr5:54734439-54734472
  hypo

SEQ ID NO: 69689 - DNA, 33 bp, Homo sapiens
  chr5:54734711-54734744
  hypo
gagcaagactccgtctaaaaaaaaaaaaaaaag

SEQ ID NO: 69690 - DNA, 20 bp, Homo sapiens
  chr5:54952934-54952954
  hypo
cacctcggcctcccaaagtc

SEQ ID NO: 69691 - DNA, 27 bp, Homo sapiens
  chr5:55029084-55029111
  hypo
ttccttggagtcttgctctctcgcccg

SEQ ID NO: 69692 - DNA, 26 bp, Homo sapiens
  chr5:55029350-55029376
  hypo
cgcccggcccttagttttcttaattg

SEQ ID NO: 69693 - DNA, 30 bp, Homo sapiens; identical to SEQ ID NO: 19444
  chr5:55032937-55032967
  hypo

SEQ ID NO: 69694 - DNA, 196 bp, Homo sapiens
  chr5:55033696-55033892
  hypo
tcgccataggggcccgaacgctagcgtttagggaatccgcaggctagaagtggaggcgggacgccactggtcgtctgagcgctgattggctggtggcgctagtcaccagccaatcgtcaacagacgccatttgttgttggagccacgcacctgacgcagtgggcgtcttgcacgtgcagccgtttaagtcgcgtgg

SEQ ID NO: 69695 - DNA, 166 bp, Homo sapiens
  chr5:55229392-55229558
  hypo
gagatggagaggagtggctggcggcaccgtgaaggtgaggcaggctggaacgggtgctcgcgctaggcagcgggcccggggaagtctgtggacagaaccacctggggtaggaccgtggtctgagcacccaggaaaagcccctgccggagatcctcctgtcactagt

SEQ ID NO: 69696 - DNA, 24 bp, Homo sapiens
  chr5:55256849-55256873
  hypo
tccgcctcccaggttcaagtgatt

SEQ ID NO: 69697 - DNA, 5 bp, Homo sapiens
  chr5:55309216-55309221
  hypo
gtgct

SEQ ID NO: 69698 - DNA, 35 bp, Homo sapiens
  chr5:55330546-55330581
  hypo
tatttatttatttttttgagacggagtctcactct

SEQ ID NO: 69699 - DNA, 34 bp, Homo sapiens; identical to SEQ ID NO: 19445
  chr5:55330820-55330854
  hypo

SEQ ID NO: 69700 - DNA, 24 bp, Homo sapiens
  chr5:55335522-55335546
  hypo
tgcaacctccgcctccagggttca

SEQ ID NO: 69701 - DNA, 147 bp, Homo sapiens
  chr5:56011131-56011278
  hypo
ttcactgtggaatagtcgctgctccgcatgtgccttttccagcagtgggtgggcacgttctgattcacagaactaaagggatttaaaggacagattttttttgtgtgtgttctatgtgattagaaatacgctgctatcgggccgggc

SEQ ID NO: 69702 - DNA, 30 bp, Homo sapiens; identical to SEQ ID NO: 41552
  chr5:56031868-56031898
  hypo

SEQ ID NO: 69703 - DNA, 30 bp, Homo sapiens
  chr5:56177574-56177604
  hypo
accaggatgcgtcgccgtttgatggctatt

SEQ ID NO: 69704 - DNA, 30 bp, Homo sapiens
  chr5:56208703-56208733
  hypo
ctattgggcgttcacgctttaagagggaga

SEQ ID NO: 69705 - DNA, 44 bp, Homo sapiens
  chr5:56487658-56487702
  hypo
ttacaggcgtgagccaccacgccggcctgtctaggttttaagga

SEQ ID NO: 69706 - DNA, 23 bp, Homo sapiens
  chr5:56544538-56544561
  hypo
gcgtgagccactattttttattt

SEQ ID NO: 69707 - DNA, 156 bp, Homo sapiens
  chr5:56568063-56568219
  hypo
tgaaggtagtcatccaatagtcgtttggatgatccagttttagtgtgtgaaaaaataaaaatcacttttgtttattgcgatgtgacattagtgagaaataaacactctaacactgaggctgggtgtggtggctcacacctgtaatcccgggacttt

SEQ ID NO: 69708 - DNA, 22 bp, Homo sapiens
  chr5:56653353-56653375
  hypo
cgattttaccagcattattttt

SEQ ID NO: 69709 - DNA, 30 bp, Homo sapiens; identical to SEQ ID NO: 19447
  chr5:56718334-56718364
  hypo

SEQ ID NO: 69710 - DNA, 207 bp, Homo sapiens
  chr5:56718794-56719001
  hypo
aggtggctgtgaatcggcggagcgcagatgccctgcctgcccctgtgcctggcgccaacagcatcctcgagccgatactgtgtctgtagcagcagaagcagctacagcagacccagctcaccaagcagatccgcatcccggtgaacacattagcctctcgcgcctgcactccagcggggcggggccgacaccctgaagaccttgggc

SEQ ID NO: 69711 - DNA, 221 bp, Homo sapiens; identical to SEQ ID NO: 41558
  chr5:57755844-57756065
  hypo

SEQ ID NO: 69712 - DNA, 116 bp, Homo sapiens; identical to SEQ ID NO: 41559
  chr5:57756488-57756604
  hypo

SEQ ID NO: 69713 - DNA, 30 bp, Homo sapiens; identical to SEQ ID NO: 41561
  chr5:58184045-58184075
  hypo

SEQ ID NO: 69714 - DNA, 30 bp, Homo sapiens; identical to SEQ ID NO: 41563
  chr5:58337465-58337495
  hypo

SEQ ID NO: 69715 - DNA, 30 bp, Homo sapiens; identical to SEQ ID NO: 41564
  chr5:58407755-58407785
  hypo

SEQ ID NO: 69716 - DNA, 31 bp, Homo sapiens; identical to SEQ ID NO: 3984
  chr5:60626140-60626171
  hypo

SEQ ID NO: 69717 - DNA, 35 bp, Homo sapiens; identical to SEQ ID NO: 19451
  chr5:60676648-60676683
  hypo

SEQ ID NO: 69718 - DNA, 186 bp, Homo sapiens
  chr5:60821646-60821832
  hypo
cggacagtgttcacccgagccatcgaggcatgcgatctccactggcaggatagccacttgcagcacattatcagcagtgacctatacaccaactactgttaccatgacgacactgaaaactccctcttcgactcccgcgggtggcccctctggcatggtaagtgaccaaaccggaaagacatttcc

SEQ ID NO: 69719 - DNA, 31 bp, Homo sapiens; identical to SEQ ID NO: 41575
  chr5:60840110-60840141
  hypo

SEQ ID NO: 69720 - DNA, 30 bp, Homo sapiens
  chr5:61040828-61040858
  hypo
tatgttctcgtgtgtcggtcaggtgagacg

SEQ ID NO: 69721 - DNA, 30 bp, Homo sapiens
  chr5:61041146-61041176
  hypo
gagaagtcgtcactgcggcatatctgcagt

SEQ ID NO: 69722 - DNA, 84 bp, Homo sapiens; identical to SEQ ID NO: 19453
  chr5:61690790-61690874
  hypo

SEQ ID NO: 69723 - DNA, 40 bp, Homo sapiens
  chr5:61704348-61704388
  hypo
ttaatattgaaaactgttggccgggcgcggtggctcacgc

SEQ ID NO: 69724 - DNA, 22 bp, Homo sapiens
  chr5:61812121-61812143
  hypo
ttttttttttcctttttgagac

SEQ ID NO: 69725 - DNA, 31 bp, Homo sapiens; identical to SEQ ID NO: 19455
  chr5:61938738-61938769
  hypo

SEQ ID NO: 69726 - DNA, 43 bp, Homo sapiens
  chr5:62080932-62080975
  hypo
cccacattatctcatttaatccgttaaaccatgtgtaatatac

SEQ ID NO: 69727 - DNA, 299 bp, Homo sapiens; identical to SEQ ID NO: 41579
  chr5:63254943-63255242
  hypo

SEQ ID NO: 69728 - DNA, 387 bp, Homo sapiens; identical to SEQ ID NO: 41580
  chr5:63255315-63255702
  hypo

SEQ ID NO: 69729 - DNA, 325 bp, Homo sapiens; identical to SEQ ID NO: 41583
  chr5:63461427-63461752
  hypo

SEQ ID NO: 69730 - DNA, 30 bp, Homo sapiens; identical to SEQ ID NO: 41584
  chr5:63462172-63462202
  hypo

SEQ ID NO: 69731 - DNA, 30 bp, Homo sapiens
  chr5:64016690-64016720
  hypo
aaacacggaacacacgactccttcctcctg

SEQ ID NO: 69732 - DNA, 30 bp, Homo sapiens; identical to SEQ ID NO: 41589
  chr5:64067736-64067766
  hypo

SEQ ID NO: 69733 - DNA, 157 bp, Homo sapiens
  chr5:64103540-64103697
  hypo
agtgcttccttattactcactcgccacaatgtttacttcacacttcaaactcactcaacggatcacctggctgcttgtttttttatgaaatgagagtaaatttcttcaacccgtatttctttctcttccccgcttcgagagtaaaaactaacaaaac

SEQ ID NO: 69734 - DNA, 139 bp, Homo sapiens; identical to SEQ ID NO: 19457
  chr5:64339981-64340120
  hypo

SEQ ID NO: 69735 - DNA, 30 bp, Homo sapiens; identical to SEQ ID NO: 19458
  chr5:64395529-64395559
  hypo

SEQ ID NO: 69736 - DNA, 30 bp, Homo sapiens; identical to SEQ ID NO: 19459
  chr5:64446588-64446618
  hypo

SEQ ID NO: 69737 - DNA, 42 bp, Homo sapiens; identical to SEQ ID NO: 19460
  chr5:65020926-65020968
  hypo

SEQ ID NO: 69738 - DNA, 41 bp, Homo sapiens
  chr5:65107350-65107391
  hypo
agttctttttcaggcaaggcacggtgactcacgcctgtaat

SEQ ID NO: 69739 - DNA, 78 bp, Homo sapiens; identical to SEQ ID NO: 19462
  chr5:65465906-65465984
  hypo

SEQ ID NO: 69740 - DNA, 43 bp, Homo sapiens
  chr5:65505216-65505259
  hypo
ggtcctcatcagttctcattccgattcttcctggagcctcctt

SEQ ID NO: 69741 - DNA, 206 bp, Homo sapiens; identical to SEQ ID NO: 19463
  chr5:65988336-65988542
  hypo

SEQ ID NO: 69742 - DNA, 18 bp, Homo sapiens
  chr5:66273220-66273238
  hypo
gcccggctatcagacatt

SEQ ID NO: 69743 - DNA, 187 bp, Homo sapiens
  chr5:66441262-66441449
  hypo
gtgctcagtcccagggcgggcctcgccaggcagtaaagatgggtgttttatgctgctagactttctccatggcctcagtccttaggcttgggacacgatcttctgagagctaagatcagatgtctcagacccctcctcagtgctcggccatgcagcaaactgttattgcttccgtttgaccttgggg

SEQ ID NO: 69744 - DNA, 623 bp, Homo sapiens
  chr5:66459031-66459654
  hypo
ggtccgggcacatccggcccagcactctccacggtcttgcacccaaactcggcgggcagcggtaccggtccggaaggcgaaagtccgccggcaacatcccactgtccccgctggcccggacgccctctccaaccccgcaacccacctccccgcagcggtcaccatcccctcttctgggacactcactgggcaattccaagatcgcgcaagcctttcccagcaagatgcactccccgcccaccatcgtcagacacatcgtgaggcccaagagtgcggagccccccaggtccccgctgctcaagcgcgtgcagtccgaggagaagctgtcgccctcttacggcagtgacaagaagcacctgtgctcccgcaagcacagcctggaggtgacccaagaggaggtgcagcgggagcagtcccagcgggaggcgccgctgcagagcctggatgagaacgtgtgcgacgtgccgccgctcagccgcgcccggccagtggagcaaggctgcctgaaacgcccagtctcccggaaggtgggccgccaggagtctgtggacgacctggaccgcgacaagctgaaggccaaggtggtggtgaagaaagcagacggcttcccagagaaacaggaa

SEQ ID NO: 69745 - DNA, 31 bp, Homo sapiens
  chr5:66534314-66534345
  hypo
tgatttagaaactcagcggtcatccagaaag

SEQ ID NO: 69746 - DNA, 59 bp, Homo sapiens
  chr5:66790233-66790292
  hypo
accacttacagcctttgttggcggggcctgttaccttcgcttacaccacatgatgtgct

SEQ ID NO: 69747 - DNA, 35 bp, Homo sapiens
  chr5:66911430-66911465
  hypo
aaattttagccagctgcggtggctcacgcctgtaa

SEQ ID NO: 69748 - DNA, 163 bp, Homo sapiens; identical to SEQ ID NO: 19466
  chr5:66938603-66938766
  hypo

SEQ ID NO: 69749 - DNA, 38 bp, Homo sapiens
  chr5:66987569-66987607
  hypo
tgggattataggcgtgagccaccgcgccaggcctattg

SEQ ID NO: 69750 - DNA, 37 bp, Homo sapiens
  chr5:67015512-67015549
  hypo
tacaggcgtgagccaccgcgaccggcccagtaatgtt

SEQ ID NO: 69751 - DNA, 36 bp, Homo sapiens
  chr5:67021469-67021505
  hypo
ataatcagtgggaatttactacgtgccctgagccat

SEQ ID NO: 69752 - DNA, 38 bp, Homo sapiens
  chr5:67488204-67488242
  hypo
caggcatgagtcaccgcgcagggcctgaatgagttatc

SEQ ID NO: 69753 - DNA, 160 bp, Homo sapiens
  chr5:67591075-67591235
  hypo
cgagaaattgacaaacgtatgaacagcattaaaccagaccttatccagctgagaaagacgagagaccaatacttgatgtaagtatttgaaatggaatcctatacatgaataattggtgattgctacaattcaggatgagttaatgcgttctcttttcaaa

SEQ ID NO: 69754 - DNA, 175 bp, Homo sapiens; identical to SEQ ID NO: 19467
  chr5:67617619-67617794
  hypo

SEQ ID NO: 69755 - DNA, 24 bp, Homo sapiens
  chr5:67646893-67646917
  hypo
caccacgcccggcctgggctcagt

SEQ ID NO: 69756 - DNA, 81 bp, Homo sapiens
  chr5:67708115-67708196
  hypo
atgtcattttaaaaatcgcattatacccttaggatcttgtcatcacattttttttttttttttgagacggagtcttgctct

SEQ ID NO: 69757 - DNA, 138 bp, Homo sapiens; identical to SEQ ID NO: 19469
  chr5:67717788-67717926
  hypo

SEQ ID NO: 69758 - DNA, 38 bp, Homo sapiens; identical to SEQ ID NO: 19470
  chr5:67753208-67753246
  hypo

SEQ ID NO: 69759 - DNA, 37 bp, Homo sapiens; identical to SEQ ID NO: 19471
  chr5:67753365-67753402
  hypo

SEQ ID NO: 69760 - DNA, 3 bp, Homo sapiens
  chr5:67771930-67771933
  hypo
ggg

SEQ ID NO: 69761 - DNA, 43 bp, Homo sapiens
  chr5:67845322-67845365
  hypo
ataagaaatatgagaactcttcgcaccaatggtaaaaataagg

SEQ ID NO: 69762 - DNA, 31 bp, Homo sapiens
  chr5:67857567-67857598
  hypo
acaattacccagacaacgtagccactccatt

SEQ ID NO: 69763 - DNA, 31 bp, Homo sapiens
  chr5:68018530-68018561
  hypo
aaaaaaaatatatcaccgatcagctcagcct

SEQ ID NO: 69764 - DNA, 27 bp, Homo sapiens
  chr5:68133363-68133390
  hypo
agccaccgcgcccggccagaaatgggt

SEQ ID NO: 69765 - DNA, 157 bp, Homo sapiens
  chr5:68238652-68238809
  hypo
agtgctgggattacaggcgtgagccaccgcgccaggcccaacacacacagttttaataaatcaggaataagtcaaggagcaccacagttcttaaaatgtcctttatcccacaaccaccaccttgccaatttgttggcctcatcgccctcctgcttca

SEQ ID NO: 69766 - DNA, 38 bp, Homo sapiens
  chr5:68337840-68337878
  hypo
tgaaataaatgtaaagccctacgcttacatttttttcg

SEQ ID NO: 69767 - DNA, 44 bp, Homo sapiens
  chr5:68363913-68363957
  hypo
gctgtttagtttttaaaaatgcgatattcgccgggcgcggtggc

SEQ ID NO: 69768 - DNA, 31 bp, Homo sapiens
  chr5:68368094-68368125
  hypo
ataaataaaataaatgcgttatcagtaacaa

SEQ ID NO: 69769 - DNA, 20 bp, Homo sapiens
  chr5:68459532-68459552
  hypo
tataatattcccagtgcggc

SEQ ID NO: 69770 - DNA, 30 bp, Homo sapiens
  chr5:68461925-68461955
  hypo
tccgtgacttccagcgccaggagtctctat

SEQ ID NO: 69771 - DNA, 39 bp, Homo sapiens
  chr5:68475607-68475646
  hypo
gcccggccctcagtaggcgatttttatatgtggtataaa

SEQ ID NO: 69772 - DNA, 31 bp, Homo sapiens; identical to SEQ ID NO: 41605
  chr5:68485209-68485240
  hypo

SEQ ID NO: 69773 - DNA, 30 bp, Homo sapiens; identical to SEQ ID NO: 19473
  chr5:68505721-68505751
  hypo

SEQ ID NO: 69774 - DNA, 122 bp, Homo sapiens
  chr5:70945905-70946027
  hypo
ctctacatttggccaaatgctcgtatctcagtgatgggaggagagcaggcagccaatgtgttggccacgataacaaaggaccaaagagcccgggaaggaaagcaggtcggtgtcgttttctc

SEQ ID NO: 69775 - DNA, 320 bp, Homo sapiens
  chr5:70994054-70994374
  hypo
gggtgaagggctcggcggtgtctggcgtatgccaagccacatgcttcctggaaagcagcaagcggagagtagcctcagcctgtgaaaattcagggcattgctttggctcgtccctgtccctgaccctaaccttaacccttatgtctgaagtagtttgagagggagacacaggccttcccaacaaatgggcccctttattctttgagtcgatgggaggccagggcggccagatctcccactccaggcaggtcagttctcgtcaggagcagcctgcgtctttaaggtcatagctgttattcttggagttatttatttatttg

SEQ ID NO: 69776 - DNA, 38 bp, Homo sapiens
  chr5:71313584-71313622
  hypo
taaaaacatttactcttaggccgggcgcgttggctcac

SEQ ID NO: 69777 - DNA, 40 bp, Homo sapiens
  chr5:71780023-71780063
  hypo
attaatcgccgggcgcggtggctcacgcctgtaatcccag

SEQ ID NO: 69778 - DNA, 181 bp, Homo sapiens
  chr5:72236833-72237014
  hypo
agacgtatttttcttcctgttgacgaaacatgagacagcagggcctagagagaagtgaaaagaatgttaaaattagcgaaagtgaacatgatgtacaagcagcacaaaggaaaacagacattgttgaaaacacagtgatgtacacagagggcaggatttttcttttttaaaaagaaaaaca

SEQ ID NO: 69779 - DNA, 46 bp, Homo sapiens
  chr5:72242482-72242528
  hypo
aaaatccctgggtggccgggtgcggtggctcatgcctgtaatccca

SEQ ID NO: 69780 - DNA, 253 bp, Homo sapiens
  chr5:72292519-72292772
  hypo
ccgcaggctgccaacgcctgtccgccagctccccgttccgctgggctttccaaaacctcgccaggggtgactttctgagccgcttgctccatacccctctctgcagcctctcctgccacttagggctgccgttccccctcccggcaacggggggctggcggagctgtgccacgggggcccccggggccggcggggccggcagagcaggcagtgccagggtcatcaggatgatgcggacgcagtgtctgctggg

SEQ ID NO: 69781 - DNA, 182 bp, Homo sapiens; identical to SEQ ID NO: 19475
  chr5:72388278-72388460
  hypo

SEQ ID NO: 69782 - DNA, 40 bp, Homo sapiens; identical to SEQ ID NO: 4019
  chr5:72732869-72732909
  hypo

SEQ ID NO: 69783 - DNA, 774 bp, Homo sapiens; identical to SEQ ID NO: 41631
  chr5:72733012-72733786
  hypo

SEQ ID NO: 69784 - DNA, 2926 bp, Homo sapiens; identical to SEQ ID NO: 41633
  chr5:72742463-72745389
  hypo

SEQ ID NO: 69785 - DNA, 30 bp, Homo sapiens
  chr5:72804605-72804635
  hypo
cgagacaagctcaccgaaatggccgcgtcc

SEQ ID NO: 69786 - DNA, 31 bp, Homo sapiens; identical to SEQ ID NO: 19479
  chr5:72806527-72806558
  hypo

SEQ ID NO: 69787 - DNA, 1144 bp, Homo sapiens; identical to SEQ ID NO: 41636
  chr5:72921422-72922566
  hypo

SEQ ID NO: 69788 - DNA, 195 bp, Homo sapiens; identical to SEQ ID NO: 19481
  chr5:73081112-73081307
  hypo

SEQ ID NO: 69789 - DNA, 39 bp, Homo sapiens
  chr5:73102525-73102564
  hypo
atatgtaccatatatacgatatatcgtatacatctatat

SEQ ID NO: 69790 - DNA, 24 bp, Homo sapiens
  chr5:73127801-73127825
  hypo
caccatgtccggcctgaagtttag

SEQ ID NO: 69791 - DNA, 42 bp, Homo sapiens
  chr5:73192670-73192712
  hypo
accgtgacagaggtgccggggcagcggcggacccagctgctt

SEQ ID NO: 69792 - DNA, 30 bp, Homo sapiens
  chr5:73205414-73205444
  hypo
tccagcaggagcagcggcgctggctgcgca

SEQ ID NO: 69793 - DNA, 88 bp, Homo sapiens
  chr5:73205663-73205751
  hypo
actggaagcacggccggcagaggagcctgcccgcggtgctccttccgggtggccccgaggtatggaccttctgcggtgctgtgaggca

SEQ ID NO: 69794 - DNA, 137 bp, Homo sapiens
  chr5:73228901-73229038
  hypo
tgggattacaggcgtgagccaccgtgcccggcctatttcctatttcttacatattactttttaagctttaaatgaactcaaatttaaaagactggagaatagaaatccaaattccaagaaaacgttaactcatttca

SEQ ID NO: 69795 - DNA, 46 bp, Homo sapiens; identical to SEQ ID NO: 19483
  chr5:73247792-73247838
  hypo

SEQ ID NO: 69796 - DNA, 177 bp, Homo sapiens
  chr5:73623642-73623819
  hypo
ttttcccatctggtcatttagcgagggtctatggaaagatagtggaaatcgtctacatcttttgctgagtaagacaagaaagtcaacgaatgcagcgactacatagtatactggaggctaaagtcttaagagacacattggtttagatgtgtgcacgtggccatgtttgctttgggg

SEQ ID NO: 69797 - DNA, 179 bp, Homo sapiens; identical to SEQ ID NO: 19484
  chr5:73627933-73628112
  hypo

SEQ ID NO: 69798 - DNA, 31 bp, Homo sapiens
  chr5:73636136-73636167
  hypo
gacctccccaatgacccgctgctcataaatg

SEQ ID NO: 69799 - DNA, 36 bp, Homo sapiens
  chr5:73665485-73665521
  hypo
agttaacaaacagggccgggcactgtggctcacgcc

SEQ ID NO: 69800 - DNA, 32 bp, Homo sapiens
  chr5:73687765-73687797
  hypo
tttttttttttttttttgagacggagtctcgc

SEQ ID NO: 69801 - DNA, 31 bp, Homo sapiens
  chr5:73771007-73771038
  hypo
aggaatatacaactctcgggtgggtgaggtg

SEQ ID NO: 69802 - DNA, 194 bp, Homo sapiens; identical to SEQ ID NO: 4025
  chr5:73843884-73844078
  hypo

SEQ ID NO: 69803 - DNA, 192 bp, Homo sapiens
  chr5:73855840-73856032
  hypo
ctggagcccttctgctcggagttcaaggctcccatgtagacctggagcgtgtgcccccaggggctgccagcgtgggtctctgctccactcagtcttgggcacagtcaagcacagaatccaggaggggctggggctgggaggaggagtaattatctctttctgccgtgttgaagggcacgctgctattccatc

SEQ ID NO: 69804 - DNA, 223 bp, Homo sapiens
  chr5:73932083-73932306
  hypo
ctgaacatggcctcaaagtagcgactgcatgcagccagcactgcccggtggcaagggaaggtcctatttccggcatggagaaggacgtcagtgaagagacgctgctggcgtaaaagattcaggtgagtgaggacgctgtcagcgtaggaggacttgtgaaacagatagatgttaatggagccgctgctggccctggacttgcggttctcatgcacactgactg

SEQ ID NO: 69805 - DNA, 264 bp, Homo sapiens; identical to SEQ ID NO: 41638
  chr5:73935723-73935987
  hypo

SEQ ID NO: 69806 - DNA, 516 bp, Homo sapiens; identical to SEQ ID NO: 41639
  chr5:73936032-73936548
  hypo

SEQ ID NO: 69807 - DNA, 286 bp, Homo sapiens; identical to SEQ ID NO: 41640
  chr5:73936773-73937059
  hypo

SEQ ID NO: 69808 - DNA, 30 bp, Homo sapiens; identical to SEQ ID NO: 19489
  chr5:73980422-73980452
  hypo

SEQ ID NO: 69809 - DNA, 204 bp, Homo sapiens; identical to SEQ ID NO: 4030
  chr5:74162515-74162719
  hypo

SEQ ID NO: 69810 - DNA, 23 bp, Homo sapiens
  chr5:74177827-74177850
  hypo
gagacagggtctgggccgggcgc

SEQ ID NO: 69811 - DNA, 31 bp, Homo sapiens
  chr5:74238223-74238254
  hypo
agatcaccttcacatacgtttaactctgaga

SEQ ID NO: 69812 - DNA, 544 bp, Homo sapiens; identical to SEQ ID NO: 41645
  chr5:74348350-74348894
  hypo

SEQ ID NO: 69813 - DNA, 1050 bp, Homo sapiens; identical to SEQ ID NO: 4032
  chr5:74348906-74349956
  hypo

SEQ ID NO: 69814 - DNA, 40 bp, Homo sapiens
  chr5:74628695-74628735
  hypo
tcttaacattatacttttaggcgggtgcggtagttcacgc

SEQ ID NO: 69815 - DNA, 38 bp, Homo sapiens; identical to SEQ ID NO: 19493
  chr5:74652648-74652686
  hypo

SEQ ID NO: 69816 - DNA, 30 bp, Homo sapiens
  chr5:74753716-74753746
  hypo
gtatgggtataggcgcgcgtgtgtgtgtgt

SEQ ID NO: 69817 - DNA, 26 bp, Homo sapiens
  chr5:74826906-74826932
  hypo
caggcgtgagccactgcacccaaacc

SEQ ID NO: 69818 - DNA, 24 bp, Homo sapiens
  chr5:74862326-74862350
  hypo
cccgtgaaatctcctggtctccag

SEQ ID NO: 69819 - DNA, 389 bp, Homo sapiens; identical to SEQ ID NO: 41648
  chr5:75377859-75378248
  hypo

SEQ ID NO: 69820 - DNA, 2296 bp, Homo sapiens; identical to SEQ ID NO: 41649
  chr5:75378678-75380974
  hypo

SEQ ID NO: 69821 - DNA, 30 bp, Homo sapiens
  chr5:75470024-75470054
  hypo
aacctagtactctgcgaacctctcacgctg

SEQ ID NO: 69822 - DNA, 30 bp, Homo sapiens
  chr5:75587137-75587167
  hypo
ccgcaccgagctgtacggagtaagtaacaa

SEQ ID NO: 69823 - DNA, 2020 bp, Homo sapiens; identical to SEQ ID NO: 41651
  chr5:75698193-75700213
  hypo

SEQ ID NO: 69824 - DNA, 30 bp, Homo sapiens
  chr5:75774896-75774926
  hypo
cttttacaccgcctccgccttcccgccatg

SEQ ID NO: 69825 - DNA, 30 bp, Homo sapiens; identical to SEQ ID NO: 19497
  chr5:75784942-75784972
  hypo

SEQ ID NO: 69826 - DNA, 30 bp, Homo sapiens
  chr5:75969398-75969428
  hypo
cccttgatctactgccgtaagttgtacttg

SEQ ID NO: 69827 - DNA, 38 bp, Homo sapiens
  chr5:76159634-76159672
  hypo
ttacaggtgtgagccactgcgcccggccaattatatta

SEQ ID NO: 69828 - DNA, 30 bp, Homo sapiens
  chr5:76264816-76264846
  hypo
ttcccagccttgagcgcacgcgcgcacaca

SEQ ID NO: 69829 - DNA, 137 bp, Homo sapiens
  chr5:76327276-76327413
  hypo
gtttaaggttgctcttctgggcgtttatcatcttcggctttcttgtgtaagtagggacgatatataactgcttttgttggagacgttaagcagcttatttcgtttccaagatggtaggggcaaatgttaatacttaa

SEQ ID NO: 69830 - DNA, 16 bp, Homo sapiens
  chr5:76327712-76327728
  hypo
agtgcaactctgtctc

SEQ ID NO: 69831 - DNA, 38 bp, Homo sapiens; identical to SEQ ID NO: 19499
  chr5:76328104-76328142
  hypo

SEQ ID NO: 69832 - DNA, 170 bp, Homo sapiens; identical to SEQ ID NO: 19500
  chr5:76372311-76372481
  hypo

SEQ ID NO: 69833 - DNA, 47 bp, Homo sapiens; identical to SEQ ID NO: 19501
  chr5:76373686-76373733
  hypo

SEQ ID NO: 69834 - DNA, 198 bp, Homo sapiens
  chr5:76399985-76400183
  hypo
tgtatcccaggcttcccgtagaggtttatgtggggcctatcgctcttccacacagtaaggaaccacgtgaaggcttgggagctgaagtacatgtttgccgggagggagctcagtatagtagatgttccctttataaccctgcacccagtgtgacaatgggcagtgctatggtttgaatgtttgcgtctattcaaaatt

SEQ ID NO: 69835 - DNA, 687 bp, Homo sapiens; identical to SEQ ID NO: 41659
  chr5:76506316-76507003
  hypo

SEQ ID NO: 69836 - DNA, 231 bp, Homo sapiens; identical to SEQ ID NO: 41660
  chr5:76507082-76507313
  hypo

SEQ ID NO: 69837 - DNA, 30 bp, Homo sapiens
  chr5:76607830-76607860
  hypo
gcggaggtgcgcatcgggcccatgagactg

SEQ ID NO: 69838 - DNA, 33 bp, Homo sapiens
  chr5:76738422-76738455
  hypo
aacctttaaaaaaagccgggtgcggtggctcac

SEQ ID NO: 69839 - DNA, 23 bp, Homo sapiens
  chr5:77047288-77047311
  hypo
caccgcgccggccagcctgacca

SEQ ID NO: 69840 - DNA, 30 bp, Homo sapiens
  chr5:77081277-77081307
  hypo
agatcctcaccgagcgccgctacagcttca

SEQ ID NO: 69841 - DNA, 667 bp, Homo sapiens; identical to SEQ ID NO: 41685
  chr5:77268309-77268976
  hypo

SEQ ID NO: 69842 - DNA, 42 bp, Homo sapiens; identical to SEQ ID NO: 41686
  chr5:77269195-77269237
  hypo

SEQ ID NO: 69843 - DNA, 172 bp, Homo sapiens; identical to SEQ ID NO: 41687
  chr5:77269263-77269435
  hypo

SEQ ID NO: 69844 - DNA, 141 bp, Homo sapiens
  chr5:77291946-77292087
  hypo
gtaacatggagtgggagcaagcgattatggtgtggtaatagtaatccagcgatggaggccgagtcggttggaaatggattgaggtaaaataactcccgcaccatgataaatgtgaacagcgctttgctgacagatgatcta

SEQ ID NO: 69845 - DNA, 64 bp, Homo sapiens
  chr5:77425048-77425112
  hypo
ctaataaatcttgtacggtctctgatgtcgtagttttgatcatacttgccgagatttaatatgt

SEQ ID NO: 69846 - DNA, 30 bp, Homo sapiens; identical to SEQ ID NO: 19506
  chr5:77511969-77511999
  hypo

SEQ ID NO: 69847 - DNA, 94 bp, Homo sapiens
  chr5:77655147-77655241
  hypo
agaaaagtgaggaaagcgatgctctttcaataagttcggcagggtggggcaaggaatggtacaaattgattttttttttttcttgagacagagt

SEQ ID NO: 69848 - DNA, 5 bp, Homo sapiens
  chr5:77655480-77655485
  hypo
gggat

SEQ ID NO: 69849 - DNA, 31 bp, Homo sapiens
  chr5:77810047-77810078
  hypo
taaatacgtttcccctcgacaacacctgacc

SEQ ID NO: 69850 - DNA, 112 bp, Homo sapiens
  chr5:77816709-77816821
  hypo
ctgaaaaatcactgaccgttcctttcttatatacttttccttcctgtttcagacaactaaaatgcttggaatcacgaacaatttgatagctgtatgccgaaagacatggcag

SEQ ID NO: 69851 - DNA, 35 bp, Homo sapiens
  chr5:77848658-77848693
  hypo
tctccttcaacaaagcgtcacgggctatacagaat

SEQ ID NO: 69852 - DNA, 21 bp, Homo sapiens
  chr5:77885002-77885023
  hypo
ttagaagttggccaggcgcag

SEQ ID NO: 69853 - DNA, 86 bp, Homo sapiens
  chr5:77912254-77912340
  hypo
ccaggttttcttcttgaccaccccgactatggattgcttcggaagacattttacataaaagtcacgaaagaggttacagtaagaat

SEQ ID NO: 69854 - DNA, 31 bp, Homo sapiens; identical to SEQ ID NO: 19510
  chr5:77916703-77916734
  hypo

SEQ ID NO: 69855 - DNA, 19 bp, Homo sapiens
  chr5:77922886-77922905
  hypo
agagcgaaactccatttca

SEQ ID NO: 69856 - DNA, 31 bp, Homo sapiens; identical to SEQ ID NO: 4058
  chr5:77944026-77944057
  hypo

SEQ ID NO: 69857 - DNA, 30 bp, Homo sapiens
  chr5:77945724-77945754
  hypo
ttcaagcccactgccgcctttctggttctc

SEQ ID NO: 69858 - DNA, 181 bp, Homo sapiens
  chr5:78068861-78069042
  hypo
gcgcccggtccaaataaccttttcaaaccaaaccggctgcttccctaacagatccagagtacatgctaatcaaaggttttgcctttagaaatactttatacagaaagaattcacagctctcatgtgggtaaaaaacgaaaacaggccgggcgtggtggctcacgaggtcaggagatcaaga

SEQ ID NO: 69859 - DNA, 30 bp, Homo sapiens
  chr5:78069638-78069668
  hypo
ggaaggaggagcgtgcgtgtttatctcctc

SEQ ID NO: 69860 - DNA, 255 bp, Homo sapiens; identical to SEQ ID NO: 19512
  chr5:78105381-78105636
  hypo

SEQ ID NO: 69861 - DNA, 4 bp, Homo sapiens
  chr5:78162671-78162675
  hypo
ggct

SEQ ID NO: 69862 - DNA, 140 bp, Homo sapiens; identical to SEQ ID NO: 19514
  chr5:78264450-78264590
  hypo

SEQ ID NO: 69863 - DNA, 51 bp, Homo sapiens; identical to SEQ ID NO: 19515
  chr5:78264836-78264887
  hypo

SEQ ID NO: 69864 - DNA, 31 bp, Homo sapiens
  chr5:78356327-78356358
  hypo
ctcatggagcacatatcgtgcttcagggaaa

SEQ ID NO: 69865 - DNA, 46 bp, Homo sapiens
  chr5:78445630-78445676
  hypo
agttaattgaaaaaatagttccgctgggcgcaatggctcacacctg

SEQ ID NO: 69866 - DNA, 100 bp, Homo sapiens
  chr5:78469178-78469278
  hypo
ggttaactctcttctaaattacgtttgcctatgtgtcttgaattaaaaaatggctttaatcgtaaataaacatgagaaaaaagtatttttctatttcgaa

SEQ ID NO: 69867 - DNA, 31 bp, Homo sapiens; identical to SEQ ID NO: 4064
  chr5:78810400-78810431
  hypo

SEQ ID NO: 69868 - DNA, 34 bp, Homo sapiens
  chr5:78812537-78812571
  hypo
ttgagacactgcgcccgaccgcgtcgtttttttt

SEQ ID NO: 69869 - DNA, 37 bp, Homo sapiens; identical to SEQ ID NO: 19518
  chr5:78881931-78881968
  hypo

SEQ ID NO: 69870 - DNA, 37 bp, Homo sapiens
  chr5:78882207-78882244
  hypo
gcgctccagcctgggcgacagagtgagactcaaaaag

SEQ ID NO: 69871 - DNA, 37 bp, Homo sapiens; identical to SEQ ID NO: 19519
  chr5:78949954-78949991
  hypo

SEQ ID NO: 69872 - DNA, 215 bp, Homo sapiens
  chr5:78986241-78986456
  hypo
tggaggcggtgaaggcgcactggtaccttccgatgaatggcggtctccccgggggcctagcagtaggctaggctgcaataaggtgaccttattttgatacaaaggcccataaattctttgggggaaaagaagcatgagtttcagtaatccctgttcttcaagtcctggtcccaaatcccaaatatcagtttccgtgaatgcgatgaagtaatact

SEQ ID NO: 69873 - DNA, 31 bp, Homo sapiens; identical to SEQ ID NO: 19520
  chr5:79086452-79086483
  hypo

SEQ ID NO: 69874 - DNA, 120 bp, Homo sapiens
  chr5:79097420-79097540
  hypo
cagacacctgagaaggtatgtcgaaaactgtctaatgcaactgcgcatgcaccctcgctagccgcgggtgaaggggaccaagtgccagcagcatctgccgtcaggttggaagcagctctg

SEQ ID NO: 69875 - DNA, 30 bp, Homo sapiens; identical to SEQ ID NO: 41703
  chr5:79316411-79316441
  hypo

SEQ ID NO: 69876 - DNA, 96 bp, Homo sapiens
  chr5:79393211-79393307
  hypo
atgaagtacacagaccgacaaccttttacagaggactgggcttgacaaagagctcgcttggatccatcttgcttccctgtgcgcacccggccccac

SEQ ID NO: 69877 - DNA, 39 bp, Homo sapiens
  chr5:79448990-79449029
  hypo
tattcagttgccgggcgtggtggctcacatctgtaatcc

SEQ ID NO: 69878 - DNA, 31 bp, Homo sapiens
  chr5:79451010-79451041
  hypo
gaattaagaaatagttcgtggaggccaggat

SEQ ID NO: 69879 - DNA, 31 bp, Homo sapiens
  chr5:79453490-79453521
  hypo
tattgtaggtactctgcgaacaacttaggaa

SEQ ID NO: 69880 - DNA, 31 bp, Homo sapiens; identical to SEQ ID NO: 19521
  chr5:79498711-79498742
  hypo

SEQ ID NO: 69881 - DNA, 292 bp, Homo sapiens; identical to SEQ ID NO: 41705
  chr5:79551151-79551443
  hypo

SEQ ID NO: 69882 - DNA, 79 bp, Homo sapiens
  chr5:79552928-79553007
  hypo
aggcgtgagccaccgcgccctgccggaatgaagatatttctgttagtgcgatttttgcgccaatccctttgctctttca

SEQ ID NO: 69883 - DNA, 32 bp, Homo sapiens
  chr5:79554325-79554357
  hypo
agccaccgcgcgcagccacaaggcaacattat

SEQ ID NO: 69884 - DNA, 113 bp, Homo sapiens
  chr5:79598626-79598739
  hypo
agccattgttgaatacgagagcagtgatatcgtcatgcatggtgagctggcagcaggtgtggatgggcggcggagtggagagggcgaggctctgtgctcgtggggaggatgca

SEQ ID NO: 69885 - DNA, 30 bp, Homo sapiens
  chr5:79628357-79628387
  hypo
catctccgcgggctcgcgctcaacgttcaa

SEQ ID NO: 69886 - DNA, 30 bp, Homo sapiens; identical to SEQ ID NO: 19522
  chr5:79647599-79647629
  hypo

SEQ ID NO: 69887 - DNA, 23 bp, Homo sapiens
  chr5:79753567-79753590
  hypo
caggcacagtggctcacgcctgt

SEQ ID NO: 69888 - DNA, 20 bp, Homo sapiens
  chr5:79783234-79783254
  hypo
tatttgacagtctagctcta

SEQ ID NO: 69889 - DNA, 474 bp, Homo sapiens; identical to SEQ ID NO: 41710
  chr5:79864970-79865444
  hypo

SEQ ID NO: 69890 - DNA, 180 bp, Homo sapiens; identical to SEQ ID NO: 4068
  chr5:79865522-79865702
  hypo

SEQ ID NO: 69891 - DNA, 89 bp, Homo sapiens; identical to SEQ ID NO: 4069
  chr5:79865744-79865833
  hypo

SEQ ID NO: 69892 - DNA, 356 bp, Homo sapiens; identical to SEQ ID NO: 41713
  chr5:79866099-79866455
  hypo

SEQ ID NO: 69893 - DNA, 441 bp, Homo sapiens
  chr5:79911129-79911570
  hypo
gccagtgcttgcccgcggggctacagaggaagacagcagccacgcctgcatatgggcttctgcactgctagcctcaaggctgccagagtgcaaagaatgccaggataatggctttatccacgtgtggccttttgacacataagctaatgactatattccaggtacaaatagttctttcccacgagctgtttctgcaggtctccaaacagacaattacccggttccacttaacagagtgactcaaggacggatctgagggctgggtcttgtgaacgcgggctgttgtcctgccctctcccagctctaacattgtgctgaaaagttaaaatacaaaacgccaaagctccccaatcccatcccacgcccctgcctgcgcagcctttcatgcattgaatgggcagcttcatgatgctgctgcgacaatagcgacaatagcggggg

SEQ ID NO: 69894 - DNA, 220 bp, Homo sapiens
  chr5:79974744-79974964
  hypo
gggagtgcagcctgccacaggcgaggttgtgtttgatagtttccaggactctgcttctcgttcagagctagaaacccggatgtcaagcctgcagccagtagagctgctgcttccttcggccttgtccgagcaaacagaggcgctcatccacagagccacatctgttaggtaagttggcacatcactggaatataataccgattctgaaacttaggtttag

SEQ ID NO: 69895 - DNA, 164 bp, Homo sapiens; identical to SEQ ID NO: 19529
  chr5:79986400-79986564
  hypo

SEQ ID NO: 69896 - DNA, 81 bp, Homo sapiens; identical to SEQ ID NO: 19530
  chr5:80076658-80076739
  hypo

SEQ ID NO: 69897 - DNA, 30 bp, Homo sapiens; identical to SEQ ID NO: 19531
  chr5:80550845-80550875
  hypo

SEQ ID NO: 69898 - DNA, 184 bp, Homo sapiens
  chr5:80652823-80653007
  hypo
taccttcttcctctcccgcctccctctaccttgcattttctctctagcaatactcttgtgttggtggcttcccagcacacagtgtgctggttcatgcctccgtgccttcaccctcactgctacgcaattcctcgccttcccaactttcttctcatagcccctcctgcagcgagtctctcgtgaa

SEQ ID NO: 69899 - DNA, 102 bp, Homo sapiens
  chr5:80717291-80717393
  hypo
gtgagaccctgtgctcggcctgtgactctaactgtaatccagtcatttttgcacgtgagtaggaacatcattgttacatgcggacttgtcagtttgatgagg

SEQ ID NO: 69900 - DNA, 35 bp, Homo sapiens
  chr5:80728271-80728306
  hypo
agaaaacaaaccggccgggcacggtggctcatgcc

SEQ ID NO: 69901 - DNA, 37 bp, Homo sapiens
  chr5:80839869-80839906
  hypo
cttcctttttttcctttgagacggagtctcgctctgt

SEQ ID NO: 69902 - DNA, 27 bp, Homo sapiens
  chr5:80931411-80931438
  hypo
tttttttttgagacattgtctcgctct

SEQ ID NO: 69903 - DNA, 153 bp, Homo sapiens
  chr5:81058592-81058745
  hypo
ttgcatagctaatatcacaaacggtgtaggcaaacagacaaagtcgctctcctgtgaatactattagcttgtagttcacggtttaggtgactgttccggagtgaaataaaaacatcttcagagacttctaccggtcaatcaacacttcaaata

SEQ ID NO: 69904 - DNA, 30 bp, Homo sapiens; identical to SEQ ID NO: 19533
  chr5:81192371-81192401
  hypo

SEQ ID NO: 69905 - DNA, 30 bp, Homo sapiens
  chr5:81266660-81266690
  hypo
ttcatctgtgaaatacgtttttaaggtaaa

SEQ ID NO: 69906 - DNA, 30 bp, Homo sapiens; identical to SEQ ID NO: 41722
  chr5:81538030-81538060
  hypo

SEQ ID NO: 69907 - DNA, 141 bp, Homo sapiens
  chr5:81570368-81570509
  hypo
tgcgccccgcctcgcggtcacaagggccccaccgcccggggagagctgcccaccccgcgcctgacgcccagggcctggaatcgcgctgcaaccgcggcctctttccctggttctggccaggtgagcgaggcctagcaatct

SEQ ID NO: 69908 - DNA, 30 bp, Homo sapiens; identical to SEQ ID NO: 41724
  chr5:81658875-81658905
  hypo

SEQ ID NO: 69909 - DNA, 30 bp, Homo sapiens; identical to SEQ ID NO: 41727
  chr5:82453282-82453312
  hypo

SEQ ID NO: 69910 - DNA, 76 bp, Homo sapiens
  chr5:82808024-82808100
  hypo
ggcggcatggaggaacggctttgaccagtgcgattacgggtggctgtcggatgccagcgtgcgccaccctgtgact

SEQ ID NO: 69911 - DNA, 31 bp, Homo sapiens
  chr5:83095534-83095565
  hypo
caaagataaaaaggttcgctaatatactgag

SEQ ID NO: 69912 - DNA, 31 bp, Homo sapiens
  chr5:84845601-84845632
  hypo
tgaaaatgcacttggccgggaagtcagagca

SEQ ID NO: 69913 - DNA, 30 bp, Homo sapiens
  chr5:85842324-85842354
  hypo
atgtagaggcggagcggattaggataataa

SEQ ID NO: 69914 - DNA, 27 bp, Homo sapiens
  chr5:85911801-85911828
  hypo
tttttttttgagatggagtctcgctct

SEQ ID NO: 69915 - DNA, 997 bp, Homo sapiens; identical to SEQ ID NO: 41737
  chr5:87436528-87437525
  hypo

SEQ ID NO: 69916 - DNA, 20 bp, Homo sapiens
  chr5:88079167-88079187
  hypo
gggtgcagtggttcacgcct

SEQ ID NO: 69917 - DNA, 32 bp, Homo sapiens
  chr5:88097574-88097606
  hypo
ttacaggtgtgagtcaccgtgcctggcctact

SEQ ID NO: 69918 - DNA, 238 bp, Homo sapiens; identical to SEQ ID NO: 41763
  chr5:88178898-88179136
  hypo

SEQ ID NO: 69919 - DNA, 368 bp, Homo sapiens; identical to SEQ ID NO: 41764
  chr5:88179187-88179555
  hypo

SEQ ID NO: 69920 - DNA, 153 bp, Homo sapiens
  chr5:88233141-88233294
  hypo
ggtagatacatttgcagctggcgggggcactgctttattgcctattgtggaatgcgtgccaaataaaaaccatcgtgatttgaaatcggcaatcttatatgcttttcaggttactcggatgttcaaacacacgtaaccaaccatcaatatgag

SEQ ID NO: 69921 - DNA, 31 bp, Homo sapiens
  chr5:90256912-90256943
  hypo
gctcattataaatgctcgataacaaaatgct

SEQ ID NO: 69922 - DNA, 35 bp, Homo sapiens
  chr5:90257314-90257349
  hypo
aaaaaaaaaagggggggtggcggtcatttcaagaa

SEQ ID NO: 69923 - DNA, 30 bp, Homo sapiens; identical to SEQ ID NO: 19537
  chr5:90459826-90459856
  hypo

SEQ ID NO: 69924 - DNA, 144 bp, Homo sapiens
  chr5:90670734-90670878
  hypo
ataccattagtgaatattccacgcggattatactacagtcgaggatagagggagaaactggtggaattttcagcaacttgccattccacgtctctgtctttccagatgataaggattccccacgcaagttagccacaagctgtt

SEQ ID NO: 69925 - DNA, 94 bp, Homo sapiens
  chr5:90672505-90672599
  hypo
gtagccaaggcctgtgcaattcggctttcacccaatagcgcacactgccatgtcggccttcgaatgaggtagcgagtggtctgtgcagaatata

SEQ ID NO: 69926 - DNA, 31 bp, Homo sapiens
  chr5:92310056-92310087
  hypo
caatcaagttcactaacgattacagaaaaaa

SEQ ID NO: 69927 - DNA, 31 bp, Homo sapiens; identical to SEQ ID NO: 4107
  chr5:92917347-92917378
  hypo

SEQ ID NO: 69928 - DNA, 101 bp, Homo sapiens
  chr5:93076895-93076996
  hypo
tctttcagtatgcccgagatgtcctctggcggcggcaacttcggaatgctccgcagggcaatgtagggccccgggagggcgccttcggaggggcgtcgcaa

SEQ ID NO: 69929 - DNA, 145 bp, Homo sapiens
  chr5:93077275-93077420
  hypo
aatggcacccgcagcggctctggtaggaactgatggccctcgaggcttcagaacagccaccggccccctcaagccccgccccccagtgggcggagaaggcgttacaagccaagggtgcctgtgcgtaggcggggaaatctggtag

SEQ ID NO: 69930 - DNA, 158 bp, Homo sapiens
  chr5:93143745-93143903
  hypo
ggccttatgcaaatagaagcacgtcctgcaacctagggagggaacatgcgcaatagatcaattggatataaaaaaccttacggctatatcggcttcagacagtaaatatatactgatgaatatctcatactgcccgcgaattcttaaaatgggttatt

SEQ ID NO: 69931 - DNA, 30 bp, Homo sapiens; identical to SEQ ID NO: 19540
  chr5:93414323-93414353
  hypo

SEQ ID NO: 69932 - DNA, 31 bp, Homo sapiens
  chr5:93823875-93823906
  hypo
caggcgtgagccacagcgcccttctgaaaac

SEQ ID NO: 69933 - DNA, 39 bp, Homo sapiens; identical to SEQ ID NO: 19541
  chr5:94762452-94762491
  hypo

SEQ ID NO: 69934 - DNA, 38 bp, Homo sapiens; identical to SEQ ID NO: 19542
  chr5:94762730-94762768
  hypo

SEQ ID NO: 69935 - DNA, 87 bp, Homo sapiens
  chr5:94776918-94777005
  hypo
ccaagcaccagaaacagcagccgaggaacctcaaactttacatgcgcatttttcaaaattaaaactatgcatctggccgggcgcgat

SEQ ID NO: 69936 - DNA, 31 bp, Homo sapiens; identical to SEQ ID NO: 19543
  chr5:94795583-94795614
  hypo

SEQ ID NO: 69937 - DNA, 1626 bp, Homo sapiens; identical to SEQ ID NO: 41797
  chr5:94955638-94957264
  hypo

SEQ ID NO: 69938 - DNA, 95 bp, Homo sapiens
  chr5:94981772-94981867
  hypo
tattgaaccattcctccgtgttatcacttcagctattttcactacttcacagcaataaacattttttttttttttgagatggagtttcgctcgtg

SEQ ID NO: 69939 - DNA, 30 bp, Homo sapiens
  chr5:94982106-94982136
  hypo
aggcgtgaaccaccgcgcccggccttaaca

SEQ ID NO: 69940 - DNA, 17 bp, Homo sapiens
  chr5:95019538-95019555
  hypo
ccgacagcctagttata

SEQ ID NO: 69941 - DNA, 30 bp, Homo sapiens; identical to SEQ ID NO: 41798
  chr5:95066553-95066583
  hypo

SEQ ID NO: 69942 - DNA, 156 bp, Homo sapiens
  chr5:95213825-95213981
  hypo
tctcgggaaaaaaaaaaaaaaaaaaaaaaaggcataaagcattgattgtcaagtggtctggtaagaaaatacttactgcgcttccttacttttgctcatttttcattcccaaaagggcttcttttcagtttctctgaccctcgggcatctttctcc

SEQ ID NO: 69943 - DNA, 33 bp, Homo sapiens; identical to SEQ ID NO: 19546
  chr5:95290420-95290453
  hypo

SEQ ID NO: 69944 - DNA, 30 bp, Homo sapiens
  chr5:95993882-95993912
  hypo
ccaggacaggaacacgggagtactttgggt

SEQ ID NO: 69945 - DNA, 30 bp, Homo sapiens
  chr5:96098100-96098130
  hypo
gataaatgtttttgcgcagccacaactaga

SEQ ID NO: 69946 - DNA, 476 bp, Homo sapiens
  chr5:96111421-96111897
  hypo
aaagagggtcccctctcggagctaagaccctcaggggaggccagcccgaggcatcccgcaagggaatcagggaagaacacctccacctactacctcctccgaccccagctccagctctccggctccccactgaccaacatccaaagggcaagaaagcttgatgacttggcctttacaagtcagcccctgggcatggagcaaggaagagggatgggcagcgggtctggaggggtgagccgggagagctttaacccagtcatcgtccggcttagtctcagatccaggtgttcattgttcagtagtcgactattcagagtctttcgaggagactgatgaaacagtttatgaatgataaacatggggtacagggttttggacacgggtgcttaagcataaactataaaatgagaagaataaggtactttattcttctgtggcagggaacccaacacttgggtttacgttgcagggcaaca

SEQ ID NO: 69947 - DNA, 204 bp, Homo sapiens; identical to SEQ ID NO: 19548
  chr5:96114495-96114699
  hypo

SEQ ID NO: 69948 - DNA, 30 bp, Homo sapiens; identical to SEQ ID NO: 19549
  chr5:96121167-96121197
  hypo

SEQ ID NO: 69949 - DNA, 167 bp, Homo sapiens
  chr5:96121445-96121612
  hypo
cagctgctttcagaaataaaccgcgactttgtgcagcgtgtattacctgacgagctgaaatgcattgttaatgagactcgcccgatcattactgctgactgctgtgtgtgttccttttaaaaggccagtcaaagagtcccatccatcatcctcgtaatgcacaatgt

SEQ ID NO: 69950 - DNA, 30 bp, Homo sapiens; identical to SEQ ID NO: 19551
  chr5:96141706-96141736
  hypo

SEQ ID NO: 69951 - DNA, 34 bp, Homo sapiens; identical to SEQ ID NO: 19552
  chr5:96173521-96173555
  hypo

SEQ ID NO: 69952 - DNA, 86 bp, Homo sapiens; identical to SEQ ID NO: 19553
  chr5:96362697-96362783
  hypo

SEQ ID NO: 69953 - DNA, 43 bp, Homo sapiens
  chr5:96742641-96742684
  hypo
tggcctcccccccacacttgtcggtgttcaaagtccccagggg

SEQ ID NO: 69954 - DNA, 18 bp, Homo sapiens
  chr5:96855630-96855648
  hypo
catcttggctcctcccca

SEQ ID NO: 69955 - DNA, 448 bp, Homo sapiens; identical to SEQ ID NO: 41807
  chr5:98109212-98109660
  hypo

SEQ ID NO: 69956 - DNA, 696 bp, Homo sapiens; identical to SEQ ID NO: 41808
  chr5:98109926-98110622
  hypo

SEQ ID NO: 69957 - DNA, 182 bp, Homo sapiens
  chr5:98200929-98201111
  hypo
aaaaagtatgaatgccagtgtcgctggaaccaagtaagtcagagaagtggccggcaacgatgggaggtgactagatgctacgaggctggtttcaggctaagaatcttttctcctaaatgagatggaaagccactggagtgttgtaggcacagaaatataacggtgtgactttattctccctc

SEQ ID NO: 69958 - DNA, 133 bp, Homo sapiens
  chr5:98239919-98240052
  hypo
aagaggctgagtcagaatatacgtcaacgatgtcactaggcacattgttttagctcagatttgagcggggggccggtagcaacatttttctctatgaaggaatctgtgtgtcgatttatattctggccctcaa

SEQ ID NO: 69959 - DNA, 77 bp, Homo sapiens; identical to SEQ ID NO: 19557
  chr5:98242968-98243045
  hypo

SEQ ID NO: 69960 - DNA, 30 bp, Homo sapiens
  chr5:98260390-98260420
  hypo
agtgtcaggcctggcgtggtggctcatgcc

SEQ ID NO: 69961 - DNA, 30 bp, Homo sapiens
  chr5:98396286-98396316
  hypo
ggaagtttgaaaaaacgaataattttccta

SEQ ID NO: 69962 - DNA, 30 bp, Homo sapiens; identical to SEQ ID NO: 19558
  chr5:99583036-99583066
  hypo

SEQ ID NO: 69963 - DNA, 28 bp, Homo sapiens
  chr5:100185189-100185217
  hypo
taagaaacactgctggctgagcgcggtg

SEQ ID NO: 69964 - DNA, 937 bp, Homo sapiens; identical to SEQ ID NO: 4123
  chr5:100238182-100239119
  hypo

SEQ ID NO: 69965 - DNA, 1010 bp, Homo sapiens; identical to SEQ ID NO: 4124
  chr5:100239134-100240144
  hypo

SEQ ID NO: 69966 - DNA, 40 bp, Homo sapiens
  chr5:100247923-100247963
  hypo
tgagccaccacgcccagccgatgattcttgtttatggatg

SEQ ID NO: 69967 - DNA, 27 bp, Homo sapiens
  chr5:100377803-100377830
  hypo
agaaaaaagctgacttctggccgggcg

SEQ ID NO: 69968 - DNA, 26 bp, Homo sapiens
  chr5:100378069-100378095
  hypo
tgggcgaactgacataaaacatcaca

SEQ ID NO: 69969 - DNA, 30 bp, Homo sapiens; identical to SEQ ID NO: 4128
  chr5:102201406-102201436
  hypo

SEQ ID NO: 69970 - DNA, 30 bp, Homo sapiens; identical to SEQ ID NO: 19564
  chr5:102364820-102364850
  hypo

SEQ ID NO: 69971 - DNA, 81 bp, Homo sapiens
  chr5:103289776-103289857
  hypo
ccaggccggcggcgcccgcccgctaagagtgtgggtcccaccgagcccacgcccacccggaactccgcgctggcctgccag

SEQ ID NO: 69972 - DNA, 19 bp, Homo sapiens
  chr5:104382503-104382522
  hypo
cagacggctgcacatcagt

SEQ ID NO: 69973 - DNA, 2608 bp, Homo sapiens; identical to SEQ ID NO: 41820
  chr5:107005046-107007654
  hypo

SEQ ID NO: 69974 - DNA, 103 bp, Homo sapiens; identical to SEQ ID NO: 41821
  chr5:107007962-107008065
  hypo

SEQ ID NO: 69975 - DNA, 30 bp, Homo sapiens; identical to SEQ ID NO: 4132
  chr5:107141292-107141322
  hypo

SEQ ID NO: 69976 - DNA, 207 bp, Homo sapiens; identical to SEQ ID NO: 4133
  chr5:107359032-107359239
  hypo

SEQ ID NO: 69977 - DNA, 344 bp, Homo sapiens
  chr5:107703568-107703912
  hypo
tggaagtctaaacaaaggtcacgccagtacttgcaaaccaatgatgcggaaaggcaacgctcatccagtgacaaattggaaaatatctgtgaataaaaaacggtaccatataatatgtgctaaacattttcaaggcacaggaaaaggtttttattagttagaaaaagttaactttgtaaaaagaaaaccttcttgaataaaagaggccattattgtaagtcaccgtaagagatcaccttaaagagaaactatgatacaggagctaaaaacggactgatgttatattttctgtaagaagaggaggggaagagaacaggcatgtactgacacgtgttcatgcatat

SEQ ID NO: 69978 - DNA, 30 bp, Homo sapiens
  chr5:108666416-108666446
  hypo
gtccatagggcatacgacctcttaggagat

SEQ ID NO: 69979 - DNA, 39 bp, Homo sapiens; identical to SEQ ID NO: 19571
  chr5:108730037-108730076
  hypo

SEQ ID NO: 69980 - DNA, 30 bp, Homo sapiens; identical to SEQ ID NO: 19572
  chr5:108906276-108906306
  hypo

SEQ ID NO: 69981 - DNA, 30 bp, Homo sapiens; identical to SEQ ID NO: 4135
  chr5:109024882-109024912
  hypo

SEQ ID NO: 69982 - DNA, 30 bp, Homo sapiens
  chr5:109123832-109123862
  hypo
agcgaggagtttctacgtacttctccaata

SEQ ID NO: 69983 - DNA, 30 bp, Homo sapiens; identical to SEQ ID NO: 19574
  chr5:109162075-109162105
  hypo

SEQ ID NO: 69984 - DNA, 30 bp, Homo sapiens; identical to SEQ ID NO: 19575
  chr5:109162335-109162365
  hypo

SEQ ID NO: 69985 - DNA, 30 bp, Homo sapiens
  chr5:109221096-109221126
  hypo
gcccctggccagcccgcagactgccaacct

SEQ ID NO: 69986 - DNA, 293 bp, Homo sapiens; identical to SEQ ID NO: 41829
  chr5:110074562-110074855
  hypo

SEQ ID NO: 69987 - DNA, 31 bp, Homo sapiens; identical to SEQ ID NO: 4137
  chr5:110075104-110075135
  hypo

SEQ ID NO: 69988 - DNA, 30 bp, Homo sapiens
  chr5:110427056-110427086
  hypo
gttacgttagtcactcgacccaaaccttaa

SEQ ID NO: 69989 - DNA, 30 bp, Homo sapiens
  chr5:110427338-110427368
  hypo
aactgcccggactcccgtttgcattatgat

SEQ ID NO: 69990 - DNA, 570 bp, Homo sapiens; identical to SEQ ID NO: 4138
  chr5:110559548-110560118
  hypo

SEQ ID NO: 69991 - DNA, 436 bp, Homo sapiens; identical to SEQ ID NO: 41835
  chr5:110560138-110560574
  hypo

SEQ ID NO: 69992 - DNA, 20 bp, Homo sapiens
  chr5:110826285-110826305
  hypo
aactccgtcaaaaaaaaata

SEQ ID NO: 69993 - DNA, 1031 bp, Homo sapiens; identical to SEQ ID NO: 41837
  chr5:110847624-110848655
  hypo

SEQ ID NO: 69994 - DNA, 123 bp, Homo sapiens; identical to SEQ ID NO: 19582
  chr5:111065739-111065862
  hypo

SEQ ID NO: 69995 - DNA, 30 bp, Homo sapiens; identical to SEQ ID NO: 4142
  chr5:111093898-111093928
  hypo

SEQ ID NO: 69996 - DNA, 20 bp, Homo sapiens
  chr5:111160054-111160074
  hypo
gactccgtctcaaaaaataa

SEQ ID NO: 69997 - DNA, 30 bp, Homo sapiens
  chr5:111504743-111504773
  hypo
actggcggtaacttcgtggcgaatgagaat

SEQ ID NO: 69998 - DNA, 124 bp, Homo sapiens
  chr5:111675708-111675832
  hypo
ggaacagagaaccagaactcccgattagggccccatgtggttccctcatatccaatgctcacagcagcatgagaaaagtcacggaggagagcccatcgaccccgccctttcaacaaagtgttaa

SEQ ID NO: 69999 - DNA, 30 bp, Homo sapiens; identical to SEQ ID NO: 19585
  chr5:112094580-112094610
  hypo

SEQ ID NO: 70000 - DNA, 30 bp, Homo sapiens; identical to SEQ ID NO: 4145
  chr5:112175624-112175654
  hypo

SEQ ID NO: 70001 - DNA, 31 bp, Homo sapiens; identical to SEQ ID NO: 19587
  chr5:112255823-112255854
  hypo

SEQ ID NO: 70002 - DNA, 31 bp, Homo sapiens
  chr5:112308701-112308732
  hypo
gattacaggcgacctcactcaatttaaaagg

SEQ ID NO: 70003 - DNA, 18 bp, Homo sapiens
  chr5:112340528-112340546
  hypo
aatatactgggcttggcc

SEQ ID NO: 70004 - DNA, 30 bp, Homo sapiens
  chr5:112930105-112930135
  hypo
ctaaagcctgcaagcgccacaattctaagt

SEQ ID NO: 70005 - DNA, 30 bp, Homo sapiens; identical to SEQ ID NO: 41857
  chr5:114506052-114506082
  hypo

SEQ ID NO: 70006 - DNA, 292 bp, Homo sapiens; identical to SEQ ID NO: 41858
  chr5:114506294-114506586
  hypo

SEQ ID NO: 70007 - DNA, 30 bp, Homo sapiens; identical to SEQ ID NO: 41859
  chr5:114506853-114506883
  hypo

SEQ ID NO: 70008 - DNA, 30 bp, Homo sapiens
  chr5:114527362-114527392
  hypo
tatgattttgctattcgtatatatcaaagc

SEQ ID NO: 70009 - DNA, 30 bp, Homo sapiens
  chr5:114849104-114849134
  hypo
gtacaccataagagcgtttgccgacgctct

SEQ ID NO: 70010 - DNA, 31 bp, Homo sapiens; identical to SEQ ID NO: 4161
  chr5:114879309-114879340
  hypo

SEQ ID NO: 70011 - DNA, 201 bp, Homo sapiens; identical to SEQ ID NO: 19589
  chr5:115570378-115570579
  hypo

SEQ ID NO: 70012 - DNA, 101 bp, Homo sapiens
  chr5:115717686-115717787
  hypo
catcactgagcagcaaggctgcgtggatctaaagcgggatgagatgaggtaaaaacatccaaaattgaagtaaaatattcgacaatgtacatattcatgtg

SEQ ID NO: 70013 - DNA, 560 bp, Homo sapiens
  chr5:115783166-115783726
  hypo
tgctttaatgagcatcttggccgtgttgccgggagtggcgagcttgccgttgtgcatgagtggcgtgaggatggcctccggctttgggtctttggattgagtgtccccaaagaggccgctgagcttggtgacgctgctcatggagccccggcgcgagtgggtgagctccttctccttgcgctgcaccacagccacgtctttgcgccgatgatcacagacgcagtagacggtgatgcccgagaagacggcccccatgacgaaagccaggatgactgcaatggccaagagggtgacgggaaccagctggtcgtggcctttgaggtaactttcccgaatcactcctgcaatagacatcgcatatggcgttaagaaatgaaagcacaccccgaggcttgtttttgcttggcattcaccttgttaattaataacagtagtaagtgacaacagcacctctgcacaacttgtcttccaagctcagcttgccaaacattaaccaattaatcctccccaagcccctcgtgtgcagtatgtaaatggactccatttgtagccttctttgt

SEQ ID NO: 70014 - DNA, 39 bp, Homo sapiens
  chr5:116177881-116177920
  hypo
gtttaagatattgaatctggccgggcgcggtggctcacg

SEQ ID NO: 70015 - DNA, 34 bp, Homo sapiens
  chr5:116238694-116238728
  hypo
agtgtgagccaccgtgcctggcctgaagttcata

SEQ ID NO: 70016 - DNA, 157 bp, Homo sapiens
  chr5:118309318-118309475
  hypo
agcctccttgctcgcggcagcctccttgctcgcggcagcctccttgctcgccgcagccgcctccgccacgcgcctcctccgccgccgcggactccggcagctttatcgccagagtccctgaactctcgctttctttttaatcgcctgcatcggatca

SEQ ID NO: 70017 - DNA, 31 bp, Homo sapiens; identical to SEQ ID NO: 19592
  chr5:118420252-118420283
  hypo

SEQ ID NO: 70018 - DNA, 36 bp, Homo sapiens; identical to SEQ ID NO: 19593
  chr5:118461527-118461563
  hypo

SEQ ID NO: 70019 - DNA, 30 bp, Homo sapiens
  chr5:118579739-118579769
  hypo
ttctgagtactccaccgaggctggtacgga

SEQ ID NO: 70020 - DNA, 30 bp, Homo sapiens
  chr5:118580240-118580270
  hypo
tgttacaggatctgccgaaggcaatataaa

SEQ ID NO: 70021 - DNA, 35 bp, Homo sapiens
  chr5:118717628-118717663
  hypo
aaaaaacaccgaacaaaaaacggagtacctttgta

SEQ ID NO: 70022 - DNA, 31 bp, Homo sapiens
  chr5:120004769-120004800
  hypo
aactctgtggtgactgcgtgtaatgacactg

SEQ ID NO: 70023 - DNA, 132 bp, Homo sapiens
  chr5:121187430-121187562
  hypo
tctgcgctggcctccgcctagactgcgccccacgcgggtccccagagcccccggcggcgcttccccagcgccctccgcgtggaaccccgcgcctctggaacagaaggggcgtgtgacgcagtcaccgttgcc

SEQ ID NO: 70024 - DNA, 150 bp, Homo sapiens; identical to SEQ ID NO: 19595
  chr5:121187994-121188144
  hypo

SEQ ID NO: 70025 - DNA, 30 bp, Homo sapiens; identical to SEQ ID NO: 41885
  chr5:121263545-121263575
  hypo

SEQ ID NO: 70026 - DNA, 30 bp, Homo sapiens; identical to SEQ ID NO: 19596
  chr5:121478913-121478943
  hypo

SEQ ID NO: 70027 - DNA, 31 bp, Homo sapiens
  chr5:121495181-121495212
  hypo
tttctcgatgaaatatcgggcaatcttatca

SEQ ID NO: 70028 - DNA, 1042 bp, Homo sapiens; identical to SEQ ID NO: 41887
  chr5:121647527-121648569
  hypo

SEQ ID NO: 70029 - DNA, 166 bp, Homo sapiens
  chr5:121874456-121874622
  hypo
agagcaagactccgtttcaaaaaaaaaagaagaatattcttttgttagacgtggccctcacgacagataccatgtggtatcctcagccctaagagcagaggactaatgaatataaaataatgccataattcctgccataaaaataagctttcggaacacacttctg

SEQ ID NO: 70030 - DNA, 204 bp, Homo sapiens
  chr5:121906793-121906997
  hypo
tcctgactgagctttacgatggcccatggggattctgcatacacatgtgtacaaggtaagtgcaaaaagtataaaactaggaagtgcacattgaaatcaggggaaaaaatacacccaacaaagtgtgctgttgttaggagatgcgccatagctttcaccctccatgctgtctgccgcagcgcctcacaccgtaggtaaatggag

SEQ ID NO: 70031 - DNA, 31 bp, Homo sapiens; identical to SEQ ID NO: 19598
  chr5:122116620-122116651
  hypo

SEQ ID NO: 70032 - DNA, 42 bp, Homo sapiens
  chr5:122150759-122150801
  hypo
aatgggattagatgagtaatcgagaatcatcaaatagttgac

SEQ ID NO: 70033 - DNA, 30 bp, Homo sapiens; identical to SEQ ID NO: 19599
  chr5:122152725-122152755
  hypo

SEQ ID NO: 70034 - DNA, 44 bp, Homo sapiens
  chr5:122179758-122179802
  hypo
gacaggcatgagccaccgcgcccggccatgtgattgttatagag

SEQ ID NO: 70035 - DNA, 39 bp, Homo sapiens
  chr5:122189086-122189125
  hypo
gctgggattacaggcgtgagccaccgcgcccggcggtat

SEQ ID NO: 70036 - DNA, 254 bp, Homo sapiens; identical to SEQ ID NO: 4180
  chr5:122425701-122425955
  hypo

SEQ ID NO: 70037 - DNA, 656 bp, Homo sapiens; identical to SEQ ID NO: 4181
  chr5:122426004-122426660
  hypo

SEQ ID NO: 70038 - DNA, 32 bp, Homo sapiens
  chr5:122906338-122906370
  hypo
cgcgcccagccgacagtcctttcattgaagaa

SEQ ID NO: 70039 - DNA, 89 bp, Homo sapiens
  chr5:123929399-123929488
  hypo
attacaggcgtgagccaccctgcccggcaccctgacatagtttttattatgactaatatattacttataattatcgttgatttacttgc

SEQ ID NO: 70040 - DNA, 165 bp, Homo sapiens; identical to SEQ ID NO: 41909
  chr5:124084137-124084302
  hypo

SEQ ID NO: 70041 - DNA, 417 bp, Homo sapiens; identical to SEQ ID NO: 4187
  chr5:124084645-124085062
  hypo

SEQ ID NO: 70042 - DNA, 25 bp, Homo sapiens
  chr5:124128184-124128209
  hypo
tttttttttttttttttgagacgga

SEQ ID NO: 70043 - DNA, 145 bp, Homo sapiens
  chr5:124128448-124128593
  hypo
gctgggattacaggtgtgagctaccgcgcccggccgatcacatgctttttacacattcacttccatgtcctcatcagaagcactcacactaccgtcaaacatttaaggttaaaacaaagattacgttatgtgtagcagttaccca

SEQ ID NO: 70044 - DNA, 20 bp, Homo sapiens
  chr5:125400286-125400306
  hypo
ccaccgcgcccggccgagct

SEQ ID NO: 70045 - DNA, 23 bp, Homo sapiens
  chr5:125870914-125870937
  hypo
agaggagggggagcacgcaggag

SEQ ID NO: 70046 - DNA, 40 bp, Homo sapiens; identical to SEQ ID NO: 19604
  chr5:125911665-125911705
  hypo

SEQ ID NO: 70047 - DNA, 175 bp, Homo sapiens
  chr5:126073558-126073733
  hypo
ccttttctttagaacccgatccaatagcgactactcgcttgcagtacttttccttgagatttttctggaagcataatgcctcctttggttacagtttcggcagtactcctttcaaccgatactcggtcagagtggaagaaagtttctaaaggtttgtcccgacatgactccctcc

SEQ ID NO: 70048 - DNA, 31 bp, Homo sapiens
  chr5:126139595-126139626
  hypo
aaaatattagggaggccgttatttattgtta

SEQ ID NO: 70049 - DNA, 30 bp, Homo sapiens; identical to SEQ ID NO: 19606
  chr5:126193455-126193485
  hypo

SEQ ID NO: 70050 - DNA, 248 bp, Homo sapiens
  chr5:126213743-126213991
  hypo
gctcccgccagcaatcgaaggtctgttttctaccgggcaggtgagatgtgttacagacaagaggaaaggcttgtgccagctgtgaggctgccagctccaaatggcctgaaccccagccacggcccatacttactagtgtccaaaagaggtaaatagtgaagagtgcgacagtgagtgcaatcagtccgacggcttccagccgactactaaagtgcaggtggtccacggcgccccgcaggcacagccag

SEQ ID NO: 70051 - DNA, 304 bp, Homo sapiens
  chr5:126250499-126250803
  hypo
acacagtcacatagctattaccgtgcttcagtaaagctgtacagggcttgtgatccaggcataaaaacagacatcatttgctcattagagctaagttttcaggacgtgccccacttactgacctccactaacggcctgggtttgcgctcgactgcaaacctgaagtggcagagttcacagtagctggtgtttgaggatgacagccagtgctccaggcagctccgatgaattgtccccaaggtccctgtacattcacatggagagagcaagtcctcttggctgctgccctcgtggcagatcctgc

SEQ ID NO: 70052 - DNA, 31 bp, Homo sapiens; identical to SEQ ID NO: 19608
  chr5:126260014-126260045
  hypo

SEQ ID NO: 70053 - DNA, 20 bp, Homo sapiens
  chr5:126338839-126338859
  hypo
gaggtggaagcttggtaagt

SEQ ID NO: 70054 - DNA, 19 bp, Homo sapiens
  chr5:126339398-126339417
  hypo
gccagaggagtatacaacc

SEQ ID NO: 70055 - DNA, 41 bp, Homo sapiens
  chr5:126479574-126479615
  hypo
ctgtcccgctgcacagcgcagggaggcggcccacagcgcgc

SEQ ID NO: 70056 - DNA, 25 bp, Homo sapiens
  chr5:127091573-127091598
  hypo
ctgcactttgggaggctgaggcggg

SEQ ID NO: 70057 - DNA, 22 bp, Homo sapiens
  chr5:127344554-127344576
  hypo
cgagcgtggtggctcacgcctg

SEQ ID NO: 70058 - DNA, 43 bp, Homo sapiens
  chr5:127808516-127808559
  hypo
ttttatgcaatgtgtgttttacgacaatcttaaaaataaatat

SEQ ID NO: 70059 - DNA, 253 bp, Homo sapiens; identical to SEQ ID NO: 41921
  chr5:127873552-127873805
  hypo

SEQ ID NO: 70060 - DNA, 497 bp, Homo sapiens; identical to SEQ ID NO: 41922
  chr5:127873980-127874477
  hypo

SEQ ID NO: 70061 - DNA, 1894 bp, Homo sapiens; identical to SEQ ID NO: 41927
  chr5:128795583-128797477
  hypo

SEQ ID NO: 70062 - DNA, 30 bp, Homo sapiens; identical to SEQ ID NO: 4200
  chr5:129196622-129196652
  hypo

SEQ ID NO: 70063 - DNA, 1132 bp, Homo sapiens; identical to SEQ ID NO: 41929
  chr5:129239802-129240934
  hypo

SEQ ID NO: 70064 - DNA, 635 bp, Homo sapiens; identical to SEQ ID NO: 4202
  chr5:129240962-129241597
  hypo

SEQ ID NO: 70065 - DNA, 30 bp, Homo sapiens
  chr5:129353640-129353670
  hypo
tgaggttaacagacgcgtaattcctttgta

SEQ ID NO: 70066 - DNA, 208 bp, Homo sapiens
  chr5:130330904-130331112
  hypo
ggagttccagaaagccaaggccggctccacaggcacccgaccccggcctgaagcgcaggtctcctcctgaggcccgacaaccacctgccccgcctcgtcctcgcctgtgtcccccccgtcatccccgctccaggcgcccccggggagccagcctccgcagccaccgtcaagaggaagccgaagagccggtggaggcctgaagagaaca

SEQ ID NO: 70067 - DNA, 30 bp, Homo sapiens
  chr5:130331754-130331784
  hypo
tccaaggaagacggcgagaactaggccttc

SEQ ID NO: 70068 - DNA, 27 bp, Homo sapiens
  chr5:130530661-130530688
  hypo
gcaaaataaaattggccgggatcgctg

SEQ ID NO: 70069 - DNA, 98 bp, Homo sapiens; identical to SEQ ID NO: 19617
  chr5:130636509-130636607
  hypo

SEQ ID NO: 70070 - DNA, 66 bp, Homo sapiens; identical to SEQ ID NO: 19618
  chr5:130661705-130661771
  hypo

SEQ ID NO: 70071 - DNA, 22 bp, Homo sapiens
  chr5:130708432-130708454
  hypo
cggatttgaattccagagctgg

SEQ ID NO: 70072 - DNA, 43 bp, Homo sapiens; identical to SEQ ID NO: 19619
  chr5:130723957-130724000
  hypo

SEQ ID NO: 70073 - DNA, 43 bp, Homo sapiens
  chr5:130951289-130951332
  hypo
tgtagctttcaagagggaagtcggctgggtacagtggctcaca

SEQ ID NO: 70074 - DNA, 30 bp, Homo sapiens
  chr5:130958305-130958335
  hypo
tatagtcaagctcatcgagttgggaatctc

SEQ ID NO: 70075 - DNA, 56 bp, Homo sapiens; identical to SEQ ID NO: 4203
  chr5:130970374-130970430
  hypo

SEQ ID NO: 70076 - DNA, 30 bp, Homo sapiens
  chr5:130972859-130972889
  hypo
tttttttttttttttttgagacggagtttt

SEQ ID NO: 70077 - DNA, 31 bp, Homo sapiens; identical to SEQ ID NO: 19621
  chr5:131037382-131037413
  hypo

SEQ ID NO: 70078 - DNA, 198 bp, Homo sapiens; identical to SEQ ID NO: 41936
  chr5:131133197-131133395
  hypo

SEQ ID NO: 70079 - DNA, 56 bp, Homo sapiens
  chr5:131410605-131410661
  hypo
agcagcactgccctccaaccccggtgagtgcctacggcagggcctccagcaggaat

SEQ ID NO: 70080 - DNA, 278 bp, Homo sapiens; identical to SEQ ID NO: 41939
  chr5:131563558-131563836
  hypo

SEQ ID NO: 70081 - DNA, 447 bp, Homo sapiens
  chr5:131607828-131608275
  hypo
ctactgtgagagccacgccaaggcgcgcgtgaagccgcccgagggctacgacgtggtggcggtgtaccccaatgccaaggtggaactcgtctgagctgggaccctgctcccacgcctgcttcttaaggtccctgctcggccggtgtaaatatgtttcaccctgtccctctaataaagctcctctgctccaccttgaacctgtcacctggcctgccaccctcctgcgcaggccatgcatggctcccgagtacagtagtatctgcttaggtgccaggcatgtcctaggctctgggtgcagtagtgagcaggacgggtaccatgctgccctgaagggggccacagcctgggtggaaggcagacctgaatcacaacgggccagctctagtaatacgaaggtgaggtctgggatgctgcgtgcggcgcgacgacaggaggtatgacctgggt

SEQ ID NO: 70082 - DNA, 325 bp, Homo sapiens
  chr5:131609887-131610212
  hypo
cccaaggggtcagactgtgtgcgttgaggccctgagggcgccccaccgtagcgctgcgcaggtgtgcacgcacacacgctccctgcagccacacccaaatagggtggggtggtggaggagtctgcccttgcctgcccaccctgcctccgctgacttggtcccagccccacccagtcataggtgggagaggagaggatgactggcacccaggaaagcagggaagcattattaagcacaggagtgggtggaaaaataccgggagccatgggccctggcccccacctctcactcccactcacccgcagaaactcgactctcccactgg

SEQ ID NO: 70083 - DNA, 30 bp, Homo sapiens; identical to SEQ ID NO: 19626
  chr5:131658146-131658176
  hypo

SEQ ID NO: 70084 - DNA, 75 bp, Homo sapiens
  chr5:131712865-131712940
  hypo
ccaacccctctgagaggtgcccggaggctgtgcgcccacactgcccagcagtgcggagaagcaggcttgtttttc

SEQ ID NO: 70085 - DNA, 132 bp, Homo sapiens
  chr5:131725263-131725395
  hypo
gaaacatgtccaagtgcacatcgctagcttttgctcagcggccgaaccctgggattctaggcgacttctggagcctggtgggttagcggtgagaagatgggcgaggagggcggacttcatctcagagtcctt

SEQ ID NO: 70086 - DNA, 30 bp, Homo sapiens
  chr5:131787265-131787295
  hypo
gcctcttttagcggccgagacagcctgact

SEQ ID NO: 70087 - DNA, 30 bp, Homo sapiens
  chr5:131806578-131806608
  hypo
tcaggtgttaaagacggtcttcatttctct

SEQ ID NO: 70088 - DNA, 239 bp, Homo sapiens; identical to SEQ ID NO: 4211
  chr5:131831521-131831760
  hypo

SEQ ID NO: 70089 - DNA, 30 bp, Homo sapiens
  chr5:131835741-131835771
  hypo
cgtatgtcatacctcgagtaagaggcaaag

SEQ ID NO: 70090 - DNA, 31 bp, Homo sapiens; identical to SEQ ID NO: 19629
  chr5:131982534-131982565
  hypo

SEQ ID NO: 70091 - DNA, 46 bp, Homo sapiens
  chr5:131991176-131991222
  hypo
attacaggcgtgagccaccgcgcccggcctataaacaacctttaaa

SEQ ID NO: 70092 - DNA, 160 bp, Homo sapiens; identical to SEQ ID NO: 19630
  chr5:132001669-132001829
  hypo

SEQ ID NO: 70093 - DNA, 220 bp, Homo sapiens
  chr5:132095766-132095986
  hypo
agcccctgtgggaagccgctttcctcccttaagccctgcgggcccttcagaacagctgtgtggtgaccagtctccaggaggccagtgttggctggcgcgagtgcccgcagttctccatcaccacctgccagccaatacgggctccacaccactgccccacagactgaggagggatgcgccacaggtgtccaagcagaaaccaccacggcttttggaatct

SEQ ID NO: 70094 - DNA, 30 bp, Homo sapiens
  chr5:132097213-132097243
  hypo
agagctcgtagtgccggctgtgggtctgct

SEQ ID NO: 70095 - DNA, 30 bp, Homo sapiens; identical to SEQ ID NO: 19632
  chr5:132110953-132110983
  hypo

SEQ ID NO: 70096 - DNA, 30 bp, Homo sapiens; identical to SEQ ID NO: 19633
  chr5:132167161-132167191
  hypo

SEQ ID NO: 70097 - DNA, 30 bp, Homo sapiens; identical to SEQ ID NO: 19634
  chr5:132204383-132204413
  hypo

SEQ ID NO: 70098 - DNA, 30 bp, Homo sapiens
  chr5:132232571-132232601
  hypo
tcttcaggcctccacgaggctcttcagcag

SEQ ID NO: 70099 - DNA, 39 bp, Homo sapiens; identical to SEQ ID NO: 19635
  chr5:132267349-132267388
  hypo

SEQ ID NO: 70100 - DNA, 30 bp, Homo sapiens
  chr5:132295360-132295390
  hypo
ttactgccctcttccgtgtactagagtatc

SEQ ID NO: 70101 - DNA, 30 bp, Homo sapiens
  chr5:132322088-132322118
  hypo
aggcatgagcctccgcgccccgccagtact

SEQ ID NO: 70102 - DNA, 31 bp, Homo sapiens; identical to SEQ ID NO: 19636
  chr5:132370349-132370380
  hypo

SEQ ID NO: 70103 - DNA, 31 bp, Homo sapiens
  chr5:132383280-132383311
  hypo
ggcctggtgtgggatccgggtgggagtgggt

SEQ ID NO: 70104 - DNA, 321 bp, Homo sapiens; identical to SEQ ID NO: 41956
  chr5:132387333-132387654
  hypo

SEQ ID NO: 70105 - DNA, 30 bp, Homo sapiens
  chr5:132391934-132391964
  hypo
ttgaagagcagccacgactctttcagctgc

SEQ ID NO: 70106 - DNA, 29 bp, Homo sapiens
  chr5:132399903-132399932
  hypo
attctgagtcctggccaggtgcggtggct

SEQ ID NO: 70107 - DNA, 31 bp, Homo sapiens; identical to SEQ ID NO: 19638
  chr5:132448250-132448281
  hypo

SEQ ID NO: 70108 - DNA, 31 bp, Homo sapiens; identical to SEQ ID NO: 19639
  chr5:132584999-132585030
  hypo

SEQ ID NO: 70109 - DNA, 43 bp, Homo sapiens
  chr5:132585270-132585313
  hypo
gcagagggaaaggaggaggcacggtcaggtgcaggcccaggga

SEQ ID NO: 70110 - DNA, 31 bp, Homo sapiens; identical to SEQ ID NO: 19640
  chr5:132607917-132607948
  hypo

SEQ ID NO: 70111 - DNA, 207 bp, Homo sapiens
  chr5:132654499-132654706
  hypo
ctggaccttggtggggcgtaaaccacttctgagctgcctgctgccctgggcaagattcctttctgggagcctcttatttcgtctcaggaccccagtggccaggctggcctaagcatggagagcgccctgggagttcttggggtcaccagctggcaaacccatttctcaagtctgtagagctacacggactggcgtccccctgtgagc

SEQ ID NO: 70112 - DNA, 198 bp, Homo sapiens
  chr5:132664449-132664647
  hypo
caccaggcagggaagtcggaggggatatgggagtgtgggtgccttctccacctcctgtttaattttattaattttgtttccaagacttccttgggaggctgcatcctcccaaacatctaactaaggggaaaaggccggctgtggagctggcagtaactttgctcagcgtcagcgaggcaatggcgtcagtgatgtcca

SEQ ID NO: 70113 - DNA, 31 bp, Homo sapiens
  chr5:132738534-132738565
  hypo
cactttgctaattgttcgcatgtcaccatga

SEQ ID NO: 70114 - DNA, 30 bp, Homo sapiens
  chr5:132784881-132784911
  hypo
ggggtagggtggcctcgccctgcactgccc

SEQ ID NO: 70115 - DNA, 30 bp, Homo sapiens
  chr5:132785322-132785352
  hypo
accccaggcggggtccgaggtgaggggtga

SEQ ID NO: 70116 - DNA, 31 bp, Homo sapiens
  chr5:133034437-133034468
  hypo
atctggagctctcaagcgtctcacagcaatg

SEQ ID NO: 70117 - DNA, 31 bp, Homo sapiens
  chr5:133237867-133237898
  hypo
tgctaagggccaggcacggtggctcacgcct

SEQ ID NO: 70118 - DNA, 93 bp, Homo sapiens; identical to SEQ ID NO: 19641
  chr5:133240404-133240497
  hypo

SEQ ID NO: 70119 - DNA, 43 bp, Homo sapiens
  chr5:133280964-133281007
  hypo
ctacttattcatgtatcttttcgtttgtttgtttgtttgagac

SEQ ID NO: 70120 - DNA, 191 bp, Homo sapiens
  chr5:133362903-133363094
  hypo
ctgcaaagtgctgagacgtccctggatcaggggcccctggataggatgatcccagccctcctccctctcccgccccatcagcagccatgagaggggctcccgttgcctccttcacctgcaggtctccctcagacccactgcttcatgaccagttcccgagcagcaaggtgtgcaggcgctgtgccgggccc

SEQ ID NO: 70121 - DNA, 31 bp, Homo sapiens
  chr5:133363360-133363391
  hypo
atttgtttcaattacccgtgatcttctccct

SEQ ID NO: 70122 - DNA, 101 bp, Homo sapiens
  chr5:133422877-133422978
  hypo
tttcatgctggggttcgcgtccctcctctgtttggcataaagagagtggaacagatcaggccctcagatctgtgtgcacctgcggtcgctgcaaggagggg

SEQ ID NO: 70123 - DNA, 18 bp, Homo sapiens
  chr5:133423247-133423265
  hypo
taaaaacaaaaagagcgg

SEQ ID NO: 70124 - DNA, 199 bp, Homo sapiens
  chr5:133456099-133456298
  hypo
ctcttgcagtgaagtcgaagccactcatcacagccgagtgcctgggtggcccccgccagccgcccctcatcacctgcaccagcctcttgctgtctccctgacagcagtcccctccctgtcctagggggtcttacagccagcaacttctttccaccccaggactcttgcactgcttccctccgctcggaagtctcttccc

SEQ ID NO: 70125 - DNA, 91 bp, Homo sapiens; identical to SEQ ID NO: 19643
  chr5:133457287-133457378
  hypo

SEQ ID NO: 70126 - DNA, 142 bp, Homo sapiens
  chr5:133458995-133459137
  hypo
cttgggtccataccccgactgagccccttctctatacttcgcctggctcagcatgtggcgggctccctctgcccttccagagctcagtcctgggagacaaagagactttcactgggagcctctaagtcggctctgagattct

SEQ ID NO: 70127 - DNA, 208 bp, Homo sapiens; identical to SEQ ID NO: 19644
  chr5:133459374-133459582
  hypo

SEQ ID NO: 70128 - DNA, 30 bp, Homo sapiens; identical to SEQ ID NO: 19645
  chr5:133461918-133461948
  hypo

SEQ ID NO: 70129 - DNA, 21 bp, Homo sapiens
  chr5:133462599-133462620
  hypo
aaagatcgtacaagccaagaa

SEQ ID NO: 70130 - DNA, 30 bp, Homo sapiens
  chr5:133463790-133463820
  hypo
ccttacactccgttgcgtctttggccgcgc

SEQ ID NO: 70131 - DNA, 78 bp, Homo sapiens; identical to SEQ ID NO: 19647
  chr5:133464193-133464271
  hypo

SEQ ID NO: 70132 - DNA, 30 bp, Homo sapiens; identical to SEQ ID NO: 19648
  chr5:133464829-133464859
  hypo

SEQ ID NO: 70133 - DNA, 208 bp, Homo sapiens; identical to SEQ ID NO: 19649
  chr5:133465709-133465917
  hypo

SEQ ID NO: 70134 - DNA, 111 bp, Homo sapiens; identical to SEQ ID NO: 19650
  chr5:133469214-133469325
  hypo

SEQ ID NO: 70135 - DNA, 30 bp, Homo sapiens; identical to SEQ ID NO: 19651
  chr5:133533231-133533261
  hypo

SEQ ID NO: 70136 - DNA, 20 bp, Homo sapiens
  chr5:133547175-133547195
  hypo
tttttttttgagacagagtt

SEQ ID NO: 70137 - DNA, 31 bp, Homo sapiens
  chr5:133665434-133665465
  hypo
caggcgtgagccaccacgctgttaattaatt

SEQ ID NO: 70138 - DNA, 18 bp, Homo sapiens
  chr5:133682095-133682113
  hypo
tttgttaaatttgtcacg

SEQ ID NO: 70139 - DNA, 18 bp, Homo sapiens
  chr5:133682472-133682490
  hypo
caccgtgcccagccggga

SEQ ID NO: 70140 - DNA, 16 bp, Homo sapiens
  chr5:133703365-133703381
  hypo
agatggttcttaaatc

SEQ ID NO: 70141 - DNA, 30 bp, Homo sapiens
  chr5:133703715-133703745
  hypo
tctcgctatgcttccgctaaataagaggaa

SEQ ID NO: 70142 - DNA, 33 bp, Homo sapiens
  chr5:133730847-133730880
  hypo
aagagcaaagggggctgggtgcggtggctcatg

SEQ ID NO: 70143 - DNA, 30 bp, Homo sapiens; identical to SEQ ID NO: 4216
  chr5:133784545-133784575
  hypo

SEQ ID NO: 70144 - DNA, 14 bp, Homo sapiens
  chr5:133818629-133818643
  hypo
tctcgccctgtcgc

SEQ ID NO: 70145 - DNA, 241 bp, Homo sapiens
  chr5:133819199-133819440
  hypo
ctgggattacagacgtaagccaccgcgcccggcctgaataattttttaaaggtcacttttatcaaactggaaatgtaaagaagctgtcttgattatataaaggctgtctttaaagaaataaaacaaggattatacctcgtggtaaaacaatgaaagttttccctttgaaaactggaacaaaacagagacattcattactacatttttttttttttttttttgagactcccgtctcgccctg

SEQ ID NO: 70146 - DNA, 103 bp, Homo sapiens; identical to SEQ ID NO: 19655
  chr5:133820038-133820141
  hypo

SEQ ID NO: 70147 - DNA, 31 bp, Homo sapiens; identical to SEQ ID NO: 19656
  chr5:133823804-133823835
  hypo

SEQ ID NO: 70148 - DNA, 183 bp, Homo sapiens
  chr5:133845347-133845530
  hypo
aactgagtgagatttgagtgacgaaaaggagcagacaaagacaacagcgagtacaaaggccctgaggcaggaacgagcttggcatgatcaagaactgaaaagagcacaggggaggctgcagcacagtgaaagagaggtcagtgataggacatgcgattagacggggcccactagacaatccag

SEQ ID NO: 70149 - DNA, 903 bp, Homo sapiens; identical to SEQ ID NO: 4217
  chr5:133862722-133863625
  hypo

SEQ ID NO: 70150 - DNA, 241 bp, Homo sapiens; identical to SEQ ID NO: 19658
  chr5:133907491-133907732
  hypo

SEQ ID NO: 70151 - DNA, 136 bp, Homo sapiens
  chr5:133914458-133914594
  hypo
ccaccaccgcaggacgggcctggttcacggacgactccagacaaagcccccaagaagacctggggccaggatgcaggcagtggcaaggggggtcaagggccacctaccaggaagccaccacgtcggacatcttctc

SEQ ID NO: 70152 - DNA, 39 bp, Homo sapiens; identical to SEQ ID NO: 19659
  chr5:133984528-133984567
  hypo

SEQ ID NO: 70153 - DNA, 25 bp, Homo sapiens
  chr5:134085042-134085067
  hypo
ccgctgcacccggccaactataggt

SEQ ID NO: 70154 - DNA, 92 bp, Homo sapiens
  chr5:134202025-134202117
  hypo
cagctcccatatcaaacaagacgtaagtcagtatcctcaaggaactcgtattacaaaacaaatgccagtcgggcgcggtggctcacgcctgt

SEQ ID NO: 70155 - DNA, 137 bp, Homo sapiens
  chr5:134242165-134242302
  hypo
tagaagaaatttaaaatagctcgaagacggaggaagataggcactccgccgcttcttgtccacgaaggggagaacacaagttgagtgcctactgtcacctaggcgtgtcttcaggcgtactctgccccaggtgctag

SEQ ID NO: 70156 - DNA, 40 bp, Homo sapiens
  chr5:134256616-134256656
  hypo
aagtgttgggaatacaggcgttgagcccagctgctgaggc

SEQ ID NO: 70157 - DNA, 158 bp, Homo sapiens; identical to SEQ ID NO: 19661
  chr5:134278931-134279089
  hypo

SEQ ID NO: 70158 - DNA, 30 bp, Homo sapiens; identical to SEQ ID NO: 19662
  chr5:134303557-134303587
  hypo

SEQ ID NO: 70159 - DNA, 31 bp, Homo sapiens
  chr5:134331950-134331981
  hypo
ctacccctgtagttctcggagatcttctttg

SEQ ID NO: 70160 - DNA, 31 bp, Homo sapiens; identical to SEQ ID NO: 19663
  chr5:134343157-134343188
  hypo

SEQ ID NO: 70161 - DNA, 61 bp, Homo sapiens; identical to SEQ ID NO: 41977
  chr5:134370267-134370328
  hypo

SEQ ID NO: 70162 - DNA, 224 bp, Homo sapiens
  chr5:134436702-134436926
  hypo
tgtaaaatcacttggccgggtctgtgggtgcagatttccatcattagcctgtcttcgctgtaggcctcgctttggtgcttttcccttggtccttctgcacagcggcactgacatctcccttttttccacagatggaaattctggctgatcttgaaggctcagctcaaatcttcatctggctctttttcgaagtcttctctacctggcctcgtccgaagctcagg

SEQ ID NO: 70163 - DNA, 31 bp, Homo sapiens
  chr5:134440294-134440325
  hypo
gatatgttttgtggctcgctggtcctgggag

SEQ ID NO: 70164 - DNA, 187 bp, Homo sapiens; identical to SEQ ID NO: 19666
  chr5:134453699-134453886
  hypo

SEQ ID NO: 70165 - DNA, 43 bp, Homo sapiens
  chr5:134462415-134462458
  hypo
tctgtaagtggtccaggaggccgcctggtcaggacatggtcac

SEQ ID NO: 70166 - DNA, 220 bp, Homo sapiens; identical to SEQ ID NO: 41982
  chr5:134463604-134463824
  hypo

SEQ ID NO: 70167 - DNA, 31 bp, Homo sapiens
  chr5:134468970-134469001
  hypo
gtagtgtgtccagcagcgctgcccagtgatg

SEQ ID NO: 70168 - DNA, 30 bp, Homo sapiens; identical to SEQ ID NO: 41983
  chr5:134499076-134499106
  hypo

SEQ ID NO: 70169 - DNA, 155 bp, Homo sapiens; identical to SEQ ID NO: 19668
  chr5:134513709-134513864
  hypo

SEQ ID NO: 70170 - DNA, 31 bp, Homo sapiens; identical to SEQ ID NO: 19669
  chr5:134547962-134547993
  hypo

SEQ ID NO: 70171 - DNA, 299 bp, Homo sapiens
  chr5:134579599-134579898
  hypo
ccctgaactccactggtgccccgcttgtcatgcacagccccgtcagagccggctccctgggctgaggggctgccctgtgctcctctgagtccccggccgagcgcaccgaattatgtaatgctgctgagccaacatttacgcgtctcagccaatttgctggcctagagttacactgtgcagatgctctgccttacggcttgcttttgtctcggaggccgtaagcagatagcataaccctgcttaccattagacatttcgcaaatcatctaggctcgagcgtgctgcagccagacagttca

SEQ ID NO: 70172 - DNA, 87 bp, Homo sapiens; identical to SEQ ID NO: 19670
  chr5:134582970-134583057
  hypo

SEQ ID NO: 70173 - DNA, 166 bp, Homo sapiens
  chr5:134583072-134583238
  hypo
ctaggaacggctaggacctcccagggtttgccttgtgcccatggaaccagcagttccgccccaagggaagccagccgtgtgtcctagtgccggaatgatggggtaatgccagtgagccgccccttctccacagggtactgagaacgaggccaggcagcagctgtcc

SEQ ID NO: 70174 - DNA, 205 bp, Homo sapiens
  chr5:134585644-134585849
  hypo
gcttcttgataggcaccgccatgttggggatggacctctgtgcccatggtccactcgggggctcatccagggcagtgctatccatcagaaccttccgtggtgatggaaatgttcttcagatctgagctgtgcaacacagtggctcctagtcctgtgtgtctattgagcttttgaaatacccgctctggctcgtgcagctgaagga

SEQ ID NO: 70175 - DNA, 152 bp, Homo sapiens; identical to SEQ ID NO: 19672
  chr5:134608287-134608439
  hypo

SEQ ID NO: 70176 - DNA, 31 bp, Homo sapiens
  chr5:134666385-134666416
  hypo
tccctcctcgccccatcgccttcaggtggat

SEQ ID NO: 70177 - DNA, 30 bp, Homo sapiens
  chr5:134672039-134672069
  hypo
cacacggcttcacccggctggtggagactt

SEQ ID NO: 70178 - DNA, 39 bp, Homo sapiens
  chr5:134673487-134673526
  hypo
ttaatagagagcagacggttccaccggaatgtccctggc

SEQ ID NO: 70179 - DNA, 31 bp, Homo sapiens; identical to SEQ ID NO: 19674
  chr5:134785498-134785529
  hypo

SEQ ID NO: 70180 - DNA, 30 bp, Homo sapiens; identical to SEQ ID NO: 19675
  chr5:135082181-135082211
  hypo

SEQ ID NO: 70181 - DNA, 433 bp, Homo sapiens
  chr5:135091169-135091602
  hypo
atatcatatctagtgttgatgcgctatggtattaatgaaatatcactgtggtatttatcatatctaatgtcaacacactatggtgttaatgaaatatcgctgtgatatttaccatatgtagcgtcaacgcactatggtattaatgaaatatcgctgtgatatttatcatatctaatgacaacgaactatagtattaattaaatattgctgtggtatttcttatatctagtgtcaacgcactatcttattaaggaaatatcgctgtgatatatatatatggtcatacgtagtgtcaatgcactatggtatgaatgaaatatcgctgcgacatttatctcatatctaatgtcaatgcagtgtagtattaatgaaatatcgctgtgatatttatcatatcatatttagtgtcaacgcactatgatagtaataaaat

SEQ ID NO: 70182 - DNA, 52 bp, Homo sapiens
  chr5:135120901-135120953
  hypo
caccccccttgtcccatagatcgtaatgtccgggtggggagatggtgatatt

SEQ ID NO: 70183 - DNA, 31 bp, Homo sapiens
  chr5:135265700-135265731
  hypo
tgcattgataaaggggcgcccttcatcggga

SEQ ID NO: 70184 - DNA, 30 bp, Homo sapiens; identical to SEQ ID NO: 4237
  chr5:135335661-135335691
  hypo

SEQ ID NO: 70185 - DNA, 135 bp, Homo sapiens; identical to SEQ ID NO: 4239
  chr5:135468431-135468566
  hypo

SEQ ID NO: 70186 - DNA, 1157 bp, Homo sapiens; identical to SEQ ID NO: 42001
  chr5:135527841-135528998
  hypo

SEQ ID NO: 70187 - DNA, 750 bp, Homo sapiens; identical to SEQ ID NO: 19680
  chr5:135692312-135693062
  hypo

SEQ ID NO: 70188 - DNA, 31 bp, Homo sapiens
  chr5:135802138-135802169
  hypo
accacaatcaaattaacgaacatactcttca

SEQ ID NO: 70189 - DNA, 35 bp, Homo sapiens; identical to SEQ ID NO: 19681
  chr5:135989644-135989679
  hypo

SEQ ID NO: 70190 - DNA, 30 bp, Homo sapiens; identical to SEQ ID NO: 19682
  chr5:136157285-136157315
  hypo

SEQ ID NO: 70191 - DNA, 8 bp, Homo sapiens
  chr5:136629427-136629435
  hypo
gggcgtgg

SEQ ID NO: 70192 - DNA, 374 bp, Homo sapiens; identical to SEQ ID NO: 4242
  chr5:136834289-136834663
  hypo

SEQ ID NO: 70193 - DNA, 174 bp, Homo sapiens; identical to SEQ ID NO: 4243
  chr5:136834706-136834880
  hypo

SEQ ID NO: 70194 - DNA, 254 bp, Homo sapiens; identical to SEQ ID NO: 4244
  chr5:136834912-136835166
  hypo

SEQ ID NO: 70195 - DNA, 132 bp, Homo sapiens
  chr5:136983256-136983388
  hypo
gcaggcccagccagtcggtccctcgggccagggcaggaagcgagagtctctcttaccctggtgcgtggggccgcagggctaacaccaacaattcatccgatggagcatgtcgaggtcgagccagaagacttg

SEQ ID NO: 70196 - DNA, 31 bp, Homo sapiens; identical to SEQ ID NO: 19687
  chr5:137403227-137403258
  hypo

SEQ ID NO: 70197 - DNA, 36 bp, Homo sapiens; identical to SEQ ID NO: 19688
  chr5:137470415-137470451
  hypo

SEQ ID NO: 70198 - DNA, 82 bp, Homo sapiens; identical to SEQ ID NO: 19689
  chr5:137529620-137529702
  hypo

SEQ ID NO: 70199 - DNA, 30 bp, Homo sapiens
  chr5:137595617-137595647
  hypo
caccatcgcacttacgcgatggtgctcagc

SEQ ID NO: 70200 - DNA, 30 bp, Homo sapiens; identical to SEQ ID NO: 19690
  chr5:137606591-137606621
  hypo

SEQ ID NO: 70201 - DNA, 221 bp, Homo sapiens
  chr5:137721786-137722007
  hypo
ggaggaaaagtgcttcggactctgggtgtgaccctgcatcaaagaaattaaaaggagacaggggtgaagtagacagtaatgggagcgatggaggtgaggcaagccgagggccctggaaaggagggaatgccagtggagagccagggctggatcagagagccaagcagccaccgtctacatttgtcccccagataaaccgcaacattcgctttgccacttac

SEQ ID NO: 70202 - DNA, 16 bp, Homo sapiens
  chr5:137727474-137727490
  hypo
tgccatggggaatggc

SEQ ID NO: 70203 - DNA, 285 bp, Homo sapiens
  chr5:137727661-137727946
  hypo
gcagatttttcacaggagaacaaagctccttttgaagctgtgaaaaggttctcactggatgaacgaagcttggcttgcagacaagactcggactccagcaccaacagtgacctgtcagatttgagtgactctgaggagcagctgcaggctaagacaggcctgaagggaattccagagcacctgatggggaagctgggccccaatggggagcgcagtgctgagctgttgctgggcaaaagcaaagggaagcaggcccccaagggccggcctcggactgcccccctg

SEQ ID NO: 70204 - DNA, 30 bp, Homo sapiens; identical to SEQ ID NO: 19692
  chr5:137773697-137773727
  hypo

SEQ ID NO: 70205 - DNA, 30 bp, Homo sapiens; identical to SEQ ID NO: 42013
  chr5:137775026-137775056
  hypo

SEQ ID NO: 70206 - DNA, 31 bp, Homo sapiens
  chr5:137790369-137790400
  hypo
ccgctttccatctggacggttgtcccacttc

SEQ ID NO: 70207 - DNA, 96 bp, Homo sapiens; identical to SEQ ID NO: 42015
  chr5:137801266-137801362
  hypo

SEQ ID NO: 70208 - DNA, 135 bp, Homo sapiens
  chr5:137802659-137802794
  hypo
accatctccagcggcctcctccgcctccgcctcccagagcccacccctgagctgcgcagtgccatccaacgacagcagtcccatttactcagcggcacccaccttccccacgccgaacactgacattttccctga

SEQ ID NO: 70209 - DNA, 467 bp, Homo sapiens; identical to SEQ ID NO: 19693
  chr5:137803074-137803541
  hypo

SEQ ID NO: 70210 - DNA, 43 bp, Homo sapiens
  chr5:137824664-137824707
  hypo
gtttcatctcattggtttatgcgggttaaatgaggcaatgtct

SEQ ID NO: 70211 - DNA, 30 bp, Homo sapiens; identical to SEQ ID NO: 19694
  chr5:137840921-137840951
  hypo

SEQ ID NO: 70212 - DNA, 97 bp, Homo sapiens
  chr5:137865652-137865749
  hypo
aactcttgggcccaaacactcctcccacctcagactcactgagcagctaaggttataggcgcaagcgaccgtgcccgcctgacccacaaggatctta

SEQ ID NO: 70213 - DNA, 217 bp, Homo sapiens
  chr5:137895656-137895873
  hypo
gcacatccgtgacatcgccggccaacacacctccctgaatggcagctccaatggccacagcctcatcaggattgacagctttacttggggctctgccaaaaagatcctgtacagtctgctgaacctgaacatcaaggaaaaagaacctgtcggcccacacttgggaactacctgagcagaacaaaagggagcacgtgtcctacgctcccagccagat

SEQ ID NO: 70214 - DNA, 157 bp, Homo sapiens
  chr5:137912555-137912712
  hypo
tgagccaccgcgcccaacccagttttagatttttaagaagaggaattaattgattcaacagatatgttttggcatgcctaccgtgtgtcagtcactctcccaggtggtaggaatacagcgaaagcaaaacacgaacgaatggctgatgacagattga

SEQ ID NO: 70215 - DNA, 102 bp, Homo sapiens; identical to SEQ ID NO: 19697
  chr5:137945776-137945878
  hypo

SEQ ID NO: 70216 - DNA, 16 bp, Homo sapiens
  chr5:138052138-138052154
  hypo
gcgtgagctaccaccc

SEQ ID NO: 70217 - DNA, 31 bp, Homo sapiens
  chr5:138064358-138064389
  hypo
ggctgttgtggccaggcgtggtggctcatgc

SEQ ID NO: 70218 - DNA, 82 bp, Homo sapiens; identical to SEQ ID NO: 42018
  chr5:138088595-138088677
  hypo

SEQ ID NO: 70219 - DNA, 52 bp, Homo sapiens; identical to SEQ ID NO: 42019
  chr5:138089783-138089835
  hypo

SEQ ID NO: 70220 - DNA, 31 bp, Homo sapiens; identical to SEQ ID NO: 4249
  chr5:138089858-138089889
  hypo

SEQ ID NO: 70221 - DNA, 36 bp, Homo sapiens
  chr5:138101349-138101385
  hypo
agaattggcgctgggcgaggtggctcatgcctgtaa

SEQ ID NO: 70222 - DNA, 93 bp, Homo sapiens; identical to SEQ ID NO: 19701
  chr5:138119911-138120004
  hypo

SEQ ID NO: 70223 - DNA, 29 bp, Homo sapiens
  chr5:138122825-138122854
  hypo
ataagggctctgggctgggtgcgatggct

SEQ ID NO: 70224 - DNA, 29 bp, Homo sapiens
  chr5:138123093-138123122
  hypo
gagactccgtctccaaaaaaaaaaaaggt

SEQ ID NO: 70225 - DNA, 30 bp, Homo sapiens
  chr5:138238382-138238412
  hypo
caggcatgagccaccgtgcccggtacacca

SEQ ID NO: 70226 - DNA, 233 bp, Homo sapiens
  chr5:138273628-138273861
  hypo
caaggcctcctcccctccccacggaagcaagagagaaggagctgccacgtgctgggcacctcagagcctgtgtccagcctttactctcgtcaccccatttcatctgtgcgacccgagatgtcagtgccattgctgcatctccagctgcacagctgaagaagtgactaggggaggtgaagtcacactgcggcaagtggctggccccgccacccggctttgagaggcacttcctc

SEQ ID NO: 70227 - DNA, 152 bp, Homo sapiens
  chr5:138274092-138274244
  hypo
tgctggtcaatgttgagccaccggctctctagggccaggccagggaggatgcgaacagatgcacatctgtgcatttagaaaacacgggaccgctataaaggaattgcagcacaccattcacaaaaggagacgtacaggactctaactgggaa

SEQ ID NO: 70228 - DNA, 30 bp, Homo sapiens; identical to SEQ ID NO: 19704
  chr5:138280838-138280868
  hypo

SEQ ID NO: 70229 - DNA, 31 bp, Homo sapiens; identical to SEQ ID NO: 19705
  chr5:138538952-138538983
  hypo

SEQ ID NO: 70230 - DNA, 32 bp, Homo sapiens; identical to SEQ ID NO: 19706
  chr5:138659302-138659334
  hypo

SEQ ID NO: 70231 - DNA, 43 bp, Homo sapiens
  chr5:138668933-138668976
  hypo
attgagggagtaaggggacaccggtttagccagccagatcagc

SEQ ID NO: 70232 - DNA, 23 bp, Homo sapiens
  chr5:138709154-138709177
  hypo
cactgagccgggctagtaatttt

SEQ ID NO: 70233 - DNA, 30 bp, Homo sapiens
  chr5:138713735-138713765
  hypo
gcacgaagaggttgcgagaggagttcatgt

SEQ ID NO: 70234 - DNA, 30 bp, Homo sapiens
  chr5:138717328-138717358
  hypo
gaggggagagccagcgagggtacaatccct

SEQ ID NO: 70235 - DNA, 30 bp, Homo sapiens; identical to SEQ ID NO: 19707
  chr5:138895190-138895220
  hypo

SEQ ID NO: 70236 - DNA, 30 bp, Homo sapiens; identical to SEQ ID NO: 19708
  chr5:138897028-138897058
  hypo

SEQ ID NO: 70237 - DNA, 56 bp, Homo sapiens; identical to SEQ ID NO: 19709
  chr5:138928997-138929053
  hypo

SEQ ID NO: 70238 - DNA, 121 bp, Homo sapiens
  chr5:138959964-138960085
  hypo
aatggctgaggagagtggatggcttgagtccaggagtataaggccagctgggacagcgtaacagagtgagaccctgtttctacaaatttttttcttttttgaaacggagtctcgctgcgtg

SEQ ID NO: 70239 - DNA, 19 bp, Homo sapiens
  chr5:138971484-138971503
  hypo
tctgtcttgaaaacctggg

SEQ ID NO: 70240 - DNA, 887 bp, Homo sapiens; identical to SEQ ID NO: 4252
  chr5:139016855-139017742
  hypo

SEQ ID NO: 70241 - DNA, 65 bp, Homo sapiens; identical to SEQ ID NO: 4253
  chr5:139039950-139040015
  hypo

SEQ ID NO: 70242 - DNA, 52 bp, Homo sapiens; identical to SEQ ID NO: 19712
  chr5:139060688-139060740
  hypo

SEQ ID NO: 70243 - DNA, 288 bp, Homo sapiens; identical to SEQ ID NO: 4255
  chr5:139089042-139089330
  hypo

SEQ ID NO: 70244 - DNA, 30 bp, Homo sapiens; identical to SEQ ID NO: 19714
  chr5:139133700-139133730
  hypo

SEQ ID NO: 70245 - DNA, 30 bp, Homo sapiens; identical to SEQ ID NO: 19715
  chr5:139142883-139142913
  hypo

SEQ ID NO: 70246 - DNA, 30 bp, Homo sapiens; identical to SEQ ID NO: 42042
  chr5:139256182-139256212
  hypo

SEQ ID NO: 70247 - DNA, 621 bp, Homo sapiens; identical to SEQ ID NO: 42043
  chr5:139283488-139284109
  hypo

SEQ ID NO: 70248 - DNA, 276 bp, Homo sapiens; identical to SEQ ID NO: 42044
  chr5:139284309-139284585
  hypo

SEQ ID NO: 70249 - DNA, 31 bp, Homo sapiens; identical to SEQ ID NO: 19717
  chr5:139535849-139535880
  hypo

SEQ ID NO: 70250 - DNA, 238 bp, Homo sapiens; identical to SEQ ID NO: 42049
  chr5:139554292-139554530
  hypo

SEQ ID NO: 70251 - DNA, 102 bp, Homo sapiens
  chr5:139556301-139556403
  hypo
tgtggggcattggattcgctgaaaggagtcccatactatttgttgattgtagatcaaagatctctagacctggcctggtgcggtggctcacacctgtaatcc

SEQ ID NO: 70252 - DNA, 30 bp, Homo sapiens; identical to SEQ ID NO: 19720
  chr5:139632449-139632479
  hypo

SEQ ID NO: 70253 - DNA, 27 bp, Homo sapiens
  chr5:139678895-139678922
  hypo
aatgtactttgaggccaggggcggtgg

SEQ ID NO: 70254 - DNA, 152 bp, Homo sapiens; identical to SEQ ID NO: 42052
  chr5:139725996-139726148
  hypo

SEQ ID NO: 70255 - DNA, 24 bp, Homo sapiens
  chr5:139829237-139829261
  hypo
ctcggtctcaaaaaaaaaaaaaaa

SEQ ID NO: 70256 - DNA, 19 bp, Homo sapiens
  chr5:139922384-139922403
  hypo
ttaagacctttggggccgg

SEQ ID NO: 70257 - DNA, 30 bp, Homo sapiens
  chr5:139943158-139943188
  hypo
ttgcctgggccacccgttacctccggtcca

SEQ ID NO: 70258 - DNA, 30 bp, Homo sapiens
  chr5:140053053-140053083
  hypo
gacccccgctccggcggggctcgccggccc

SEQ ID NO: 70259 - DNA, 33 bp, Homo sapiens; identical to SEQ ID NO: 19723
  chr5:140088249-140088282
  hypo

SEQ ID NO: 70260 - DNA, 33 bp, Homo sapiens; identical to SEQ ID NO: 19724
  chr5:140088521-140088554
  hypo

SEQ ID NO: 70261 - DNA, 169 bp, Homo sapiens
  chr5:140905567-140905736
  hypo
tcctatctcagcccatcaacccgtcttcactcctcacctgcattcatgtctatgagttgctctctcttctgctgcttctctagccgctccttctctgccttctccttggctagttttgctcgcctcatcttttcttctgtctcccgccgcttctggttctccttgactg

SEQ ID NO: 70262 - DNA, 35 bp, Homo sapiens; identical to SEQ ID NO: 19725
  chr5:141002377-141002412
  hypo

SEQ ID NO: 70263 - DNA, 484 bp, Homo sapiens; identical to SEQ ID NO: 42085
  chr5:141030746-141031230
  hypo

SEQ ID NO: 70264 - DNA, 145 bp, Homo sapiens; identical to SEQ ID NO: 19728
  chr5:141051472-141051617
  hypo

SEQ ID NO: 70265 - DNA, 31 bp, Homo sapiens
  chr5:141052013-141052044
  hypo
tgtgcataccctctgacgtcctactaaagag

SEQ ID NO: 70266 - DNA, 94 bp, Homo sapiens
  chr5:141052406-141052500
  hypo
gggtggttgggggggccgggggtggcccaggaggcgctgctccttcagacaggactgcagcgtggagcaccacatgtcccgctgagctggtggg

SEQ ID NO: 70267 - DNA, 266 bp, Homo sapiens
  chr5:141244705-141244971
  hypo
tgagtcactagccctatgccccggatctcaatggtgggggcattgtcattcatgtccttcacggtcacaaccacctgggcacgggcactcttggggttggtgcctcggtccttagcaagcactgagaagcgcagggtgcttaggtcctcacggtccaccgggccctgaacagtgataagtccagtgttcctgtccagtcgaagaagacgcctcacaacttcgggcgcctggtggaatgtgtattcgatttctgcattggcaccttg

SEQ ID NO: 70268 - DNA, 244 bp, Homo sapiens; identical to SEQ ID NO: 19730
  chr5:141248095-141248339
  hypo

SEQ ID NO: 70269 - DNA, 114 bp, Homo sapiens
  chr5:141248653-141248767
  hypo
gggagctggttctggcattcacggagcccctcacggtcgatggaggtctcggtggtgaaaatgtcacctgtcttgccatccacgcgaaggtacggggcacccacctctagcttg

SEQ ID NO: 70270 - DNA, 703 bp, Homo sapiens; identical to SEQ ID NO: 42088
  chr5:141257327-141258030
  hypo

SEQ ID NO: 70271 - DNA, 31 bp, Homo sapiens; identical to SEQ ID NO: 19731
  chr5:141303243-141303274
  hypo

SEQ ID NO: 70272 - DNA, 30 bp, Homo sapiens
  chr5:141391518-141391548
  hypo
taaactggatgatgcggttcctgatgtatt

SEQ ID NO: 70273 - DNA, 30 bp, Homo sapiens
  chr5:141468244-141468274
  hypo
tggacctccttccggcgtatctgcagtggg

SEQ ID NO: 70274 - DNA, 30 bp, Homo sapiens; identical to SEQ ID NO: 19732
  chr5:141576297-141576327
  hypo

SEQ ID NO: 70275 - DNA, 42 bp, Homo sapiens
  chr5:141581707-141581749
  hypo
gggattacaggagtgggccactgcgcccggccacctgaggca

SEQ ID NO: 70276 - DNA, 31 bp, Homo sapiens; identical to SEQ ID NO: 19733
  chr5:141639936-141639967
  hypo

SEQ ID NO: 70277 - DNA, 245 bp, Homo sapiens
  chr5:141663281-141663526
  hypo
ggcaaactgtctcacacgatgcctggcacagagagtcaaacgatcatgcttgtagcagatgcctgcgttcgccagcaagcatatgttgtacctgcacatggaggctttctgcttgctcctggtagattattgcacttgccggcttttcttttctaataatttttcattttattattggggcgcgagatttagctgtgttccatgggtctagccgccaagtcctgcagtctcgctgtattcctctg

SEQ ID NO: 70278 - DNA, 35 bp, Homo sapiens; identical to SEQ ID NO: 19734
  chr5:141674167-141674202
  hypo

SEQ ID NO: 70279 - DNA, 35 bp, Homo sapiens
  chr5:141674501-141674536
  hypo
ttgctgctggatcagatgtacggtaggaaataaag

SEQ ID NO: 70280 - DNA, 266 bp, Homo sapiens; identical to SEQ ID NO: 42097
  chr5:141704447-141704713
  hypo

SEQ ID NO: 70281 - DNA, 342 bp, Homo sapiens; identical to SEQ ID NO: 42099
  chr5:141736298-141736640
  hypo

SEQ ID NO: 70282 - DNA, 62 bp, Homo sapiens; identical to SEQ ID NO: 19737
  chr5:141788624-141788686
  hypo

SEQ ID NO: 70283 - DNA, 34 bp, Homo sapiens; identical to SEQ ID NO: 19738
  chr5:141803863-141803897
  hypo

SEQ ID NO: 70284 - DNA, 31 bp, Homo sapiens
  chr5:141815622-141815653
  hypo
agtggcatttgtttcacggagcacatcaggg

SEQ ID NO: 70285 - DNA, 151 bp, Homo sapiens; identical to SEQ ID NO: 19739
  chr5:141850812-141850963
  hypo

SEQ ID NO: 70286 - DNA, 38 bp, Homo sapiens
  chr5:141903296-141903334
  hypo
gggattacaggcatgagccaccacgcccaaccccacac

SEQ ID NO: 70287 - DNA, 31 bp, Homo sapiens
  chr5:142054639-142054670
  hypo
gtcgttagaaacaacccggccatcgccttgg

SEQ ID NO: 70288 - DNA, 31 bp, Homo sapiens; identical to SEQ ID NO: 4293
  chr5:142092798-142092829
  hypo

SEQ ID NO: 70289 - DNA, 172 bp, Homo sapiens
  chr5:142239512-142239684
  hypo
ccctcagggctgtcagcgttcccccttactcagtcgtagatataagacacttaccttgcacttactttgagtctcactgagctcccacacatggtgggtccaccagaattctgtgcactggggccacaaggagccccagtgcgcccgcatgacatcccggttgttgttcctg

SEQ ID NO: 70290 - DNA, 30 bp, Homo sapiens; identical to SEQ ID NO: 19741
  chr5:142394060-142394090
  hypo

SEQ ID NO: 70291 - DNA, 43 bp, Homo sapiens
  chr5:142624100-142624143
  hypo
gaaatgggattactctcctatcgtgatgaagcctgtgttgcct

SEQ ID NO: 70292 - DNA, 189 bp, Homo sapiens; identical to SEQ ID NO: 19742
  chr5:142625551-142625740
  hypo

SEQ ID NO: 70293 - DNA, 28 bp, Homo sapiens
  chr5:142634380-142634408
  hypo
ccaccacgcccactctcaggcatgagct

SEQ ID NO: 70294 - DNA, 797 bp, Homo sapiens; identical to SEQ ID NO: 42104
  chr5:142781701-142782498
  hypo

SEQ ID NO: 70295 - DNA, 705 bp, Homo sapiens; identical to SEQ ID NO: 42107
  chr5:142784568-142785273
  hypo

SEQ ID NO: 70296 - DNA, 40 bp, Homo sapiens
  chr5:143182535-143182575
  hypo
ataataaatgacggattattctgggcgttatttcaaatgg

SEQ ID NO: 70297 - DNA, 30 bp, Homo sapiens
  chr5:145234902-145234932
  hypo
cccccaaaccaggccgatctaacttgacct

SEQ ID NO: 70298 - DNA, 159 bp, Homo sapiens; identical to SEQ ID NO: 19745
  chr5:145379610-145379769
  hypo

SEQ ID NO: 70299 - DNA, 31 bp, Homo sapiens; identical to SEQ ID NO: 19746
  chr5:145438102-145438133
  hypo

SEQ ID NO: 70300 - DNA, 31 bp, Homo sapiens; identical to SEQ ID NO: 19747
  chr5:145453475-145453506
  hypo

SEQ ID NO: 70301 - DNA, 196 bp, Homo sapiens; identical to SEQ ID NO: 42116
  chr5:145717843-145718039
  hypo

SEQ ID NO: 70302 - DNA, 68 bp, Homo sapiens; identical to SEQ ID NO: 42117
  chr5:145718326-145718394
  hypo

SEQ ID NO: 70303 - DNA, 266 bp, Homo sapiens; identical to SEQ ID NO: 42118
  chr5:145718419-145718685
  hypo

SEQ ID NO: 70304 - DNA, 170 bp, Homo sapiens; identical to SEQ ID NO: 42126
  chr5:145725693-145725863
  hypo

SEQ ID NO: 70305 - DNA, 30 bp, Homo sapiens
  chr5:145890284-145890314
  hypo
tagtcaacctattgcgaaaccatctgacaa

SEQ ID NO: 70306 - DNA, 43 bp, Homo sapiens
  chr5:146685045-146685088
  hypo
gacttggaggctgggtttctccgggacccttggctgtctcctg

SEQ ID NO: 70307 - DNA, 180 bp, Homo sapiens; identical to SEQ ID NO: 19749
  chr5:147040614-147040794
  hypo

SEQ ID NO: 70308 - DNA, 32 bp, Homo sapiens; identical to SEQ ID NO: 19750
  chr5:147055596-147055628
  hypo

SEQ ID NO: 70309 - DNA, 44 bp, Homo sapiens; identical to SEQ ID NO: 19751
  chr5:147274325-147274369
  hypo

SEQ ID NO: 70310 - DNA, 40 bp, Homo sapiens
  chr5:147439592-147439632
  hypo
atctagtttaaagcactgtaacgtctggattctctttttt

SEQ ID NO: 70311 - DNA, 99 bp, Homo sapiens
  chr5:147439811-147439910
  hypo
gacggggtttcaccatgttagccaggatggtctcgatctggattctctttgaacggtataaaagtctgtgagatggccgtggggaaactcagagaaatt

SEQ ID NO: 70312 - DNA, 30 bp, Homo sapiens; identical to SEQ ID NO: 4310
  chr5:147534273-147534303
  hypo

SEQ ID NO: 70313 - DNA, 394 bp, Homo sapiens; identical to SEQ ID NO: 42136
  chr5:148206070-148206464
  hypo

SEQ ID NO: 70314 - DNA, 43 bp, Homo sapiens
  chr5:148222773-148222816
  hypo
gcctttgaattgggtggtaaacgcagatatctagcaatgctat

SEQ ID NO: 70315 - DNA, 198 bp, Homo sapiens
  chr5:148409734-148409932
  hypo
aagagtatgagtgatgcgcaagttacaaaatggtgtcccctctctaggaggaagaattacaaagggccatccttccctatggtatacgccttggggaagctgcaatttaccaacaagatgttctcctgctgcttgtcttggtgctggggcagcctgcacaaccataaggtgcggactgcacgccgcagagctgcactc

SEQ ID NO: 70316 - DNA, 120 bp, Homo sapiens
  chr5:148520458-148520578
  hypo
ttattggtagccactatatgccgggccctgtgctaggtattgggggcctgtaggtgaaccctacggacagacccattctttcacggagctaacattctcgtggggaaaagaggtaataaa

SEQ ID NO: 70317 - DNA, 30 bp, Homo sapiens; identical to SEQ ID NO: 19753
  chr5:148638018-148638048
  hypo

SEQ ID NO: 70318 - DNA, 1056 bp, Homo sapiens; identical to SEQ ID NO: 4313
  chr5:148651040-148652096
  hypo

SEQ ID NO: 70319 - DNA, 31 bp, Homo sapiens; identical to SEQ ID NO: 19755
  chr5:148669501-148669532
  hypo

SEQ ID NO: 70320 - DNA, 36 bp, Homo sapiens
  chr5:148686934-148686970
  hypo
gtgatggatcctttcccgtgacgcctgcagataatg

SEQ ID NO: 70321 - DNA, 100 bp, Homo sapiens
  chr5:148695864-148695964
  hypo
tggtgggtccagggcacggggaggaagggtgctcaggtcctgtgtgcgcgggctttgggggctgaggccaggagacctcatgcctcgtccacctcacccc

SEQ ID NO: 70322 - DNA, 107 bp, Homo sapiens; identical to SEQ ID NO: 4314
  chr5:148724796-148724903
  hypo

SEQ ID NO: 70323 - DNA, 31 bp, Homo sapiens
  chr5:148745523-148745554
  hypo
cacggctatgccttctcgggtgtggaggagc

SEQ ID NO: 70324 - DNA, 31 bp, Homo sapiens
  chr5:148748095-148748126
  hypo
ccgtggaggtgatggccgtggctgccaagaa

SEQ ID NO: 70325 - DNA, 50 bp, Homo sapiens
  chr5:148754032-148754082
  hypo
gaacctggctgaacaccggcacgctcaccatgctgcggtcctcctgcatg

SEQ ID NO: 70326 - DNA, 34 bp, Homo sapiens
  chr5:148772454-148772488
  hypo
cacagtctctgcatctgtgtacgtgtgtgtgcat

SEQ ID NO: 70327 - DNA, 93 bp, Homo sapiens
  chr5:148772607-148772700
  hypo
gtgtgcgcatgtgtgtctgcgtgtgtgagattgttttcccctttccttcctcagcagcaagttacctaacccgtttattgtacaaatagaaaa

SEQ ID NO: 70328 - DNA, 18 bp, Homo sapiens
  chr5:148811473-148811491
  hypo
ctttccggccgggcgcgg

SEQ ID NO: 70329 - DNA, 17 bp, Homo sapiens
  chr5:148811730-148811747
  hypo
agcgtgggggacaaaag

SEQ ID NO: 70330 - DNA, 142 bp, Homo sapiens
  chr5:148821006-148821148
  hypo
ctcctgttggcctgggagccacggaaggtcttagagcaggggtcgctgaccaagtcgtctcatgtagaagtgggatctcggtccctgcggcccacccgcttcctgagccatcgttgaggacggtgtggtgggagaaggggaa

SEQ ID NO: 70331 - DNA, 31 bp, Homo sapiens
  chr5:148823375-148823406
  hypo
cagaggagggtagagacgttaaaatcttaac

SEQ ID NO: 70332 - DNA, 31 bp, Homo sapiens
  chr5:148850848-148850879
  hypo
gcagttcagggtggctcgagagggtggtgga

SEQ ID NO: 70333 - DNA, 34 bp, Homo sapiens; identical to SEQ ID NO: 19757
  chr5:148868823-148868857
  hypo

SEQ ID NO: 70334 - DNA, 23 bp, Homo sapiens
  chr5:148872634-148872657
  hypo
acctttttgttgttgttgagacg

SEQ ID NO: 70335 - DNA, 23 bp, Homo sapiens
  chr5:148872896-148872919
  hypo
gcgtgtgccactgctcctagcca

SEQ ID NO: 70336 - DNA, 30 bp, Homo sapiens; identical to SEQ ID NO: 42140
  chr5:148904076-148904106
  hypo

SEQ ID NO: 70337 - DNA, 59 bp, Homo sapiens
  chr5:148938521-148938580
  hypo
agcccaggcaacagagcgagaccttgtcccaaaaaatataagtacgtattttatttttc

SEQ ID NO: 70338 - DNA, 23 bp, Homo sapiens
  chr5:148945696-148945719
  hypo
ccgtgcctggcccagaaactcta

SEQ ID NO: 70339 - DNA, 23 bp, Homo sapiens
  chr5:148976154-148976177
  hypo
accgcacccgggcccttgatact

SEQ ID NO: 70340 - DNA, 62 bp, Homo sapiens
  chr5:148980119-148980181
  hypo
acctaggctaaaaccccggttcagcttttcttccccactgagtactccgtctgttcctctct

SEQ ID NO: 70341 - DNA, 42 bp, Homo sapiens; identical to SEQ ID NO: 19761
  chr5:148981577-148981619
  hypo

SEQ ID NO: 70342 - DNA, 89 bp, Homo sapiens
  chr5:148982436-148982525
  hypo
taacctttcctgaacacgaatgatgaggatgcagattaaaaacaacaaatatgcaaaaaaaagttttatttttttttgagatggagtct

SEQ ID NO: 70343 - DNA, 145 bp, Homo sapiens; identical to SEQ ID NO: 19762
  chr5:148989227-148989372
  hypo

SEQ ID NO: 70344 - DNA, 37 bp, Homo sapiens; identical to SEQ ID NO: 19763
  chr5:148999329-148999366
  hypo

SEQ ID NO: 70345 - DNA, 44 bp, Homo sapiens
  chr5:149006875-149006919
  hypo
accaccccacagaagccggtgcagagacccgggcactcttgtgg

SEQ ID NO: 70346 - DNA, 30 bp, Homo sapiens
  chr5:149014767-149014797
  hypo
ccatcaattacgtgccgtgtaagtgtcagg

SEQ ID NO: 70347 - DNA, 225 bp, Homo sapiens
  chr5:149189353-149189578
  hypo
aatgataagtgctaatcgagggaattccagcagggtgctaggtaggccagagacgggatggccatttggggtgcagtggtcagggaggcccatctggggagggacgttcaacctgggatgaggatagaaagaagggagccgctatgggagatgaaggagagagaaggcgttccaggctgaggaaggctccagcacagaggccccggggtggacactcaagccaca

SEQ ID NO: 70348 - DNA, 31 bp, Homo sapiens; identical to SEQ ID NO: 19766
  chr5:149270743-149270774
  hypo

SEQ ID NO: 70349 - DNA, 103 bp, Homo sapiens; identical to SEQ ID NO: 19767
  chr5:149323763-149323866
  hypo

SEQ ID NO: 70350 - DNA, 31 bp, Homo sapiens
  chr5:149333519-149333550
  hypo
catcttgcctttggtccgctctgccaccaca

SEQ ID NO: 70351 - DNA, 34 bp, Homo sapiens; identical to SEQ ID NO: 19768
  chr5:149375067-149375101
  hypo

SEQ ID NO: 70352 - DNA, 95 bp, Homo sapiens; identical to SEQ ID NO: 19769
  chr5:149375679-149375774
  hypo

SEQ ID NO: 70353 - DNA, 30 bp, Homo sapiens
  chr5:149431987-149432017
  hypo
gcacttgggggacacggtatgtttaatgga

SEQ ID NO: 70354 - DNA, 52 bp, Homo sapiens
  chr5:149449458-149449510
  hypo
caggagccactccccacgctgttgtgggccctgcactcgtaggtttggttgt

SEQ ID NO: 70355 - DNA, 30 bp, Homo sapiens
  chr5:149493799-149493829
  hypo
atacccccatggagcgctgcctcagggatg

SEQ ID NO: 70356 - DNA, 186 bp, Homo sapiens
  chr5:149497193-149497379
  hypo
gggaaccctccagtgggccctcgtcagcaacctcgggtttggggtcaggcagggggatgatatagtcgttgtcaccctcattgggctgcacggcagtatagaggacggagctggtgtccaggggagatcggaggccatggaacccaggcaagcgggcctgggaccgaaggatggctgggtggtcac

SEQ ID NO: 70357 - DNA, 40 bp, Homo sapiens
  chr5:149501435-149501475
  hypo
cacccaccagagggaacgtagttatcgtaaggggccatgt

SEQ ID NO: 70358 - DNA, 144 bp, Homo sapiens
  chr5:149502536-149502680
  hypo
aaaggaggggaaggagcggtgctcctcaggtatcccaaagattcagtccctggcctccctcctggtacctgggcagggggagcccaacgggcagagcattgctgtagagctccgcgctgggcgggcggcgcttgtcggagtggt

SEQ ID NO: 70359 - DNA, 127 bp, Homo sapiens
  chr5:149503639-149503766
  hypo
agtttctaaaccccaccgccctctgggaccgcgcagtgagggcgctggagcgggtgggcacggaccctccagcaggagtgtgctgttgtgcaaggcctgaggggggggtaggcggggcctggccttg

SEQ ID NO: 70360 - DNA, 188 bp, Homo sapiens
  chr5:149573354-149573542
  hypo
cttaaaatatggtgcccggaacggaggaacaaaactccagcactggtgggtgaaggagacctggctttcgcatcaggaagccttgggctccagacctagttcttccactcaccaacctggtagaaacctcgggtatgtcatgacacctctttgagcctcagttttcctcatgacgaaaatggagctta

SEQ ID NO: 70361 - DNA, 31 bp, Homo sapiens; identical to SEQ ID NO: 19771
  chr5:149581943-149581974
  hypo

SEQ ID NO: 70362 - DNA, 30 bp, Homo sapiens
  chr5:149675544-149675574
  hypo
gtgtgcggatggaggcgcgctaggcggcag

SEQ ID NO: 70363 - DNA, 30 bp, Homo sapiens
  chr5:149680084-149680114
  hypo
gctggcttgtaaagcggatgggccagctaa

SEQ ID NO: 70364 - DNA, 189 bp, Homo sapiens; identical to SEQ ID NO: 19772
  chr5:149725940-149726129
  hypo

SEQ ID NO: 70365 - DNA, 30 bp, Homo sapiens
  chr5:149765856-149765886
  hypo
cttctcttcgtccccgacaatctgttcctg

SEQ ID NO: 70366 - DNA, 30 bp, Homo sapiens
  chr5:149784322-149784352
  hypo
tcaaagacctaatacggatagaggtggagg

SEQ ID NO: 70367 - DNA, 148 bp, Homo sapiens; identical to SEQ ID NO: 19773
  chr5:149800712-149800860
  hypo

SEQ ID NO: 70368 - DNA, 27 bp, Homo sapiens
  chr5:149814536-149814563
  hypo
agagaatgcagccaggcgcagtggctc

SEQ ID NO: 70369 - DNA, 27 bp, Homo sapiens
  chr5:149814862-149814889
  hypo
acactcggcatagtacctacctcaata

SEQ ID NO: 70370 - DNA, 31 bp, Homo sapiens; identical to SEQ ID NO: 19775
  chr5:149866413-149866444
  hypo

SEQ ID NO: 70371 - DNA, 31 bp, Homo sapiens; identical to SEQ ID NO: 19776
  chr5:149922920-149922951
  hypo

SEQ ID NO: 70372 - DNA, 31 bp, Homo sapiens
  chr5:149925306-149925337
  hypo
aggtggaggctggttacgcctagaggaagct

SEQ ID NO: 70373 - DNA, 30 bp, Homo sapiens
  chr5:149935362-149935392
  hypo
tgggaaggagcaggcggttggaaatcctgt

SEQ ID NO: 70374 - DNA, 55 bp, Homo sapiens
  chr5:150028667-150028722
  hypo
gccagacaggagcccccggccacagagacacataatgtcccgcagccccatggtg

SEQ ID NO: 70375 - DNA, 30 bp, Homo sapiens
  chr5:150029200-150029230
  hypo
gcctcaagtcaccccgcatccaggccaagc

SEQ ID NO: 70376 - DNA, 31 bp, Homo sapiens
  chr5:150030360-150030391
  hypo
aggctcaagctcctggcgtctttcttcctgt

SEQ ID NO: 70377 - DNA, 31 bp, Homo sapiens
  chr5:150055342-150055373
  hypo
tgcatcccagtgcctacgcgcctgtgctttc

SEQ ID NO: 70378 - DNA, 33 bp, Homo sapiens
  chr5:150060536-150060569
  hypo
acttgtggattgggctgggtgcggtggctcacg

SEQ ID NO: 70379 - DNA, 40 bp, Homo sapiens; identical to SEQ ID NO: 19778
  chr5:150066937-150066977
  hypo

SEQ ID NO: 70380 - DNA, 30 bp, Homo sapiens
  chr5:150139133-150139163
  hypo
ttggtaggcgtctacgtttttctaatgtgt

SEQ ID NO: 70381 - DNA, 30 bp, Homo sapiens; identical to SEQ ID NO: 4320
  chr5:150336249-150336279
  hypo

SEQ ID NO: 70382 - DNA, 185 bp, Homo sapiens
  chr5:150446151-150446336
  hypo
accaccatgcttgaatcgcctccttgtcaggcactgcattaaatgtttcagatatacaatcttggaggagctgcacagtaactctaacatgcatactaatctcatctgcattttacaagggagaaactgaggctcagggcggttaagtaactcagccacgatgacccggccgcaataagagccaa

SEQ ID NO: 70383 - DNA, 38 bp, Homo sapiens
  chr5:150452467-150452505
  hypo
aacaaagttctcatgtagaaacgtgtgcttgagggctg

SEQ ID NO: 70384 - DNA, 30 bp, Homo sapiens; identical to SEQ ID NO: 4326
  chr5:150620960-150620990
  hypo

SEQ ID NO: 70385 - DNA, 31 bp, Homo sapiens
  chr5:150834190-150834221
  hypo
ccctcttgactctccacgtactgatcctagc

SEQ ID NO: 70386 - DNA, 30 bp, Homo sapiens
  chr5:150884798-150884828
  hypo
cggggactgagagccggcagatcagggagc

SEQ ID NO: 70387 - DNA, 31 bp, Homo sapiens; identical to SEQ ID NO: 19781
  chr5:150885248-150885279
  hypo

SEQ ID NO: 70388 - DNA, 31 bp, Homo sapiens
  chr5:150885683-150885714
  hypo
gagctcattttctccccggaaggtttcagct

SEQ ID NO: 70389 - DNA, 30 bp, Homo sapiens
  chr5:150948291-150948321
  hypo
ccactgtggctccgcgaggtagatgcccat

SEQ ID NO: 70390 - DNA, 23 bp, Homo sapiens
  chr5:151150204-151150227
  hypo
cggctccccagaggccgaggccg

SEQ ID NO: 70391 - DNA, 648 bp, Homo sapiens; identical to SEQ ID NO: 42171
  chr5:151150270-151150918
  hypo

SEQ ID NO: 70392 - DNA, 26 bp, Homo sapiens
  chr5:151162427-151162453
  hypo
tttttttttgagatggactctcgctc

SEQ ID NO: 70393 - DNA, 30 bp, Homo sapiens
  chr5:151784236-151784266
  hypo
cacgtagcgctccacgctgacggtggtgat

SEQ ID NO: 70394 - DNA, 21 bp, Homo sapiens
  chr5:152190069-152190090
  hypo
tttttttttttttttttgaga

SEQ ID NO: 70395 - DNA, 40 bp, Homo sapiens
  chr5:153454423-153454463
  hypo
ataataatattattgaccaggcgtggtggctcgcacctgt

SEQ ID NO: 70396 - DNA, 23 bp, Homo sapiens
  chr5:153651012-153651035
  hypo
cgaaactccgtctcaaaaaataa

SEQ ID NO: 70397 - DNA, 146 bp, Homo sapiens
  chr5:153675964-153676110
  hypo
taaattaagaaagaaaacatttgggaagagctgatttgccagacatactagaattattaacactgggctaaccagcaagacaagagtaacgagcagtggagacattaataataataataacctgcatctgtcgaacgctaactatg

SEQ ID NO: 70398 - DNA, 143 bp, Homo sapiens
  chr5:153785958-153786101
  hypo
tgattatgtgtgggttcgcagaaccacagagatgcctgaatcaggtgcggccttttattatggtgactaacaaccctcaattacttgcagaccacatttaaaatatttgttcagtgggccgggcgtggtggctcatgcctgta

SEQ ID NO: 70399 - DNA, 30 bp, Homo sapiens; identical to SEQ ID NO: 19785
  chr5:153798347-153798377
  hypo

SEQ ID NO: 70400 - DNA, 199 bp, Homo sapiens; identical to SEQ ID NO: 42185
  chr5:153857284-153857483
  hypo

SEQ ID NO: 70401 - DNA, 159 bp, Homo sapiens; identical to SEQ ID NO: 42186
  chr5:153857774-153857933
  hypo

SEQ ID NO: 70402 - DNA, 53 bp, Homo sapiens; identical to SEQ ID NO: 19788
  chr5:154071647-154071700
  hypo

SEQ ID NO: 70403 - DNA, 20 bp, Homo sapiens
  chr5:154082383-154082403
  hypo
gaggacactggttgtgctgg

SEQ ID NO: 70404 - DNA, 28 bp, Homo sapiens
  chr5:154094719-154094747
  hypo
acagagcgagactctgtctcaaaaaaaa

SEQ ID NO: 70405 - DNA, 30 bp, Homo sapiens; identical to SEQ ID NO: 19789
  chr5:154158985-154159015
  hypo

SEQ ID NO: 70406 - DNA, 30 bp, Homo sapiens
  chr5:154166968-154166998
  hypo
tgtacctgtgtgcacgtgtgcacacgtgct

SEQ ID NO: 70407 - DNA, 30 bp, Homo sapiens
  chr5:154181816-154181846
  hypo
acccagggggggaccgcacaggcaaccaca

SEQ ID NO: 70408 - DNA, 30 bp, Homo sapiens; identical to SEQ ID NO: 19790
  chr5:154194743-154194773
  hypo

SEQ ID NO: 70409 - DNA, 267 bp, Homo sapiens
  chr5:154209727-154209994
  hypo
tccttgttgtgtaggaaaaggcgagccagactcagggaacagtgggacccacttcccggcgctgtgcaagtcagagttccttgtaagcagggtctgggcctcacttatcatggatttgccctggtgcctttcactattggtcgaattgagtatttcggaaggagaacttgtttaaaagacagccaccgcccacacattcagaatccatactatccgtctattacagtggagttatccattgttttcgcagctgtctccctctctcat

SEQ ID NO: 70410 - DNA, 35 bp, Homo sapiens; identical to SEQ ID NO: 19791
  chr5:154218387-154218422
  hypo

SEQ ID NO: 70411 - DNA, 30 bp, Homo sapiens
  chr5:154245974-154246004
  hypo
tttttattgttgttcgtatgttttggaaat

SEQ ID NO: 70412 - DNA, 30 bp, Homo sapiens
  chr5:154248101-154248131
  hypo
acagttgtgagccaccgcacccgacctatt

SEQ ID NO: 70413 - DNA, 98 bp, Homo sapiens
  chr5:154318076-154318174
  hypo
ccactatcccgtccaacgttttttgagcgctatgtgccagggcactttgctagttgtggaggtgttttaaagatatgcacaagaggccgggtgcggtg

SEQ ID NO: 70414 - DNA, 18 bp, Homo sapiens
  chr5:154929087-154929105
  hypo
gcccggatctcattattt

SEQ ID NO: 70415 - DNA, 21 bp, Homo sapiens
  chr5:156207110-156207131
  hypo
ccagctgggtgcggtggctca

SEQ ID NO: 70416 - DNA, 4 bp, Homo sapiens
  chr5:156485323-156485327
  hypo
tagc

SEQ ID NO: 70417 - DNA, 103 bp, Homo sapiens; identical to SEQ ID NO: 19795
  chr5:156485566-156485669
  hypo

SEQ ID NO: 70418 - DNA, 11 bp, Homo sapiens
  chr5:156577167-156577178
  hypo
gggcgcggtgg

SEQ ID NO: 70419 - DNA, 30 bp, Homo sapiens; identical to SEQ ID NO: 4345
  chr5:156693942-156693972
  hypo

SEQ ID NO: 70420 - DNA, 156 bp, Homo sapiens
  chr5:156811485-156811641
  hypo
gactcaaatcctcagcggaggacagaaggtggcctctcttctggcaaaacatggtaagtatttttggagcacgatgcaaagcctcatctgcacagacgtcatgctgaggaagccaccccagcccggcccccgcatgccaccaacctccttctgaaa

SEQ ID NO: 70421 - DNA, 188 bp, Homo sapiens
  chr5:156874151-156874339
  hypo
gataggtaagcaccaacgtatttaatgggctggctacagaataaacagctacatttttctttggggagcaaaatgcagataattatcaccacttaagctttagtgcaactgtgtaaaaaggcgcggctttttattggcccagcgcctttgtgtgcaaccaatcctgaggtgggcggctgtgtccccgc

SEQ ID NO: 70422 - DNA, 315 bp, Homo sapiens; identical to SEQ ID NO: 42206
  chr5:156887145-156887460
  hypo

SEQ ID NO: 70423 - DNA, 254 bp, Homo sapiens; identical to SEQ ID NO: 19798
  chr5:156895562-156895816
  hypo

SEQ ID NO: 70424 - DNA, 1284 bp, Homo sapiens; identical to SEQ ID NO: 42207
  chr5:157001781-157003065
  hypo

SEQ ID NO: 70425 - DNA, 30 bp, Homo sapiens
  chr5:157107138-157107168
  hypo
aaaccagcagacagcggagcataataaatc

SEQ ID NO: 70426 - DNA, 30 bp, Homo sapiens; identical to SEQ ID NO: 42212
  chr5:157988964-157988994
  hypo

SEQ ID NO: 70427 - DNA, 143 bp, Homo sapiens
  chr5:158139221-158139364
  hypo
acattgcggcagagccgtatccgttcatgctcgtggtgacggagttatagttggtctgctggggagtggtgctcggcacgtacccgtgtggtgatacgctgcttgagttgcgggtgaaacctgaggggcgggggcaaaaccgg

SEQ ID NO: 70428 - DNA, 30 bp, Homo sapiens; identical to SEQ ID NO: 42213
  chr5:158244067-158244097
  hypo

SEQ ID NO: 70429 - DNA, 187 bp, Homo sapiens; identical to SEQ ID NO: 42216
  chr5:158526185-158526372
  hypo

SEQ ID NO: 70430 - DNA, 650 bp, Homo sapiens; identical to SEQ ID NO: 4353
  chr5:158527353-158528003
  hypo

SEQ ID NO: 70431 - DNA, 25 bp, Homo sapiens
  chr5:158612931-158612956
  hypo
aagatctatgaaaagggcctccggc

SEQ ID NO: 70432 - DNA, 29 bp, Homo sapiens
  chr5:158631513-158631542
  hypo
ataaaatagggcaaacaaggccgggcgca

SEQ ID NO: 70433 - DNA, 1212 bp, Homo sapiens; identical to SEQ ID NO: 42220
  chr5:158634800-158636012
  hypo

SEQ ID NO: 70434 - DNA, 19 bp, Homo sapiens
  chr5:158638269-158638288
  hypo
gaagtatggttgctggatt

SEQ ID NO: 70435 - DNA, 32 bp, Homo sapiens; identical to SEQ ID NO: 19803
  chr5:158884899-158884931
  hypo

SEQ ID NO: 70436 - DNA, 30 bp, Homo sapiens; identical to SEQ ID NO: 19804
  chr5:159214703-159214733
  hypo

SEQ ID NO: 70437 - DNA, 31 bp, Homo sapiens; identical to SEQ ID NO: 42224
  chr5:159228213-159228244
  hypo

SEQ ID NO: 70438 - DNA, 111 bp, Homo sapiens; identical to SEQ ID NO: 42225
  chr5:159343453-159343564
  hypo

SEQ ID NO: 70439 - DNA, 31 bp, Homo sapiens; identical to SEQ ID NO: 19806
  chr5:159459176-159459207
  hypo

SEQ ID NO: 70440 - DNA, 194 bp, Homo sapiens
  chr5:159489226-159489420
  hypo
aattcttcctctcgtcggcagtttgaatatttgcagtcttagcttggaatggtctttctgcactagagggaaacctcctttagtgcagaccagcctaaagccaagccattgctgcctgaggaagctgccatctctggagcacggtgacatgccaccaccctggacctattcccatcccccggagcactgtggca

SEQ ID NO: 70441 - DNA, 30 bp, Homo sapiens
  chr5:159489946-159489976
  hypo
ctacgcccatgtgcccgaggctgtgccgct

SEQ ID NO: 70442 - DNA, 31 bp, Homo sapiens; identical to SEQ ID NO: 19807
  chr5:159497742-159497773
  hypo

SEQ ID NO: 70443 - DNA, 31 bp, Homo sapiens; identical to SEQ ID NO: 19808
  chr5:159600447-159600478
  hypo

SEQ ID NO: 70444 - DNA, 30 bp, Homo sapiens
  chr5:159658714-159658744
  hypo
ttcattccagaacttcgcgagcttggcaag

SEQ ID NO: 70445 - DNA, 100 bp, Homo sapiens
  chr5:159659074-159659174
  hypo
tatggctactctgcttgtccccgggtccagggatctccagcgatgtaatcgaaaaggcccgcaacttcaagatcgtcacggaggtgcagcaggatgggca

SEQ ID NO: 70446 - DNA, 45 bp, Homo sapiens; identical to SEQ ID NO: 19809
  chr5:159669396-159669441
  hypo

SEQ ID NO: 70447 - DNA, 33 bp, Homo sapiens
  chr5:159670914-159670947
  hypo
ggcgtgagccactgcgcccggccagggctcttc

SEQ ID NO: 70448 - DNA, 407 bp, Homo sapiens
  chr5:159686735-159687142
  hypo
tgctccaacttggggacgtggtcttcccgatcctcgaacttacctgtcggggagcaggggaagcaggggttactggaagacatttacctgaacccaggaagctaacggcccaccttacagtgcctggacattgctggcaaagaagacagaaagcagacaggccagactgcggaggaataggagcacacattccagatctgtcaaacctaggcttgaatccacaagccatcacttcccactgggggatcatggctaggtgtctcaacctctctgtgactcagtttcctcatctgtaagatggaacctatacttcataaggcttttgttagagtcaatgggaaaatgcaaaccaaatgctcagacaagcctctggaacacaaagcagccgatagcggtcagcagcagca

SEQ ID NO: 70449 - DNA, 31 bp, Homo sapiens
  chr5:159692187-159692218
  hypo
ccaaaagtccttcatgcgtgggaagatgcct

SEQ ID NO: 70450 - DNA, 440 bp, Homo sapiens
  chr5:159707381-159707821
  hypo
aaaaatgttgatgctaaaaaacgctcagtgaaggatgaacatataagacgtgcaaagatcgtcaaaatgtaaagtgatttggaagcagccaggcgcactgagcgggaggagaccgcacaagcgcggaggaagacgtaggttttcgcttacttgcaagcaggaggcaggagacggccacggtgtagagctgcttggaggtggtgacgttgtagcgatccatgaagtggtccagcaggtagacggccaggtgccgggctgcagggcagagctggcagtggctgctcagcagggtcaggatgtccacgaagaaccggcggctcttcaggagtggggagtgggctcggaaggtgggcagcttcagttcctggaggacaggcggggcggaggggtgacggtcagggctgcctcctgagagtctcggctgtcccaggaaatgggac

SEQ ID NO: 70451 - DNA, 29 bp, Homo sapiens
  chr5:159732104-159732133
  hypo
gccaccgcgcctggccaggtcactgattt

SEQ ID NO: 70452 - DNA, 275 bp, Homo sapiens; identical to SEQ ID NO: 19811
  chr5:159776320-159776595
  hypo

SEQ ID NO: 70453 - DNA, 174 bp, Homo sapiens; identical to SEQ ID NO: 4360
  chr5:159826415-159826589
  hypo

SEQ ID NO: 70454 - DNA, 857 bp, Homo sapiens; identical to SEQ ID NO: 42238
  chr5:160974540-160975397
  hypo

SEQ ID NO: 70455 - DNA, 31 bp, Homo sapiens; identical to SEQ ID NO: 19813
  chr5:165055690-165055721
  hypo

SEQ ID NO: 70456 - DNA, 31 bp, Homo sapiens; identical to SEQ ID NO: 19814
  chr5:165210728-165210759
  hypo

SEQ ID NO: 70457 - DNA, 31 bp, Homo sapiens; identical to SEQ ID NO: 19815
  chr5:166318065-166318096
  hypo

SEQ ID NO: 70458 - DNA, 33 bp, Homo sapiens
  chr5:166374190-166374223
  hypo
tcttaagaaatgttgctacatcgggctgggcgg

SEQ ID NO: 70459 - DNA, 104 bp, Homo sapiens; identical to SEQ ID NO: 19816
  chr5:166477137-166477241
  hypo

SEQ ID NO: 70460 - DNA, 156 bp, Homo sapiens
  chr5:167536297-167536453
  hypo
aagtcacttttgataaaatagcgtaagaagaatcgccaccgcctattgaagatcaactacatgctgggcactgtgcaaagggttttaagtgaatcctctcatttcatccttgtgtcatacgtcatgatcgtctccgtttcacagctaaagaaactg

SEQ ID NO: 70461 - DNA, 30 bp, Homo sapiens
  chr5:167615243-167615273
  hypo
ggcctctgattcagcgttccagtacaagtg

SEQ ID NO: 70462 - DNA, 57 bp, Homo sapiens; identical to SEQ ID NO: 19817
  chr5:167652912-167652969
  hypo

SEQ ID NO: 70463 - DNA, 49 bp, Homo sapiens
  chr5:167671585-167671634
  hypo
atacttcttcaatgggcgcctggctgggcttcagcgtggggccatgagc

SEQ ID NO: 70464 - DNA, 33 bp, Homo sapiens
  chr5:167680719-167680752
  hypo
gcgcctggctacgcactcattatttataagcag

SEQ ID NO: 70465 - DNA, 321 bp, Homo sapiens
  chr5:167689118-167689439
  hypo
ggtcattactaaaaagctccacgccagcatccgagagaaagcaggtcactggtttgccaccaccacgcccatcattggcaaaggcatcatgtttgccatcaaagaagggcgggtgaccacgggcgtgtccagcatcgccagcgaagatagccgcaaggtggcatctgtgctgaacaacgcctactacctggacaagatgcactacagcatcgagggcaaggacacccactactttgtgaagattggctcagccgatggcgacctggtcacactaggcaccaccatcggccgcaaggtgctagagagcggggtgaacgtgac

SEQ ID NO: 70466 - DNA, 36 bp, Homo sapiens
  chr5:167698410-167698446
  hypo
ggaagtgggctgggcgcggtggctcacgccttaatc

SEQ ID NO: 70467 - DNA, 224 bp, Homo sapiens; identical to SEQ ID NO: 4371
  chr5:167718507-167718731
  hypo

SEQ ID NO: 70468 - DNA, 378 bp, Homo sapiens; identical to SEQ ID NO: 4372
  chr5:167718951-167719329
  hypo

SEQ ID NO: 70469 - DNA, 150 bp, Homo sapiens
  chr5:167729412-167729562
  hypo
gaaatagttaaatagataaatcgcattatgactgggggtttgatgttctctagagctcttttaggaaggtggagggacagacctggtgacacctgtcgacagtggtggtgcggacctagatttgaagccgggagaccttgaggcctttag

SEQ ID NO: 70470 - DNA, 103 bp, Homo sapiens
  chr5:167825007-167825110
  hypo
tgtaccaggcacagtgcgaaatatctcatgtgtattatctcgtgtctatgaagtaactaccgtcatctgcattttattatttttatttatttatttatttatt

SEQ ID NO: 70471 - DNA, 31 bp, Homo sapiens
  chr5:167833667-167833698
  hypo
cgggcgcggtggctcacgcctgtaatcccag

SEQ ID NO: 70472 - DNA, 43 bp, Homo sapiens; identical to SEQ ID NO: 19821
  chr5:167847700-167847743
  hypo

SEQ ID NO: 70473 - DNA, 179 bp, Homo sapiens
  chr5:167853640-167853819
  hypo
aaagcaggaggtctccgcgggctcagcaggcatgggacgcaggctcagcttccccatcaccagcacttgcagtctcccagacccgccttgtcacccatcgccgtccccggcctgccatgccctggactctgtgcccctcaatgctgcgagcccttgccctgctccggtctgcccgcagg

SEQ ID NO: 70474 - DNA, 31 bp, Homo sapiens; identical to SEQ ID NO: 19823
  chr5:167858405-167858436
  hypo

SEQ ID NO: 70475 - DNA, 45 bp, Homo sapiens; identical to SEQ ID NO: 19824
  chr5:167897878-167897923
  hypo

SEQ ID NO: 70476 - DNA, 238 bp, Homo sapiens; identical to SEQ ID NO: 19825
  chr5:168112660-168112898
  hypo

SEQ ID NO: 70477 - DNA, 43 bp, Homo sapiens; identical to SEQ ID NO: 19826
  chr5:168124522-168124565
  hypo

SEQ ID NO: 70478 - DNA, 30 bp, Homo sapiens
  chr5:168174920-168174950
  hypo
tcctgcactgctgccgggatcagactgaga

SEQ ID NO: 70479 - DNA, 84 bp, Homo sapiens; identical to SEQ ID NO: 19827
  chr5:168184344-168184428
  hypo

SEQ ID NO: 70480 - DNA, 23 bp, Homo sapiens
  chr5:168184727-168184750
  hypo
ccgtgcccaacccaacccctgtt

SEQ ID NO: 70481 - DNA, 320 bp, Homo sapiens; identical to SEQ ID NO: 19829
  chr5:168189440-168189760
  hypo

SEQ ID NO: 70482 - DNA, 346 bp, Homo sapiens; identical to SEQ ID NO: 19830
  chr5:168195070-168195416
  hypo

SEQ ID NO: 70483 - DNA, 306 bp, Homo sapiens; identical to SEQ ID NO: 19831
  chr5:168199737-168200043
  hypo

SEQ ID NO: 70484 - DNA, 30 bp, Homo sapiens
  chr5:168202507-168202537
  hypo
ccctcactccattatcgtctctcacacccc

SEQ ID NO: 70485 - DNA, 30 bp, Homo sapiens
  chr5:168203236-168203266
  hypo
gcctcatactccccacggtcccggtgcacc

SEQ ID NO: 70486 - DNA, 30 bp, Homo sapiens; identical to SEQ ID NO: 19832
  chr5:168233452-168233482
  hypo

SEQ ID NO: 70487 - DNA, 126 bp, Homo sapiens; identical to SEQ ID NO: 19833
  chr5:168244375-168244501
  hypo

SEQ ID NO: 70488 - DNA, 30 bp, Homo sapiens
  chr5:168250263-168250293
  hypo
cagagttcggatcttcggcatgtggttgaa

SEQ ID NO: 70489 - DNA, 186 bp, Homo sapiens; identical to SEQ ID NO: 19834
  chr5:168284803-168284989
  hypo

SEQ ID NO: 70490 - DNA, 798 bp, Homo sapiens; identical to SEQ ID NO: 42266
  chr5:169064007-169064805
  hypo

SEQ ID NO: 70491 - DNA, 30 bp, Homo sapiens; identical to SEQ ID NO: 19836
  chr5:169361336-169361366
  hypo

SEQ ID NO: 70492 - DNA, 175 bp, Homo sapiens; identical to SEQ ID NO: 19837
  chr5:169484555-169484730
  hypo

SEQ ID NO: 70493 - DNA, 30 bp, Homo sapiens; identical to SEQ ID NO: 19838
  chr5:169532928-169532958
  hypo

SEQ ID NO: 70494 - DNA, 534 bp, Homo sapiens
  chr5:169659809-169660343
  hypo
aaggaatgtcagtgctttttccgccaacgtggccgcgcgagtcagttgtaacccggcatccagaaccttctccgtaggggccttgcctgggactacaactcccaggatgccgcaggcggagaagctggccaatcagggggcgcggcttcgccttcaccgtcggctccctgctcctgtcagaacctcggtgacggttggccaggtgggtagtgacggctgctcggtcttgaaggatcctaatctggtttgggagggtgaagaccgctgaaatttccaggctgcccgaggctccaccttccaccacccaacgggtgggcggtgggccgggctggcctcggagcctctccctgggtgtcggttgggccgagaaggggacggttggctgggtgggcctggcggctggtggctgtccgtaggccggggtcactctgagggcattttacattaccctaatcctgtccacttggcaagaaacttagtaagccccaaaggttcattccaaatcctgtctgggagggcgaggactgtggaaac

SEQ ID NO: 70495 - DNA, 31 bp, Homo sapiens; identical to SEQ ID NO: 19839
  chr5:169732124-169732155
  hypo

SEQ ID NO: 70496 - DNA, 30 bp, Homo sapiens; identical to SEQ ID NO: 19840
  chr5:169805568-169805598
  hypo

SEQ ID NO: 70497 - DNA, 31 bp, Homo sapiens
  chr5:169821168-169821199
  hypo
cttccacaggactccccgctggggccttccc

SEQ ID NO: 70498 - DNA, 25 bp, Homo sapiens
  chr5:169931353-169931378
  hypo
cgcggggagcggctagccctgagtc

SEQ ID NO: 70499 - DNA, 31 bp, Homo sapiens
  chr5:170169587-170169618
  hypo
aacactgcctccagaccgccacgcgattcgg

SEQ ID NO: 70500 - DNA, 19 bp, Homo sapiens
  chr5:170618414-170618433
  hypo
gggcgcagtggctcacgcc

SEQ ID NO: 70501 - DNA, 19 bp, Homo sapiens
  chr5:170618672-170618691
  hypo
agagcgagactccgtctca

SEQ ID NO: 70502 - DNA, 30 bp, Homo sapiens; identical to SEQ ID NO: 19842
  chr5:170678690-170678720
  hypo

SEQ ID NO: 70503 - DNA, 31 bp, Homo sapiens
  chr5:170680140-170680171
  hypo
gattgacaagcccttccgatcacagtagttg

SEQ ID NO: 70504 - DNA, 31 bp, Homo sapiens; identical to SEQ ID NO: 19843
  chr5:170758643-170758674
  hypo

SEQ ID NO: 70505 - DNA, 30 bp, Homo sapiens; identical to SEQ ID NO: 4390
  chr5:170819918-170819948
  hypo

SEQ ID NO: 70506 - DNA, 30 bp, Homo sapiens; identical to SEQ ID NO: 4391
  chr5:170834697-170834727
  hypo

SEQ ID NO: 70507 - DNA, 30 bp, Homo sapiens; identical to SEQ ID NO: 4392
  chr5:170837529-170837559
  hypo

SEQ ID NO: 70508 - DNA, 30 bp, Homo sapiens; identical to SEQ ID NO: 4393
  chr5:170837858-170837888
  hypo

SEQ ID NO: 70509 - DNA, 85 bp, Homo sapiens; identical to SEQ ID NO: 19848
  chr5:170863091-170863176
  hypo

SEQ ID NO: 70510 - DNA, 30 bp, Homo sapiens
  chr5:170880220-170880250
  hypo
gcaagcgtcaagcccggatgtagcctgctg

SEQ ID NO: 70511 - DNA, 186 bp, Homo sapiens
  chr5:170883646-170883832
  hypo
caagaaggggcggccgcggaagggccccaagacccgggagaaccagcaggacgtgcatttcatgaagcgctaccccaaggggcagccggagcttcagaagcccttcaagtacacgacggtgaccaagaggtcccgtcggatccggcccacacaccctgcctaggccaccccgccgcggcccctcag

SEQ ID NO: 70512 - DNA, 30 bp, Homo sapiens
  chr5:170884263-170884293
  hypo
actccaacaaaaatcgctctctggtttgca

SEQ ID NO: 70513 - DNA, 30 bp, Homo sapiens; identical to SEQ ID NO: 19850
  chr5:170919700-170919730
  hypo

SEQ ID NO: 70514 - DNA, 40 bp, Homo sapiens
  chr5:170937769-170937809
  hypo
gattacaggtgtgagccaccgcacccggccaactttgagc

SEQ ID NO: 70515 - DNA, 30 bp, Homo sapiens; identical to SEQ ID NO: 4396
  chr5:171022582-171022612
  hypo

SEQ ID NO: 70516 - DNA, 30 bp, Homo sapiens
  chr5:171341739-171341769
  hypo
acccatgaggtttccgatgattgcacaaaa

SEQ ID NO: 70517 - DNA, 462 bp, Homo sapiens
  chr5:171351589-171352051
  hypo
taccgaacatgggtaggtaaaacgctgtaatactgtagccctccaccctctgccggtgccaggcagcagccccgcatgacaggaagcagccacggggccaggccagcccaggagccgtgggccagagcagggcgacaggattaaatgagctgtaacataagtgggctgaaacacgtcccacccccccacccccgctgattggtagtgctgcagagaggagagaagagctacaacccttctggggccccagacctcgccactcccagagccagagttgcgacatgctgtaacaccctctttggggtcacgcggatgctggtgtctccaaaagtttcaagtgccaccgcattcccccttgtctagatgccggtgcccaaggcagaagcaggctacagcacgcctggccccggcacagactgagtgcgggatcagggccagggcgctaagagcagcccaccaggc

SEQ ID NO: 70518 - DNA, 27 bp, Homo sapiens
  chr5:171367903-171367930
  hypo
acagacgctgacctgaaaaggcaccca

SEQ ID NO: 70519 - DNA, 30 bp, Homo sapiens; identical to SEQ ID NO: 19852
  chr5:171382191-171382221
  hypo

SEQ ID NO: 70520 - DNA, 30 bp, Homo sapiens
  chr5:171410135-171410165
  hypo
gtgagctgtttgtgccgctacactccagcc

SEQ ID NO: 70521 - DNA, 30 bp, Homo sapiens
  chr5:171410553-171410583
  hypo
ctaggtagattgtgtcggaattgaattggg

SEQ ID NO: 70522 - DNA, 30 bp, Homo sapiens
  chr5:171427595-171427625
  hypo
ccttttccacaccatcggtcttgacttcgc

SEQ ID NO: 70523 - DNA, 267 bp, Homo sapiens
  chr5:171470997-171471264
  hypo
gtgcgggggccagcacgcatcgcagcctggcagtacagcctgtgcttttccatgcctccggtgccaacaccccgcacgtgccacaccaactgctccacctaacatgctcagtggcacaggctcaggcagcaaacgtgttccaacccacctgggcagaagaggccaggccagcagaccaagtcctgtgtgtacgcgtatgtgtgtgcattcacacccatgtgcaggaagggggacgcgagatggcatgaaacacgggagaagcagaat

SEQ ID NO: 70524 - DNA, 30 bp, Homo sapiens
  chr5:171481205-171481235
  hypo
gcccacaaggggctcggccacaccccaacc

SEQ ID NO: 70525 - DNA, 277 bp, Homo sapiens; identical to SEQ ID NO: 19853
  chr5:171523261-171523538
  hypo

SEQ ID NO: 70526 - DNA, 30 bp, Homo sapiens
  chr5:171528887-171528917
  hypo
cagagcacagcaaggcggctgggcaggctg

SEQ ID NO: 70527 - DNA, 82 bp, Homo sapiens
  chr5:171529692-171529774
  hypo
gctgacccatggcacagaaaccgctgacaaccttgacaagagcagctgtgatagagtggacgggtttaagagcaaattcagc

SEQ ID NO: 70528 - DNA, 296 bp, Homo sapiens
  chr5:171533430-171533726
  hypo
aagggaaaaagaggcacgaagggcccgggggggctcagaaacgcctgaagacccccaggccccaacctctcctttggagctagcagcaccaggagaacgctaccactgcacctccccagccccgtccaccacatattccagccctaatcccggcgcaggcaccccggcaggtggccctgcccctgcccctcaccacttagagggcgtgagcagcgtgggagggtccgacttggcgatctttagcaggacccgcatggggttgagctcgtggtgtggcggctcgatctgggccatct

SEQ ID NO: 70529 - DNA, 30 bp, Homo sapiens
  chr5:171534419-171534449
  hypo
tactgttcaccttcacggtccccatccccg

SEQ ID NO: 70530 - DNA, 86 bp, Homo sapiens; identical to SEQ ID NO: 42294
  chr5:171541757-171541843
  hypo

SEQ ID NO: 70531 - DNA, 30 bp, Homo sapiens; identical to SEQ ID NO: 19855
  chr5:171682601-171682631
  hypo

SEQ ID NO: 70532 - DNA, 46 bp, Homo sapiens
  chr5:171724014-171724060
  hypo
gaatcccacgggcgtacggcttcaggagtctcgaatcccacgggcg

SEQ ID NO: 70533 - DNA, 31 bp, Homo sapiens
  chr5:171762546-171762577
  hypo
cgcctcacaggcttgccgtaaggattaaagg

SEQ ID NO: 70534 - DNA, 507 bp, Homo sapiens; identical to SEQ ID NO: 19857
  chr5:171766369-171766876
  hypo

SEQ ID NO: 70535 - DNA, 73 bp, Homo sapiens
  chr5:171769328-171769401
  hypo
ctgtcacctcattttacgcatgcagaacggagcctcaggagagctgaggaacacacagcgggtcctgtagaag

SEQ ID NO: 70536 - DNA, 93 bp, Homo sapiens; identical to SEQ ID NO: 19859
  chr5:171777274-171777367
  hypo

SEQ ID NO: 70537 - DNA, 18 bp, Homo sapiens
  chr5:171782457-171782475
  hypo
acccgggtcccagaaaga

SEQ ID NO: 70538 - DNA, 110 bp, Homo sapiens
  chr5:171808699-171808809
  hypo
ccacctccacctctgtggacagaagctagatgaatctacggctcagcccctgcctcacgggctcagcctgctcagttccgacacacctcgataagtgctgtgggcaggtg

SEQ ID NO: 70539 - DNA, 25 bp, Homo sapiens
  chr5:171818129-171818154
  hypo
ccaccacgcccggcttgcagcttcc

SEQ ID NO: 70540 - DNA, 202 bp, Homo sapiens
  chr5:171821578-171821780
  hypo
atcaattggtatcaggcgtttgacagccacgtcccggatgtggcttcgtctgaagagaatcttacctgcagaagatgagagcaaagacagtgttgtcagggaacagggacaagctctcagcaacctgagagggtgtggacatggcggttcctagggtaggtctgagtggtgccaaaattcctggctgcgatcaaggtacccc

SEQ ID NO: 70541 - DNA, 45 bp, Homo sapiens
  chr5:171858872-171858917
  hypo
gataccttatttaggccgggcgcagtggctcgtaatcctagatca

SEQ ID NO: 70542 - DNA, 115 bp, Homo sapiens
  chr5:171859508-171859623
  hypo
ttttcaccgctctgcacgtgcccatgtccgaaaatgcccacaaaagtgcttcgagtatcgcttttgagttacaaataaattttagcaagtaggcaaattcgcaaacatgaaatct

SEQ ID NO: 70543 - DNA, 31 bp, Homo sapiens; identical to SEQ ID NO: 19863
  chr5:171863585-171863616
  hypo

SEQ ID NO: 70544 - DNA, 188 bp, Homo sapiens
  chr5:171867142-171867330
  hypo
atttcaagtgagggcctctctcgtgttgacagagctgtccagagtgaatggagccgccaacaagagcacccactacgcgcaaggcagtagcatcaaagctgtcttcaaggagcacgcggtcgagatggcaaagtagcaatcctgcacgtcctcctacacaatcacccgcctgggtttctgccactcca

SEQ ID NO: 70545 - DNA, 31 bp, Homo sapiens
  chr5:171892635-171892666
  hypo
gcaggcgtgaggaaccgcgcctggccaactt

SEQ ID NO: 70546 - DNA, 151 bp, Homo sapiens; identical to SEQ ID NO: 19864
  chr5:171916859-171917010
  hypo

SEQ ID NO: 70547 - DNA, 66 bp, Homo sapiens
  chr5:172016614-172016680
  hypo
ccaagcacagagctgacgtgctgtctagtgaccctaggcacaagaaggctgcgatgagccttatgg

SEQ ID NO: 70548 - DNA, 33 bp, Homo sapiens; identical to SEQ ID NO: 19865
  chr5:172062314-172062347
  hypo

SEQ ID NO: 70549 - DNA, 235 bp, Homo sapiens
  chr5:172074241-172074476
  hypo
gcagagagggaagagggagggcgccaggtcgcagcccgacaggtagcacacgctcacctgggcagtgtcgcggggtggtccgagcttctgcacacctgccctgcactaggccctttattccatcccattgaagccgtcatgagagccttgcgaggcagtcttctcatgtcacagaaggggaaactgaggctcagaggggtagtgagacctgcccggcccaggtggccaggaagtg

SEQ ID NO: 70550 - DNA, 30 bp, Homo sapiens
  chr5:172093498-172093528
  hypo
agagcagaagagggcgcccctagccaaaaa

SEQ ID NO: 70551 - DNA, 95 bp, Homo sapiens; identical to SEQ ID NO: 19867
  chr5:172097650-172097745
  hypo

SEQ ID NO: 70552 - DNA, 28 bp, Homo sapiens
  chr5:172100845-172100873
  hypo
agaaattcaaatgtggctacacgcggtg

SEQ ID NO: 70553 - DNA, 40 bp, Homo sapiens; identical to SEQ ID NO: 19868
  chr5:172105003-172105043
  hypo

SEQ ID NO: 70554 - DNA, 30 bp, Homo sapiens
  chr5:172110196-172110226
  hypo
catgtcaaggaaaccgaggatggtgcttaa

SEQ ID NO: 70555 - DNA, 383 bp, Homo sapiens
  chr5:172113699-172114082
  hypo
cccgctgagccccccggtgtcccccgtgttctccccaccggagccggcaggcatcaagaatggcgagtgcacggtgtgcttcgatggcgaggtggacacggtcatctacacgtgtggacacatgtgcctgtgccacagctgcggcctgcggctcaagcgacaggcccgggcctgctgccccatctgccggcggcccatcaaggacgtcattaagatctacaggccatagcctagcctgcccacgggccttggccggtgcaaggtcacctttctgaaggccccctgggctgggcaaccacatggctgccagggagtccacgggcagcggccatctctccagtggtgggcaaggtgtgacagtcgtggagcgaggcccacagggc

SEQ ID NO: 70556 - DNA, 31 bp, Homo sapiens
  chr5:172118020-172118051
  hypo
gcctcctggcatttctcggtatttaactgtc

SEQ ID NO: 70557 - DNA, 30 bp, Homo sapiens
  chr5:172189359-172189389
  hypo
cggcagcatgccatcgccttctccagccct

SEQ ID NO: 70558 - DNA, 31 bp, Homo sapiens; identical to SEQ ID NO: 19871
  chr5:172234014-172234045
  hypo

SEQ ID NO: 70559 - DNA, 121 bp, Homo sapiens; identical to SEQ ID NO: 19872
  chr5:172235650-172235771
  hypo

SEQ ID NO: 70560 - DNA, 200 bp, Homo sapiens; identical to SEQ ID NO: 19873
  chr5:172264178-172264378
  hypo

SEQ ID NO: 70561 - DNA, 98 bp, Homo sapiens
  chr5:172307698-172307796
  hypo
ttggctttctcttctgtaaagcgaacgggttggacacagtgatctcagaatccctgagagagctgaccgtgaggagcgttgagggcagggggccctat

SEQ ID NO: 70562 - DNA, 209 bp, Homo sapiens; identical to SEQ ID NO: 19874
  chr5:172346277-172346486
  hypo

SEQ ID NO: 70563 - DNA, 435 bp, Homo sapiens
  chr5:172353788-172354223
  hypo
ggcacagcagacgcacgcacgcagtggataccagctattaccattattgttgctctcatcacagccacatcatcatccttagttgaactaattacctaagatcccacagggagctatggcagaaccaggatctgttctgcctccaggtcgcaccgtgagaacaggtctgtgggtggcccagtcagctgtgaccacatggctgcctcccccacacctcactctcctcctgctcagactcctcccatcgatagtggctcctcctagagtcctcgccctccttagctccctggcaccttggcccagatcaaagagaaccgcacatctccacacgcagacaggagagcacgcatacctttcgtgcacaccaacacacatgagctcacatggccccagacacgtgcacagaatgggcccgggaggcctgtgtgctcaagc

SEQ ID NO: 70564 - DNA, 133 bp, Homo sapiens; identical to SEQ ID NO: 19875
  chr5:172367588-172367721
  hypo

SEQ ID NO: 70565 - DNA, 23 bp, Homo sapiens
  chr5:172384946-172384969
  hypo
ttaactgtgaagggcccggaata

SEQ ID NO: 70566 - DNA, 447 bp, Homo sapiens; identical to SEQ ID NO: 4404
  chr5:172385501-172385948
  hypo

SEQ ID NO: 70567 - DNA, 164 bp, Homo sapiens; identical to SEQ ID NO: 42307
  chr5:172386282-172386446
  hypo

SEQ ID NO: 70568 - DNA, 30 bp, Homo sapiens
  chr5:172409775-172409805
  hypo
aggctcagcaaggacgagttgggtagaaag

SEQ ID NO: 70569 - DNA, 103 bp, Homo sapiens; identical to SEQ ID NO: 42309
  chr5:172444178-172444281
  hypo

SEQ ID NO: 70570 - DNA, 35 bp, Homo sapiens; identical to SEQ ID NO: 19877
  chr5:172454587-172454622
  hypo

SEQ ID NO: 70571 - DNA, 320 bp, Homo sapiens
  chr5:172461479-172461799
  hypo
attagctgccttaaacgttaacagcacatttgaatgccttattctacaatgcagcgtgttttcctttgccttttttgcactttggtgaattacgtgcctccataacctgaactgtgccgactccacaaaacgattatgtactcttctgagatagaagatgctgttcttctgagagatacgttactctctccttggaatctgtggatttgaagatggctcctgccttctcacgtgggaatcagtgaagtgtttagaaactgctgcaagacaaacaagactccagtggggtggtcagtaggagagcacgttcagagggaaga

SEQ ID NO: 70572 - DNA, 488 bp, Homo sapiens; identical to SEQ ID NO: 42317
  chr5:172659537-172660025
  hypo

SEQ ID NO: 70573 - DNA, 75 bp, Homo sapiens; identical to SEQ ID NO: 42318
  chr5:172660141-172660216
  hypo

SEQ ID NO: 70574 - DNA, 856 bp, Homo sapiens; identical to SEQ ID NO: 42322
  chr5:172665285-172666141
  hypo

SEQ ID NO: 70575 - DNA, 244 bp, Homo sapiens
  chr5:172724558-172724802
  hypo
gtgggccggcttctccgctgcccactcccgcctggtcattccgtgcaggggcatctcctgactgctcttcgcaacaaaccttgcaattttctgtcttgaatctgtttcctgtgaagcccatcgaagaccactgccttctcgggcaggcctccactgccagctccagctgcctccccaccgtgagtcccctggcctggggacagatacaggctcattcccgagtagcctccgatattgattggct

SEQ ID NO: 70576 - DNA, 30 bp, Homo sapiens
  chr5:172725067-172725097
  hypo
tgtgagggtggggcacggccatggcagcgt

SEQ ID NO: 70577 - DNA, 223 bp, Homo sapiens; identical to SEQ ID NO: 19879
  chr5:172744790-172745013
  hypo

SEQ ID NO: 70578 - DNA, 197 bp, Homo sapiens
  chr5:172765670-172765867
  hypo
cacatggggaaaggttcgagggcaaggagagatgatctatggggtgcgcaagtggggatggctttggtgtgggtgggaagggtaggggcttggagctaggtgtcgagggattcgagtctcagccttgatgtggattagctgtgtgaccatgaccagattacttaacctctctgagcttcaatcgggtcaacataggc

SEQ ID NO: 70579 - DNA, 30 bp, Homo sapiens
  chr5:173089860-173089890
  hypo
gctcccgggtgaatccggtgcgcatccagg

SEQ ID NO: 70580 - DNA, 30 bp, Homo sapiens; identical to SEQ ID NO: 19880
  chr5:173180671-173180701
  hypo

SEQ ID NO: 70581 - DNA, 144 bp, Homo sapiens
  chr5:173396948-173397092
  hypo
ggttgcgagtcagcagcgctgggagcctgagactacatctctaccaagctatccagtgggctccatgctactgcttctccatagaagttagttcttgagaaagccgtgaacgttcagacctgggagtaacgctgtcagaatgag

SEQ ID NO: 70582 - DNA, 30 bp, Homo sapiens; identical to SEQ ID NO: 19881
  chr5:173415976-173416006
  hypo

SEQ ID NO: 70583 - DNA, 30 bp, Homo sapiens
  chr5:173416259-173416289
  hypo
ggctgcgatggcggcggcaggccggggtcg

SEQ ID NO: 70584 - DNA, 30 bp, Homo sapiens
  chr5:173539172-173539202
  hypo
ccctgggacccggtgcgactcctgcacctg

SEQ ID NO: 70585 - DNA, 30 bp, Homo sapiens
  chr5:173622072-173622102
  hypo
atgctcatcactgccgtgctgagcaggcct

SEQ ID NO: 70586 - DNA, 21 bp, Homo sapiens
  chr5:173780908-173780929
  hypo
agccaccgtgcctggcctcca

SEQ ID NO: 70587 - DNA, 41 bp, Homo sapiens
  chr5:174029707-174029748
  hypo
gattgcaggtgtgagccaccgtgcctggcctctcctatagt

SEQ ID NO: 70588 - DNA, 26 bp, Homo sapiens
  chr5:174056496-174056522
  hypo
gtggaaggacagtgatcgcttagaaa

SEQ ID NO: 70589 - DNA, 89 bp, Homo sapiens; identical to SEQ ID NO: 42349
  chr5:174220727-174220816
  hypo

SEQ ID NO: 70590 - DNA, 205 bp, Homo sapiens; identical to SEQ ID NO: 42350
  chr5:174220856-174221061
  hypo

SEQ ID NO: 70591 - DNA, 150 bp, Homo sapiens
  chr5:174350057-174350207
  hypo
gagcgcagcgtggacttggtgtcgccgcttttggcatggcggccttttccggcccggctgggccaatcctgttgctgaacccgcaggaagatcccgggtttcagaaggagggggcgcaggttcgcaagcgcacaactctgtggaaaaaaa

SEQ ID NO: 70592 - DNA, 44 bp, Homo sapiens
  chr5:174667549-174667593
  hypo
atagaattgtaaggccgggcacggtggctcacgcctgtaatccc

SEQ ID NO: 70593 - DNA, 30 bp, Homo sapiens; identical to SEQ ID NO: 42351
  chr5:174728096-174728126
  hypo

SEQ ID NO: 70594 - DNA, 79 bp, Homo sapiens
  chr5:174920752-174920831
  hypo
aaaaagtacaattaccgatagagagaatgaacctgagaagcttgccggggtgaagaacagaggtcggcaaactttttcc

SEQ ID NO: 70595 - DNA, 23 bp, Homo sapiens
  chr5:174921426-174921449
  hypo
gatcatctttatttgcgacagca

SEQ ID NO: 70596 - DNA, 30 bp, Homo sapiens; identical to SEQ ID NO: 19884
  chr5:174949926-174949956
  hypo

SEQ ID NO: 70597 - DNA, 619 bp, Homo sapiens; identical to SEQ ID NO: 42356
  chr5:175084695-175085314
  hypo

SEQ ID NO: 70598 - DNA, 130 bp, Homo sapiens; identical to SEQ ID NO: 42357
  chr5:175085524-175085654
  hypo

SEQ ID NO: 70599 - DNA, 199 bp, Homo sapiens
  chr5:175110259-175110458
  hypo
ttccttttgcctggactctaccgcatgcaagatcaccatcaccgtggtccttgcggtcctcatcctcatcaccgttgctggcaatgtggtcgtctgtctggccgtgggcttgaaccgccggctccgcaacctgaccaattgtttcatcgtgtccttggctatcactgacctgctcctcggcctcctggtgctgcccttc

SEQ ID NO: 70600 - DNA, 30 bp, Homo sapiens
  chr5:175139214-175139244
  hypo
agtggacccaagagccgtgaggttctagag

SEQ ID NO: 70601 - DNA, 250 bp, Homo sapiens
  chr5:175139688-175139938
  hypo
cataactcaatgtttcggaggtctttgcagaagtcagtgccgtgtccctgacctcctcattcaaggtcacagagcacaaagtgcttctcacgtcctgagatgccactgggcaagctgctgcactggtctggcctgatcttggccctcaccaccggggccatttggggcattgccagagttctcgtgcatctggtgggcctggcaggactctcggggaaatagggccccaaagggacgcagtctggaccac

SEQ ID NO: 70602 - DNA, 1676 bp, Homo sapiens; identical to SEQ ID NO: 42362
  chr5:175298494-175300170
  hypo

SEQ ID NO: 70603 - DNA, 101 bp, Homo sapiens; identical to SEQ ID NO: 42363
  chr5:175300216-175300317
  hypo

SEQ ID NO: 70604 - DNA, 31 bp, Homo sapiens
  chr5:175337161-175337192
  hypo
ctccacttcaggaatgcgtcccgccatcccc

SEQ ID NO: 70605 - DNA, 30 bp, Homo sapiens
  chr5:175348886-175348916
  hypo
tgctacatgaaacccgttcgcaagcagcag

SEQ ID NO: 70606 - DNA, 54 bp, Homo sapiens
  chr5:175559712-175559766
  hypo
ggcatgtgtagcagtgggctgcgagtaggagccgggttcaagtaggagtagggt

SEQ ID NO: 70607 - DNA, 6 bp, Homo sapiens
  chr5:175578295-175578301
  hypo
tttatt

SEQ ID NO: 70608 - DNA, 30 bp, Homo sapiens
  chr5:175610504-175610534
  hypo
cctggctaagccgcccgcatcactgtgaag

SEQ ID NO: 70609 - DNA, 241 bp, Homo sapiens
  chr5:175777487-175777728
  hypo
ctaagagctcgggagcgagactaactccacagcccccaactaactgagctggtaacttcaaaaccacagccacatttcaagccatgaacactgaaggttttgttttttcaaagttcctaagagcttacgtggagtgcttcggccactcgaaggtacttggtctcctcggtggtgaggcccttgtggggtgtgtagccagcatctctcagccctgcctgtcgctcaaaatgctgaatgcttt

SEQ ID NO: 70610 - DNA, 761 bp, Homo sapiens; identical to SEQ ID NO: 42367
  chr5:175792170-175792931
  hypo

SEQ ID NO: 70611 - DNA, 106 bp, Homo sapiens; identical to SEQ ID NO: 42368
  chr5:175792997-175793103
  hypo

SEQ ID NO: 70612 - DNA, 632 bp, Homo sapiens
  chr5:175831151-175831783
  hypo
attgctgggtgtgactcgccacatagtagctaatagggcccaaagtcacttctgtgacgcatagtttgtgtgcctgcttgtcttcctctcaagacaagactagagactgggtccccagctccggttgcccccaggtctcatggcccgccttcctctgggacgcacccccacacaccaccctcagctcgcctaggggctgggtcaggagtttgtgagaagcgtccggggctgcagagcacttttttccacagccctttggggcagcggagcggagcctctaattcgcattttacaaatgagaagccaggctcagagtagttaagtgactagcccacagccagccagctgggaaaaagcagaaagtgaagtccaggtcttctgactccatctaaacctccgctgcagcctgcagtctgggtgtgggaacagccttaaggaaactcagcccccacggtgtcctgccccagtcccaaggtgccaagcctggccaaactgggcccacatctccgccacctgccaccagctgcaaggcccactgatgcactctagtgggggctatgcagggctcacccgaaacctttggcctctcctggcacgtccctttgtgcagcaggtcccgggctccggtgaac

SEQ ID NO: 70613 - DNA, 30 bp, Homo sapiens; identical to SEQ ID NO: 19896
  chr5:175840779-175840809
  hypo

SEQ ID NO: 70614 - DNA, 30 bp, Homo sapiens
  chr5:175842207-175842237
  hypo
aatcataatagccccggaccacctttggaa

SEQ ID NO: 70615 - DNA, 37 bp, Homo sapiens
  chr5:175871771-175871808
  hypo
gagatgacaggcatgagccaccgcgcctggccaacac

SEQ ID NO: 70616 - DNA, 37 bp, Homo sapiens
  chr5:175872856-175872893
  hypo
aaacagggccaggtgcgatggctcacgtctgtaatcc

SEQ ID NO: 70617 - DNA, 37 bp, Homo sapiens; identical to SEQ ID NO: 19897
  chr5:175879332-175879369
  hypo

SEQ ID NO: 70618 - DNA, 18 bp, Homo sapiens
  chr5:175924883-175924901
  hypo
ctcatacctgtaatccga

SEQ ID NO: 70619 - DNA, 30 bp, Homo sapiens
  chr5:175936006-175936036
  hypo
cactttatgcctctcgccttttgataatag

SEQ ID NO: 70620 - DNA, 30 bp, Homo sapiens
  chr5:175955090-175955120
  hypo
ccggccagcatgaccgtgctcggccccctg

SEQ ID NO: 70621 - DNA, 18 bp, Homo sapiens
  chr5:175971441-175971459
  hypo
ttctctctttcctttttt

SEQ ID NO: 70622 - DNA, 78 bp, Homo sapiens
  chr5:175971758-175971836
  hypo
gaggctgtgagtctgtgacatcacggggatattcttgggctggttccttgtctgtaagagcaacgaagggactttgta

SEQ ID NO: 70623 - DNA, 31 bp, Homo sapiens
  chr5:175975194-175975225
  hypo
tattatatgtgtggttcgttgttgaccaaaa

SEQ ID NO: 70624 - DNA, 205 bp, Homo sapiens
  chr5:176003231-176003436
  hypo
cagtgggagcctggatcgagtgacggtgtcatgtggtgctgggtggcggtgctggtggtgcagggtgtgatggcggagaatgggggtgctgggtgctctctggaagcctgtgttggtaagcagtatcatcctctgggcgatccgtgtggggctgaatagaaggccatgctgagtggaggctgacgtagaacgtcagatgatgctg

SEQ ID NO: 70625 - DNA, 163 bp, Homo sapiens; identical to SEQ ID NO: 19901
  chr5:176012686-176012849
  hypo

SEQ ID NO: 70626 - DNA, 77 bp, Homo sapiens; identical to SEQ ID NO: 19902
  chr5:176016152-176016229
  hypo

SEQ ID NO: 70627 - DNA, 30 bp, Homo sapiens
  chr5:176022744-176022774
  hypo
atgaaaatatatgacgctgccctgcctcct

SEQ ID NO: 70628 - DNA, 1025 bp, Homo sapiens; identical to SEQ ID NO: 42380
  chr5:176056802-176057827
  hypo

SEQ ID NO: 70629 - DNA, 98 bp, Homo sapiens; identical to SEQ ID NO: 19905
  chr5:176066072-176066170
  hypo

SEQ ID NO: 70630 - DNA, 52 bp, Homo sapiens; identical to SEQ ID NO: 19906
  chr5:176077109-176077161
  hypo

SEQ ID NO: 70631 - DNA, 31 bp, Homo sapiens; identical to SEQ ID NO: 19907
  chr5:176087845-176087876
  hypo

SEQ ID NO: 70632 - DNA, 171 bp, Homo sapiens; identical to SEQ ID NO: 19908
  chr5:176225692-176225863
  hypo

SEQ ID NO: 70633 - DNA, 30 bp, Homo sapiens
  chr5:176295296-176295326
  hypo
ggggagggcgcacggcgggagggtgtcacc

SEQ ID NO: 70634 - DNA, 329 bp, Homo sapiens
  chr5:176295607-176295936
  hypo
cctggagcagggcatcgtgctgccctgccgtccaccggagggcatccctccagccgaggtgagggctcctctagtgcccacgtctggacctgggctcctgcctggtcaccctggcaggggccactctgggcagggccagcatgggctggcagtacatggcagggctccctcccctaggtggagtggctccggaacgaggacctggtggacccgtccctggaccccaatgtatacatcacgcgggagcacagcctggtggtgcgacaggcccgccttgctgacacggccaactacacctgcgtggccaagaacatcgtggcacgtcgccg

SEQ ID NO: 70635 - DNA, 30 bp, Homo sapiens
  chr5:176296712-176296742
  hypo
cctctcaacgggggcgctttctgtgagggg

SEQ ID NO: 70636 - DNA, 30 bp, Homo sapiens
  chr5:176307728-176307758
  hypo
tggctggtgccccacgcggggcctgtcatg

SEQ ID NO: 70637 - DNA, 188 bp, Homo sapiens
  chr5:176315296-176315484
  hypo
tgccaactaatcatgcggatcacgtttccacaatacctggggtgccgctcacacactcggcctccggtggccacagcaacctggagtgtttgttgctcccggctgtgctggaggcaggagagaacagcggccagggcggcagcacagagctgggcagcccgcgtgcacacggccgcacagacgtgctg

SEQ ID NO: 70638 - DNA, 23 bp, Homo sapiens
  chr5:176328428-176328451
  hypo
tcccacaatctcaatagtccacg

SEQ ID NO: 70639 - DNA, 30 bp, Homo sapiens
  chr5:176382803-176382833
  hypo
atgtgtatacgcatacgagtgttgagacat

SEQ ID NO: 70640 - DNA, 31 bp, Homo sapiens; identical to SEQ ID NO: 19909
  chr5:176456647-176456678
  hypo

SEQ ID NO: 70641 - DNA, 30 bp, Homo sapiens
  chr5:176520487-176520517
  hypo
ttgctcgccggcctcgtgagtctagatcta

SEQ ID NO: 70642 - DNA, 32 bp, Homo sapiens; identical to SEQ ID NO: 19910
  chr5:176544344-176544376
  hypo

SEQ ID NO: 70643 - DNA, 287 bp, Homo sapiens
  chr5:176558643-176558930
  hypo
gtcacacagggcaacgccaaaaatggcctttctcccaggtgggctcaaagttaacagaaggcagtgagtaaacagtccactggggcaataactatgcacatttactaagccatgggaagaatagtagtcacgtggccctcgagggcggtgccctcagcttgagatggagttaactccaaatctaatcacagaaggctttctggaggaggcggaatttttatggcggccggatccggctttctctgaacagcgagaaggcgcttagcgccctagggaccaggtaactc

SEQ ID NO: 70644 - DNA, 136 bp, Homo sapiens; identical to SEQ ID NO: 42394
  chr5:176560144-176560280
  hypo

SEQ ID NO: 70645 - DNA, 22 bp, Homo sapiens
  chr5:176576219-176576241
  hypo
gttttgtttttttttttgagac

SEQ ID NO: 70646 - DNA, 3 bp, Homo sapiens
  chr5:176602185-176602188
  hypo
ttg

SEQ ID NO: 70647 - DNA, 77 bp, Homo sapiens
  chr5:176611703-176611780
  hypo
gtgtgtgggtgtgtgtgtgcacgcaaggatgggatctcgccaaagttgatcttgaaatcctggcctcgagcgatcac

SEQ ID NO: 70648 - DNA, 31 bp, Homo sapiens
  chr5:176640469-176640500
  hypo
ttttctttttttttcttgagacggagtctcg

SEQ ID NO: 70649 - DNA, 28 bp, Homo sapiens
  chr5:176646196-176646224
  hypo
tttttttttgagagggagtctcgctctg

SEQ ID NO: 70650 - DNA, 98 bp, Homo sapiens; identical to SEQ ID NO: 19913
  chr5:176663883-176663981
  hypo

SEQ ID NO: 70651 - DNA, 77 bp, Homo sapiens; identical to SEQ ID NO: 19914
  chr5:176674063-176674140
  hypo

SEQ ID NO: 70652 - DNA, 31 bp, Homo sapiens
  chr5:176680868-176680899
  hypo
atcaagcagtcctcctcgttcagcctctgaa

SEQ ID NO: 70653 - DNA, 163 bp, Homo sapiens; identical to SEQ ID NO: 19915
  chr5:176694902-176695065
  hypo

SEQ ID NO: 70654 - DNA, 102 bp, Homo sapiens
  chr5:176698048-176698150
  hypo
gagtataaggaataccgcaggtctgagcctgcctaagctctgagattctgccttaatcagggggtttctaggtgcctctgacttcttcgagcttgtattttt

SEQ ID NO: 70655 - DNA, 30 bp, Homo sapiens
  chr5:176742704-176742734
  hypo
cagcccctgctatccggggaggaacactgc

SEQ ID NO: 70656 - DNA, 153 bp, Homo sapiens
  chr5:176757376-176757529
  hypo
cgtggtgccgatgacgtgattgtagcagccgtggagagctcgtctctgggcctcggctctacacacctggcctaaagccctccagcacctgacaggtgagcgtcgtggatgaaatgagttatgtgcctcaatcgctccgaagcagggcctgtc

SEQ ID NO: 70657 - DNA, 340 bp, Homo sapiens
  chr5:176764094-176764434
  hypo
gtgagctgggctgggaaccaacgcctggcccggcccactcaccagacaggtcgccggtgccggcggaggccccgaagtagtagccggtgggcaggcgcactcccgtgatgtcaatgcagttcttccactcgttcttgtcctccaggtcggtcatcacctgcagggcccagcacgctaagcacctcgcaggacagcagcctgccctcctgagcctctgtgggaccagcacagggccaccagctgccacccccaccgcctagcctgctcaccgtcagacggccccgggagtagcgcacagccaggaaggtgtcgtgatcgcggttgcggaagtcagccgtgc

SEQ ID NO: 70658 - DNA, 43 bp, Homo sapiens
  chr5:176780527-176780570
  hypo
ttggtcatatatttttcgttcgcttttttattattaaagtcac

SEQ ID NO: 70659 - DNA, 359 bp, Homo sapiens
  chr5:176795049-176795408
  hypo
ggcccctgcaggatggctccaaacaaggcccaccagtggggaacaggcttccgcagaggatgggtgagggcggggggctgttcgcgttcatcgctccctcttcactagagctgggcgggactgcaaacgccgccttgcgccgagagtctcagggctccctcaactcctccgccagcctggaccttggcttcctagccttcgtcagcagcaaatctgaggtgagccgactgttggggaagacaagatgctctatgggctagagtcactactcaggcccatttacgtggtggccctcattccaagttgctgtccttactgcgtctcccagcttgctctgcgtagccaacccttcagcctcc

SEQ ID NO: 70660 - DNA, 31 bp, Homo sapiens; identical to SEQ ID NO: 19919
  chr5:176810601-176810632
  hypo

SEQ ID NO: 70661 - DNA, 30 bp, Homo sapiens
  chr5:176813826-176813856
  hypo
ctctcaggtgggcgccgacactgcagtcca

SEQ ID NO: 70662 - DNA, 91 bp, Homo sapiens; identical to SEQ ID NO: 42402
  chr5:176827092-176827183
  hypo

SEQ ID NO: 70663 - DNA, 30 bp, Homo sapiens
  chr5:176863149-176863179
  hypo
gatcgcaggccagtcgcccttccagcagag

SEQ ID NO: 70664 - DNA, 32 bp, Homo sapiens
  chr5:176865065-176865097
  hypo
gacaaagaaaactaaagcaagcggctgggtgc

SEQ ID NO: 70665 - DNA, 30 bp, Homo sapiens; identical to SEQ ID NO: 19920
  chr5:176886297-176886327
  hypo

SEQ ID NO: 70666 - DNA, 150 bp, Homo sapiens
  chr5:176901646-176901796
  hypo
gaaaccgtccacagcgcttagaagccttttccaccactacaaagcctccaacctcgacctccctgagcaaacttcacctggtcccaaccgcaccgcggaggaggaggtggttctagccaggcctccgagttctgcgttgggtaattggct

SEQ ID NO: 70667 - DNA, 31 bp, Homo sapiens
  chr5:176912593-176912624
  hypo
tggggactgtgtcacacggaggaggacctct

SEQ ID NO: 70668 - DNA, 709 bp, Homo sapiens
  chr5:176919045-176919754
  hypo
cctacatctatttggaggctacggggagaggacgactcaggtttcaaggggcccatttgggagtggcgatctcagtccacgcaggaccgagggctgaccgagtgcgggcgagcacgcagcgccggcggcgggaggcagcaggcggacagacaggcggacagacaggcggacatgcgtggtgccaggaccgtgcagcagcccctggctcaactccagggccctagacccgccttagctccggtttctgccctccactcccggccagggattggggtaccgagaatgtgccaggagggcgagcaggcctggccgtccaagcccacaccgcccaccgcccggatgtcccggccagcctcgtaccttctgcggtttgctctgaaccggctgggccctggaggagaaggaaagcgtgacagcgggccgggcccgcagggatccccactgccagcgcgggcgcacccatccatgtccacccgcatacctgctgaggcccaggctgaggcgctccccgcaggcccggatcttgttctgagcttcgatgtgtgtgaggctacccgcattctcgccatcgatgctcagcacccagtcacccacggccactccggcctgcgccgctttgcccccaggagtgagctgtggagagagaagcaaagtgaccgaggccctggaccctgcagacccaagccaggctgacggtggtaacactgcc

SEQ ID NO: 70669 - DNA, 30 bp, Homo sapiens
  chr5:176922891-176922921
  hypo
ccacaaaaaatgtacgccatgctgtgcctc

SEQ ID NO: 70670 - DNA, 31 bp, Homo sapiens
  chr5:176926732-176926763
  hypo
actggttcagcagaaacgatgaagttatcct

SEQ ID NO: 70671 - DNA, 30 bp, Homo sapiens
  chr5:176931096-176931126
  hypo
ccagctccagcagccgccggtactgggcct

SEQ ID NO: 70672 - DNA, 30 bp, Homo sapiens; identical to SEQ ID NO: 19923
  chr5:176931407-176931437
  hypo

SEQ ID NO: 70673 - DNA, 30 bp, Homo sapiens; identical to SEQ ID NO: 19924
  chr5:176938851-176938881
  hypo

SEQ ID NO: 70674 - DNA, 30 bp, Homo sapiens
  chr5:176956719-176956749
  hypo
agcacacatatttacgaaaagcacatcaga

SEQ ID NO: 70675 - DNA, 30 bp, Homo sapiens; identical to SEQ ID NO: 19925
  chr5:176958368-176958398
  hypo

SEQ ID NO: 70676 - DNA, 280 bp, Homo sapiens
  chr5:176965873-176966153
  hypo
gcattcagggacccctgtcagcggttacctaccgccactgcatgttctcgacctgtctgcctttcatcttcctccatgctctttcggcaactctggcagacccacagaggcatctcgcctaggagattcttgacgagctttggcatgaagtcagggggcagcttctcaccctgcaacaccagtccattttgagaagggccttcttcccagcctttgcgttcccggtgacacagcaggcagcaagtctgcacaggctggctggaggcgggggggacctgtc

SEQ ID NO: 70677 - DNA, 44 bp, Homo sapiens; identical to SEQ ID NO: 19927
  chr5:176976122-176976166
  hypo

SEQ ID NO: 70678 - DNA, 24 bp, Homo sapiens
  chr5:176987695-176987719
  hypo
ggcgtgagccaccactcccagcct

SEQ ID NO: 70679 - DNA, 30 bp, Homo sapiens
  chr5:177022345-177022375
  hypo
atcctcgtggccatcggtgtctggcagatg

SEQ ID NO: 70680 - DNA, 545 bp, Homo sapiens
  chr5:177031059-177031604
  hypo
ttcccaggtgcttggggtagacgagttatgtgcagcctcctcgtggggaggccagagaacgggtctgtcacagggccagccctgccccgccctcctgaccctgtcccgcgcttgctccaggtccgggttgctctccggcggcctccctcggaagtgttccgtcttccacctgttcgtggcctgcctctcgctgggcttcttctccctactctggctgcagctcagctgctctggggacgtggcccgggcagtcaggggacaagggcaggagacctcgggccctccccgtgcctgccccccagagccgccccctgagcactgggaagaagacgcatcctggggcccccaccgcctggcagtgctggtgcccttccgcgaacgcttcgaggagctcctggtcttcgtgccccacatgcgccgcttcctgagcaggaagaagatccggcaccacatctacgtgctcaaccaggtggaccacttcaggtagcgcccgcccccaccctctcccctcggcacccctgcccgggctcaggcttctcaggccc

SEQ ID NO: 70681 - DNA, 30 bp, Homo sapiens
  chr5:177035504-177035534
  hypo
gatgggccgagtgacgctgcttgtctctgt

SEQ ID NO: 70682 - DNA, 154 bp, Homo sapiens
  chr5:177387549-177387703
  hypo
gagaacgtactgcaggagaaaacaggcctggcctgagacggctgtgccggctttctgaggccgtgaatggcaagacctcgagactgtcaagaggagcaagaggagtcgggatttagcgtcagtgatgaggtgcgccactcactgtgtgacttca

SEQ ID NO: 70683 - DNA, 236 bp, Homo sapiens
  chr5:177393168-177393404
  hypo
gtatgagtttgtgcgcgtgggcggtggggtgtgtctgtgtggggtgggatttgtgtggggcggccgtgtgtctgtgcccacgtctgtttccgctggtgttatactccgcctagacagcagagttgcaggtgtaagctttctcaacaaggaatgccgtccccattactccacagcgtatatgtggagcctaaccgggtggactgcaaggcagttccgaccctcaccactcagggtta

SEQ ID NO: 70684 - DNA, 30 bp, Homo sapiens; identical to SEQ ID NO: 19930
  chr5:177482814-177482844
  hypo

SEQ ID NO: 70685 - DNA, 17 bp, Homo sapiens
  chr5:177508374-177508391
  hypo
tcaacaaaagtcttggc

SEQ ID NO: 70686 - DNA, 95 bp, Homo sapiens
  chr5:177525840-177525935
  hypo
atagaaaaatcaccatcacagcggcggagtaaaacttgccgcaggcaagatccaccaactgacgcaagagagtcggagaaagatatttgcatact

SEQ ID NO: 70687 - DNA, 30 bp, Homo sapiens
  chr5:177547285-177547315
  hypo
tggcagcctgcacacgctggcctgccaccc

SEQ ID NO: 70688 - DNA, 131 bp, Homo sapiens; identical to SEQ ID NO: 19932
  chr5:177548898-177549029
  hypo

SEQ ID NO: 70689 - DNA, 70 bp, Homo sapiens
  chr5:177571375-177571445
  hypo
agagcatgccatgcccgtcccacctgttctgcctcgtatgcctccctgacctgtgtggcctatggaaaag

SEQ ID NO: 70690 - DNA, 30 bp, Homo sapiens
  chr5:177575201-177575231
  hypo
gatggaccagcccacgcctggcacctggct

SEQ ID NO: 70691 - DNA, 30 bp, Homo sapiens
  chr5:177581756-177581786
  hypo
gccgagaagccagccggggctgagggaagg

SEQ ID NO: 70692 - DNA, 30 bp, Homo sapiens
  chr5:177615716-177615746
  hypo
cttgttgggaaccccgtgtgtgtaaagggc

SEQ ID NO: 70693 - DNA, 49 bp, Homo sapiens; identical to SEQ ID NO: 19933
  chr5:177637069-177637118
  hypo

SEQ ID NO: 70694 - DNA, 281 bp, Homo sapiens
  chr5:177650773-177651054
  hypo
tccctctgttgtcaccgtaggtaacacacctctctctcctatgtctgcgcctccactccatctccaccatactgcccccgtcaggcctccccacagctcacttggggcctgctggccacttcacggtcacctgacctcaagccgccgcattccaatccatcctccacatagccctggagtcagagagcagccccggccccaggtcttagcgctctcctgcttaagactctggtggttcccgggggcctccagggcagaactgctgccgcccagcatagttc

SEQ ID NO: 70695 - DNA, 244 bp, Homo sapiens; identical to SEQ ID NO: 19935
  chr5:177653944-177654188
  hypo

SEQ ID NO: 70696 - DNA, 31 bp, Homo sapiens
  chr5:177675598-177675629
  hypo
tggtggctcttccagtcgggccacaaaagca

SEQ ID NO: 70697 - DNA, 121 bp, Homo sapiens
  chr5:177680783-177680904
  hypo
gtttttatttttttaacatcatgccctgcatggactatggctgcccgctgcccatcaaactgagtcggcatctcagtctggcatccaaagtccatctctggctgggcgtggtggctcacgc

SEQ ID NO: 70698 - DNA, 298 bp, Homo sapiens; identical to SEQ ID NO: 19936
  chr5:177708330-177708628
  hypo

SEQ ID NO: 70699 - DNA, 40 bp, Homo sapiens
  chr5:177718240-177718280
  hypo
cagtcagcggccagcacgatttatacgtcccaagtatgag

SEQ ID NO: 70700 - DNA, 126 bp, Homo sapiens
  chr5:177737218-177737344
  hypo
tccaccaacagagaggccaggcgggcttggagactggattgcaggagccgcaggagtgggggcaggacggacggcctctcctgagtctctggactatcaggtgccgagagcccaccatgggcagtg

SEQ ID NO: 70701 - DNA, 19 bp, Homo sapiens
  chr5:177739036-177739055
  hypo
aactggttcttatgagtcc

SEQ ID NO: 70702 - DNA, 208 bp, Homo sapiens
  chr5:177749733-177749941
  hypo
tggtcattccagggacacccacgggaggccctgcaggcactagggaccgggagttgggtcagccctgtccctggggttccatgcgcagcaacactcccaacacaggcatgcaccacaacgcagcatgggaaggcaggctggggacaggcggatagctcggtgggctgtgcccccagtgggtccactcgaggacatgctgtccctggca

SEQ ID NO: 70703 - DNA, 161 bp, Homo sapiens
  chr5:177778268-177778429
  hypo
gggagagcaggctcagcctcccgtgctggcagttacctggcggatgaggacggggagcaggaaccacattttctcccgctgtagaagcaaacctttggatgagcaataacgggtgtgcacagtgtgactggtgccttggcgagccttgctggggacctgtc

SEQ ID NO: 70704 - DNA, 31 bp, Homo sapiens; identical to SEQ ID NO: 19939
  chr5:177800879-177800910
  hypo

SEQ ID NO: 70705 - DNA, 159 bp, Homo sapiens
  chr5:177802447-177802606
  hypo
atcagaacttggcctttctctcggaaccctgcaatgactttctgtctcacacagagtcgatggtctcacctcacgatggcccaaaaggccctgcgtggtcccgccctgcccctccgacagcctcgttcctgctttcccgtcttacttctctcccacctt

SEQ ID NO: 70706 - DNA, 91 bp, Homo sapiens
  chr5:177852083-177852174
  hypo
gccagcggagaaaaacgcaaagcagcctgtaaaatccaaagcaaagggtaaagggttgcggccggtttggtggctcatgcctgtaatccca

SEQ ID NO: 70707 - DNA, 72 bp, Homo sapiens
  chr5:177852473-177852545
  hypo
aaaataaagccaatggtggctgtttcccgcgctcacctctgtttcagtttcctcatccgcaaaaaggtggat

SEQ ID NO: 70708 - DNA, 30 bp, Homo sapiens; identical to SEQ ID NO: 19940
  chr5:177875125-177875155
  hypo

SEQ ID NO: 70709 - DNA, 22 bp, Homo sapiens
  chr5:177884489-177884511
  hypo
acaggcacgaaccactacgccc

SEQ ID NO: 70710 - DNA, 404 bp, Homo sapiens
  chr5:177892742-177893146
  hypo
gggaggcagagtgatcgtgctacacacggtaaagaagtagactgtcctggggattcaacagcagtgagtcctctgagggactggcgtgcaggggcagggagatgtggggtggtcagtaccaaccagcggtggtgtggactcgccgcttgcctggcttcctgcctgctccggatggcgagtctaactcagcgcacacttcaggacacaaaacacagtagagcctcggggtgagtgcacctcaaggccatcgtgtccacatcaccctggtccctcagtctcccctctgcgccacctctttcctgaatcccatcctggtgaacgacccccatgaatctcatcttgggagacacacatcggcctccaagccgtgggcctcagaggcattgcaacgcaaactcactccc

SEQ ID NO: 70711 - DNA, 152 bp, Homo sapiens
  chr5:177961362-177961514
  hypo
acacccccgccttcacggtgaggattttgctgtacgaattcgcagggacataaaactctgtccatcacatgttgtaagggagggggcactgggctcagccccatcgctcactggccaagtcagaaatagcgcacagaggccagggcggtggc

SEQ ID NO: 70712 - DNA, 37 bp, Homo sapiens
  chr5:177964384-177964421
  hypo
tcacagatggggaaaccgaggccgggtggggctgggt

SEQ ID NO: 70713 - DNA, 117 bp, Homo sapiens
  chr5:178002878-178002995
  hypo
aactcacatacaccaggtgttcggaatatgaccgtagccacaactacttcacaatcttccaagcgagcaagtcaatccattgattcctctagtagcgatggataaaaacccaactca

SEQ ID NO: 70714 - DNA, 31 bp, Homo sapiens
  chr5:178006763-178006794
  hypo
cttccctgccactccacgcatccatcactta

SEQ ID NO: 70715 - DNA, 31 bp, Homo sapiens
  chr5:178012189-178012220
  hypo
gttatgagaacttaggcgggccagtggatga

SEQ ID NO: 70716 - DNA, 150 bp, Homo sapiens
  chr5:178108585-178108735
  hypo
acagtattgtcaatataggcacggtgtcgtgcagcagctgtctagagcatactcatctggcataaccgaaactgtacacctgctgagcagtacacctccatttacgccgccccccagcccctgacaaccgccattctaccctctgtctct

SEQ ID NO: 70717 - DNA, 35 bp, Homo sapiens
  chr5:178113315-178113350
  hypo
tctgtgatggaagccccatcacgtgaccgggcgcg

SEQ ID NO: 70718 - DNA, 35 bp, Homo sapiens
  chr5:178113589-178113624
  hypo
tacagtctgggctcgaaactccatctcaaaaaaaa

SEQ ID NO: 70719 - DNA, 30 bp, Homo sapiens; identical to SEQ ID NO: 19941
  chr5:178195541-178195571
  hypo

SEQ ID NO: 70720 - DNA, 31 bp, Homo sapiens; identical to SEQ ID NO: 19942
  chr5:178224674-178224705
  hypo

SEQ ID NO: 70721 - DNA, 38 bp, Homo sapiens
  chr5:178226973-178227011
  hypo
tattattgttattttttaagacggagtctcgctccgtc

SEQ ID NO: 70722 - DNA, 185 bp, Homo sapiens
  chr5:178259506-178259691
  hypo
tctcccatcaccaccaccaaccgcagccaggcaggcctcagtggcaaacgctccagcctccagcatgcacaagtggtccccgcttctcgtcctctagccggtcaggagcagctcttcctgccggccatccttctaccgctccggccgccctcctacactctgccgcacactgcattctccctcac

SEQ ID NO: 70723 - DNA, 565 bp, Homo sapiens; identical to SEQ ID NO: 42424
  chr5:178287035-178287600
  hypo

SEQ ID NO: 70724 - DNA, 167 bp, Homo sapiens; identical to SEQ ID NO: 19945
  chr5:178289145-178289312
  hypo

SEQ ID NO: 70725 - DNA, 31 bp, Homo sapiens; identical to SEQ ID NO: 19946
  chr5:178291936-178291967
  hypo

SEQ ID NO: 70726 - DNA, 85 bp, Homo sapiens
  chr5:178292217-178292302
  hypo
cctggattggaatccccgctctaccactgaacagctgtgtgactttagacgaattttttttttcttttttgagatggagtctcat

SEQ ID NO: 70727 - DNA, 31 bp, Homo sapiens; identical to SEQ ID NO: 19947
  chr5:178293312-178293343
  hypo

SEQ ID NO: 70728 - DNA, 46 bp, Homo sapiens; identical to SEQ ID NO: 19948
  chr5:178295549-178295595
  hypo

SEQ ID NO: 70729 - DNA, 377 bp, Homo sapiens
  chr5:178295948-178296325
  hypo
agtgacagagcaagactccaactcaaaaaaaaaaaaaaaagaatggtgttcgtgaaggtccaaagaagtaaagccagtgaggagaaggtagagccaggcaccgaagagagccgcgggccttgtcatagagtttggttggtgcttgagagctaagcataggctctgaggagccataagtagcccagggcaggcccaggctgcattctgcagctgccagcgcatgtgaggaacctgaccgccacagtgcagggcttgtcaagtccagagggctcagtgatggccccttgtgccacgggcccagcgaggagctgcacggcaggcagctttggtccccatagcccctgtgctggggagagctttctcgtgatgatagcttg

SEQ ID NO: 70730 - DNA, 44 bp, Homo sapiens
  chr5:178298334-178298378
  hypo
gtctgggactgttcttcgtggcagtcatgcgtccatgtggctca

SEQ ID NO: 70731 - DNA, 24 bp, Homo sapiens
  chr5:178320069-178320093
  hypo
aaaaacaaagctaggccgggcgca

SEQ ID NO: 70732 - DNA, 38 bp, Homo sapiens
  chr5:178369100-178369138
  hypo
acttgttaaagagataattctcggccgagtgcggcggc

SEQ ID NO: 70733 - DNA, 30 bp, Homo sapiens; identical to SEQ ID NO: 4478
  chr5:178382964-178382994
  hypo

SEQ ID NO: 70734 - DNA, 117 bp, Homo sapiens
  chr5:178411212-178411329
  hypo
tgcaagcccagggctgcacagcggtaaccaccaaaacggcccacagatgccgcagcccgtggagtggggagcgagcgagcacgcctcactcggaacggactcctgcaaaataacagc

SEQ ID NO: 70735 - DNA, 181 bp, Homo sapiens
  chr5:178411694-178411875
  hypo
ggggacactcaggccctgttacgtggaggaagacgggagcacctcctagtcacggagaactgcatgacccgaggcacgtggcgtgtgtggaacgaatagagaaggggctcgccgggagtggacagcaccgggagtgctccaaacgggtgagcaggtgttcgcactgaggccaccctccacc

SEQ ID NO: 70736 - DNA, 114 bp, Homo sapiens
  chr5:178416035-178416149
  hypo
catgctgtggagggcgtgggcaatggcgtacaccgcatcaatcacaaactgcaccttgccctcctgctcgtaggtggagtcccggccgatgcgttcctcgcctgtcctagggat

SEQ ID NO: 70737 - DNA, 215 bp, Homo sapiens; identical to SEQ ID NO: 4479
  chr5:178423618-178423833
  hypo

SEQ ID NO: 70738 - DNA, 505 bp, Homo sapiens; identical to SEQ ID NO: 42429
  chr5:178450648-178451153
  hypo

SEQ ID NO: 70739 - DNA, 31 bp, Homo sapiens
  chr5:178451595-178451626
  hypo
ttcaactgctgtttttcgtattgaacaacat

SEQ ID NO: 70740 - DNA, 226 bp, Homo sapiens
  chr5:178551040-178551266
  hypo
actgggaggggacaccgggagcctgcgcctggattcctcccaacctccttgcctgtgacttttctttttcccgattctactctgtatcctttcaccgtaagcccctgcaactgcaagtcccgcttctgagtctgtgagtccttctagtggattactgagcctgagggtggtcttggggagcccctgacacacgctcctccagctctgccagcgtgggccctgcatg

SEQ ID NO: 70741 - DNA, 641 bp, Homo sapiens
  chr5:178551487-178552128
  hypo
ctgggcctcggagcccgggctaccctcagtttcctgggattccagaccccgtatcatgcagaagcctctgcctgtgcagtgaagacacacattccactggtttcttagtacagcactgaccacgtggcagccactggcgccgtgaaacccacaggatgtggctcaggacaggagctacatccaggcccacgggccgaaaggggaatgctctggtcacctcagtcccacccaagctcagtttgggagctgaggacacgggatcaggggattgcttacctgggaccagggcccggctcgccaatgatcagggcagagctcgctgctgcaggcccggcggctctcaggccgggcgtcattgcagtgcttggcatgcacggagcgggtggtggtgttgtgtagcggctgaatgcagcgcacggagcgcacctgcatgcctgtccaccctcagttttggagctgaggacacgggatcgggggattgcgtacctgggaccagggcccggctcgccaacgaccagggcagagctcgcggctgcaggcccggcggctctcgggccgggcgtcattgcagtgcttggcgtgcacggagcgggtggtgttgtcgtgtagcggctgaatgcagcgcacggagcgcacctgca

SEQ ID NO: 70742 - DNA, 30 bp, Homo sapiens; identical to SEQ ID NO: 19957
  chr5:178564803-178564833
  hypo

SEQ ID NO: 70743 - DNA, 216 bp, Homo sapiens; identical to SEQ ID NO: 19958
  chr5:178576385-178576601
  hypo

SEQ ID NO: 70744 - DNA, 30 bp, Homo sapiens
  chr5:178580546-178580576
  hypo
gagtagtgcagtcccgggagctggggcagc

SEQ ID NO: 70745 - DNA, 30 bp, Homo sapiens
  chr5:178585241-178585271
  hypo
aggtgtgaaccaccgcgcccggccttttgt

SEQ ID NO: 70746 - DNA, 256 bp, Homo sapiens; identical to SEQ ID NO: 19959
  chr5:178585630-178585886
  hypo

SEQ ID NO: 70747 - DNA, 179 bp, Homo sapiens
  chr5:178589359-178589538
  hypo
ggtggggggcctgcagcggctggagcccccctgcactacaggagaccccccaccaaggattaaaggaggatgagaccactgtcgagctaagactggggctgcagtctcatctgaaggctgtaccggaggcgggtcagctcccaggctcattcaggtggtcacggcgggccccagctgag

SEQ ID NO: 70748 - DNA, 272 bp, Homo sapiens; identical to SEQ ID NO: 42432
  chr5:178594123-178594395
  hypo

SEQ ID NO: 70749 - DNA, 30 bp, Homo sapiens; identical to SEQ ID NO: 19961
  chr5:178622065-178622095
  hypo

SEQ ID NO: 70750 - DNA, 30 bp, Homo sapiens
  chr5:178622788-178622818
  hypo
gccagcgggacaagcgtgaggaacagaaac

SEQ ID NO: 70751 - DNA, 30 bp, Homo sapiens; identical to SEQ ID NO: 19962
  chr5:178634616-178634646
  hypo

SEQ ID NO: 70752 - DNA, 30 bp, Homo sapiens
  chr5:178651185-178651215
  hypo
aggtggatgctgtgcgcttactgcagccat

SEQ ID NO: 70753 - DNA, 31 bp, Homo sapiens
  chr5:178652178-178652209
  hypo
actctcaattcagccccgcacagccaagggc

SEQ ID NO: 70754 - DNA, 121 bp, Homo sapiens; identical to SEQ ID NO: 19963
  chr5:178652527-178652648
  hypo

SEQ ID NO: 70755 - DNA, 138 bp, Homo sapiens
  chr5:178665270-178665408
  hypo
cctgctgggtgtccacggattcacccccagctactgtgtaggggccagctcccctcagggactgctcctgggagaccgtgggagtcaccgcagctccctgctctgtggagcggccacgctagcagaaggaacagaggg

SEQ ID NO: 70756 - DNA, 30 bp, Homo sapiens
  chr5:178665745-178665775
  hypo
gtctggtaggtggcccgggtgctgggtgct

SEQ ID NO: 70757 - DNA, 31 bp, Homo sapiens; identical to SEQ ID NO: 19965
  chr5:178702394-178702425
  hypo

SEQ ID NO: 70758 - DNA, 31 bp, Homo sapiens
  chr5:178744775-178744806
  hypo
ccctggccagactcatcgccagctggggaga

SEQ ID NO: 70759 - DNA, 201 bp, Homo sapiens; identical to SEQ ID NO: 4482
  chr5:178770703-178770904
  hypo

SEQ ID NO: 70760 - DNA, 432 bp, Homo sapiens; identical to SEQ ID NO: 4483
  chr5:178771198-178771630
  hypo

SEQ ID NO: 70761 - DNA, 136 bp, Homo sapiens; identical to SEQ ID NO: 4484
  chr5:178771723-178771859
  hypo

SEQ ID NO: 70762 - DNA, 762 bp, Homo sapiens; identical to SEQ ID NO: 42436
  chr5:178771967-178772729
  hypo

SEQ ID NO: 70763 - DNA, 30 bp, Homo sapiens; identical to SEQ ID NO: 42437
  chr5:178772778-178772808
  hypo

SEQ ID NO: 70764 - DNA, 147 bp, Homo sapiens; identical to SEQ ID NO: 19972
  chr5:178854897-178855044
  hypo

SEQ ID NO: 70765 - DNA, 30 bp, Homo sapiens
  chr5:178855635-178855665
  hypo
ggacgaggaaagggccgctgctcttcctcg

SEQ ID NO: 70766 - DNA, 37 bp, Homo sapiens
  chr5:178882637-178882674
  hypo
cccagccccggaaaacggagtccgcctgagccacggg

SEQ ID NO: 70767 - DNA, 30 bp, Homo sapiens
  chr5:178950840-178950870
  hypo
aaaacgctgcccaccgggcatctggctatc

SEQ ID NO: 70768 - DNA, 30 bp, Homo sapiens; identical to SEQ ID NO: 19973
  chr5:178956058-178956088
  hypo

SEQ ID NO: 70769 - DNA, 36 bp, Homo sapiens
  chr5:178975529-178975565
  hypo
tccagtaaagactagtagggccgggctcagtggctc

SEQ ID NO: 70770 - DNA, 30 bp, Homo sapiens
  chr5:178982541-178982571
  hypo
acagcaccacccagcgctgattgcctggaa

SEQ ID NO: 70771 - DNA, 252 bp, Homo sapiens
  chr5:179004520-179004772
  hypo
gccgggtctccggacggaaattgccgaagactagcggaggctccgaggccgggcgtggtggggctggaggggagggcgggggtggggagtttcggccgaaagagcaaatccggggctggaggggagggcgggggtggggagtttcagccgaaagagcaaatccgggttggactgtgtgattgggcccggtggtgtgggcagggcaggttaggtgtgtccgctcctttcacactcaccggtggtcgggcggcg

SEQ ID NO: 70772 - DNA, 163 bp, Homo sapiens; identical to SEQ ID NO: 19974
  chr5:179023532-179023695
  hypo

SEQ ID NO: 70773 - DNA, 47 bp, Homo sapiens; identical to SEQ ID NO: 19975
  chr5:179030601-179030648
  hypo

SEQ ID NO: 70774 - DNA, 79 bp, Homo sapiens
  chr5:179064397-179064476
  hypo
gaatttgttatccatactttccgaaaagaaaaacccaggcctggatgatttaaccgcttagtattttgttttattttat

SEQ ID NO: 70775 - DNA, 44 bp, Homo sapiens; identical to SEQ ID NO: 19976
  chr5:179106626-179106670
  hypo

SEQ ID NO: 70776 - DNA, 10 bp, Homo sapiens
  chr5:179111267-179111277
  hypo
gagacggggt

SEQ ID NO: 70777 - DNA, 30 bp, Homo sapiens
  chr5:179224821-179224851
  hypo
cacagtgtgggggccgcctgcctcctccgc

SEQ ID NO: 70778 - DNA, 51 bp, Homo sapiens
  chr5:179225522-179225573
  hypo
agcacctccacagacgtgttgaagagcttgtcctccgggtgctcgatgttc

SEQ ID NO: 70779 - DNA, 30 bp, Homo sapiens
  chr5:179228474-179228504
  hypo
ggacggaggcccgacgctggaaagggtgcg

SEQ ID NO: 70780 - DNA, 150 bp, Homo sapiens; identical to SEQ ID NO: 42447
  chr5:179234472-179234622
  hypo

SEQ ID NO: 70781 - DNA, 150 bp, Homo sapiens
  chr5:179234921-179235071
  hypo
attacaggcgtgagccaccacgcacggcccatttgcgttctaatttcaggcgttcctcaatcctctgtggaaccaggaagggcgcaaattataaagggactggcccagcgccgcctctgggcaggctttgggcagcgcctggcccgctgc

SEQ ID NO: 70782 - DNA, 605 bp, Homo sapiens; identical to SEQ ID NO: 4491
  chr5:179245984-179246589
  hypo

SEQ ID NO: 70783 - DNA, 30 bp, Homo sapiens
  chr5:179254302-179254332
  hypo
gatgtctttttttttctgagacggagtctc

SEQ ID NO: 70784 - DNA, 29 bp, Homo sapiens
  chr5:179254571-179254600
  hypo
ctgcacccggccctcagatgtctttgagc

SEQ ID NO: 70785 - DNA, 31 bp, Homo sapiens; identical to SEQ ID NO: 4492
  chr5:179279346-179279377
  hypo

SEQ ID NO: 70786 - DNA, 27 bp, Homo sapiens
  chr5:179281293-179281320
  hypo
acaggcgtgagccaccagggctggatc

SEQ ID NO: 70787 - DNA, 204 bp, Homo sapiens
  chr5:179293875-179294079
  hypo
caggtggcattatggtcggttttgcaagtgtgctgcatgtcaccagctcgactgcgaaagcccagggcctagcatgctcccatcacctgggatcagatgctcccaacaggctttaaacatagcacagggatgagttctaacaggcactcaacatgcgtgtttttccttaacaaaaaacgtgacgtggaacatgaagatttttcc

SEQ ID NO: 70788 - DNA, 30 bp, Homo sapiens
  chr5:179297425-179297455
  hypo
gcaggctggggtcccgacggccggccattg

SEQ ID NO: 70789 - DNA, 151 bp, Homo sapiens
  chr5:179358102-179358253
  hypo
ttaagataaaaacatggtgaccgcatgactgattggcattttgatgacgtccacgcaaagctggattcctgtgacagtgtttcccgcctgaagtaccgcacatctgaactgggactgtaacactgatggcgatacagtgtggggtgccaga

SEQ ID NO: 70790 - DNA, 31 bp, Homo sapiens
  chr5:179383617-179383648
  hypo
ctgatcctgctctgtgcggtcctcactgtgt

SEQ ID NO: 70791 - DNA, 214 bp, Homo sapiens
  chr5:179401179-179401393
  hypo
gtctctgtctctatggaccctcggctgcagtggagcctcagacatctgcagcggccggccccccgctttagctcctgaagtggcatggaaacatacgttcatccacgcggcaactccacttctgaaaacgtacttctaacgactacacactccgatggccgacctttaagaggtctaataagaccaggtgacagttcctcggtttctaagacct

SEQ ID NO: 70792 - DNA, 521 bp, Homo sapiens
  chr5:179401682-179402203
  hypo
gcagtacttggagggcgatggctttgaaagagagttttaaaaactggactgggaaatgcgagtgtcacgagatgccggcgagtggagacagaacactggaaggagcagccagccaagagaacgaggccccgaggaagggagagagcaggcacgcagcggcgcggggaggagcggcatggaccgcagcagacggcctctccggcctgcgcacccgggtcagcacgctgagggaattaaacccattgcttcctctgggcagtcaatggtgaagcggtcctctgagagtgaagaacaagcgtgtgagttaaggtgttgaagtagagtgaacacacctgcaggtgctgctgtgccgaatgcggagcgccagccaggcggggaggctctgtcttgccaagtctgttcagagtcccgtgggaagacggtgagggaacagaaccgcttagcaacatgaggtacagaaagccacagcaggtaacaccgactctgggcttcaaagacaataggggcggggaggcgtccca

SEQ ID NO: 70793 - DNA, 346 bp, Homo sapiens; identical to SEQ ID NO: 19983
  chr5:179402747-179403093
  hypo

SEQ ID NO: 70794 - DNA, 171 bp, Homo sapiens
  chr5:179473084-179473255
  hypo
ggcatctgaggccccacgagaatctgtgcgcggtggaccgcggcgcgtgcaggcccacagtgctgagggacccagcgcaccctccgcagctgctggcccaggtgctaagcccctcactgaccggggcaggtgcagggcccgccaagctcacacccacgcagaactccaggg

SEQ ID NO: 70795 - DNA, 31 bp, Homo sapiens; identical to SEQ ID NO: 19985
  chr5:179482573-179482604
  hypo

SEQ ID NO: 70796 - DNA, 1296 bp, Homo sapiens; identical to SEQ ID NO: 42452
  chr5:179498056-179499352
  hypo

SEQ ID NO: 70797 - DNA, 189 bp, Homo sapiens
  chr5:179503668-179503857
  hypo
aagcctgcatgcctctcggtggggatgtgtctgcatctctgagagtgtccttcggagtgggatgctgtgtcatgtgcaggcatgtatttcgtgttggtaggcactggcgccatattttcaagctgcccccttcctccccacctgagcctcttttatctgtgtcttccctccccacgcccacctcctgct

SEQ ID NO: 70798 - DNA, 42 bp, Homo sapiens
  chr5:179545454-179545496
  hypo
ggtggtgagttccccacgctggaggcacgcaagcaaggagac

SEQ ID NO: 70799 - DNA, 31 bp, Homo sapiens
  chr5:179547026-179547057
  hypo
ccaggctcggccctctcgcctgcagccagcg

SEQ ID NO: 70800 - DNA, 70 bp, Homo sapiens
  chr5:179547318-179547388
  hypo
caactcctgtgtccatcgccacgtcgcatggggccgcctcctctctactcttctccgcaggtgtggaccc

SEQ ID NO: 70801 - DNA, 30 bp, Homo sapiens
  chr5:179563730-179563760
  hypo
ctttctgcggttgacggctccatcctccct

SEQ ID NO: 70802 - DNA, 30 bp, Homo sapiens
  chr5:179621719-179621749
  hypo
gttagggcattttacgggagtacgtcacag

SEQ ID NO: 70803 - DNA, 116 bp, Homo sapiens
  chr5:179643355-179643471
  hypo
atcaggcaccttggcgaacaggctggacacctgggcacacgtgtggcaaagtttttaggttcacaggacagaaaacctccaagcaagagtgagcggctgccgtgaacgtcggcagg

SEQ ID NO: 70804 - DNA, 30 bp, Homo sapiens
  chr5:179710052-179710082
  hypo
gagggctgtggaagccgtcaaaacatcaga

SEQ ID NO: 70805 - DNA, 23 bp, Homo sapiens
  chr5:179725477-179725500
  hypo
acgcctgtaatcccagcgctttg

SEQ ID NO: 70806 - DNA, 165 bp, Homo sapiens
  chr5:179726330-179726495
  hypo
ctagtggaggcagtgccgccctctccttgcaccgccagcatgcactcaccctccactttcgaactaggcagtgtatttgggggatagatacacaggtgaaactataaagaaaagcaagggaacaattggcacaaaagtcagaatggccgtcgcctcttgggcata

SEQ ID NO: 70807 - DNA, 194 bp, Homo sapiens
  chr5:179731618-179731812
  hypo
gtgcactccccacaggcggcccgggggagggtgtgtggtcacagccactcactggccagaccatccatcactggtactggcagacagtggtgaggtgggcatgcatggggaaaagcaggagagagctggcccagtccagtggagagccctcacctggcgggccgtgacttgctgcagggcgttctggcatttgg

SEQ ID NO: 70808 - DNA, 32 bp, Homo sapiens
  chr5:179742136-179742168
  hypo
ttttagttgtggtagtaacaccgtggtcatac

SEQ ID NO: 70809 - DNA, 31 bp, Homo sapiens
  chr5:179742467-179742498
  hypo
gcgcccggccggttatatgtttttcttttgt

SEQ ID NO: 70810 - DNA, 312 bp, Homo sapiens
  chr5:179762745-179763057
  hypo
cggaacctgctttggcgggcactggccctgacacagctcagggtgaggtggaaccatggggacggggaagcatgccacataccgttgcctttgtctgagcgctgagggtggctgttgacagcactggggaccccgtgggtggcccagcgcgtgtgggcaatgccgaagtgtgtctcaaactccacttttaagtccatgctgtcttgttctaaatgaaaggaaaatcagtttgccgcacttgaacaacaagcctcgacccaggactgtgagtgcaacctggtgtcgttacccaagtcacgtcacccacaccga

SEQ ID NO: 70811 - DNA, 31 bp, Homo sapiens; identical to SEQ ID NO: 19990
  chr5:179773468-179773499
  hypo

SEQ ID NO: 70812 - DNA, 665 bp, Homo sapiens; identical to SEQ ID NO: 4498
  chr5:179780035-179780700
  hypo

SEQ ID NO: 70813 - DNA, 498 bp, Homo sapiens; identical to SEQ ID NO: 4499
  chr5:179780801-179781299
  hypo

SEQ ID NO: 70814 - DNA, 30 bp, Homo sapiens
  chr5:179797007-179797037
  hypo
caaatgtgtaagagtcggcctgggccagtg

SEQ ID NO: 70815 - DNA, 37 bp, Homo sapiens
  chr5:179824294-179824331
  hypo
ttttgtgttttcttttgttgtcgttgttgttgttttt

SEQ ID NO: 70816 - DNA, 158 bp, Homo sapiens
  chr5:179824630-179824788
  hypo
ttcatgtttaaggctgaatgatactcgatcgtggctctgtgccacctttgtttattcgttcacctgtggacagacacgtgggctgcttccaccttttggctattgtgaagaacgctgctgtgaatgcgggcttacacgtatctcttttggatcctgct

SEQ ID NO: 70817 - DNA, 20 bp, Homo sapiens
  chr5:179826083-179826103
  hypo
tgccacggcctcccaaagtg

SEQ ID NO: 70818 - DNA, 31 bp, Homo sapiens; identical to SEQ ID NO: 19993
  chr5:179903411-179903442
  hypo

SEQ ID NO: 70819 - DNA, 30 bp, Homo sapiens
  chr5:179918447-179918477
  hypo
agcagagccactatcgtaccctcctggtgg

SEQ ID NO: 70820 - DNA, 1053 bp, Homo sapiens; identical to SEQ ID NO: 42458
  chr5:180017078-180018131
  hypo

SEQ ID NO: 70821 - DNA, 336 bp, Homo sapiens; identical to SEQ ID NO: 42459
  chr5:180018484-180018820
  hypo

SEQ ID NO: 70822 - DNA, 24 bp, Homo sapiens
  chr5:180024540-180024564
  hypo
caccgcgcccggcctctcagctcc

SEQ ID NO: 70823 - DNA, 30 bp, Homo sapiens
  chr5:180030306-180030336
  hypo
gccccccgctcaggccgccgccgcctccct

SEQ ID NO: 70824 - DNA, 315 bp, Homo sapiens
  chr5:180036576-180036891
  hypo
ccatggggcccctctgcccagcgctcactgaccaggcccgggacccccgaacctgccaccgaggaggagccgtccttccactggggtttctgcgctgctgaggaggggaggcctcgtgtgggggtgacgagggcataggacagaaagcagctgtgagtcgtggcatcgcaggagggcccaaatgtgcccaaggctcaccctggacttgcactttcaaaggacagtcgttgggttctgccatttgccttacgaattcctgacgctgcctcccctgaggcggccccagccctgagccgagagcgcagcccccaccct

SEQ ID NO: 70825 - DNA, 58 bp, Homo sapiens
  chr5:180047268-180047326
  hypo
tgatggacaggtagcccgtcttgatgtctgcgtgggccggctgcggggaggggacagg

SEQ ID NO: 70826 - DNA, 379 bp, Homo sapiens
  chr5:180055789-180056168
  hypo
ggggaggacgctgcccgtcttcccctatggtctgttttgcccctggacttggaagggtatcggcggggtcggtggggagccagggctgttaccactggaactcgggcggggggtacgctgccagcttcacgggcagcttcaccagctcgtctcctgccgtggcctccaggatgggtcctttgagccactcgacgctgatgaagggattttctgccggacaggagaagtcactgtaaatccaggactgacccgtcgtggactgaccagggactccccccacggcccctgcagccccggcagccggacatccgcagactggggctggccatgccgcccggtgcaggagctgggcagctcctctgctcgtggccctcccttc

SEQ ID NO: 70827 - DNA, 30 bp, Homo sapiens
  chr5:180056387-180056417
  hypo
gctgggagcgtcgctcgggcacccacttac

SEQ ID NO: 70828 - DNA, 190 bp, Homo sapiens
  chr5:180057545-180057735
  hypo
aagtctcacctctcacgaacacgtaggagctggcggccgtggtgccctcgatgcgtgccttgatgtacttgtagtagcagacgtagctgcctgtgtcgttggcatgtacctcgtgcagcagcaacaccttgcagtagggcctggcgtctgtgccctcgcagtctcgcaccacccccgtgtcctcgctgtc

SEQ ID NO: 70829 - DNA, 14 bp, Homo sapiens
  chr5:180075843-180075857
  hypo
cttccgccccttct

SEQ ID NO: 70830 - DNA, 227 bp, Homo sapiens; identical to SEQ ID NO: 42461
  chr5:180076053-180076280
  hypo

SEQ ID NO: 70831 - DNA, 43 bp, Homo sapiens
  chr5:180093827-180093870
  hypo
acataaacactacaatcaatgcggcattttaccctgtacaaga

SEQ ID NO: 70832 - DNA, 152 bp, Homo sapiens; identical to SEQ ID NO: 42463
  chr5:180101015-180101167
  hypo

SEQ ID NO: 70833 - DNA, 611 bp, Homo sapiens
  chr5:180218494-180219105
  hypo
acttaaatgccactcggaaaaatcaaaaagataaatgcacctaagagggaaacacaggcaggccgatgcagcctggggactgtggtcccacctcagctcatgatgtggcaaggaggggcccaggaaggacaggcaggtgctaattccagctaggatcatagccctcccacgtcagtgggggcgccaggtggacacggcggccccggaactggaaggtgacaataccccggtagccagctctcggaacccccgacttaaggtcatccatgacacccagagccttggcgaaagccttgaagctgtccctgcccgtatactgcacccgcacctcccccagctccttccggtcattggtcctcactttctccacctgcagctggggagcaccgtagacgcgggcgaggaaatctcggtcataggcctcccgctgcaggtaagacaggtccagctgggtgaagtgcacaaactgctggttcagcttgataaacttgaggtgctggtcaaagaactgcccgtggctcacacccttgcggccaaaggtcatcgttcttgagatctcagggcgtatgcaggcccgcccctgccgctgctccggccgccgcatccagtcg

SEQ ID NO: 70834 - DNA, 445 bp, Homo sapiens
  chr5:180219600-180220045
  hypo
ttgtccaggcagcgccgaacagtgctgcggtcacaggcgatgaccaggatgggaatcaccgccggcgcgggggtcacaggcacacgcggctgggcgggaggggccgcggtgggcaccctcccccgctggctcgacagggcatccccgatctgctgcagcagcccacgctgccgctccagctccacctcggcgtcttgggccaggcgaatcacttcccgggtgaggctggcggggtcgccatcgagagcgctgactgagggtggcctgccaggtgctgggcgcgtccagaagaagaggagcagcagggcattccaggccacaaagaggatagcgccccacagcacaagccctgcagactgcttcttcagcatcctggcccccaccggggagggcaggccaggggacggttcaaggctgccctgggcttgcccggctcccttgcccg

SEQ ID NO: 70835 - DNA, 47 bp, Homo sapiens; identical to SEQ ID NO: 20003
  chr5:180255233-180255280
  hypo

SEQ ID NO: 70836 - DNA, 30 bp, Homo sapiens; identical to SEQ ID NO: 20004
  chr5:180276703-180276733
  hypo

SEQ ID NO: 70837 - DNA, 451 bp, Homo sapiens
  chr5:180326120-180326571
  hypo
tggtacatgacagctgtgtctcgatggagtagactctcagaacagcgcagtttgccctccgctcacgcagagcctctccgtggcttccgcaccttgagcattaggccagttctcctcttctctctaatccatccgtcacctctcctgtcatccgtttccatgccgtgaggtccattcacagaacacatccatggctctcatgctcagtttggttctgagtctcctcaagctgggatcaggtaagactcatctttgtttcctccttactaactaacagtttgagttctttagctacaatggttgcagcataatggaatgaaggcatctttgtcgtttccattcctttggcttctcctagcctcagcctggggaaggatcaggcgctgtggaaacaattatagtagcccccaaataatggaaacacgggtgttgaagacgcaccgtgatcgtt

SEQ ID NO: 70838 - DNA, 1489 bp, Homo sapiens; identical to SEQ ID NO: 42469
  chr5:180479641-180481130
  hypo

SEQ ID NO: 70839 - DNA, 79 bp, Homo sapiens
  chr5:180502177-180502256
  hypo
gccagtcatgatggcacgtgcctgtggtcccagatatttggacggctgagctgggagggtcggttgagcccaggaggtc

SEQ ID NO: 70840 - DNA, 19 bp, Homo sapiens
  chr5:180502315-180502334
  hypo
gggacgaggaaagagggaa

SEQ ID NO: 70841 - DNA, 218 bp, Homo sapiens; identical to SEQ ID NO: 42470
  chr5:180527480-180527698
  hypo

SEQ ID NO: 70842 - DNA, 31 bp, Homo sapiens; identical to SEQ ID NO: 20010
  chr5:180621422-180621453
  hypo

SEQ ID NO: 70843 - DNA, 30 bp, Homo sapiens
  chr5:180647231-180647261
  hypo
gttcatgtgtgtgtcgtgcttctccgactg

SEQ ID NO: 70844 - DNA, 105 bp, Homo sapiens; identical to SEQ ID NO: 20011
  chr5:180657109-180657214
  hypo

SEQ ID NO: 70845 - DNA, 30 bp, Homo sapiens
  chr5:180659734-180659764
  hypo
cagggctggaacggcgtctcagagagatgc

SEQ ID NO: 70846 - DNA, 433 bp, Homo sapiens
  chr5:180661377-180661810
  hypo
cggtgggtgctgcccgtgaatcaacccatcataaggaaaaggtgggccctgggggttcctccgtgggcagcggggatgccagctcctcgcgccatcaccatcgccgccgccggctccacctgccccagcagcccctgctccagcgggaagtgtggtgcgtgggcaccaacggcaaacgctatcaggcccagagctccacagaacagacgctgctgagccccagtgagaaaccaaggcgctttggtgtgtacctggactatgaagctgggcgcctgggcttctacaacgcagagactctagcccacgtgcacaccttctcggctgccttcctgggcgagcgtgtctttcctttcttccgggtgctctccaagggcacccgcatcaagctctgcccttgattatcctgccacccgcaggggcccctctgtcagca

SEQ ID NO: 70847 - DNA, 30 bp, Homo sapiens; identical to SEQ ID NO: 20013
  chr5:180664007-180664037
  hypo

SEQ ID NO: 70848 - DNA, 339 bp, Homo sapiens; identical to SEQ ID NO: 4509
  chr5:180673931-180674270
  hypo

SEQ ID NO: 70849 - DNA, 36 bp, Homo sapiens
  chr5:180674398-180674434
  hypo
aggagaggccgggcacggtggctcacgcctgtaatc

SEQ ID NO: 70850 - DNA, 44 bp, Homo sapiens
  chr5:180680860-180680904
  hypo
ccttgttacacagaaggctgacgtgggagcatcacttgaacgta

SEQ ID NO: 70851 - DNA, 27 bp, Homo sapiens
  chr5:180681263-180681290
  hypo
tgggcaacagagcgagactctgtcaaa

SEQ ID NO: 70852 - DNA, 30 bp, Homo sapiens
  chr6:224324-224354
  hypo
gaggcagtggtgaccgcaggacccctgcat

SEQ ID NO: 70853 - DNA, 177 bp, Homo sapiens
  chr6:226030-226207
  hypo
aggggctccccaccatgctggcggcctggggcctggacagagccaactggggaaagtgcctcgcaacagaccaacctggtgagggaggcggggggagcacatggcgcaacccaccctcctaccatccacattgcaaagccccagcgattcctgggcgtcacttttccacccccaccc

SEQ ID NO: 70854 - DNA, 61 bp, Homo sapiens
  chr6:356758-356819
  hypo
agtgctaatcccagcaagagccgccttcccagcttggcccgaggagccacatcaccacgca

SEQ ID NO: 70855 - DNA, 43 bp, Homo sapiens
  chr6:358266-358309
  hypo
gtggtgggtgctttctgttctcgatgctccatctctgtgaaag

SEQ ID NO: 70856 - DNA, 55 bp, Homo sapiens
  chr6:373251-373306
  hypo
tgaaggtggtggatgtgtgcccggcgagggtggcggctggaaggtctgctggtgc

SEQ ID NO: 70857 - DNA, 802 bp, Homo sapiens; identical to SEQ ID NO: 4510
  chr6:391097-391899
  hypo

SEQ ID NO: 70858 - DNA, 24 bp, Homo sapiens
  chr6:392409-392433
  hypo
gctctcccgggcctgctccggggt

SEQ ID NO: 70859 - DNA, 371 bp, Homo sapiens; identical to SEQ ID NO: 4512
  chr6:392587-392958
  hypo

SEQ ID NO: 70860 - DNA, 348 bp, Homo sapiens; identical to SEQ ID NO: 4513
  chr6:393124-393472
  hypo

SEQ ID NO: 70861 - DNA, 76 bp, Homo sapiens; identical to SEQ ID NO: 4514
  chr6:393764-393840
  hypo

SEQ ID NO: 70862 - DNA, 161 bp, Homo sapiens
  chr6:394826-394987
  hypo
gcactgtttaaaggaaagttccgagaaggcatcgacaagccggaccctcccacctggaagacgcgcctgcggtgcgctttgaacaagagcaatgactttgaggaactggttgagcggagccagctggacatctcagacccgtacaaagtgtacaggattgt

SEQ ID NO: 70863 - DNA, 214 bp, Homo sapiens
  chr6:402005-402219
  hypo
gcaattctggttttcagcagtcgcctcttaaaacagttccatttcattgcactatgatctcgacaaatacgtctgctgatgtggcggctcttttcaggttcccagaaaaatcataaaggttggaagcatattgttaacattcttggttgtcaggtgtgtcaccctcatgcagatgctggcccacgagtgagacggagggtggagtggactgtac

SEQ ID NO: 70864 - DNA, 30 bp, Homo sapiens
  chr6:423668-423698
  hypo
agagaatggaagcacgttagtgctagcaga

SEQ ID NO: 70865 - DNA, 30 bp, Homo sapiens
  chr6:423967-423997
  hypo
ctggggaagaggatcggtaaggacttgcag

SEQ ID NO: 70866 - DNA, 132 bp, Homo sapiens
  chr6:504234-504366
  hypo
ctcgcctgcggcctcgcagtctcttccttaaatgggaggtcagacggagaaggtgaggcagaggccgtcagagaggggctccgtgtgcatccgttatggaagcggctgaggcctcgcggtgatggcagaacg

SEQ ID NO: 70867 - DNA, 30 bp, Homo sapiens
  chr6:515798-515828
  hypo
caacaaaggagagacgcacacagctggtgg

SEQ ID NO: 70868 - DNA, 30 bp, Homo sapiens
  chr6:537481-537511
  hypo
aagatgatgaccgacggagcgtacactcga

SEQ ID NO: 70869 - DNA, 31 bp, Homo sapiens; identical to SEQ ID NO: 20021
  chr6:571736-571767
  hypo

SEQ ID NO: 70870 - DNA, 30 bp, Homo sapiens
  chr6:572766-572796
  hypo
tctgcgtggacgctcgcggcccacctggct

SEQ ID NO: 70871 - DNA, 30 bp, Homo sapiens; identical to SEQ ID NO: 20022
  chr6:589259-589289
  hypo

SEQ ID NO: 70872 - DNA, 30 bp, Homo sapiens
  chr6:594437-594467
  hypo
aacactttcactcacgtagccctcagattt

SEQ ID NO: 70873 - DNA, 30 bp, Homo sapiens
  chr6:596258-596288
  hypo
gctcatactcccgccgtacgcctcatcact

SEQ ID NO: 70874 - DNA, 30 bp, Homo sapiens
  chr6:617283-617313
  hypo
ctacctgcgtgcatacgtgggcgcctgtgc

SEQ ID NO: 70875 - DNA, 30 bp, Homo sapiens
  chr6:617983-618013
  hypo
gctttcaaattgttgcgtagatctaaacct

SEQ ID NO: 70876 - DNA, 31 bp, Homo sapiens
  chr6:623146-623177
  hypo
cccgtgcaccacaggccgctgggaggacacg

SEQ ID NO: 70877 - DNA, 79 bp, Homo sapiens
  chr6:625317-625396
  hypo
cagcggtgttattccgcgcttgcggcaaagagaacacactttcttgatttggcggatggaagacggaggggggaggcca

SEQ ID NO: 70878 - DNA, 30 bp, Homo sapiens
  chr6:656489-656519
  hypo
gcgcgcaggctgggcggcaggcagtcccgc

SEQ ID NO: 70879 - DNA, 659 bp, Homo sapiens; identical to SEQ ID NO: 42487
  chr6:710813-711472
  hypo

SEQ ID NO: 70880 - DNA, 48 bp, Homo sapiens
  chr6:736768-736816
  hypo
ccgtgtacccaccacgcaactgaacagtaacacggcacggggagcgtg

SEQ ID NO: 70881 - DNA, 31 bp, Homo sapiens; identical to SEQ ID NO: 20025
  chr6:782981-783012
  hypo

SEQ ID NO: 70882 - DNA, 149 bp, Homo sapiens
  chr6:968510-968659
  hypo
caatacccgcgagttactgaccctttccatgagaagacccgatgacccgaaagttactacccttccctaggatgttctgcataaaccgccccttaactcgcatgttcctaggacgttctgcataaaccgccctttaacccgcatgttcc

SEQ ID NO: 70883 - DNA, 31 bp, Homo sapiens; identical to SEQ ID NO: 20026
  chr6:1001881-1001912
  hypo

SEQ ID NO: 70884 - DNA, 30 bp, Homo sapiens
  chr6:1003679-1003709
  hypo
aaagaacagagtaccgggccctgggacccc

SEQ ID NO: 70885 - DNA, 30 bp, Homo sapiens
  chr6:1004091-1004121
  hypo
gacgacagaccccccggcgatcaggaccct

SEQ ID NO: 70886 - DNA, 513 bp, Homo sapiens; identical to SEQ ID NO: 20027
  chr6:1080627-1081140
  hypo

SEQ ID NO: 70887 - DNA, 47 bp, Homo sapiens
  chr6:1083103-1083150
  hypo
gttttgttggcttataatcctcgcacggtgttaaaacctaggtgctg

SEQ ID NO: 70888 - DNA, 256 bp, Homo sapiens
  chr6:1097958-1098214
  hypo
acactgcaagctccttggccccgccagggctgtcttcccccagctttcagtgggtagtgacggccccgtgaccatcactgcatcgggggggagttgaccccgccagggctgtcctctcccagctttcagtgggtagtgacggccctgtgaccatcactgcagaccccgccagggctgtcctctcccagctttcagtgggtagtgacggccccatgaccatcactgcactggggacgcttgaccctgcagtggcttt

SEQ ID NO: 70889 - DNA, 31 bp, Homo sapiens
  chr6:1317676-1317707
  hypo
tgtttggtttgggactcgccctttgacacct

SEQ ID NO: 70890 - DNA, 123 bp, Homo sapiens; identical to SEQ ID NO: 42495
  chr6:1379267-1379390
  hypo

SEQ ID NO: 70891 - DNA, 397 bp, Homo sapiens; identical to SEQ ID NO: 42496
  chr6:1379631-1380028
  hypo

SEQ ID NO: 70892 - DNA, 331 bp, Homo sapiens; identical to SEQ ID NO: 4530
  chr6:1390427-1390758
  hypo

SEQ ID NO: 70893 - DNA, 512 bp, Homo sapiens; identical to SEQ ID NO: 4531
  chr6:1390955-1391467
  hypo

SEQ ID NO: 70894 - DNA, 352 bp, Homo sapiens
  chr6:1515494-1515846
  hypo
catgggtccctcatgcagagacgttgccacgttcatcccggggctggagctgctgcttcacactgacttacacggtgagcagcggcggcaggggaggaggtggaacccgcggcgagctgctgcttcacactgacttacaccgtgagcagcggcggcaggggaggaggtggaacccgcggccggagacacacgccgtggggtcggtcaacacacactcacgcacttgcacacgctccaaggcccggaaggaagctgaggccggcccgcctcccgccaaagggccgaggaatcccgccacctaacggcaggggcaggggccacagctggcaacgcctactttaattttaaaaat

SEQ ID NO: 70895 - DNA, 30 bp, Homo sapiens
  chr6:1519148-1519178
  hypo
gccccaggcccatccggatggatggcatca

SEQ ID NO: 70896 - DNA, 43 bp, Homo sapiens
  chr6:1523632-1523675
  hypo
gctcagctggcagaggtgcaccgccttgcttggtttccactcc

SEQ ID NO: 70897 - DNA, 116 bp, Homo sapiens; identical to SEQ ID NO: 20031
  chr6:1523887-1524003
  hypo

SEQ ID NO: 70898 - DNA, 30 bp, Homo sapiens
  chr6:1581771-1581801
  hypo
ggagctgggacacacgttagtcaaggtgta

SEQ ID NO: 70899 - DNA, 30 bp, Homo sapiens; identical to SEQ ID NO: 42510
  chr6:1604974-1605004
  hypo

SEQ ID NO: 70900 - DNA, 394 bp, Homo sapiens; identical to SEQ ID NO: 42511
  chr6:1605239-1605633
  hypo

SEQ ID NO: 70901 - DNA, 983 bp, Homo sapiens; identical to SEQ ID NO: 42513
  chr6:1610744-1611727
  hypo

SEQ ID NO: 70902 - DNA, 16 bp, Homo sapiens
  chr6:1612300-1612316
  hypo
cgcacgtccggagctt

SEQ ID NO: 70903 - DNA, 30 bp, Homo sapiens; identical to SEQ ID NO: 20035
  chr6:1621792-1621822
  hypo

SEQ ID NO: 70904 - DNA, 173 bp, Homo sapiens
  chr6:1631278-1631451
  hypo
tggaaggaggtggcaaaaccccgaggacaggagataaagcgcctttgagtggaccgattagggactcttgtgacatcgctggcaagtggcaccctggatacaagaggaaggccgctgtgctcttgccacttagggctttctaccctcaaagcgctttatagacatcagctaat

SEQ ID NO: 70905 - DNA, 74 bp, Homo sapiens
  chr6:1666396-1666470
  hypo
atgaagcagcaaaggccgtgagagtccctgagggtcaagtcgctctgagatcctagagacgggagtcctgctct

SEQ ID NO: 70906 - DNA, 116 bp, Homo sapiens
  chr6:1679634-1679750
  hypo
aatttaggtcagctgacgcaagcgctgagaagctgaacaactggcatggtgctctatcttcactgccaggccaggcaagggggccccagctaatgctgctccgtgctgatctgctc

SEQ ID NO: 70907 - DNA, 328 bp, Homo sapiens; identical to SEQ ID NO: 20036
  chr6:1708417-1708745
  hypo

SEQ ID NO: 70908 - DNA, 154 bp, Homo sapiens
  chr6:1726567-1726721
  hypo
tggcaccaggcattccatgagcgcatttgcccagccagccagccaaatgtggccacgcactgggtggccagagagtccttaccacttcagttggccggtagtacttgagatccacagtcacgtgaactttgccggtctctttacatctgcccac

SEQ ID NO: 70909 - DNA, 282 bp, Homo sapiens; identical to SEQ ID NO: 20037
  chr6:1953248-1953530
  hypo

SEQ ID NO: 70910 - DNA, 180 bp, Homo sapiens
  chr6:2108902-2109082
  hypo
gaatgacaagaggtccgatataaagtatcagagtcctgcggtatcttcccctcacagttcaacgatactgcccacctcggtattctcagcttagtagtgtgacaggaagactgagtggcatcatatctgggctggagactaggtagcgtgtggctgcttatgaaccgcacgtccaggtgg

SEQ ID NO: 70911 - DNA, 164 bp, Homo sapiens; identical to SEQ ID NO: 20039
  chr6:2127866-2128030
  hypo

SEQ ID NO: 70912 - DNA, 97 bp, Homo sapiens; identical to SEQ ID NO: 20040
  chr6:2233025-2233122
  hypo

SEQ ID NO: 70913 - DNA, 31 bp, Homo sapiens
  chr6:2247165-2247196
  hypo
taaaaaaatcactgagcaagccgggcgcagt

SEQ ID NO: 70914 - DNA, 168 bp, Homo sapiens
  chr6:2447381-2447549
  hypo
cagaatacctgtattagtttacgttcccaccaacggtatgcaaaggttcccttttctccacatctgcacggttcagttcagctcctaagggagcagtgacaccggcagctgaggaagcgtcatggattccagcttcactgattgtccgaaagccagtggggcatccct

SEQ ID NO: 70915 - DNA, 152 bp, Homo sapiens
  chr6:2510116-2510268
  hypo
ttcaccatgtggaccccaggacgccaccgcgtgatgcttctccacctgcgctctgtcgttcgccgcctgagttaccagccgagcgttgccgcctagcttgatgacagaggcttaaacaatatcagaatgacgtggtaatgctgaatcataag

SEQ ID NO: 70916 - DNA, 141 bp, Homo sapiens
  chr6:2530902-2531043
  hypo
tagggtaccatccttcgggacacagcatagggattaaaccagcaacccttgtatcgcgcatgctgtttccccagcaggggaggaagggctgctgctacacagcggaggcagcaggaatatgtgcagcgctcaggccatcca

SEQ ID NO: 70917 - DNA, 308 bp, Homo sapiens
  chr6:2559178-2559486
  hypo
gggggtgggggcatgggaggtcggcactccctccttcaggaatctctgagctcgcagaaccgtccagtgcgtgggtggtagagggatcagctgacggggaagtgcaagcgtgaaggcggccacccaagacttcaggtcactgctgacctcccgtcggggctcagatctcagcactgggagggcatctgctcgccctgccaaaacaaaccagcccctgcaaggggcacattgcacaggaaggggggctggagggacaaggagctccgggtttcacttgaacagtctcaaataaccggtttacaatgatg

SEQ ID NO: 70918 - DNA, 68 bp, Homo sapiens
  chr6:2697705-2697773
  hypo
cagcagggcggcatcggtccacaggcgtgtgccggctacctgggcatgagtgcgctctcgccctgcgt

SEQ ID NO: 70919 - DNA, 30 bp, Homo sapiens
  chr6:2713785-2713815
  hypo
ggtgaaataggagtcgcatccatgcatggc

SEQ ID NO: 70920 - DNA, 31 bp, Homo sapiens; identical to SEQ ID NO: 20042
  chr6:2803700-2803731
  hypo

SEQ ID NO: 70921 - DNA, 34 bp, Homo sapiens; identical to SEQ ID NO: 20043
  chr6:2906981-2907015
  hypo

SEQ ID NO: 70922 - DNA, 93 bp, Homo sapiens; identical to SEQ ID NO: 20044
  chr6:2907134-2907227
  hypo

SEQ ID NO: 70923 - DNA, 64 bp, Homo sapiens
  chr6:2907532-2907596
  hypo
aggttgtgtgtgtgctcgagtacgtgtgtcgaggttgtgtgtgtgtgctcgagtatgtgtgtcc

SEQ ID NO: 70924 - DNA, 257 bp, Homo sapiens; identical to SEQ ID NO: 20045
  chr6:2920899-2921156
  hypo

SEQ ID NO: 70925 - DNA, 30 bp, Homo sapiens
  chr6:2985228-2985258
  hypo
ctgctcctcaggtgccgagttagagacacc

SEQ ID NO: 70926 - DNA, 44 bp, Homo sapiens
  chr6:2986009-2986053
  hypo
tttcattatttttaaacaaaggcgagcaattcactttctgggtg

SEQ ID NO: 70927 - DNA, 16 bp, Homo sapiens
  chr6:2986765-2986781
  hypo
gcctcattctacaaac

SEQ ID NO: 70928 - DNA, 30 bp, Homo sapiens
  chr6:3036870-3036900
  hypo
aacgcatcgcccttccgcacaaataactca

SEQ ID NO: 70929 - DNA, 329 bp, Homo sapiens
  chr6:3053000-3053329
  hypo
tcctgaccccacgggcgtggcttggccaggcagctcaggacttgcttctccccacggcttggcccccttctcaggtcgctctcaatctatggggaacctagagggaaggaggctgcccatggcgcacaccgtggagggaccctgaggacagcggagagcaggtctaaggtgaggcaggtgctctcaggttaaagataggggaagaatctgaagcactattgcagacgggcccccaggagggttaaaggtcaaggtggaggcgaaactaagattggaaggtgagtatgcagcccagagtcatggaggttccagagcgggtgatggtttct

SEQ ID NO: 70930 - DNA, 88 bp, Homo sapiens
  chr6:3065503-3065591
  hypo
aaaaaaaaaaaaaaaaaaaaaagacacggctttctgaggtgccgtgcggctgtggcgggggtggctgggggtgcgggttgtgttcatt

SEQ ID NO: 70931 - DNA, 30 bp, Homo sapiens
  chr6:3083384-3083414
  hypo
ctgagggaagtggacggcaccgctaagaag

SEQ ID NO: 70932 - DNA, 384 bp, Homo sapiens
  chr6:3115565-3115949
  hypo
ctccctgccagtgcattttggcgctcaggatgagaggcctgcagcactgctgtccccgcgcctggctctggggccttcccttcacccccactctctcagcaccatggtgagaagaaccaagtttgcctgtgaggagttaggtacaaggcccaagctccacaagaacactgctgttaatgggcagagccaatgacgacacagaccagcaaagcagaaccgagactgtccgcacttggttcggaaacaaatactcacaccctaggttattgctggtaacggagacctccttccagctcccacagtcctgcttggtagattttctacttgttgctacaatcatcatctttgctttgggtctgtcacgtgaggttagggtttcaggaa

SEQ ID NO: 70933 - DNA, 129 bp, Homo sapiens
  chr6:3132219-3132348
  hypo
cccttgcctcggtcaccgcagtgggaactcactgtgtgcagttgctctgactttcctttcttgatgaaagcaagagtctctcagtagcgcagcactctttactctctgacgtctcgctacttcccctcc

SEQ ID NO: 70934 - DNA, 30 bp, Homo sapiens
  chr6:3140586-3140616
  hypo
taaagcagattcctcgtgctgtgtatccgt

SEQ ID NO: 70935 - DNA, 31 bp, Homo sapiens; identical to SEQ ID NO: 20049
  chr6:3143423-3143454
  hypo

SEQ ID NO: 70936 - DNA, 30 bp, Homo sapiens; identical to SEQ ID NO: 20050
  chr6:3150252-3150282
  hypo

SEQ ID NO: 70937 - DNA, 27 bp, Homo sapiens
  chr6:3154184-3154211
  hypo
tcgttcatgttgctctcggcctcggtg

SEQ ID NO: 70938 - DNA, 58 bp, Homo sapiens; identical to SEQ ID NO: 4542
  chr6:3162904-3162962
  hypo

SEQ ID NO: 70939 - DNA, 41 bp, Homo sapiens
  chr6:3177386-3177427
  hypo
gttcaccgccagcttgcgcaggtctacgttcagctggcccg

SEQ ID NO: 70940 - DNA, 41 bp, Homo sapiens; identical to SEQ ID NO: 20052
  chr6:3179683-3179724
  hypo

SEQ ID NO: 70941 - DNA, 216 bp, Homo sapiens
  chr6:3193807-3194023
  hypo
tcggcctgcagacagcgtgtgcttggggctcccgtgccgtgcagcaaaagccggatccgggagctcagtgctgaggccggcagtggccacagtcacccagcactgtctgcggggggcgtgtgaagtctctccagttcgggggtaggagggcgacactgaaaggcctattgttgctgcccaactcggtaacatggatttcatcggcgattatgcagg

SEQ ID NO: 70942 - DNA, 41 bp, Homo sapiens
  chr6:3194435-3194476
  hypo
gctgggattacgggcgtgagccacggcgcccggcctacatt

SEQ ID NO: 70943 - DNA, 31 bp, Homo sapiens; identical to SEQ ID NO: 20053
  chr6:3195389-3195420
  hypo

SEQ ID NO: 70944 - DNA, 30 bp, Homo sapiens; identical to SEQ ID NO: 20054
  chr6:3226274-3226304
  hypo

SEQ ID NO: 70945 - DNA, 30 bp, Homo sapiens; identical to SEQ ID NO: 20055
  chr6:3263635-3263665
  hypo

SEQ ID NO: 70946 - DNA, 91 bp, Homo sapiens
  chr6:3267968-3268059
  hypo
tgtaaacttatgtacaatgtacgtgtaaataaatggattgaatttcagtttgtcatcaggccgcgctcccgttttgtttttaaggggttaa

SEQ ID NO: 70947 - DNA, 69 bp, Homo sapiens
  chr6:3269487-3269556
  hypo
ttaagaccaggactcgaagcagagtgagaggcctccctccacccacctcggggcgagtgaagacacagc

SEQ ID NO: 70948 - DNA, 30 bp, Homo sapiens
  chr6:3272494-3272524
  hypo
aggaggaataaaaacgagcacatctcaggt

SEQ ID NO: 70949 - DNA, 30 bp, Homo sapiens; identical to SEQ ID NO: 20056
  chr6:3272953-3272983
  hypo

SEQ ID NO: 70950 - DNA, 30 bp, Homo sapiens
  chr6:3273205-3273235
  hypo
cctggctgcgtgttcggtccctggtctgta

SEQ ID NO: 70951 - DNA, 97 bp, Homo sapiens
  chr6:3281276-3281373
  hypo
ctcacctggacccctccgtgagggcaaaggaagcctcggagcccacctggagcatccagatggacagtggatagaaaagatccgccccagcacagcc

SEQ ID NO: 70952 - DNA, 426 bp, Homo sapiens
  chr6:3285281-3285707
  hypo
aggaagcacagcccacgcgcttgggactcacctgagtctgggtgctggctgtactttccaatcactggacccgcagacatgatcgcacccacacggacaagggccaagcaagcgagaagagagaagagagcacattaggtgtggagttagcctagcgtgttcccatgcgacttggttcaagcaaactcccttccgtgtctgggatggcgctggccgccggggcagtggaattcatactgcgctaaacaaagatctttttgttaggaagacaggagtgagaccctgctggcctcagagcctgaggagaaaatggaaccttcacagtgagaccccagcaggtgcaaagggtgagcttccttgcatgtaaagtcacccacaggtcactgccgcctgcattcaagctgcgtcaagtgctgtggggtgccc

SEQ ID NO: 70953 - DNA, 37 bp, Homo sapiens; identical to SEQ ID NO: 20059
  chr6:3289594-3289631
  hypo

SEQ ID NO: 70954 - DNA, 31 bp, Homo sapiens
  chr6:3289980-3290011
  hypo
tgtcctctgtgactcacgagttcacacacag

SEQ ID NO: 70955 - DNA, 153 bp, Homo sapiens
  chr6:3290702-3290855
  hypo
catgcacacattcatacgcatgcatatacgtgtgcatgttttagttaacagaagtccttgggggctggacaatattttggctccaagggatgtgagcaactataaagtcatgagactgagtttcttgtgcggctccagcggctctgaaagccc

SEQ ID NO: 70956 - DNA, 31 bp, Homo sapiens
  chr6:3292642-3292673
  hypo
tgggcaacagggagcccggccaggttgtggg

SEQ ID NO: 70957 - DNA, 121 bp, Homo sapiens
  chr6:3302109-3302230
  hypo
gggaaaatccaaaatgcggcatatttgagtatggacatttgagtggtgccattttgccttcaagataaagcccttgtaaaacgagttggaagaattccttctgtttcgtttttttggggaa

SEQ ID NO: 70958 - DNA, 266 bp, Homo sapiens
  chr6:3307209-3307475
  hypo
tcagcgtctgcagcgcggtatggatacagcaatggaggggcacaaggattcctcctctagggtaagtaggatgcttgccaacttggaggattttagagcagatgtttgctgatgggccatgaacatgctgagcagacggcatacggcagcgctacgacatgcacaggtggcacttggttactgacaagctgagggtaggcacaaaacctgcactctcagtggcatgtccaggcaggtgtcctcactggctccgggtctcagttcat

SEQ ID NO: 70959 - DNA, 30 bp, Homo sapiens
  chr6:3312213-3312243
  hypo
tagactcagggctaacgctcactgttgcct

SEQ ID NO: 70960 - DNA, 70 bp, Homo sapiens
  chr6:3312766-3312836
  hypo
taatgaaacaagtcgcgacaccttagccaattctgatggctgagtgaggctgtcccggtcgcactcagga

SEQ ID NO: 70961 - DNA, 77 bp, Homo sapiens; identical to SEQ ID NO: 20060
  chr6:3316814-3316891
  hypo

SEQ ID NO: 70962 - DNA, 31 bp, Homo sapiens
  chr6:3317655-3317686
  hypo
ccacctatcttcctagcgcatctaagcagaa

SEQ ID NO: 70963 - DNA, 201 bp, Homo sapiens
  chr6:3321382-3321583
  hypo
catgcatatgttttccgtgcgttatttcagtcttcaaaacaaccccatgaaataagaactattatgacccactttttacagacatgagacaacgcgggctcagagaggtgtgaggcaggctggaggcagcacagccagtcactaggccagctctacccagactgcagagctggagctgtaagcgggaagcagagcaccttg

SEQ ID NO: 70964 - DNA, 30 bp, Homo sapiens
  chr6:3327249-3327279
  hypo
ggactgcaggtggatcgtttctgctgggag

SEQ ID NO: 70965 - DNA, 455 bp, Homo sapiens
  chr6:3328504-3328959
  hypo
actaagtctgagcacagaggccgcccggaggctttgatagaaaagtggcattgttaggaggccacagctctgggagatacgcttttcggaagtcgtcagattcttacaaattttcaggaggaaaagcacattgcgcttcccagggtagacactttatgtgacggaggaggaaggcctgagggagtggggtgtgggggtttgatgtgtcacgtggcggggctgcagtcttaggcatttgctcaaacaggaaccccggtgctgccaggagagagctgactttgagcgaggggcttctagataatttgggtgggtctcgcctcatctgttgaaagacctgaacatagggccgaggcttccttgaggaggaagaagattccacctgtggacggcagtgcccgcccccatgccctggagtcctgatggctggccctcccgctggcccctcatggatgtca

SEQ ID NO: 70966 - DNA, 261 bp, Homo sapiens
  chr6:3333097-3333358
  hypo
ccccatggaacttgaagaaaccgctggttttatgtgactgtcccgtgatgtcgttcacatgttccttcatgccctggtttaatctctaaactggaagctccacctaatgtctggtgagacccaggttcaggtttttggaagagcgtatcgcagctggtgcctgtgcgtcacggtgctgccccgcaggaggtcacctactgggaatgacgctaccactgacccatggagcaaagcggcggcgcctcagcctcccatcctaga

SEQ ID NO: 70967 - DNA, 30 bp, Homo sapiens
  chr6:3343873-3343903
  hypo
taaatactcagcagccggccaaatgtcgaa

SEQ ID NO: 70968 - DNA, 211 bp, Homo sapiens
  chr6:3346365-3346576
  hypo
aagcccaagcaggctcctggacgttcaagggcacagactctctttgaatgtgcacgatgccaatctgacaggccagcgccacctctgctcgggtcccagctcaacgtctctgctgacctgctcacacgttcatgtacctctaaaacccagcattgcacgtctgaagctgcaatcacccctgcccctctccgcacaaaagccagcccttcca

SEQ ID NO: 70969 - DNA, 26 bp, Homo sapiens
  chr6:3362338-3362364
  hypo
actttaaaaaaattagcggccaggtg

SEQ ID NO: 70970 - DNA, 31 bp, Homo sapiens
  chr6:3368646-3368677
  hypo
gtgtgtaagagatatgcgcttttccagggga

SEQ ID NO: 70971 - DNA, 30 bp, Homo sapiens; identical to SEQ ID NO: 20062
  chr6:3386569-3386599
  hypo

SEQ ID NO: 70972 - DNA, 30 bp, Homo sapiens; identical to SEQ ID NO: 20063
  chr6:3400399-3400429
  hypo

SEQ ID NO: 70973 - DNA, 187 bp, Homo sapiens
  chr6:3405618-3405805
  hypo
tgctgctactgggaaggcccacgtatctgaagatggggaaaccgggtggagacaaagagacgaccgagcacgtattcatgcgaaactttcccttcacccaaatgcagagcaaatgtttgctccccagaagcccacaaggtagctgaagccatttctagttgacatcggcaatctccattctcttcat

SEQ ID NO: 70974 - DNA, 68 bp, Homo sapiens
  chr6:3441918-3441986
  hypo
cctcctgggatgtgctcggttcaccccccaccctcagctcccattccctgccccgctcatcctgtgcc

SEQ ID NO: 70975 - DNA, 47 bp, Homo sapiens
  chr6:3445256-3445303
  hypo
gtgggggtggggcacgcttcccagtgttctgcgtctgtcctcacaat

SEQ ID NO: 70976 - DNA, 44 bp, Homo sapiens
  chr6:3450541-3450585
  hypo
ttttattatttttttttgagacggagtctcgctctgttgctcag

SEQ ID NO: 70977 - DNA, 43 bp, Homo sapiens
  chr6:3450824-3450867
  hypo
cactgtgcccggccgtcagttcggtattaggaaaagaatttaa

SEQ ID NO: 70978 - DNA, 1367 bp, Homo sapiens; identical to SEQ ID NO: 42532
  chr6:3455897-3457264
  hypo

SEQ ID NO: 70979 - DNA, 700 bp, Homo sapiens; identical to SEQ ID NO: 42533
  chr6:3457536-3458236
  hypo

SEQ ID NO: 70980 - DNA, 31 bp, Homo sapiens
  chr6:3466107-3466138
  hypo
tgtggtagttggtacacggcatttccgtaat

SEQ ID NO: 70981 - DNA, 99 bp, Homo sapiens
  chr6:3468952-3469051
  hypo
ggtcctggctccaccttctcccgcttgccctgtcttgctgcagacacgttgctttgcatcttggacagaaccagaaacgtgacacattcctaataacct

SEQ ID NO: 70982 - DNA, 97 bp, Homo sapiens
  chr6:3471225-3471322
  hypo
cctagctttcgaagacgggtaaggtaaaagaaccagaaaacaaagtcgaaatggtgtccccttcctgtaggctcgcttttctttctttctttttctt

SEQ ID NO: 70983 - DNA, 21 bp, Homo sapiens
  chr6:3572937-3572958
  hypo
gccatgttgcccacaagtccc

SEQ ID NO: 70984 - DNA, 257 bp, Homo sapiens
  chr6:3578543-3578800
  hypo
agtgctgggattaaaggcgtgagtcaccacacctggccgatagatgtattttttatctcattagaaacagcccaccttcctgggttatagaaagaagcagaggccgagagccgtcgaccctcccagctcccgcctgtgttctcttcttggtcctctcccatcctgaatcgacaaccagcaaatatgacaatccagatggtggtcctacccgacttaagcctctctgggcctcacgttggaagcgcccctttgctccc

SEQ ID NO: 70985 - DNA, 222 bp, Homo sapiens; identical to SEQ ID NO: 20068
  chr6:3579859-3580081
  hypo

SEQ ID NO: 70986 - DNA, 25 bp, Homo sapiens
  chr6:3612287-3612312
  hypo
acccggcctctcattttcatctgct

SEQ ID NO: 70987 - DNA, 450 bp, Homo sapiens
  chr6:3618162-3618612
  hypo
gacctcaaattccaaaggcaccgtgagagtctcaggactcagcctttccacccttgccggggtgactcgtggagggaatcgagcctaagtcttacggcacgttgtgcagtttgggccggggcggaggaccagggcccagctgaggctggccttagtgactcagccttgatcctgccacggtgacaagggtgggagggttcccgcaggggtccagctcgtgtctgtgagaagcaccttcccttcagggtcgcacgtggaccgtggctgctaccacgctaccgttgccttcagtgctcttttgcaggagtgcagacgggcagttcagcgcgggccccagtgccgggggtggggggcagggagctcccgcagggctttgctgagaaggggcataaccatgacccactggtgatgtctgtgaggtggaggcagtggttgcggtgagattcatag

SEQ ID NO: 70988 - DNA, 35 bp, Homo sapiens
  chr6:3646461-3646496
  hypo
gaaggtggccgggcgcggtggctcacgcctgtaat

SEQ ID NO: 70989 - DNA, 391 bp, Homo sapiens; identical to SEQ ID NO: 20072
  chr6:3646959-3647350
  hypo

SEQ ID NO: 70990 - DNA, 270 bp, Homo sapiens; identical to SEQ ID NO: 20073
  chr6:3724298-3724568
  hypo

SEQ ID NO: 70991 - DNA, 208 bp, Homo sapiens; identical to SEQ ID NO: 20074
  chr6:3725240-3725448
  hypo

SEQ ID NO: 70992 - DNA, 433 bp, Homo sapiens
  chr6:3725747-3726180
  hypo
cccctggggccagactcggggcagcctgctgagactctgctgtgggggccctgctgtgggcccggcggcactgggctcacaggctcgggccagacaatcagcctcgggtgccagggaggacagccacgcagggaggtgaagcctccagttccacaaagggtgtctgtgctcttggtcgctgtcaaccccccacccgacagccggtgccgtgtagaaacagatcgtccctgtgagacactggagctggaccatcgactccactgcactgcccgagattgaggagccagagaaaggcccggcaagcccaagtcggaactccctccagatgctcccgagccccatggcggcaggcgtttctttgttaggcttttctggggtcatggagattttctcggccctctctgtgagccaggcatcccggagcaggtggccg

SEQ ID NO: 70993 - DNA, 130 bp, Homo sapiens
  chr6:3738058-3738188
  hypo
cccagggaggaaaaaccggggccactggagcccatgaaagccttctttctcctgattacacctgcacacctccactccgtccctatcgcctggtactaccagggagggaacaaaacggctaagtgagaca

SEQ ID NO: 70994 - DNA, 19 bp, Homo sapiens
  chr6:3758266-3758285
  hypo
gcctcctcggcctgggcgc

SEQ ID NO: 70995 - DNA, 31 bp, Homo sapiens; identical to SEQ ID NO: 20077
  chr6:3810823-3810854
  hypo

SEQ ID NO: 70996 - DNA, 53 bp, Homo sapiens
  chr6:3821399-3821452
  hypo
ccataaatagggcatccgtagacctgagcagccagttgcggagaagttgagag

SEQ ID NO: 70997 - DNA, 36 bp, Homo sapiens
  chr6:3850717-3850753
  hypo
ctggagctgcgctccgccggcgtggagcagctcatg

SEQ ID NO: 70998 - DNA, 30 bp, Homo sapiens
  chr6:3853081-3853111
  hypo
agtatgctgccgggcgcggtggctcacgcc

SEQ ID NO: 70999 - DNA, 30 bp, Homo sapiens
  chr6:3880139-3880169
  hypo
ggaggtgacggtcccgcctctgatcagagg

SEQ ID NO: 71000 - DNA, 31 bp, Homo sapiens
  chr6:3895146-3895177
  hypo
gtgttgggcctctactcggttgacttccagt

SEQ ID NO: 71001 - DNA, 31 bp, Homo sapiens; identical to SEQ ID NO: 20079
  chr6:3931975-3932006
  hypo

SEQ ID NO: 71002 - DNA, 19 bp, Homo sapiens
  chr6:4020057-4020076
  hypo
atttcatttatttatttga

SEQ ID NO: 71003 - DNA, 241 bp, Homo sapiens
  chr6:4020315-4020556
  hypo
caggcgtgagccaccgcgcccggccctaacatttcaaaacgtttggaattcaggcaacaagagacattttgtaagaacatttaaaacccttctcccctggaaatcaagagatatgtatggagtctggagattccgaactcaattttctaggacaaaggcaaactcagatgattacaagaatgaaagtgatcgtcacgctgcttccaggttccaaagtatggataatttttttttttttttt

SEQ ID NO: 71004 - DNA, 155 bp, Homo sapiens; identical to SEQ ID NO: 20082
  chr6:4061558-4061713
  hypo

SEQ ID NO: 71005 - DNA, 30 bp, Homo sapiens
  chr6:4079634-4079664
  hypo
cgcccccggcctcgcgggaaagcctgagcc

SEQ ID NO: 71006 - DNA, 31 bp, Homo sapiens
  chr6:4160622-4160653
  hypo
tacagcaatgtgagaacggactcatactgtg

SEQ ID NO: 71007 - DNA, 31 bp, Homo sapiens; identical to SEQ ID NO: 20083
  chr6:4165190-4165221
  hypo

SEQ ID NO: 71008 - DNA, 22 bp, Homo sapiens
  chr6:4166997-4167019
  hypo
gatcaagggccaggtgcggtgg

SEQ ID NO: 71009 - DNA, 102 bp, Homo sapiens
  chr6:4189171-4189273
  hypo
ggcccgcgagggggcgcgagtgggtgccagggcgcagtgggaagggggccgcggagcccgcgaggcacatgcgcagtgcaggaccccgccattttgtcttca

SEQ ID NO: 71010 - DNA, 188 bp, Homo sapiens; identical to SEQ ID NO: 20085
  chr6:4254743-4254931
  hypo

SEQ ID NO: 71011 - DNA, 30 bp, Homo sapiens; identical to SEQ ID NO: 4550
  chr6:4415168-4415198
  hypo

SEQ ID NO: 71012 - DNA, 202 bp, Homo sapiens; identical to SEQ ID NO: 20087
  chr6:4494277-4494479
  hypo

SEQ ID NO: 71013 - DNA, 369 bp, Homo sapiens
  chr6:4549976-4550345
  hypo
cctggccagtggtttccggggcgcactggggcttgcggggtccccggagcaccgcctgaaacgcaccaaagaaccccactctcctcgccccttaagaaaatcaggacaaaccagctgccactcaggcagagaactcaggaaggcccaaggagaccaagacgcggcacggctgcaggagaaagctcagccttgtgcagtccagaaatcctgccttgaagctcacaggggcccaacccagctgccccagaaacacggagacgctctagagccgcatggaacctcagcacaagaacttcaaaaaggacaaacccaggtgacccttgagcccgtactcaaggccaggcatgcgtaccacattctgtgagggca

SEQ ID NO: 71014 - DNA, 434 bp, Homo sapiens
  chr6:4559570-4560004
  hypo
catccatcacattcacatgctcgcacatgctcacttccactctcacactcatgctcactcacgcacactcacgttcacacgcacacacgcatattcacactctcgtgcactcacactcatgcacactcccattcatacacagttttgcgagtgtacttctggagtgctttgctggcagctctaggaaggaaagagagacgctccaattaggtctggagaagaacgagggggcatggcgagagggcccagcgggccgccactccattccagaaaggagtgcccctgctttccctggggctccctgcaccagctggtatgtggcgtggcatggcacggtatggtgtggcagggtgtggtatggtatagtctagtgtggcatgcgctggtatggcatagtctagggtagtgtggcctgatgtcgttcggcgtagtat

SEQ ID NO: 71015 - DNA, 69 bp, Homo sapiens
  chr6:4563332-4563401
  hypo
agtggacctggctggggtcaacgtctcttcgtttgacttggatacatcgatcctttccatctgtctcat

SEQ ID NO: 71016 - DNA, 30 bp, Homo sapiens
  chr6:4672211-4672241
  hypo
tccagcctggacgacggacgccttcctgag

SEQ ID NO: 71017 - DNA, 43 bp, Homo sapiens
  chr6:4689094-4689137
  hypo
agcatgggctttgaaatcatgcgtaggtttgaccaccaagtat

SEQ ID NO: 71018 - DNA, 687 bp, Homo sapiens; identical to SEQ ID NO: 4551
  chr6:4775126-4775813
  hypo

SEQ ID NO: 71019 - DNA, 77 bp, Homo sapiens; identical to SEQ ID NO: 42538
  chr6:4776193-4776270
  hypo

SEQ ID NO: 71020 - DNA, 17 bp, Homo sapiens
  chr6:4836441-4836458
  hypo
ttcggccatcttggctc

SEQ ID NO: 71021 - DNA, 43 bp, Homo sapiens
  chr6:4854164-4854207
  hypo
ctttgtaaaattttgttttcccgaaattcagcacagatgggct

SEQ ID NO: 71022 - DNA, 129 bp, Homo sapiens
  chr6:4858681-4858810
  hypo
tcagcactgctattgtccagccgtccagtcacctggatgagcaaaccagagctcacggagcttaaggaacctgcccagagccacacagccccagccacgggatcgagcgccaccctggccagcctgtct

SEQ ID NO: 71023 - DNA, 43 bp, Homo sapiens
  chr6:4872577-4872620
  hypo
ttggtacattaggtttaaaagcgaacacgttggcagagttttt

SEQ ID NO: 71024 - DNA, 104 bp, Homo sapiens
  chr6:4874010-4874114
  hypo
tgttttattgtgaataggctccgagagcctggtttgaaaccgccaagtaggaacatcgcacaggggacaccttcacatgcgccgcagctgtgcagatttcacct

SEQ ID NO: 71025 - DNA, 111 bp, Homo sapiens
  chr6:4874531-4874642
  hypo
cttgtcagttttatttcatagcgtttcttttttatatgtacatgtgcacgttattcagtgtttctgttcagcgttggcgttagggttggcgaggccttccccactgtgtgc

SEQ ID NO: 71026 - DNA, 21 bp, Homo sapiens
  chr6:4886532-4886553
  hypo
gaacaacgagactgttttcca

SEQ ID NO: 71027 - DNA, 42 bp, Homo sapiens
  chr6:4889731-4889773
  hypo
caggcgtgagccaccgtgcccggcccacatttttttactagc

SEQ ID NO: 71028 - DNA, 112 bp, Homo sapiens
  chr6:4905281-4905393
  hypo
tgctctacccctagcgtgatctgaactgctgaagtcagagaagtccacgttggataaacaaagccagcccagtagtaacctggctgtcacagtgaccgtgtgtccgtcttac

SEQ ID NO: 71029 - DNA, 199 bp, Homo sapiens; identical to SEQ ID NO: 20097
  chr6:4909051-4909250
  hypo

SEQ ID NO: 71030 - DNA, 92 bp, Homo sapiens
  chr6:4909754-4909846
  hypo
cttaagggtgtgtcttcgctttctggtgtacttgagataaaattcatacttttttttgtttgtttttgagacggagtctccctctgttgccc

SEQ ID NO: 71031 - DNA, 32 bp, Homo sapiens
  chr6:4910085-4910117
  hypo
catgagccaccgcacctggccaaatttcatac

SEQ ID NO: 71032 - DNA, 143 bp, Homo sapiens; identical to SEQ ID NO: 20099
  chr6:4910916-4911059
  hypo

SEQ ID NO: 71033 - DNA, 22 bp, Homo sapiens
  chr6:4911358-4911380
  hypo
cgaaaaaggatttttaaggcag

SEQ ID NO: 71034 - DNA, 43 bp, Homo sapiens
  chr6:4932007-4932050
  hypo
tgagcagggacctcactggcacgaggagccaacacagttttaa

SEQ ID NO: 71035 - DNA, 507 bp, Homo sapiens; identical to SEQ ID NO: 4553
  chr6:4948975-4949482
  hypo

SEQ ID NO: 71036 - DNA, 31 bp, Homo sapiens; identical to SEQ ID NO: 4554
  chr6:4949502-4949533
  hypo

SEQ ID NO: 71037 - DNA, 30 bp, Homo sapiens; identical to SEQ ID NO: 20103
  chr6:4950293-4950323
  hypo

SEQ ID NO: 71038 - DNA, 278 bp, Homo sapiens
  chr6:4950658-4950936
  hypo
tgaaaggaaaaccccgacagcacagagcacttcgtgcggcagcagcacaccgggagtcccactccctttcctgctgcgtttggatctgccgtgacaaggactatcagaaccactcacagtaaggtcgggtcgcgtttctaaatccactgtttatggaccgtcttttcactgagaagaagctcgtcagttcaggggtttctagaacttctccagactcttcaaaaactcatgactttctccaagttggtaatcccagcactttgggaggcccaggcggg

SEQ ID NO: 71039 - DNA, 215 bp, Homo sapiens
  chr6:4951175-4951390
  hypo
aaaaaaacttgcaaaccctcatgaggagcctgtccccagccctgttttccagcctctgcctgcatgggaggggcagtgagtcagccacgtgtttgctttgccgcctctgcctgtgtgctctccaagctgcgggtttcacatgcagtaaacggcatcaagacattgacagaaggtgtatgggcagtcttacactgtctcagcgacttcagggccaa

SEQ ID NO: 71040 - DNA, 30 bp, Homo sapiens
  chr6:4952435-4952465
  hypo
ggatgggtcttccccgcccgcctcccaccg

SEQ ID NO: 71041 - DNA, 30 bp, Homo sapiens
  chr6:4953850-4953880
  hypo
atgcggcagtggcgcggggccgaggctgct

SEQ ID NO: 71042 - DNA, 34 bp, Homo sapiens; identical to SEQ ID NO: 20106
  chr6:5003273-5003307
  hypo

SEQ ID NO: 71043 - DNA, 30 bp, Homo sapiens
  chr6:5030126-5030156
  hypo
aagatgatggaagccgagacaaagatagtc

SEQ ID NO: 71044 - DNA, 1292 bp, Homo sapiens; identical to SEQ ID NO: 42541
  chr6:5085036-5086328
  hypo

SEQ ID NO: 71045 - DNA, 71 bp, Homo sapiens
  chr6:5107467-5107538
  hypo
gctgttacagcctgcagcccacgttaagtttgggtggactgcctcattgcgtaaaacctgggggagtggga

SEQ ID NO: 71046 - DNA, 31 bp, Homo sapiens; identical to SEQ ID NO: 20108
  chr6:5108331-5108362
  hypo

SEQ ID NO: 71047 - DNA, 31 bp, Homo sapiens; identical to SEQ ID NO: 20109
  chr6:5109989-5110020
  hypo

SEQ ID NO: 71048 - DNA, 30 bp, Homo sapiens
  chr6:5145056-5145086
  hypo
ccgtaatcccttcccgcaggtgtttctgcg

SEQ ID NO: 71049 - DNA, 30 bp, Homo sapiens
  chr6:5264914-5264944
  hypo
caggcgtgagccaccgcgcccggcccataa

SEQ ID NO: 71050 - DNA, 224 bp, Homo sapiens; identical to SEQ ID NO: 20110
  chr6:5507939-5508163
  hypo

SEQ ID NO: 71051 - DNA, 133 bp, Homo sapiens
  chr6:5510682-5510815
  hypo
accgtgagttccgccgcagcctggcctgtctttcgccctagttagtctttaagctcctgaatgcccgccgcacgcccagggctttgcacacggtgggcacacggtgccttttgagcgcgggagagggttgtga

SEQ ID NO: 71052 - DNA, 142 bp, Homo sapiens
  chr6:5556542-5556684
  hypo
gagtatagaaatcagggtcatcgtggcgcattcaacgaacttaactatattggtcaaaaggaaacatgcgctgttctgagagcggcagccacagtcctcctgattctcagtcccttgtaccgtcagtttccatcttcagctt

SEQ ID NO: 71053 - DNA, 31 bp, Homo sapiens; identical to SEQ ID NO: 20112
  chr6:5684506-5684537
  hypo

SEQ ID NO: 71054 - DNA, 157 bp, Homo sapiens
  chr6:5746472-5746629
  hypo
tcatgaacaaagacagtgacacgatggccacgtggtccttagatggtgcgtggaagaggggattttaaagagcgtgtgtctgtgtgtgtgcactgttactccatacggatggtatctgctttatgtgtttgacaacggcaggtttttgtctgcttgc

SEQ ID NO: 71055 - DNA, 308 bp, Homo sapiens
  chr6:5783576-5783884
  hypo
agtttggactttggagtcaggcggttcaagttcaaatccagtgtccttgagcacccgctaagctccctgagccacacctaagagttaaatggcacagtgtgtgcaaaagctgctaaaatcaggccgagaagtcgacaatgaagggaagacggaagggattgtgaggtctgggaagtgtctggaaaaacgtcgcatcgcagaaggcctgtggtgttaggatatgcgttttggtttttgtccaggttcctggctcccagcacccacattccttgttagaatgctggggcgccttaggactcaggaaacag

SEQ ID NO: 71056 - DNA, 74 bp, Homo sapiens
  chr6:5839913-5839987
  hypo
gacagctgaggggagcaggtacgtgggccctgcttggggctcatgggaagaccggagggaattacatgggattc

SEQ ID NO: 71057 - DNA, 30 bp, Homo sapiens
  chr6:5989367-5989397
  hypo
cggctgtagcacgtgcgtgggaaacataga

SEQ ID NO: 71058 - DNA, 30 bp, Homo sapiens; identical to SEQ ID NO: 4561
  chr6:5999244-5999274
  hypo

SEQ ID NO: 71059 - DNA, 352 bp, Homo sapiens; identical to SEQ ID NO: 42546
  chr6:5999609-5999961
  hypo

SEQ ID NO: 71060 - DNA, 811 bp, Homo sapiens; identical to SEQ ID NO: 42550
  chr6:6008842-6009653
  hypo

SEQ ID NO: 71061 - DNA, 114 bp, Homo sapiens
  chr6:6167627-6167741
  hypo
cacacatgaacactaagtctgcgtgcctttgtctctgttccaggatgagacgctaagactgaccttgatgatgatctcagggatggttagcacggtggacttttgcttggccag

SEQ ID NO: 71062 - DNA, 208 bp, Homo sapiens
  chr6:6199259-6199467
  hypo
tgtgttgtggctggagcatagcgtgtttgaacattcaggttcataggagaacggtgatggcaggcaatgcacgaaactaacaaatacatataacacttccttagtgcgaagtggtgttctaaaaccctcatggatgttaacacatctgatgtccctagcaccctataagaacagtactattggtcgggcgcagtggctcacgcctgta

SEQ ID NO: 71063 - DNA, 27 bp, Homo sapiens
  chr6:6199706-6199733
  hypo
cagagcgagactccatctcagaaaaaa

SEQ ID NO: 71064 - DNA, 58 bp, Homo sapiens
  chr6:6250342-6250400
  hypo
aaactcctgagaaatgacattcgcccccgcttgtgtcgctaattaaaaatcattttga

SEQ ID NO: 71065 - DNA, 30 bp, Homo sapiens; identical to SEQ ID NO: 20117
  chr6:6328399-6328429
  hypo

SEQ ID NO: 71066 - DNA, 30 bp, Homo sapiens
  chr6:6534782-6534812
  hypo
ccgtgggacccaggcgtccaggcaccgcgc

SEQ ID NO: 71067 - DNA, 826 bp, Homo sapiens; identical to SEQ ID NO: 42552
  chr6:6546461-6547287
  hypo

SEQ ID NO: 71068 - DNA, 31 bp, Homo sapiens
  chr6:6558351-6558382
  hypo
cagagtcatccaagttcgtacaagttgattc

SEQ ID NO: 71069 - DNA, 30 bp, Homo sapiens
  chr6:6615179-6615209
  hypo
tcataaagggctaagcggaggcggctgcct

SEQ ID NO: 71070 - DNA, 31 bp, Homo sapiens
  chr6:6668387-6668418
  hypo
tccatcccaagatggccgaataggaacagct

SEQ ID NO: 71071 - DNA, 129 bp, Homo sapiens
  chr6:6737009-6737138
  hypo
cttgaaaagcaatctcgattcccggccagactccctgcccacgtgttccccacccgcgtccccacagctccgtccgcctgctctggtcaacaccacagctgggccctgccccttcggaagctgatgctc

SEQ ID NO: 71072 - DNA, 114 bp, Homo sapiens
  chr6:6745410-6745524
  hypo
gcaaacaacaacaagatttaccgcagaacaaaagaacagaactcgcacaatataaacacacaccacaaaagaaaaccgaccaggttataattgctagcgcggcagcctgctttt

SEQ ID NO: 71073 - DNA, 93 bp, Homo sapiens
  chr6:6753684-6753777
  hypo
atgtgtgccagaagggcggcacacctgagagggcatggaacttcctcgccgctcccccataccttgccttccacctggcggttcctcagctgt

SEQ ID NO: 71074 - DNA, 137 bp, Homo sapiens; identical to SEQ ID NO: 20118
  chr6:6780549-6780686
  hypo

SEQ ID NO: 71075 - DNA, 194 bp, Homo sapiens
  chr6:6824563-6824757
  hypo
gggagataaacagatgcgtggcattccacagctctgaggaaagatgccccttgaagctagggagaagcttttgtccatgctgccacctttaggggctttctcagaaattcccactcctacgctcagtgacgggatcatcagagcctaacagcttcttggccatggtcgtgcacagccatcgccagccaccctgg

SEQ ID NO: 71076 - DNA, 30 bp, Homo sapiens
  chr6:6843227-6843257
  hypo
ccttatgtgtaattcgccaaggttaagcag

SEQ ID NO: 71077 - DNA, 17 bp, Homo sapiens
  chr6:6849734-6849751
  hypo
ggcgcccagccataaga

SEQ ID NO: 71078 - DNA, 31 bp, Homo sapiens; identical to SEQ ID NO: 20119
  chr6:6898398-6898429
  hypo

SEQ ID NO: 71079 - DNA, 131 bp, Homo sapiens; identical to SEQ ID NO: 20120
  chr6:6901360-6901491
  hypo

SEQ ID NO: 71080 - DNA, 86 bp, Homo sapiens
  chr6:6971300-6971386
  hypo
gcctggatgctctgcgctgtgggcgctggctcatcgcccctctgattcacaccgttattaaaccagcactcgggcaagaagcaaaa

SEQ ID NO: 71081 - DNA, 94 bp, Homo sapiens
  chr6:6982818-6982912
  hypo
tccattgcaacgcagacgccaaatattagcacaagaagtgccatcacagtcactctgagaagaaaggtgtattaaccatcggtcaatggagaaa

SEQ ID NO: 71082 - DNA, 137 bp, Homo sapiens
  chr6:6984867-6985004
  hypo
ggctgaaacagcacacgcgcagagaggcttcaagggtacttgtattgggaaacgttgatgcgcccagtacagtcgggaaacaaaaggagatgaagctgagaaggcagaatgtggccagatggcgtttggactttgtc

SEQ ID NO: 71083 - DNA, 31 bp, Homo sapiens; identical to SEQ ID NO: 20122
  chr6:7040003-7040034
  hypo

SEQ ID NO: 71084 - DNA, 72 bp, Homo sapiens; identical to SEQ ID NO: 42553
  chr6:7051765-7051837
  hypo

SEQ ID NO: 71085 - DNA, 235 bp, Homo sapiens; identical to SEQ ID NO: 42554
  chr6:7051873-7052108
  hypo

SEQ ID NO: 71086 - DNA, 227 bp, Homo sapiens; identical to SEQ ID NO: 42555
  chr6:7052331-7052558
  hypo

SEQ ID NO: 71087 - DNA, 95 bp, Homo sapiens
  chr6:7058378-7058473
  hypo
aagtgccaggattatgggcatgagccaccgtgcccagccagtctgtatttttaataagctttacaggtcactccggtatggatcattttggggaa

SEQ ID NO: 71088 - DNA, 31 bp, Homo sapiens
  chr6:7120383-7120414
  hypo
ttaaaaattatgtacctaggccgggcgtggt

SEQ ID NO: 71089 - DNA, 99 bp, Homo sapiens
  chr6:7132659-7132758
  hypo
aagtggtgggattagagacgtgagccaccacgcccagccactttttgttctttttaagcattttattcactgatgcctcccaagcgcttgccatagtgc

SEQ ID NO: 71090 - DNA, 197 bp, Homo sapiens; identical to SEQ ID NO: 20123
  chr6:7204198-7204395
  hypo

SEQ ID NO: 71091 - DNA, 30 bp, Homo sapiens; identical to SEQ ID NO: 20124
  chr6:7204765-7204795
  hypo

SEQ ID NO: 71092 - DNA, 30 bp, Homo sapiens; identical to SEQ ID NO: 20125
  chr6:7214465-7214495
  hypo

SEQ ID NO: 71093 - DNA, 30 bp, Homo sapiens
  chr6:7230098-7230128
  hypo
gcctgagatgaagacgcagctggagcagga

SEQ ID NO: 71094 - DNA, 83 bp, Homo sapiens; identical to SEQ ID NO: 20126
  chr6:7230352-7230435
  hypo

SEQ ID NO: 71095 - DNA, 226 bp, Homo sapiens
  chr6:7237762-7237988
  hypo
ctgatggtttaagcgctcgcgttggggcttgcagaatgctgtaggtcctgagtgcgcaggtaactcactgtggttacaggtgcttttacaaatccccttctaaagcagttattcgtggcagctaccaaataaatagaatcatttgctactttctatatagatggctggccaacaagtgtttttgaaacctgcgttattataaaatactaaacgggcccgttttcct

SEQ ID NO: 71096 - DNA, 157 bp, Homo sapiens
  chr6:7246885-7247042
  hypo
ggacgccgacggcgcggaagaggacgcgtcgagcaaccagagcctggacctggacttcgccaccaagctcatggacttcaagctggcggagggcgacggcgaggcaggcgccgggggcgcggcctcgcaggagcagaagctcgcctgcgacacctgt

SEQ ID NO: 71097 - DNA, 210 bp, Homo sapiens
  chr6:7247339-7247549
  hypo
gactcccccaaaagcgtggccagcaaggcagacaagaggaagaaggtctgcagcgtgtgcaacaagcggttctggtcgctgcaggacctgacccggcacatgcgctcccacacaggtaaccagggcaggccaggtccccggcccaacaagaggaggcgagccgggcacctctcctaggagctcccctgaagcggcgctggaggccaccga

SEQ ID NO: 71098 - DNA, 30 bp, Homo sapiens
  chr6:7247826-7247856
  hypo
tcctgtggcctggacgacaggcactgcccc

SEQ ID NO: 71099 - DNA, 113 bp, Homo sapiens
  chr6:7267436-7267549
  hypo
ggtctctgctgcaccgcttaggagatggcatcaccctgagcaagggaccctggcggggaccactgggcggcgtgacccaggctcacccatcttcagatcggggcactgggtgt

SEQ ID NO: 71100 - DNA, 181 bp, Homo sapiens
  chr6:7268059-7268240
  hypo
atgcagcttcctgggtcggctccctgagattctgctggagtaggtatgtgtgtgtgttctgggtggttctgatgcgtgtggctcacaggctgagtgtgcgatgcctctctctgcctgtgactctgtgtgcacgtgtgtgcctctgtcaggtggcaagtgagcactgcgtctccgccctctc

SEQ ID NO: 71101 - DNA, 30 bp, Homo sapiens
  chr6:7269009-7269039
  hypo
ccagtccttgctggcgggacctgcatcccc

SEQ ID NO: 71102 - DNA, 135 bp, Homo sapiens; identical to SEQ ID NO: 20129
  chr6:7269313-7269448
  hypo

SEQ ID NO: 71103 - DNA, 56 bp, Homo sapiens
  chr6:7271970-7272026
  hypo
aggtgcctctgggatacgggtgtttggctgggtctaccgttcgctggagagagtgg

SEQ ID NO: 71104 - DNA, 29 bp, Homo sapiens
  chr6:7279445-7279474
  hypo
attaagaatctatcttggggccgggtgcg

SEQ ID NO: 71105 - DNA, 23 bp, Homo sapiens
  chr6:7291623-7291646
  hypo
ccgtgtctcagaaaaataaaaaa

SEQ ID NO: 71106 - DNA, 103 bp, Homo sapiens
  chr6:7294550-7294653
  hypo
tactcacataaaaacaataggcgtatatgcttatagatatatagaaattaatggaaaatataaacataataccatttatgaaaaatagggccgggcgtggtgg

SEQ ID NO: 71107 - DNA, 164 bp, Homo sapiens
  chr6:7415146-7415310
  hypo
ggaatgtgaatcatcacgtggtccagcgtcttcacactgtcgacactccccacccgttagtcacttagtagccttcttggctatcagttcagctgctgtgatgttgtggtgcttgtgtgcaagtaacccttactttgcttaataatgaccgtaaattacaggag

SEQ ID NO: 71108 - DNA, 30 bp, Homo sapiens
  chr6:7474307-7474337
  hypo
gaaagggaggaggagcgtgtgcaaaggccc

SEQ ID NO: 71109 - DNA, 1811 bp, Homo sapiens; identical to SEQ ID NO: 42557
  chr6:7541427-7543238
  hypo

SEQ ID NO: 71110 - DNA, 31 bp, Homo sapiens; identical to SEQ ID NO: 20132
  chr6:7583974-7584005
  hypo

SEQ ID NO: 71111 - DNA, 31 bp, Homo sapiens
  chr6:7692045-7692076
  hypo
ccgtgtggtgagatgacggcctggtaagcac

SEQ ID NO: 71112 - DNA, 1723 bp, Homo sapiens; identical to SEQ ID NO: 4574
  chr6:7726045-7727768
  hypo

SEQ ID NO: 71113 - DNA, 38 bp, Homo sapiens
  chr6:7767220-7767258
  hypo
gtttgttttttttttttgagacggagtctcgctctgtc

SEQ ID NO: 71114 - DNA, 245 bp, Homo sapiens
  chr6:7880270-7880515
  hypo
agaatgctccttcccactcaacgcacacatgaatgcaaccaaccacgcgattgtgcagaccttggtgagctctcggagactttgttttgtaagtgggagtaagccaagaccaggtgtcatttctaaggtaccttctccccttctgttttggaacaggttcaccttatgaaccccgagtatgtccccaaaccgtgctgtgcgccaactaagctaaatgccatctcggttctttactttgatgacaa

SEQ ID NO: 71115 - DNA, 301 bp, Homo sapiens
  chr6:7882609-7882910
  hypo
agttcatgtgggctctggcttcgtgttaacatgaggaactaaagacatgtttcaccccgtgagaaacagaaggatcccctgaacagtaactgatttgacaagtatcgacacataaagttatggcatcagcattctcttactcaggcacggtcagaagtaacgctgctttcatcacggctaacctctcacactgagagaagtattcacagcaacagaagctccagcagcggccgtgaaggtatcttccagaggtgtgggtttttgcatttcaatctgctccatgctacggaccaacacagta

SEQ ID NO: 71116 - DNA, 487 bp, Homo sapiens
  chr6:7883308-7883795
  hypo
ctgtgggactgaactcctaaacgcagggtgcgggagctgggcaggagaggtgacctccaactgtgttcctaaagttcgtctttcgcttggctcaggacaaagcggtgtaacgagtcaaggtctctgcctccactgtgctcactgactttcttccctcctcggaaaagcaataacgtggggtagcctcgtaccttaaaacaaaaaagaaaaaagtttgcaaaccagcggtccagatcacatgcaaattgcttcctaaataaaaccagatacactcctaccgttgtggctggaaaaattctgtggctaatttttaaaggtgtatattccattaaaacaggagcagactactgtttagaaagcacagccgtggggctgtgtgttcacttctgaattcaaaatgacatcattaaagatcagcctcaaaggaacgactttaccctaaagcagacgctttcagtctttactgtgcacacgatcacctgcggat

SEQ ID NO: 71117 - DNA, 413 bp, Homo sapiens
  chr6:7884118-7884531
  hypo
aacccaagcacaggaccgacttgctggcatggccctttcagaaaggaggttatgttgaaatgattcttagattcagccactgcattttataatgctggcttatgtgtgaaaaatgagcgactcgggtatttatggcaaaggctacagaccactggtcaatcatcaagagtcgcggtgtgggaagccccacagtctatggcgtggggtctgttacttcacggccttgttactcagacagcaaggcctgaaaacctgcactgaaacatggatactaactacaaagcgggcgaagaagaatgccttccctttgagagaggatctcttttgcttctccaaacaaacaactcaaagggacataaaaaccacattgttgagaagatgagagcagagtgagttatcgtggttgaggcaca

SEQ ID NO: 71118 - DNA, 204 bp, Homo sapiens; identical to SEQ ID NO: 20137
  chr6:7885607-7885811
  hypo

SEQ ID NO: 71119 - DNA, 356 bp, Homo sapiens; identical to SEQ ID NO: 20138
  chr6:7887533-7887889
  hypo

SEQ ID NO: 71120 - DNA, 891 bp, Homo sapiens; identical to SEQ ID NO: 20139
  chr6:7888465-7889356
  hypo

SEQ ID NO: 71121 - DNA, 70 bp, Homo sapiens; identical to SEQ ID NO: 20140
  chr6:7889725-7889795
  hypo

SEQ ID NO: 71122 - DNA, 218 bp, Homo sapiens; identical to SEQ ID NO: 20141
  chr6:7890516-7890734
  hypo

SEQ ID NO: 71123 - DNA, 30 bp, Homo sapiens
  chr6:7891508-7891538
  hypo
gaggtcgaacgtggacggtctccaagttcg

SEQ ID NO: 71124 - DNA, 123 bp, Homo sapiens
  chr6:7891858-7891981
  hypo
caatcttgacagtttcggaatgttcaaggcccagagccagctgctcccaggttggagccagggctttgcagtgaccacaccacggagcgaagaacttgataaagtggtcgcctggagtggaga

SEQ ID NO: 71125 - DNA, 98 bp, Homo sapiens
  chr6:7892314-7892412
  hypo
taaaaaatgaagggacgcttgaatgagcctcggcacttggcagccctaaggaatggacggacccaggctctgcctgtcatggtcgaccacatcccaaa

SEQ ID NO: 71126 - DNA, 196 bp, Homo sapiens
  chr6:7893045-7893241
  hypo
ttgtaaattgcccagtctcgggtgtgtattcatcagcagtgaaaacggactaatacaagtggtttccacaaatgtcaggcaagtgccttcttggagaagggagggcgggctgtgccctgcatgggacacgggaagctggcagttttatttcttgaactggacagtagttacagtgtgaccacgctataaaaattca

SEQ ID NO: 71127 - DNA, 272 bp, Homo sapiens; identical to SEQ ID NO: 20142
  chr6:7893705-7893977
  hypo

SEQ ID NO: 71128 - DNA, 211 bp, Homo sapiens
  chr6:7898571-7898782
  hypo
agccaccacacccagccgagttgagagagtctttgcaggtgagggatggaagcactgaatcagcagccaagtttctgattaggtcatcagagaagatggggcagagcggaagagccgcacagacacactggaaactggcaacagtaagcggcaaagctccaaaaggaccaccacagaccaccttcaaatcagtgggcgcttagctgataca

SEQ ID NO: 71129 - DNA, 301 bp, Homo sapiens
  chr6:7911687-7911988
  hypo
ctactgtgccctcatttatgccggttactaaaatgaatgacagcacgcctgctatggctgaactcagcctgtggaatggcccgaaggcatccctgcccagcgactcataactcgcacctgcacacacaccttacagcagatggtaatcgaaagctccagccctaccccggggatctgaagctaaattagaatcaccgggttgctctccgggatcctgcctgctctttgattatcctcaatccaggaagccccaggtagttaactcctggcttggcaacaggggacgcgcccactgtctcac

SEQ ID NO: 71130 - DNA, 203 bp, Homo sapiens; identical to SEQ ID NO: 20144
  chr6:7919988-7920191
  hypo

SEQ ID NO: 71131 - DNA, 91 bp, Homo sapiens
  chr6:7976896-7976987
  hypo
ttaaatgtgacagcagaggcacgcacaaaataggaccgcagtgtctcccctcaacgtcagtttaccatccgctcacttggagagttatcta

SEQ ID NO: 71132 - DNA, 47 bp, Homo sapiens
  chr6:7986657-7986704
  hypo
tggcccgcagaacgcgggttctgtaaagacacgtggagaagattcga

SEQ ID NO: 71133 - DNA, 30 bp, Homo sapiens
  chr6:7987724-7987754
  hypo
tagatcatgcacaacgagagcccttaagca

SEQ ID NO: 71134 - DNA, 30 bp, Homo sapiens; identical to SEQ ID NO: 4578
  chr6:8825196-8825226
  hypo

SEQ ID NO: 71135 - DNA, 17 bp, Homo sapiens
  chr6:10075433-10075450
  hypo
agcgagtgctgctgggg

SEQ ID NO: 71136 - DNA, 493 bp, Homo sapiens; identical to SEQ ID NO: 20149
  chr6:10319601-10320094
  hypo

SEQ ID NO: 71137 - DNA, 26 bp, Homo sapiens
  chr6:10436414-10436440
  hypo
tcgcccactcgccaccgcgcccggct

SEQ ID NO: 71138 - DNA, 26 bp, Homo sapiens
  chr6:10436559-10436585
  hypo
gccaccgcgcccggccgcagtaggca

SEQ ID NO: 71139 - DNA, 44 bp, Homo sapiens
  chr6:10491328-10491372
  hypo
tgggattacaggcgtgagccaccgcacccagccagcatctccct

SEQ ID NO: 71140 - DNA, 30 bp, Homo sapiens; identical to SEQ ID NO: 20150
  chr6:10494984-10495014
  hypo

SEQ ID NO: 71141 - DNA, 100 bp, Homo sapiens
  chr6:10527663-10527763
  hypo
ataaataaaataaaataaaaagttgcttgtctactacatacagacaatgctaggagccagaaacatgaggaatacatgagctcggcgccaatggaacatg

SEQ ID NO: 71142 - DNA, 149 bp, Homo sapiens; identical to SEQ ID NO: 20151
  chr6:10538234-10538383
  hypo

SEQ ID NO: 71143 - DNA, 42 bp, Homo sapiens; identical to SEQ ID NO: 20152
  chr6:10539695-10539737
  hypo

SEQ ID NO: 71144 - DNA, 32 bp, Homo sapiens; identical to SEQ ID NO: 20153
  chr6:10542885-10542917
  hypo

SEQ ID NO: 71145 - DNA, 31 bp, Homo sapiens
  chr6:10551605-10551636
  hypo
gttaaacttctttccccgcctctgagataat

SEQ ID NO: 71146 - DNA, 30 bp, Homo sapiens
  chr6:10578053-10578083
  hypo
gtgagctgctgcacccggcctattgaatcc

SEQ ID NO: 71147 - DNA, 85 bp, Homo sapiens; identical to SEQ ID NO: 20154
  chr6:10595774-10595859
  hypo

SEQ ID NO: 71148 - DNA, 30 bp, Homo sapiens
  chr6:10612506-10612536
  hypo
accgcgcccggcctttgtttttgttttaac

SEQ ID NO: 71149 - DNA, 26 bp, Homo sapiens
  chr6:10693034-10693060
  hypo
gagtgagccaccgtgcccagccaaga

SEQ ID NO: 71150 - DNA, 78 bp, Homo sapiens
  chr6:10693317-10693395
  hypo
ctattgtatgtaactgcgggacatgctcacaggcccaggcacgttccagctcacagcctgtttagcaaatcgggtatc

SEQ ID NO: 71151 - DNA, 30 bp, Homo sapiens
  chr6:10693775-10693805
  hypo
gctgaagcactgtatcgcacttgaaatgga

SEQ ID NO: 71152 - DNA, 88 bp, Homo sapiens
  chr6:10735101-10735189
  hypo
accaaggaatatctttggaaatccccgtgaacatgtgcaaaggaatctgtaggttacattcctaaacgctgtgtcagagcatctcagc

SEQ ID NO: 71153 - DNA, 25 bp, Homo sapiens
  chr6:10761165-10761190
  hypo
tgccgcacctgatcattcatgcatt

SEQ ID NO: 71154 - DNA, 160 bp, Homo sapiens
  chr6:10785338-10785498
  hypo
agtggctaagcacctcgctagctgtttagtggtgtttgttagtattaagactgactctctgcctgttggtccctaactcccacagtcctgtttctgtgtacggactgaggactttctgcttcgaggcttagttctgtctcattcccgaggcctgtccctg

SEQ ID NO: 71155 - DNA, 22 bp, Homo sapiens
  chr6:10832343-10832365
  hypo
cagtagctgggattacaggtgc

SEQ ID NO: 71156 - DNA, 19 bp, Homo sapiens
  chr6:10856653-10856672
  hypo
gagccgagatcatgccact

SEQ ID NO: 71157 - DNA, 1232 bp, Homo sapiens; identical to SEQ ID NO: 42607
  chr6:11043615-11044847
  hypo

SEQ ID NO: 71158 - DNA, 91 bp, Homo sapiens
  chr6:11052341-11052432
  hypo
gatgggatctccttatgttgcccagatggagtcctgaactcctgcgctcaagggatcctcctgccttagcatcctgcggagccaggattac

SEQ ID NO: 71159 - DNA, 30 bp, Homo sapiens; identical to SEQ ID NO: 20159
  chr6:11191220-11191250
  hypo

SEQ ID NO: 71160 - DNA, 30 bp, Homo sapiens; identical to SEQ ID NO: 42610
  chr6:11217446-11217476
  hypo

SEQ ID NO: 71161 - DNA, 293 bp, Homo sapiens
  chr6:11273699-11273992
  hypo
ctgaatcatgacaagtgccaccgatgctgaggtgcgaacggccggggactgcgcctatctgtgtgcgttcacctgtgttgccctccacacagtccccgcctgtggtctagccttctactccctttccggccggcagattccgtcttgccagtggcttgatatgacttcatttatttgaggttgtgagtcaatgttatcaagatccgaattaccctgggcattgttcatacaatggaaggccgaaatggacacccatgacatgtagggcaaccgtgagtagagcctcactcaat

SEQ ID NO: 71162 - DNA, 31 bp, Homo sapiens
  chr6:11288374-11288405
  hypo
ggctcagtcaaaattacgcaggctggttcag

SEQ ID NO: 71163 - DNA, 66 bp, Homo sapiens
  chr6:11324664-11324730
  hypo
ttcatgcatggtgccaccccacgtgcagggccagcttcatggcacgtcacctgtgtgcttgcatag

SEQ ID NO: 71164 - DNA, 30 bp, Homo sapiens; identical to SEQ ID NO: 4620
  chr6:11392177-11392207
  hypo

SEQ ID NO: 71165 - DNA, 30 bp, Homo sapiens; identical to SEQ ID NO: 42616
  chr6:11538752-11538782
  hypo

SEQ ID NO: 71166 - DNA, 30 bp, Homo sapiens; identical to SEQ ID NO: 42617
  chr6:11968636-11968666
  hypo

SEQ ID NO: 71167 - DNA, 22 bp, Homo sapiens
  chr6:12007481-12007503
  hypo
agcatgattttttttttgagac

SEQ ID NO: 71168 - DNA, 30 bp, Homo sapiens
  chr6:12029260-12029290
  hypo
ttccttaccttttatcgctacataatattc

SEQ ID NO: 71169 - DNA, 38 bp, Homo sapiens
  chr6:12029573-12029611
  hypo
gtcttttgtggacagcgtgttgccgcgattgctttttc

SEQ ID NO: 71170 - DNA, 30 bp, Homo sapiens; identical to SEQ ID NO: 42618
  chr6:12163297-12163327
  hypo

SEQ ID NO: 71171 - DNA, 165 bp, Homo sapiens
  chr6:12222840-12223005
  hypo
acaggcaagcctaaccctgcccgggcctgtgtctgatggcgaggcttggtatatactacaagcaccttgtcattagggttttatcgtgctatggatatgctaacgatacatttataaacaaagtttctaagtagtgcaattgccgaggaaaaactgattgattta

SEQ ID NO: 71172 - DNA, 155 bp, Homo sapiens; identical to SEQ ID NO: 20161
  chr6:12287986-12288141
  hypo

SEQ ID NO: 71173 - DNA, 30 bp, Homo sapiens; identical to SEQ ID NO: 20162
  chr6:12288539-12288569
  hypo

SEQ ID NO: 71174 - DNA, 266 bp, Homo sapiens
  chr6:12338228-12338494
  hypo
acacttacattactacggtatataggcaatactgtaggcaattagaacaccgtgttaaggatttgtgtatctagacagagaaaaggtacggtaaaaatacagtatgaggatctcacaggactctcgtgtatgcggtcagcattgactgaaatatcacgtggcatctgaccgtatttacaataacgggaggcagtggacactatctgactcctgaaatcagatcacctaggtgactccttcaaaactgtggatgtttggctgggcgt

SEQ ID NO: 71175 - DNA, 22 bp, Homo sapiens
  chr6:12788094-12788116
  hypo
ctcaacaaaggaggccaggcac

SEQ ID NO: 71176 - DNA, 30 bp, Homo sapiens
  chr6:13194012-13194042
  hypo
gctcaccctgatgacgtggtgactttgatt

SEQ ID NO: 71177 - DNA, 184 bp, Homo sapiens
  chr6:13296595-13296779
  hypo
tgccttttgtaggacaaaactcgaacagggaaatttaacttgcgtgtaacatgcacacccagacgaccttatttcaatcatacccaattttaaaatccaggaaccggccacagtaaggaaaggcaggcatgtttcaggctgtccagcagctgggcagaaaaacggagacccactgggccaaaca

SEQ ID NO: 71178 - DNA, 18 bp, Homo sapiens
  chr6:13330102-13330120
  hypo
tgtgttaaaaagtgatcg

SEQ ID NO: 71179 - DNA, 136 bp, Homo sapiens; identical to SEQ ID NO: 20165
  chr6:13333028-13333164
  hypo

SEQ ID NO: 71180 - DNA, 30 bp, Homo sapiens
  chr6:13333831-13333861
  hypo
agaggagaaggagggcgatggaactggtag

SEQ ID NO: 71181 - DNA, 30 bp, Homo sapiens; identical to SEQ ID NO: 20166
  chr6:13350850-13350880
  hypo

SEQ ID NO: 71182 - DNA, 30 bp, Homo sapiens
  chr6:13365034-13365064
  hypo
cagctccggctcctcggtcatgatggcaat

SEQ ID NO: 71183 - DNA, 173 bp, Homo sapiens
  chr6:13386516-13386689
  hypo
aaggagcctcctatccgtcaggtccaaatcccccttttcatttataagcaagcaaactgatacacctgtgcactagatacacaccgcgtaggtgaaagctgactccaggtagcacctggcctgactgtgaaggaatctcgcgtacttcggaggacatgcggctgtccctgcca

SEQ ID NO: 71184 - DNA, 25 bp, Homo sapiens
  chr6:13397368-13397393
  hypo
tgtgggtgcccacagtggtctcgaa

SEQ ID NO: 71185 - DNA, 84 bp, Homo sapiens; identical to SEQ ID NO: 20168
  chr6:13397452-13397536
  hypo

SEQ ID NO: 71186 - DNA, 390 bp, Homo sapiens; identical to SEQ ID NO: 20169
  chr6:13456726-13457116
  hypo

SEQ ID NO: 71187 - DNA, 30 bp, Homo sapiens; identical to SEQ ID NO: 42623
  chr6:13488468-13488498
  hypo

SEQ ID NO: 71188 - DNA, 125 bp, Homo sapiens
  chr6:13510283-13510408
  hypo
tggattattagtcacacgggcgtatttactttgtaatagtttgccaaggtgtgatgattggtgcacttttctgttacatacatacgtattttagacaatctccctctgtcctccagggtggagta

SEQ ID NO: 71189 - DNA, 27 bp, Homo sapiens
  chr6:13510527-13510554
  hypo
gaagtcggtgtgtctggagtttttttc

SEQ ID NO: 71190 - DNA, 147 bp, Homo sapiens; identical to SEQ ID NO: 4623
  chr6:13574017-13574164
  hypo

SEQ ID NO: 71191 - DNA, 38 bp, Homo sapiens; identical to SEQ ID NO: 20171
  chr6:13631318-13631356
  hypo

SEQ ID NO: 71192 - DNA, 30 bp, Homo sapiens; identical to SEQ ID NO: 20172
  chr6:13639923-13639953
  hypo

SEQ ID NO: 71193 - DNA, 30 bp, Homo sapiens; identical to SEQ ID NO: 42627
  chr6:13722507-13722537
  hypo

SEQ ID NO: 71194 - DNA, 30 bp, Homo sapiens
  chr6:13780626-13780656
  hypo
acagtctgggcatgccgggcgtggtggctc

SEQ ID NO: 71195 - DNA, 30 bp, Homo sapiens
  chr6:13795737-13795767
  hypo
actttaccgaaagaacgagagccagaaaac

SEQ ID NO: 71196 - DNA, 19 bp, Homo sapiens
  chr6:13797646-13797665
  hypo
aaaacacacttaggccggg

SEQ ID NO: 71197 - DNA, 30 bp, Homo sapiens
  chr6:13988024-13988054
  hypo
gatgggtcccgacgccgtcctctcactcac

SEQ ID NO: 71198 - DNA, 211 bp, Homo sapiens
  chr6:14002318-14002529
  hypo
aaaaaaaatggtgaagtttaacgttagtcggttttactaataactgtattacaaaagcttggtactacatgaagtgtaataattggagctattcaagtaacggaaggtgttgccccgagaacagtgaggtcccatcactggacgtgttccacggagactgctgaaggtgagaggtgacagcgggctggcagccctggctcgctctcggcgc

SEQ ID NO: 71199 - DNA, 30 bp, Homo sapiens
  chr6:14003738-14003768
  hypo
aactcctgatatatccgaacctcaaaagga

SEQ ID NO: 71200 - DNA, 101 bp, Homo sapiens
  chr6:14099381-14099482
  hypo
tgctgggattacaggcgtgggtcaccgtacccagccctagtataagtaaatttgaacacattttcgtatgtttaaggaccggtgttatttctcttttaatg

SEQ ID NO: 71201 - DNA, 293 bp, Homo sapiens; identical to SEQ ID NO: 42630
  chr6:14117385-14117678
  hypo

SEQ ID NO: 71202 - DNA, 95 bp, Homo sapiens
  chr6:14139161-14139256
  hypo
gaagagataataacagcgacttctggacgtagagacagcagagcgaggccatgtgttcaacctaacagcacagtgagagtcgagagtcttggaat

SEQ ID NO: 71203 - DNA, 157 bp, Homo sapiens
  chr6:14203366-14203523
  hypo
tgtccacatggcaaatcattacgcaccaactcgtcactctccgacgctgcagtaaactgcctgcacttgccacctcttcgtctgcggcccggctcataagccttcttcttgatcacttggtttcttgcctactgtcgggtggaaggaggccacagac

SEQ ID NO: 71204 - DNA, 129 bp, Homo sapiens; identical to SEQ ID NO: 4628
  chr6:14211102-14211231
  hypo

SEQ ID NO: 71205 - DNA, 173 bp, Homo sapiens
  chr6:14273200-14273373
  hypo
ggcccactggaccctacgctccttgagaacaggggtctcccttgttctttgttacatcctcaatgccaggcatgataagggcttgatgaagctttgtccattggatctttctgggtttgccagccttcctcgtctacaccacagccacggtctcgtatcgacaggatctggat

SEQ ID NO: 71206 - DNA, 435 bp, Homo sapiens
  chr6:14282462-14282897
  hypo
gccggacgaaggttcggactggaaatgtgcttggctctccctgaggacaatttctctgaggaacggggtactatagcccccttttgtggctttccctccataacaaaccgtggtctagacaggatctggctagaaattcccttattaccaccccggccagactccatttatcatcaccttgaacgtaatgctcgcgcaaaacctccaggcctctcccgttcacataacgaatcgagggaggcagagctcttacggcgctccagccagtgtctgcctgcttctggaaatacctcatcttccagaaaagcattcatttgtcaacagagggataatgctaaaaccttaaagacaaatcggccagaaggcagggatgggagaagcaggcagggtacagcccgggagagacggcagctttgcctcggtgcagttatttga

SEQ ID NO: 71207 - DNA, 30 bp, Homo sapiens; identical to SEQ ID NO: 20178
  chr6:14324620-14324650
  hypo

SEQ ID NO: 71208 - DNA, 26 bp, Homo sapiens
  chr6:14559510-14559536
  hypo
atacgcattgttggctgggtgcggtg

SEQ ID NO: 71209 - DNA, 31 bp, Homo sapiens
  chr6:14744737-14744768
  hypo
tttaaaaaaaagaaggcggccaggggcagtg

SEQ ID NO: 71210 - DNA, 18 bp, Homo sapiens
  chr6:14755745-14755763
  hypo
cgggcgcagtggctcacg

SEQ ID NO: 71211 - DNA, 17 bp, Homo sapiens
  chr6:14756002-14756019
  hypo
gagcaagactctgtctc

SEQ ID NO: 71212 - DNA, 18 bp, Homo sapiens
  chr6:14771956-14771974
  hypo
gtgaaaacagggcaaaga

SEQ ID NO: 71213 - DNA, 31 bp, Homo sapiens; identical to SEQ ID NO: 20182
  chr6:14813397-14813428
  hypo

SEQ ID NO: 71214 - DNA, 30 bp, Homo sapiens
  chr6:14844859-14844889
  hypo
tctcccacacctcccggtgaatcctgcatg

SEQ ID NO: 71215 - DNA, 31 bp, Homo sapiens; identical to SEQ ID NO: 20183
  chr6:14847049-14847080
  hypo

SEQ ID NO: 71216 - DNA, 37 bp, Homo sapiens
  chr6:14916086-14916123
  hypo
ggcatctcctctgcctcggcgcccactctggcggcgt

SEQ ID NO: 71217 - DNA, 32 bp, Homo sapiens
  chr6:14930076-14930108
  hypo
cttttgttttttcttttgagacggagtctcgc

SEQ ID NO: 71218 - DNA, 31 bp, Homo sapiens; identical to SEQ ID NO: 20184
  chr6:14940112-14940143
  hypo

SEQ ID NO: 71219 - DNA, 82 bp, Homo sapiens
  chr6:14941361-14941443
  hypo
agtgctgggattacaggcatgagccaccgcgcccagccgaggagtgcattattccactgtcgcatgcatattcaaaggctca

SEQ ID NO: 71220 - DNA, 31 bp, Homo sapiens
  chr6:14963355-14963386
  hypo
gcacctggccaaccaccggatggggtcctat

SEQ ID NO: 71221 - DNA, 28 bp, Homo sapiens
  chr6:14966732-14966760
  hypo
taaaaatttgaaatttcgaggccaggtg

SEQ ID NO: 71222 - DNA, 88 bp, Homo sapiens; identical to SEQ ID NO: 20186
  chr6:14966819-14966907
  hypo

SEQ ID NO: 71223 - DNA, 103 bp, Homo sapiens
  chr6:14986857-14986960
  hypo
ccttgagagggccacatgtacggtgtgtttattgaagttgtgcgcatgttgacttgaggtgtcttttgctcaccagtcgagcgttcctggagggaggtcatat

SEQ ID NO: 71224 - DNA, 28 bp, Homo sapiens
  chr6:14993681-14993709
  hypo
ttttttttttttgagacggagtttcact

SEQ ID NO: 71225 - DNA, 40 bp, Homo sapiens
  chr6:15083848-15083888
  hypo
gattatagatgtgagccaccatgcccggccaactcttagg

SEQ ID NO: 71226 - DNA, 210 bp, Homo sapiens; identical to SEQ ID NO: 20188
  chr6:15227669-15227879
  hypo

SEQ ID NO: 71227 - DNA, 44 bp, Homo sapiens; identical to SEQ ID NO: 20189
  chr6:15282317-15282361
  hypo

SEQ ID NO: 71228 - DNA, 44 bp, Homo sapiens; identical to SEQ ID NO: 20190
  chr6:15282480-15282524
  hypo

SEQ ID NO: 71229 - DNA, 121 bp, Homo sapiens; identical to SEQ ID NO: 20191
  chr6:15283482-15283603
  hypo

SEQ ID NO: 71230 - DNA, 24 bp, Homo sapiens
  chr6:15283842-15283866
  hypo
gattacaggcgtgagccaccgtgc

SEQ ID NO: 71231 - DNA, 19 bp, Homo sapiens
  chr6:15382230-15382249
  hypo
ggggctgggtactgtggct

SEQ ID NO: 71232 - DNA, 30 bp, Homo sapiens; identical to SEQ ID NO: 20192
  chr6:15494999-15495029
  hypo

SEQ ID NO: 71233 - DNA, 30 bp, Homo sapiens
  chr6:15501254-15501284
  hypo
gaactgcccaggaccggctggccaagctgc

SEQ ID NO: 71234 - DNA, 129 bp, Homo sapiens
  chr6:15503288-15503417
  hypo
tgtttaaatccaccccgtcaagggtatttctagatttcatcacggaaatatagtggagctctgcgtggtggccatggcgaagcccccagcagccgtgtgcccacgggtagggaccgtgagcacgcaact

SEQ ID NO: 71235 - DNA, 30 bp, Homo sapiens
  chr6:15503637-15503667
  hypo
tctccatgccgactacgactgtggacccaa

SEQ ID NO: 71236 - DNA, 51 bp, Homo sapiens
  chr6:15512642-15512693
  hypo
ccgcttgctgcccccgcatccctgtgagtgccgtgcgtgagcgcacacaga

SEQ ID NO: 71237 - DNA, 673 bp, Homo sapiens; identical to SEQ ID NO: 20194
  chr6:15513370-15514043
  hypo

SEQ ID NO: 71238 - DNA, 42 bp, Homo sapiens; identical to SEQ ID NO: 20195
  chr6:15518529-15518571
  hypo

SEQ ID NO: 71239 - DNA, 54 bp, Homo sapiens; identical to SEQ ID NO: 20196
  chr6:15523494-15523548
  hypo

SEQ ID NO: 71240 - DNA, 30 bp, Homo sapiens
  chr6:15524599-15524629
  hypo
cagccgtgtggaaccgtggggttagggagc

SEQ ID NO: 71241 - DNA, 30 bp, Homo sapiens; identical to SEQ ID NO: 4629
  chr6:15810289-15810319
  hypo

SEQ ID NO: 71242 - DNA, 26 bp, Homo sapiens
  chr6:15891667-15891693
  hypo
tttcttaaaataaaaccggccgggct

SEQ ID NO: 71243 - DNA, 30 bp, Homo sapiens
  chr6:15895042-15895072
  hypo
cgaaactccgtctcaaaaaaaaaaaaaaaa

SEQ ID NO: 71244 - DNA, 32 bp, Homo sapiens; identical to SEQ ID NO: 20199
  chr6:15907073-15907105
  hypo

SEQ ID NO: 71245 - DNA, 178 bp, Homo sapiens
  chr6:16197121-16197299
  hypo
gagttctgatgtgtccggaattgatgggttgtctcactgacttcaaggaaaaagccgcagatctccgtggtgggtgctaaaattcttaaaggtggtgtgtctggagtatgttccttttcatgttcagacgtgtgcagtttacgggggtggggaggttctaggtctcgctggctcagga

SEQ ID NO: 71246 - DNA, 2 bp, Homo sapiens
  chr6:16197358-16197360
  hypo
gt

SEQ ID NO: 71247 - DNA, 147 bp, Homo sapiens
  chr6:16197606-16197753
  hypo
aagcccctcactgcccggggtggcagagcaggctggctgctcccagtgcggggcggtggggggggcgcagtggggcggggggggggcacgcccacccggaactctagctgattggtccactttacagacagtcgattggtctgtttt

SEQ ID NO: 71248 - DNA, 76 bp, Homo sapiens
  chr6:16218401-16218477
  hypo
caccggggttgctggtggagctgcctgccagtcccgcaccgtgtgcctgcacaccggggctgtaaatggagctgcc

SEQ ID NO: 71249 - DNA, 17 bp, Homo sapiens
  chr6:16220365-16220382
  hypo
attaggaactagagtgg

SEQ ID NO: 71250 - DNA, 30 bp, Homo sapiens
  chr6:16295439-16295469
  hypo
ggctcgagtggaagcgtccaaacctgcttt

SEQ ID NO: 71251 - DNA, 147 bp, Homo sapiens
  chr6:16298906-16299053
  hypo
cccggtctgctcgctgaatttctaatgagcttgaattacaggaagtaaaaataaattttccacttacagaccactaaccagtttagagcaaatctgtaaggagtgtatagattatgccacacgagcgcatgaagctaccacatgttt

SEQ ID NO: 71252 - DNA, 140 bp, Homo sapiens; identical to SEQ ID NO: 20200
  chr6:16322046-16322186
  hypo

SEQ ID NO: 71253 - DNA, 30 bp, Homo sapiens
  chr6:16327551-16327581
  hypo
cttctccatctcaccgttcaggacctcctt

SEQ ID NO: 71254 - DNA, 46 bp, Homo sapiens
  chr6:16733497-16733543
  hypo
gaaccacaagtcagccaggcacggcagctcatgtctgtaatcccaa

SEQ ID NO: 71255 - DNA, 43 bp, Homo sapiens
  chr6:16841588-16841631
  hypo
tttgcacctttaggcaaaacacgtctcttcattcctttaactc

SEQ ID NO: 71256 - DNA, 1230 bp, Homo sapiens; identical to SEQ ID NO: 42644
  chr6:17281118-17282348
  hypo

SEQ ID NO: 71257 - DNA, 20 bp, Homo sapiens
  chr6:17333378-17333398
  hypo
tgactcttcttttttttgag

SEQ ID NO: 71258 - DNA, 27 bp, Homo sapiens
  chr6:17386650-17386677
  hypo
caccgcgcccagccagccttattgtta

SEQ ID NO: 71259 - DNA, 205 bp, Homo sapiens
  chr6:17508424-17508629
  hypo
atacaactggggtgtacgcagagacacctggaagactagcagccattcagagtgctgctgaaagtatagatgagtctaaaccaaggggctttgcctggtgaaccagcgtgaaaggaccttgcgttcgacagcacaagtaatagatcccagagtaacttaaactggagtcagaatagaaaataggcccaaacggagacatggcaga

SEQ ID NO: 71260 - DNA, 25 bp, Homo sapiens
  chr6:17751570-17751595
  hypo
ccacggtgcccggccttgttgttgt

SEQ ID NO: 71261 - DNA, 121 bp, Homo sapiens
  chr6:17756938-17757059
  hypo
tcaaaaaaaaaaaaaagaatcttcatggtcacctagcgatgatttcctttgtatcctattagatgttacaaatcttctttaaatggatcgtagccttgttccttaaagaacgtagtgtcgg

SEQ ID NO: 71262 - DNA, 43 bp, Homo sapiens; identical to SEQ ID NO: 20203
  chr6:17761881-17761924
  hypo

SEQ ID NO: 71263 - DNA, 31 bp, Homo sapiens; identical to SEQ ID NO: 20204
  chr6:17779890-17779921
  hypo

SEQ ID NO: 71264 - DNA, 77 bp, Homo sapiens; identical to SEQ ID NO: 20205
  chr6:17788885-17788962
  hypo

SEQ ID NO: 71265 - DNA, 31 bp, Homo sapiens
  chr6:17795509-17795540
  hypo
acactgccatgaacatcgtataggctgggtg

SEQ ID NO: 71266 - DNA, 96 bp, Homo sapiens; identical to SEQ ID NO: 20206
  chr6:17797154-17797250
  hypo

SEQ ID NO: 71267 - DNA, 68 bp, Homo sapiens
  chr6:17800167-17800235
  hypo
tcactgtcctctcacccgacatgtcagctttttgactcggtgaatgatttccccgctgctgtctacga

SEQ ID NO: 71268 - DNA, 30 bp, Homo sapiens
  chr6:17899775-17899805
  hypo
ataattctacgctttcgagtgcagggaaga

SEQ ID NO: 71269 - DNA, 37 bp, Homo sapiens
  chr6:17934557-17934594
  hypo
gttgcttaagtgcagacgagagcggctgaacaccatc

SEQ ID NO: 71270 - DNA, 330 bp, Homo sapiens
  chr6:17940368-17940698
  hypo
cttccttccttccttccttctttcctttcctcctcctcctcctcctttttcctcctcttcctcttcttcttttggaacactgttttgaaggtacatcagcacaatgcttcttaaacttcaatatgtatacggatgcttcaggaacactattaagcgcagattcttcgattctgtaaatccgtggtgggtcctgagcttctgcatttctaatgagctcccagggtgtgctaatgctgctgatccacaagggattcgagcatgcaaattaagttatggagaaagcattactgtttaattttacatatggtaggaaaacgctgttagtgaacc

SEQ ID NO: 71271 - DNA, 31 bp, Homo sapiens; identical to SEQ ID NO: 4637
  chr6:17987686-17987717
  hypo

SEQ ID NO: 71272 - DNA, 39 bp, Homo sapiens
  chr6:18024630-18024669
  hypo
tttatgcagggtctcacgatgctgcgtgtagatattcac

SEQ ID NO: 71273 - DNA, 121 bp, Homo sapiens
  chr6:18030873-18030994
  hypo
tacaggcgtgagctaccgggcccggccagggtaggaaaacatttctaagacaagtcacaaaaggcataggagaaaaaattgaaaattaaacttcactaaaattaaaaacctctgcccatca

SEQ ID NO: 71274 - DNA, 99 bp, Homo sapiens
  chr6:18035942-18036041
  hypo
gtcgagtacataccaggtactcgataaatctcaagtaatatgtgaatgaacaaataaacgtttacttatttcatgagcggactttgtgtacaaagcact

SEQ ID NO: 71275 - DNA, 31 bp, Homo sapiens; identical to SEQ ID NO: 20210
  chr6:18044394-18044425
  hypo

SEQ ID NO: 71276 - DNA, 105 bp, Homo sapiens
  chr6:18129285-18129390
  hypo
aaagtgagaccctgtctctacataaaagtaaaatcaaaagtctctggagagaattgtgttggtccagctcgggttagttgtccattcaaccggtgatacaggcag

SEQ ID NO: 71277 - DNA, 88 bp, Homo sapiens
  chr6:18220399-18220487
  hypo
ctttcacctgtgttcctacttcgtttaatatggtttagaagtacacgtctcattgtttcatctaaaatatagttaccgtttttgttta

SEQ ID NO: 71278 - DNA, 78 bp, Homo sapiens
  chr6:18220964-18221042
  hypo
ctttcctttgctgctttgatgcgattattacctcaccttttcctttttttttttttgagatggagtctcgctgtgtcg

SEQ ID NO: 71279 - DNA, 21 bp, Homo sapiens
  chr6:18228603-18228624
  hypo
ctctaattgtttgccccggga

SEQ ID NO: 71280 - DNA, 31 bp, Homo sapiens
  chr6:18239433-18239464
  hypo
cgtgagccactgtgcccggccaagtcaacct

SEQ ID NO: 71281 - DNA, 77 bp, Homo sapiens
  chr6:18247861-18247938
  hypo
acaacaatttagaaagcgaattttaaaagtgagtataaaatgctctcgttttttttttttgagacggagtttcgctc

SEQ ID NO: 71282 - DNA, 99 bp, Homo sapiens; identical to SEQ ID NO: 20211
  chr6:18250344-18250443
  hypo

SEQ ID NO: 71283 - DNA, 42 bp, Homo sapiens; identical to SEQ ID NO: 20212
  chr6:18259257-18259299
  hypo

SEQ ID NO: 71284 - DNA, 1475 bp, Homo sapiens; identical to SEQ ID NO: 4639
  chr6:18263765-18265240
  hypo

SEQ ID NO: 71285 - DNA, 34 bp, Homo sapiens; identical to SEQ ID NO: 20214
  chr6:18275932-18275966
  hypo

SEQ ID NO: 71286 - DNA, 583 bp, Homo sapiens; identical to SEQ ID NO: 4640
  chr6:18277377-18277960
  hypo

SEQ ID NO: 71287 - DNA, 103 bp, Homo sapiens; identical to SEQ ID NO: 42654
  chr6:18277979-18278082
  hypo

SEQ ID NO: 71288 - DNA, 22 bp, Homo sapiens
  chr6:18282593-18282615
  hypo
aagatatctggccaggcgtggt

SEQ ID NO: 71289 - DNA, 30 bp, Homo sapiens
  chr6:18368151-18368181
  hypo
tccttggaggccagcgggtagtctcggttc

SEQ ID NO: 71290 - DNA, 252 bp, Homo sapiens
  chr6:18368661-18368913
  hypo
gggggaggagatcagcgtcagcggcgtcttcagcgtgatcttccgggtcaggactgaggtcaggtccacctcatcagctatgaagtctatgaatcctgggagaatcgggacgtcgttgtaggtgaggccgtcagcgctggtgaagagctgctgtgggatgagcccgtcctcaggcacgtagccggtgcagcagttgctcagatagtccgccatgctgcgggagaccccgcgaccccacgtaaacacccgcgc

SEQ ID NO: 71291 - DNA, 44 bp, Homo sapiens
  chr6:18458439-18458483
  hypo
attacagacataagccaccacacttgggcgatacagagggtttt

SEQ ID NO: 71292 - DNA, 26 bp, Homo sapiens
  chr6:19557118-19557144
  hypo
gggcgcggtggctcacgcctgtaatc

SEQ ID NO: 71293 - DNA, 26 bp, Homo sapiens
  chr6:19557383-19557409
  hypo
gctccgtctcagaaaaaaaaaaaaaa

SEQ ID NO: 71294 - DNA, 181 bp, Homo sapiens
  chr6:19676996-19677177
  hypo
agcctggcagacgggacgagactctgcctaaaaaaaaaaagaaaaaaaaaaaagagttgcacagcctcccatctctaagcaactttaagttcattttctgattctttgtctactctgcgtgtgcatgtgtgatgagaccgttttccctgttttccttggtatgttcccagctatgccccgg

SEQ ID NO: 71295 - DNA, 43 bp, Homo sapiens; identical to SEQ ID NO: 20220
  chr6:19677236-19677279
  hypo

SEQ ID NO: 71296 - DNA, 22 bp, Homo sapiens
  chr6:19779513-19779535
  hypo
gccactgcgctcagcctgtatt

SEQ ID NO: 71297 - DNA, 36 bp, Homo sapiens
  chr6:19967404-19967440
  hypo
tgagccaccgagcccggcctcaatccacatttctaa

SEQ ID NO: 71298 - DNA, 31 bp, Homo sapiens
  chr6:20057722-20057753
  hypo
tcctcatccatgttttcgcaggtgggaaatt

SEQ ID NO: 71299 - DNA, 31 bp, Homo sapiens
  chr6:20105679-20105710
  hypo
tctacgaaagtttctacgcaaattctaacgt

SEQ ID NO: 71300 - DNA, 67 bp, Homo sapiens
  chr6:20124516-20124583
  hypo
caactgcctcccattacgtgttgagcttctttgatgaagtgatccaaaacgtcgttctggctaagcc

SEQ ID NO: 71301 - DNA, 803 bp, Homo sapiens; identical to SEQ ID NO: 42665
  chr6:20212303-20213106
  hypo

SEQ ID NO: 71302 - DNA, 42 bp, Homo sapiens
  chr6:20228877-20228919
  hypo
gggattacaggcatgacccaccgtgctcggccacattcacga

SEQ ID NO: 71303 - DNA, 33 bp, Homo sapiens
  chr6:20239104-20239137
  hypo
ctctccaactgagagtgacagcgtgctggcagt

SEQ ID NO: 71304 - DNA, 26 bp, Homo sapiens
  chr6:20256566-20256592
  hypo
gagaacaaggccaggcgcggtggctc

SEQ ID NO: 71305 - DNA, 31 bp, Homo sapiens
  chr6:20294237-20294268
  hypo
aggaatggcaaaggagcgcagagcagctggg

SEQ ID NO: 71306 - DNA, 30 bp, Homo sapiens
  chr6:20321330-20321360
  hypo
gcaggctgccggagccggcagtggcaagcc

SEQ ID NO: 71307 - DNA, 44 bp, Homo sapiens
  chr6:20395765-20395809
  hypo
tgatcaggatattgctgggcacggtggctcacgcctgtaatccc

SEQ ID NO: 71308 - DNA, 30 bp, Homo sapiens
  chr6:20561378-20561408
  hypo
gaacagactgtcagccgggcgcagtggctc

SEQ ID NO: 71309 - DNA, 92 bp, Homo sapiens
  chr6:20640181-20640273
  hypo
gagccaccgcgccgaccattttcattggttttaagaagttatttttcaagttgtaccttaagggtgctttcgaattctcttattaaagcata

SEQ ID NO: 71310 - DNA, 31 bp, Homo sapiens; identical to SEQ ID NO: 20224
  chr6:20687079-20687110
  hypo

SEQ ID NO: 71311 - DNA, 172 bp, Homo sapiens
  chr6:20691376-20691548
  hypo
gctgccatttgtaaacggccattcattgtcctgtctcttgcctttggctctttccagtttttcttcccaaatctttggactagttcctgcagaaaatatgaattcacagtggtgccctctgggcctgggcatctctgggccggcagaccctgagcagcgactgctgctgaga

SEQ ID NO: 71312 - DNA, 21 bp, Homo sapiens
  chr6:20878666-20878687
  hypo
aatctttaaagccaaccttag

SEQ ID NO: 71313 - DNA, 30 bp, Homo sapiens
  chr6:20893392-20893422
  hypo
gcatcacaaaagaagcgcattagaacatct

SEQ ID NO: 71314 - DNA, 30 bp, Homo sapiens
  chr6:20907802-20907832
  hypo
tggactaggaggtacgtgtagcagttaagg

SEQ ID NO: 71315 - DNA, 182 bp, Homo sapiens
  chr6:21277793-21277975
  hypo
aaaacatctcttacattgtcacgcgcagaaacatcccaatactcacagtccttttaacctacaaaaggaggaattctgtggcatcagccactgcagaacagaaaggtggagtttgtggagagggcgcgataaggtctacttccaacttgaaacacgacaacggtgaaatgagtcatgctaaa

SEQ ID NO: 71316 - DNA, 143 bp, Homo sapiens
  chr6:21342798-21342941
  hypo
aggagccagattatggtgtatcgctaaggtctgtgtttcagtcgctccagtcatgaactgctaacagcatctggcgtccataacccttagtagaggaatgtttgccggcctatttgtggagcgtatctctgagtgcacactta

SEQ ID NO: 71317 - DNA, 30 bp, Homo sapiens
  chr6:21369107-21369137
  hypo
atgcaacttcaaaacgggcttcttaatggg

SEQ ID NO: 71318 - DNA, 43 bp, Homo sapiens
  chr6:21406918-21406961
  hypo
aaagcatttcacacaattccacgccactcttactttctgtttt

SEQ ID NO: 71319 - DNA, 31 bp, Homo sapiens; identical to SEQ ID NO: 20227
  chr6:21459015-21459046
  hypo

SEQ ID NO: 71320 - DNA, 23 bp, Homo sapiens
  chr6:21470164-21470187
  hypo
ctgcgccccgcctaaaataataa

SEQ ID NO: 71321 - DNA, 34 bp, Homo sapiens
  chr6:21494918-21494952
  hypo
ccctaggggttttgagcagcggagcacctgagcc

SEQ ID NO: 71322 - DNA, 94 bp, Homo sapiens; identical to SEQ ID NO: 20229
  chr6:21570591-21570685
  hypo

SEQ ID NO: 71323 - DNA, 31 bp, Homo sapiens; identical to SEQ ID NO: 4652
  chr6:21588775-21588806
  hypo

SEQ ID NO: 71324 - DNA, 1132 bp, Homo sapiens; identical to SEQ ID NO: 4653
  chr6:21594474-21595606
  hypo

SEQ ID NO: 71325 - DNA, 31 bp, Homo sapiens
  chr6:21596585-21596616
  hypo
acccccagcaagaaggcgagttagttttcta

SEQ ID NO: 71326 - DNA, 188 bp, Homo sapiens
  chr6:21602323-21602511
  hypo
ccccactgggctgtcgccccagctggactaccaccatggaactcagggccgaatacctcagggagaagctgcagcgggacctggcggcggagcatgtggcggtggaggacaacacgaccctcaaccattgcgcctgtagcttctggcggtgtcggccaagttcgaggggaagccgctgcttcagagac

SEQ ID NO: 71327 - DNA, 121 bp, Homo sapiens
  chr6:21622713-21622834
  hypo
atatgtagttaaatactgaaatttacaaacatagggtaaaattaagcagtgccatgaaacactattacaacaggaaaaattaattctattgcccccgttccttaaaaaattagataagtaa

SEQ ID NO: 71328 - DNA, 41 bp, Homo sapiens
  chr6:21633883-21633924
  hypo
atgtgtttagccgggcgtggtggcatacgcctgtagtccca

SEQ ID NO: 71329 - DNA, 31 bp, Homo sapiens; identical to SEQ ID NO: 20233
  chr6:21636069-21636100
  hypo

SEQ ID NO: 71330 - DNA, 30 bp, Homo sapiens; identical to SEQ ID NO: 42673
  chr6:21649069-21649099
  hypo

SEQ ID NO: 71331 - DNA, 23 bp, Homo sapiens
  chr6:21649881-21649904
  hypo
caccgcgccggcctacactcttt

SEQ ID NO: 71332 - DNA, 31 bp, Homo sapiens; identical to SEQ ID NO: 20234
  chr6:21730829-21730860
  hypo

SEQ ID NO: 71333 - DNA, 31 bp, Homo sapiens; identical to SEQ ID NO: 4656
  chr6:21783024-21783055
  hypo

SEQ ID NO: 71334 - DNA, 55 bp, Homo sapiens
  chr6:21918788-21918843
  hypo
ggttgaagtgagggaggggttcgccctaggtaccgatgcttggattatgaagaac

SEQ ID NO: 71335 - DNA, 31 bp, Homo sapiens
  chr6:21919459-21919490
  hypo
ttatgatggcatcacacgcaggattcagaga

SEQ ID NO: 71336 - DNA, 31 bp, Homo sapiens
  chr6:21959458-21959489
  hypo
tagaaagcactgataccgaggtactccttct

SEQ ID NO: 71337 - DNA, 35 bp, Homo sapiens; identical to SEQ ID NO: 20236
  chr6:22037568-22037603
  hypo

SEQ ID NO: 71338 - DNA, 183 bp, Homo sapiens; identical to SEQ ID NO: 4657
  chr6:22146871-22147054
  hypo

SEQ ID NO: 71339 - DNA, 37 bp, Homo sapiens; identical to SEQ ID NO: 20238
  chr6:22331078-22331115
  hypo

SEQ ID NO: 71340 - DNA, 255 bp, Homo sapiens; identical to SEQ ID NO: 20239
  chr6:22349412-22349667
  hypo

SEQ ID NO: 71341 - DNA, 368 bp, Homo sapiens
  chr6:22569528-22569896
  hypo
gcacaaccgccacccggccatcccagctatttcctccagcattctagacatcatggcgtccgagggtgggtccaacgggcttcgagtgttcgggagataatgcacacttcgcagtggatcttctcggggccccgagcgttgcccgcccattaggtggcgccggtcccctcgaacaggtcgctcaacaactcccgcccagcagccgcccttactgcgcgcgcgcagacttcggcgtctacttccggtgtggcccaggcggggtccgcagaaccagctatgtcggcctacggcatgcccatgtacaagagcggggacctggtgtttgccaagttaaagggctatgcccactggccggcgaggatagagca

SEQ ID NO: 71342 - DNA, 30 bp, Homo sapiens; identical to SEQ ID NO: 20240
  chr6:22570131-22570161
  hypo

SEQ ID NO: 71343 - DNA, 30 bp, Homo sapiens; identical to SEQ ID NO: 20241
  chr6:24384144-24384174
  hypo

SEQ ID NO: 71344 - DNA, 162 bp, Homo sapiens; identical to SEQ ID NO: 20242
  chr6:24425298-24425460
  hypo

SEQ ID NO: 71345 - DNA, 231 bp, Homo sapiens
  chr6:24432977-24433208
  hypo
agcaaccagtcagttctgccacggcagcacgacagcagccacgcgcagtccacagcagacgagcccggctatgttccactacagctgtgtgggcgctgaaactgcactgccgtttaaacttcatatgttacaaaacattctgttttgatttcttttcaaccatctcaacatgagctgacttttttagttcatggctttacaaaattaggtggcagacgacttggccccaac

SEQ ID NO: 71346 - DNA, 31 bp, Homo sapiens; identical to SEQ ID NO: 20244
  chr6:24434291-24434322
  hypo

SEQ ID NO: 71347 - DNA, 35 bp, Homo sapiens
  chr6:24476566-24476601
  hypo
tcttccacaccacccgctgcgctgctgtgtccctt

SEQ ID NO: 71348 - DNA, 126 bp, Homo sapiens; identical to SEQ ID NO: 20245
  chr6:24523038-24523164
  hypo

SEQ ID NO: 71349 - DNA, 30 bp, Homo sapiens
  chr6:24535207-24535237
  hypo
caaaaaacaaaagccgctatgaccggcgtt

SEQ ID NO: 71350 - DNA, 162 bp, Homo sapiens; identical to SEQ ID NO: 20246
  chr6:24647203-24647365
  hypo

SEQ ID NO: 71351 - DNA, 121 bp, Homo sapiens; identical to SEQ ID NO: 20247
  chr6:24662783-24662904
  hypo

SEQ ID NO: 71352 - DNA, 81 bp, Homo sapiens
  chr6:24761525-24761606
  hypo
cctgcagggatggggcggggccaaggggggtatcccatgcccccaaggggagcgtggttcgggggagggaacatcccaggc

SEQ ID NO: 71353 - DNA, 20 bp, Homo sapiens
  chr6:24761665-24761685
  hypo
tgcaccggcaaagctcctgc

SEQ ID NO: 71354 - DNA, 29 bp, Homo sapiens
  chr6:24781125-24781154
  hypo
aattgttcaatttaagaagttcgtcgggt

SEQ ID NO: 71355 - DNA, 31 bp, Homo sapiens
  chr6:24895642-24895673
  hypo
gtggggcctgggcatacgtactttaaaaaaa

SEQ ID NO: 71356 - DNA, 42 bp, Homo sapiens
  chr6:25023689-25023731
  hypo
tgcccctaggacttggcgatgcagtggcggacaaattcacac

SEQ ID NO: 71357 - DNA, 174 bp, Homo sapiens; identical to SEQ ID NO: 20249
  chr6:25153407-25153581
  hypo

SEQ ID NO: 71358 - DNA, 21 bp, Homo sapiens
  chr6:25506764-25506785
  hypo
gtctcaaacaaacaaacaaac

SEQ ID NO: 71359 - DNA, 816 bp, Homo sapiens
  chr6:25726842-25727658
  hypo
gctatctgattggctgatggccgtctacccaatcagaaagtcgtactagaatcgcctcatttgcattcacgccacttcccattgtccaatcagattttggataccgaacgcggcgtttgagggccgtgcctataaataccgcatctttcatcctccagttctgtttgtttacttggcgagacttggagctgaggtcatttggagctgtttaatactgaagagctgttgagcactggaaagtgctgtgtaaccctggaaaagaaccgtgtaacgctgcagaagtgtgtggtagctatgccggaggtgtcatctaaaggtgctaccatttccaagaagggctttaagaaagctgtcgttaagacccagaaaaaggaaggcaaaaagcgcaagaggacccgtaaggagagttattctatttacatctacaaagtgctaaagcaggtccatccggacactggcatctcttcgaaagctatgagcattatgaattccttcgtcactgatatctttgagcgtatagcgagcgaggcatcacgtttggctcactacagcaagcgctccaccatttcttccagagagattcagacagcagtgcgcttgctactgccgggagagctggctaaacatgctgtgtctgagggcaccaaggctgtcactaagtacaccagctccaagtaagcctgctaagtaaacgtcatttctaacccaaaggctcttttcagagccacttaaacatactgaaacagctgtgggcttcgtttttgtgtagtttctaaccgtaagggttttttttttttttgaggcggagtctcactc

SEQ ID NO: 71360 - DNA, 181 bp, Homo sapiens; identical to SEQ ID NO: 20252
  chr6:25727897-25728078
  hypo

SEQ ID NO: 71361 - DNA, 222 bp, Homo sapiens
  chr6:26025540-26025762
  hypo
cgggattacaggcgtgagccaccttgccgggcctatatttcttaagctctatgtttcgttctgaagcttgaagtgggtggaagcaaactgatagaatttggagaggtggttaggcatcccgggaatgagaaacagcccgaagctgccactatcacaggctttggcattgctagaagttaacgtggcacttacagctaggccgtggtgttctgttgaacaaac

SEQ ID NO: 71362 - DNA, 506 bp, Homo sapiens; identical to SEQ ID NO: 4661
  chr6:26027157-26027663
  hypo

SEQ ID NO: 71363 - DNA, 31 bp, Homo sapiens
  chr6:26039044-26039075
  hypo
taaaaaaacagtttggctgggcgcgaggtct

SEQ ID NO: 71364 - DNA, 99 bp, Homo sapiens
  chr6:26047694-26047793
  hypo
caccgcgcccggcctccttgaagccattcttacgtcagattggctggcaacgaatgaagtacacatgatcacatatgcaaatcacgtaacttattatcc

SEQ ID NO: 71365 - DNA, 37 bp, Homo sapiens
  chr6:26095302-26095339
  hypo
ataaaagcacttacttcgtgtccgactcttctgagca

SEQ ID NO: 71366 - DNA, 22 bp, Homo sapiens
  chr6:26160802-26160824
  hypo
atacagacttgaggccaggcac

SEQ ID NO: 71367 - DNA, 753 bp, Homo sapiens; identical to SEQ ID NO: 4672
  chr6:26188698-26189451
  hypo

SEQ ID NO: 71368 - DNA, 1046 bp, Homo sapiens; identical to SEQ ID NO: 42713
  chr6:26198851-26199897
  hypo

SEQ ID NO: 71369 - DNA, 27 bp, Homo sapiens
  chr6:26201158-26201185
  hypo
tttttttttgaggaggagtttcgctat

SEQ ID NO: 71370 - DNA, 37 bp, Homo sapiens
  chr6:26214611-26214648
  hypo
agccggcgtgagccaccgcgcccggccaagagaaaaa

SEQ ID NO: 71371 - DNA, 30 bp, Homo sapiens; identical to SEQ ID NO: 20257
  chr6:26225974-26226004
  hypo

SEQ ID NO: 71372 - DNA, 35 bp, Homo sapiens
  chr6:26226774-26226809
  hypo
tcgcccggccttccggctgatatcttaaaagaact

SEQ ID NO: 71373 - DNA, 30 bp, Homo sapiens; identical to SEQ ID NO: 20258
  chr6:26246955-26246985
  hypo

SEQ ID NO: 71374 - DNA, 30 bp, Homo sapiens
  chr6:26247238-26247268
  hypo
gattactcgctttccgcagccttttatata

SEQ ID NO: 71375 - DNA, 111 bp, Homo sapiens
  chr6:26423338-26423449
  hypo
gcagaaggaggagtaccgagggagaaccacctttgtgagcaaagacagcaggggcagcgtggccctgatcatacacaatgtcacagccgaggataacggcatctaccagtg

SEQ ID NO: 71376 - DNA, 30 bp, Homo sapiens
  chr6:26500068-26500098
  hypo
ttcatttttcaacccgcagaaataataata

SEQ ID NO: 71377 - DNA, 22 bp, Homo sapiens
  chr6:26534412-26534434
  hypo
aagatgcaagtcggccgggcgc

SEQ ID NO: 71378 - DNA, 24 bp, Homo sapiens
  chr6:26549651-26549675
  hypo
tgcttgtttgtttttttgagacgg

SEQ ID NO: 71379 - DNA, 66 bp, Homo sapiens; identical to SEQ ID NO: 20260
  chr6:26970367-26970433
  hypo

SEQ ID NO: 71380 - DNA, 30 bp, Homo sapiens
  chr6:27162135-27162165
  hypo
gaccactacccccaacgagcagagtgtgga

SEQ ID NO: 71381 - DNA, 1177 bp, Homo sapiens; identical to SEQ ID NO: 4725
  chr6:27218650-27219827
  hypo

SEQ ID NO: 71382 - DNA, 938 bp, Homo sapiens; identical to SEQ ID NO: 42778
  chr6:27279848-27280786
  hypo

SEQ ID NO: 71383 - DNA, 31 bp, Homo sapiens; identical to SEQ ID NO: 20263
  chr6:27408482-27408513
  hypo

SEQ ID NO: 71384 - DNA, 134 bp, Homo sapiens
  chr6:27428732-27428866
  hypo
catggtcactaattatcgacataattctgtgtgcctagtcactgattaatgacgttattctgtgtgcccagtgcactgggacaagatgtaccaaactgtcaacatcgtttaaagaaacacggaaatttatgagt

SEQ ID NO: 71385 - DNA, 46 bp, Homo sapiens; identical to SEQ ID NO: 4729
  chr6:27440465-27440511
  hypo

SEQ ID NO: 71386 - DNA, 160 bp, Homo sapiens
  chr6:27441961-27442121
  hypo
taaggaaacccggagataatattcccatgttttgccacttagtaaagcattttatatgcctgtgtcagcgagcacatagctgcaagtgtagcccatggccagtctgtcactgtgtccttggcagaaaaaaagaatccaacaaatcggtaggtttttatat

SEQ ID NO: 71387 - DNA, 75 bp, Homo sapiens; identical to SEQ ID NO: 4730
  chr6:27447498-27447573
  hypo

SEQ ID NO: 71388 - DNA, 43 bp, Homo sapiens
  chr6:27631246-27631289
  hypo
caaaaggggaaggtttgtgtccgggcgtggtggctcacgcctg

SEQ ID NO: 71389 - DNA, 121 bp, Homo sapiens
  chr6:27770798-27770919
  hypo
gccgggattataggcgcgagccaccatgcctgcctaattttaaaaaaacttttagtagagacggggttttaccatgttgtgttgagcagggcggtctcgaactcctagcctcaagtgatcc

SEQ ID NO: 71390 - DNA, 153 bp, Homo sapiens; identical to SEQ ID NO: 4750
  chr6:27805753-27805906
  hypo

SEQ ID NO: 71391 - DNA, 575 bp, Homo sapiens; identical to SEQ ID NO: 42819
  chr6:27805936-27806511
  hypo

SEQ ID NO: 71392 - DNA, 30 bp, Homo sapiens; identical to SEQ ID NO: 20271
  chr6:27830376-27830406
  hypo

SEQ ID NO: 71393 - DNA, 19 bp, Homo sapiens
  chr6:27843639-27843658
  hypo
aaagaaagtttgtggccgg

SEQ ID NO: 71394 - DNA, 31 bp, Homo sapiens; identical to SEQ ID NO: 20272
  chr6:27846867-27846898
  hypo

SEQ ID NO: 71395 - DNA, 44 bp, Homo sapiens
  chr6:28031401-28031445
  hypo
tccagactgggcgacagagcaacgtctcaaaaaaaaaaaaaaaa

SEQ ID NO: 71396 - DNA, 30 bp, Homo sapiens; identical to SEQ ID NO: 20273
  chr6:28226188-28226218
  hypo

SEQ ID NO: 71397 - DNA, 30 bp, Homo sapiens
  chr6:28280847-28280877
  hypo
agcgcttgcggcagcgtttgcttgcgtagg

SEQ ID NO: 71398 - DNA, 30 bp, Homo sapiens
  chr6:28327484-28327514
  hypo
gttctgagggctcccgcgagcgcttccgag

SEQ ID NO: 71399 - DNA, 156 bp, Homo sapiens; identical to SEQ ID NO: 20274
  chr6:28327738-28327894
  hypo

SEQ ID NO: 71400 - DNA, 227 bp, Homo sapiens; identical to SEQ ID NO: 42844
  chr6:28414764-28414991
  hypo

SEQ ID NO: 71401 - DNA, 15 bp, Homo sapiens
  chr6:28415091-28415106
  hypo
cgttcccctttatcg

SEQ ID NO: 71402 - DNA, 30 bp, Homo sapiens; identical to SEQ ID NO: 42847
  chr6:28458582-28458612
  hypo

SEQ ID NO: 71403 - DNA, 30 bp, Homo sapiens
  chr6:29924284-29924314
  hypo
ccccgggggttggtcgaggctgaggcgggg

SEQ ID NO: 71404 - DNA, 30 bp, Homo sapiens
  chr6:31132622-31132652
  hypo
tacagaaccacactcggaccacctgcaagt

SEQ ID NO: 71405 - DNA, 30 bp, Homo sapiens; identical to SEQ ID NO: 42848
  chr6:31390394-31390424
  hypo

SEQ ID NO: 71406 - DNA, 30 bp, Homo sapiens; identical to SEQ ID NO: 42849
  chr6:31540125-31540155
  hypo

SEQ ID NO: 71407 - DNA, 30 bp, Homo sapiens; identical to SEQ ID NO: 42850
  chr6:32600787-32600817
  hypo

SEQ ID NO: 71408 - DNA, 30 bp, Homo sapiens; identical to SEQ ID NO: 4772
  chr6:32612963-32612993
  hypo

SEQ ID NO: 71409 - DNA, 30 bp, Homo sapiens; identical to SEQ ID NO: 42852
  chr6:32636104-32636134
  hypo

SEQ ID NO: 71410 - DNA, 30 bp, Homo sapiens; identical to SEQ ID NO: 42853
  chr6:33072156-33072186
  hypo

SEQ ID NO: 71411 - DNA, 30 bp, Homo sapiens; identical to SEQ ID NO: 42854
  chr6:33204258-33204288
  hypo

SEQ ID NO: 71412 - DNA, 30 bp, Homo sapiens
  chr6:33493141-33493171
  hypo
agaagcggggggcgcgtccgggaggtgagg

SEQ ID NO: 71413 - DNA, 32 bp, Homo sapiens
  chr6:33549225-33549257
  hypo
ggccaaggcaagaggatcgcttgaggccaggt

SEQ ID NO: 71414 - DNA, 418 bp, Homo sapiens
  chr6:33578944-33579362
  hypo
tcatccattcccagctttggccgggcagccagggcaaggactggctgggagggccttagtcctgccaaggtggggtggggtgcggctagaggccaggcccagcccaggtggacttgacgtcatgcttttcacctctgtctctgtcagacaaagcctgctccttcgtgcctggccctgcccccggggaagttttccatgctgctctcctttctcaacaggatcacagggctgatgcttcccctcccaacccacctttcttgttggcaggtgaagtgccaaggcctgcgcacactcacagagacctgcgccgcttccctcctcgtgcagggtcccccttcggagtctggagaaaggaagaatggccagaggccactccctctccttgggagctcctgccgggatgccaacctgggcttca

SEQ ID NO: 71415 - DNA, 247 bp, Homo sapiens; identical to SEQ ID NO: 20276
  chr6:33609018-33609265
  hypo

SEQ ID NO: 71416 - DNA, 130 bp, Homo sapiens
  chr6:33638298-33638428
  hypo
cggtcaagtttgcccgtctctggactgagatccccacagccatcaccatcaaggagtgagaggggtggaggcagggtgggcggggcaggggcagaggctggagtgggtgtatctcggggaccttcatgcc

SEQ ID NO: 71417 - DNA, 38 bp, Homo sapiens
  chr6:33645951-33645989
  hypo
ccaggcctcaccttgacgctgaccgtgacacttcacct

SEQ ID NO: 71418 - DNA, 125 bp, Homo sapiens
  chr6:33653396-33653521
  hypo
gcctcaccaggtctcgcccacaggccgcgtggcctccttctcgatacctggctcctcatcccgctactcgctgggccccagcctgcgccgggggcacgaggtgagcgaacgtgtgcagagcagtg

SEQ ID NO: 71419 - DNA, 30 bp, Homo sapiens
  chr6:33656778-33656808
  hypo
caggcacgtgcacacgcatagatgtgtcag

SEQ ID NO: 71420 - DNA, 246 bp, Homo sapiens
  chr6:33674158-33674404
  hypo
gaggggccacaaagacgacgacccaggccagctgtggagaagctggcaggcacactacagagacaagatacacatgaattagaaaccaaccctgcccggggcaatgtgtaagtgagagccagatctgcggagcacgggccgctgcacgagacccgaggtgggagttgggcacctggctgtgctgatggggaggtgtggcaggaaagggctgagtttcactgcagcgacagtgcagagagtgaggag

SEQ ID NO: 71421 - DNA, 140 bp, Homo sapiens
  chr6:33687281-33687421
  hypo
ttgcagctcaaacaccacctccgcaatcaccccatgaggcggtgagccctcgctgccgctcctctctgggtagcactgcacagctgagcagatggtcctcatcccctcttgaagcacccgtgagattttcataaggaggt

SEQ ID NO: 71422 - DNA, 34 bp, Homo sapiens; identical to SEQ ID NO: 20280
  chr6:33694717-33694751
  hypo

SEQ ID NO: 71423 - DNA, 31 bp, Homo sapiens
  chr6:33698515-33698546
  hypo
cccaaggtcacatggtcggtgtggggtggag

SEQ ID NO: 71424 - DNA, 142 bp, Homo sapiens
  chr6:33701972-33702114
  hypo
tccgtctcaaaaaaaaaaaaaaaaaaaaaagagaattcctgaccctcaccccaagaccccaggggattctgattcacaggtctggcatggggcgtggggacctgtgcgcctttgtgcacatacacgccggattctagtaaag

SEQ ID NO: 71425 - DNA, 30 bp, Homo sapiens
  chr6:33747177-33747207
  hypo
caaaactctagagacgttttaatatcaaga

SEQ ID NO: 71426 - DNA, 144 bp, Homo sapiens; identical to SEQ ID NO: 20281
  chr6:33748501-33748645
  hypo

SEQ ID NO: 71427 - DNA, 30 bp, Homo sapiens
  chr6:33757638-33757668
  hypo
actccagagatacacggtcttgcagcctca

SEQ ID NO: 71428 - DNA, 30 bp, Homo sapiens
  chr6:33770197-33770227
  hypo
ccctggaaaggcctcggggcttctctgcag

SEQ ID NO: 71429 - DNA, 84 bp, Homo sapiens; identical to SEQ ID NO: 20282
  chr6:33771000-33771084
  hypo

SEQ ID NO: 71430 - DNA, 79 bp, Homo sapiens
  chr6:33871407-33871486
  hypo
tttttcaccggtcccgttccctctaccaccaaccttgtcatttgacttgagtatcctggtcttcgtcatttggcttgac

SEQ ID NO: 71431 - DNA, 30 bp, Homo sapiens; identical to SEQ ID NO: 20283
  chr6:33878451-33878481
  hypo

SEQ ID NO: 71432 - DNA, 30 bp, Homo sapiens
  chr6:33878808-33878838
  hypo
gccagagcctctcccgacccgttccttatc

SEQ ID NO: 71433 - DNA, 108 bp, Homo sapiens; identical to SEQ ID NO: 20284
  chr6:33907852-33907960
  hypo

SEQ ID NO: 71434 - DNA, 30 bp, Homo sapiens
  chr6:33955625-33955655
  hypo
cctccagaaatgaggcgggaaaatgactgc

SEQ ID NO: 71435 - DNA, 41 bp, Homo sapiens
  chr6:33962223-33962264
  hypo
ctcgtctttacatagacgaggaggctcgagggtagagacac

SEQ ID NO: 71436 - DNA, 36 bp, Homo sapiens; identical to SEQ ID NO: 20286
  chr6:33985260-33985296
  hypo

SEQ ID NO: 71437 - DNA, 306 bp, Homo sapiens; identical to SEQ ID NO: 20287
  chr6:33995831-33996137
  hypo

SEQ ID NO: 71438 - DNA, 30 bp, Homo sapiens
  chr6:34003625-34003655
  hypo
atgagcgacaggtccgagatgtcacacttg

SEQ ID NO: 71439 - DNA, 30 bp, Homo sapiens
  chr6:34008415-34008445
  hypo
gtcacggtgcatggcgtgcagcgcgtggcc

SEQ ID NO: 71440 - DNA, 105 bp, Homo sapiens; identical to SEQ ID NO: 20288
  chr6:34100883-34100988
  hypo

SEQ ID NO: 71441 - DNA, 1865 bp, Homo sapiens; identical to SEQ ID NO: 42860
  chr6:34111735-34113600
  hypo

SEQ ID NO: 71442 - DNA, 31 bp, Homo sapiens; identical to SEQ ID NO: 20290
  chr6:34165021-34165052
  hypo

SEQ ID NO: 71443 - DNA, 181 bp, Homo sapiens
  chr6:34170820-34171001
  hypo
tccgcagccacagtttgggtggctgtagccccgcccaagagggcggggcttctgtcggctccatggagccggaggcccgggtctgcctccgtttggtttgggtggccatggtttgggtggctgcagcggcaccccagggcgctcctgcccccaactcagaaggggcggggctcccactggc

SEQ ID NO: 71444 - DNA, 1 bp, Homo sapiens
  chr6:34171060-34171061
  hypo
c

SEQ ID NO: 71445 - DNA, 31 bp, Homo sapiens; identical to SEQ ID NO: 20292
  chr6:34191861-34191892
  hypo

SEQ ID NO: 71446 - DNA, 30 bp, Homo sapiens; identical to SEQ ID NO: 20293
  chr6:34194629-34194659
  hypo

SEQ ID NO: 71447 - DNA, 121 bp, Homo sapiens; identical to SEQ ID NO: 20294
  chr6:34219815-34219936
  hypo

SEQ ID NO: 71448 - DNA, 42 bp, Homo sapiens
  chr6:34231474-34231516
  hypo
cgcgccgcccgctccgagggaaagagcgtagattcaaatata

SEQ ID NO: 71449 - DNA, 250 bp, Homo sapiens; identical to SEQ ID NO: 42865
  chr6:34359486-34359736
  hypo

SEQ ID NO: 71450 - DNA, 30 bp, Homo sapiens
  chr6:34390006-34390036
  hypo
gggttaccaagaatcgttgagttcctcttg

SEQ ID NO: 71451 - DNA, 30 bp, Homo sapiens; identical to SEQ ID NO: 20297
  chr6:34392090-34392120
  hypo

SEQ ID NO: 71452 - DNA, 121 bp, Homo sapiens; identical to SEQ ID NO: 42867
  chr6:34405015-34405136
  hypo

SEQ ID NO: 71453 - DNA, 40 bp, Homo sapiens; identical to SEQ ID NO: 42868
  chr6:34405255-34405295
  hypo

SEQ ID NO: 71454 - DNA, 31 bp, Homo sapiens
  chr6:34484387-34484418
  hypo
gtgagagctgaaggaacgtctgtccactcag

SEQ ID NO: 71455 - DNA, 244 bp, Homo sapiens
  chr6:34512042-34512286
  hypo
caaagtaggagaggtagaaggcggacaggccctgctcgggcgtggcgggtggactgggactccagtcccgtctctcgagacccactgcccccgctgccgccttctccaagcctgtccgcgacaccgtgtcggggggcagcaggaggtggctgggggatacgctgctcagacccgggctggcgctgcccatgccgctgctgtttgggctggcggctgtgtctacggaaatgaaagaggactcagg

SEQ ID NO: 71456 - DNA, 43 bp, Homo sapiens
  chr6:34513307-34513350
  hypo
agaagggggactggagaggtgcgcaagcactgaaaccccagga

SEQ ID NO: 71457 - DNA, 194 bp, Homo sapiens; identical to SEQ ID NO: 20300
  chr6:34518767-34518961
  hypo

SEQ ID NO: 71458 - DNA, 333 bp, Homo sapiens
  chr6:34519837-34520170
  hypo
cccccaccacctgcacatccccgctttgccatgatgcagcccgggtcacatggctgcccctctctggcacagtctcgtcctcacccccaaatcgccggtacactccttgaagggccggccacagtaccttccctcttccctaccctcctccagccccgcatacgccgtacctcccagcttgccacaggacaggggtcgtgaggtttcctgggtctcttgctccccacagccctgcccagcagggtcgttgagggcatgagaacacacggatgtcaccggagctctgctgctcctgcctgaggccccttggccgatcctcttggcctcagcctc

SEQ ID NO: 71459 - DNA, 30 bp, Homo sapiens
  chr6:34520751-34520781
  hypo
gcaaccagtctcaggcgctggagccccggg

SEQ ID NO: 71460 - DNA, 28 bp, Homo sapiens
  chr6:34659544-34659572
  hypo
cctgggcgacagagcaaaactctgtctc

SEQ ID NO: 71461 - DNA, 101 bp, Homo sapiens; identical to SEQ ID NO: 20301
  chr6:34683316-34683417
  hypo

SEQ ID NO: 71462 - DNA, 27 bp, Homo sapiens
  chr6:34714766-34714793
  hypo
agtgctaagtgctttattattcgtttt

SEQ ID NO: 71463 - DNA, 37 bp, Homo sapiens
  chr6:34723873-34723910
  hypo
aataattattacctgccgggcgcggtgggtcacgcct

SEQ ID NO: 71464 - DNA, 38 bp, Homo sapiens
  chr6:34726097-34726135
  hypo
ttttttttttttgaaacggagtttcgctcttgttgccc

SEQ ID NO: 71465 - DNA, 17 bp, Homo sapiens
  chr6:34785644-34785661
  hypo
tgggggggtggagtctc

SEQ ID NO: 71466 - DNA, 37 bp, Homo sapiens
  chr6:34854518-34854555
  hypo
aggcgtgagccactacgcccagacaaattttctcttt

SEQ ID NO: 71467 - DNA, 36 bp, Homo sapiens
  chr6:34870301-34870337
  hypo
ggcgtgagctaccgcgcctggcccaagtttttcttt

SEQ ID NO: 71468 - DNA, 89 bp, Homo sapiens
  chr6:34953049-34953138
  hypo
aggcctgtatgtgacccggggcttacacctcctgggggctgtgttggctggctggcccctgaggtgatggggcacggggaagggaagtg

SEQ ID NO: 71469 - DNA, 30 bp, Homo sapiens
  chr6:35019456-35019486
  hypo
cagtgttaagctctgcgtgtgagtagaata

SEQ ID NO: 71470 - DNA, 30 bp, Homo sapiens
  chr6:35027132-35027162
  hypo
tgacccccgagccccggcccatgtgcccca

SEQ ID NO: 71471 - DNA, 31 bp, Homo sapiens
  chr6:35027635-35027666
  hypo
atcatgcatgtgcagccgtggccctggagca

SEQ ID NO: 71472 - DNA, 44 bp, Homo sapiens; identical to SEQ ID NO: 20304
  chr6:35033861-35033905
  hypo

SEQ ID NO: 71473 - DNA, 202 bp, Homo sapiens
  chr6:35044730-35044932
  hypo
cttgggcaggtccagcgtggagtagggagggagtgctttggaaatgctagatagataaaacgtggaaagatgctcatcctcacctctggatgagatgatcctactccgataagaaatgtgcaaattgaaactgcagggagactctttccctgctgtgttgctgatggtgtgggggatctagcactggcgtcactaagaagag

SEQ ID NO: 71474 - DNA, 96 bp, Homo sapiens
  chr6:35045148-35045244
  hypo
gtgggcccacatgcactgctgcggaacaatctcctgtgtatattccgtgataagaacaaggcaccgagcgtgtgcgagaatggcatttgtgtgaaa

SEQ ID NO: 71475 - DNA, 30 bp, Homo sapiens
  chr6:35045709-35045739
  hypo
agcgctgcaggtgggcgctccgtgtgcctc

SEQ ID NO: 71476 - DNA, 30 bp, Homo sapiens
  chr6:35048239-35048269
  hypo
cgctccccgagccctcgggtgcactgggcc

SEQ ID NO: 71477 - DNA, 258 bp, Homo sapiens
  chr6:35048657-35048915
  hypo
tgcttctcccggtgccgctgcctgtgccgtcctaaccagtggggctggctgatacctgtagtcgggcactgggccgagggttgcaagttccacctggatttttccctccacagtgccaagatttgctctcccagacgtcatccccactgagtcagaatgattcctgcactgggcggtcggcagatctgctgctgcctccaggggacacaggcaggaggcgccatgacagtctccatgaccctgcggcaccctcccgag

SEQ ID NO: 71478 - DNA, 246 bp, Homo sapiens
  chr6:35109323-35109569
  hypo
tcttcaggctgtttggacagccgagaagccgagccacacccaggagggttgtttcacagcgtgtgccgcaggggcgcaggggccgcgctctttcctcacatgtgggagaagcggaggagccgccagggctggggccaggctctgcccactggggttccgcccgttgtcgccctccgcctcctgggctctagcccttgcctttcttgactctaagtctactctgtcgcccttgcagtgatgtgaaga

SEQ ID NO: 71479 - DNA, 271 bp, Homo sapiens
  chr6:35149809-35150080
  hypo
gcaaatgtttcttgagcgctggcaacgtgccaggctccttgctgggccccaaggagggagccacaaacacggacaaattccaggacctgctggagctgttctcgggctctaacgtgaggcaaaactgtgcacaaatcctggggcactctggacactgagctccggaccccgtgcaggcggtagtcgcctctgcgcggagtaggagctttgtgggcctcccacccagcatcaggagaatcagggcccacgtggcgggcgagggatctgcgac

SEQ ID NO: 71480 - DNA, 31 bp, Homo sapiens; identical to SEQ ID NO: 20307
  chr6:35260503-35260534
  hypo

SEQ ID NO: 71481 - DNA, 27 bp, Homo sapiens
  chr6:35271478-35271505
  hypo
aataaggtgatcaggccgggcagggta

SEQ ID NO: 71482 - DNA, 34 bp, Homo sapiens
  chr6:35357349-35357383
  hypo
aaagtgctaggattacaggcgtgagccaccgcgc

SEQ ID NO: 71483 - DNA, 697 bp, Homo sapiens
  chr6:35374507-35375204
  hypo
caaccacttacttacacctcccgaaactgagaacagttttaccggttctggtgaaaaaaacccactaccagctcatatgtgggagtgggagctgaggctctgctgagtaacacggcccagtgcacacagctgtcagggcctggcccggctcgagtcctgctgtgtccgaagctctgccgttttctgcttcgtcctctagcatgttctgagatgccctgttgggatcctcaggcctgtcacttttgtcatctgcaaggggggcctataaggccttaatgggggctggcgaggcttgagtgggagcgtgacgcatagtgggagctcagtcagctccctcccctccctccaggatttggtcctgacagggagctccatcaggtcttccccagggtcaccagaggctcagatgctgtgttgtcaagtatatataccaggcagtattgtagcttttcctcctctgttactgcctgctaagcggggaccccacatcttcacgtcctcctcttcctggctctcatcaccacagcctggtgtgcattgccccgtgtccactgacacccacgccacatgggtccaaaaacagagtgtgttctcattgcctcatcccactcaccctgggctctgccgccactgcgctgtggctctcgggggtcccaccatctgacccttgtcacccgtgctgctccttctcttggga

SEQ ID NO: 71484 - DNA, 30 bp, Homo sapiens
  chr6:35392231-35392261
  hypo
accacagtggagaccgtgcgggagctcact

SEQ ID NO: 71485 - DNA, 387 bp, Homo sapiens
  chr6:35454306-35454693
  hypo
cctggaagctctgctcgatgtccgggctccacacgccctccgcatcgttgtccagccccttgtccaggccctcgggcccatcctcccgggcctccccggggctgctgctggcgttccagctgttggacgctattgtgctggttgctctgggctctgggcctgagcccactgggcggctgagcctgggggacagacagacaggaactgggaccagggtcctcctcgaccacagcaatctcctatcccacagccgctggctctggagctccgcccccagccccaagcccaccctaggagcaggtgctccaggtggaacggaggtaaccagaggaacaaccacagcttgttcagagctgtgtgacctgggatgcacgcgctacttcacct

SEQ ID NO: 71486 - DNA, 9 bp, Homo sapiens
  chr6:35454906-35454915
  hypo
acaaaacta

SEQ ID NO: 71487 - DNA, 31 bp, Homo sapiens
  chr6:35490043-35490074
  hypo
aggctggaggctgtcccgaggtgcacgccct

SEQ ID NO: 71488 - DNA, 25 bp, Homo sapiens
  chr6:35505223-35505248
  hypo
gctgagccaccgctcccggccaggg

SEQ ID NO: 71489 - DNA, 31 bp, Homo sapiens; identical to SEQ ID NO: 42881
  chr6:35523457-35523488
  hypo

SEQ ID NO: 71490 - DNA, 30 bp, Homo sapiens; identical to SEQ ID NO: 20312
  chr6:35529548-35529578
  hypo

SEQ ID NO: 71491 - DNA, 26 bp, Homo sapiens
  chr6:35568030-35568056
  hypo
atatttttactgaattcgctgagggt

SEQ ID NO: 71492 - DNA, 26 bp, Homo sapiens
  chr6:35568175-35568201
  hypo
cagagtgagaccgtctcaaaaaaaaa

SEQ ID NO: 71493 - DNA, 30 bp, Homo sapiens; identical to SEQ ID NO: 20315
  chr6:35704807-35704837
  hypo

SEQ ID NO: 71494 - DNA, 30 bp, Homo sapiens
  chr6:35741529-35741559
  hypo
tgttcctactcccccgcaatgcagaggtac

SEQ ID NO: 71495 - DNA, 31 bp, Homo sapiens
  chr6:35763035-35763066
  hypo
agtaaatcccatagagcgtctgcagagacac

SEQ ID NO: 71496 - DNA, 42 bp, Homo sapiens
  chr6:35895200-35895242
  hypo
caggcatgagccacggtgcccggcccccaggtatttttttta

SEQ ID NO: 71497 - DNA, 55 bp, Homo sapiens
  chr6:35911712-35911767
  hypo
tgaatccataggatggcgtctcctctccactgaccatgtccgagtctgagtctga

SEQ ID NO: 71498 - DNA, 39 bp, Homo sapiens
  chr6:35944303-35944342
  hypo
ctgtatggtattagaagccctcgcttttttttttttttt

SEQ ID NO: 71499 - DNA, 31 bp, Homo sapiens
  chr6:35989517-35989548
  hypo
actttacatatgtttacgtatacatataaat

SEQ ID NO: 71500 - DNA, 23 bp, Homo sapiens
  chr6:35994810-35994833
  hypo
aacagccttctggccggaacctg

SEQ ID NO: 71501 - DNA, 22 bp, Homo sapiens
  chr6:36072474-36072496
  hypo
ttcttgtcgtcattctgttctg

SEQ ID NO: 71502 - DNA, 36 bp, Homo sapiens
  chr6:36092695-36092731
  hypo
aaaaaaaaagtttccggaggtcagtaaggtgtccca

SEQ ID NO: 71503 - DNA, 131 bp, Homo sapiens; identical to SEQ ID NO: 20318
  chr6:36165691-36165822
  hypo

SEQ ID NO: 71504 - DNA, 30 bp, Homo sapiens
  chr6:36168127-36168157
  hypo
agaatgccgagggccggcgttccccgtccc

SEQ ID NO: 71505 - DNA, 192 bp, Homo sapiens
  chr6:36178133-36178325
  hypo
gctaaagacacaattttccaccgagcagctgtccgcctgcgggacctgggaggggccatcctacggcacgcccggcggcaggcagagaacatcggctatgaccccgagaggggcactcacctgcccgagtcacccaaattggaagacttttaccgcttctcctgggaagacggtgagaggcctggatgggtg

SEQ ID NO: 71506 - DNA, 259 bp, Homo sapiens
  chr6:36198229-36198488
  hypo
gcccttgggtgtggaagacaccgtggacaagctcaagatgctggaaggccgcaagaccagcatccgcaagtcagtgcaggtggcctatgaccgtgcgatgatccacctgagcagagtccgggggccccactccttcgtcacttccagctacctgtaagggcagggctgggcctgcatccgcttgccctgcctccatcccgcagggcacagagaagcctcttctgcccctgccagatgtatggccggcagcttccccctc

SEQ ID NO: 71507 - DNA, 145 bp, Homo sapiens; identical to SEQ ID NO: 20321
  chr6:36214656-36214801
  hypo

SEQ ID NO: 71508 - DNA, 149 bp, Homo sapiens
  chr6:36238276-36238425
  hypo
actccatctccttctcgggcagtggattcctctccttctaccaggcgggggctgtggacgccctgcgggacctggccccccggatgctggaaacagcccaccgctttgcggggacatcggcaggtgctgtgatcgccgccctggccatc

SEQ ID NO: 71509 - DNA, 30 bp, Homo sapiens
  chr6:36275505-36275535
  hypo
ttccttaaatcccacggagaggagcagctt

SEQ ID NO: 71510 - DNA, 30 bp, Homo sapiens
  chr6:36313961-36313991
  hypo
gctttccataagacacgctaagacacgccc

SEQ ID NO: 71511 - DNA, 30 bp, Homo sapiens
  chr6:36314472-36314502
  hypo
gactaattaatcgccgtagatcgagggaag

SEQ ID NO: 71512 - DNA, 146 bp, Homo sapiens
  chr6:36339125-36339271
  hypo
gggggcctgcggcatcgcggggaaggaacagaccccctgggtcctgcagccgagctctgcacagtgacataagttgagggactcctccttgccaggggtccaccttgccaggccagggtcatccaggtggccgaagttgctggtaa

SEQ ID NO: 71513 - DNA, 84 bp, Homo sapiens
  chr6:36343599-36343683
  hypo
ggcctaccagggttcccgcttagaggaaagcctgtgcgtttccctgacctgagctgggcgcacggtgccggaagtcgtccttgg

SEQ ID NO: 71514 - DNA, 121 bp, Homo sapiens
  chr6:36392401-36392522
  hypo
cgagactccgtctcaaaaaaacaaaaacaaatacaaaaacagatgaagattcaaaatttcagtcaattcagtgctttctaaaaaatggataccaggccggtcgcggtggctcacacctgta

SEQ ID NO: 71515 - DNA, 16 bp, Homo sapiens
  chr6:36396174-36396190
  hypo
tcgcgacagagcgaga

SEQ ID NO: 71516 - DNA, 39 bp, Homo sapiens; identical to SEQ ID NO: 20324
  chr6:36406488-36406527
  hypo

SEQ ID NO: 71517 - DNA, 30 bp, Homo sapiens
  chr6:36406780-36406810
  hypo
ggaacttttttttttttgagacggagtctc

SEQ ID NO: 71518 - DNA, 18 bp, Homo sapiens
  chr6:36535241-36535259
  hypo
tttgagacggagcctcgc

SEQ ID NO: 71519 - DNA, 18 bp, Homo sapiens
  chr6:36535498-36535516
  hypo
ctgtaaactgtatttttg

SEQ ID NO: 71520 - DNA, 81 bp, Homo sapiens
  chr6:36545728-36545809
  hypo
ccgtgcccggcctggcaacggtattctaacttgaacacagtgtcaccaaccactgtttgcgaacattcagacagcatcaac

SEQ ID NO: 71521 - DNA, 30 bp, Homo sapiens
  chr6:36569528-36569558
  hypo
agagaaatcacaagccgtcccgatccttct

SEQ ID NO: 71522 - DNA, 103 bp, Homo sapiens; identical to SEQ ID NO: 20325
  chr6:36599662-36599765
  hypo

SEQ ID NO: 71523 - DNA, 42 bp, Homo sapiens
  chr6:36600064-36600106
  hypo
aacactttcacatctgggaacggctttgatcctttcacagcc

SEQ ID NO: 71524 - DNA, 30 bp, Homo sapiens; identical to SEQ ID NO: 42898
  chr6:36622884-36622914
  hypo

SEQ ID NO: 71525 - DNA, 30 bp, Homo sapiens; identical to SEQ ID NO: 20326
  chr6:36629624-36629654
  hypo

SEQ ID NO: 71526 - DNA, 30 bp, Homo sapiens
  chr6:36657837-36657867
  hypo
tttatagtggcattacggatctttctcttc

SEQ ID NO: 71527 - DNA, 230 bp, Homo sapiens
  chr6:36713047-36713277
  hypo
gggctccctgaaaggcaagtgcgtgggaagagaaaccccctcccaccacccagaggcagagctggtgtggaaacagaggccttgtgagtgcctggaggcggtggcagcggcactcacctggccacgtgggtgaccacgggggcaaagttggtggggccgtacagctgcacagtgcgcaggctgcggtggtaggcctccaggatgccgtcgatgccacagcatgaggggtt

SEQ ID NO: 71528 - DNA, 30 bp, Homo sapiens; identical to SEQ ID NO: 20328
  chr6:36831621-36831651
  hypo

SEQ ID NO: 71529 - DNA, 30 bp, Homo sapiens
  chr6:36837401-36837431
  hypo
ttgcgaaggtaaaagcgaagcaagttgtga

SEQ ID NO: 71530 - DNA, 30 bp, Homo sapiens
  chr6:36926932-36926962
  hypo
gagctggccgccttcgccaaggcctacgca

SEQ ID NO: 71531 - DNA, 30 bp, Homo sapiens
  chr6:36929175-36929205
  hypo
gcaccatgccacctcgcatggggctgagct

SEQ ID NO: 71532 - DNA, 178 bp, Homo sapiens
  chr6:36936700-36936878
  hypo
cctgatgacacccggcggaaaagcaggctggagcctcggaagagctggccctggaccagaaggaaaagtaaggtgagtgaaagggaggccacgcttccttgtccctccgagaggaaggccagtgtcaggcaaagaagggtccaggagctcaaagacccagctccggggtggacggcct

SEQ ID NO: 71533 - DNA, 30 bp, Homo sapiens
  chr6:36937279-36937309
  hypo
acggagaggtagcttcggtacagaacacga

SEQ ID NO: 71534 - DNA, 112 bp, Homo sapiens
  chr6:36939066-36939178
  hypo
ccggcagcctcacctcggcctttaagccacatacagaaaagcactcgaaaaacactttagacaaatctgttgactgctgttgttgctgatgtaagcacggcagcctctggtc

SEQ ID NO: 71535 - DNA, 30 bp, Homo sapiens
  chr6:36949243-36949273
  hypo
atgccagctcgactgcgtgccatgctgcgc

SEQ ID NO: 71536 - DNA, 18 bp, Homo sapiens
  chr6:37011430-37011448
  hypo
gcccggccccagactcac

SEQ ID NO: 71537 - DNA, 30 bp, Homo sapiens; identical to SEQ ID NO: 20330
  chr6:37012625-37012655
  hypo

SEQ ID NO: 71538 - DNA, 838 bp, Homo sapiens
  chr6:37023811-37024649
  hypo
agacatgggccacatcggccacatcttctgagctgcggggtggaggcctggctgcccacctgcattccttactctgcgtacccatgatctcatcccggccctcagccacccacagggcaggaggctttgccccattgtgcagatgagacagccatgccctgccctgggatggtcatttggcctgggctcagggcactctagtgggccccaggctccggcggggtgagtggaatgtggtcacggaggccaccccacgctgtcttgttgggtttaatgagccccattggtctgtccataccctgaataagctctggtctaccgaccctcctatgggctgctggggcgggggaggtcccagggttttccagattcagctgtcctccctctgcagtctcagggacccagacagggctggctgacaaacaggtcctgcccgggatgggcgtggggctgagcgagcgaaactccttttaggaaggaaatctcggccaggttgagaaaccagcatcttgccaaggcctagggggtgggggagcccaggtgagccgactcagtcctcaggaatgggtggggtctccaggagaggcgggcacttcctccgccccagcccagggtcctgttcaatccttattgaggagtttcctggcgacaggcagtgacctgtcggctgcctgtgtgggaagccgcttggcgtggccctccccatctcattagtggtgattcacctggactcacctggctgtcagggacctgtcccactgcccgctggaaccagctcagcaggcaccctctgaggggcagagacctcgttccctcagctccccgtcctccatggtgt

SEQ ID NO: 71539 - DNA, 95 bp, Homo sapiens
  chr6:37033765-37033860
  hypo
taataaggaacaaaacaagattgatggaacctgcagcggcagcccatctagagcaatttgtgaagaattaatcttgtgcacgccctaattgaaaa

SEQ ID NO: 71540 - DNA, 31 bp, Homo sapiens
  chr6:37053275-37053306
  hypo
atgataaaacccctaccgatggctgatgact

SEQ ID NO: 71541 - DNA, 119 bp, Homo sapiens
  chr6:37060658-37060777
  hypo
gcacagactggcttccccagccgcctgcctgcaccgaagaaaggcccagacagtagtgggacaaaacggcaccccatgagggcccaaggggtgagtgcggaacatgggctgggatgcag

SEQ ID NO: 71542 - DNA, 41 bp, Homo sapiens; identical to SEQ ID NO: 20334
  chr6:37100544-37100585
  hypo

SEQ ID NO: 71543 - DNA, 45 bp, Homo sapiens
  chr6:37131658-37131703
  hypo
ataaaactgaaataggccaggcgcagtggctcatgcctgtgatcc

SEQ ID NO: 71544 - DNA, 988 bp, Homo sapiens; identical to SEQ ID NO: 42905
  chr6:37138569-37139557
  hypo

SEQ ID NO: 71545 - DNA, 23 bp, Homo sapiens
  chr6:37195193-37195216
  hypo
tcttgattgctctaagcgaaggt

SEQ ID NO: 71546 - DNA, 163 bp, Homo sapiens; identical to SEQ ID NO: 20335
  chr6:37275431-37275594
  hypo

SEQ ID NO: 71547 - DNA, 87 bp, Homo sapiens
  chr6:37352724-37352811
  hypo
caaggtcaggatgaggcgggagtgtccacatgcttgtactcagatagtatataacactgtattcttaagattttttttttttgagat

SEQ ID NO: 71548 - DNA, 367 bp, Homo sapiens
  chr6:37358448-37358815
  hypo
gaagcagggagtccacggaagggaaatacaggctcctcatttatttatttctcttctttttctccaaagcaaagagattgttctgaagaccgtgctctaagggcatttgaaagactgccaggtagtgcgagcctgagatggtctggaggattctctctagccgtgactccgctgctctgaaggtcaactgagaagtcttgtgggacagagacttgagttaggaagccctcagtcacttgccttccacggtggccagccctgctgccatcattggctgaagcaccaccaggattcacggcacccaactgcttcagggtacttcgtagactctgcctcactacatgtcgaaagagttatttgagttctc

SEQ ID NO: 71549 - DNA, 188 bp, Homo sapiens; identical to SEQ ID NO: 20338
  chr6:37450649-37450837
  hypo

SEQ ID NO: 71550 - DNA, 88 bp, Homo sapiens
  chr6:37460924-37461012
  hypo
gccaggtcagaaaggcgagggaaccgctgcagcccacgcgagtcccgacgccttcccgcgaggagacggaggccgagccagccttgca

SEQ ID NO: 71551 - DNA, 247 bp, Homo sapiens
  chr6:37461237-37461484
  hypo
gccgccatccagccgcgctaggtaatgaggttttagtctcctgacccccgtcaagtggcgcagagccagatgtaggctgccgcgagaaatcacctgcccaatggcgacctgtcgctctcgcctggcagcaggtgaggctcatttaatggtcagcggcccctgaacagtcctctgcgtgctgcgagcctttctcccagcccctggcttggggttcagggtcccagcaaggtggcgtctaaccgcctgc

SEQ ID NO: 71552 - DNA, 154 bp, Homo sapiens
  chr6:37605016-37605170
  hypo
caggccccctccctggcgggccggccctgcccctgggcaccccagctggcgggggtcagtctttggtacaatgtggacactttggtgtgccgggggcaaggttgggggggtggccacacagctctcatcatctctgcaacgccaagaggaagat

SEQ ID NO: 71553 - DNA, 37 bp, Homo sapiens
  chr6:37608134-37608171
  hypo
cttttttcggagggggcggtgcggggacagggtcttg

SEQ ID NO: 71554 - DNA, 104 bp, Homo sapiens
  chr6:37642011-37642115
  hypo
atgtgtctctgacctccgggtacaagggcgctgtcactgaatacagcaaccagccacagctgaaaggatcagtgtgcaggccgccaccccgccaccacaattga

SEQ ID NO: 71555 - DNA, 1226 bp, Homo sapiens; identical to SEQ ID NO: 42913
  chr6:37664481-37665707
  hypo

SEQ ID NO: 71556 - DNA, 381 bp, Homo sapiens; identical to SEQ ID NO: 42915
  chr6:37666462-37666843
  hypo

SEQ ID NO: 71557 - DNA, 221 bp, Homo sapiens; identical to SEQ ID NO: 42916
  chr6:37666866-37667087
  hypo

SEQ ID NO: 71558 - DNA, 103 bp, Homo sapiens; identical to SEQ ID NO: 20341
  chr6:37721652-37721755
  hypo

SEQ ID NO: 71559 - DNA, 36 bp, Homo sapiens; identical to SEQ ID NO: 20342
  chr6:37776699-37776735
  hypo

SEQ ID NO: 71560 - DNA, 37 bp, Homo sapiens
  chr6:37791848-37791885
  hypo
gccggtatatattaacgtcatatttttaggattaaaa

SEQ ID NO: 71561 - DNA, 30 bp, Homo sapiens
  chr6:37865335-37865365
  hypo
aatgctaagcttttgcggtagtggctatac

SEQ ID NO: 71562 - DNA, 19 bp, Homo sapiens
  chr6:37980160-37980179
  hypo
ttttttttttttgagtcgg

SEQ ID NO: 71563 - DNA, 83 bp, Homo sapiens
  chr6:38020517-38020600
  hypo
ctccatgttgaccgccgggcgtggtggctcacgcctgtaatcccagagtgattacaggcacgaggctgaggcagggagatcat

SEQ ID NO: 71564 - DNA, 167 bp, Homo sapiens
  chr6:38084361-38084528
  hypo
aatgaggcttcaccagtaaaacggccacgactacttgagaatacggaacggtccgaggaaaccagtcgatctaaacagaagagtcgacgtcggtgcttccagtgccaaaccaaactggagctggtgcagcaggaattgggatcgtgtcgctgcggtaagcatctccc

SEQ ID NO: 71565 - DNA, 30 bp, Homo sapiens; identical to SEQ ID NO: 20344
  chr6:38087590-38087620
  hypo

SEQ ID NO: 71566 - DNA, 181 bp, Homo sapiens
  chr6:38101942-38102123
  hypo
caccttttggtctcccgctgtacctgggtaatatgagacacagtggcatttaattctgttgacatgcacattccgttctcctgagtgctaattcatatcctcatattccttgaaaagttacctcctccaagatcccttattgcagttgacttccccttggtgctcccgatttattacacat

SEQ ID NO: 71567 - DNA, 186 bp, Homo sapiens; identical to SEQ ID NO: 20345
  chr6:38118859-38119045
  hypo

SEQ ID NO: 71568 - DNA, 105 bp, Homo sapiens
  chr6:38121252-38121357
  hypo
ttagtaagggaaggcagcatacgtcccagggacagtgggtttggatctgtctagaacagcggtttgtggctgtggcccagctccgagagtgatatttgctctggt

SEQ ID NO: 71569 - DNA, 83 bp, Homo sapiens; identical to SEQ ID NO: 20346
  chr6:38122001-38122084
  hypo

SEQ ID NO: 71570 - DNA, 64 bp, Homo sapiens; identical to SEQ ID NO: 20347
  chr6:38134383-38134447
  hypo

SEQ ID NO: 71571 - DNA, 30 bp, Homo sapiens
  chr6:38183173-38183203
  hypo
caaatagtttacccacgcgcgagtgaacag

SEQ ID NO: 71572 - DNA, 187 bp, Homo sapiens; identical to SEQ ID NO: 20348
  chr6:38646371-38646558
  hypo

SEQ ID NO: 71573 - DNA, 30 bp, Homo sapiens; identical to SEQ ID NO: 20349
  chr6:38803940-38803970
  hypo

SEQ ID NO: 71574 - DNA, 31 bp, Homo sapiens
  chr6:38852630-38852661
  hypo
cattagaagacttcaccggtgttgccagaag

SEQ ID NO: 71575 - DNA, 30 bp, Homo sapiens
  chr6:39072443-39072473
  hypo
actcaagcagccaacgggtctggagttaac

SEQ ID NO: 71576 - DNA, 94 bp, Homo sapiens
  chr6:39127058-39127152
  hypo
ctgctagctgagatctcggagagaaggaggaactggcagggaagtgctagcaaaatctttgtaagggacagatactttaatactcaagaagtta

SEQ ID NO: 71577 - DNA, 240 bp, Homo sapiens
  chr6:39158096-39158336
  hypo
ccagcagcctccaccccactacggtttgtagtaggtgcccgacctgaccggcaggcccacagctgggatgcgggcgggccctgctcctgctgtggtacggaaacacctgaccccacgcacagcggtacctccccagacacttcagagctccctctccaaatgccgagctcagtaataccggtaaacttaaacagctgaggccccagacctcagagaaccgtgtgatactccaccaaatgg

SEQ ID NO: 71578 - DNA, 824 bp, Homo sapiens
  chr6:39158587-39159411
  hypo
gcgtcccggtcatctcgggacaccctagggtgaggggggaagaggccatcaaaggtggggtggggagccggccctgcctcatgtgcccttggggctgttagccttgttgtactcattcatcagctgttcgtaaggcacagagagctcagactcagtgctggtgaaggtggactcggaggaggaggggaactcgcccatgttcaggggcgccttggcttcagccccctgctgggggctctcctcccctgccaagttgtcctctagcgaggacttggaggtctcctcgtctgagaggccagcctccgtgttcacgaaggtgatgctggcgtcctggaagatgagtgggtggtagtcctgggcgtcccatggctcgcattcctcgctgatgcggtccagctggttcatgaacacctcgggggcaggggagctgtcttcaggggcccgtgccacagcctcctcatctggggaccttgatacgtggcctttgctcctcagtgtctgtgacacctcttccaaggtgggcacccggttcttggagtagactaccaggggcaccagggaagggggcagtgctgggagcccaccgccttgaggccccagccctgggcccgggcccgtctccccacccccgcttgtcttcatggccttcttcccgatctgcttgatgaggtcgttgtaggtctcttccttcttggaaagaaagctgaagatgttgacgtccttggaggctgtgctccccttcacctgcagggccttccgggagtgtggggagctctcaaaggactccttccgtcgccgccgccgcttcttaatggctttgtgga

SEQ ID NO: 71579 - DNA, 104 bp, Homo sapiens
  chr6:39162022-39162126
  hypo
cagtcaccatgaatacgaagggtgggatcaccaggtggactaggacgccccacacgatgaagatgactgtgcacgtgatctgcgccttccgctgatggggagca

SEQ ID NO: 71580 - DNA, 67 bp, Homo sapiens
  chr6:39162447-39162514
  hypo
ccacgtcaggcagagcggcaccccgaagagaccatagaaaacacagaagaggcgaccggcgggggtc

SEQ ID NO: 71581 - DNA, 25 bp, Homo sapiens
  chr6:39184594-39184619
  hypo
gtaaaagttgaaactcactgccggg

SEQ ID NO: 71582 - DNA, 43 bp, Homo sapiens
  chr6:39185582-39185625
  hypo
ccctggggagcagggaggcatcggatcctttctgcctgaggcc

SEQ ID NO: 71583 - DNA, 494 bp, Homo sapiens; identical to SEQ ID NO: 42924
  chr6:39281406-39281900
  hypo

SEQ ID NO: 71584 - DNA, 38 bp, Homo sapiens
  chr6:39691930-39691968
  hypo
agaagcataaaaagtgctgggcgcggtggctcacgcct

SEQ ID NO: 71585 - DNA, 658 bp, Homo sapiens; identical to SEQ ID NO: 42925
  chr6:39692722-39693380
  hypo

SEQ ID NO: 71586 - DNA, 297 bp, Homo sapiens
  chr6:39895078-39895375
  hypo
cacttctctgtgagggagatccgcaggtagctgtgctgccggccgaagctgtctgtgaggaaggcggagaagggggccgcatgctcccgcaggaactgcctccgcctggacacctcctgcgaggacagaccagggaggaagcatgggcccctgctaccgggctgggaagaggcacaaggagaaccgcctgccccctcccttactctgacatctgtgcggagcttccaactcttccacatgtttgggctctgcaatgttggggaagctgggattgtccctctcgttgagaaatcagct

SEQ ID NO: 71587 - DNA, 445 bp, Homo sapiens; identical to SEQ ID NO: 42928
  chr6:39901967-39902412
  hypo

SEQ ID NO: 71588 - DNA, 30 bp, Homo sapiens
  chr6:40346284-40346314
  hypo
gggccgctgctgcccgtcctcgcctaggtg

SEQ ID NO: 71589 - DNA, 30 bp, Homo sapiens
  chr6:40359820-40359850
  hypo
ggactgtagccgcccggcacgacccctccc

SEQ ID NO: 71590 - DNA, 30 bp, Homo sapiens
  chr6:40399617-40399647
  hypo
ctgcctccacctccccggctggtcttgctg

SEQ ID NO: 71591 - DNA, 721 bp, Homo sapiens
  chr6:40399973-40400694
  hypo
ctgggtgatgagaggcggctcgcacacaaactcctcctcacgcacatgccagaagtagcgacccttgaggccccctggggagccacaggtttccaggtcatcgtcccgctcgagcctccgcagccagagaagctcacaattgcagtgaagtgggttacccccaaaactaaaggacaagggtggggcaaagggtgtggctgtcaaagccgaagcctgggagcgggcaaagatgggatcagggggcagcttctgcagccgattggaggtgagatccaggcgggccagtttctgcaggtctgcaaaggtgccctcggcgatgtgatccagcaggttgtggtccaggctcagctggtggaggttgaccatgcgtcgcacggagtcccacggcaggccatggaggttgttgtaggagaggtccagatcctccaatgtcagcaggaagtcctcaaaagcctcatctgcgatgccgcccagctggttgttgttcacgataaggtgctgcaggttgaccaggccccggagggtgtcctccccaaggcttggcagccgattgctgtcaagatgcagggagcggaggctctcgaggtccagaaaggaaaagggctggatgtggctgatggtgttcctggacagggtcaggtccaccagccccgtcatgttggcaaagtcctggcggctgatgtggatgatgaagttgccgcccaggcgcagctccactgtc

SEQ ID NO: 71592 - DNA, 843 bp, Homo sapiens; identical to SEQ ID NO: 42929
  chr6:40554427-40555270
  hypo

SEQ ID NO: 71593 - DNA, 223 bp, Homo sapiens; identical to SEQ ID NO: 42930
  chr6:40555282-40555505
  hypo

SEQ ID NO: 71594 - DNA, 31 bp, Homo sapiens; identical to SEQ ID NO: 4803
  chr6:40763876-40763907
  hypo

SEQ ID NO: 71595 - DNA, 30 bp, Homo sapiens; identical to SEQ ID NO: 42933
  chr6:40802245-40802275
  hypo

SEQ ID NO: 71596 - DNA, 74 bp, Homo sapiens
  chr6:41001833-41001907
  hypo
cctgggcttgggacagcgatggggcgtccgacaggtcccacaccaggatcaaagacacccgctcctggcggccc

SEQ ID NO: 71597 - DNA, 30 bp, Homo sapiens
  chr6:41068158-41068188
  hypo
ttttaccttacggtcgctgggaatctaagc

SEQ ID NO: 71598 - DNA, 30 bp, Homo sapiens
  chr6:41303884-41303914
  hypo
tgagatgccagtacccgcccacgggcagtc

SEQ ID NO: 71599 - DNA, 489 bp, Homo sapiens; identical to SEQ ID NO: 4806
  chr6:41339069-41339558
  hypo

SEQ ID NO: 71600 - DNA, 928 bp, Homo sapiens; identical to SEQ ID NO: 42938
  chr6:41339601-41340529
  hypo

SEQ ID NO: 71601 - DNA, 30 bp, Homo sapiens; identical to SEQ ID NO: 42939
  chr6:41341059-41341089
  hypo

SEQ ID NO: 71602 - DNA, 30 bp, Homo sapiens; identical to SEQ ID NO: 20360
  chr6:41454616-41454646
  hypo

SEQ ID NO: 71603 - DNA, 30 bp, Homo sapiens; identical to SEQ ID NO: 20361
  chr6:41511678-41511708
  hypo

SEQ ID NO: 71604 - DNA, 30 bp, Homo sapiens; identical to SEQ ID NO: 20362
  chr6:41519620-41519650
  hypo

SEQ ID NO: 71605 - DNA, 30 bp, Homo sapiens; identical to SEQ ID NO: 20363
  chr6:41524751-41524781
  hypo

SEQ ID NO: 71606 - DNA, 30 bp, Homo sapiens; identical to SEQ ID NO: 20364
  chr6:41529917-41529947
  hypo

SEQ ID NO: 71607 - DNA, 30 bp, Homo sapiens
  chr6:41584022-41584052
  hypo
acagcagctagagccgacctgtccgggagg

SEQ ID NO: 71608 - DNA, 31 bp, Homo sapiens; identical to SEQ ID NO: 20365
  chr6:41619005-41619036
  hypo

SEQ ID NO: 71609 - DNA, 338 bp, Homo sapiens
  chr6:41620829-41621167
  hypo
gcaaggatgatccagactgcccgctccgatgtgcttaactgtctgtgcctcggggtcatcacctagaaaatggagctgtggggacggattcgtgagcttcaggcacacagtgaacactcagcgtccctgctgctgccgctgccgcaggcccccacacccccggctatttcacacacgctcatccctcccctctctcacccgtccccctctccaccgccaccccgcagactgctgtgtccactgcatcctgtcctgcctgttctgcgagttcctgacgctgtgcaacatcgtcctggactgcgccacctgtggctcctgcagctcggaggactcgtgcc

SEQ ID NO: 71610 - DNA, 30 bp, Homo sapiens; identical to SEQ ID NO: 42948
  chr6:41692796-41692826
  hypo

SEQ ID NO: 71611 - DNA, 43 bp, Homo sapiens
  chr6:41715406-41715449
  hypo
cataatgtgtgcatttagggacgagggccagaaaaaggtagag

SEQ ID NO: 71612 - DNA, 81 bp, Homo sapiens
  chr6:41753205-41753286
  hypo
ccatgatggacaactctactgcggccgtcatcatgcagagttgctgcgcccgcgctgcccggcttgtgaccaggtacagcc

SEQ ID NO: 71613 - DNA, 1038 bp, Homo sapiens
  chr6:41773490-41774528
  hypo
ccttgtgcagcagctcgcagagaaattcctgcgcgtcctgttggtcgtagccgcggaaggcagggatcaggctccacactgagtggagcatggcgaagggcgacactagggcccacttcccggaccacatgactcggaagagggtgtgcagttcacggcagagggaaatgtgctttgaactcggctccttgttctggatgagctccagactccgactaatggaggccctgccgttccagcagaagccctcccgctcgcatgcctcggccctgtcatttctcaaggacagctccgtggccgagctgttggttggcttgccagaaagctgagtcttcccgttggtggctttgggaaacagatgttccgttttggaagggtcaaggttgaggaaacattctcggaacttctggaggtggctgagcacctggaggatggagttcatgtagcaggtgttgcccaggttgcgcaggcccgtgacgcctggggccatggccggctggcgacgcagcttgagtgtggcggcgggcactctgcgtgaggtagggagggcggcggggcgcgaggcagccgggcccgcgtcgcggggcgtgtgcaggagcagccgtgcactcttgcgcggaggggtgctggccagctcctccagcagccgccgtttcacctcgcgccgccgcctccgcgcctcctccttcttgcgctccagggcctcctcctgccgccgctgctccagcttcgcctggccccgggagctcttctcgaaccacagccgcagcgtcctggccagcaggcgctgacgccggtaccacagagccgtgagcatctgcggctgtccctgaggagcgcgctgcggcaggaccacgtcctcacccgaagccatggaccgcagcgtccgcccacgtctcaccggcgtgtcctgtttctggccccggaccgccaggagggagcttcttagcagcttcaggtccccctctgggttatcattgagcacgtagtccttgcacaggtaacagaacacgtagagatcccggacttccatggcta

SEQ ID NO: 71614 - DNA, 30 bp, Homo sapiens
  chr6:41776547-41776577
  hypo
tggcttgcacacttcgggaggctgaggtgg

SEQ ID NO: 71615 - DNA, 201 bp, Homo sapiens; identical to SEQ ID NO: 20369
  chr6:41827195-41827396
  hypo

SEQ ID NO: 71616 - DNA, 30 bp, Homo sapiens
  chr6:41900483-41900513
  hypo
gacaccaagacccccgttggtgactgaaga

SEQ ID NO: 71617 - DNA, 43 bp, Homo sapiens
  chr6:41956741-41956784
  hypo
gctgaacttcattaaaatttaaaacctccgctccacaaaaggc

SEQ ID NO: 71618 - DNA, 29 bp, Homo sapiens
  chr6:41981483-41981512
  hypo
cagcagtcccttccagcgccaagccattc

SEQ ID NO: 71619 - DNA, 48 bp, Homo sapiens
  chr6:42017468-42017516
  hypo
tccaagtgggccattgacaggcggggcggccctcagcacaaaatcacc

SEQ ID NO: 71620 - DNA, 204 bp, Homo sapiens
  chr6:42047605-42047809
  hypo
ccattcccttggtgaatttggaaacttgaaaaacttggggacttgacagcaggctccatgttcttctggcctcactgtactgtgtaaggaaagagctgcttgtcaggaacggaagaggggacgctagtaaaaaaaaaaaaattggattccccaactggactaaataggagtttttcaggtttgtagtaacgtgaaactctccta

SEQ ID NO: 71621 - DNA, 43 bp, Homo sapiens
  chr6:42062060-42062103
  hypo
aagcaagcctgagcaacacagcgacaccccatctttttttttt

SEQ ID NO: 71622 - DNA, 30 bp, Homo sapiens; identical to SEQ ID NO: 20371
  chr6:42071204-42071234
  hypo

SEQ ID NO: 71623 - DNA, 192 bp, Homo sapiens; identical to SEQ ID NO: 20372
  chr6:42074110-42074302
  hypo

SEQ ID NO: 71624 - DNA, 163 bp, Homo sapiens
  chr6:42090712-42090875
  hypo
tcctcatatgcatcaccctggcgatggcttgattcagactggggagggcaagagagaaccccagaaaacacaaccttgctgccacccactgttctatggacccagctctcagacgcagagggacaggccgggcgcggtggctcacgcccgtaatcccagaact

SEQ ID NO: 71625 - DNA, 40 bp, Homo sapiens
  chr6:42105771-42105811
  hypo
ggcaacggatcgagactccgtctcaaaaaacccccagagc

SEQ ID NO: 71626 - DNA, 31 bp, Homo sapiens
  chr6:42141343-42141374
  hypo
cctgagcaatgggcaacgtgatggagggaaa

SEQ ID NO: 71627 - DNA, 30 bp, Homo sapiens
  chr6:42143414-42143444
  hypo
atgtgtgtcccatgcgagcaccacctgtac

SEQ ID NO: 71628 - DNA, 30 bp, Homo sapiens; identical to SEQ ID NO: 20373
  chr6:42207495-42207525
  hypo

SEQ ID NO: 71629 - DNA, 30 bp, Homo sapiens
  chr6:42712085-42712115
  hypo
tactgtctataatccgagtgttttgggagg

SEQ ID NO: 71630 - DNA, 120 bp, Homo sapiens
  chr6:42762763-42762883
  hypo
ctcacaaagagaattacgcatgaacgacagtcaaggtaactgaaaagatctacatctattgttagaaagttgtctaacttgttttccaaaactttctgctattagatttaaaaacgtgac

SEQ ID NO: 71631 - DNA, 38 bp, Homo sapiens; identical to SEQ ID NO: 20374
  chr6:42773434-42773472
  hypo

SEQ ID NO: 71632 - DNA, 31 bp, Homo sapiens; identical to SEQ ID NO: 20375
  chr6:42777803-42777834
  hypo

SEQ ID NO: 71633 - DNA, 80 bp, Homo sapiens
  chr6:42813436-42813516
  hypo
cagccactggcaggtgcgccggtttccaatacttaacaatacatcagaatcaactggaaagctttaaaaagttatagatt

SEQ ID NO: 71634 - DNA, 18 bp, Homo sapiens
  chr6:42846175-42846193
  hypo
gagcgagacgccatctca

SEQ ID NO: 71635 - DNA, 23 bp, Homo sapiens
  chr6:42905051-42905074
  hypo
aggatgaggccaggtgcggtggc

SEQ ID NO: 71636 - DNA, 30 bp, Homo sapiens
  chr6:42929919-42929949
  hypo
tctctgcctctcctcgctggccgtactcag

SEQ ID NO: 71637 - DNA, 30 bp, Homo sapiens
  chr6:42932095-42932125
  hypo
ggatgcgcttgtaccggagcagctcctgct

SEQ ID NO: 71638 - DNA, 22 bp, Homo sapiens
  chr6:42942139-42942161
  hypo
ctgatataccaagaggcgccta

SEQ ID NO: 71639 - DNA, 36 bp, Homo sapiens; identical to SEQ ID NO: 20378
  chr6:42951450-42951486
  hypo

SEQ ID NO: 71640 - DNA, 30 bp, Homo sapiens
  chr6:42979946-42979976
  hypo
gggcgcaggcagtgcggcttttggctgtgt

SEQ ID NO: 71641 - DNA, 30 bp, Homo sapiens; identical to SEQ ID NO: 20379
  chr6:42997019-42997049
  hypo

SEQ ID NO: 71642 - DNA, 30 bp, Homo sapiens
  chr6:43034095-43034125
  hypo
agcaaggttgcggacgttgcacaacctggt

SEQ ID NO: 71643 - DNA, 20 bp, Homo sapiens
  chr6:43050197-43050217
  hypo
gccaccgtgccctgctgcaa

SEQ ID NO: 71644 - DNA, 30 bp, Homo sapiens; identical to SEQ ID NO: 20381
  chr6:43057812-43057842
  hypo

SEQ ID NO: 71645 - DNA, 126 bp, Homo sapiens; identical to SEQ ID NO: 42981
  chr6:43081635-43081761
  hypo

SEQ ID NO: 71646 - DNA, 267 bp, Homo sapiens; identical to SEQ ID NO: 20382
  chr6:43096726-43096993
  hypo

SEQ ID NO: 71647 - DNA, 35 bp, Homo sapiens
  chr6:43104147-43104182
  hypo
caggttcaggtgggcccgctcgtctacctggtgtg

SEQ ID NO: 71648 - DNA, 31 bp, Homo sapiens; identical to SEQ ID NO: 20383
  chr6:43113235-43113266
  hypo

SEQ ID NO: 71649 - DNA, 32 bp, Homo sapiens
  chr6:43118950-43118982
  hypo
tttttttttttttcttgagaccgagtctcgct

SEQ ID NO: 71650 - DNA, 92 bp, Homo sapiens; identical to SEQ ID NO: 20384
  chr6:43119821-43119913
  hypo

SEQ ID NO: 71651 - DNA, 31 bp, Homo sapiens
  chr6:43181064-43181095
  hypo
ctgctaccttatctgtcgctgttctcctcct

SEQ ID NO: 71652 - DNA, 30 bp, Homo sapiens; identical to SEQ ID NO: 42987
  chr6:43214835-43214865
  hypo

SEQ ID NO: 71653 - DNA, 31 bp, Homo sapiens
  chr6:43222389-43222420
  hypo
gtgagtaccgtcggggcggggaggacagtgg

SEQ ID NO: 71654 - DNA, 216 bp, Homo sapiens
  chr6:43230736-43230952
  hypo
catcgacaaggagacggagctcaaggacttccctccaggggctgagcccagcacatcgggcaccacggatgaggagcccgaggagctgcggccactgcccgaggagggcgaagagcggcggcggctgggggcagagcccaccgtccggccccggggacgcagcatgcaggcgctggcggaggaggacctgcagcatttgccgccccagcccctgcc

SEQ ID NO: 71655 - DNA, 31 bp, Homo sapiens; identical to SEQ ID NO: 20385
  chr6:43249394-43249425
  hypo

SEQ ID NO: 71656 - DNA, 30 bp, Homo sapiens; identical to SEQ ID NO: 20386
  chr6:43325213-43325243
  hypo

SEQ ID NO: 71657 - DNA, 38 bp, Homo sapiens
  chr6:43334538-43334576
  hypo
attacatacacacacacgcacacaaactgtaactccct

SEQ ID NO: 71658 - DNA, 29 bp, Homo sapiens
  chr6:43338304-43338333
  hypo
tcttcacacgttttcgagctgttttctga

SEQ ID NO: 71659 - DNA, 30 bp, Homo sapiens
  chr6:43398431-43398461
  hypo
cactgctgcagatacgttttcctgtatttg

SEQ ID NO: 71660 - DNA, 96 bp, Homo sapiens
  chr6:43424451-43424547
  hypo
cccccgcccccccccaaaaaaagacaaggacccagaacataatttctagtttgtgcaggacaacagggcagaggtcaggaacgctagcgcccatct

SEQ ID NO: 71661 - DNA, 19 bp, Homo sapiens
  chr6:43425113-43425132
  hypo
ttttttttttttgagacgg

SEQ ID NO: 71662 - DNA, 320 bp, Homo sapiens; identical to SEQ ID NO: 20388
  chr6:43456969-43457289
  hypo

SEQ ID NO: 71663 - DNA, 69 bp, Homo sapiens
  chr6:43478675-43478744
  hypo
cacaccttctcaggtacgcagggcactgttgacatctgagggtgtgtccgtgccgcgagactggggcag

SEQ ID NO: 71664 - DNA, 24 bp, Homo sapiens
  chr6:43481964-43481988
  hypo
tgcgactccatctcaaaacaaaac

SEQ ID NO: 71665 - DNA, 99 bp, Homo sapiens; identical to SEQ ID NO: 4831
  chr6:43596712-43596811
  hypo

SEQ ID NO: 71666 - DNA, 31 bp, Homo sapiens; identical to SEQ ID NO: 20390
  chr6:43608107-43608138
  hypo

SEQ ID NO: 71667 - DNA, 75 bp, Homo sapiens; identical to SEQ ID NO: 20391
  chr6:43639571-43639646
  hypo

SEQ ID NO: 71668 - DNA, 60 bp, Homo sapiens; identical to SEQ ID NO: 20392
  chr6:43745060-43745120
  hypo

SEQ ID NO: 71669 - DNA, 49 bp, Homo sapiens; identical to SEQ ID NO: 20393
  chr6:43745319-43745368
  hypo

SEQ ID NO: 71670 - DNA, 338 bp, Homo sapiens; identical to SEQ ID NO: 20394
  chr6:43748285-43748623
  hypo

SEQ ID NO: 71671 - DNA, 168 bp, Homo sapiens
  chr6:43752448-43752616
  hypo
atgaaggaagaggagactctgcgcagagcactttgggtccggagggcgagactccggcggaagcattcccgggcgggtgacccagcacggtccctcttggaattggattcgccattttatttttcttgctgctaaatcaccgagcccggaagattagagagttttatt

SEQ ID NO: 71672 - DNA, 77 bp, Homo sapiens
  chr6:43755592-43755669
  hypo
tcccaatcactgaccacgtgccgacccctacattggttaacactgaatctgcacagcagccctgggaggtaggtgct

SEQ ID NO: 71673 - DNA, 9 bp, Homo sapiens
  chr6:43755968-43755977
  hypo
cggcaggta

SEQ ID NO: 71674 - DNA, 30 bp, Homo sapiens
  chr6:43792936-43792966
  hypo
agtttccagtacgacgaggaaaaccacctc

SEQ ID NO: 71675 - DNA, 31 bp, Homo sapiens
  chr6:43819544-43819575
  hypo
tggggtggaactggaacgacaagatgcagtc

SEQ ID NO: 71676 - DNA, 30 bp, Homo sapiens
  chr6:43827222-43827252
  hypo
cctttccaggcttacgcttcatttctcaag

SEQ ID NO: 71677 - DNA, 30 bp, Homo sapiens
  chr6:43857896-43857926
  hypo
cctcatactgtccccgtgagttgggcaagg

SEQ ID NO: 71678 - DNA, 31 bp, Homo sapiens; identical to SEQ ID NO: 20396
  chr6:43890965-43890996
  hypo

SEQ ID NO: 71679 - DNA, 190 bp, Homo sapiens
  chr6:43891388-43891578
  hypo
ctagttctgggtacctgcagacgtgggctctcttgcaggtttgaggtctgggagtggcccagccagggactctggatgcctttgggagggctccggtcccttccccgacatactcaccatggaagcaaccacgtagtgtccctgggcagccgggtgggtgtgagtcaccgggcaggccaaaccccaaatg

SEQ ID NO: 71680 - DNA, 166 bp, Homo sapiens; identical to SEQ ID NO: 20397
  chr6:43893234-43893400
  hypo

SEQ ID NO: 71681 - DNA, 93 bp, Homo sapiens
  chr6:43894168-43894261
  hypo
agctgttgccctccagcctgccgcgcttcccggggacctgcaaacgtccatcctttcctcggtcgattcctcgtccagcctgtggtccttggg

SEQ ID NO: 71682 - DNA, 30 bp, Homo sapiens
  chr6:43895115-43895145
  hypo
gggatgattgagactcggcaaacaggaata

SEQ ID NO: 71683 - DNA, 31 bp, Homo sapiens
  chr6:43917991-43918022
  hypo
ccattcaactccgcctcgtttgttcaacaat

SEQ ID NO: 71684 - DNA, 193 bp, Homo sapiens
  chr6:43990913-43991106
  hypo
actggatgcccacctgcgtccggcggccaagccagcgggcctggcggtaatgcaattacagcaccattccattaaagggagcttgggttctttggggacaaggggaagggttccagaaggacaagcaggagaggacaaggacagggtcagagggaaacaaatgcaggagtgacacccacggccaagatagatc

SEQ ID NO: 71685 - DNA, 388 bp, Homo sapiens; identical to SEQ ID NO: 43004
  chr6:44044180-44044568
  hypo

SEQ ID NO: 71686 - DNA, 26 bp, Homo sapiens
  chr6:44086401-44086427
  hypo
atctcatttaaacctcatggccgggc

SEQ ID NO: 71687 - DNA, 44 bp, Homo sapiens
  chr6:44086952-44086996
  hypo
ttgttccatcaagaatactgacgtcagctgggcgcggtggctca

SEQ ID NO: 71688 - DNA, 41 bp, Homo sapiens
  chr6:44089392-44089433
  hypo
atgactgggcatagtggcttacgcctataatcccaacactt

SEQ ID NO: 71689 - DNA, 35 bp, Homo sapiens
  chr6:44090097-44090132
  hypo
gcatgagccaccgcgccctgccagagagctcattt

SEQ ID NO: 71690 - DNA, 271 bp, Homo sapiens; identical to SEQ ID NO: 43006
  chr6:44095870-44096141
  hypo

SEQ ID NO: 71691 - DNA, 30 bp, Homo sapiens
  chr6:44116495-44116525
  hypo
gttcctggactgaccggttccccaccttgc

SEQ ID NO: 71692 - DNA, 219 bp, Homo sapiens
  chr6:44120363-44120582
  hypo
acgcctggatgatgtgcgtcttcacggtggtcatgacctacagtatcacctgccccatcatcgtgcccttcggtaggcaccgccgcgccgggacctgggccctgctcggggggacccaggacttcaccctctccactctaggaatgcaggccaccccgagtggacagggcccggctgggagaccggcccctcggggctcccgcccggtccctggctcag

SEQ ID NO: 71693 - DNA, 168 bp, Homo sapiens
  chr6:44121129-44121297
  hypo
ttagagaaaaatgatacgggttttaagaagatgcttgttgattcaaatgactagatttccaatagtagaattcctgatgaggagagtagaatgaggggttgtagcggaggaagctgaagttctgtgatcacgctggggcacggggcactatcccgtcctggggcccgg

SEQ ID NO: 71694 - DNA, 30 bp, Homo sapiens
  chr6:44123599-44123629
  hypo
caaagtaagcctggcgccagcccatctgtc

SEQ ID NO: 71695 - DNA, 37 bp, Homo sapiens; identical to SEQ ID NO: 20401
  chr6:44166168-44166205
  hypo

SEQ ID NO: 71696 - DNA, 31 bp, Homo sapiens
  chr6:44200718-44200749
  hypo
gcctctgcatgtgcttcgggcccaagtgagt

SEQ ID NO: 71697 - DNA, 261 bp, Homo sapiens; identical to SEQ ID NO: 20402
  chr6:44222599-44222860
  hypo

SEQ ID NO: 71698 - DNA, 238 bp, Homo sapiens; identical to SEQ ID NO: 20403
  chr6:44227779-44228017
  hypo

SEQ ID NO: 71699 - DNA, 171 bp, Homo sapiens
  chr6:44229400-44229571
  hypo
gttcctctgcctggctctggccgcccttccagcaggcagcgggcacaggccaagtgctggcgctggcaggccacatgaagggctgtgtcaccatgccggtcctgtagtgcccggctggcccccttcagcaccagtgcccgaactgcgcccggttggtccagatgtacagcc

SEQ ID NO: 71700 - DNA, 30 bp, Homo sapiens
  chr6:44250199-44250229
  hypo
acaagtccagctcctcgaggactgggtggt

SEQ ID NO: 71701 - DNA, 31 bp, Homo sapiens
  chr6:44376364-44376395
  hypo
tgcaggtaacgtgtcacgtagtagaatgagg

SEQ ID NO: 71702 - DNA, 31 bp, Homo sapiens
  chr6:44429408-44429439
  hypo
aagcaggacagcagctcggggctgtcttagc

SEQ ID NO: 71703 - DNA, 30 bp, Homo sapiens; identical to SEQ ID NO: 20404
  chr6:44438427-44438457
  hypo

SEQ ID NO: 71704 - DNA, 128 bp, Homo sapiens
  chr6:44449534-44449662
  hypo
gcatacatttatattcggattagtgccgcacactcagtttggtgtcattttcctctgagcatcgtgagtattttcccatgacatttaatattttttgaaagcgtggtttgtaccggctgcgcataagg

SEQ ID NO: 71705 - DNA, 30 bp, Homo sapiens; identical to SEQ ID NO: 20405
  chr6:44696124-44696154
  hypo

SEQ ID NO: 71706 - DNA, 43 bp, Homo sapiens
  chr6:45030133-45030176
  hypo
acactaaatggagcatcaaagcggatcagccttctaaagagta

SEQ ID NO: 71707 - DNA, 646 bp, Homo sapiens; identical to SEQ ID NO: 43020
  chr6:45390895-45391541
  hypo

SEQ ID NO: 71708 - DNA, 30 bp, Homo sapiens
  chr6:45492185-45492215
  hypo
cttatcgccatctcgcgctgtacccaaaac

SEQ ID NO: 71709 - DNA, 30 bp, Homo sapiens; identical to SEQ ID NO: 20407
  chr6:45608782-45608812
  hypo

SEQ ID NO: 71710 - DNA, 37 bp, Homo sapiens; identical to SEQ ID NO: 43021
  chr6:45631098-45631135
  hypo

SEQ ID NO: 71711 - DNA, 23 bp, Homo sapiens
  chr6:45631602-45631625
  hypo
cgtttcagcgtgaaacagacccg

SEQ ID NO: 71712 - DNA, 357 bp, Homo sapiens; identical to SEQ ID NO: 4842
  chr6:46097264-46097621
  hypo

SEQ ID NO: 71713 - DNA, 443 bp, Homo sapiens; identical to SEQ ID NO: 43025
  chr6:46097694-46098137
  hypo

SEQ ID NO: 71714 - DNA, 30 bp, Homo sapiens
  chr6:46657166-46657196
  hypo
gtttggagtacagtcgtgttgcttggctga

SEQ ID NO: 71715 - DNA, 24 bp, Homo sapiens
  chr6:46783944-46783968
  hypo
gattacaggcgtgagccaccatta

SEQ ID NO: 71716 - DNA, 61 bp, Homo sapiens; identical to SEQ ID NO: 4846
  chr6:46816791-46816852
  hypo

SEQ ID NO: 71717 - DNA, 32 bp, Homo sapiens; identical to SEQ ID NO: 20411
  chr6:46951821-46951853
  hypo

SEQ ID NO: 71718 - DNA, 32 bp, Homo sapiens
  chr6:46952092-46952124
  hypo
tgagccaccacgccccacccaacaaagggttt

SEQ ID NO: 71719 - DNA, 153 bp, Homo sapiens
  chr6:47084372-47084525
  hypo
gcagggagaaagttggacacacgcacagaaagtggggcatagggctgggtagggaaactattgcagggtaatgacgtttctcgtccctcctcgggtccacctggctggcctgggtgtggcaagaatacttccgactcattcaaagaagcctca

SEQ ID NO: 71720 - DNA, 524 bp, Homo sapiens
  chr6:47202105-47202629
  hypo
tacattttatcaggccttccccgaaacacacatttgatagcatcatgaggataaagggtggccgatagctctccaccgggcagtgcgagctgcaaagattttggaggcgtgtcttcgccagccaatggcgaggttactctcgggccagcgtatcttgaagttttggactggtcttcctgggcaggtaattcagatgactcaactctcagctacaactggactgtggacggggagggacgaatcccaggggctctttggggggtttaagtgcgtgtgtgaggtctgctgcgatgcccgtacctttggtaataaaggaaccgttcctgctcagcgcggaggagccgctggatgtagagtcacagcggagaaggggctccgactcatccacgaagaagcccttgttcttgtcctgtggggaaggctccaccgtcaggagagcggaattctcaagtttcgcgttggggctggggatggggctcgggctaagcgggctggggctcatcgggagagctagtttgtcagtt

SEQ ID NO: 71721 - DNA, 25 bp, Homo sapiens
  chr6:47205763-47205788
  hypo
cgacggagtgagactctgtctcaaa

SEQ ID NO: 71722 - DNA, 30 bp, Homo sapiens
  chr6:47221021-47221051
  hypo
cttctccacaacatcgtttctccggtgctg

SEQ ID NO: 71723 - DNA, 30 bp, Homo sapiens; identical to SEQ ID NO: 4848
  chr6:47413210-47413240
  hypo

SEQ ID NO: 71724 - DNA, 30 bp, Homo sapiens
  chr6:47452720-47452750
  hypo
tatagtagtgcaacgcgttactcactgtgt

SEQ ID NO: 71725 - DNA, 177 bp, Homo sapiens
  chr6:47539955-47540132
  hypo
ggtatatcaagaagcaggggccgggcgcagtgactcatgcctgcgcccggatccactgcgatggtgtacaagtgctgggtgacgaattgttctgtatcttgttgtatttacatggtgcgacatttgtcaaacattactgaaatgcatatttaaaacgggttcattttattcattgta

SEQ ID NO: 71726 - DNA, 30 bp, Homo sapiens; identical to SEQ ID NO: 4849
  chr6:47655314-47655344
  hypo

SEQ ID NO: 71727 - DNA, 22 bp, Homo sapiens
  chr6:48788421-48788443
  hypo
cgacagagtgagacactgtctc

SEQ ID NO: 71728 - DNA, 145 bp, Homo sapiens
  chr6:49453724-49453869
  hypo
atgaagcatcctgtatcgtcacgggtacgtcctaaatccaatgacaagtgttcttataaaagacaagagaaggcacaaagacaaagaaaaagccacgtgaaacacaatagaaggcataaataaaaagccacgtgaaagcaaaggc

SEQ ID NO: 71729 - DNA, 31 bp, Homo sapiens
  chr6:49527737-49527768
  hypo
ttgatcaggctgggtgcggtggctcatgcct

SEQ ID NO: 71730 - DNA, 17 bp, Homo sapiens
  chr6:49590554-49590571
  hypo
ttgttttgttttgagac

SEQ ID NO: 71731 - DNA, 99 bp, Homo sapiens; identical to SEQ ID NO: 20415
  chr6:49708446-49708545
  hypo

SEQ ID NO: 71732 - DNA, 30 bp, Homo sapiens; identical to SEQ ID NO: 20416
  chr6:49755175-49755205
  hypo

SEQ ID NO: 71733 - DNA, 178 bp, Homo sapiens
  chr6:52141101-52141279
  hypo
gcagcgggcattcagccgagcatggatgccagccttggcaatggtcactcgaccctgctccatcacttcatggatggctgtgcgatccatgtcagacattttgtcaaattcatcaatgcaaaccacgcctcggtcagccaggaccatggcccctgcttccagacggcgctctcctggg

SEQ ID NO: 71734 - DNA, 31 bp, Homo sapiens; identical to SEQ ID NO: 20417
  chr6:52161689-52161720
  hypo

SEQ ID NO: 71735 - DNA, 40 bp, Homo sapiens
  chr6:52171804-52171844
  hypo
tcttaaactggaaaacctcggtatgtcaaggcctgcactt

SEQ ID NO: 71736 - DNA, 40 bp, Homo sapiens; identical to SEQ ID NO: 4865
  chr6:52226739-52226779
  hypo

SEQ ID NO: 71737 - DNA, 1040 bp, Homo sapiens; identical to SEQ ID NO: 4866
  chr6:52227004-52228044
  hypo

SEQ ID NO: 71738 - DNA, 239 bp, Homo sapiens; identical to SEQ ID NO: 20420
  chr6:52267966-52268205
  hypo

SEQ ID NO: 71739 - DNA, 30 bp, Homo sapiens
  chr6:52288808-52288838
  hypo
aacagttgggataggcggagaccggctcca

SEQ ID NO: 71740 - DNA, 297 bp, Homo sapiens; identical to SEQ ID NO: 20421
  chr6:52344288-52344585
  hypo

SEQ ID NO: 71741 - DNA, 25 bp, Homo sapiens
  chr6:52393651-52393676
  hypo
ctgctcacactgccttacaaacgtg

SEQ ID NO: 71742 - DNA, 24 bp, Homo sapiens
  chr6:52393975-52393999
  hypo
accgtgcccagccacaaatgtgta

SEQ ID NO: 71743 - DNA, 152 bp, Homo sapiens
  chr6:52409342-52409494
  hypo
ggaaatgcatcctaacacactcggcactggcgtttgagtccatcttgctcgagtctacaaagaccggccaatgaccacctacgtgagggaacccgataagcagaacttcatgatgatgatttgattccagcgtcttaaaccaaggccaagaa

SEQ ID NO: 71744 - DNA, 30 bp, Homo sapiens; identical to SEQ ID NO: 43069
  chr6:52441447-52441477
  hypo

SEQ ID NO: 71745 - DNA, 19 bp, Homo sapiens
  chr6:52694101-52694120
  hypo
gaaatggcgggctgcacgt

SEQ ID NO: 71746 - DNA, 98 bp, Homo sapiens
  chr6:52769064-52769162
  hypo
ggtgtgacccactgctcctggcctgctccgtcttttacttcacctccccacgatctcacaaatgtccatgattagggagggaacgtcactggaggaaa

SEQ ID NO: 71747 - DNA, 18 bp, Homo sapiens
  chr6:52862526-52862544
  hypo
tcacgcccctgcagtaca

SEQ ID NO: 71748 - DNA, 121 bp, Homo sapiens
  chr6:52928886-52929007
  hypo
agcaaaacaaaacacggcatttggacttccttattgtagctcgttctctctccccttcactctctcgctctctcccctccctcagcactttcacctccatttctgtgccaaagatgtacta

SEQ ID NO: 71749 - DNA, 31 bp, Homo sapiens
  chr6:53024100-53024131
  hypo
cacaaatttcattcaacgctcccaaaaatat

SEQ ID NO: 71750 - DNA, 33 bp, Homo sapiens; identical to SEQ ID NO: 20424
  chr6:53052126-53052159
  hypo

SEQ ID NO: 71751 - DNA, 207 bp, Homo sapiens; identical to SEQ ID NO: 20425
  chr6:53111000-53111207
  hypo

SEQ ID NO: 71752 - DNA, 157 bp, Homo sapiens
  chr6:53139850-53140007
  hypo
cacacctgttccccaagtccccgtctctaatacttacagtggccgcaggggacccagttcatcacaaaccaccagatgttcagcatcgaggcatggtggtagacgtgcaggaccgtgatctggtggttgttcttgcgcaggatgaagaagaaagtgt

SEQ ID NO: 71753 - DNA, 44 bp, Homo sapiens
  chr6:53154514-53154558
  hypo
tcaaaacaaacaaacagaaaaacgtgtagctaaaatgatatttg

SEQ ID NO: 71754 - DNA, 1865 bp, Homo sapiens; identical to SEQ ID NO: 4871
  chr6:53212357-53214222
  hypo

SEQ ID NO: 71755 - DNA, 121 bp, Homo sapiens
  chr6:53219593-53219714
  hypo
cgcttcaagaagcgtgcccctcgggcactcagagagattccgaaatttgccatcaaagaggtggaaactctaagtgtgcgcattgatagcaggttcaacaaagctctctgcgccaaaggaa

SEQ ID NO: 71756 - DNA, 31 bp, Homo sapiens
  chr6:53290504-53290535
  hypo
atatattttggcctggcgcagtggctcatgc

SEQ ID NO: 71757 - DNA, 709 bp, Homo sapiens
  chr6:53385074-53385783
  hypo
atagagcatcggtatcgatagtgctttgggagcactgcagatcctctgatctgccactgatgccaccatatgctagcaggtaaatgctgctttttgaaagtgcatgagggcgcaactgtcacagtcaccaggggacagcattccagaagctttggctactgcttacagggtcagaactgtgtggcaggcgtgctgctccctccaccctcgcctgcggcagacacggccacactgctggtctgtcatcacagtatcctggtctttcccactgagcccccactgagtgcactcaccacggtgcagccaccacagctgacagaagctggcatgcaactgtgtctgcagctctactgttacagagtctatcaagtgcagtctataaaagataaaccatctgtaacgtatgaggattgtaaggtggaatgcccgggtcgtgacttgctcttttcattacctgtatctctgagagatctgctggggcatgttaatataggaactaacctgggaaatgaagttattgtgcaaagagcctgattttcttctaatatagaagtagcctccttccggcgttttcgcatgttggcctcaactgtattgaactcggacattgttcctccgtagggctgtcctggtgtcccttcaatcatgtaactcccatactctggtctccaaagggtaggatggctacggaggagaaataacttagttc

SEQ ID NO: 71758 - DNA, 11 bp, Homo sapiens
  chr6:53406019-53406030
  hypo
aaagaaaaaaa

SEQ ID NO: 71759 - DNA, 539 bp, Homo sapiens; identical to SEQ ID NO: 43077
  chr6:53409552-53410091
  hypo

SEQ ID NO: 71760 - DNA, 31 bp, Homo sapiens
  chr6:53519303-53519334
  hypo
ctcaaaagatctgcagcgtattttactctct

SEQ ID NO: 71761 - DNA, 31 bp, Homo sapiens
  chr6:53725818-53725849
  hypo
gccgcttttagggtgacgggtgagagaaggg

SEQ ID NO: 71762 - DNA, 30 bp, Homo sapiens; identical to SEQ ID NO: 4875
  chr6:54835453-54835483
  hypo

SEQ ID NO: 71763 - DNA, 20 bp, Homo sapiens
  chr6:55445498-55445518
  hypo
caccgcgcccagccggatgt

SEQ ID NO: 71764 - DNA, 113 bp, Homo sapiens
  chr6:56295531-56295644
  hypo
gttttgcgtccaggcgagaagagcgttccgggaaaggcacctcataactcactcagcacagcgcacacgcagagagctcgggcacttgatggggacacgggtggcagccacag

SEQ ID NO: 71765 - DNA, 75 bp, Homo sapiens
  chr6:56297180-56297255
  hypo
tcgtccttctgctctgcgtggccgagccggccatagccaccgaagccccaggagaagactcgcttctgggagtcc

SEQ ID NO: 71766 - DNA, 30 bp, Homo sapiens
  chr6:56391200-56391230
  hypo
ctgagtgatggtgtcgctcactaatcggta

SEQ ID NO: 71767 - DNA, 1807 bp, Homo sapiens; identical to SEQ ID NO: 43086
  chr6:56818494-56820301
  hypo

SEQ ID NO: 71768 - DNA, 148 bp, Homo sapiens; identical to SEQ ID NO: 20432
  chr6:56894235-56894383
  hypo

SEQ ID NO: 71769 - DNA, 30 bp, Homo sapiens
  chr6:56910296-56910326
  hypo
acaagaccctgggctcgctatgcagtccgt

SEQ ID NO: 71770 - DNA, 26 bp, Homo sapiens
  chr6:56972904-56972930
  hypo
gggattacaggcgtgagccacagtgc

SEQ ID NO: 71771 - DNA, 60 bp, Homo sapiens
  chr6:57042599-57042659
  hypo
agtagccacagtttgcgcaaaattgctgttgtactcctcctaagtctcccagcagtttgc

SEQ ID NO: 71772 - DNA, 8 bp, Homo sapiens
  chr6:57042734-57042742
  hypo
gttttgtc

SEQ ID NO: 71773 - DNA, 109 bp, Homo sapiens; identical to SEQ ID NO: 20435
  chr6:57096922-57097031
  hypo

SEQ ID NO: 71774 - DNA, 92 bp, Homo sapiens
  chr6:57111927-57112019
  hypo
aggcgtgagccacaccgcgcccggcctggacttgatttcttgattgcctgcacctagagtatccatcgtctttcctacgtggctgggcaact

SEQ ID NO: 71775 - DNA, 145 bp, Homo sapiens
  chr6:57726145-57726290
  hypo
cacactttcagttttcctgtacgcataattccttttcatttctccgacccttgggtaatgttgaattctcctgcacagccatgcgtgatagtgttgttaagaataaagtgagagtacgaggtcaggagatcgagaccatcttggc

SEQ ID NO: 71776 - DNA, 24 bp, Homo sapiens
  chr6:57726469-57726493
  hypo
tccgtcttaaaaaaaaaaaaaaaa

SEQ ID NO: 71777 - DNA, 30 bp, Homo sapiens; identical to SEQ ID NO: 4886
  chr6:57943180-57943210
  hypo

SEQ ID NO: 71778 - DNA, 30 bp, Homo sapiens; identical to SEQ ID NO: 43096
  chr6:58180191-58180221
  hypo

SEQ ID NO: 71779 - DNA, 366 bp, Homo sapiens; identical to SEQ ID NO: 4888
  chr6:62995508-62995874
  hypo

SEQ ID NO: 71780 - DNA, 453 bp, Homo sapiens; identical to SEQ ID NO: 4889
  chr6:62996077-62996530
  hypo

SEQ ID NO: 71781 - DNA, 31 bp, Homo sapiens
  chr6:63347183-63347214
  hypo
tctttcttcttttttttgagacggagtctcg

SEQ ID NO: 71782 - DNA, 30 bp, Homo sapiens
  chr6:63921443-63921473
  hypo
tcggcgtcggccgccgccatgggagtgcac

SEQ ID NO: 71783 - DNA, 218 bp, Homo sapiens
  chr6:64150630-64150848
  hypo
tcaaaaccctggagccaggtccgttcagccgaccgtcaccatgaccaacgcagatagcgagggcggaaacctccgccaccagctggacagcaacaaacaggacctgagcctcagcaacctggatgaagacccggtcaaggagctggctgcccttccaaagactaccacactggatctgtcttgtaataaatgactattgtgccgggcacggtggctca

SEQ ID NO: 71784 - DNA, 97 bp, Homo sapiens
  chr6:64151087-64151184
  hypo
gggcaacaagagtgaaactccatctcaaaaaaataaataatgactattctcccgtcggatttctgtggcctcacacacctggcgaagctagacctta

SEQ ID NO: 71785 - DNA, 53 bp, Homo sapiens; identical to SEQ ID NO: 43101
  chr6:64283087-64283140
  hypo

SEQ ID NO: 71786 - DNA, 30 bp, Homo sapiens; identical to SEQ ID NO: 20440
  chr6:64289954-64289984
  hypo

SEQ ID NO: 71787 - DNA, 10 bp, Homo sapiens
  chr6:64354837-64354847
  hypo
tggagtgcag

SEQ ID NO: 71788 - DNA, 31 bp, Homo sapiens; identical to SEQ ID NO: 20442
  chr6:65212134-65212165
  hypo

SEQ ID NO: 71789 - DNA, 31 bp, Homo sapiens; identical to SEQ ID NO: 20443
  chr6:65212404-65212435
  hypo

SEQ ID NO: 71790 - DNA, 490 bp, Homo sapiens
  chr6:66497654-66498144
  hypo
ttagaaaaaacacaacagggccggtctgggcagccgaccgctctaggggtccaccccagtcctctgcgcgcgccggctgccctggcccagtcgctgtggaccccacccaggcggcgcgcgcagaatcagttctgagcctcctcgcctcccggctctcccgcctgttgcgggtgtttatccggctgctgggcgacctttcccgggaaggaggctgtgccttcattcggtcacgccccggtctggggaggctcctccctggtgcgcagaaaccgcaggggcggggaggagccgggctctgcctgcgcccggggcagagcggggctggcaccgcgcaaggggccctgtttccggggagactgatttcggcctcctgacctcgggaccccttgactgtggagtgtcagacggaggaggacttagtgatcttgtccaaccccctccccgcttttcacaggttggggagatgggcgcctggagaatggaaatccag

SEQ ID NO: 71791 - DNA, 1369 bp, Homo sapiens; identical to SEQ ID NO: 43104
  chr6:69344102-69345471
  hypo

SEQ ID NO: 71792 - DNA, 30 bp, Homo sapiens; identical to SEQ ID NO: 4894
  chr6:69454973-69455003
  hypo

SEQ ID NO: 71793 - DNA, 43 bp, Homo sapiens
  chr6:69882239-69882282
  hypo
taaagaaataaacaggccaggcgcagtggctcacgcctgtaat

SEQ ID NO: 71794 - DNA, 30 bp, Homo sapiens; identical to SEQ ID NO: 20446
  chr6:70507772-70507802
  hypo

SEQ ID NO: 71795 - DNA, 42 bp, Homo sapiens
  chr6:70515894-70515936
  hypo
caggcatgagtcactgcgcccggcctaaatgttcactttttc

SEQ ID NO: 71796 - DNA, 21 bp, Homo sapiens
  chr6:71121844-71121865
  hypo
gtacaagccaggcacggtgtc

SEQ ID NO: 71797 - DNA, 23 bp, Homo sapiens
  chr6:71122104-71122127
  hypo
ctgggcgacggagcaatgctctg

SEQ ID NO: 71798 - DNA, 30 bp, Homo sapiens
  chr6:71122578-71122608
  hypo
tcccgccctttttggcgtcataaaccaaga

SEQ ID NO: 71799 - DNA, 566 bp, Homo sapiens; identical to SEQ ID NO: 43112
  chr6:71123137-71123703
  hypo

SEQ ID NO: 71800 - DNA, 304 bp, Homo sapiens; identical to SEQ ID NO: 43113
  chr6:71123746-71124050
  hypo

SEQ ID NO: 71801 - DNA, 20 bp, Homo sapiens
  chr6:71246929-71246949
  hypo
cctggccttgatttgccttt

SEQ ID NO: 71802 - DNA, 39 bp, Homo sapiens
  chr6:71544652-71544691
  hypo
agagttattaaagaattgggccgggcgcagtggctcacg

SEQ ID NO: 71803 - DNA, 1098 bp, Homo sapiens; identical to SEQ ID NO: 43115
  chr6:71665582-71666680
  hypo

SEQ ID NO: 71804 - DNA, 38 bp, Homo sapiens
  chr6:71874696-71874734
  hypo
tgggactcgccgctcgcacgcccttgggcagcggcggg

SEQ ID NO: 71805 - DNA, 87 bp, Homo sapiens
  chr6:71874758-71874845
  hypo
gctgtgagctgaggcggtgtatgtgcggcaataacatgtcaaccccgctgcccaccatcgtgcccgccccccggaaggccaccactg

SEQ ID NO: 71806 - DNA, 104 bp, Homo sapiens
  chr6:71955571-71955675
  hypo
ccaccgatggcctgccgatgtctgctggtgtctgtgtgtttgcttttctgctcctcttgacgaccagccatttgtgtctgtgcccgctacggtctctcgggttt

SEQ ID NO: 71807 - DNA, 256 bp, Homo sapiens; identical to SEQ ID NO: 4904
  chr6:72129593-72129849
  hypo

SEQ ID NO: 71808 - DNA, 118 bp, Homo sapiens; identical to SEQ ID NO: 4905
  chr6:72129926-72130044
  hypo

SEQ ID NO: 71809 - DNA, 308 bp, Homo sapiens; identical to SEQ ID NO: 4906
  chr6:72130190-72130498
  hypo

SEQ ID NO: 71810 - DNA, 230 bp, Homo sapiens; identical to SEQ ID NO: 20458
  chr6:72806768-72806998
  hypo

SEQ ID NO: 71811 - DNA, 1066 bp, Homo sapiens; identical to SEQ ID NO: 43123
  chr6:73330784-73331850
  hypo

SEQ ID NO: 71812 - DNA, 1246 bp, Homo sapiens; identical to SEQ ID NO: 43124
  chr6:73331875-73333121
  hypo

SEQ ID NO: 71813 - DNA, 30 bp, Homo sapiens
  chr6:73435929-73435959
  hypo
aatttttttttttttttttttcgagatgga

SEQ ID NO: 71814 - DNA, 30 bp, Homo sapiens
  chr6:73870159-73870189
  hypo
ttttttgatggctgcgagtagaagacaatg

SEQ ID NO: 71815 - DNA, 88 bp, Homo sapiens
  chr6:73935058-73935146
  hypo
ccattggagaatgaaagttttcgggcagggtccaccacggctccttgctgagagcactcgttcccacggccatgctgtgctcccacct

SEQ ID NO: 71816 - DNA, 390 bp, Homo sapiens; identical to SEQ ID NO: 43125
  chr6:73972753-73973143
  hypo

SEQ ID NO: 71817 - DNA, 43 bp, Homo sapiens
  chr6:74016435-74016478
  hypo
gaaaattttcacttagctgggcgtggtggctcatgcctgcaat

SEQ ID NO: 71818 - DNA, 853 bp, Homo sapiens; identical to SEQ ID NO: 43126
  chr6:74019357-74020210
  hypo

SEQ ID NO: 71819 - DNA, 58 bp, Homo sapiens; identical to SEQ ID NO: 20463
  chr6:74025142-74025200
  hypo

SEQ ID NO: 71820 - DNA, 30 bp, Homo sapiens
  chr6:74074121-74074151
  hypo
tccaagcccgctgtcgttctactcaaggtg

SEQ ID NO: 71821 - DNA, 218 bp, Homo sapiens
  chr6:74079516-74079734
  hypo
ctgggaccagcagccgcggagcgcgctcgaggcggctttcgcaagacctcttccagacccaggcgcgaagctcgggctctcttttaccatattcgacccgctccgccccttccggcggcgcctcgcaccgcgtcggggtgagcgggtgcaagcgacgccccggcatagcggcaccattggacacttcctgcgctgcttcaatcgccgggattgcctct

SEQ ID NO: 71822 - DNA, 266 bp, Homo sapiens; identical to SEQ ID NO: 43129
  chr6:74161232-74161498
  hypo

SEQ ID NO: 71823 - DNA, 113 bp, Homo sapiens; identical to SEQ ID NO: 4916
  chr6:74161684-74161797
  hypo

SEQ ID NO: 71824 - DNA, 145 bp, Homo sapiens; identical to SEQ ID NO: 4917
  chr6:74161830-74161975
  hypo

SEQ ID NO: 71825 - DNA, 39 bp, Homo sapiens
  chr6:74234188-74234227
  hypo
agaaaagatgatggcccggtgcggtggctcacgcctgta

SEQ ID NO: 71826 - DNA, 122 bp, Homo sapiens; identical to SEQ ID NO: 43135
  chr6:74406082-74406204
  hypo

SEQ ID NO: 71827 - DNA, 19 bp, Homo sapiens
  chr6:75756094-75756113
  hypo
gtaagaatggctattgttg

SEQ ID NO: 71828 - DNA, 38 bp, Homo sapiens
  chr6:75995668-75995706
  hypo
tgcttggtcctcataatttaccgttaagctgggctctg

SEQ ID NO: 71829 - DNA, 21 bp, Homo sapiens
  chr6:76234817-76234838
  hypo
tttttttttttttttttgaga

SEQ ID NO: 71830 - DNA, 87 bp, Homo sapiens; identical to SEQ ID NO: 4925
  chr6:76458863-76458950
  hypo

SEQ ID NO: 71831 - DNA, 43 bp, Homo sapiens
  chr6:76468480-76468523
  hypo
agctttttaactagcttcattcggaggtgattagttaatatta

SEQ ID NO: 71832 - DNA, 36 bp, Homo sapiens
  chr6:76541352-76541388
  hypo
atgcctgtaatccaagcacttcggggagggcggatc

SEQ ID NO: 71833 - DNA, 178 bp, Homo sapiens
  chr6:79767962-79768140
  hypo
acccaaggtatttttgccatacgtatatatagggttctgtaccatctgttgtctccgacatccactacggatctcagaatgtatctcctgtgaataagggaagataaatgttcctctctccttgtcagcagtatttactaatctgaccatcaacgacgtggcctaaaatattatattt

SEQ ID NO: 71834 - DNA, 22 bp, Homo sapiens
  chr6:79879551-79879573
  hypo
acagtatcatgcctggcgctgt

SEQ ID NO: 71835 - DNA, 4 bp, Homo sapiens
  chr6:80235970-80235974
  hypo
aatt

SEQ ID NO: 71836 - DNA, 30 bp, Homo sapiens
  chr6:80268289-80268319
  hypo
aagaaagattggcccggtgcggtggctcat

SEQ ID NO: 71837 - DNA, 36 bp, Homo sapiens
  chr6:80380889-80380925
  hypo
tgacatagatgaggtcaggcacggtggctcacgcct

SEQ ID NO: 71838 - DNA, 1125 bp, Homo sapiens; identical to SEQ ID NO: 43162
  chr6:80656579-80657704
  hypo

SEQ ID NO: 71839 - DNA, 30 bp, Homo sapiens; identical to SEQ ID NO: 4939
  chr6:81814308-81814338
  hypo

SEQ ID NO: 71840 - DNA, 30 bp, Homo sapiens; identical to SEQ ID NO: 43168
  chr6:82128370-82128400
  hypo

SEQ ID NO: 71841 - DNA, 25 bp, Homo sapiens
  chr6:82560663-82560688
  hypo
agcgagactccgttaaaaaaaaaaa

SEQ ID NO: 71842 - DNA, 42 bp, Homo sapiens
  chr6:82588583-82588625
  hypo
aaaagataattagggccgggcgcggtggctcacgcctgtaat

SEQ ID NO: 71843 - DNA, 43 bp, Homo sapiens
  chr6:82936652-82936695
  hypo
aacattttaaagcttatgtaacgctcctgactcagtatttgct

SEQ ID NO: 71844 - DNA, 29 bp, Homo sapiens
  chr6:82958621-82958650
  hypo
taagttggccgggcgcggtggctcacgcc

SEQ ID NO: 71845 - DNA, 30 bp, Homo sapiens; identical to SEQ ID NO: 4944
  chr6:82968453-82968483
  hypo

SEQ ID NO: 71846 - DNA, 19 bp, Homo sapiens
  chr6:83757501-83757520
  hypo
gttcaataatctgcattaa

SEQ ID NO: 71847 - DNA, 34 bp, Homo sapiens
  chr6:83901428-83901462
  hypo
cgggagcggtggctcacgccagtaatcttagcac

SEQ ID NO: 71848 - DNA, 145 bp, Homo sapiens; identical to SEQ ID NO: 4948
  chr6:84417918-84418063
  hypo

SEQ ID NO: 71849 - DNA, 528 bp, Homo sapiens; identical to SEQ ID NO: 4949
  chr6:84418260-84418788
  hypo

SEQ ID NO: 71850 - DNA, 86 bp, Homo sapiens; identical to SEQ ID NO: 20474
  chr6:84513478-84513564
  hypo

SEQ ID NO: 71851 - DNA, 30 bp, Homo sapiens; identical to SEQ ID NO: 20475
  chr6:84621443-84621473
  hypo

SEQ ID NO: 71852 - DNA, 106 bp, Homo sapiens
  chr6:86302344-86302450
  hypo
atcaattttaacctttcggaatatttcaggtttttttggggagggtggcatcaagtcctcttaagaatattatagggatgtggccgggtgcggtggctcacgcctg

SEQ ID NO: 71853 - DNA, 30 bp, Homo sapiens
  chr6:86324288-86324318
  hypo
aaataaaatcagttcgccagaagcagttag

SEQ ID NO: 71854 - DNA, 78 bp, Homo sapiens; identical to SEQ ID NO: 20477
  chr6:86325373-86325451
  hypo

SEQ ID NO: 71855 - DNA, 18 bp, Homo sapiens
  chr6:86325510-86325528
  hypo
gagcgagactctgactca

SEQ ID NO: 71856 - DNA, 24 bp, Homo sapiens
  chr6:86653087-86653111
  hypo
tttttttttttttttttgagacgg

SEQ ID NO: 71857 - DNA, 83 bp, Homo sapiens
  chr6:86653350-86653433
  hypo
ctgggattacaggagtgagccaccgtgcccggccaacagcaactcttacctaaattcctagcgtaccttatatgttttggact

SEQ ID NO: 71858 - DNA, 47 bp, Homo sapiens
  chr6:86915707-86915754
  hypo
gttgaactgaacaaaggatgacgaacgcaggaataaagacaaaagag

SEQ ID NO: 71859 - DNA, 29 bp, Homo sapiens
  chr6:87321736-87321765
  hypo
gaggattcggtctcaaaaaaaaaaaaaaa

SEQ ID NO: 71860 - DNA, 121 bp, Homo sapiens; identical to SEQ ID NO: 20479
  chr6:87890685-87890806
  hypo

SEQ ID NO: 71861 - DNA, 32 bp, Homo sapiens; identical to SEQ ID NO: 20480
  chr6:88039270-88039302
  hypo

SEQ ID NO: 71862 - DNA, 31 bp, Homo sapiens
  chr6:88068031-88068062
  hypo
aaaaaaaaaaaagtccaggggcggtggttca

SEQ ID NO: 71863 - DNA, 31 bp, Homo sapiens
  chr6:88068301-88068332
  hypo
gcgacagagcgagacttgtctcaaaaaaaaa

SEQ ID NO: 71864 - DNA, 31 bp, Homo sapiens
  chr6:88137642-88137673
  hypo
gtgtccttgcagggtgcgtggggggaacttt

SEQ ID NO: 71865 - DNA, 35 bp, Homo sapiens; identical to SEQ ID NO: 20481
  chr6:88280032-88280067
  hypo

SEQ ID NO: 71866 - DNA, 36 bp, Homo sapiens
  chr6:88461839-88461875
  hypo
gagggggagggagccgaactgtgttttgcgccctac

SEQ ID NO: 71867 - DNA, 19 bp, Homo sapiens
  chr6:88554100-88554119
  hypo
taaagaaaccaggttgttg

SEQ ID NO: 71868 - DNA, 101 bp, Homo sapiens; identical to SEQ ID NO: 43216
  chr6:88875466-88875567
  hypo

SEQ ID NO: 71869 - DNA, 616 bp, Homo sapiens; identical to SEQ ID NO: 4974
  chr6:88875621-88876237
  hypo

SEQ ID NO: 71870 - DNA, 192 bp, Homo sapiens; identical to SEQ ID NO: 4975
  chr6:88876284-88876476
  hypo

SEQ ID NO: 71871 - DNA, 791 bp, Homo sapiens; identical to SEQ ID NO: 4976
  chr6:88876630-88877421
  hypo

SEQ ID NO: 71872 - DNA, 121 bp, Homo sapiens; identical to SEQ ID NO: 20486
  chr6:89376381-89376502
  hypo

SEQ ID NO: 71873 - DNA, 109 bp, Homo sapiens
  chr6:89554143-89554252
  hypo
tgagcccagtcttcattttttcgtgtcgaggacttataatttctcgttctatacactgcagacgaacattaaaatcacaatctccaacgggctgtgactgaattaaata

SEQ ID NO: 71874 - DNA, 30 bp, Homo sapiens
  chr6:89769219-89769249
  hypo
tctccaggaaaagccgttgagaggaccatc

SEQ ID NO: 71875 - DNA, 22 bp, Homo sapiens
  chr6:89821728-89821750
  hypo
taaaactatttattttgagacc

SEQ ID NO: 71876 - DNA, 22 bp, Homo sapiens
  chr6:89821929-89821951
  hypo
cggcctaaaacttatttttaaa

SEQ ID NO: 71877 - DNA, 30 bp, Homo sapiens; identical to SEQ ID NO: 43220
  chr6:89827120-89827150
  hypo

SEQ ID NO: 71878 - DNA, 33 bp, Homo sapiens; identical to SEQ ID NO: 43221
  chr6:89827897-89827930
  hypo

SEQ ID NO: 71879 - DNA, 36 bp, Homo sapiens; identical to SEQ ID NO: 20488
  chr6:89857376-89857412
  hypo

SEQ ID NO: 71880 - DNA, 121 bp, Homo sapiens; identical to SEQ ID NO: 20489
  chr6:89857591-89857712
  hypo

SEQ ID NO: 71881 - DNA, 30 bp, Homo sapiens
  chr6:90011775-90011805
  hypo
ggtcagagtggggccggcaataactgggcc

SEQ ID NO: 71882 - DNA, 64 bp, Homo sapiens; identical to SEQ ID NO: 20490
  chr6:90052740-90052804
  hypo

SEQ ID NO: 71883 - DNA, 30 bp, Homo sapiens; identical to SEQ ID NO: 43223
  chr6:90062676-90062706
  hypo

SEQ ID NO: 71884 - DNA, 1576 bp, Homo sapiens; identical to SEQ ID NO: 43225
  chr6:90120935-90122511
  hypo

SEQ ID NO: 71885 - DNA, 1085 bp, Homo sapiens; identical to SEQ ID NO: 4983
  chr6:90142634-90143719
  hypo

SEQ ID NO: 71886 - DNA, 30 bp, Homo sapiens
  chr6:90205020-90205050
  hypo
tgaaccccatgactcggggagcactggtcc

SEQ ID NO: 71887 - DNA, 30 bp, Homo sapiens
  chr6:90312233-90312263
  hypo
aacccctgcattgccgttgactagtacagg

SEQ ID NO: 71888 - DNA, 30 bp, Homo sapiens; identical to SEQ ID NO: 20493
  chr6:90367403-90367433
  hypo

SEQ ID NO: 71889 - DNA, 91 bp, Homo sapiens; identical to SEQ ID NO: 20494
  chr6:90367695-90367786
  hypo

SEQ ID NO: 71890 - DNA, 36 bp, Homo sapiens
  chr6:90522084-90522120
  hypo
tctgagctcagccactgcacccggccaggaaaaaat

SEQ ID NO: 71891 - DNA, 30 bp, Homo sapiens
  chr6:90527747-90527777
  hypo
acttcagggcagggcgctgtggctcatgcc

SEQ ID NO: 71892 - DNA, 30 bp, Homo sapiens
  chr6:90596351-90596381
  hypo
tcaagtgtcactcacggcctgagactactg

SEQ ID NO: 71893 - DNA, 105 bp, Homo sapiens
  chr6:90685939-90686044
  hypo
tgggtgctctttgtacgcaagagcgtgaagccggatgggagagaaagaaaggaagacaaaaataaagcgtaaaaatgcaggcacattagccgcaggcaagctccc

SEQ ID NO: 71894 - DNA, 28 bp, Homo sapiens
  chr6:90749120-90749148
  hypo
tgagatggagtctcactgtgtcgcccag

SEQ ID NO: 71895 - DNA, 28 bp, Homo sapiens
  chr6:90749387-90749415
  hypo
ccactgcgcctggccaagagtacttctt

SEQ ID NO: 71896 - DNA, 423 bp, Homo sapiens; identical to SEQ ID NO: 43229
  chr6:91004755-91005178
  hypo

SEQ ID NO: 71897 - DNA, 422 bp, Homo sapiens; identical to SEQ ID NO: 4985
  chr6:91005208-91005630
  hypo

SEQ ID NO: 71898 - DNA, 775 bp, Homo sapiens; identical to SEQ ID NO: 4986
  chr6:91005660-91006435
  hypo

SEQ ID NO: 71899 - DNA, 42 bp, Homo sapiens
  chr6:91316403-91316445
  hypo
attacaggtgtgagccaccgcgcccagcctggtagccaaatc

SEQ ID NO: 71900 - DNA, 617 bp, Homo sapiens; identical to SEQ ID NO: 43233
  chr6:91320685-91321302
  hypo

SEQ ID NO: 71901 - DNA, 19 bp, Homo sapiens
  chr6:91362617-91362636
  hypo
attttgtactgcacttcca

SEQ ID NO: 71902 - DNA, 30 bp, Homo sapiens
  chr6:92242264-92242294
  hypo
caaatttagattaagcgaaaaagtctctac

SEQ ID NO: 71903 - DNA, 30 bp, Homo sapiens; identical to SEQ ID NO: 43241
  chr6:94309719-94309749
  hypo

SEQ ID NO: 71904 - DNA, 25 bp, Homo sapiens
  chr6:94511686-94511711
  hypo
tttttattttttgagacggagtctc

SEQ ID NO: 71905 - DNA, 30 bp, Homo sapiens; identical to SEQ ID NO: 4993
  chr6:94807929-94807959
  hypo

SEQ ID NO: 71906 - DNA, 26 bp, Homo sapiens
  chr6:96026947-96026973
  hypo
gttaaaaaaaattctgcggcctggcg

SEQ ID NO: 71907 - DNA, 95 bp, Homo sapiens; identical to SEQ ID NO: 20501
  chr6:96085018-96085113
  hypo

SEQ ID NO: 71908 - DNA, 30 bp, Homo sapiens
  chr6:97593511-97593541
  hypo
caccaaatattttcacgtacattatcccat

SEQ ID NO: 71909 - DNA, 30 bp, Homo sapiens; identical to SEQ ID NO: 4998
  chr6:98405135-98405165
  hypo

SEQ ID NO: 71910 - DNA, 27 bp, Homo sapiens
  chr6:99396455-99396482
  hypo
tatgtattttttgagacggagtctcgc

SEQ ID NO: 71911 - DNA, 26 bp, Homo sapiens
  chr6:99396721-99396747
  hypo
gccaccgcgcccgcccttggcacttt

SEQ ID NO: 71912 - DNA, 67 bp, Homo sapiens; identical to SEQ ID NO: 5019
  chr6:99962858-99962925
  hypo

SEQ ID NO: 71913 - DNA, 220 bp, Homo sapiens; identical to SEQ ID NO: 43278
  chr6:99963447-99963667
  hypo

SEQ ID NO: 71914 - DNA, 30 bp, Homo sapiens
  chr6:100017973-100018003
  hypo
cgagatctcggccgcgatcttaatggagtt

SEQ ID NO: 71915 - DNA, 500 bp, Homo sapiens; identical to SEQ ID NO: 43286
  chr6:100061196-100061696
  hypo

SEQ ID NO: 71916 - DNA, 725 bp, Homo sapiens; identical to SEQ ID NO: 5024
  chr6:100061988-100062713
  hypo

SEQ ID NO: 71917 - DNA, 147 bp, Homo sapiens
  chr6:100841321-100841468
  hypo
cctaatgcttggagttcgggaaccctttcacctgctcttaccatggatcctgtggactgaagcgatgtgaggcatgctgttttcataggcttctctgctttctggggaggcctttgtcaggggcaaggctgcgcgagagccccacca

SEQ ID NO: 71918 - DNA, 30 bp, Homo sapiens; identical to SEQ ID NO: 5030
  chr6:100933169-100933199
  hypo

SEQ ID NO: 71919 - DNA, 969 bp, Homo sapiens; identical to SEQ ID NO: 43306
  chr6:101841143-101842112
  hypo

SEQ ID NO: 71920 - DNA, 192 bp, Homo sapiens; identical to SEQ ID NO: 43314
  chr6:105584127-105584319
  hypo

SEQ ID NO: 71921 - DNA, 1175 bp, Homo sapiens; identical to SEQ ID NO: 43315
  chr6:105584366-105585541
  hypo

SEQ ID NO: 71922 - DNA, 824 bp, Homo sapiens; identical to SEQ ID NO: 43316
  chr6:105627266-105628090
  hypo

SEQ ID NO: 71923 - DNA, 405 bp, Homo sapiens; identical to SEQ ID NO: 20513
  chr6:105750345-105750750
  hypo

SEQ ID NO: 71924 - DNA, 769 bp, Homo sapiens; identical to SEQ ID NO: 43321
  chr6:106533715-106534484
  hypo

SEQ ID NO: 71925 - DNA, 30 bp, Homo sapiens; identical to SEQ ID NO: 20515
  chr6:106553142-106553172
  hypo

SEQ ID NO: 71926 - DNA, 30 bp, Homo sapiens
  chr6:106720463-106720493
  hypo
aaatgtaacaattacgtaaaagtgatctgt

SEQ ID NO: 71927 - DNA, 21 bp, Homo sapiens
  chr6:106731576-106731597
  hypo
cgcgcccgactagttcttagg

SEQ ID NO: 71928 - DNA, 31 bp, Homo sapiens
  chr6:106908237-106908268
  hypo
gctcatttttgtattgcgttgtttaccttgc

SEQ ID NO: 71929 - DNA, 20 bp, Homo sapiens
  chr6:106945964-106945984
  hypo
gactccgtcttaaaaaaaaa

SEQ ID NO: 71930 - DNA, 1660 bp, Homo sapiens; identical to SEQ ID NO: 5045
  chr6:106959519-106961179
  hypo

SEQ ID NO: 71931 - DNA, 35 bp, Homo sapiens; identical to SEQ ID NO: 20518
  chr6:107010363-107010398
  hypo

SEQ ID NO: 71932 - DNA, 78 bp, Homo sapiens
  chr6:107078764-107078842
  hypo
ttatgttatcattttaaattgcgtcgaatcaaatttgttctttaaaaaataaatatgcccggcgcggtggctcacgcc

SEQ ID NO: 71933 - DNA, 31 bp, Homo sapiens; identical to SEQ ID NO: 20519
  chr6:107132181-107132212
  hypo

SEQ ID NO: 71934 - DNA, 121 bp, Homo sapiens; identical to SEQ ID NO: 20520
  chr6:107562425-107562546
  hypo

SEQ ID NO: 71935 - DNA, 21 bp, Homo sapiens
  chr6:107562845-107562866
  hypo
ggctgctctacaaacttcttt

SEQ ID NO: 71936 - DNA, 31 bp, Homo sapiens; identical to SEQ ID NO: 20522
  chr6:107777106-107777137
  hypo

SEQ ID NO: 71937 - DNA, 19 bp, Homo sapiens
  chr6:107779401-107779420
  hypo
acttttggccgggcacggt

SEQ ID NO: 71938 - DNA, 1084 bp, Homo sapiens; identical to SEQ ID NO: 43328
  chr6:107810017-107811101
  hypo

SEQ ID NO: 71939 - DNA, 21 bp, Homo sapiens
  chr6:108181931-108181952
  hypo
cctattcggccatcttggccc

SEQ ID NO: 71940 - DNA, 91 bp, Homo sapiens
  chr6:108274498-108274589
  hypo
ccccaaaactgtactacgggggtcctcatcttttacttaaaatccttaagaacaaatgtgcttcagaatttttcagatttgccccgtccgg

SEQ ID NO: 71941 - DNA, 17 bp, Homo sapiens
  chr6:108555477-108555494
  hypo
tgggtgcagtggctcac

SEQ ID NO: 71942 - DNA, 22 bp, Homo sapiens
  chr6:108614847-108614869
  hypo
tctttttttgagacagagtctc

SEQ ID NO: 71943 - DNA, 184 bp, Homo sapiens; identical to SEQ ID NO: 43353
  chr6:108882163-108882347
  hypo

SEQ ID NO: 71944 - DNA, 30 bp, Homo sapiens
  chr6:108930997-108931027
  hypo
gttaggactttacacgtatgaatatgctgc

SEQ ID NO: 71945 - DNA, 45 bp, Homo sapiens; identical to SEQ ID NO: 20526
  chr6:108984286-108984331
  hypo

SEQ ID NO: 71946 - DNA, 31 bp, Homo sapiens; identical to SEQ ID NO: 20527
  chr6:108990718-108990749
  hypo

SEQ ID NO: 71947 - DNA, 30 bp, Homo sapiens
  chr6:109020263-109020293
  hypo
aatggccccctccacgttccaccccctggg

SEQ ID NO: 71948 - DNA, 30 bp, Homo sapiens; identical to SEQ ID NO: 20528
  chr6:109029003-109029033
  hypo

SEQ ID NO: 71949 - DNA, 73 bp, Homo sapiens
  chr6:109038592-109038665
  hypo
agggtgcccgaggcttcggtgtgctgaggccggggcagctgctggacttcgggtcttcggtgcggaccctgga

SEQ ID NO: 71950 - DNA, 30 bp, Homo sapiens; identical to SEQ ID NO: 20529
  chr6:109053432-109053462
  hypo

SEQ ID NO: 71951 - DNA, 43 bp, Homo sapiens; identical to SEQ ID NO: 20530
  chr6:109057730-109057773
  hypo

SEQ ID NO: 71952 - DNA, 163 bp, Homo sapiens
  chr6:109058635-109058798
  hypo
tcaggcatgtagatgtgtatccgtaacacaaaagcagtccaaataattcttttcagatcatagtatacagtttactggcctagaattagtttataatcagttgtggtcgggccaagaaaattattgatattgggccgggcgcggtggctcacacctgtaatcc

SEQ ID NO: 71953 - DNA, 87 bp, Homo sapiens
  chr6:109059834-109059921
  hypo
agaaagagagggcttccgagaggaaaaagaaccagagaagagccagttggccatggatgtgccggatttcatagtcaggcttgagga

SEQ ID NO: 71954 - DNA, 121 bp, Homo sapiens; identical to SEQ ID NO: 20532
  chr6:109059980-109060101
  hypo

SEQ ID NO: 71955 - DNA, 40 bp, Homo sapiens
  chr6:109551796-109551836
  hypo
caggcatgagccaccgcgcccagcccggagaactctttta

SEQ ID NO: 71956 - DNA, 31 bp, Homo sapiens
  chr6:109643047-109643078
  hypo
agtaaaacacccgggcgtggtggctcacgcc

SEQ ID NO: 71957 - DNA, 430 bp, Homo sapiens; identical to SEQ ID NO: 5067
  chr6:109777176-109777606
  hypo

SEQ ID NO: 71958 - DNA, 144 bp, Homo sapiens; identical to SEQ ID NO: 20535
  chr6:109798004-109798148
  hypo

SEQ ID NO: 71959 - DNA, 30 bp, Homo sapiens
  chr6:109819221-109819251
  hypo
aatcagaaggccaccgaggctctcctgcac

SEQ ID NO: 71960 - DNA, 30 bp, Homo sapiens; identical to SEQ ID NO: 20536
  chr6:110104618-110104648
  hypo

SEQ ID NO: 71961 - DNA, 29 bp, Homo sapiens
  chr6:110437729-110437758
  hypo
aagaggccggtaagcttgaactgctcagt

SEQ ID NO: 71962 - DNA, 69 bp, Homo sapiens
  chr6:110670275-110670344
  hypo
aggcatcccaaacagcgaacgtgaaacatgacctagacgatgtccatttagacacggatgattgaaggg

SEQ ID NO: 71963 - DNA, 136 bp, Homo sapiens; identical to SEQ ID NO: 20537
  chr6:110768070-110768206
  hypo

SEQ ID NO: 71964 - DNA, 45 bp, Homo sapiens
  chr6:110798285-110798330
  hypo
tttaaaaggtacatttaaggccgggcgcacttgctcacgcctgta

SEQ ID NO: 71965 - DNA, 49 bp, Homo sapiens; identical to SEQ ID NO: 20538
  chr6:110843340-110843389
  hypo

SEQ ID NO: 71966 - DNA, 188 bp, Homo sapiens
  chr6:110872231-110872419
  hypo
tcacctcatctcccagcgccactgccctctcccggtccagtgcaagcttggacctggaccctgaatgagggaggtctatttctgggacactcctccactctcgctttccgctttgggaaatagttcctctagtgcgctgggctgagaggtaggacagagaaagggcagagggtcgtaaactaacaggg

SEQ ID NO: 71967 - DNA, 426 bp, Homo sapiens
  chr6:110966934-110967360
  hypo
acaggtggtgtccacggtaatgcatggacaatgagcggctgttttccagtttctggcctctggtgcctatctagagacggagggatggccgcgcacgacgcgccgcgcttcctcctgaccttcgatttcgaagagactatcgtagacgaaaacagcggcgactcagtcctgcgaactgtgccgggacagcaggtgcaggagagcctgcgagccaccgaccgcgagggcttctacaacgagcacatgcagcgcgtcttcaagtatctgggcaagcagggtgtgcggtcgcgggacctgcgtgccatctacgaagctatccctttgttgccaggcatgggcgacctgctgcagtttgtggctaagcaaggcacctccttcgaggtgattctcatctctgatgctaacaccttcggcatggagagcacg

SEQ ID NO: 71968 - DNA, 83 bp, Homo sapiens
  chr6:110968046-110968129
  hypo
aggaaggggctccccggcaggtgagagaaggaaaatctcccactgctgtaattgctgcctcgggccgcgtgaccgcccgcctc

SEQ ID NO: 71969 - DNA, 87 bp, Homo sapiens
  chr6:111022041-111022128
  hypo
agattatttccatcagtgttgcgccaggaatcgattctgaagtcaccaatgcagatgtttaagtcaactattttaataaattaattg

SEQ ID NO: 71970 - DNA, 46 bp, Homo sapiens; identical to SEQ ID NO: 20540
  chr6:111085014-111085060
  hypo

SEQ ID NO: 71971 - DNA, 30 bp, Homo sapiens
  chr6:111179852-111179882
  hypo
agcggggtggacatcggccttaagtactcg

SEQ ID NO: 71972 - DNA, 20 bp, Homo sapiens
  chr6:111190619-111190639
  hypo
ccaccgcgcccagcccatta

SEQ ID NO: 71973 - DNA, 31 bp, Homo sapiens; identical to SEQ ID NO: 20542
  chr6:111204757-111204788
  hypo

SEQ ID NO: 71974 - DNA, 178 bp, Homo sapiens
  chr6:111244971-111245149
  hypo
tgactaccagcaaaggcgcaaaggtgttgaagggctcattgacatcgagaatcccaaccgggtggcacagacaaccaaaaaggtcacacaactggatctggatgggccaaaggagcttttgaggagagaacgagaggagattgagaagcagaaggcaaaagagcgttacatgaaaatg

SEQ ID NO: 71975 - DNA, 847 bp, Homo sapiens; identical to SEQ ID NO: 43378
  chr6:111409007-111409854
  hypo

SEQ ID NO: 71976 - DNA, 8 bp, Homo sapiens
  chr6:111579403-111579411
  hypo
accaaaaa

SEQ ID NO: 71977 - DNA, 33 bp, Homo sapiens
  chr6:111581422-111581455
  hypo
ttcctacgtctccttcgtcggatgggaaggttg

SEQ ID NO: 71978 - DNA, 196 bp, Homo sapiens; identical to SEQ ID NO: 20544
  chr6:111673960-111674156
  hypo

SEQ ID NO: 71979 - DNA, 246 bp, Homo sapiens
  chr6:111750919-111751165
  hypo
gcgggccccgctcccgccctcggctcgcctggcccagaccggaagcagcgccgcactgcctgggcctggcgcggggggtgagcacaggggcccggtcggacatggacaagaagcacaagcacaagaagctcaagtcggacaaacacctctaccaggagtatgtagagaagcccttgaagctggtcctcaaagcaggagggaatgaagtcaccgaactctccgtgggcagctcggggcacaactcca

SEQ ID NO: 71980 - DNA, 48 bp, Homo sapiens
  chr6:111751950-111751998
  hypo
aataatttagagagagcgcaggagcagcttgaccgcatcgtgaaggaa

SEQ ID NO: 71981 - DNA, 165 bp, Homo sapiens
  chr6:111766136-111766301
  hypo
agtatagtggccaaagcgaaggagatttatggaaggcaatgattaacccagagaactaacctaggcagtcaagcaaccgatcacctcatcgttttcaagaatcaactacagataataagacggcaacaggagagaaatataagaagctctcggcatgtggccaac

SEQ ID NO: 71982 - DNA, 30 bp, Homo sapiens; identical to SEQ ID NO: 20547
  chr6:111846875-111846905
  hypo

SEQ ID NO: 71983 - DNA, 30 bp, Homo sapiens; identical to SEQ ID NO: 20548
  chr6:111872400-111872430
  hypo

SEQ ID NO: 71984 - DNA, 30 bp, Homo sapiens; identical to SEQ ID NO: 20549
  chr6:111886828-111886858
  hypo

SEQ ID NO: 71985 - DNA, 103 bp, Homo sapiens
  chr6:111955505-111955608
  hypo
tttccttgatgagtaacgttgttgagcatctttttctatgtttattggccatgaagagatcctcttttgtgaagggcctcttaagtcttttgccgaatttttt

SEQ ID NO: 71986 - DNA, 31 bp, Homo sapiens
  chr6:111960202-111960233
  hypo
tgtcttacagttttatcgtgaatcttcaaat

SEQ ID NO: 71987 - DNA, 187 bp, Homo sapiens
  chr6:111993234-111993421
  hypo
acccccaatgaggacacggttccctggttgccactgccaaccagcaaggccccaacgcaggctctcggccacccttccagtcacatctccaggtgtgcccctgcacatggcatcttctcagattcatcctgtggtccctggaactgtcctcccaggcctatgtgccttcccacgtgccagaccttgg

SEQ ID NO: 71988 - DNA, 40 bp, Homo sapiens
  chr6:114153358-114153398
  hypo
tgaacccaccagaaggaaccaactccggacatattactat

SEQ ID NO: 71989 - DNA, 31 bp, Homo sapiens; identical to SEQ ID NO: 5077
  chr6:114180217-114180248
  hypo

SEQ ID NO: 71990 - DNA, 31 bp, Homo sapiens
  chr6:116574056-116574087
  hypo
atctctgcaattctgtcgaattctagaaggc

SEQ ID NO: 71991 - DNA, 41 bp, Homo sapiens
  chr6:116873933-116873974
  hypo
actttattaaaaaccaaatatcggccgggcgaggtgtctca

SEQ ID NO: 71992 - DNA, 30 bp, Homo sapiens
  chr6:116885175-116885205
  hypo
tgcagccctggagccggcgaggtggtggca

SEQ ID NO: 71993 - DNA, 18 bp, Homo sapiens
  chr6:116959858-116959876
  hypo
aggaggaggagccaagat

SEQ ID NO: 71994 - DNA, 690 bp, Homo sapiens; identical to SEQ ID NO: 43411
  chr6:117591683-117592373
  hypo

SEQ ID NO: 71995 - DNA, 821 bp, Homo sapiens; identical to SEQ ID NO: 43412
  chr6:117803612-117804433
  hypo

SEQ ID NO: 71996 - DNA, 186 bp, Homo sapiens; identical to SEQ ID NO: 43415
  chr6:118228045-118228231
  hypo

SEQ ID NO: 71997 - DNA, 1066 bp, Homo sapiens; identical to SEQ ID NO: 43416
  chr6:118228323-118229389
  hypo

SEQ ID NO: 71998 - DNA, 156 bp, Homo sapiens; identical to SEQ ID NO: 43417
  chr6:118229416-118229572
  hypo

SEQ ID NO: 71999 - DNA, 30 bp, Homo sapiens; identical to SEQ ID NO: 5093
  chr6:118971609-118971639
  hypo

SEQ ID NO: 72000 - DNA, 30 bp, Homo sapiens; identical to SEQ ID NO: 20556
  chr6:118983677-118983707
  hypo

SEQ ID NO: 72001 - DNA, 34 bp, Homo sapiens
  chr6:119023865-119023899
  hypo
agagctggagttggccaggcacggcggctcacgc

SEQ ID NO: 72002 - DNA, 25 bp, Homo sapiens
  chr6:119117467-119117492
  hypo
gattggtggagccaagatggccgaa

SEQ ID NO: 72003 - DNA, 27 bp, Homo sapiens
  chr6:119254364-119254391
  hypo
taagaaacacttatttggggccgggcg

SEQ ID NO: 72004 - DNA, 33 bp, Homo sapiens; identical to SEQ ID NO: 20559
  chr6:119254690-119254723
  hypo

SEQ ID NO: 72005 - DNA, 32 bp, Homo sapiens
  chr6:119482931-119482963
  hypo
tttcttagggttgggctgctgcggtggttttg

SEQ ID NO: 72006 - DNA, 32 bp, Homo sapiens
  chr6:119483262-119483294
  hypo
cccccacgcccggcctctgttttgtttttaat

SEQ ID NO: 72007 - DNA, 152 bp, Homo sapiens
  chr6:119510812-119510964
  hypo
aataacatgtactcacatgttcgattatatgattcatgacaagtacgggcaatttcagccccgagttcaaggtagtgttgggccatgccttcgggagctgcatcagccccgagtgcgaacatgccccccgcgaagcaggtcaggtggcccat

SEQ ID NO: 72008 - DNA, 30 bp, Homo sapiens
  chr6:119826718-119826748
  hypo
tggccccacactcccgacatctataaactt

SEQ ID NO: 72009 - DNA, 30 bp, Homo sapiens; identical to SEQ ID NO: 5096
  chr6:121506912-121506942
  hypo

SEQ ID NO: 72010 - DNA, 43 bp, Homo sapiens
  chr6:121654905-121654948
  hypo
gtggcagtaaaaatatagaggcggcggccgggcgcggtggctc

SEQ ID NO: 72011 - DNA, 68 bp, Homo sapiens; identical to SEQ ID NO: 5100
  chr6:123110666-123110734
  hypo

SEQ ID NO: 72012 - DNA, 30 bp, Homo sapiens; identical to SEQ ID NO: 5103
  chr6:123366433-123366463
  hypo

SEQ ID NO: 72013 - DNA, 1119 bp, Homo sapiens; identical to SEQ ID NO: 5104
  chr6:124124162-124125281
  hypo

SEQ ID NO: 72014 - DNA, 132 bp, Homo sapiens
  chr6:125087370-125087502
  hypo
taaagtgttctctaagaccctcgtttaaagtgcctcttaggacttttgagactgtcgagatgaattctactttctgggtcctgaatccaaaatgagcggaagaggacctacggttgccctgtaagagtgggt

SEQ ID NO: 72015 - DNA, 40 bp, Homo sapiens
  chr6:125207461-125207501
  hypo
ggggacagagccagactccgtctcaaaaaaaaaaaaaaaa

SEQ ID NO: 72016 - DNA, 634 bp, Homo sapiens; identical to SEQ ID NO: 43440
  chr6:125282855-125283489
  hypo

SEQ ID NO: 72017 - DNA, 774 bp, Homo sapiens; identical to SEQ ID NO: 5105
  chr6:125283600-125284374
  hypo

SEQ ID NO: 72018 - DNA, 419 bp, Homo sapiens; identical to SEQ ID NO: 43442
  chr6:125420730-125421149
  hypo

SEQ ID NO: 72019 - DNA, 8 bp, Homo sapiens
  chr6:125843088-125843096
  hypo
cacgacct

SEQ ID NO: 72020 - DNA, 30 bp, Homo sapiens; identical to SEQ ID NO: 43445
  chr6:126010100-126010130
  hypo

SEQ ID NO: 72021 - DNA, 42 bp, Homo sapiens
  chr6:126208031-126208073
  hypo
gagtgtgtgtatgtgcgcgtgcacacacgtgcaggacgtttt

SEQ ID NO: 72022 - DNA, 152 bp, Homo sapiens; identical to SEQ ID NO: 20565
  chr6:126242091-126242243
  hypo

SEQ ID NO: 72023 - DNA, 58 bp, Homo sapiens
  chr6:126243891-126243949
  hypo
agcacgggaccagcttaaagacgctctaccggaaatcggcatcactagacagtcctgt

SEQ ID NO: 72024 - DNA, 151 bp, Homo sapiens; identical to SEQ ID NO: 20566
  chr6:126426569-126426720
  hypo

SEQ ID NO: 72025 - DNA, 30 bp, Homo sapiens
  chr6:126663033-126663063
  hypo
ggggctccatagtgcggtgggatccaggtg

SEQ ID NO: 72026 - DNA, 1124 bp, Homo sapiens; identical to SEQ ID NO: 5108
  chr6:127439838-127440962
  hypo

SEQ ID NO: 72027 - DNA, 689 bp, Homo sapiens; identical to SEQ ID NO: 5109
  chr6:127441030-127441719
  hypo

SEQ ID NO: 72028 - DNA, 31 bp, Homo sapiens; identical to SEQ ID NO: 20569
  chr6:127536396-127536427
  hypo

SEQ ID NO: 72029 - DNA, 30 bp, Homo sapiens; identical to SEQ ID NO: 20570
  chr6:127665866-127665896
  hypo

SEQ ID NO: 72030 - DNA, 17 bp, Homo sapiens
  chr6:127669721-127669738
  hypo
tgaaccactatcctttt

SEQ ID NO: 72031 - DNA, 1219 bp, Homo sapiens; identical to SEQ ID NO: 43460
  chr6:127836582-127837801
  hypo

SEQ ID NO: 72032 - DNA, 83 bp, Homo sapiens
  chr6:128830108-128830191
  hypo
agaaaagaaaagaaaacgaaaaaatttcataaataaacagcttttaaattacacacccttctgagtggcgtgatgaaatcaca

SEQ ID NO: 72033 - DNA, 502 bp, Homo sapiens
  chr6:128901509-128902011
  hypo
gatggaggacttggccaccagcgagggattcttggccttcttggcgtacagccgcagccgctcctcccgcagccgccttgcctccttgtcttcctccttattgtcgctgccaacagatcaatgtcatcgtcctcgttatcctctgcttcttggccggggtcgtagtaaggggggcgaggggaggggcgctccacttggcgcatgggagacacgtgctgtgtctgcgggactgtggaccatggccaggcgagctcttctctcttctccggcatgttcagccaggcctccaggttggagaccgcctgctgcagctcctgcaccacgccgcgcaggctctggttctccacttccaggctggcgatctggaggacgagctcgctgtggtcttccctggggccgagctctggcgggaggcgctggccacaggcccattcatctgcttgtagaatttcctttctgtatcttcatatttgaatttgtcgagccagatcttctcatgtgc

SEQ ID NO: 72034 - DNA, 27 bp, Homo sapiens
  chr6:129373289-129373316
  hypo
ttttttttttaggcagagtttcgctct

SEQ ID NO: 72035 - DNA, 82 bp, Homo sapiens
  chr6:129635703-129635785
  hypo
tttttaaaaagagtatgctcccgttatgcattctcagggtgatttctcccctaactttgccgttataaactctgagggtctc

SEQ ID NO: 72036 - DNA, 30 bp, Homo sapiens; identical to SEQ ID NO: 20573
  chr6:130015070-130015100
  hypo

SEQ ID NO: 72037 - DNA, 31 bp, Homo sapiens; identical to SEQ ID NO: 5118
  chr6:130342613-130342644
  hypo

SEQ ID NO: 72038 - DNA, 30 bp, Homo sapiens; identical to SEQ ID NO: 43469
  chr6:130349103-130349133
  hypo

SEQ ID NO: 72039 - DNA, 31 bp, Homo sapiens; identical to SEQ ID NO: 20575
  chr6:130454500-130454531
  hypo

SEQ ID NO: 72040 - DNA, 33 bp, Homo sapiens
  chr6:130472586-130472619
  hypo
tttatttatttatttttaacacggagtttcact

SEQ ID NO: 72041 - DNA, 73 bp, Homo sapiens
  chr6:130499428-130499501
  hypo
acccttcttgaagacagtgccttagggctgcttctgctgctcttctccgctgcaatgccgtgtgattgaatag

SEQ ID NO: 72042 - DNA, 821 bp, Homo sapiens; identical to SEQ ID NO: 5119
  chr6:130686371-130687192
  hypo

SEQ ID NO: 72043 - DNA, 525 bp, Homo sapiens; identical to SEQ ID NO: 43471
  chr6:130687224-130687749
  hypo

SEQ ID NO: 72044 - DNA, 380 bp, Homo sapiens; identical to SEQ ID NO: 43472
  chr6:131383361-131383741
  hypo

SEQ ID NO: 72045 - DNA, 30 bp, Homo sapiens; identical to SEQ ID NO: 20579
  chr6:131455391-131455421
  hypo

SEQ ID NO: 72046 - DNA, 65 bp, Homo sapiens; identical to SEQ ID NO: 20580
  chr6:131455894-131455959
  hypo

SEQ ID NO: 72047 - DNA, 30 bp, Homo sapiens
  chr6:131908766-131908796
  hypo
tccactctcaaagacggatatatttctact

SEQ ID NO: 72048 - DNA, 30 bp, Homo sapiens; identical to SEQ ID NO: 20581
  chr6:132568035-132568065
  hypo

SEQ ID NO: 72049 - DNA, 30 bp, Homo sapiens
  chr6:133091304-133091334
  hypo
tccacggagttttgcgcgtaaaattttaaa

SEQ ID NO: 72050 - DNA, 31 bp, Homo sapiens; identical to SEQ ID NO: 5125
  chr6:133134687-133134718
  hypo

SEQ ID NO: 72051 - DNA, 194 bp, Homo sapiens; identical to SEQ ID NO: 43483
  chr6:133146627-133146821
  hypo

SEQ ID NO: 72052 - DNA, 301 bp, Homo sapiens; identical to SEQ ID NO: 5127
  chr6:133561966-133562267
  hypo

SEQ ID NO: 72053 - DNA, 88 bp, Homo sapiens; identical to SEQ ID NO: 5128
  chr6:133562348-133562436
  hypo

SEQ ID NO: 72054 - DNA, 420 bp, Homo sapiens; identical to SEQ ID NO: 5129
  chr6:133562674-133563094
  hypo

SEQ ID NO: 72055 - DNA, 933 bp, Homo sapiens; identical to SEQ ID NO: 43487
  chr6:133563157-133564090
  hypo

SEQ ID NO: 72056 - DNA, 31 bp, Homo sapiens; identical to SEQ ID NO: 20587
  chr6:134067447-134067478
  hypo

SEQ ID NO: 72057 - DNA, 163 bp, Homo sapiens; identical to SEQ ID NO: 43493
  chr6:134212320-134212483
  hypo

SEQ ID NO: 72058 - DNA, 24 bp, Homo sapiens
  chr6:134285170-134285194
  hypo
tgcgtctcaaaaaaaagaaccaat

SEQ ID NO: 72059 - DNA, 88 bp, Homo sapiens
  chr6:134589499-134589587
  hypo
acaactgtttgtgaagcgcattgtaaacaaacatagacggggtgagacatcctctttatcctgaataaatcaagaattcccaggccgg

SEQ ID NO: 72060 - DNA, 83 bp, Homo sapiens; identical to SEQ ID NO: 20588
  chr6:134817632-134817715
  hypo

SEQ ID NO: 72061 - DNA, 74 bp, Homo sapiens
  chr6:135305599-135305673
  hypo
gatacagagaatacagagggacgcgtcagggcatgtgcgcaggtaagcacgccggttaccaatttactgctgct

SEQ ID NO: 72062 - DNA, 45 bp, Homo sapiens; identical to SEQ ID NO: 5139
  chr6:135503607-135503652
  hypo

SEQ ID NO: 72063 - DNA, 30 bp, Homo sapiens; identical to SEQ ID NO: 20590
  chr6:135572009-135572039
  hypo

SEQ ID NO: 72064 - DNA, 30 bp, Homo sapiens; identical to SEQ ID NO: 20591
  chr6:135572371-135572401
  hypo

SEQ ID NO: 72065 - DNA, 160 bp, Homo sapiens
  chr6:136556324-136556484
  hypo
gcctgattcctagatcttaagcaaccgggtgatcgtgttgccatttgctaatatgcaaaagacgtgggaaagaacaggttttcaaggtggcggaaaagaacaggtaggaaggaaaagtcctgttttggacctgtgaaacgagatacctgtgagacaggca

SEQ ID NO: 72066 - DNA, 30 bp, Homo sapiens; identical to SEQ ID NO: 20592
  chr6:136647689-136647719
  hypo

SEQ ID NO: 72067 - DNA, 121 bp, Homo sapiens
  chr6:136655687-136655808
  hypo
ccagaggagcacatcagcggaagaagacacaagtggctggacgtcgaggagccatcaaggggagcacaccggcataagagcacacgacagaggccagcacaccagcgggccatcgacttgt

SEQ ID NO: 72068 - DNA, 30 bp, Homo sapiens; identical to SEQ ID NO: 20593
  chr6:136657114-136657144
  hypo

SEQ ID NO: 72069 - DNA, 31 bp, Homo sapiens
  chr6:136681876-136681907
  hypo
cttctctcgttcctgccggaccctctctgct

SEQ ID NO: 72070 - DNA, 85 bp, Homo sapiens
  chr6:136682123-136682208
  hypo
gggtggggtgcggccgcacctgcctctgggcgcgctctgcctcctcccgctcgcgcagcgcccgctcctccgcctgccgctgcag

SEQ ID NO: 72071 - DNA, 207 bp, Homo sapiens; identical to SEQ ID NO: 20594
  chr6:136682757-136682964
  hypo

SEQ ID NO: 72072 - DNA, 30 bp, Homo sapiens
  chr6:136760664-136760694
  hypo
taaaatctctaggacgcgcttagatgaata

SEQ ID NO: 72073 - DNA, 17 bp, Homo sapiens
  chr6:136770171-136770188
  hypo
cacagtggctcaagccc

SEQ ID NO: 72074 - DNA, 155 bp, Homo sapiens
  chr6:136809004-136809159
  hypo
gttggaccattaacatggacacgcacttcatacgctaatatacagagcggaaagtcctctgttaagagtcatacttattctgggaaaagggcctctcaaaaaatttcaaaaggacagtattattgcgaaagggcggcttatgctttatttacttt

SEQ ID NO: 72075 - DNA, 564 bp, Homo sapiens; identical to SEQ ID NO: 43506
  chr6:136870741-136871305
  hypo

SEQ ID NO: 72076 - DNA, 30 bp, Homo sapiens
  chr6:136888847-136888877
  hypo
aactgagcgtgctcacgcctgaggtagcca

SEQ ID NO: 72077 - DNA, 157 bp, Homo sapiens
  chr6:136901461-136901618
  hypo
gtctgtaccgccttccgaatgatactgtctaaggcaaacatccagtgcggcttgatgttatgattccgaagaactttattgacctggagagagagtgacatttagcctactttaatttttaattgcaaatagcctagatgatcgaagcacttgtatg

SEQ ID NO: 72078 - DNA, 126 bp, Homo sapiens; identical to SEQ ID NO: 20596
  chr6:136980867-136980993
  hypo

SEQ ID NO: 72079 - DNA, 30 bp, Homo sapiens
  chr6:137021183-137021213
  hypo
cctgggtgacagagcgagactctgtcagga

SEQ ID NO: 72080 - DNA, 63 bp, Homo sapiens
  chr6:137144533-137144596
  hypo
ccagttaattgtctcccgtcgcgcgcattggctcagcctgtggttaaagctgctcaggaggct

SEQ ID NO: 72081 - DNA, 31 bp, Homo sapiens; identical to SEQ ID NO: 20598
  chr6:137147698-137147729
  hypo

SEQ ID NO: 72082 - DNA, 2330 bp, Homo sapiens; identical to SEQ ID NO: 43509
  chr6:137241818-137244148
  hypo

SEQ ID NO: 72083 - DNA, 230 bp, Homo sapiens; identical to SEQ ID NO: 43510
  chr6:137244235-137244465
  hypo

SEQ ID NO: 72084 - DNA, 30 bp, Homo sapiens; identical to SEQ ID NO: 5147
  chr6:137421484-137421514
  hypo

SEQ ID NO: 72085 - DNA, 31 bp, Homo sapiens; identical to SEQ ID NO: 20602
  chr6:137491867-137491898
  hypo

SEQ ID NO: 72086 - DNA, 44 bp, Homo sapiens; identical to SEQ ID NO: 20603
  chr6:138055130-138055174
  hypo

SEQ ID NO: 72087 - DNA, 228 bp, Homo sapiens; identical to SEQ ID NO: 43527
  chr6:138428362-138428590
  hypo

SEQ ID NO: 72088 - DNA, 191 bp, Homo sapiens
  chr6:138518766-138518957
  hypo
atgatcatcttatgggaccaccgtggtccgtcattgacggaaacaccattgtgcggcacatgactgtatttgtccatccttattgagtggttgtgagagttgttgggatcaagtgcctgagctctcagcacggtgactggcatgctggaggttttaatgatggcacttccgtgactcaactgccactctcc

SEQ ID NO: 72089 - DNA, 30 bp, Homo sapiens
  chr6:138723160-138723190
  hypo
taacatgtgcttaccgagtcaaaaaagaga

SEQ ID NO: 72090 - DNA, 267 bp, Homo sapiens; identical to SEQ ID NO: 5159
  chr6:138724515-138724782
  hypo

SEQ ID NO: 72091 - DNA, 328 bp, Homo sapiens
  chr6:138745334-138745662
  hypo
cccacagagcaggccgccctcgtccatctcctccctcgccagtccgtccagggaacatccctccgcagcgcccagagccccgcgggctatgctgtccacaggctccacggcttccccttctccctccgagatgacggtcatggggctgctctggatccggttccgcatgctgtacctgctgctggcggcagaaggcggcgttcggctgcggccgtacctggggccggaaaaggacagactccgaggcatcaagccttcgttcttggcccactcctcctgcgcccttctgttcttgcttggggagcagcttgacgggctctcgggggca

SEQ ID NO: 72092 - DNA, 30 bp, Homo sapiens; identical to SEQ ID NO: 20607
  chr6:138785343-138785373
  hypo

SEQ ID NO: 72093 - DNA, 264 bp, Homo sapiens
  chr6:138790361-138790625
  hypo
agccaactaagcagccaatcacgtactatgcggatgcacacaaatgaaaccctcacttcaacctgaagacattcgcacatgagttacgtagagggacctgcaggaagcggtagagaaaacataaggcttatgcgtttaatttccacaccaatttcaggatctttgtcactgacagcagcactaagacttgttaactttatatagttaagaagaacaaggctgagcgcgatgactcacgcctgtaagcctagaactttgggaggc

SEQ ID NO: 72094 - DNA, 42 bp, Homo sapiens
  chr6:138812077-138812119
  hypo
ttctttaatgttaaacaggtcgatgtgtgcaccattgttttt

SEQ ID NO: 72095 - DNA, 162 bp, Homo sapiens
  chr6:138883860-138884022
  hypo
gtgcctatataatcccttcaacgagaactttgtcttttctcggttacgacagcccctagatgacctggttctaacccctaatgctccaatcccttctgcacgccataaccagagcaggttccttccaatacggcttcgaccgagtattcacaatagatattt

SEQ ID NO: 72096 - DNA, 185 bp, Homo sapiens
  chr6:138884362-138884547
  hypo
aaagttttaataatagtgtctcgccacggtaaacattcactaaatattagctattgttaagcttatggataggtcgactgattcagacatgactttcaatttagtattttaatcatttcaggatttgacgtcaacactgagataccaattccttgaaggattacgtaaaggaagtgataggttcc

SEQ ID NO: 72097 - DNA, 155 bp, Homo sapiens
  chr6:138905936-138906091
  hypo
aagtggactgatggagactggcgagcacagacggagacatttgttccagagattctccttcctaatcgtcctcctcccagcccagccacgcaggcatttccctgaaacacaggaagaactacaacagagctgccgcaaaatgcacctgtgtgggt

SEQ ID NO: 72098 - DNA, 30 bp, Homo sapiens
  chr6:138938916-138938946
  hypo
tgagtcccatggaacgatgtgtgtccctct

SEQ ID NO: 72099 - DNA, 28 bp, Homo sapiens
  chr6:139002029-139002057
  hypo
aggcatgagccaccgtgcccagccccct

SEQ ID NO: 72100 - DNA, 484 bp, Homo sapiens; identical to SEQ ID NO: 43534
  chr6:139013360-139013844
  hypo

SEQ ID NO: 72101 - DNA, 30 bp, Homo sapiens
  chr6:139139728-139139758
  hypo
agacagtaaggcggacgttactgagaacct

SEQ ID NO: 72102 - DNA, 31 bp, Homo sapiens; identical to SEQ ID NO: 5162
  chr6:139350568-139350599
  hypo

SEQ ID NO: 72103 - DNA, 30 bp, Homo sapiens; identical to SEQ ID NO: 20611
  chr6:139461634-139461664
  hypo

SEQ ID NO: 72104 - DNA, 380 bp, Homo sapiens
  chr6:139564047-139564427
  hypo
ggcaggggactctctgaatcccgtgaagggatcagagggggttgctctggctccttgagagcggcgtcagcactctcctgagaactgcctatttcgggttgggtttctttggactggtgcggggttgactctggatgatgaattatcatgaaggctgtggccagatttttcacggcggtttggacactattaacctcctctgcgtcaatctcttgatccacagagacgtttgactctggctcttcatcggagttgtgctgactttggtcatccttttcagatatttctgcgtctctgatttttttgtggagttcgtttctctcttcttgtaaagcacggcagaggttctctagcctcccgattttcatcacaaagcactc

SEQ ID NO: 72105 - DNA, 244 bp, Homo sapiens; identical to SEQ ID NO: 5163
  chr6:139694963-139695207
  hypo

SEQ ID NO: 72106 - DNA, 30 bp, Homo sapiens
  chr6:139716824-139716854
  hypo
tggcactttgctgtcggctctaagggacct

SEQ ID NO: 72107 - DNA, 66 bp, Homo sapiens
  chr6:139858704-139858770
  hypo
ttacccttgtccaggccctgtcgtatgaatagttctatttcattcgactcttcctctccagacatg

SEQ ID NO: 72108 - DNA, 34 bp, Homo sapiens; identical to SEQ ID NO: 20613
  chr6:139871209-139871243
  hypo

SEQ ID NO: 72109 - DNA, 34 bp, Homo sapiens
  chr6:139871482-139871516
  hypo
accgagccctgccgctgtctggaaaattttaaca

SEQ ID NO: 72110 - DNA, 31 bp, Homo sapiens
  chr6:140012887-140012918
  hypo
catgagtggctgggtgcggtggctcacccct

SEQ ID NO: 72111 - DNA, 213 bp, Homo sapiens; identical to SEQ ID NO: 20614
  chr6:140300531-140300744
  hypo

SEQ ID NO: 72112 - DNA, 30 bp, Homo sapiens
  chr6:141150325-141150355
  hypo
tgattgtcacgtcaccggactgctcaatga

SEQ ID NO: 72113 - DNA, 28 bp, Homo sapiens
  chr6:141150739-141150767
  hypo
gacacacagcaaggccgggcgcggtggc

SEQ ID NO: 72114 - DNA, 30 bp, Homo sapiens; identical to SEQ ID NO: 5164
  chr6:141490782-141490812
  hypo

SEQ ID NO: 72115 - DNA, 66 bp, Homo sapiens; identical to SEQ ID NO: 20616
  chr6:143031707-143031773
  hypo

SEQ ID NO: 72116 - DNA, 30 bp, Homo sapiens
  chr6:143253197-143253227
  hypo
cttctcagtacttcacgtgtgcctctctca

SEQ ID NO: 72117 - DNA, 31 bp, Homo sapiens; identical to SEQ ID NO: 5167
  chr6:143266116-143266147
  hypo

SEQ ID NO: 72118 - DNA, 30 bp, Homo sapiens; identical to SEQ ID NO: 20618
  chr6:143658588-143658618
  hypo

SEQ ID NO: 72119 - DNA, 30 bp, Homo sapiens
  chr6:143661926-143661956
  hypo
acaaaatctttgaccgtaattatttttaag

SEQ ID NO: 72120 - DNA, 40 bp, Homo sapiens
  chr6:143947370-143947410
  hypo
gtttaaaatttagcacaaaaccggccgggcacggttgctc

SEQ ID NO: 72121 - DNA, 40 bp, Homo sapiens
  chr6:143947649-143947689
  hypo
ggcagcagagcgagactccgtctcaaaaaaaaaaaaaaat

SEQ ID NO: 72122 - DNA, 470 bp, Homo sapiens; identical to SEQ ID NO: 43555
  chr6:143998942-143999412
  hypo

SEQ ID NO: 72123 - DNA, 43 bp, Homo sapiens
  chr6:144067714-144067757
  hypo
tggaggaggtctacagagtcccgccacccctcagagcccagtc

SEQ ID NO: 72124 - DNA, 30 bp, Homo sapiens
  chr6:144179890-144179920
  hypo
aagtagatgttaggcgccttgctgtgtgcc

SEQ ID NO: 72125 - DNA, 251 bp, Homo sapiens
  chr6:144271185-144271436
  hypo
tttcagtgtctggacagagttcgcggtaccaagcaaatacccctcaccatcctgcctcacccacttggaaacgtgaaagctgactcgggcacttttggtcagcgctaatccaaaccaggggacacacaggagtcctcggccagcaccttggcaccacaccttctttgtgacggctgtgattctagcagcacacacaacctctgcaattatgtgtgactttaactaattacctgtcccggctctgcccaaac

SEQ ID NO: 72126 - DNA, 73 bp, Homo sapiens; identical to SEQ ID NO: 20620
  chr6:144330174-144330247
  hypo

SEQ ID NO: 72127 - DNA, 30 bp, Homo sapiens
  chr6:144467325-144467355
  hypo
aggaacggcactagcgtgcaggatgatggc

SEQ ID NO: 72128 - DNA, 80 bp, Homo sapiens
  chr6:144508670-144508750
  hypo
cgcgctgggaaggacgcaccaaagccgggagctctgccctgcagggagttgccccaaccctttccggaactcagtcttta

SEQ ID NO: 72129 - DNA, 174 bp, Homo sapiens
  chr6:144534398-144534572
  hypo
tggacatatttttaaaactatcgcagaatgtatgaagaatatcatggcttaactaagcacatatacacactgaaaactagtttaaatagcgtggaacatttccctgtaagaagtacgttaaatgcagtttcttgaacgtgaagccatttcaacgttacaaaatctgtcctaata

SEQ ID NO: 72130 - DNA, 47 bp, Homo sapiens; identical to SEQ ID NO: 5173
  chr6:144537938-144537985
  hypo

SEQ ID NO: 72131 - DNA, 488 bp, Homo sapiens; identical to SEQ ID NO: 43561
  chr6:144606892-144607380
  hypo

SEQ ID NO: 72132 - DNA, 106 bp, Homo sapiens; identical to SEQ ID NO: 20624
  chr6:144608086-144608192
  hypo

SEQ ID NO: 72133 - DNA, 30 bp, Homo sapiens
  chr6:144973738-144973768
  hypo
caaaaaactttagaccgtagtatcacagta

SEQ ID NO: 72134 - DNA, 30 bp, Homo sapiens; identical to SEQ ID NO: 43562
  chr6:145166138-145166168
  hypo

SEQ ID NO: 72135 - DNA, 32 bp, Homo sapiens; identical to SEQ ID NO: 20625
  chr6:146011351-146011383
  hypo

SEQ ID NO: 72136 - DNA, 780 bp, Homo sapiens; identical to SEQ ID NO: 5176
  chr6:146136027-146136807
  hypo

SEQ ID NO: 72137 - DNA, 458 bp, Homo sapiens; identical to SEQ ID NO: 43567
  chr6:146864476-146864934
  hypo

SEQ ID NO: 72138 - DNA, 31 bp, Homo sapiens
  chr6:147177766-147177797
  hypo
gaaactgtgcggctgccgcccacccaagctc

SEQ ID NO: 72139 - DNA, 70 bp, Homo sapiens
  chr6:147519321-147519391
  hypo
gaagtaatatgatatacgattagtcgctgtctatatataaatatatatataggtgcgaatccaggggtgg

SEQ ID NO: 72140 - DNA, 164 bp, Homo sapiens
  chr6:147728141-147728305
  hypo
ggcgacccaggcggcgccacaggcaacccccaccgggcgtcagatcctgcacgcccgcggggactgggagaggaacctggaggcgctcttcaacgccttcatgaaccccaagatggccaacgtgcaccagaccatgcccatgaggctccggaagctgcccgact

SEQ ID NO: 72141 - DNA, 30 bp, Homo sapiens; identical to SEQ ID NO: 20628
  chr6:148200467-148200497
  hypo

SEQ ID NO: 72142 - DNA, 30 bp, Homo sapiens; identical to SEQ ID NO: 20629
  chr6:148200970-148201000
  hypo

SEQ ID NO: 72143 - DNA, 30 bp, Homo sapiens; identical to SEQ ID NO: 43571
  chr6:148540220-148540250
  hypo

SEQ ID NO: 72144 - DNA, 40 bp, Homo sapiens
  chr6:148648688-148648728
  hypo
gattacaggcgtgagccactgcgcccggccagaaatttct

SEQ ID NO: 72145 - DNA, 31 bp, Homo sapiens
  chr6:148699760-148699791
  hypo
tatcagcgtgagccaccgtgcctggttgata

SEQ ID NO: 72146 - DNA, 73 bp, Homo sapiens
  chr6:148710400-148710473
  hypo
agtgttcctcagaggttgagacgtgcctaaggccacttaaccaataccaggcgctatggagctgggtggaaac

SEQ ID NO: 72147 - DNA, 199 bp, Homo sapiens
  chr6:148819896-148820095
  hypo
gtgctcttgggaacaacgctggggaagttggggataagaggatttccattacttgttcaatgttactgattgattacatgtcaattccttgttaaatcatttgccctagcgccggtccttatttaatggatgggttggggagatacccaggcactattgttattcgtaagtagaatttagactgcgggccatctccaac

SEQ ID NO: 72148 - DNA, 31 bp, Homo sapiens
  chr6:148854572-148854603
  hypo
ctctgaggagggaaggcgttcagagtgccgg

SEQ ID NO: 72149 - DNA, 31 bp, Homo sapiens
  chr6:148857378-148857409
  hypo
aaagcatctattgtcccgaaccacatctgcc

SEQ ID NO: 72150 - DNA, 31 bp, Homo sapiens
  chr6:148865873-148865904
  hypo
ggagtggatctagaaacgctcactgaaaaca

SEQ ID NO: 72151 - DNA, 196 bp, Homo sapiens
  chr6:149177571-149177767
  hypo
gttatatatcaaagtacgcatctactaagtcctattcatcggagacagccacaggtgatagtgtatgggcagaggtgccaccaacctagcatgtcctgcatgggggcttttcccttagtcaataaaggccagtgactaggcggtagctacctcttgaagagatgggactagggttgcggggcgggctttcccacat

SEQ ID NO: 72152 - DNA, 93 bp, Homo sapiens
  chr6:149198423-149198516
  hypo
tatgagtgcggggggtcgtgtatgagtgtgggtatcgtgtacaagtgtggggggtcatgtatgagtgcagagatcgtgtatgagtgggggggt

SEQ ID NO: 72153 - DNA, 33 bp, Homo sapiens
  chr6:149198575-149198608
  hypo
gcgtatgagtggggggatcgtgtatgagtgtgg

SEQ ID NO: 72154 - DNA, 30 bp, Homo sapiens
  chr6:149285948-149285978
  hypo
tttgggacccagagcgttaacagtctttcc

SEQ ID NO: 72155 - DNA, 30 bp, Homo sapiens; identical to SEQ ID NO: 20631
  chr6:149479234-149479264
  hypo

SEQ ID NO: 72156 - DNA, 21 bp, Homo sapiens
  chr6:149574460-149574481
  hypo
aagaatgtagttttggccagg

SEQ ID NO: 72157 - DNA, 30 bp, Homo sapiens
  chr6:149721410-149721440
  hypo
tctccctcatccaccgctgtcacctcctgc

SEQ ID NO: 72158 - DNA, 35 bp, Homo sapiens
  chr6:149772981-149773016
  hypo
ggccaggcttagggagcgggcggtagggagtgggt

SEQ ID NO: 72159 - DNA, 30 bp, Homo sapiens
  chr6:149817119-149817149
  hypo
atgaagccaagactgcgctgcatctaatca

SEQ ID NO: 72160 - DNA, 25 bp, Homo sapiens
  chr6:149851783-149851808
  hypo
gactccatctcggaaaaaaaaaaag

SEQ ID NO: 72161 - DNA, 485 bp, Homo sapiens
  chr6:149915184-149915669
  hypo
caggaggcctacatgccgccacttgtgctgccgccatgtctctagtgatccctgaaaagtcccagcatattttgccgagtagtcaacaccaacattgatgggtggcggaaaatggcctttgccatcactgccgttaagggtgtgggccgaagatatgctcatgtggtgttgaggaaagcagacactgacctcaccaagagggcgggagaactcactgaggatgaggtggaacatgtgatcaccattatgcagaatccacactagtacaagatgccagcctggttcttgaacagacagaaggatgtaaaggatggaaaatatagccaggtcctagccaatggtctggacaacaagctctgtgaagacctggagcgactgaaaaagattcgggcccgtagagggctgcgtcacttctggggccttcgtgtccgaggccagcacaccaagaccacaggctgccgtggccgcatcgtgggtgtgtctaa

SEQ ID NO: 72162 - DNA, 85 bp, Homo sapiens; identical to SEQ ID NO: 20634
  chr6:150081970-150082055
  hypo

SEQ ID NO: 72163 - DNA, 30 bp, Homo sapiens
  chr6:150160453-150160483
  hypo
gatagaagctcctgcggaagaagaggaagc

SEQ ID NO: 72164 - DNA, 123 bp, Homo sapiens
  chr6:150174428-150174551
  hypo
tttttctatttattttatgatcgtggaatttagctataatatgcgcagaagaggctgtgtggagtgttggctggtagcgattttgggtacaaggcagcatacgaggtcccaccaatgtgtaaa

SEQ ID NO: 72165 - DNA, 287 bp, Homo sapiens; identical to SEQ ID NO: 43585
  chr6:150185354-150185641
  hypo

SEQ ID NO: 72166 - DNA, 30 bp, Homo sapiens
  chr6:150231927-150231957
  hypo
gggagccccggggacggtcaccaagtatgc

SEQ ID NO: 72167 - DNA, 100 bp, Homo sapiens
  chr6:150420026-150420126
  hypo
acaactcaatccatgtcggttacaaacctctcttacaatttctccgccttattctcactcgttctcacctttccagccacgttcaagaaatcacccagtc

SEQ ID NO: 72168 - DNA, 40 bp, Homo sapiens
  chr6:150420185-150420225
  hypo
cccaccaagcccaggactgggtacccgggcaagattggca

SEQ ID NO: 72169 - DNA, 36 bp, Homo sapiens
  chr6:150487185-150487221
  hypo
tcacatgccacataccgctcttcttcttcttttttt

SEQ ID NO: 72170 - DNA, 81 bp, Homo sapiens
  chr6:150518679-150518760
  hypo
cattgctgatttccaggctgccgtgggaaggctggtggtgggtatccaggttgctgtagcggggtggagagaaagcacctc

SEQ ID NO: 72171 - DNA, 40 bp, Homo sapiens; identical to SEQ ID NO: 20636
  chr6:150596882-150596922
  hypo

SEQ ID NO: 72172 - DNA, 309 bp, Homo sapiens
  chr6:150654326-150654635
  hypo
tgtgcatgagttgctagtgcacgagttgattgagttgatagtatgcaagttgatagtgtgcacgagttggtattgtgtgcaagttgatagtgtgcacgagttgatagttgcaggttgatagtgtgtgcacgagttaacagtgtgcaagttgatagtgtgtgcatgagttgctagtgcgcgagttgattgagttgatagtgtgcaagttgatagtgtgcacaatttgatattgtgcgcgagttgatagtgtgcacgagttgataatgcgtgcgagttgatagtgtgtgcgaattgatagggtgcatgagt

SEQ ID NO: 72173 - DNA, 31 bp, Homo sapiens
  chr6:150746914-150746945
  hypo
ttgctcacacagccctcgctgctccatgcct

SEQ ID NO: 72174 - DNA, 767 bp, Homo sapiens; identical to SEQ ID NO: 5194
  chr6:150921276-150922043
  hypo

SEQ ID NO: 72175 - DNA, 30 bp, Homo sapiens
  chr6:151152811-151152841
  hypo
ccgtctcctggcagcgtttcctgtgagcaa

SEQ ID NO: 72176 - DNA, 30 bp, Homo sapiens; identical to SEQ ID NO: 20639
  chr6:151244579-151244609
  hypo

SEQ ID NO: 72177 - DNA, 68 bp, Homo sapiens
  chr6:151306908-151306976
  hypo
aggaagcactgggaaatagcacgtcactggtgcctcgtgccatttccgtgcctttccctgtcttgcct

SEQ ID NO: 72178 - DNA, 30 bp, Homo sapiens; identical to SEQ ID NO: 20640
  chr6:151334995-151335025
  hypo

SEQ ID NO: 72179 - DNA, 30 bp, Homo sapiens; identical to SEQ ID NO: 20641
  chr6:151346253-151346283
  hypo

SEQ ID NO: 72180 - DNA, 30 bp, Homo sapiens
  chr6:151430466-151430496
  hypo
gtcaccgcattcagccgattcattttataa

SEQ ID NO: 72181 - DNA, 30 bp, Homo sapiens
  chr6:151430850-151430880
  hypo
tgaaaggaccctgatcgtttaaagccagtt

SEQ ID NO: 72182 - DNA, 35 bp, Homo sapiens
  chr6:151546981-151547016
  hypo
ccacgtgctaggccatcgtggatgagggcggtctt

SEQ ID NO: 72183 - DNA, 35 bp, Homo sapiens
  chr6:151547075-151547110
  hypo
tggccatggcggtggattacgggtgaagctgaatc

SEQ ID NO: 72184 - DNA, 119 bp, Homo sapiens; identical to SEQ ID NO: 43603
  chr6:151561221-151561340
  hypo

SEQ ID NO: 72185 - DNA, 623 bp, Homo sapiens; identical to SEQ ID NO: 5196
  chr6:151561368-151561991
  hypo

SEQ ID NO: 72186 - DNA, 610 bp, Homo sapiens; identical to SEQ ID NO: 43605
  chr6:151562056-151562666
  hypo

SEQ ID NO: 72187 - DNA, 370 bp, Homo sapiens
  chr6:151662636-151663006
  hypo
aggtcgagggctggcgccgggcgcggggaggctgcgtcttttgtgatgttcgcggctggcttcccgggcccaggctttcgcgagctatggcagccggcaggggcgcgctgggcctcacgggcggctgttgggctgcccctgccggcgggctgcgcgcgccatgccctggtggagtaaactctgcagtgagtagcacgtgcacccaagcggcagttcgccccgcagcgatggcggacacggaatcccgagggccaccaactgtcccttaggaccggcccgagatgggtgtgtgtgggttttccagcctccttccttcccgtcccaggcttgggaaagcctctctactggccaaggcgcgcagggacaggtc

SEQ ID NO: 72188 - DNA, 30 bp, Homo sapiens; identical to SEQ ID NO: 20646
  chr6:151671679-151671709
  hypo

SEQ ID NO: 72189 - DNA, 271 bp, Homo sapiens
  chr6:151687249-151687520
  hypo
gtcacttatcatcccggcttcaggcacttccatggcatctttcccgaggtcagctgcattgctacagagagtcagggggacgcgactttctccctgttggctagatgtgaaaggtactcctgtgtggatctggaggtgttcacgtaagctgctccggagagtgaagcgccgtccacacaggtggcaggcatagtactttggaaagctcccattcctcttcatgatgcttggcttgacgtgggctattgtgagggacgcaggctgctcatcg

SEQ ID NO: 72190 - DNA, 31 bp, Homo sapiens; identical to SEQ ID NO: 20647
  chr6:151726417-151726448
  hypo

SEQ ID NO: 72191 - DNA, 39 bp, Homo sapiens
  chr6:151770485-151770524
  hypo
agagtgagattctgtaacgaaaaaaaaaaaaaaaagcta

SEQ ID NO: 72192 - DNA, 30 bp, Homo sapiens; identical to SEQ ID NO: 43609
  chr6:151918840-151918870
  hypo

SEQ ID NO: 72193 - DNA, 30 bp, Homo sapiens; identical to SEQ ID NO: 43610
  chr6:151942178-151942208
  hypo

SEQ ID NO: 72194 - DNA, 30 bp, Homo sapiens; identical to SEQ ID NO: 43611
  chr6:151948350-151948380
  hypo

SEQ ID NO: 72195 - DNA, 30 bp, Homo sapiens; identical to SEQ ID NO: 43612
  chr6:151952316-151952346
  hypo

SEQ ID NO: 72196 - DNA, 30 bp, Homo sapiens; identical to SEQ ID NO: 43613
  chr6:152417445-152417475
  hypo

SEQ ID NO: 72197 - DNA, 30 bp, Homo sapiens; identical to SEQ ID NO: 43614
  chr6:152437000-152437030
  hypo

SEQ ID NO: 72198 - DNA, 755 bp, Homo sapiens; identical to SEQ ID NO: 5200
  chr6:152622775-152623530
  hypo

SEQ ID NO: 72199 - DNA, 18 bp, Homo sapiens
  chr6:152633224-152633242
  hypo
agactttttttaatgaag

SEQ ID NO: 72200 - DNA, 149 bp, Homo sapiens
  chr6:152644580-152644729
  hypo
aaacaaaagaatgaaagtaggtgcttaattacttcaggcaccgatcttgcatggcggtgatttcctgcatgagcggaggctcttccccaggggttggggcggctccatcctggagcatgctcagggtttgctgccgcagcatgcccaag

SEQ ID NO: 72201 - DNA, 30 bp, Homo sapiens; identical to SEQ ID NO: 5201
  chr6:152720395-152720425
  hypo

SEQ ID NO: 72202 - DNA, 254 bp, Homo sapiens; identical to SEQ ID NO: 43617
  chr6:152957526-152957780
  hypo

SEQ ID NO: 72203 - DNA, 689 bp, Homo sapiens; identical to SEQ ID NO: 43618
  chr6:152957815-152958504
  hypo

SEQ ID NO: 72204 - DNA, 31 bp, Homo sapiens; identical to SEQ ID NO: 20652
  chr6:153311586-153311617
  hypo

SEQ ID NO: 72205 - DNA, 40 bp, Homo sapiens
  chr6:153337060-153337100
  hypo
tacaggtgtgagccaccgcgcccagccaagcatatctttt

SEQ ID NO: 72206 - DNA, 81 bp, Homo sapiens
  chr6:153572989-153573070
  hypo
atgagtaacttactgaaggaacgattttttttttgttgttttttgagactctgtcgcccaggctggagtgcagtggcgcca

SEQ ID NO: 72207 - DNA, 20 bp, Homo sapiens
  chr6:153573309-153573329
  hypo
gaatgatttttttttttaaa

SEQ ID NO: 72208 - DNA, 31 bp, Homo sapiens
  chr6:153990668-153990699
  hypo
gactccctgaagcccacgtagaagcccccat

SEQ ID NO: 72209 - DNA, 38 bp, Homo sapiens
  chr6:154709414-154709452
  hypo
agtttatttcacttagcgtaatgtccttaagatttatc

SEQ ID NO: 72210 - DNA, 31 bp, Homo sapiens
  chr6:154727733-154727764
  hypo
aatgatcggaggaatccgctcgttactgaaa

SEQ ID NO: 72211 - DNA, 31 bp, Homo sapiens
  chr6:154739332-154739363
  hypo
ctccaccaggatgcttcgtcctgcatagtag

SEQ ID NO: 72212 - DNA, 137 bp, Homo sapiens
  chr6:154764333-154764470
  hypo
cggctcattcttatcactcaggtgctggcccaaatgtcccctcccctgcaaggcttccctgaccacttaatctagaacaaggtttctcaacctcagccctactgacatttggggccagataacgcttgtggggtggg

SEQ ID NO: 72213 - DNA, 20 bp, Homo sapiens
  chr6:154772650-154772670
  hypo
acactcgtgcacacacgcac

SEQ ID NO: 72214 - DNA, 97 bp, Homo sapiens
  chr6:154785475-154785572
  hypo
aaggaaaaaaaattctactctcggaaacattcacactaacatacaattcacatcgtggatttaagcagcacgttaaagaaagacaaaggcctgggcg

SEQ ID NO: 72215 - DNA, 22 bp, Homo sapiens
  chr6:154788906-154788928
  hypo
ttttgagatggagtctcgctct

SEQ ID NO: 72216 - DNA, 184 bp, Homo sapiens
  chr6:154799039-154799223
  hypo
aaatcccctaacatcactcaccgccaggcaccaggggagccatcacagaagaacgtcctgctctgctggggcttccgtccttatgacggaagagaggcagcgaacacacaaacccagaacagggcaggcggtaagtgcttggaagaaggctaaggcaggcaccggggctgcagaatggcactta

SEQ ID NO: 72217 - DNA, 122 bp, Homo sapiens
  chr6:154806722-154806844
  hypo
agaccaaatctgttcttaatacgaacagcgtgattcacgtcactccaggttactccctgcaaggcgcctctttgacacggtgggcatcattctttctcctcgctgcacaggcaatctaaaag

SEQ ID NO: 72218 - DNA, 161 bp, Homo sapiens
  chr6:154826921-154827082
  hypo
ccgcgcctggccaactacacaattgttgagagcctacccactcgaggctgatcaacagccaaggctaggacagttctgctgggacaaccagtcccacgtcttcctcgtcgaaggcactccccagtggcctttttaaagcagaaaaacgacttgtggtagct

SEQ ID NO: 72219 - DNA, 1469 bp, Homo sapiens; identical to SEQ ID NO: 43626
  chr6:154830546-154832015
  hypo

SEQ ID NO: 72220 - DNA, 176 bp, Homo sapiens
  chr6:154842636-154842812
  hypo
cttcgtggaggtccgcgtggtgaggaattgaggcctcctgctgatggctcatgctaacttgctagccgtgggagtcagctaccttggaagcaatccttcatccccagtcaagcactcagatgaccgcagctctggccaacatcttgactgcaacctgtgaacgaccctgagcagaa

SEQ ID NO: 72221 - DNA, 24 bp, Homo sapiens
  chr6:154843244-154843268
  hypo
cactgcgcccggccctacatgatg

SEQ ID NO: 72222 - DNA, 23 bp, Homo sapiens
  chr6:154863130-154863153
  hypo
ccggctgagcccattctcttaat

SEQ ID NO: 72223 - DNA, 153 bp, Homo sapiens
  chr6:154894707-154894860
  hypo
gtagctgggattacaggcatgtgccatcgtgcccggcctcattagctatttccacacttatgcatgttgttggccattcattgaattagttgatcaaaactttacagtattattttccaactccctaataaactggggcggtacttgataaag

SEQ ID NO: 72224 - DNA, 22 bp, Homo sapiens
  chr6:154922341-154922363
  hypo
aagactccgtctcaaaaaaaaa

SEQ ID NO: 72225 - DNA, 30 bp, Homo sapiens
  chr6:154924326-154924356
  hypo
catcttcaatgtttcgattctattcccata

SEQ ID NO: 72226 - DNA, 40 bp, Homo sapiens
  chr6:154970552-154970592
  hypo
agaagtgaaaaatggcattaccggccgggcgcggtggctc

SEQ ID NO: 72227 - DNA, 39 bp, Homo sapiens
  chr6:154970831-154970870
  hypo
gcgacacagcgacactccgtctaaaaaaaaaaaaaaaaa

SEQ ID NO: 72228 - DNA, 42 bp, Homo sapiens; identical to SEQ ID NO: 20662
  chr6:155077848-155077890
  hypo

SEQ ID NO: 72229 - DNA, 175 bp, Homo sapiens; identical to SEQ ID NO: 20663
  chr6:155281566-155281741
  hypo

SEQ ID NO: 72230 - DNA, 823 bp, Homo sapiens; identical to SEQ ID NO: 43627
  chr6:155316286-155317109
  hypo

SEQ ID NO: 72231 - DNA, 58 bp, Homo sapiens
  chr6:155353324-155353382
  hypo
ttttctcctggtgcatacacacgtcttaagcctgtgcgaacctgcctgcttgtctgtg

SEQ ID NO: 72232 - DNA, 61 bp, Homo sapiens
  chr6:155396835-155396896
  hypo
agataccttatatgcatagcccgacggtaattttatattcgaaagaattttgtgcatgaaa

SEQ ID NO: 72233 - DNA, 759 bp, Homo sapiens; identical to SEQ ID NO: 20665
  chr6:155568744-155569503
  hypo

SEQ ID NO: 72234 - DNA, 189 bp, Homo sapiens
  chr6:155577790-155577979
  hypo
aaatacccacaccccggcttggcagattttgccgacaatctcatcaaagagagtgacatcctgagcgatgaagatgatgaccaccgtcagactgtgaagcagggcagccctactaaagacatcgaaattcagttccagagactgaggatttccgaggacccagacgttcaccccgaggctgagcagcag

SEQ ID NO: 72235 - DNA, 30 bp, Homo sapiens
  chr6:155582911-155582941
  hypo
gcggtgtgggctggcgcatgctgagaatgt

SEQ ID NO: 72236 - DNA, 23 bp, Homo sapiens
  chr6:155596051-155596074
  hypo
ttaaaaataaaatcatttgggcg

SEQ ID NO: 72237 - DNA, 31 bp, Homo sapiens
  chr6:155838704-155838735
  hypo
aaccagctagggctggcgtctcactggcatc

SEQ ID NO: 72238 - DNA, 41 bp, Homo sapiens
  chr6:155991044-155991085
  hypo
ggattacaggcatgagccaccttgcccggccaggtttcctt

SEQ ID NO: 72239 - DNA, 66 bp, Homo sapiens
  chr6:156030250-156030316
  hypo
aaaagcggagacaacgttggaaagaatgaggcctgagaacgagtcagtgccgcctcatccgcgtca

SEQ ID NO: 72240 - DNA, 33 bp, Homo sapiens; identical to SEQ ID NO: 20666
  chr6:156156135-156156168
  hypo

SEQ ID NO: 72241 - DNA, 121 bp, Homo sapiens
  chr6:156199682-156199803
  hypo
gtttttatagtacgatctcgtcatcttttatttatctatccaattgccttttcatatactttccccatctatatatctttgtaagtatctattttgacatgcttttggtttctagaatgat

SEQ ID NO: 72242 - DNA, 131 bp, Homo sapiens
  chr6:156374933-156375064
  hypo
gagacagtttgcagtcgctgtgtcagcataaaaaagagaatcataggtaggacaaggtgaaagggtcaggcgtcagcatggggatttgggttacgccggttccaaaaataatcactcgttcacgtgcttgg

SEQ ID NO: 72243 - DNA, 73 bp, Homo sapiens
  chr6:156710252-156710325
  hypo
gtgggcatagagaggggcctacgtcagaacatactgaaaaatgtttccgtgcgaaactaatgtacatccccaa

SEQ ID NO: 72244 - DNA, 55 bp, Homo sapiens
  chr6:156876716-156876771
  hypo
cacatgaggcactgggcacatcgactcacctggcgctgactcccacactctttcc

SEQ ID NO: 72245 - DNA, 28 bp, Homo sapiens
  chr6:156909896-156909924
  hypo
ttataagatgaatgaatcttacggcagg

SEQ ID NO: 72246 - DNA, 30 bp, Homo sapiens; identical to SEQ ID NO: 20668
  chr6:156952430-156952460
  hypo

SEQ ID NO: 72247 - DNA, 22 bp, Homo sapiens
  chr6:157027562-157027584
  hypo
cgagactctgtctcaaaaaaaa

SEQ ID NO: 72248 - DNA, 22 bp, Homo sapiens
  chr6:157040391-157040413
  hypo
tttttttttttttttccgagac

SEQ ID NO: 72249 - DNA, 82 bp, Homo sapiens
  chr6:157159617-157159699
  hypo
agcctgagctgccaacgatagcgagagcgtacctgaaagcaagagctcttaaaacgctctaagtcaccgaagcctgtcggtg

SEQ ID NO: 72250 - DNA, 30 bp, Homo sapiens
  chr6:157191248-157191278
  hypo
tccagttctagctccgaaacaccctggatt

SEQ ID NO: 72251 - DNA, 87 bp, Homo sapiens; identical to SEQ ID NO: 20670
  chr6:157193702-157193789
  hypo

SEQ ID NO: 72252 - DNA, 30 bp, Homo sapiens
  chr6:157255750-157255780
  hypo
cttaataacgatttacgctgttatgtgggt

SEQ ID NO: 72253 - DNA, 121 bp, Homo sapiens
  chr6:157283776-157283897
  hypo
cggctaatttttttgtatttttagtagagatggatcttcccatgttgccagtctgctcttaaactcccacgctcaagagatccgcccgccttggcttttcaaagtgtggggattacaggtg

SEQ ID NO: 72254 - DNA, 31 bp, Homo sapiens; identical to SEQ ID NO: 20671
  chr6:157319352-157319383
  hypo

SEQ ID NO: 72255 - DNA, 167 bp, Homo sapiens
  chr6:157336126-157336293
  hypo
gagcagctggctaatctgactcgagggcatcagactgggaaagacgagatgacatttgatgccacgtgtcttttaatccagcatttttcacacaatgccctgcacgtcgtagctactgagaaaatatttggggagtaagtttgaacggaactgtgacttgaagaata

SEQ ID NO: 72256 - DNA, 228 bp, Homo sapiens
  chr6:157351859-157352087
  hypo
tatgttaacatcacaccgccttgaaattgtgtcttagagtactaagtttatcaaatgctttttgattgcatagatgtatttttcattgttaccaatatttattgggtccctgtatagagacaaggttttagttcatttccaatacattcagaggacggccgctgtactcagcagcacgaggctaccgtgcgtgttctttccactgctggctaacggtgcactgagcga

SEQ ID NO: 72257 - DNA, 41 bp, Homo sapiens
  chr6:157390993-157391034
  hypo
ggtaactacatgaagcggcattccagcgtcctagcctatac

SEQ ID NO: 72258 - DNA, 177 bp, Homo sapiens; identical to SEQ ID NO: 20673
  chr6:157430365-157430542
  hypo

SEQ ID NO: 72259 - DNA, 174 bp, Homo sapiens
  chr6:157431599-157431773
  hypo
ttacaggtagtcagatgcctccgcagccacccgggagccagtcagaatccagttcccatcccgccttgagccagtcaccaatgccacaggaaagaggttcgtctccagttcatgtcttacatgcctatagtgctttcaggcgataaggcgtacgtgagtttgcttacctatgca

SEQ ID NO: 72260 - DNA, 31 bp, Homo sapiens; identical to SEQ ID NO: 5214
  chr6:157446395-157446426
  hypo

SEQ ID NO: 72261 - DNA, 30 bp, Homo sapiens
  chr6:157469065-157469095
  hypo
cctttgaccctgcccgccagctctcctgct

SEQ ID NO: 72262 - DNA, 167 bp, Homo sapiens
  chr6:157472012-157472179
  hypo
ctgcgggacctgggcgttttctctgaaactgttaacgatcgtgccgtctggccgcgaaaggaacacccaaaccaagaaagcgaaacacctaacagaaaatccatctccaagggggttgtccttctgtccatttttgttggtgtgtttgtttcgttttcctttcgtat

SEQ ID NO: 72263 - DNA, 205 bp, Homo sapiens; identical to SEQ ID NO: 20675
  chr6:157477822-157478027
  hypo

SEQ ID NO: 72264 - DNA, 269 bp, Homo sapiens; identical to SEQ ID NO: 20676
  chr6:157478285-157478554
  hypo

SEQ ID NO: 72265 - DNA, 31 bp, Homo sapiens
  chr6:157502544-157502575
  hypo
ttcgtcatgtatacagcgggccagactagat

SEQ ID NO: 72266 - DNA, 313 bp, Homo sapiens
  chr6:157505816-157506129
  hypo
aatcaaaacaggctttcgaattctaagccatatacgtttattgcttatacaagtattcaaaaagattccatctacctctacacaaaataaagatcccccagtggccagtttgaatacatgtgcacttctaggaaatgccaccctacaggttcgacagctcgagctcccccgccctctttcggaaatcctcagatttgaactttagtaaaatgaagcctgggcttcgtttctaatgtcccctacccagcaagttctcacttctagggaatttaacaagctgtcgtggtaaggatccacacggccttgttttgga

SEQ ID NO: 72267 - DNA, 30 bp, Homo sapiens; identical to SEQ ID NO: 20678
  chr6:157527549-157527579
  hypo

SEQ ID NO: 72268 - DNA, 67 bp, Homo sapiens; identical to SEQ ID NO: 20679
  chr6:157548326-157548393
  hypo

SEQ ID NO: 72269 - DNA, 30 bp, Homo sapiens; identical to SEQ ID NO: 20680
  chr6:157549833-157549863
  hypo

SEQ ID NO: 72270 - DNA, 30 bp, Homo sapiens; identical to SEQ ID NO: 20681
  chr6:157550094-157550124
  hypo

SEQ ID NO: 72271 - DNA, 31 bp, Homo sapiens
  chr6:157638361-157638392
  hypo
agcacagggcagcagccggcttggcccgcag

SEQ ID NO: 72272 - DNA, 30 bp, Homo sapiens
  chr6:157721206-157721236
  hypo
ccaggacgtcgcaacgccaagagagccatt

SEQ ID NO: 72273 - DNA, 60 bp, Homo sapiens; identical to SEQ ID NO: 43640
  chr6:157802883-157802943
  hypo

SEQ ID NO: 72274 - DNA, 364 bp, Homo sapiens
  chr6:157892373-157892737
  hypo
gggcaggcctgcagcgttcacattttcccgatgatttctgtgtgggctggactcccccgcccgccgacaccagacacacctgctgccccctccccatccagaacccccgaggaaaggaaatttgcactgcacagcgggtcttcacagggcaattccagcatctgtgcaaagcggtttcgcgtcggttaatgctgccttcgatgagaaggaagacgttatcacaggagggagctagctcaaattaaagagttcgagggcccgaaatagctgggaaaatggctgcctttgtaagaaaaccaaacctactttgctgagcggactggttataaaacatccagggagagaagacggtcttggaagccgg

SEQ ID NO: 72275 - DNA, 30 bp, Homo sapiens; identical to SEQ ID NO: 20683
  chr6:157963687-157963717
  hypo

SEQ ID NO: 72276 - DNA, 465 bp, Homo sapiens
  chr6:158017915-158018380
  hypo
gattacaacaagaagcgtcttcacaaagtagtaggaatcgccttgtttctctgtaatctggaaggatttagatgatctgccgtgatcgacgtgaatgtattttctgtctctctctgactttgtccctgctgcctgtttccgtctgtctctttctctgaatccttgactgtctctctggttctctgtgagtcttgccatcgcgttccttctgcacacgtggaacgcagcatttcgggttgtttatttatccaggcgggctttgaggttacggaatatttttaaacaaccaacagctggggccagggagccacctcttctctctcggatcctcatatccctcaaatcattaaagcgagagaaactgaaggagctgaagaggcaaagcatgggcctgtgagaccctctcgggctcactatgtatgttttaaagccccaggtgcatgctgccctcgtttttctgatggg

SEQ ID NO: 72277 - DNA, 247 bp, Homo sapiens
  chr6:158024185-158024432
  hypo
aatccagccatctctgtggaacgctttgtgaagcaagtgtttacaatgaatccagaagcacttatggagtggctgctatgtgcacgtagagggcaaagaaatttcacacaggttcgttccctgcccttaacgagttttccacgtagttatgaaaagataactaacatcataaagaagtacttgacaaggtcgtagcactcaggatggtcattttagaccaattcccgtaaaggggagaaatgagaga

SEQ ID NO: 72278 - DNA, 30 bp, Homo sapiens
  chr6:158039205-158039235
  hypo
tgggacaggagtggcgtggacttactgagg

SEQ ID NO: 72279 - DNA, 30 bp, Homo sapiens
  chr6:158057191-158057221
  hypo
acacacatccctcatcgcacaggtcacttg

SEQ ID NO: 72280 - DNA, 30 bp, Homo sapiens
  chr6:158057471-158057501
  hypo
gctcgcgggataccccgaaggcccttgctg

SEQ ID NO: 72281 - DNA, 91 bp, Homo sapiens
  chr6:158057892-158057983
  hypo
acagagacatttcttcggtgtgccactgacgcccctcccctcatcgatgctgtggttgcctaaaggttctgtgttccgacagggtgctttc

SEQ ID NO: 72282 - DNA, 186 bp, Homo sapiens
  chr6:158070270-158070456
  hypo
gctccagacttgaagcggtgtggggcagcactgaaggggctccgggggaggcttttattgggtgaaggcagagcaagacaaataagacatttgctttgttaaagtggggccgtagctttccttgggtcattctggagcttgggcagggacataggccactcataggcttccgggctggccccaggc

SEQ ID NO: 72283 - DNA, 653 bp, Homo sapiens
  chr6:158093622-158094275
  hypo
ctgaggtgtcactaacggtttctctcttctcgcaccccaccctccccgcccgtgccctgtccccatccctgtccctccccacctctgccccctcctctccaccttctctttgctggcgcctcccgctctccagtgcgaccaagaccagtgcattcagagcaccaaattcgttttgcaggctgcagccacgcccctgctgcagagcgagcccagcctcaccagcgacgagctgcacctgcccgggaagcctggcctgggcacgccctgcgccagcctcacactgggcccgcccacaccgcccgcctccatgcccaacctcgccgaggccacgctcgcggacgtgatgccccggaaagatgagcacatgggccaccagttcctgacgcccgatgaggcgccctcgccccccaggctactggcggcgggcagccccctggcgcacagccgcaccatgcacgtgctgggcctggccagccaggactccctgcatgaggactctgtgcgcggcctggtgaagctcagctccgtgtgacccacatggccccaggccgggggacaccagaggctcctccatgggcagcaggagtgagcggaggggtgtgtcccacagcgactttcccagccaatgccacggtggagatgacagccccagg

SEQ ID NO: 72284 - DNA, 30 bp, Homo sapiens
  chr6:158094810-158094840
  hypo
ggcggctggggttccgtcgtgtcgggtgtc

SEQ ID NO: 72285 - DNA, 108 bp, Homo sapiens
  chr6:158116452-158116560
  hypo
ggaaagtcagggtggactggccgtgggcgacagagtaacagtccactgcacttcccttgtgcacagcggccttggtatgatgctagcgagtagagaagtcaggcaata

SEQ ID NO: 72286 - DNA, 31 bp, Homo sapiens; identical to SEQ ID NO: 20687
  chr6:158140715-158140746
  hypo

SEQ ID NO: 72287 - DNA, 30 bp, Homo sapiens; identical to SEQ ID NO: 20688
  chr6:158239844-158239874
  hypo

SEQ ID NO: 72288 - DNA, 425 bp, Homo sapiens; identical to SEQ ID NO: 43641
  chr6:158244129-158244554
  hypo

SEQ ID NO: 72289 - DNA, 30 bp, Homo sapiens
  chr6:158270526-158270556
  hypo
ccttggcgctgcaggcggaagatgaattgg

SEQ ID NO: 72290 - DNA, 303 bp, Homo sapiens
  chr6:158296041-158296344
  hypo
cgtaatctatgaaaataattgcggctctttctcctattcagattttacccagtgatggaaaagatcaattttcttgtggaaattcagtggctgaccaagccttccttgattctctctcagccagcacagctcaggccagttcgtcggctgccagcaacaatcaccaggtacgtctcacttcctccttctggatgtggctggctttacggaaaacagagcgtatttgtgaaggcttgtgatgcattatagctattgccattccccaaaagcaaaaacaaagtcgcttttaggttgttctgtggc

SEQ ID NO: 72291 - DNA, 88 bp, Homo sapiens
  chr6:158321402-158321490
  hypo
atcagatacatggctcgcaaatattttctcccagcctattgcgggatctggccagcagcccgcaatgcaacggggttctctttgtgtt

SEQ ID NO: 72292 - DNA, 200 bp, Homo sapiens; identical to SEQ ID NO: 20690
  chr6:158328732-158328932
  hypo

SEQ ID NO: 72293 - DNA, 30 bp, Homo sapiens
  chr6:158334664-158334694
  hypo
ctccccaggttccctcgtgctgcccatccc

SEQ ID NO: 72294 - DNA, 30 bp, Homo sapiens
  chr6:158365115-158365145
  hypo
ggaccttggcacaccgtcagctcgaactca

SEQ ID NO: 72295 - DNA, 427 bp, Homo sapiens; identical to SEQ ID NO: 5218
  chr6:158402207-158402634
  hypo

SEQ ID NO: 72296 - DNA, 30 bp, Homo sapiens
  chr6:158464281-158464311
  hypo
tacccagcccaggacgttcggtttcattga

SEQ ID NO: 72297 - DNA, 184 bp, Homo sapiens; identical to SEQ ID NO: 20692
  chr6:158488743-158488927
  hypo

SEQ ID NO: 72298 - DNA, 30 bp, Homo sapiens
  chr6:158492679-158492709
  hypo
gggaacaagggcgccgtcggcatccgcttc

SEQ ID NO: 72299 - DNA, 38 bp, Homo sapiens
  chr6:158563785-158563823
  hypo
catgagccactgcgcccggccctcattctttaagataa

SEQ ID NO: 72300 - DNA, 36 bp, Homo sapiens; identical to SEQ ID NO: 20693
  chr6:158593345-158593381
  hypo

SEQ ID NO: 72301 - DNA, 42 bp, Homo sapiens; identical to SEQ ID NO: 20694
  chr6:158734070-158734112
  hypo

SEQ ID NO: 72302 - DNA, 64 bp, Homo sapiens
  chr6:158794480-158794544
  hypo
gaacagttagagtgtggcagtcgaatcagtcatcgtcgtcatcgtggatggctttgcacttgga

SEQ ID NO: 72303 - DNA, 158 bp, Homo sapiens
  chr6:158806006-158806164
  hypo
tctatctcccaatcccaaagtcgggcttttaattaagttaagagttagtcgactaaggcaaatgacctgatgcttttatctggaaagaagttatcctcgcccacgtcagtgtgttgatgccgtgaatgtaggttcccgttactgagtataccattcag

SEQ ID NO: 72304 - DNA, 70 bp, Homo sapiens
  chr6:158873314-158873384
  hypo
acacaccccaaacctgcagaccgggcctgtgtgtgcttgcctcaaggccggtcttgtacactctgtgctt

SEQ ID NO: 72305 - DNA, 30 bp, Homo sapiens
  chr6:158902182-158902212
  hypo
gacccggaggtgggcggcccgtgctacacg

SEQ ID NO: 72306 - DNA, 56 bp, Homo sapiens
  chr6:158925049-158925105
  hypo
agaaggaggacgggcggctgggcagccaaggcttcgtgtacgtgatggccaacaag

SEQ ID NO: 72307 - DNA, 1228 bp, Homo sapiens; identical to SEQ ID NO: 43647
  chr6:158957206-158958434
  hypo

SEQ ID NO: 72308 - DNA, 110 bp, Homo sapiens
  chr6:158982707-158982817
  hypo
cagttgaccaaggaaaggtcccgaggaggacaagcaaaacgcagcttgaattttgtgcgagtttgaggcctccccctgcagctgtaagcgctttgtgcctcaggctctgt

SEQ ID NO: 72309 - DNA, 449 bp, Homo sapiens; identical to SEQ ID NO: 20697
  chr6:159045070-159045519
  hypo

SEQ ID NO: 72310 - DNA, 399 bp, Homo sapiens
  chr6:159049611-159050010
  hypo
acaggtcagctcctcgcgccctgttctccggaggcctcgtctctgctgagaggtgtctcagttggccccgctgcagccgtgggaaggggcagcctgtccctcctctgtacacaggaagcttggctcagtagttgccccaggtcaggtttcgggtggcagagcccggctccaaacccagagaggctggcgctctggagcgtgcccacgccacgctgctttccacccagaggggcaggtgctgtgaggtaaatgaggtgcggttgcctctccacaccgcggggctccaagcccctactgccctccagcagagcactgtggggtggctgagggctgccgtgagcctcctgtctccccccgggatatctctctcatcatcacggagatgtatccaagggtatg

SEQ ID NO: 72311 - DNA, 30 bp, Homo sapiens; identical to SEQ ID NO: 20699
  chr6:159067669-159067699
  hypo

SEQ ID NO: 72312 - DNA, 217 bp, Homo sapiens
  chr6:159076941-159077158
  hypo
gggcagaaggaagagtggggccgatgcgtggaaatgcagagcgcatgtggtcagggaatggtcttgaatgaggtcagtatgggagtggcgagcattctgtgggaactgaggatggaggagtcaggagaactggatcgggaggtcacgactgggatgcctgtgctttagaatgtgtttacgggaagggaaaaccagcgtgacttcactggagagtgga

SEQ ID NO: 72313 - DNA, 216 bp, Homo sapiens; identical to SEQ ID NO: 20700
  chr6:159135763-159135979
  hypo

SEQ ID NO: 72314 - DNA, 36 bp, Homo sapiens
  chr6:159151891-159151927
  hypo
aaaagccgccagggggcgggtcggggtggggcggtg

SEQ ID NO: 72315 - DNA, 31 bp, Homo sapiens; identical to SEQ ID NO: 20701
  chr6:159177015-159177046
  hypo

SEQ ID NO: 72316 - DNA, 30 bp, Homo sapiens
  chr6:159185655-159185685
  hypo
caggttgcagcaggcgtgaggcactgtgcg

SEQ ID NO: 72317 - DNA, 30 bp, Homo sapiens
  chr6:159186795-159186825
  hypo
ttatttcatgtctgcggcatggaatccacc

SEQ ID NO: 72318 - DNA, 30 bp, Homo sapiens
  chr6:159187875-159187905
  hypo
agacacaagcgtggcggggctggcagcgcc

SEQ ID NO: 72319 - DNA, 30 bp, Homo sapiens
  chr6:159188373-159188403
  hypo
actagacagctccgcgctgtagcccgtggg

SEQ ID NO: 72320 - DNA, 31 bp, Homo sapiens; identical to SEQ ID NO: 20702
  chr6:159190328-159190359
  hypo

SEQ ID NO: 72321 - DNA, 59 bp, Homo sapiens
  chr6:159203057-159203116
  hypo
tgggattccaggtgtgagccgctgtgcctggcttttccgtgcttctttaccaatgctgc

SEQ ID NO: 72322 - DNA, 126 bp, Homo sapiens
  chr6:159205610-159205736
  hypo
acaggaaaagacatgctggagcgcacggagatggcaagatcccaacagcagggcacagcactcacttgagcatcccacggtgttccgcatgccacacctggatccggtcctcccactggtccctgg

SEQ ID NO: 72323 - DNA, 235 bp, Homo sapiens
  chr6:159206077-159206312
  hypo
ggaggagctgagcagtcaggtcgagaagtttgctatgccatgtcccacaggacacggccacgctttagtttccatgaggaatggcagctcgccttccctggctatgtttcaggtcgctggtcagtgacttaatgactagcatgaaggagcacttgacactggcgaagtccttgtgtttttaaactgtgcttctaaggcaatcacttctccctgccgaggacggcatgactgctcc

SEQ ID NO: 72324 - DNA, 54 bp, Homo sapiens
  chr6:159212097-159212151
  hypo
aacataattagtctccccagccgctcccaccccgtcccaataacatttaagact

SEQ ID NO: 72325 - DNA, 36 bp, Homo sapiens
  chr6:159213571-159213607
  hypo
ttggctgggcacagtggctcacgtaatcccagcact

SEQ ID NO: 72326 - DNA, 38 bp, Homo sapiens
  chr6:159223563-159223601
  hypo
tgttttgtttgttttttgaggcggagtttcactcttgt

SEQ ID NO: 72327 - DNA, 38 bp, Homo sapiens
  chr6:159223840-159223878
  hypo
tgtgagccaccgcgcccggccaggtttttgcttattta

SEQ ID NO: 72328 - DNA, 33 bp, Homo sapiens
  chr6:159228048-159228081
  hypo
ttaaaaacataacaggccaggcgcagtggctca

SEQ ID NO: 72329 - DNA, 340 bp, Homo sapiens; identical to SEQ ID NO: 43650
  chr6:159290823-159291163
  hypo

SEQ ID NO: 72330 - DNA, 64 bp, Homo sapiens; identical to SEQ ID NO: 20704
  chr6:159299253-159299317
  hypo

SEQ ID NO: 72331 - DNA, 120 bp, Homo sapiens
  chr6:159345137-159345257
  hypo
tatttatgtctccaaacgtatctaaacagaaaaggtaaaatacaaatatggtaatataatcttaagggaccgcatcaagaaatgactggcaaagttcacgtaaaaatgcccttggcaatt

SEQ ID NO: 72332 - DNA, 121 bp, Homo sapiens; identical to SEQ ID NO: 20705
  chr6:159419498-159419619
  hypo

SEQ ID NO: 72333 - DNA, 146 bp, Homo sapiens
  chr6:159423618-159423764
  hypo
tcaaggaagcagccaattcctcgttctaaggcaggaagtcgtgttggggatggcagtaagagtgagtggagcagagtgagcacaaggaggagcattcggagatgaagtcagaggctgggccgtgcgccctgttgtaggtcagtgaa

SEQ ID NO: 72334 - DNA, 30 bp, Homo sapiens
  chr6:159423989-159424019
  hypo
gcagtgagtcagtgccgaggccatgtcggg

SEQ ID NO: 72335 - DNA, 30 bp, Homo sapiens
  chr6:159456892-159456922
  hypo
tcagcctcaaagaccggctggctacatcgt

SEQ ID NO: 72336 - DNA, 30 bp, Homo sapiens
  chr6:159550143-159550173
  hypo
cgctgcactggccccgcacgcgcgtctcag

SEQ ID NO: 72337 - DNA, 346 bp, Homo sapiens; identical to SEQ ID NO: 43655
  chr6:159589740-159590086
  hypo

SEQ ID NO: 72338 - DNA, 607 bp, Homo sapiens; identical to SEQ ID NO: 43656
  chr6:159590154-159590761
  hypo

SEQ ID NO: 72339 - DNA, 368 bp, Homo sapiens; identical to SEQ ID NO: 5225
  chr6:159590971-159591339
  hypo

SEQ ID NO: 72340 - DNA, 254 bp, Homo sapiens
  chr6:160220482-160220736
  hypo
aaaggaaaaaataaagtataacggtaatgttttctccgctaaccttaaagattgatttgagcacctcactttgaggaccatagttccaaaacgctgttcaagtagaagcctagaattcaagggaggacactgtaaggaagaccatggactagttgcactggaaacagtaacaaaagtaaaaattaagctcacatgtatgtgatgatgtaggtagggatttccgcaaggagtgagtgcacgagataatccctggg

SEQ ID NO: 72341 - DNA, 181 bp, Homo sapiens
  chr6:160328045-160328226
  hypo
gcaggaacgcctcagtcgggaatgcacatcggcaaatccccatcgtgcactgggtcattatgagcatctccccagtggggtttgttgagaatgggattctcctctggttcctgtgcttccggatgagaagaaatcccttcactgtctacatcacccacctgtctatcgcagacatctcact

SEQ ID NO: 72342 - DNA, 30 bp, Homo sapiens
  chr6:160388909-160388939
  hypo
atatattaatagcacggtggttatgtcaca

SEQ ID NO: 72343 - DNA, 471 bp, Homo sapiens; identical to SEQ ID NO: 43664
  chr6:160389586-160390057
  hypo

SEQ ID NO: 72344 - DNA, 30 bp, Homo sapiens
  chr6:160393034-160393064
  hypo
aacttttcttggggcgggggaggttatcag

SEQ ID NO: 72345 - DNA, 31 bp, Homo sapiens; identical to SEQ ID NO: 20711
  chr6:160425815-160425846
  hypo

SEQ ID NO: 72346 - DNA, 58 bp, Homo sapiens
  chr6:160452660-160452718
  hypo
gtgtcagactgcactgagccacgtgggcagaagcatcgattatgagtcaaacagaaga

SEQ ID NO: 72347 - DNA, 57 bp, Homo sapiens
  chr6:160455507-160455564
  hypo
gtttcagcggatgagcgtcataaactttgagtgcaataaaaccgcaggtaagtgtgc

SEQ ID NO: 72348 - DNA, 264 bp, Homo sapiens
  chr6:160459514-160459778
  hypo
accagctcaaaagtactaggacgatttgtagtagtatttaattatttgtaaacttacacgtttttcttcacgtttgcagaatacaaatctttgtcagtagtgaaatgtgaatctagtaggattaaactgtgtgtaaaccttgtgggcgggatgaagagaggcagaggcgcgtcactgttgctgttagttgaccggcaagctcaggggcccagctatggtagctgcctctgggttgtcagctgcgcccaggaggtgaaggtggaa

SEQ ID NO: 72349 - DNA, 43 bp, Homo sapiens
  chr6:160463627-160463670
  hypo
tcaccagtcttgtgagttcagcggccacctgtggtaccttgct

SEQ ID NO: 72350 - DNA, 138 bp, Homo sapiens; identical to SEQ ID NO: 20713
  chr6:160475954-160476092
  hypo

SEQ ID NO: 72351 - DNA, 30 bp, Homo sapiens
  chr6:160481513-160481543
  hypo
gtgcttgtgggctgcgccatgaatactgtt

SEQ ID NO: 72352 - DNA, 163 bp, Homo sapiens
  chr6:160491753-160491916
  hypo
gagttgggcattaactcgggcaagaccagctcgctgggtgtcagggtggctcgccccatgctctccagcggtgggcagcagtggtaggggagcttgggatggggggctccaggagcttcaggcctgccctcttgcctggagcggcagggaagtttcctcttgg

SEQ ID NO: 72353 - DNA, 558 bp, Homo sapiens
  chr6:160511921-160512479
  hypo
tggtgctgagctcatcgccgagaaggagcaggtgctccgtgccctggtgctgagcgcatcgccgagaaggagcgggtgctctgtgccctggtgctgagcgcatcgctgagaaggagcgggtgctctgtgccctggtgctgagcgcatcgctgagaaggagcgggtgctctgtgccctggtgcggctgagaaggagcgggtgctccgtgccctggtgctgagcacatcgccgagaaggagcaggtgctccgtgccctggtgctgagcacatcgccgagaaggagcaggtgctccgtgccctggtgctgagcgcatcgccgagaaggagcaggtgctccgtgccctggtgctgagcgcatcgccgagaaggagcaggtgctccgtgccctggtgctgagcgcatcgccgagaaggagcaggtgctccgtgccctggtgctgagcgcatcgccgagaaggagcaggtgctctgtgccctggtgctgagcgcatcgccgagaaggagcaggtgctccgtgccctggtgctgagtgcatctccacgacggcagcacctgatgg

SEQ ID NO: 72354 - DNA, 30 bp, Homo sapiens; identical to SEQ ID NO: 20716
  chr6:160555558-160555588
  hypo

SEQ ID NO: 72355 - DNA, 469 bp, Homo sapiens; identical to SEQ ID NO: 20717
  chr6:160679356-160679825
  hypo

SEQ ID NO: 72356 - DNA, 196 bp, Homo sapiens
  chr6:160680140-160680336
  hypo
atcacagcccagtaatcttcccgtagtgccccgagcagccaggaacttaatatactcctatctcatgcgcaccgccagcttttcttcaaggccctatggagaaaacacacgtgtttggccacaaggcccagcgtgatgtgaaccaggatccgtgtcagaaccctggtccagattcgaagtgggttgcaagcctgac

SEQ ID NO: 72357 - DNA, 30 bp, Homo sapiens; identical to SEQ ID NO: 43667
  chr6:160840236-160840266
  hypo

SEQ ID NO: 72358 - DNA, 99 bp, Homo sapiens
  chr6:161430267-161430366
  hypo
ggcctcccaaagtgctgggattacaggtgtgagtcaccgtggccgcctgaaccatttttaagggtacagttcagtagcgttgttaagtacatttattta

SEQ ID NO: 72359 - DNA, 169 bp, Homo sapiens; identical to SEQ ID NO: 20718
  chr6:161522587-161522756
  hypo

SEQ ID NO: 72360 - DNA, 30 bp, Homo sapiens; identical to SEQ ID NO: 20719
  chr6:161538160-161538190
  hypo

SEQ ID NO: 72361 - DNA, 40 bp, Homo sapiens
  chr6:161558060-161558100
  hypo
aggagcctggaagacgcaagagctcgagtatcgagtgccc

SEQ ID NO: 72362 - DNA, 31 bp, Homo sapiens
  chr6:161559687-161559718
  hypo
ccatttggaagaagcacgtgatctctgtgtg

SEQ ID NO: 72363 - DNA, 48 bp, Homo sapiens
  chr6:161560590-161560638
  hypo
gggggcaccatgggcgtctctgggaaggtgcccgtcctgtagtactcc

SEQ ID NO: 72364 - DNA, 30 bp, Homo sapiens
  chr6:161563543-161563573
  hypo
atcctattgagaggcggcagatccccggac

SEQ ID NO: 72365 - DNA, 114 bp, Homo sapiens
  chr6:161572341-161572455
  hypo
gcgtacagggcctggcgtgccagacgcgcccgagaccggtgttggctgttcttggagacagccttgttaactctccgtgatgaacagcatagagctggacggccttgcgaggca

SEQ ID NO: 72366 - DNA, 31 bp, Homo sapiens; identical to SEQ ID NO: 20720
  chr6:161577268-161577299
  hypo

SEQ ID NO: 72367 - DNA, 31 bp, Homo sapiens; identical to SEQ ID NO: 20721
  chr6:161586464-161586495
  hypo

SEQ ID NO: 72368 - DNA, 277 bp, Homo sapiens
  chr6:161637993-161638270
  hypo
actttcccctcacacgtggctctgattcacctttgctcacctgctgatgcggttctcatgttacacgtgttcttcaccttcaggctttcctgtccttgtcaatttccgtttaggtgttttatcattagggcctgactccgcgtttcagcaatgaaagatgagcagacagtggagaaggcaagccaggggaggggcggagtgagcacaggcgtggggacgcgaaaggacaggggaacaccggagaactcggtcatccgcttgggagccagggacatgc

SEQ ID NO: 72369 - DNA, 30 bp, Homo sapiens
  chr6:161656388-161656418
  hypo
aggtgagaagtgctcgagttgttaaataat

SEQ ID NO: 72370 - DNA, 30 bp, Homo sapiens; identical to SEQ ID NO: 20723
  chr6:161687270-161687300
  hypo

SEQ ID NO: 72371 - DNA, 31 bp, Homo sapiens
  chr6:161767101-161767132
  hypo
taaaaaaactgaacatcgatattctccacac

SEQ ID NO: 72372 - DNA, 30 bp, Homo sapiens
  chr6:161769534-161769564
  hypo
cagggcctctgagacgacgggactgtcctc

SEQ ID NO: 72373 - DNA, 30 bp, Homo sapiens
  chr6:162294471-162294501
  hypo
ccagcttttcctgacgggaactaaatacaa

SEQ ID NO: 72374 - DNA, 30 bp, Homo sapiens; identical to SEQ ID NO: 20724
  chr6:162340097-162340127
  hypo

SEQ ID NO: 72375 - DNA, 30 bp, Homo sapiens; identical to SEQ ID NO: 20725
  chr6:162792072-162792102
  hypo

SEQ ID NO: 72376 - DNA, 42 bp, Homo sapiens
  chr6:162938562-162938604
  hypo
caggcgtgagcgactgcgcccggccaatatatttttttaatt

SEQ ID NO: 72377 - DNA, 38 bp, Homo sapiens
  chr6:163009854-163009892
  hypo
ttacaggcgtgagccaccgcgcccggcccagagctcat

SEQ ID NO: 72378 - DNA, 291 bp, Homo sapiens
  chr6:163321043-163321334
  hypo
gggtctggctgtggggaagggcgggggagagagagccagttccttatggtcagaccggaacatcgtaatgctccctcgagaactgatgctctggtatcagagcatggtcaggccggaacatcgtaatgcaccctcgagaactgatgcgctggtatccagggaggatcggtaaaggaaccaacacgcacatatgcactcacaatgctcacggatgtcacgcagcaggacctggcagggctggcctctgcttacagaggccgacgttccctcgccctgagacatcaattttac

SEQ ID NO: 72379 - DNA, 59 bp, Homo sapiens
  chr6:163558513-163558572
  hypo
ctccatccattcaaagaggagcgccaggatttcccaagcgacaagaacagggcgagctc

SEQ ID NO: 72380 - DNA, 30 bp, Homo sapiens; identical to SEQ ID NO: 43672
  chr6:163591386-163591416
  hypo

SEQ ID NO: 72381 - DNA, 210 bp, Homo sapiens; identical to SEQ ID NO: 20727
  chr6:163591722-163591932
  hypo

SEQ ID NO: 72382 - DNA, 30 bp, Homo sapiens; identical to SEQ ID NO: 20728
  chr6:163661759-163661789
  hypo

SEQ ID NO: 72383 - DNA, 145 bp, Homo sapiens
  chr6:163710195-163710340
  hypo
agtttggccgtggaccgactgaaccctgcgccagttcccatgtgtcaggactcgctggtgtgcagagtatttgctgcggctttgatctcattgttttagtttactggctctcctgatttggcattaaatgcgttagaacctaatc

SEQ ID NO: 72384 - DNA, 2793 bp, Homo sapiens; identical to SEQ ID NO: 43676
  chr6:163834987-163837780
  hypo

SEQ ID NO: 72385 - DNA, 30 bp, Homo sapiens
  chr6:163985208-163985238
  hypo
ttttgtaatatttgcgatcacttaaaatat

SEQ ID NO: 72386 - DNA, 30 bp, Homo sapiens
  chr6:163987802-163987832
  hypo
caaaggattgtgaccgcagaccgaggttag

SEQ ID NO: 72387 - DNA, 30 bp, Homo sapiens
  chr6:164066699-164066729
  hypo
aattaacgtcaaacacgaaacaatcagtgt

SEQ ID NO: 72388 - DNA, 30 bp, Homo sapiens; identical to SEQ ID NO: 20730
  chr6:164067317-164067347
  hypo

SEQ ID NO: 72389 - DNA, 30 bp, Homo sapiens
  chr6:164241312-164241342
  hypo
acctcccacggatgcgtttctggcctgatg

SEQ ID NO: 72390 - DNA, 72 bp, Homo sapiens
  chr6:164245429-164245501
  hypo
ctgcaaagagacaccagccaccgggaaagcggtggttaacgttggctccacgcccttgttcctgcatctgcc

SEQ ID NO: 72391 - DNA, 30 bp, Homo sapiens
  chr6:164256003-164256033
  hypo
gtcctggtaatactcggagtctggcggata

SEQ ID NO: 72392 - DNA, 78 bp, Homo sapiens
  chr6:164283341-164283419
  hypo
aagagggctcagtggagactccggtggatcaatgactgaagttcacatgggacaatcgatggcacagaagatggccct

SEQ ID NO: 72393 - DNA, 43 bp, Homo sapiens
  chr6:164299007-164299050
  hypo
tcagtaagttctggcatggggcggagttggagacttctctgcc

SEQ ID NO: 72394 - DNA, 52 bp, Homo sapiens
  chr6:164314283-164314335
  hypo
tcaagttggtgctcaggtatccgtggagagcgcacaggagagtctcacctgc

SEQ ID NO: 72395 - DNA, 39 bp, Homo sapiens
  chr6:164320870-164320909
  hypo
gacatagaaagaagtctgggccgggcgtggtggctcacg

SEQ ID NO: 72396 - DNA, 84 bp, Homo sapiens
  chr6:164322566-164322650
  hypo
tttcagaggggggcatcttaacgcgagtcttacggtctttcctgggttcccatgctcggcggcggctcctccacaggcctgtct

SEQ ID NO: 72397 - DNA, 131 bp, Homo sapiens
  chr6:164339932-164340063
  hypo
aaaggaaaaagaaaatctagacgacatcataatttccccgccacgcaaaaaagaaatgtgaaggtagaattcggctgatttgagaatgctgggggaagacggaaatgtgcgtgctctgcatgccccagaaa

SEQ ID NO: 72398 - DNA, 173 bp, Homo sapiens; identical to SEQ ID NO: 20731
  chr6:164441337-164441510
  hypo

SEQ ID NO: 72399 - DNA, 30 bp, Homo sapiens; identical to SEQ ID NO: 20732
  chr6:164758318-164758348
  hypo

SEQ ID NO: 72400 - DNA, 53 bp, Homo sapiens
  chr6:165747831-165747884
  hypo
ctacagcgccgggcacgcgcctccatagcgccctacagcgccgggcacgcgcc

SEQ ID NO: 72401 - DNA, 446 bp, Homo sapiens
  chr6:166240450-166240896
  hypo
agagggacatcaggaggggcacggaggggacaggtaagggccaataacttgcctgggtgacgccagccgcacagcctcggttgtcccctgaccaggacgtggcctgccgggtagggcacagggaatgtcggggccgacccgggagagcctgacttcctgcgggccctccgccgtggtctagacgcttcccctcttgtgcgctcaggtggagcgcggaggccaagctcagtctgacccaggaaccaccaggtccccggcaaaacacagggaagggtctaagccctgacgtccctccagaccccacgcccattcgcggctgcccgctggggaggtgcaggggtgacgcggggcgggggcacccggtgtccagctcgagacctgtgcggggacaggaggtgcccggtgacagcgccaagctccaccccgaactctcccagaagaactcc

SEQ ID NO: 72402 - DNA, 584 bp, Homo sapiens; identical to SEQ ID NO: 5248
  chr6:166402066-166402650
  hypo

SEQ ID NO: 72403 - DNA, 151 bp, Homo sapiens; identical to SEQ ID NO: 5249
  chr6:166402752-166402903
  hypo

SEQ ID NO: 72404 - DNA, 2956 bp, Homo sapiens; identical to SEQ ID NO: 43692
  chr6:166579863-166582819
  hypo

SEQ ID NO: 72405 - DNA, 109 bp, Homo sapiens; identical to SEQ ID NO: 43695
  chr6:166666750-166666859
  hypo

SEQ ID NO: 72406 - DNA, 139 bp, Homo sapiens; identical to SEQ ID NO: 43696
  chr6:166666879-166667018
  hypo

SEQ ID NO: 72407 - DNA, 283 bp, Homo sapiens; identical to SEQ ID NO: 43697
  chr6:166667349-166667632
  hypo

SEQ ID NO: 72408 - DNA, 137 bp, Homo sapiens
  chr6:166711366-166711503
  hypo
gctgcaccaagggacgagatgtgacggtgacagacgatggccaaggccatcttaccgagtgccaggcacgggcctcggcacctgctgtgctctgtctggggaagcgggcacagagatgaagcggccccacggcggtc

SEQ ID NO: 72409 - DNA, 107 bp, Homo sapiens
  chr6:166742968-166743075
  hypo
aagatattttgagaagccaaacgtacctggctaacgcagcaagattgccgagggtataaaacactgcaaaaagctttatgccgcccggaagccacagcaatccagtt

SEQ ID NO: 72410 - DNA, 49 bp, Homo sapiens; identical to SEQ ID NO: 20736
  chr6:166748325-166748374
  hypo

SEQ ID NO: 72411 - DNA, 31 bp, Homo sapiens; identical to SEQ ID NO: 5254
  chr6:166822698-166822729
  hypo

SEQ ID NO: 72412 - DNA, 30 bp, Homo sapiens
  chr6:166826082-166826112
  hypo
gtcaggaccctctccggggctgaaaaagaa

SEQ ID NO: 72413 - DNA, 30 bp, Homo sapiens
  chr6:166826423-166826453
  hypo
gttgagccggagcccggggcctccatgggc

SEQ ID NO: 72414 - DNA, 30 bp, Homo sapiens
  chr6:166858103-166858133
  hypo
gaaacagtgccgtgcgcgtgagaaggaaga

SEQ ID NO: 72415 - DNA, 204 bp, Homo sapiens
  chr6:166868889-166869093
  hypo
aagcgtcatggacccgggctcatcttcagtgtcctgaaccaagaggcagctagagccaggtgtcggccctcaaaggggccaaaaaaggggccttcacagtcaccccaggtagatgcccacgcgacccctggactaatgtgaccagagtcggctgtgtttggaaataaacttccaacgctccagactagcgaagcgtcgttaaaa

SEQ ID NO: 72416 - DNA, 30 bp, Homo sapiens
  chr6:166921875-166921905
  hypo
agtcacttgagaaacggcaggaccccggct

SEQ ID NO: 72417 - DNA, 276 bp, Homo sapiens
  chr6:166944028-166944304
  hypo
tcagttcatctgtccagtgcccggcgctgtgtgttcaatcgcctaatgctgtttagggcagggggaagttccctctctcaccaacacagtgaataggaggtgatcagaacagatacggtaggtgcccagctagtgacgggcttaaagactgtgagcctggaacggagattttggatcacattctgactctaacgctgcactaggggctcatccctcacttgcaggatgggcgtgcagaggagctgggcagaaatcggtatttctaatgcccagtca

SEQ ID NO: 72418 - DNA, 38 bp, Homo sapiens
  chr6:167038331-167038369
  hypo
ttttttttttgagacaagtctcgctctctcgccaggct

SEQ ID NO: 72419 - DNA, 97 bp, Homo sapiens; identical to SEQ ID NO: 20738
  chr6:167051699-167051796
  hypo

SEQ ID NO: 72420 - DNA, 31 bp, Homo sapiens
  chr6:167065180-167065211
  hypo
cttacacaggatgcttcgatctgatgacgat

SEQ ID NO: 72421 - DNA, 30 bp, Homo sapiens; identical to SEQ ID NO: 20739
  chr6:167136244-167136274
  hypo

SEQ ID NO: 72422 - DNA, 103 bp, Homo sapiens; identical to SEQ ID NO: 20740
  chr6:167139234-167139337
  hypo

SEQ ID NO: 72423 - DNA, 5 bp, Homo sapiens
  chr6:167144474-167144479
  hypo
aatcc

SEQ ID NO: 72424 - DNA, 30 bp, Homo sapiens; identical to SEQ ID NO: 20742
  chr6:167152239-167152269
  hypo

SEQ ID NO: 72425 - DNA, 56 bp, Homo sapiens
  chr6:167169076-167169132
  hypo
ggctgggggtcctttcgacacgcaccatggctgctgcgctccggcccagcttccta

SEQ ID NO: 72426 - DNA, 356 bp, Homo sapiens; identical to SEQ ID NO: 43704
  chr6:167275699-167276055
  hypo

SEQ ID NO: 72427 - DNA, 114 bp, Homo sapiens; identical to SEQ ID NO: 43705
  chr6:167276260-167276374
  hypo

SEQ ID NO: 72428 - DNA, 205 bp, Homo sapiens
  chr6:167284358-167284563
  hypo
aaagaccagcctggccagagtcgcactagctgtgaaccaaacgacaggctgcgcccagtcagagggtggaaggtgccccgcggtgtgctgagaactgtgcttacgtttctcaacataaagcggagcattgataaaccccagagaacaagctgtgcggcgctgaccacgctgtgcagggctgaacgcacattaggtgcttgataaa

SEQ ID NO: 72429 - DNA, 2668 bp, Homo sapiens
  chr6:167313422-167316090
  hypo
caggagagaacctccagtgagcgcacagaaagaagaacgccacaggaacgcacagtggagagaatgccatgtgaaggcacaaagaacggagaacgctgcgtgaacgcacacacgtgggggagaaagccaggggaacgcacagagtaaatagaacgcaatgggaacgcacaggaaagagaacgccacgggaacacaccgggggagaacgccaggagaacacactgaggagagaactccgcgtgaacacaatgcgggagaactccaggtcaacgcacggagaggagaacgcctgctgaatgcacggggttggagaacgccggtgaacgccggtgaacgcacggggaagagaacgccacgtgaacacacgggggagacgccgcacgaacacacagaagggagaatgccgggtgaacacacacgggggagaacgcccacgcgaacgcacagggtagagaattccgggtgaaggcacaggagggaaacggcgcgcgaacgctcagcggggagaacgcctggtgaatgcacgggagggagaaggccaggtgaacgcacagggggaaaatgccgcgctaaagcacacgggaaataacgccgagcaaacacacaggtgggagaacgtcgcacgaacgcacagcgtggagaacgcgacgtgaacgcacacggggaagaacactgcgcgaacgcacagcagggagaacgccacttgaaagcaaagtgaggggagaatgccgcgttgaacgcacagtggggagaacaacccgcgaactcataaaggggagaacgcagcgtgaaagcacacagcggggagaacgcctggggaacgcaaagagtaaagagaatgccttgggaacgcacaggagagagaacgcaacctgaacacacggtgggggctggaggaagaacgtcgggagatcacacagggaggagaacgccaggtgaacgcacaagagaaaacgcctggtgaacgcgcaaagaaaggagaaagccaggtgaacgcacagggagaacgccgcacaaccgcacaggtaggagaaagccatgtgaacgcacaaagaaaggagaacgctgagtgaacgcacacagggccgagaacgccaggggaacgcacacagtaaagagaacaccgagaacgccgtgggaacgcacaggagagagaacgccacgtgaacacacgagggagaacgccgcgggaacacacagaagggcgaatgcccggcgaacgcacagaggggagaacgccaggggaacacgcacgggggagaacgctgcgcgatcacacagcggggagaacaccgggtaaacacacactggggaaaacaccgcgtgaacgcatagaggggagaaccccgggtgaacacacagaggggagagctccgtgtgaacacaaagggaggagaacgcctggtgagcacacacggggagagaacaccgcgcggacccacaagggggagaatgcctggtgaacgtacagcgggaggggagaacgctggtgaacgcacagcggggaaaacgccatgtgaacgcacaaaggaaggagaacgccaggtgaactcatacagggggtaggaacgccagaggaaagcacacagtaaagagaaggccgtgggaacgcgcaggggagagaacgccgggagaacacagagggaggaaaatgccaggtgaacgcacaagggggaaaacgcctggtgaacgcacaaaggagaaagccaggtgaacgcacaagcagcagaacgccaagtgaacgcacgaggggagaatgctgcgccaacacacacgggaaacacaaccgcgcgagcacgcagtggggagaacggcacgcgaacgctcagcaagaagaacgtaagttgaacggacagcggggagaacgccgccctaacacacgcgggaaataacgacgcgtgaacacacagcagggagaacgccgcgtgaaagcacaggggggagaacgccgcgtgaatgcacacacgggaaataacgccgtgtgaacacacagcggggagaacgccgcgtgaacgcacacaggggaaataacgccgcgcgaacacacagggggaagaacgtcacagggacgcacagtggggaaacgccatgtgaacgcacaaagaaagaacgccacgtgaactcgcacacgcggggagaacgccggggaaacgcacacagtaaagagaacgcagtttgaacgcacaggggagagaacgccacgtgaacacacagaagggagaatgcagtgcgaacacacagaagggagaacacctggtgaaggcacagaggggagaacgccgagcgaacgcacagggtggagaatgccatgtgaacgcacaaagaaaggagaacccctggtgaacgcacacaggagaaagaatgccgaggaacgcacagagtaaagagaccgccgtgggaacacacaggggagagaacgccacgtgaacacatggggagaacgccgcgggaacacacagaagggcgaccgcctggtggatgcacagaggggagaacgccaggggaacacacacaggggagaacgctgggcgatcacacagggtggagaacgccgggtaaatacacactggggaaaacgctgtgcaatcgcatagagggaagaacgccgggtgaacacacagggtgcgttcttccatcatgcggctgcgcctgagtctctgagtctact

SEQ ID NO: 72430 - DNA, 66 bp, Homo sapiens; identical to SEQ ID NO: 20744
  chr6:167384338-167384404
  hypo

SEQ ID NO: 72431 - DNA, 197 bp, Homo sapiens; identical to SEQ ID NO: 20745
  chr6:167511714-167511911
  hypo

SEQ ID NO: 72432 - DNA, 31 bp, Homo sapiens
  chr6:167570837-167570868
  hypo
ctggtggagttctgggcggcctcagagatga

SEQ ID NO: 72433 - DNA, 31 bp, Homo sapiens
  chr6:167592732-167592763
  hypo
tctgaccacttttgtccgattccctggttgg

SEQ ID NO: 72434 - DNA, 128 bp, Homo sapiens
  chr6:167649277-167649405
  hypo
ctccaagagcacacagaggctcgtgtctaccgccccaactcgggcggctgcagccgcgcgggagagattggcggtgctgctgcctgctcctggctcccacccactccgtggggcacacagccccaact

SEQ ID NO: 72435 - DNA, 31 bp, Homo sapiens
  chr6:167651139-167651170
  hypo
agcagctcccgtgggccgatgaggaggcatg

SEQ ID NO: 72436 - DNA, 31 bp, Homo sapiens
  chr6:167808332-167808363
  hypo
ccactactaactctacgcggacagaaatggt

SEQ ID NO: 72437 - DNA, 262 bp, Homo sapiens
  chr6:167835046-167835308
  hypo
tcttgctatgccagggcggtgctagagatagactttgccctgggctgggctgttttccccccacgcggatcctcacctccgcttctccactggctttccgcctttacatacgtctattttaaatttgtgttaggcacccccacactgtgactcccctcaacactgccgctcccccacgcacacagcggctcccccaacacacggctgctccccccacagcctgcggctccccacacacggcggctcatccacatatgctggc

SEQ ID NO: 72438 - DNA, 30 bp, Homo sapiens
  chr6:167836835-167836865
  hypo
cggctcccccgacacggtggctccccacac

SEQ ID NO: 72439 - DNA, 31 bp, Homo sapiens
  chr6:167859495-167859526
  hypo
caggaggagccattgccgctggcgtctgggg

SEQ ID NO: 72440 - DNA, 546 bp, Homo sapiens; identical to SEQ ID NO: 20747
  chr6:167880206-167880752
  hypo

SEQ ID NO: 72441 - DNA, 19 bp, Homo sapiens
  chr6:168046805-168046824
  hypo
taagaaagaagggggccgg

SEQ ID NO: 72442 - DNA, 52 bp, Homo sapiens
  chr6:168054235-168054287
  hypo
gaagtcagcatacccacgatggaagtgctaacctttacgtcccccaacagac

SEQ ID NO: 72443 - DNA, 376 bp, Homo sapiens
  chr6:168062966-168063342
  hypo
cctttcccgcagtcacgatcactggagcacgttcagggcctgcaggtggtgatgggccgcgcagtcgggaccctggagctcttcaacgtgcttcatggcactgcttctcgacctgagattcaaggctccagaggccccactggccactccgcttccgggacccctcacacctcccagccgggacttggggaggcacttgcgagaggctgcgtttgccgttgcgctctctggagctggagaaccactgggcgactctgcgtgactcctgcacccactgtcaggaccccggaagccaaccggtttggagaaaagggcccactcctcaccgcgctctctgcccgcggcctggcgcagggcctcacggggctgagatcct

SEQ ID NO: 72444 - DNA, 31 bp, Homo sapiens
  chr6:168098917-168098948
  hypo
tggatcagccactaagcgacccaaggcagaa

SEQ ID NO: 72445 - DNA, 30 bp, Homo sapiens; identical to SEQ ID NO: 20749
  chr6:168122740-168122770
  hypo

SEQ ID NO: 72446 - DNA, 37 bp, Homo sapiens; identical to SEQ ID NO: 20750
  chr6:168131200-168131237
  hypo

SEQ ID NO: 72447 - DNA, 48 bp, Homo sapiens
  chr6:168156340-168156388
  hypo
agaagcgggtgggactcgtcctggtagtgggggcgagttcaaggtaac

SEQ ID NO: 72448 - DNA, 472 bp, Homo sapiens; identical to SEQ ID NO: 43710
  chr6:168226996-168227468
  hypo

SEQ ID NO: 72449 - DNA, 34 bp, Homo sapiens; identical to SEQ ID NO: 5261
  chr6:168227909-168227943
  hypo

SEQ ID NO: 72450 - DNA, 85 bp, Homo sapiens; identical to SEQ ID NO: 5262
  chr6:168228221-168228306
  hypo

SEQ ID NO: 72451 - DNA, 301 bp, Homo sapiens
  chr6:168377437-168377738
  hypo
cggtccaggagctccgcaagttgcgggagaacctggcgggtccgtggtccagcgaggcctgggattcagaagggatgaaacgttcctcgacgcttgaacaccggcctcctgcccctgggtcttcctgctatttcttcctgcccctcgctcccgcctcgagccaccccctcgtgctccccaacgcccgctcctgtgctggtcactgggggcagtgagaggaggccagaagcagaggcgatgccggcggggagcgggcggtgggggggcttctgggagcgacggacccggcagctgcagagcc

SEQ ID NO: 72452 - DNA, 684 bp, Homo sapiens
  chr6:168378612-168379296
  hypo
gcacagtagcgaagccgggacagataaagttcttctagtcactgccctcttggagtataccgttgaatccgggaagtagatcaatgaaataaacacagaatggttgtaaaatacagaacgctgggaagtggaggtgcgtggtcttacccgtgtttataattcagccgtcgcctaacctgagaaatcaaggatttctgcgtcgtgcgcgtgcccgctgagctgagctctgctgggatggggagtccttctccggctggaggctgagggcaggagctctcggtgagaggctgcggccagcggtgctgtgagccgggcgggggtcagcgcgggcggccggggcgaggctgacagcacagcaggggccgagctcccccgggtcaggcgggaccaggaagggatcatccttcttttgagggcacggagccaccgtcggagggcctgtgagaagggtgggaagctgagattacattcctattctgaaaatgtcacactgtggagggcggtggttcaagcgcagtaatggccatggagggagaacaccgcccggggacacccggggtggcagggaccggagccccggaaacctgagcaaaacgcgcaaaatggggaaaaccacccaggttttaatggaaattgtgcgaacagctgtcaacgaagagtcaaactctgtaaaatatttgaaga

SEQ ID NO: 72453 - DNA, 30 bp, Homo sapiens
  chr6:168379793-168379823
  hypo
acagctctgcaggaccgtttcaaaatatgg

SEQ ID NO: 72454 - DNA, 41 bp, Homo sapiens
  chr6:168387061-168387102
  hypo
ccatacagtcaggcatcgcttaatggcggggttgtgttctg

SEQ ID NO: 72455 - DNA, 87 bp, Homo sapiens
  chr6:168387332-168387419
  hypo
gggcccctgtgaggtacgaggcctgtcattgactaaagcacagccgtgcagcccaggacggcagttccttgccgagggcccgtgtgt

SEQ ID NO: 72456 - DNA, 189 bp, Homo sapiens
  chr6:168389683-168389872
  hypo
aaggaacctgaggtgtcgctgctctacaatcacactccagtctccatctttggccagggacacaggtccttctgtggaggagggacctcagacccctgcccgtgagtgcctgagcttgcagaggtaacccctcgccatcacattccaccaaagccttctccagcagaacgtggacggcccccgctcagg

SEQ ID NO: 72457 - DNA, 101 bp, Homo sapiens
  chr6:168390654-168390755
  hypo
gcagccccacgttgagcgcagaccatcctggcgccatggattttcttagaactgccgttccacgccgggtgagtccccggggctctggaaccgtggatttt

SEQ ID NO: 72458 - DNA, 100 bp, Homo sapiens
  chr6:168390874-168390974
  hypo
aattgccgttccacgcccggtgagtcccggaggctccggaacacggtttctaacgcgcaggctgatgatttctaacactcacgtgcgtggtatttctttc

SEQ ID NO: 72459 - DNA, 306 bp, Homo sapiens
  chr6:168391270-168391576
  hypo
tgcagcctccctgccccgctgcgcccggctcgcccccgtccctctgctcctgaggccctgagcttggccgtctctgtgccaggactcgggcctgggcttagctccccggaggcaccgcaggcagcgcgcgaccccgagctcacacgcgggcatcgccgagtcacacgtgggcatcccgggcctcacacgcagcccctcttccaggacgttctgcctccccgcacctggccgggaccctcaggctcagccctggggatgcctccccgacggctcctgtggctccgtgccccgcgcgcccctggatca

SEQ ID NO: 72460 - DNA, 202 bp, Homo sapiens
  chr6:168401779-168401981
  hypo
aggactggaaattgggcctgtcggatacgtcagtgtggcgcgggacaggccaagtggccctcattcaaaatgtgtgggaccagaagaagtgtttccgatgttgaattgtttcatattttcgaatgttcgtgttttgtatggaccggttcagcaagataatccagtgggcattttctttcagcgtcatctcagtgctcaaaac

SEQ ID NO: 72461 - DNA, 201 bp, Homo sapiens
  chr6:168420279-168420480
  hypo
gggacggctgggctgacgcaagccccacagtgcgaatgagcttgaggcccctggacggcacacttgaaatggtgaaaatgtcaattttgttatatgtatttttttaccacaattaaaaaggaagtgaacagagcatcatggcgccatgggaccatgatgtattggcttccaagaagccaaatacagcgggagttgcagtcc

SEQ ID NO: 72462 - DNA, 30 bp, Homo sapiens; identical to SEQ ID NO: 20760
  chr6:168421731-168421761
  hypo

SEQ ID NO: 72463 - DNA, 46 bp, Homo sapiens
  chr6:168428431-168428477
  hypo
gtccgtgggtgagaaacgggttctctgtgtcgcgtctcttcagagc

SEQ ID NO: 72464 - DNA, 168 bp, Homo sapiens
  chr6:168434609-168434777
  hypo
ctataccatgctgggacgccattcggacgacggccctgttctgccgcttgacccacagagtgacttaggaattatccctagagtggctgaggagctcttcaggtactgccgatggtgatgagtggggcagagaaatatggcagggaagccaggcggtcagcaccttgg

SEQ ID NO: 72465 - DNA, 217 bp, Homo sapiens
  chr6:168450727-168450944
  hypo
cggaaccacaggggcccggccccatctcggggtccggggtggcttccctgcgggggcggcctctgtgcagaggcctgaagggtccacagtggcaaagggggaatgacaaagtgtctgcctgtgccggaccgagtgatctgtactataattaccctgtgaggggcgcacgctgccgtcctagagcgtcacagacaccagcccccgggcctgttggtac

SEQ ID NO: 72466 - DNA, 97 bp, Homo sapiens
  chr6:168453026-168453123
  hypo
gcagaggcccccattggaggccggcctgttcccactgttacgtgttcccatgtccgctcaggagggagcctggcccgcaccccacagggcacactcc

SEQ ID NO: 72467 - DNA, 352 bp, Homo sapiens
  chr6:168458056-168458408
  hypo
ctctcactcccaccaccgcacacggcagccacactgcttgtggccacagagccacactccctgccaatgcccaccctgcgccgcagtgcatggccggcctgcccctggacgggtcccccagcacacacctctgcgagagaggcttggcatcttcctttgatgcatttcaggaggcccccaccttgcccagcttctttcctggggctgctttctgccttttaactcagtggacctggactcttagcgtttggtgtaatttaggatcaggtctgagtgtgggccttgaacactagctctggaagcacctcagtggtcaagaacggcctcctattttatacgggaggaaactgtc

SEQ ID NO: 72468 - DNA, 31 bp, Homo sapiens
  chr6:168461479-168461510
  hypo
tcctggggctggaggacggctccttctcatg

SEQ ID NO: 72469 - DNA, 67 bp, Homo sapiens
  chr6:168461831-168461898
  hypo
acagcccagatgaggacgtggaacaggcagggagaccaggcctgcgggtaaacgctgaggccaggcc

SEQ ID NO: 72470 - DNA, 203 bp, Homo sapiens
  chr6:168463426-168463629
  hypo
acagcagaggcagggcgcgtccaggcagggccagccagcgcccatgaccgctgcagggatgctacacagcccagactccagtggggaagggaggagggggtgggggcaggacgaggggctctgtgaggctggagccccttcggtcacctggtagatgtgcactcccctgagggccagtcccaggatcacggtgggacgacctt

SEQ ID NO: 72471 - DNA, 31 bp, Homo sapiens
  chr6:168464976-168465007
  hypo
aaccttaaagttcacccggaacagggcctgc

SEQ ID NO: 72472 - DNA, 157 bp, Homo sapiens
  chr6:168467712-168467869
  hypo
agaacatctgcaaaggcgggcttcgggcgggcacacctgcttgcagcctcagggctcaccacagtccccctgcggacagcccctctggacggagcagctgcgtggacagaaggcagcacattggtccagcacagtccaccgcggtgcctgccctctc

SEQ ID NO: 72473 - DNA, 31 bp, Homo sapiens
  chr6:168481549-168481580
  hypo
tgctggtgtgtgtgggcgctggtgtgtgtgg

SEQ ID NO: 72474 - DNA, 31 bp, Homo sapiens
  chr6:168482064-168482095
  hypo
agaggctggcctgccacgttcgtgatgtcag

SEQ ID NO: 72475 - DNA, 119 bp, Homo sapiens
  chr6:168517649-168517768
  hypo
aagatttgggactggagctcacggtgcccagagatgcacagcgggattttcccgccacgccatgcattctccacaggccgagagtgtgctgtgaaaccgcaaggctgaaaccaccttca

SEQ ID NO: 72476 - DNA, 31 bp, Homo sapiens
  chr6:168529145-168529176
  hypo
gcctctggcctccaagcgcccggctgagccc

SEQ ID NO: 72477 - DNA, 542 bp, Homo sapiens
  chr6:168529685-168530227
  hypo
cctgtccagctgagccgtctcccgcttggcgcccccaggcagtcagacttcccacacctgaaggaaactaggtggaagcgacttggcctctccggccccgcctaggcctcggaggtcaggtggcctcacctcccctgcgggcaccggccagctgctaaggcctgtccacgaggagagcggggtgtgggacacagacttcgcctctcagtgggaagcgtgttccgactctgccacgtgcctcttactttagaaaagtgaatccatcattgttccagttaccttgggctgcactctaaccgccaccaagtgccacggcttcaacacggttcattaattgccagcgtgtgtgtggctggtctggccacagcggccggttttcgctcgaggtccttcatgtggttgccgtcagatggtcagatggcggccggggccggggctggggtcgctggacacttgacccagctggaggcctacggggaggccttggttggagtgtctgaggcctcagctgggcccctgcctccgcgcgcctgaccagcact

SEQ ID NO: 72478 - DNA, 39 bp, Homo sapiens
  chr6:168561522-168561561
  hypo
tgatgttcactttcttcgatcttacgtggtggcatccac

SEQ ID NO: 72479 - DNA, 210 bp, Homo sapiens
  chr6:168591118-168591328
  hypo
cctcacgtgtcctgcgctgtgcacctgacgtcccgcctgcgagggtcggccacctcacgtgtcctgcgctgtgcacctgacgtcccgcctgcgagggtcggccgcctcacgtgtcctgcgctgtgcacctgacgtcccgcctgcgagggtcggccgcctcacgtgtcctgcgctgtgcacctgacgtcccgcctgcgagggtcggccgcc

SEQ ID NO: 72480 - DNA, 109 bp, Homo sapiens
  chr6:168613293-168613402
  hypo
acacttgtgtggggcgggggcggggtctacgcttgcgtggggcaggggcggcgtctacacttgtgtggtgtctacacttgcgtggggcaggggcggggtctacacttgt

SEQ ID NO: 72481 - DNA, 30 bp, Homo sapiens; identical to SEQ ID NO: 20769
  chr6:168630192-168630222
  hypo

SEQ ID NO: 72482 - DNA, 253 bp, Homo sapiens
  chr6:168633685-168633938
  hypo
acggagaggctggatgagatgcggcgagcgcgtgacacacatcagaaagtggcagaaccagaaccggctccccggggctgcccctgcttcccctgacaccggctgcgtctgtcatgggctgcggcacggtcatcttcgttttgactttcaggtggcaaccgcacggtgccacaggctgtcgctgtcacccaagcacaagtgcagtgacaatcctcgctacgaatttcctcgcggctccatacctgaaataagt

SEQ ID NO: 72483 - DNA, 31 bp, Homo sapiens
  chr6:168643920-168643951
  hypo
ccgtgaggctgcccaacgcagagcagagggc

SEQ ID NO: 72484 - DNA, 194 bp, Homo sapiens
  chr6:168664087-168664281
  hypo
tatccttcaagcagcacagagcgggcggtttgtctcacgctggagaaggaattcagacgcaaagctcgccgcagcctcagagggcaggcgcaccaggctcctgggttctctccgtgaaggaaactgacgaagccttcccgaaggctgatttctaactgcctgatgcttccaacgaggtggagctgtgggcacag

SEQ ID NO: 72485 - DNA, 395 bp, Homo sapiens
  chr6:168672437-168672832
  hypo
tggaatcctcgttcccgctgaaatctgcctgggcggccacacgcttcctgtgcaggctgcagggacccagaggacggtgtcttgccgagggatcctccctccctccaggtacctcgccccgggacagcagaagtgagagacaatccgagcatatccatgtaatgtggaaatgctgtactatcacccatctaaacaaagctcggaactgtctgcgccccaggacggggtcccagctggcccaggagaaatcgcactcacaggcccagcagagcccaacgccagcgctcagaatcccacagtgtctagacacgcacagcagcaacacggaagcggcacagggacagccccagcggtggcgacccagctccacaggcgtgtggcaaatgcaggcaggc

SEQ ID NO: 72486 - DNA, 31 bp, Homo sapiens; identical to SEQ ID NO: 20771
  chr6:168708313-168708344
  hypo

SEQ ID NO: 72487 - DNA, 461 bp, Homo sapiens; identical to SEQ ID NO: 20772
  chr6:168709571-168710032
  hypo

SEQ ID NO: 72488 - DNA, 31 bp, Homo sapiens
  chr6:168710885-168710916
  hypo
tggcctgcatcctccacgctccctgggggcc

SEQ ID NO: 72489 - DNA, 30 bp, Homo sapiens; identical to SEQ ID NO: 20773
  chr6:168771624-168771654
  hypo

SEQ ID NO: 72490 - DNA, 134 bp, Homo sapiens
  chr6:168813948-168814082
  hypo
ggggtggcgggccctgcgggagcgtgtacgtgagcgcggcgggccctgcgggagcgtgtacgtgagcggggcgggccctgcgggagcaagtacgcaggtgtggggtttgggggactttgcgggagaggctccag

SEQ ID NO: 72491 - DNA, 301 bp, Homo sapiens; identical to SEQ ID NO: 20775
  chr6:168936431-168936732
  hypo

SEQ ID NO: 72492 - DNA, 157 bp, Homo sapiens
  chr6:168956124-168956281
  hypo
gcagggaagcccttaccttcccgtcgcctacacagagaggctgggtgctggctcagccagcccagcgagctccttctccctctgccagcaccctgctccccgtgggatttgggatggacgtatggcgtccacggccgcatgttacaaggtcccactc

SEQ ID NO: 72493 - DNA, 88 bp, Homo sapiens
  chr6:169013508-169013596
  hypo
ccagagcagagcaggcccagtcgccggcaggttcagggcaggagcatcggccaaggagagttggctcgaaaacttacaatggagactt

SEQ ID NO: 72494 - DNA, 24 bp, Homo sapiens
  chr6:169098055-169098079
  hypo
tagatggagttttgctcttgtcgc

SEQ ID NO: 72495 - DNA, 186 bp, Homo sapiens; identical to SEQ ID NO: 20776
  chr6:169106756-169106942
  hypo

SEQ ID NO: 72496 - DNA, 30 bp, Homo sapiens; identical to SEQ ID NO: 43717
  chr6:169386136-169386166
  hypo

SEQ ID NO: 72497 - DNA, 178 bp, Homo sapiens
  chr6:169465182-169465360
  hypo
tgtgcctctgatttgcgggtgtcgcctgtggacccacaggcctccagcctggcgctccctagaactcgtcctcagagcagccgcccgaggccgtttccacccagtcccctctactccaggccttctcacgagcatcagacctgctcccgttctgttcctcccccgcctgctcccaccc

SEQ ID NO: 72498 - DNA, 633 bp, Homo sapiens; identical to SEQ ID NO: 20777
  chr6:169539420-169540053
  hypo

SEQ ID NO: 72499 - DNA, 427 bp, Homo sapiens; identical to SEQ ID NO: 20778
  chr6:169567203-169567630
  hypo

SEQ ID NO: 72500 - DNA, 46 bp, Homo sapiens
  chr6:169585504-169585550
  hypo
gtgtcagagactgtttcaatgcgctggaaacctgaaatgaaagagg

SEQ ID NO: 72501 - DNA, 30 bp, Homo sapiens; identical to SEQ ID NO: 20779
  chr6:169586491-169586521
  hypo

SEQ ID NO: 72502 - DNA, 241 bp, Homo sapiens; identical to SEQ ID NO: 20780
  chr6:169592277-169592518
  hypo

SEQ ID NO: 72503 - DNA, 213 bp, Homo sapiens; identical to SEQ ID NO: 20781
  chr6:169592577-169592790
  hypo

SEQ ID NO: 72504 - DNA, 31 bp, Homo sapiens
  chr6:169614048-169614079
  hypo
gatcaccccacacctgcgttcctcaaggcct

SEQ ID NO: 72505 - DNA, 30 bp, Homo sapiens
  chr6:169622385-169622415
  hypo
tagccataggcccgcgtgggctggtcctcc

SEQ ID NO: 72506 - DNA, 369 bp, Homo sapiens
  chr6:169625140-169625509
  hypo
cagcagatttaagatgatctccgtgcatacatatctctgccctggcgggttgctcagaagccattttcctccacgcccatgagctgagagagcacccaccgtccaagtcctcctggtctgggttgaacacaagccggcagttgtccctgtcatcggggacgccatcgttgtcatcatcagggtcacaggcgtcgccctggccgtctctgtcatggtcagcctggttggcgttggagatgtaggggcagttgtcctggttgttctggtggccgtcgtcatctatgtcctcgttgttgtcacactggtccccaacaaggtcattgtccacgtcggtctaggggatggggcgtgagagaaacagcagaggac

SEQ ID NO: 72507 - DNA, 30 bp, Homo sapiens
  chr6:169632773-169632803
  hypo
ggctgcttccaggccgaccccgacgggctg

SEQ ID NO: 72508 - DNA, 334 bp, Homo sapiens; identical to SEQ ID NO: 20782
  chr6:169634742-169635076
  hypo

SEQ ID NO: 72509 - DNA, 31 bp, Homo sapiens
  chr6:169639660-169639691
  hypo
tgcaggatgcgcttgccggctggcgatactc

SEQ ID NO: 72510 - DNA, 146 bp, Homo sapiens
  chr6:169641266-169641412
  hypo
catgtgtatgttgtggggcaccgtggcccggagcacctcattatgttcagtccctttctctaaactgcgagctgcccgtcctgagccccgcaggcatcgctctctcttcctggccgcgctgtgccgctcaaacccatttcactcct

SEQ ID NO: 72511 - DNA, 416 bp, Homo sapiens; identical to SEQ ID NO: 20783
  chr6:169641782-169642198
  hypo

SEQ ID NO: 72512 - DNA, 746 bp, Homo sapiens; identical to SEQ ID NO: 20784
  chr6:169648463-169649209
  hypo

SEQ ID NO: 72513 - DNA, 30 bp, Homo sapiens; identical to SEQ ID NO: 43721
  chr6:169776469-169776499
  hypo

SEQ ID NO: 72514 - DNA, 194 bp, Homo sapiens
  chr6:169803234-169803428
  hypo
ccagaaatgtgcacacgcgtacacacacacacacacacagaacacatctcctacatgacacctctcgccatgcctggctctgcgagtcttggcccccacacattttcatttgagtttcctatctcctcaggcacaaccctcactgccgtgtccttcttttagtctgtcacagtgactgacgagctgggcttgca

SEQ ID NO: 72515 - DNA, 30 bp, Homo sapiens; identical to SEQ ID NO: 20785
  chr6:169902426-169902456
  hypo

SEQ ID NO: 72516 - DNA, 43 bp, Homo sapiens
  chr6:169971577-169971620
  hypo
ctatcctggcataaacatttacgttccacattcaacacccagc

SEQ ID NO: 72517 - DNA, 30 bp, Homo sapiens; identical to SEQ ID NO: 20786
  chr6:170028094-170028124
  hypo

SEQ ID NO: 72518 - DNA, 30 bp, Homo sapiens
  chr6:170038650-170038680
  hypo
tctgccccacgagccgaccacattcgcagg

SEQ ID NO: 72519 - DNA, 30 bp, Homo sapiens
  chr6:170040818-170040848
  hypo
ctgacgtatctgcccggtgactgacctcag

SEQ ID NO: 72520 - DNA, 239 bp, Homo sapiens
  chr6:170047308-170047547
  hypo
tgaaggcattatcaggacacacgtgagaatcgggcgactgtcacggaagccgagacacactcagccctgcaggaaaaggtcccggctgagggtccggtaaggaaggaatcctgtgcgcagcctgcatgatgccatccccagcctggcgcctccagcccatccatgagcagaggccgcgtctccagagggaagcagtgactgttccattagcttctttgcctgccgaagccctcccacct

SEQ ID NO: 72521 - DNA, 30 bp, Homo sapiens
  chr6:170047980-170048010
  hypo
caggtaacggtgatcgggagacattcacag

SEQ ID NO: 72522 - DNA, 179 bp, Homo sapiens; identical to SEQ ID NO: 20787
  chr6:170059399-170059578
  hypo

SEQ ID NO: 72523 - DNA, 30 bp, Homo sapiens
  chr6:170060651-170060681
  hypo
tcctcagattcacacggcaaggccttctcc

SEQ ID NO: 72524 - DNA, 37 bp, Homo sapiens; identical to SEQ ID NO: 20788
  chr6:170061017-170061054
  hypo

SEQ ID NO: 72525 - DNA, 129 bp, Homo sapiens
  chr6:170065331-170065460
  hypo
tgcactccagaaccacgcatggagctctgggacatgcagacccagctcctccgcagaccagggggcccaggaccatattgaacccacagtgacgctgagacccacagaaggtcacgttctcagcactga

SEQ ID NO: 72526 - DNA, 76 bp, Homo sapiens
  chr6:170065876-170065952
  hypo
cccaaaaggctgcccggtgagtccaccacagatgggtcccgaggaatcccatcccacctcccgacagaaggcctgg

SEQ ID NO: 72527 - DNA, 30 bp, Homo sapiens
  chr6:170068087-170068117
  hypo
ctgtcctcagacgccgagatgagggtgcct

SEQ ID NO: 72528 - DNA, 30 bp, Homo sapiens
  chr6:170068370-170068400
  hypo
gaggaaagctcaggcgacaggcacagtctc

SEQ ID NO: 72529 - DNA, 479 bp, Homo sapiens; identical to SEQ ID NO: 5269
  chr6:170124927-170125406
  hypo

SEQ ID NO: 72530 - DNA, 30 bp, Homo sapiens
  chr6:170176624-170176654
  hypo
tgctggttgtgctccgaagcatcagcgaac

SEQ ID NO: 72531 - DNA, 146 bp, Homo sapiens
  chr6:170178944-170179090
  hypo
aggggggctgctgggcgcagactgtacctgcctggtgccctgtgagcgtgcatggcccctggcagccctgatgtagaccgggcgcctcagatggtgactcagagcaagaaatgcggacgtgcaggatgggccgggagcaagggcta

SEQ ID NO: 72532 - DNA, 30 bp, Homo sapiens
  chr6:170180727-170180757
  hypo
ggagggggagggcacgctgcccaccaggct

SEQ ID NO: 72533 - DNA, 30 bp, Homo sapiens; identical to SEQ ID NO: 20791
  chr6:170201658-170201688
  hypo

SEQ ID NO: 72534 - DNA, 616 bp, Homo sapiens; identical to SEQ ID NO: 20792
  chr6:170339177-170339793
  hypo

SEQ ID NO: 72535 - DNA, 31 bp, Homo sapiens
  chr6:170344373-170344404
  hypo
gggagctggagacttccgtgtccatgggcaa

SEQ ID NO: 72536 - DNA, 43 bp, Homo sapiens
  chr6:170365709-170365752
  hypo
tccaagcagatgctgtccctccgctccagccagttcctccaga

SEQ ID NO: 72537 - DNA, 484 bp, Homo sapiens
  chr6:170402058-170402542
  hypo
agaagggagctttatgatccacgcccaacccataggcccgctcccgccatgccccctcctctgggaaagccgcctggagtgtccaccgcagaacgagtgctgcgctcagcagcaccaggacccgcagggcccgcactcccctccgcacgaagctcactgtccacgaggaaagacgaggaaatgcggggaaaggagggcacgggacaacacgtccaactgtgtagaggaaagggacctgcgtgggaaggaaggggcaggggaggcttcgagaaagagccaggaccgtgtagttggacccttggagggagctacacgtggccaagggtgcagggcggccccaggctggggaacagcaccggccaagctcggggaagggcgtggacaaggccggcccgtggaacggaagggagcatcgcactgttaaaaggtcatgaaacgtccgggagcctcagcaggggaggccgagtgtggaggtttagaggaa

SEQ ID NO: 72538 - DNA, 1067 bp, Homo sapiens; identical to SEQ ID NO: 20793
  chr6:170453832-170454899
  hypo

SEQ ID NO: 72539 - DNA, 30 bp, Homo sapiens; identical to SEQ ID NO: 20794
  chr6:170474562-170474592
  hypo

SEQ ID NO: 72540 - DNA, 699 bp, Homo sapiens
  chr6:170474868-170475567
  hypo
ggggctgcccagatcccgtcttccacagaccccctctgaggccctcgttccctcaaaccccaggagccagctctgcccccgcacagctccacggccccaggctgcttcccgctactgtaacagacgaccacaggtcgcataggccagagcccggcacggcttcttgggtgacaatcgaggggtcctgacccagcacccgtgggcacacccttatttggaaattgggcctagcccggagtgatcatgaggccacgtgacatgggcgtgccagtctcaccaacgtgtgttttcacgggcaccacagagtctgttttctatgggtggggcagcggtgaacatatccctcttaatagcggtacgggtacggccagggaggcggcagaacgtagacagaacccgggcactgagagaccggtgccgccccccgccgtccacacaacccgggcctcgggcagcaccagcaggacttttattcctcaccccgcacgccgccgtccatctcctaggccagcgtgattcttctgagtgcagctgggtctcctcctgggagatccggtggctctagcagcgtgggtgctgggaacaggaccagcctcgccggcggacagtgtggacgcctgagggcaaaccctggaccactctctccccgggggactccgttcccgcctccagggagctgcgaacgctccttctgggaca

SEQ ID NO: 72541 - DNA, 30 bp, Homo sapiens
  chr6:170491187-170491217
  hypo
ccctggagggagaacgcagcccccctgagc

SEQ ID NO: 72542 - DNA, 246 bp, Homo sapiens
  chr6:170492190-170492436
  hypo
acgcaccgcgattcccgcgtgcggagcgtcggtccccgccctcgacagctggagtggggccagacggccgggaccccagagttcagagggccactgtggcccacccgacagccacgtattcacatgagagggtgcgggtttcacctctcaaggcgaaggagcctcgcccgacgctgggtggtgagcacgttgaagatgaaaacatctgagagcgccgtgcaagatgggcgacgtaggaaaagcaag

SEQ ID NO: 72543 - DNA, 121 bp, Homo sapiens
  chr6:170500861-170500982
  hypo
tggcaggcaggactcggacactgagattaaaggggcccaccgttcccttcacagaaccagcatcttcactcaccgtcggacgtcctaccgctcggcttaccttcccggctcatgcagcgat

SEQ ID NO: 72544 - DNA, 30 bp, Homo sapiens
  chr6:170528283-170528313
  hypo
ctgcggatgcgagccggggccttcacacag

SEQ ID NO: 72545 - DNA, 185 bp, Homo sapiens
  chr6:170531566-170531751
  hypo
gcacgctcgggaacccgcggcaggcgagtggctgtctggcacaccaggcatcgatctccgcaaaacgaactggaaaatgctcttccccagaagcgcagcacctgagcgtgtgacgtgcacatgtttgtgtggaaggcccgagacgccatccaaccccgtggctctcaaaccgggtctccagaacc

SEQ ID NO: 72546 - DNA, 30 bp, Homo sapiens; identical to SEQ ID NO: 20798
  chr6:170545099-170545129
  hypo

SEQ ID NO: 72547 - DNA, 31 bp, Homo sapiens
  chr6:170561025-170561056
  hypo
tgcagagccctccacccgcacatggggtccc

SEQ ID NO: 72548 - DNA, 30 bp, Homo sapiens
  chr6:170561897-170561927
  hypo
tggattcgcagccccggcccacctgcatgg

SEQ ID NO: 72549 - DNA, 30 bp, Homo sapiens
  chr6:170578839-170578869
  hypo
atgccgggaatgctgcgtgacagcggatca

SEQ ID NO: 72550 - DNA, 171 bp, Homo sapiens; identical to SEQ ID NO: 20799
  chr6:170579425-170579596
  hypo

SEQ ID NO: 72551 - DNA, 30 bp, Homo sapiens; identical to SEQ ID NO: 43730
  chr6:170605478-170605508
  hypo

SEQ ID NO: 72552 - DNA, 30 bp, Homo sapiens
  chr6:170682022-170682052
  hypo
tctgtttagatttccgccaacttgtaggac

SEQ ID NO: 72553 - DNA, 30 bp, Homo sapiens; identical to SEQ ID NO: 20800
  chr6:170700092-170700122
  hypo

SEQ ID NO: 72554 - DNA, 30 bp, Homo sapiens
  chr6:170714023-170714053
  hypo
gttggcttctctcccgagcttgtgcctgat

SEQ ID NO: 72555 - DNA, 30 bp, Homo sapiens; identical to SEQ ID NO: 20801
  chr6:170819916-170819946
  hypo

SEQ ID NO: 72556 - DNA, 121 bp, Homo sapiens; identical to SEQ ID NO: 20802
  chr6:170894912-170895033
  hypo

SEQ ID NO: 72557 - DNA, 34 bp, Homo sapiens
  chr7:62936-62970
  hypo
gctgtctctggtccagcggcgaggagcccccaca

SEQ ID NO: 72558 - DNA, 140 bp, Homo sapiens; identical to SEQ ID NO: 20803
  chr7:85449-85589
  hypo

SEQ ID NO: 72559 - DNA, 90 bp, Homo sapiens; identical to SEQ ID NO: 20804
  chr7:88326-88416
  hypo

SEQ ID NO: 72560 - DNA, 47 bp, Homo sapiens
  chr7:118251-118298
  hypo
actgaagcgtctgtgcggaattcttacgatgtcgtgttccctcagca

SEQ ID NO: 72561 - DNA, 30 bp, Homo sapiens
  chr7:124488-124518
  hypo
ggcagccgcccccccgaggctgggaggagg

SEQ ID NO: 72562 - DNA, 95 bp, Homo sapiens
  chr7:139617-139712
  hypo
tgcctcccctccagccccagccgcggtgcacagggcgaaggctgtctgggtgaaggctatttgtgagtgaggccggggaatgaggggcagttggc

SEQ ID NO: 72563 - DNA, 790 bp, Homo sapiens; identical to SEQ ID NO: 43736
  chr7:149019-149809
  hypo

SEQ ID NO: 72564 - DNA, 31 bp, Homo sapiens
  chr7:156973-157004
  hypo
cgcaggagggatttgccggggctgcctctgc

SEQ ID NO: 72565 - DNA, 30 bp, Homo sapiens
  chr7:159759-159789
  hypo
cacagcccttctaacgaacacggaccctca

SEQ ID NO: 72566 - DNA, 30 bp, Homo sapiens
  chr7:160672-160702
  hypo
gcaaactggcatagcgagtcccatgccgtg

SEQ ID NO: 72567 - DNA, 263 bp, Homo sapiens
  chr7:161868-162131
  hypo
gaaggaaggtttagaggtgaacgtccactgcggaggtcggagaagcactcaggtcagcgggcagagcggctagtcggtgggccgagctctctgctacccccgcaggagtgtcccgacgccatcccagaagcagcacctgtgggccacggcgtttgcttagagcctggactgaggctgcctggacggggcccctcacccggccagagttaggggtgccgctgccacccccatggacccgcttcgggctgctcagtccttgttca

SEQ ID NO: 72568 - DNA, 30 bp, Homo sapiens
  chr7:171528-171558
  hypo
cccgacccccctcccggctccccttgtctg

SEQ ID NO: 72569 - DNA, 487 bp, Homo sapiens
  chr7:173193-173680
  hypo
tcggaggacaggacccgccccgcgctgccagtgccgaagcttgggttctctgaggactgcgagggggtctcagcactgtgtccacagatggggcagggacctccgcagggaaccttctctcggctgggccagcccaccccaggggctgtagacgagggagttaatgaacacgggatgggttgagccgcctggtttgcccacagaggggcgaggaagggagtggggagtctgctgtgagcggagagaggacagcctgaggcctcaggaacgctggctgcctgcctgcagcgggagctaacggggcgtctgtcgggaaggggcacggccacaggatttaggggcagtttggacacactggtccggtgagcttgatttcagattccgggatctggtttcggagtggagttgtggactctccaggacccatcgctgaggagcaggaggttctccaggggccatggggcccggggctctgagggaggctctg

SEQ ID NO: 72570 - DNA, 31 bp, Homo sapiens; identical to SEQ ID NO: 20805
  chr7:181307-181338
  hypo

SEQ ID NO: 72571 - DNA, 30 bp, Homo sapiens
  chr7:181883-181913
  hypo
ctgaccagcggccacgctatcctggacgcg

SEQ ID NO: 72572 - DNA, 1821 bp, Homo sapiens; identical to SEQ ID NO: 43737
  chr7:191991-193812
  hypo

SEQ ID NO: 72573 - DNA, 203 bp, Homo sapiens
  chr7:204778-204981
  hypo
gagggaatgtggcactcgtgtggccttcgctgtgctgtgtccccacactgccgctgttctcagtgttcagggaggggaagtggcacctgtgtggctctggccatggtgagtccccacactgccgctgttctcggtgctcggggaggggacgtggcactcttgtggcccttgccgtggtgagcccccacgccactgctgtcctg

SEQ ID NO: 72574 - DNA, 30 bp, Homo sapiens
  chr7:206138-206168
  hypo
attccctctctggccgtccccctgctccac

SEQ ID NO: 72575 - DNA, 30 bp, Homo sapiens; identical to SEQ ID NO: 20807
  chr7:207651-207681
  hypo

SEQ ID NO: 72576 - DNA, 31 bp, Homo sapiens
  chr7:211563-211594
  hypo
ccccctccctaggacccgtttgtcagggccc

SEQ ID NO: 72577 - DNA, 343 bp, Homo sapiens
  chr7:212458-212801
  hypo
tctcaaaaaaaaaagttttctttagtaaaggactttgctctctgcgctcatcacggctcggtgagttcctagtacaacgtcgtgaattagagagcacagtgtttctcctccgaggtgctagatgtgcggtgagagggtgtaggtgaggggccggcggtgaggtgggggccagcctggggtgctgcacagcgtgtggggggcgggatcaccaggggaagttttagggtctccgtttctaatagtcgctgaaaagcacgtagccggcacatcaacccaagcgctcctgggtgcttttgctttagggttacgttaagatatttacgttctttttttaaagtcagct

SEQ ID NO: 72578 - DNA, 121 bp, Homo sapiens
  chr7:223533-223654
  hypo
tggtggggcagatgccgtggggcggacatgtccctgcaagtgacgtctgcagccggctcgtctgtgtgtggggcgtcccggctgctgcaccgagccccgtggggacggcacctggtgcctg

SEQ ID NO: 72579 - DNA, 355 bp, Homo sapiens
  chr7:226183-226538
  hypo
cagcctgggcccactgcaggccgccctcttggtgtccacgcaccccatgtcccaccacagaggacggattcccttcctctgcctcgtgaccggctaagctgtctgagtccctggagaagaccggctaggaggggccctggagggtcacagtgcagggggtggaaggtttgaaaacagatcaacgttaacagcgtgtctcctgcatgggctgactcagaggggcgtgccacaaggcctagtcaccctcacaagagtcccagcgcttaccagccaaggacgagggcccaaggctcagggaggagggagtcgctgtcccgcagccacacggccgcccggctgggcctctcaggtggcc

SEQ ID NO: 72580 - DNA, 167 bp, Homo sapiens
  chr7:228055-228222
  hypo
atggttctgaagccctttagccgcaccacagcgacccgtcagagctgatgggggacggcgggctcagtcaggcgcacaggcctgtgcctgcgtaacgaaacaccaggggggaaagccatccgcctggcatggttgtgatgaggcccgtggccaatcagagaaattct

SEQ ID NO: 72581 - DNA, 30 bp, Homo sapiens
  chr7:231922-231952
  hypo
aggactccatcctccggccccagcacccgc

SEQ ID NO: 72582 - DNA, 306 bp, Homo sapiens
  chr7:284815-285121
  hypo
gagactagttcttaaaaaggccgtgggtggtacacatctttaaccccccataagaaacgttccgggaacacggagaattgtggccacagctttctgagaacagcgtgggaggacgggagccacgggctggtgtgtaattgacggcctgtgacccagacgtggtccccccgaagggacgtggacatgacatacaggacctgtgccccaccccgctgttcgtgtggcgatgatgtcggcccgtggcagggccaggatgctcccaggagttgggcggacctccgctgcgtatatggaaggaaggacccg

SEQ ID NO: 72583 - DNA, 699 bp, Homo sapiens
  chr7:286078-286777
  hypo
cccatggggagctgggacctccggcctccgtcgcaagggcctgcgctgctctgagggcccgtcggcagctgggtcagggccacggggagctgggacccccggcctccgtcgcacgtgcctgcgctgctctgagggcccgtcggcagctgggtgcccagggtcccgaaggctcagggtggccctgaggaggctggagctccaccgcatttttcatatgaggaacccagcacgtcccgcctgcctccggcccctggaggctttctcagtgacaaaccgtttctgtttctgtcttgttttctcagacaaacgagggagcaggagacaccccctgactttttttatttctctgactacgagaggcacaatgcggagattgctgccttccacctggacaggtgagcccttccttcctccctccatccgcgctcccgtgcgctcagacccaccggtgagtgaggccgtcctgcactggacacagcaggacgtcatcgtcaccttcgtcaccatcaggcagcgccggtgcctgctctccccccaccccgagtgctgccctgagcagggtcctgtatgtcatcgtcacctttgtcaccatcaggcagcgccggtgcctgctctccccccaccccgagtgctgccctgagcagggccctctgtgtcatcgtagcccacacaacacgcggtagggagagcctttcatat

SEQ ID NO: 72584 - DNA, 30 bp, Homo sapiens
  chr7:287380-287410
  hypo
tcccagcctggggtgcggccccagggccgg

SEQ ID NO: 72585 - DNA, 977 bp, Homo sapiens
  chr7:287707-288684
  hypo
acacagagcccagcacccaggcgagccgtctgacaggtggagggggagggtgctccacgcagaggcgtggtcgggccttgggtcccgggtcggccctggcagacggcccacgtccctccacacctggtcacctcgcctcacaggacaatcaccacgtcctccgtcagcaagaaaagctctcgccctgcattctccatttaattaagcgagtgggagcctgtggtgtggttcagaaggagttccattaaaagtggctcctttaatttaattttgttttaaatttagccctggaatgagggcaggctttagctatgcaggcagttggtgctgtgtgcccatcagtgaggcatcgccagccccagtccctcaggggcctctcccacccccatcaccgtggggccaggcagagccaccggacctagggctgggtttattcggaggcagggacacagaggcccgctgagccgcacagagcacagaccctcccctgccccgttcttatttggaggcagggacacagaggcccgctgagccgcacagagcacagaccattccccgcccgtttcttgccaggatcctggacttccgccgggtccctcccgtggccggcaggatggtcaacatgaccaaggagatccgggacgtcacacgggacaagaagctctggaggaccttcttcatctctccaggtagcctggcacgggggcccgcattcatctctccaggtagcctggcacgggggcccgcattcatctctccaggtagcctggcacggggagcccacattcatctcgccaggtagcctggcacgggggcccacattcacctctccaggtagcctggcacggggggccgcattcatctcttcaggtagcctggcacggggagcccacattcatctcgccaggtagcctggcacgggggcccacattcacctctccaggtagcctggcacgggggcccgcattcatctctcc

SEQ ID NO: 72586 - DNA, 114 bp, Homo sapiens
  chr7:289726-289840
  hypo
aactggcatttgtggctctgccgagggctcagtcctcctctccaagcgcctctctggtaccaggcccctgctgcacagcctgttcccatttccgatgctcacctggctgagctc

SEQ ID NO: 72587 - DNA, 259 bp, Homo sapiens; identical to SEQ ID NO: 20812
  chr7:290536-290795
  hypo

SEQ ID NO: 72588 - DNA, 196 bp, Homo sapiens
  chr7:291062-291258
  hypo
aatgagcctgtgggggcaggtcgtttcctccccgtttctaaggtcttactgagtggccgggcacggcggctcacgcctgcactgagtggccgggcacggcggctcacggctgcactgagtggccgggcacggcggctcacgcctgcactgagtggccgggcacggtggctcacacgcctgcaatcccagtactggg

SEQ ID NO: 72589 - DNA, 666 bp, Homo sapiens; identical to SEQ ID NO: 20813
  chr7:292735-293401
  hypo

SEQ ID NO: 72590 - DNA, 1289 bp, Homo sapiens; identical to SEQ ID NO: 20814
  chr7:293675-294964
  hypo

SEQ ID NO: 72591 - DNA, 1142 bp, Homo sapiens; identical to SEQ ID NO: 20815
  chr7:295709-296851
  hypo

SEQ ID NO: 72592 - DNA, 675 bp, Homo sapiens; identical to SEQ ID NO: 20816
  chr7:298604-299279
  hypo

SEQ ID NO: 72593 - DNA, 39 bp, Homo sapiens
  chr7:299616-299655
  hypo
ccctctcactttctctcgctttcccgtgggcaggcatct

SEQ ID NO: 72594 - DNA, 1067 bp, Homo sapiens
  chr7:299915-300982
  hypo
cactgagcacagagccgcctcggcgaggtagtgtccgccggccgctgcgctgcccgggacggagacagaggcgccggacctcccagcaagcgcatgcgcccgtcgtgaattcagtgaattcagaggcaggacgggatcatccggagtcgggagctgctgccacaggaggcgaggctccccaggtctcataggacacattttgtcagtgtttgaccagaaaagcttgggaaggaagcgctgtctgtgctcacggacagaggcggccggcgccggaggcattccatcctttctgtagggaaaggagcctttatttactattttgtatttatatttgatgaataagtatataaacagagacgtgtacacagatgccaatcacctaccaaaccaaacacgaggaccgccctccctggttctgggggcccctcaaggccaagctcacccctcaagtgctctcacactcgggacctaattcaagtaaaaaccctttctccttcctggggcctcggctcctggagggctggagggtctcgtctgaggacgggaggaggctctcgctggacgtctggcctgtgcgctggtggacggatgcctacgtggttttggaggacccgatgaccaggcgtcctgcgagtccgcccgctggcctgcagcacccacctcggacttggctgtggacggttggtgcaagtgcatcctgcagggctggctgtgcgcagctgtgggctgacctttgcagagttttgtggaatagtttgcaatgtcataaaagtgcaataaaggtacagcagatgtgtgtcggcctcacggggcgggtccctcacaccctggtgtgtggctgcctgtccaccccctctccaaagaaaaaccagtcctggaaccaggcatggccaggagtcggcattcaaggtggcctggacccgaggcctgctggggtcggagggggctgcctgccaagccctggtgcaaacaggccaggtggggccccacctccaaggcagggcggtccgtcctgggttgctctcagaggctggggccgcgacccaaagctgcggcggccccgaggg

SEQ ID NO: 72595 - DNA, 31 bp, Homo sapiens
  chr7:302539-302570
  hypo
cacaagaaccatcatgcgtgtgagagccttt

SEQ ID NO: 72596 - DNA, 408 bp, Homo sapiens
  chr7:312489-312897
  hypo
tcacaagagcccctccctccacgcccccaccgtgcacgttcccagacacagaagtcgcctcctggttctgaatcccagcggcctgcacagtgaccctcacaagagcccctcctcagctcgcagtccaagggacccgtaaatgtgtgagcagatcacaccccctctccttcacgcaccatccccatcccacacgagggcaaggcagagtcctcacaaaggccttcggggtcctctgcaggtggcctcggtccacgtgctaagatcatcctgcttctcttcctctcacgggttctccttcagccccaggcctggctgcttctcggtcagtgggcattcacccgcacagccctctgccctgtgcctccctcagcctcgcatggctggtgcgtcccctcttttgggtctgtg

SEQ ID NO: 72597 - DNA, 141 bp, Homo sapiens
  chr7:328220-328361
  hypo
ttgtctagaactcacacatttcgctggatgtgtctgagagccgctggatttgtgagattcactgctggtctttgagaacgtccccaaaacaggctgcagctcccgactggctgatcgccggctctctgtttcccttgcgcg

SEQ ID NO: 72598 - DNA, 140 bp, Homo sapiens; identical to SEQ ID NO: 20820
  chr7:328540-328680
  hypo

SEQ ID NO: 72599 - DNA, 35 bp, Homo sapiens; identical to SEQ ID NO: 20821
  chr7:339203-339238
  hypo

SEQ ID NO: 72600 - DNA, 453 bp, Homo sapiens
  chr7:345229-345682
  hypo
ggcagccactgtctttttcaacgctgtttgtacagagaaaggggtgcacagagccgtggacctgcagctcctggagcttcccggagctggtcctccagtagaggtgctggggatggggggacgcagccacggccttcatgcaccaacctggggtctccacgagcaaactctgtgttcaaggaggcactcggcctggggacgcggtgggaagagctatcggaggagcccctcggagctgcctcagcacagctgatgaaagcaatcagcgcccgcctgagctggatgtaaaggttaatacataaatcaaagggaaatgtcaggtgccttttaacactgattgagatgtaattgggcagggaccgtgcgccaggcacccgcgctcacggaaccacggcaggacgtggaagaaattatgtggcttgtttgtgtgtctgcaatcgcgtcaagaccgat

SEQ ID NO: 72601 - DNA, 57 bp, Homo sapiens
  chr7:361848-361905
  hypo
aggctccatccacagaccaggcggcgagtggtcagcgcacgggaggactgcccttgg

SEQ ID NO: 72602 - DNA, 181 bp, Homo sapiens
  chr7:367649-367830
  hypo
tgaagtcacgggaggcgtcggtgtcagcctggtctctgggaacaggcacgtgcaaccccgagctgtccagttagccgtctggatgctccgaggccaccgtgctgtgaaactatcgcacgtggagaagccctgagaccatggggagagagagagatgcccgcctgcccgccacggctcccag

SEQ ID NO: 72603 - DNA, 259 bp, Homo sapiens
  chr7:369856-370115
  hypo
caacgtttatggccacgaagttggcaacatcaataaaaatgtaaatgcatctgccctttggcccggcaattctgcttatcctatagataccattgcgcacaggtgaggccgtctatgtgtgaaattactcactgcagcattatttacaatggcctaaaagcccgttgataagaggttgttatataaatcataatagatccataaagtgaaacacaactgtaagaaaaacgaggaggctgggcacagtggctcacacctg

SEQ ID NO: 72604 - DNA, 206 bp, Homo sapiens; identical to SEQ ID NO: 20823
  chr7:380935-381141
  hypo

SEQ ID NO: 72605 - DNA, 31 bp, Homo sapiens; identical to SEQ ID NO: 20824
  chr7:396925-396956
  hypo

SEQ ID NO: 72606 - DNA, 405 bp, Homo sapiens
  chr7:409494-409899
  hypo
ctccaatccgccgtggccagacgcccggcgatcgtccactgtgccgaggccccgggccccaggctggctgcagaggcgaacgacgcggccggccccgcgctgcagacgggccgcctaccccagcggtgccaccaaggccgctctcaggctgccccacagctgcgtgccaagcccctgacgggcactttatggcacgttatctcgcctgtgccccacaacaacccggccgggtgggaattccgctcccattaaacagataaggaaccgggattcggagaggcgagggcggccccaggtcccgcgggttataaagcaagggctggacccagcccgggcccacctgactccgagcccacctgatgctccggcacgggcccacgccccgttaataaaatgtaataaata

SEQ ID NO: 72607 - DNA, 30 bp, Homo sapiens
  chr7:410139-410169
  hypo
gggtgctccgtggctcggtgcactggccct

SEQ ID NO: 72608 - DNA, 119 bp, Homo sapiens; identical to SEQ ID NO: 20825
  chr7:414909-415028
  hypo

SEQ ID NO: 72609 - DNA, 31 bp, Homo sapiens; identical to SEQ ID NO: 20826
  chr7:416864-416895
  hypo

SEQ ID NO: 72610 - DNA, 429 bp, Homo sapiens
  chr7:418416-418845
  hypo
cattaatttatttttcattcacgaagaagcccgtggggtacaactgagttagagacacaggacgctgcgccggcggtgccagctcctgaacccggccacctgcagtcactcacacgtcctgggagctgacaagctcagccccactgcgtggcggcccagggccaagggtgtggaggctgccccgtctgcgcccatttcacgactgtgggactgctccacacctggggtctcaacagacccccacaccagtcctagcgtagagaaccgaggatgccctccttgcagatgacaaccccaaggccaagagcagggaagggccctggtcacccagccaggccggcagagctgtggctggaccacgccgggtgagagcctcccccacctggacgcatggtctggcccacggcctgtccccgctctcaggctgct

SEQ ID NO: 72611 - DNA, 31 bp, Homo sapiens
  chr7:425949-425980
  hypo
accatccccttggtgacgagttcctgctcag

SEQ ID NO: 72612 - DNA, 147 bp, Homo sapiens; identical to SEQ ID NO: 20828
  chr7:429736-429883
  hypo

SEQ ID NO: 72613 - DNA, 453 bp, Homo sapiens
  chr7:431386-431839
  hypo
tgtgggctccactcccgggctcacccaggccagctctggatgctgaagccaccaggcacggggctgtgtgtgcagaagcagccaggcagggcggcccagcagacgcagggagcggccgccagccgctaggatcccgatgccgccgcaagtaaggacaggcccgggtgctgccgcaggaggccaggcctgcgctcgccgctgtggaatgtgtgtttgtctgatgagcatccctgcagggccccagatggagggtgtgacaaggatgggggctgagtctccagggcccgggggcacctgcacgctgcccctggcaggggcccgggcatcccacctgagctggcagccctgagcctgagaccagggctctgactcacttctgggccgccctcctcacagagatctgagaggggctttcccggagccaggcagggaggcggccgtgcacctgcgggg

SEQ ID NO: 72614 - DNA, 52 bp, Homo sapiens
  chr7:432225-432277
  hypo
cagcggtgtgcaaaccggggcccaaggccagacaagacgcaggcctacgtca

SEQ ID NO: 72615 - DNA, 191 bp, Homo sapiens
  chr7:438532-438723
  hypo
ctgtcctggtgggagatctgccgtcaccctcgcattgctgtcccggtgggagatctgccgtcaccctcccgttgctgtctcagtgggagatctgccatcaccctcccgttgctgtctcagtgggagatctgccgtcaccctcccgttgctgtctcggtgggagatctgccgtcaccctcacattgctgtcc

SEQ ID NO: 72616 - DNA, 393 bp, Homo sapiens
  chr7:462784-463177
  hypo
gcatcggatggaacccgggtgttggttccaggggtccccgccctatgcaccgcaccccctgctcaggccggcttatcttcgagggaataagaaagcatcgtgtccaccccaagacccccgcaggcccagtgtccccagagggccgggcgccccaggcctagtgaggaaggggcacccactgaggctgctgggagctttcagggtgaggggtgtggcaccggggacggaacgcccaggccaggtttcaggctgggattaagggtcctccagaccctccttgaattttaggagaagcacgaaggggtgggggcgtctctctcttctcttaggagatctggaggagacttcgggcactgcactgtggcctccacgacaagccgaggaacaaggccg

SEQ ID NO: 72617 - DNA, 31 bp, Homo sapiens
  chr7:469230-469261
  hypo
caagccgtcggttatgcgttccaggcagccc

SEQ ID NO: 72618 - DNA, 457 bp, Homo sapiens; identical to SEQ ID NO: 20829
  chr7:469754-470211
  hypo

SEQ ID NO: 72619 - DNA, 118 bp, Homo sapiens; identical to SEQ ID NO: 20830
  chr7:479136-479254
  hypo

SEQ ID NO: 72620 - DNA, 168 bp, Homo sapiens
  chr7:480949-481117
  hypo
aggccgcagcacataacgaggtaggaagagccggagaaggcctggctggccctgggagacacgtccatctcactgctggttcataagcatgtgggcacccgggaagctggagcgtggcctgtgtgacgtgggcgcccaccaccacgatgaggccggttcataaacatg

SEQ ID NO: 72621 - DNA, 36 bp, Homo sapiens; identical to SEQ ID NO: 20832
  chr7:485247-485283
  hypo

SEQ ID NO: 72622 - DNA, 30 bp, Homo sapiens; identical to SEQ ID NO: 43740
  chr7:500667-500697
  hypo

SEQ ID NO: 72623 - DNA, 455 bp, Homo sapiens; identical to SEQ ID NO: 20833
  chr7:503582-504037
  hypo

SEQ ID NO: 72624 - DNA, 30 bp, Homo sapiens
  chr7:516718-516748
  hypo
gagccctcagacggcggcaggaggcatcgc

SEQ ID NO: 72625 - DNA, 30 bp, Homo sapiens
  chr7:516951-516981
  hypo
gggaaccacagcaccgtttcgcggctgttt

SEQ ID NO: 72626 - DNA, 31 bp, Homo sapiens; identical to SEQ ID NO: 20834
  chr7:526252-526283
  hypo

SEQ ID NO: 72627 - DNA, 499 bp, Homo sapiens
  chr7:531099-531598
  hypo
cgccggatgctggtgcgtggctgggtgaccgggggccggatcataaatactgcacattttttggtggctcaaaggccgggatagaaacagtggctgttttattctgtagaaaccacacgcttttcatctgagtaccctcagggagtggggttggactccagctgtgccaggccagggtgggagtccagggggcaggccaactcccgcttgctgcagtcacctttgaggccccgctgggtcccggctcccaccccagggagaacgggagcagcctcaaatgctgacggcgaagacccagggcccccagaagtgcgagggcctccttcagtgcccgctcggggccagggactctgccaagtgacctggtgtgcccagaaaggactcagcccccagcgctgggcagggcaaggtggcctgggaagtccttcagggagggcaggcagggacgcttcaagagcctggggtctagaggtctcatggtgccggccctcaccacagc

SEQ ID NO: 72628 - DNA, 108 bp, Homo sapiens
  chr7:532033-532141
  hypo
cccggccactcactccgttttcccagctgccgccccatcagaaaagtcctgcgcttcaaccccgttccttcagcctgggcagcccccctgctccggttcccctgtgcc

SEQ ID NO: 72629 - DNA, 31 bp, Homo sapiens; identical to SEQ ID NO: 20836
  chr7:532562-532593
  hypo

SEQ ID NO: 72630 - DNA, 71 bp, Homo sapiens
  chr7:533201-533272
  hypo
gcctggacgacagagccagactgcgtctcaaaaaagaaaagaaaagaaaggctgggcgaggcaggcgggtc

SEQ ID NO: 72631 - DNA, 189 bp, Homo sapiens
  chr7:534691-534880
  hypo
gcacttggggagctcccgccccaatgctgctccggagtctggggcccagcccacccctggggtggggcagagtcaaggcccaggagatggaagggcccctggatgcccggccacagcacaagtcctgcctctctgtgtcctgcgacccttctacttggggccccctaggcgttccgggcctgccagggg

SEQ ID NO: 72632 - DNA, 30 bp, Homo sapiens
  chr7:537227-537257
  hypo
cactcagccacaaacgggctctggggcagg

SEQ ID NO: 72633 - DNA, 30 bp, Homo sapiens
  chr7:540522-540552
  hypo
tctcctgccagtgccgcagcttgggccacc

SEQ ID NO: 72634 - DNA, 30 bp, Homo sapiens
  chr7:540760-540790
  hypo
tcttcccgataatccggattcaggcttgtg

SEQ ID NO: 72635 - DNA, 105 bp, Homo sapiens
  chr7:544999-545104
  hypo
gccgccccacctcaacactcccggcgcgaactcacccaagactacaacccagggatgccgtcacccctctagacctgggatgccgagtccctactgctacaaagc

SEQ ID NO: 72636 - DNA, 76 bp, Homo sapiens; identical to SEQ ID NO: 20837
  chr7:545345-545421
  hypo

SEQ ID NO: 72637 - DNA, 698 bp, Homo sapiens
  chr7:551452-552150
  hypo
acaaaatatcccccaaatggacgcgggggtggagccctggagccaggtgtgagtggggcggggcacacgggtgtggtgagggtgtcggggggcagccgccggacacagcacgcgcgtccccaccagttcagcagccggcgcaggagcacgatgcccacactgcgaattggaaattaggcgcgaccacgtttccggcaaggctcctggggacaggccccgacaagacagggcgcttaaggaatttatgatggctcttctctcctggaagctctcttggcccagaccaggactccaggaggagcaggcgggctggggcaggagacaccctcgaaggagggaggcctcgggagaggccagagccagaggcaccagggccaggcctattttagggaggagggaacgggtggcttgcctgaggccactgcgctgggagagcgggcagctcctccccacccggccctgccctgcccatcgcggcctcctggactcaccctgacccggccctgccctgcccatcgcggcctcctggactcaccgatgcttctcttcctccgaatgggcaggggccgcttctcgggcacatgcttagtggcatggaccccgtgagctctcaggctggtgtccaaagaatcctcactccctgcaggcggaaggagaacaccgtgaatgccccaggcccgtgcgctgtgccctgggcc

SEQ ID NO: 72638 - DNA, 293 bp, Homo sapiens; identical to SEQ ID NO: 5277
  chr7:557697-557990
  hypo

SEQ ID NO: 72639 - DNA, 37 bp, Homo sapiens; identical to SEQ ID NO: 43744
  chr7:558726-558763
  hypo

SEQ ID NO: 72640 - DNA, 506 bp, Homo sapiens; identical to SEQ ID NO: 43745
  chr7:558985-559491
  hypo

SEQ ID NO: 72641 - DNA, 74 bp, Homo sapiens
  chr7:576730-576804
  hypo
cgtggttgttaggtgtcggtttctcaccctgcagctgcttgagtgtcctcacaacatggcggctggcatcccgg

SEQ ID NO: 72642 - DNA, 43 bp, Homo sapiens
  chr7:577740-577783
  hypo
caggggtgcacagcaggagtgcgctgcggtggatcagggccgt

SEQ ID NO: 72643 - DNA, 150 bp, Homo sapiens
  chr7:578809-578959
  hypo
tggaaggacccttccagctggcggggggctcccgtttggggacaagtgcctcagctacgccggtggagccttggtgaggaacccctgtgcccccactcactgcgggcagaggcaccacctctgggggccggtgtgaagccagactcctag

SEQ ID NO: 72644 - DNA, 30 bp, Homo sapiens
  chr7:581530-581560
  hypo
cacagcagaagctccgggaggcacatgccg

SEQ ID NO: 72645 - DNA, 32 bp, Homo sapiens
  chr7:587415-587447
  hypo
gttttttttttttttttgagacggagtctcac

SEQ ID NO: 72646 - DNA, 149 bp, Homo sapiens
  chr7:589081-589230
  hypo
cctcgcttgtctttcgggggaacccaggaatcccctgggaagcttctctgcactggcctcaccctttcgggcctggctggctcacgtcatcactgcgggatccaagacacatttaagggacaagtcggttgagcgggtcggggcgtgtg

SEQ ID NO: 72647 - DNA, 30 bp, Homo sapiens
  chr7:590083-590113
  hypo
tgaagctgttgtaacgctgaatgttcctct

SEQ ID NO: 72648 - DNA, 132 bp, Homo sapiens
  chr7:593560-593692
  hypo
acagaccgggcggctgagtgccgccactgtgggcagggggagacagggagcgtgccctcagccgggtgcccacagactcagaccccgggcgctggagagagggaagactccgtgggcccccacccacaggaa

SEQ ID NO: 72649 - DNA, 30 bp, Homo sapiens
  chr7:593917-593947
  hypo
gcaggccaagcccccgcacaggagagccgc

SEQ ID NO: 72650 - DNA, 30 bp, Homo sapiens; identical to SEQ ID NO: 20842
  chr7:601254-601284
  hypo

SEQ ID NO: 72651 - DNA, 359 bp, Homo sapiens; identical to SEQ ID NO: 20843
  chr7:601503-601862
  hypo

SEQ ID NO: 72652 - DNA, 30 bp, Homo sapiens
  chr7:610322-610352
  hypo
aactccggccattgcggccgtcacacccag

SEQ ID NO: 72653 - DNA, 30 bp, Homo sapiens
  chr7:611045-611075
  hypo
cctggttcaggcgtcggcggggaggaggcg

SEQ ID NO: 72654 - DNA, 359 bp, Homo sapiens
  chr7:612443-612802
  hypo
gcacagggcatctgcgacccaccaaggccgtgatttacaaaacaatgtgctttagaaactgctggaggaagaatgacagtgagcagacagggcaggacgccggccccagggagagcgagggaccggcatctcctccacgcgctgcttcaagaaaaacaaacggcggccacgagggcagccactgagcctccagcgcctgccgagaagccgccccaccggccgggccccgccgcacctgtctgatgctgtcggtggccgccctggacgtgcggtccacagctggaaaccgcaataagctgcgaagcgcgtcggttccgagcctctgatccctgcaccccggggtcacactgacttaccaa

SEQ ID NO: 72655 - DNA, 30 bp, Homo sapiens
  chr7:618959-618989
  hypo
tggacgggctccagcgcatccgccacggtc

SEQ ID NO: 72656 - DNA, 40 bp, Homo sapiens
  chr7:635125-635165
  hypo
gcaggtggggtgtgtgcggggagggcgtggagggtctcct

SEQ ID NO: 72657 - DNA, 37 bp, Homo sapiens; identical to SEQ ID NO: 20845
  chr7:636568-636605
  hypo

SEQ ID NO: 72658 - DNA, 30 bp, Homo sapiens; identical to SEQ ID NO: 20846
  chr7:637207-637237
  hypo

SEQ ID NO: 72659 - DNA, 30 bp, Homo sapiens
  chr7:645485-645515
  hypo
cctggtgtattcatcggcctcggatctgga

SEQ ID NO: 72660 - DNA, 43 bp, Homo sapiens
  chr7:649822-649865
  hypo
tgtggctgcaccccagtgactcgaggctcacgttccactcacg

SEQ ID NO: 72661 - DNA, 133 bp, Homo sapiens
  chr7:653115-653248
  hypo
gtctgaggaagcgtacgggatcagaaccagcagctccgttcacagccaaactcgccttcaaaaggcaaggagatggcgcgccaagctcagcccctgaaatcacacacgcggggttgaacgtgagtaactcagc

SEQ ID NO: 72662 - DNA, 293 bp, Homo sapiens
  chr7:653524-653817
  hypo
gccccaggacagggaagcctgcggagccaagagggtgcagtgctgggaggtccccgcaggggcaagcagggctgccaccaagcgggtgggagacacccaaggactcgtccaccacccagggaaccggactgtgaggttcaggtcagcatggagggcgggaggcgtggcgcccacagaggggaggggagccaggcccagatgacagacgcctgcagactccacgccccgcacgcccgaccaggacaggccaacgcagggctgggcacttcttcggactcacaggaagcctctgt

SEQ ID NO: 72663 - DNA, 331 bp, Homo sapiens
  chr7:667313-667644
  hypo
agggtgggcaggggctcgggcgctctccatccagagccccccgcccagctcacgcccgccctccccgggcactgggggaggaggtgagcacccgccactcaggctcaggcagcctggaagatccaggccacgactgccagcgctcaactccactcggccctcactggtattttccgagtgcccgctatgtacaggcaggtctgtgctgggcgccaggttgccgggaaatggggcacacacagcccctgtctcataaaggcaccagcaaaacaggggtgaacatcgaatgggtggggcccttctgactgtcactcacggaacaaacacaggc

SEQ ID NO: 72664 - DNA, 30 bp, Homo sapiens
  chr7:667964-667994
  hypo
aggcgaaggcgggcacgaggcgggagccgc

SEQ ID NO: 72665 - DNA, 30 bp, Homo sapiens
  chr7:668335-668365
  hypo
actgcagggcaaccccgcctaccccgggta

SEQ ID NO: 72666 - DNA, 69 bp, Homo sapiens
  chr7:671702-671771
  hypo
gaagaccgagctcacgtgtgagccagcgtctccgtgtgaccctcctgcgcacacgcaacagagcctggg

SEQ ID NO: 72667 - DNA, 30 bp, Homo sapiens
  chr7:672093-672123
  hypo
ggctcagctcaggacggccactgcgtctga

SEQ ID NO: 72668 - DNA, 152 bp, Homo sapiens
  chr7:675430-675582
  hypo
agttggtccaaatcacagctccgacacttactagctggatgatttcagcaggccacttaatcgccaggcctcagtttccccatctgtgaaacagagctacggacagcaggttcacgaagcattgtaaaagtaccagcaccgcgcccacacat

SEQ ID NO: 72669 - DNA, 30 bp, Homo sapiens
  chr7:710325-710355
  hypo
tccgagctcccccacgccacagcatccagc

SEQ ID NO: 72670 - DNA, 70 bp, Homo sapiens
  chr7:711711-711781
  hypo
ttcccagaaccctgcacggagcctggcacacaatgaatcctctggaagtatttgtcgtcttaaattctgt

SEQ ID NO: 72671 - DNA, 347 bp, Homo sapiens
  chr7:716114-716461
  hypo
gcatgcggaagaggccggaacacgaagcccacggtaatcacaccacctgtgcctgcctaggtatagcgcgcgggggaaccgcagatccagaccccctatttgaggaaggcagccgggccttcccagagcagggactcagctcggcagcagggcaggtgcacgcagcatagtatttcgggaagccacccctgcgtggtgagcccacgtttcctgagagctgtgacacgcttctcctggcgccgagcgttctgtattccatggcccatgagtcagagaaacggcaaagcctccctggaggccggggagggcggcggtgattcccaggagagcaacgggggctgcctacc

SEQ ID NO: 72672 - DNA, 264 bp, Homo sapiens
  chr7:716714-716978
  hypo
gctgtgattcccaggcgagcaacgggggctgcccacctcctggaggccagggagggaggcagtgatgcccaggcaagtggcgggacctgcccacctcccggaggccgaggagggcggcggtgatgccggggcaggggacgagtctgcctacctcctctcgttgtcatccaggtgagcgaagagcacgttcttggagatggccttggccagcgcagtcatggttttgtagtccttgggaatcacctgaagcggagccaacacatc

SEQ ID NO: 72673 - DNA, 31 bp, Homo sapiens
  chr7:718852-718883
  hypo
actggggaagccatgtcgatacatgacagac

SEQ ID NO: 72674 - DNA, 30 bp, Homo sapiens
  chr7:731239-731269
  hypo
ggtggacgccctgccgtgtgctgaatggca

SEQ ID NO: 72675 - DNA, 32 bp, Homo sapiens
  chr7:744079-744111
  hypo
aatgtaacaacttaaatgaaacggaacaatgc

SEQ ID NO: 72676 - DNA, 93 bp, Homo sapiens
  chr7:746772-746865
  hypo
cagctccatttgagaatccatcgcaagctaagaggaattcttcccagttaaacgcacccacatgtagaacacgcatgcaacttcaaagacttc

SEQ ID NO: 72677 - DNA, 22 bp, Homo sapiens
  chr7:755892-755914
  hypo
ctatgttgcctaggctagtctc

SEQ ID NO: 72678 - DNA, 30 bp, Homo sapiens; identical to SEQ ID NO: 20852
  chr7:768551-768581
  hypo

SEQ ID NO: 72679 - DNA, 90 bp, Homo sapiens
  chr7:778947-779037
  hypo
cgtcgtggcaggtgcggccgtggcaggtgtcgactgcattaaaccctgggctgtctctgctcgagacctgccggcgccatgggtgaagac

SEQ ID NO: 72680 - DNA, 30 bp, Homo sapiens
  chr7:781195-781225
  hypo
gttctgagcccaggcggccgcgtcggaaag

SEQ ID NO: 72681 - DNA, 30 bp, Homo sapiens
  chr7:790369-790399
  hypo
cccctgcccagcaccggccagtatttcttt

SEQ ID NO: 72682 - DNA, 30 bp, Homo sapiens; identical to SEQ ID NO: 20854
  chr7:794470-794500
  hypo

SEQ ID NO: 72683 - DNA, 30 bp, Homo sapiens; identical to SEQ ID NO: 43749
  chr7:797705-797735
  hypo

SEQ ID NO: 72684 - DNA, 83 bp, Homo sapiens
  chr7:799678-799761
  hypo
ggctcctccagctccgagggagacggggccgcgcggctcctccagctctgagggagacggggccgcgcggctcctccagctcc

SEQ ID NO: 72685 - DNA, 50 bp, Homo sapiens; identical to SEQ ID NO: 20856
  chr7:803319-803369
  hypo

SEQ ID NO: 72686 - DNA, 172 bp, Homo sapiens
  chr7:807889-808061
  hypo
gcgaggaggagctagcgctgggaggggagacacgtggtctgggcggaagtgtccgtgctgcgagcaggagctctcgctgggagggcagacacgtgatcctggcggaagtgtctgtgctgtgagccgcagctcacactgggagggaagacacgtggtccgggcggaagtgtct

SEQ ID NO: 72687 - DNA, 729 bp, Homo sapiens
  chr7:808522-809251
  hypo
cagaaactgggtcagaagcagcgtggttctcgtggcagggcggcacttggcccaagactcgtgctctggcgggaggctcaagtcaggcgtcccagcagcttcggtgcaacgcctcctgcccggctgcgtggggaggccctccaagacaccagctggtctcaccgcgaggcctgacttcgagccagagcagcgagtacattgcgtctccgtgtggcaagggcaggtgcgggggtctcagtccactaccgagcagcctgctctgatgactggcggcgccagggagaaggctcacatcgcgaggtccccagcaacggctcaaggtgactcacagttgcttggataagccagtggacgctccctctacactggcccggggccagagcgcctccttctgcggccccaacccagtccccaccctgagccttcagctcctgggcctgcaggctgagcctggcaggagacgctgcagggactctcagagctgtccttgccctgtcattcatggagacttacagggaggcggggcggccctactgcagtggggaccccttggggcgtaggatgcacagtgcaggcgcccaagcctcgcgcccaccggagagcagccacggtgcaggagcttggccctgagtgtgggcggggtgagggctgcaacgctgagaagcagatattaaagaagttctttcactgaaacaattgattttggtcgttgtttcaactattgcttga

SEQ ID NO: 72688 - DNA, 31 bp, Homo sapiens; identical to SEQ ID NO: 20858
  chr7:810520-810551
  hypo

SEQ ID NO: 72689 - DNA, 30 bp, Homo sapiens; identical to SEQ ID NO: 43750
  chr7:814375-814405
  hypo

SEQ ID NO: 72690 - DNA, 30 bp, Homo sapiens
  chr7:815402-815432
  hypo
tcgtgtggacgttgcgttctgccttaaaac

SEQ ID NO: 72691 - DNA, 246 bp, Homo sapiens; identical to SEQ ID NO: 20859
  chr7:818257-818503
  hypo

SEQ ID NO: 72692 - DNA, 405 bp, Homo sapiens
  chr7:819400-819805
  hypo
tcaggggtcccaggtcgccaggagcaccttgcatgtggctcgggatgcacggagtctcccgtgaggtgtgggtttcttaggaccccagggcaggtgtcccatgggagtatgaactaaatgcctttgtggacgtttagacgtgaaatgtctgctctagactcacacacctgtctcgctccctccttccagaactcttaaaacgcctagatgacgtgtccaacgatgtgaggatggcagccgcctccaccttggtcacctggctgcagtgtgtcaagggtgccaacgcaaaatcctactatcagagcagtgtccagtacctgtaccgagagttgctggttcaccttgacgatccagagagggccatccaggatgcaattttaggtgagactccgacggcttggcctt

SEQ ID NO: 72693 - DNA, 257 bp, Homo sapiens; identical to SEQ ID NO: 43751
  chr7:822391-822648
  hypo

SEQ ID NO: 72694 - DNA, 987 bp, Homo sapiens
  chr7:834224-835211
  hypo
ccagtctgcagtgcagggatccgggtccaggggatgtctctgagcccccaatcctttacggggccttttcctggggtccctgtgggctccatcccgggatgcaggacagagatgtgggatgcggaagggttccccgcagggatccaggtccgggggcaggaggagcccagagggtggcaccatcacgcaaaggcctccagaggcgtggcccgggacaagcacagcgccagccgcctgcgctgccagggcagggtccacacccacagactgtaacctggacccgggcagggcggggtccacacccacagactgtaacctggacccaggtggggtccacacccgcggactgtaacctggacctgggcagggcagggtccacacccgcggactgtaacctggacccgggcagggcggggtccacacccttggactgtaacctggacccgggcagggcggggtccgcacccgcggactgtaacctggacccgggcagggcggggtccgcacccgcggactctaacctggacccaggcagggcagggtccatccacacccacagaatctaacctggactggggcagggcctaaacccagggactctaacctggacccgggcaggggaagggtccacacccgcagactctaacctggaccagagcctgggagggtccacacccgcagaatctaacctggacctgggcagggcagggtccacacccacagagtctgtctaatctgcagaggacaagggtggggtctcccacagagccagcctgaggggtgggtgcacctgaggggtgggcgcacctgaggggtgggctcgtcgccctctgcctcatgctggcaggacccgagaggcctgggagtgctgggaactgagaaacagtcatcaccaattaaaagtcccgctgccttttattaacaccatgcgtcacccttctgtacaatatcagtgagaaaacactcgcctaaaaaaaaccttttgtt

SEQ ID NO: 72695 - DNA, 16 bp, Homo sapiens
  chr7:842534-842550
  hypo
aaagaaagaaaaaaag

SEQ ID NO: 72696 - DNA, 30 bp, Homo sapiens
  chr7:862503-862533
  hypo
cctgtggccacccgcgaattcccgcacaca

SEQ ID NO: 72697 - DNA, 142 bp, Homo sapiens
  chr7:874774-874916
  hypo
aatagtgacaagcccatttgccggccactggcttcgccagtgatgcatgcgggtcttccgcccccacccagcacttcggagcctctgcgactggtgcttcagttcacgggttccccagcccgctgtcctgcaccagtggcct

SEQ ID NO: 72698 - DNA, 36 bp, Homo sapiens
  chr7:878052-878088
  hypo
tggattaaatctcacgtccgcgtagtgttgacgagg

SEQ ID NO: 72699 - DNA, 30 bp, Homo sapiens
  chr7:881995-882025
  hypo
catgtgcgccttgtcgggtggtcattgggt

SEQ ID NO: 72700 - DNA, 123 bp, Homo sapiens; identical to SEQ ID NO: 20864
  chr7:882989-883112
  hypo

SEQ ID NO: 72701 - DNA, 30 bp, Homo sapiens
  chr7:884810-884840
  hypo
tgacagtatgctggcggtcagggcccaagc

SEQ ID NO: 72702 - DNA, 230 bp, Homo sapiens; identical to SEQ ID NO: 43755
  chr7:889349-889579
  hypo

SEQ ID NO: 72703 - DNA, 30 bp, Homo sapiens
  chr7:895442-895472
  hypo
gagggtctgcggggcgcctcctcctctgtc

SEQ ID NO: 72704 - DNA, 31 bp, Homo sapiens; identical to SEQ ID NO: 20865
  chr7:897565-897596
  hypo

SEQ ID NO: 72705 - DNA, 220 bp, Homo sapiens
  chr7:899730-899950
  hypo
ataggacatttgtgtccgtctgctgttttactaggtggacgtgcaagtcagagaaatggtgaaactcctgttttccgaagatcagcaaggcggttctctggaacagctgctgcagaggttctcatcacagtttgtgagcaaaggcgacttgcagacgatgctgcgagacctgcagctgcagatcctgcggaacgtcacccaccacgtttccgtgaccaag

SEQ ID NO: 72706 - DNA, 31 bp, Homo sapiens; identical to SEQ ID NO: 20867
  chr7:900163-900194
  hypo

SEQ ID NO: 72707 - DNA, 369 bp, Homo sapiens
  chr7:902856-903225
  hypo
ccgccctcccgagctcgcccttgctgcccagcattcaccagcgccagggcccctggagtgccgccctcccgagctcgcccttgctgcccggcgttcaccagcgccagggcccctggagtgccgccctcccgagctcgcccttgctgcccggggttgtgtgctgccttcacggccaacttggtttttgtttcttgggggttttttgtcctgctttgacaacaacattctgcctgtcctgtatcctactaagggccaaactggacttgttttttatgcttcctcttattattgagatgtaattcacacaaaaattcagcgtttttaaatgtacagctccgtggctattaacatattcgcggtgcagccatc

SEQ ID NO: 72708 - DNA, 30 bp, Homo sapiens; identical to SEQ ID NO: 20869
  chr7:906025-906055
  hypo

SEQ ID NO: 72709 - DNA, 452 bp, Homo sapiens
  chr7:907650-908102
  hypo
gagcagttcaaggctcagctccgtcttcacagcgcggtagaagacggcttgggggctgaggggcagtaaatccacagctggcatagaggagaagccggcgggtacgtgcccatcgttcaccatctcttctaaacacgaatgaaatgcgtgtgtcgtcctcacacactgaaggcaggctgcgtgcacggtctcctcctccgttgcgcacagcaacgtggctgcctgggcgcagcgtctgcaacttgtcagtcagtccctgtgtgtgcctggggacgctgtgctgcgaacagtgctctccggtcacatctgccctgcacctggaggtgggggtgcgatcgcaggccagaggcagatgtgtgcgcagcaggccgaccttgccaggctgtgcttctggggctgcaggctgcaccgtggccgggttaggttagaacgtgcattttcccagggcatca

SEQ ID NO: 72710 - DNA, 64 bp, Homo sapiens; identical to SEQ ID NO: 20871
  chr7:915323-915387
  hypo

SEQ ID NO: 72711 - DNA, 56 bp, Homo sapiens
  chr7:920489-920545
  hypo
acattccccaagttacgctttttgttttttgagacagagtcttgctctgtcgctca

SEQ ID NO: 72712 - DNA, 393 bp, Homo sapiens
  chr7:920784-921177
  hypo
agccatagcacccagccattttttaaaatgcttttatgtcaataaatatatgtaattgcacatttacatttaaatatttatgtaaaatgtataatttggtgaggtctgacatgaatgaactatgaccagtcaagacacagaagataccacggcactgtggggctctgcaaccaggcctcctcgcccccactcccaccccaccccaccccatccccggcacccgtgcatctgcgggctgcacttaggtgaggtggtgtttcctggagttttacgtatgtggaatcacagtgcgcactttctgtctaaccgcttgaattcattcaccacggaggctgggagactcctcctggagcgtccgcagttccttttatcgctgagtggttttccctgtgt

SEQ ID NO: 72713 - DNA, 30 bp, Homo sapiens; identical to SEQ ID NO: 20873
  chr7:924949-924979
  hypo

SEQ ID NO: 72714 - DNA, 770 bp, Homo sapiens
  chr7:925626-926396
  hypo
agatgagcgggggagcgcggtggcgagggcacgtgggcgtggctcacggtctcctctctgtggcaggtacatgtcccagagcaagcacacggaggcccgggagctcatgtactcgggagccctgctcttcttcagccatggccaggtaagccgtcttgcttcctcctgcatccctttctgctccgggcaggcaagtggaggtgggaatgacctcccacctccactgatgggcaaccttgcgctgccctgggcctcggccactggggctgtgggtggcagaggggcccagagtcccccctggcttggctgctccactctcaagactggggctctgcgctgcgtttgtgcacgatggggctgagagggcgttgtgttggtataaacgtccccgtccattttcatgtgattctcggccaggagctctctttttcggcggcattgccaagggacgtggtgctcagaagagactcctcagcaccggccgcactctggcttctgctggaaacccagccttgtctttgctgtcctgaacaggtcagggctttgttcttgattcttgtgtgttgctttctcttgtagcaaaacagtgcagcagacttgtccatgctggtcctggagtccctggagaaggcggaagtggaggtggctgacgagctgctgggtgagcatccggcccttcaccccgggaccctgtgacagcggccccagtacgcccctccccgggtctctgcgctgtgtttcgtgtctgcgtttgggggtcttgtgtgctg

SEQ ID NO: 72715 - DNA, 30 bp, Homo sapiens
  chr7:930778-930808
  hypo
tcccctgtccgagccgagctgcaggataaa

SEQ ID NO: 72716 - DNA, 69 bp, Homo sapiens; identical to SEQ ID NO: 20875
  chr7:931094-931163
  hypo

SEQ ID NO: 72717 - DNA, 30 bp, Homo sapiens
  chr7:931797-931827
  hypo
tgggccgcaggaaccgtgggcgcacgagct

SEQ ID NO: 72718 - DNA, 31 bp, Homo sapiens; identical to SEQ ID NO: 43757
  chr7:932818-932849
  hypo

SEQ ID NO: 72719 - DNA, 30 bp, Homo sapiens
  chr7:934206-934236
  hypo
ccctcaccgtgccccgtgacacaggcacct

SEQ ID NO: 72720 - DNA, 665 bp, Homo sapiens
  chr7:943347-944012
  hypo
cccagagccggctaccgtccacatctcctccccgtaggaccccagttccccccgaggtcccctctgggcattgtgggggcggtggatcctctagcccgagctggcagcccccactgacagggccaagctgggtggccccagagacagcgtggtgatccggctcctgggcagcccggccctgggaagctgccttcctgcacctgtcttcccatgctgcccggcgccagtgcccacactcccacacgtccaagcacccgccttcccacgctgcccagcccgacttcccgccttctcatgccgcctagctcaagtgcctaccctcccgtaccgtccaagcacccaccttcctgcgccacccgggcctgagggcccaccctcctgtgccacccgggcccgagtgctcgccagcacccaccttcccgtcctcatggtagatgaagatgttacgggtgctgttgtccttcaggtaggtgacctgcaggccgtgggggtggccgatcttggccggctggaaggtggcgttcaggtgctcgatcttcatcacggccttgggctccttggcctgagaaggggtggggtctaagcacctcacaggggccgtcgtccaagctcaagggagcaggaagggcagaccctgtgggtgctggcggcgcacctgctgtgct

SEQ ID NO: 72721 - DNA, 30 bp, Homo sapiens; identical to SEQ ID NO: 20877
  chr7:955104-955134
  hypo

SEQ ID NO: 72722 - DNA, 107 bp, Homo sapiens
  chr7:955678-955785
  hypo
ggccactccaggggccagaggcgggcacgccacctagggcgccacgtttcccaagtcacatcccggcccgaccagtcagaggtgacgagacagggactttttccagc

SEQ ID NO: 72723 - DNA, 662 bp, Homo sapiens
  chr7:959551-960213
  hypo
agagagccagggagaggtagccgggaggccccaccccacccgggtggcctcacctgccgagtagggctcctgcttctccgggtagatgaactcctgtcgctcgtacttggcccggatccactgctctcgaaggagcctgtggggagaggagagactgagccactgggccaaggcggcctccgacccagcacacgccgctctctggcccggaccctggacatctcaagaggctcatagggacccccggcagactcgagccgcccctctgggcacaagatcccggaagaaatgcagggtcagcctcctgcccgggacgcttctcactctgatattagtttattggtttcttgtgcgttcggcccccggagcatcaggcctcacgttctgcacaagcgttcccggtggacgggctggtgcctcccctctccttcccaccttggcctcagctgatgccccacagggctggggtacaggggttgagccaggcccccccaccccgagtcacacgcccctgggccctccccgaccctccccacctcgttggaccggatctgggaagtggccgcggcgccgccctccacccaccgtgctgccaccttgcaccccccgtgccgccctccacccgccgtgccgccctccacgtggttctgagacacaggacg

SEQ ID NO: 72724 - DNA, 171 bp, Homo sapiens; identical to SEQ ID NO: 20879
  chr7:965966-966137
  hypo

SEQ ID NO: 72725 - DNA, 172 bp, Homo sapiens
  chr7:966351-966523
  hypo
ggggccgtcaccacagtgacccgcagacccaaggctctgagggctccaccagcaccaggacgggaacgccacctcctcctgccccagggacaccatttctgagtgatcgaccctcccctgggacagggaaggagccagcgtccctaacgacggggtcccggcaaagggggcc

SEQ ID NO: 72726 - DNA, 143 bp, Homo sapiens
  chr7:966925-967068
  hypo
gcacactgtgctcctggcaggcgcaaaggccctgagggtggacgctggcaatgaccctgccgccagccaggtatggtgagccttgagcagcaggaggggccgccacaccccacgccagccccgagggcatgggagaggttctg

SEQ ID NO: 72727 - DNA, 288 bp, Homo sapiens; identical to SEQ ID NO: 20880
  chr7:986234-986522
  hypo

SEQ ID NO: 72728 - DNA, 99 bp, Homo sapiens
  chr7:986581-986680
  hypo
acatagtgagacaccgcgactccatccttatgaaaaaattttctataaaaggttaatttttcatatgaattgcacctcgatttggggttttgttttttt

SEQ ID NO: 72729 - DNA, 168 bp, Homo sapiens
  chr7:997100-997268
  hypo
cccctcagatctaagagatgtcggggctgagggggattcttccaaagaggaggctgctcggccgagatccgcaagtacctgcctggacccgagagcacagccgtcctgaaatcctgctgccctgactggctgtggtcagggctgggcggggcagtaggggagcccagg

SEQ ID NO: 72730 - DNA, 352 bp, Homo sapiens; identical to SEQ ID NO: 43758
  chr7:1001817-1002169
  hypo

SEQ ID NO: 72731 - DNA, 30 bp, Homo sapiens
  chr7:1006928-1006958
  hypo
gagggcgatcactccgtttctctatccagt

SEQ ID NO: 72732 - DNA, 705 bp, Homo sapiens; identical to SEQ ID NO: 43759
  chr7:1007357-1008062
  hypo

SEQ ID NO: 72733 - DNA, 58 bp, Homo sapiens
  chr7:1011970-1012028
  hypo
cccaaatgtccacacgaataaccccgaacacacctgtgtggccggaaaggcacaacgg

SEQ ID NO: 72734 - DNA, 46 bp, Homo sapiens
  chr7:1024994-1025040
  hypo
agcctggagtgatgggcgtgcagcaggaggacgggggccccagtgc

SEQ ID NO: 72735 - DNA, 114 bp, Homo sapiens; identical to SEQ ID NO: 20884
  chr7:1026934-1027048
  hypo

SEQ ID NO: 72736 - DNA, 30 bp, Homo sapiens
  chr7:1029386-1029416
  hypo
gcctgggtgacagagcgagattccatctca

SEQ ID NO: 72737 - DNA, 391 bp, Homo sapiens
  chr7:1029911-1030302
  hypo
gcagtgtgacagtggcgcgtgtgctgggggtggtgtggtcggcagtgtgacagtggcgcgtgtgctgggggcggtgtggtcggcagtgtgacagtggcgcgtgtgctgggggcggtgtgatgggacacctgctgtctgagacggccctggcccccgtcccagcgctgaccatgcacgtgagcggcaggcggcccctcaccgagaagagaggataagccgtggcacattcccacctgcgccacgtgaagcggcgccccaaggccaggacgtggtggccgggacacacgggtgcacggcaggcctcacactcccaggtggggccgcagggtccctaagtcatgggtggggctgctgctacggaggctgctgcaaggacgagaaggggacggag

SEQ ID NO: 72738 - DNA, 30 bp, Homo sapiens
  chr7:1036971-1037001
  hypo
caaggccaggggtccgggtgattccagagc

SEQ ID NO: 72739 - DNA, 30 bp, Homo sapiens; identical to SEQ ID NO: 20886
  chr7:1037328-1037358
  hypo

SEQ ID NO: 72740 - DNA, 30 bp, Homo sapiens
  chr7:1045573-1045603
  hypo
ggcagcggtcacctcgccacctgcccccaa

SEQ ID NO: 72741 - DNA, 30 bp, Homo sapiens
  chr7:1046331-1046361
  hypo
ctgcagggaaagagcgcatgacggtcacag

SEQ ID NO: 72742 - DNA, 30 bp, Homo sapiens
  chr7:1050056-1050086
  hypo
agactcccggctcccgaggctctgtgaggt

SEQ ID NO: 72743 - DNA, 198 bp, Homo sapiens
  chr7:1052678-1052876
  hypo
ggaatgggagcagcgcgggagggtggtggggccgccaggatcgggcgtggtaatgccgggacctgctgcttgctctgcttggcctgcacagtgtctggcccggagagcacaggtgagcaaggtaggacggctgtcacccacagacgagcagcggagaactttctctaactgccacccacgtgccgaccctccaaagaa

SEQ ID NO: 72744 - DNA, 30 bp, Homo sapiens
  chr7:1057654-1057684
  hypo
acccaaagtccccacggggctcagacgttc

SEQ ID NO: 72745 - DNA, 441 bp, Homo sapiens
  chr7:1059663-1060104
  hypo
gcaggtggccggcccgtccccagcctctcttcccactgaggagagatccaagggccggcggagtggtggtgtctgctgctctgcgggaacacgggcaccaggcccagcagtgcatggatgcggcaggccccgcgtgcgatgccctggtccccacgactgtttcttcccacgccgcggagtgcattccctcatgctcccgtcctgtgaacacgcgctgcagcctctgccctcctggggctccctgagagagggggcaccccttgctcccatcacagtcctcctgcagcctggggccccgcccagcacgcccaccaaaggggaggcccgctctcctgtcagagccaggacagcctctccaagaactcttcctgggccccagagaggagccccctaggttcgcttctcgccagccgctgccccatcttgcgtctccacccaagg

SEQ ID NO: 72746 - DNA, 403 bp, Homo sapiens
  chr7:1061546-1061949
  hypo
gggcacccagggcagctccctcggcctgggtcacaaggttcgatcctccgcgggggtggcaggaaagcccaagtccctcggcacacccaggtgacagcgatgacggcccacaggcgtggcgcctgggccacatcggacaggccatgtcctggagcactcgaggccccctggacagggcaaccaaccctgagtccaccggagtctgctcgcagaccaccaggagccccgctgcactgttcgtgagccacggtggtgacggcagctcaggagggaaggaccagaagcctggccccgtcccacgaggacagacgcaggcctgcggggaggcatgtccccacccacgggcgcctcctggaccacgagctcctctttctcctgcatcgcctcagaccccacccagggg

SEQ ID NO: 72747 - DNA, 385 bp, Homo sapiens
  chr7:1066100-1066485
  hypo
acctgtggaagccaccgctaactagcagtcggaggcggcgttgtttctaagacaggcaggcagctccggcaggagcagccgctaagcacaaggacggccaaccacacaaagcctgcttctcaaccactcgcaggaaatcggctcacagttgctccccattcttcaatgctgatcctgccactttactgaaaatcacattattaacgtttaaaaaacgtatgggaaccatgcaaagacatccacgcccctcagttgctgccgctccagcacctggctccgaagtctgtgcagaaggcgaggctcccgtagtgctcgagagggccttgcacgctccccgtggagggaacaaagctacgtggattttccagcgcgccgcccacttcac

SEQ ID NO: 72748 - DNA, 71 bp, Homo sapiens; identical to SEQ ID NO: 5285
  chr7:1069636-1069707
  hypo

SEQ ID NO: 72749 - DNA, 121 bp, Homo sapiens; identical to SEQ ID NO: 20889
  chr7:1071762-1071883
  hypo

SEQ ID NO: 72750 - DNA, 61 bp, Homo sapiens
  chr7:1075881-1075942
  hypo
cataagctgcggacttcgggcggttgtgctgtggccatgtagggttcgggtgctcgtgctg

SEQ ID NO: 72751 - DNA, 339 bp, Homo sapiens; identical to SEQ ID NO: 43761
  chr7:1083895-1084234
  hypo

SEQ ID NO: 72752 - DNA, 133 bp, Homo sapiens; identical to SEQ ID NO: 20890
  chr7:1086193-1086326
  hypo

SEQ ID NO: 72753 - DNA, 39 bp, Homo sapiens; identical to SEQ ID NO: 20891
  chr7:1097389-1097428
  hypo

SEQ ID NO: 72754 - DNA, 30 bp, Homo sapiens
  chr7:1103861-1103891
  hypo
gagacccgacacagcgccgggtcctgatgg

SEQ ID NO: 72755 - DNA, 30 bp, Homo sapiens
  chr7:1108068-1108098
  hypo
agcgctgagttggacgctgcctggtgtgga

SEQ ID NO: 72756 - DNA, 45 bp, Homo sapiens; identical to SEQ ID NO: 20892
  chr7:1113682-1113727
  hypo

SEQ ID NO: 72757 - DNA, 215 bp, Homo sapiens
  chr7:1115544-1115759
  hypo
tttattaaaaaaaaaaaccctcctgacctcaggtaggaacagcagagtctgagtcaccaaagcccggggctgccactctccagggcgccccactcccagctccagcggctgagtccaccaagccaggacaggcccaaggaccagagggcgaggtgattcacagtggagctcggaaagacccatccatgcccagcgccttgtcaaaaaccacaggg

SEQ ID NO: 72758 - DNA, 179 bp, Homo sapiens; identical to SEQ ID NO: 20894
  chr7:1124307-1124486
  hypo

SEQ ID NO: 72759 - DNA, 30 bp, Homo sapiens; identical to SEQ ID NO: 20895
  chr7:1132119-1132149
  hypo

SEQ ID NO: 72760 - DNA, 30 bp, Homo sapiens
  chr7:1133867-1133897
  hypo
ctcccctcctttcccgcctcacccacctgg

SEQ ID NO: 72761 - DNA, 445 bp, Homo sapiens
  chr7:1141909-1142354
  hypo
aggagctgggcccagcggcagtggcagttcccttctccaccgcgcagtcccactaaagctgcgggcagctcttgatttgtgtatcttacaagaagaagaggagggggagaagaagggaaaagtcggcgtctgcagccacactcaagttcttccgctcatccacgactgtgaagctcacagctccggccacgctggcgttcaacaccaggtcactgtcacttccacaggggacggtcttgcttctttggtaaaaccaaaggagtgtttcaaaccatgcccaccttccattcacctgtttttaaaatttttttttttttcagagcaggagcggacgtttattaaaaagctttaagagagaaaggaaggtgcactcggaagagaacccagcgggcgacctggagaacaggtgacccactgaactgtgatcctgcgcccctttccgtga

SEQ ID NO: 72762 - DNA, 31 bp, Homo sapiens
  chr7:1142682-1142713
  hypo
gagcagacctctgcagcgtgcgggccggggt

SEQ ID NO: 72763 - DNA, 31 bp, Homo sapiens; identical to SEQ ID NO: 5287
  chr7:1147466-1147497
  hypo

SEQ ID NO: 72764 - DNA, 30 bp, Homo sapiens
  chr7:1149690-1149720
  hypo
agacacggaggctacgcaaatctgccccaa

SEQ ID NO: 72765 - DNA, 30 bp, Homo sapiens
  chr7:1191756-1191786
  hypo
catcctgacgaagtcgcaccactggagcat

SEQ ID NO: 72766 - DNA, 30 bp, Homo sapiens
  chr7:1192673-1192703
  hypo
gtgctccgagccatcgcagcggagtctctt

SEQ ID NO: 72767 - DNA, 239 bp, Homo sapiens
  chr7:1225055-1225294
  hypo
gactgtggcctcaggagtcaacgcctcgctgtgcacctctcccctgcctcggtctcccgacctgccatgccctgaaaggatggcgcctctcagcgtggcgacgcggaccgagctgtctccatggtcatgctgtggccccgacacccacggcccctccgtggactttccctgccgccttttccgtccaccctccccctccgtggaggactttccttgccgccttttctgtccaccctcag

SEQ ID NO: 72768 - DNA, 30 bp, Homo sapiens; identical to SEQ ID NO: 43771
  chr7:1269166-1269196
  hypo

SEQ ID NO: 72769 - DNA, 78 bp, Homo sapiens
  chr7:1303423-1303501
  hypo
cacctccgcaggcagcgcgtcccccgcacacccgctgcccgcccggctttcactccagaatggcgctgcccgtgcctg

SEQ ID NO: 72770 - DNA, 176 bp, Homo sapiens
  chr7:1308345-1308521
  hypo
ccctggccaccctggcccttccggctgccggctggggacgcgggcgtggtgcggcaggcctgccttgattgtgtcgatgggagatgattttcaaggtgaaatttctagttcactagagtcactttcgttcaaggcgacgcacaaaatgtcatcccggcctgttccgcgtgcaacgc

SEQ ID NO: 72771 - DNA, 230 bp, Homo sapiens
  chr7:1315704-1315934
  hypo
ccgggtgacccgcctcggcccgctgagcagccgaacgcgctgacggatccattaggccgctcccggccccggccccctctccctccattcctggccggcgctgtaaatctccgccaatttcggtcctaatcatcattataaacccttcctctgcccgctcccgcgcctcacctcgctggcaaaacagcccctggcatgatcatcgcaccggcctgcggggtcagcagccc

SEQ ID NO: 72772 - DNA, 90 bp, Homo sapiens
  chr7:1318803-1318893
  hypo
tcaaaagcgacaggacggggagaatacagacctgaccctgagttaaaccgttcaggggaggggcgaggtgactcatgcctgtgatcctag

SEQ ID NO: 72773 - DNA, 30 bp, Homo sapiens
  chr7:1328612-1328642
  hypo
ccagacacagctcccgtcattcaatatggc

SEQ ID NO: 72774 - DNA, 305 bp, Homo sapiens; identical to SEQ ID NO: 20902
  chr7:1333574-1333879
  hypo

SEQ ID NO: 72775 - DNA, 395 bp, Homo sapiens; identical to SEQ ID NO: 20903
  chr7:1347153-1347548
  hypo

SEQ ID NO: 72776 - DNA, 232 bp, Homo sapiens; identical to SEQ ID NO: 20904
  chr7:1351443-1351675
  hypo

SEQ ID NO: 72777 - DNA, 30 bp, Homo sapiens
  chr7:1351987-1352017
  hypo
ggctgggagctccccgggtaccccactggc

SEQ ID NO: 72778 - DNA, 55 bp, Homo sapiens
  chr7:1354097-1354152
  hypo
ctctgctcaccagctgggtgacgctggacaggtcggctcccctttctgatcctca

SEQ ID NO: 72779 - DNA, 30 bp, Homo sapiens
  chr7:1354936-1354966
  hypo
gtcacccccagagacgcgcaccacccagat

SEQ ID NO: 72780 - DNA, 155 bp, Homo sapiens
  chr7:1357985-1358140
  hypo
tctggggcatcctcccaggtacgcctggttttggctgcgccttgacggacgctgttcattttgattctttgattcaggggtgtccgccaggtgtccctactgtaaagtgactccccgttgagactggatatcccgtttgtcaccaaattgtccat

SEQ ID NO: 72781 - DNA, 442 bp, Homo sapiens
  chr7:1370034-1370476
  hypo
ccatgtctcaaatcctccatgcgtgatggctcaggtgcgtcttccacgcagatcactctggcagggagcgcggatggagacccgaggctggggcctgctggctttgcccctctacgcgaacagaatggcctctgccctgcaggaatcttgagtccaggagaggagagtttccctggaggtggaggtcaggcccggcagtcagcaggccaagctccttcgggccagggcaagccggagggcttcccagagcgggcacagtggacagctgagcaggccagactctgacatgaggtctggacaggcccttccgcccttccggatgccagtccccctgcttgtctgaccactggcccgcctgcccacggggcggctgagatgctggcgtgtgcgtgcgcatgtgcacgtgtgtttgtgtgcgcgtggggctttctgacagccgata

SEQ ID NO: 72782 - DNA, 12 bp, Homo sapiens
  chr7:1370977-1370989
  hypo
gattctgggagc

SEQ ID NO: 72783 - DNA, 30 bp, Homo sapiens
  chr7:1391751-1391781
  hypo
gggcgtccatcctgcgtcccatgagctatg

SEQ ID NO: 72784 - DNA, 331 bp, Homo sapiens; identical to SEQ ID NO: 43790
  chr7:1408439-1408770
  hypo

SEQ ID NO: 72785 - DNA, 12 bp, Homo sapiens
  chr7:1408874-1408886
  hypo
cgcggaccccgg

SEQ ID NO: 72786 - DNA, 140 bp, Homo sapiens; identical to SEQ ID NO: 20909
  chr7:1451099-1451239
  hypo

SEQ ID NO: 72787 - DNA, 358 bp, Homo sapiens; identical to SEQ ID NO: 20910
  chr7:1460651-1461009
  hypo

SEQ ID NO: 72788 - DNA, 30 bp, Homo sapiens
  chr7:1468355-1468385
  hypo
gcagaatccaaaaccgtgacctgagacggc

SEQ ID NO: 72789 - DNA, 30 bp, Homo sapiens
  chr7:1473454-1473484
  hypo
gttccccaggaccgccgcagaggctcctac

SEQ ID NO: 72790 - DNA, 588 bp, Homo sapiens; identical to SEQ ID NO: 20911
  chr7:1473772-1474360
  hypo

SEQ ID NO: 72791 - DNA, 30 bp, Homo sapiens
  chr7:1474672-1474702
  hypo
gcactcagcatccccggcccacccagccag

SEQ ID NO: 72792 - DNA, 320 bp, Homo sapiens; identical to SEQ ID NO: 20912
  chr7:1475084-1475404
  hypo

SEQ ID NO: 72793 - DNA, 1801 bp, Homo sapiens
  chr7:1476252-1478053
  hypo
ccagtcagcatagacaataaccgcctggtcagaaagttctacggggctggctgaccctgagggccgggagcatggaccaggcgacctggcctggctgggaggggcccccggcacctgcccctcaccggagccggtcctcgtccagcgagtccacgatgtcactgcggtcgttcacggtgctcacgtactgctccagcagctcctgctcccgccgccgctcctgcagtgacttcagagcctctgtggggatggctcgtcagcaggagccccccccaccactgccatgcccctcacaggacacaatgtccccaccacccaagcgccaggctcctcttttggaggaagaaggtggggtcttggggggatccggagcagaatgaatgagtgaataagtgaatgaaggaaggaacggccacgtcagagcccgtgtgctgggatccttccccatcatctcgcagaaacaccactcgctgcagagatatggacactgaggctcagggcgtcgctgtccctgcagcacagcaaggaaagggcagaggcagacggcctgggcctgtgccctcagccagggcaccctgcatcacgagacaaatgcctatggctcgccctgactgctgctacactaaatgccttgtgcgaattgattcgtttaatcctcacaacagctgcgtgaggtgggtgctacaagcatcctcactttgcagaggatgaaacccaagcacagcaaggttaagtaccttggctgaggacacacagccaggaggtgggagatttgaaactcaaacgtgggctcgcctggctccagggaaggtctcaccaccaggacagtcaggtggcctcacagagccggcccccagacatcctgggctccgcggcatccctggctggggccccttggctggcgcgcgggggacgcaccgggcttggccatgagccggcgcagctcgccctcgatgtccagctgctgctcctccagacgctgggccttggacctgccgcacagacacgcgtctgaggcctgactctgccgccctgtcccccgcctggcccgcccagcccgcaacgaggtcctggacctgccacacagacacgagtctgaggcctgactcgccgcccgtcccccgcctggcccacccagaccgcaacgaggtcctggacctgccgcacagacatgcatctgaggcctgactctgcgctcctgtcccccgcctggcctgcccagcccgcaacgaggtcctggccttcgaggaggggcccacggctgggctctcacttgtacatcagctctgactcctgtctcagcagaagctgcttctcgtgaatgagccagaaccagtccaccatgaggctatcctcagcgtcatctggggagaggagccagctggggcaggggggcccgccagagttcatggcccccagccccaggactgagggtgtctgtgggagtcgggctggcccagggccaggccgaggcgctcacctccctcggccgcccgcagtcgcttctccagctccacgccgcggagctccagggcgtccagccgcctctcgatgtcctgcagctgcctctgtatctcctccggggagaggtagtcggggtgcagctgggaacggaggggcggtgaggatgccggagggctgggcccctgcccggctccccaccactactcaccctgactggggaggtcaccgtctcgccaggcagagcagggacattggccggggacaagggtctccctggagaaggagcagggtgagcctctgggacctgggccaccaggcccaacgtgaccaggacaca

SEQ ID NO: 72794 - DNA, 184 bp, Homo sapiens
  chr7:1478558-1478742
  hypo
agccagttgtcacaaacgtcgaggctggcagggacggccagtctcctgcggcggggtggggagggggacctggctgcccccaggtggggagacagagccacgcttcagagcagggccactgggagcctggggtctgtcccagcacagccaacagctcgctgggtagcccggccatccccatgcc

SEQ ID NO: 72795 - DNA, 357 bp, Homo sapiens
  chr7:1479113-1479470
  hypo
tggacacatgcatcacgtgtgggcacacatgcatcacatacacgaacacagacacatggacacgcatcacacatgtacacatgcatcacacgcatgaacactgatgtacacatgaatacacatgcatcacacatcacatacatgaacagacacatggacatgcatcacgtgcacatgcatcacacacatgaacacagatgtacacatgcgcacacatgcatcacgcatggatacaggcatcacatacatgaacacatgcacacatgcatcacacacatgcacacatgtacacacaagcctgcccaggactaccagcttctctggctgaccggagcgcctctccgcacaccccaggag

SEQ ID NO: 72796 - DNA, 403 bp, Homo sapiens
  chr7:1479733-1480136
  hypo
catgaggtcggaacccgaaccaccagccccagggcctggcccacctggaggggctcccaggccatatgcagaccagccggagggagcaggtggccttctgagcaaatgccacctcccagcccactgactacacctgctgggaccctcctgcaaacacacgtgtccatcgctacctgccgtggtgcgaagcagattccaggcgtgagctccgggccccacgggacccacacatggggagactccaccccagctgcaggcatggtgcgtgaacccacacgggtgctgccatgcccaggtgagacacgcaacgctgcccccaaaccagggacagcggcccccatgtccctcaggcaggggtgacctggcctctgctactcacagggaggtgcgtctatccctggat

SEQ ID NO: 72797 - DNA, 31 bp, Homo sapiens; identical to SEQ ID NO: 20917
  chr7:1483466-1483497
  hypo

SEQ ID NO: 72798 - DNA, 31 bp, Homo sapiens; identical to SEQ ID NO: 20918
  chr7:1484816-1484847
  hypo

SEQ ID NO: 72799 - DNA, 516 bp, Homo sapiens
  chr7:1488211-1488727
  hypo
ggggcctggtcctgcctggctcggcgggcgcggcagggactcactgggggagcggccgtggaagtagttgtaatactgggacacgtaggtcaagatgctcagccggtcaggcaccttcaaggccaccatgtcctcggcatccagcaaggctgggatgcccaagtgctcctcggccacgcggaaggcctgcgaaaggtgggagggggtcagcggggcagctgggagccccctccttctccaccaggccgcagctcacctcgactcaaagacacagtcttggagcccaaagaggcgtgggttggaggccggagctgagttctgctcgcgtggcctcccggcctcagcttacccatcattgcagcggggatcacggtcccatctgcacaggactgaggtcaccaggccggtgggcgctcaaggccccgtccaggtgaaacctcaggggatcctacccttcaccgggagaatcccaggccccacccaacccagacttacgcagtcttgaaacagctccct

SEQ ID NO: 72800 - DNA, 30 bp, Homo sapiens; identical to SEQ ID NO: 20919
  chr7:1490616-1490646
  hypo

SEQ ID NO: 72801 - DNA, 677 bp, Homo sapiens
  chr7:1491265-1491942
  hypo
ctggggctgcaagccgtgtcctgcctcaccccggcctgcatgtctgaccccggccagcctcggtctcagggcctcagtctccctgtctgggaggacaaccgcagctcctggtggcgaatctgacggccgtagctgcagcaaacaggaaggctgggcaggtctcaaacggagaagtgggggccgagacccctgtggccacgcagcctgggcggcctagttctgagcccagcctgcacagcccttgccaggccctgacccccataagaatgctccgaggcccggacagtgagcccatttcacctgtttcacagatggggaaactgaggccaggcagcagccacacggtggggtgggggcagtgggatgggggctgcaggctgcccacctctctccttaggaagcccccgccccgtccgcctgcagccctgccgtccatcaatctgctgggatccttgggaaccctccaccgtttccagcttggaccccctcccaggtaacaggtttcagacggcaggaccacccgtctgcacaggcggagcttctgcacgccggacaagatggggcgcggactcctctccgtgtggacagatgacgaggagccccctccctgggctcagtggcagcgaaagcggtttccgtctgctcgggcctgggccgatgcctctgtctgcctgggc

SEQ ID NO: 72802 - DNA, 30 bp, Homo sapiens
  chr7:1492142-1492172
  hypo
cccggaaagaatgcccggacggccgggagg

SEQ ID NO: 72803 - DNA, 348 bp, Homo sapiens
  chr7:1492392-1492740
  hypo
cacaggtctgggctgcgagttcaagcatcgcggcctcaggatgaggttcaagctgcattcggggcgtttgaggcctattcaactgggctgcaccaccccggccggtcccacagccaccacccatcctgccccaagctccttccccagggccggccctccagcctccagaccatggctccactctcccggcacagaacagcttttcccacactccgcccgatgcacccgccaggccctccccagatgcaccttgctgtccccgagctcacacccccggggcccctgagcagctgagctcaggggcccgatgctggcagaaatcgccgccagaaccgtctcgcaagcccc

SEQ ID NO: 72804 - DNA, 30 bp, Homo sapiens
  chr7:1493092-1493122
  hypo
cacctccgtccgggacgttggcctgcagaa

SEQ ID NO: 72805 - DNA, 96 bp, Homo sapiens
  chr7:1493402-1493498
  hypo
aaaatcaggtataccatggcccggctccaagacacacaccgtgggccaggcacacagtcggtgccctataaatgcgtgtgatgcatttgttctgtg

SEQ ID NO: 72806 - DNA, 88 bp, Homo sapiens
  chr7:1496421-1496509
  hypo
gggcccaggcacccatacaagcgcatgtccccacaccctggtgcacacccgacccccatgacactccgggttttccatcagccagggt

SEQ ID NO: 72807 - DNA, 685 bp, Homo sapiens; identical to SEQ ID NO: 43793
  chr7:1498584-1499269
  hypo

SEQ ID NO: 72808 - DNA, 31 bp, Homo sapiens
  chr7:1503565-1503596
  hypo
tcgggaatgcagagggcgtgagagagaacca

SEQ ID NO: 72809 - DNA, 78 bp, Homo sapiens
  chr7:1505247-1505325
  hypo
tcacaggtgaggaatcaagctcagaaaagggcagcgatttgtccaaggccagtggggagcaggcgttagaaccctggg

SEQ ID NO: 72810 - DNA, 30 bp, Homo sapiens
  chr7:1512325-1512355
  hypo
acgtgctgcggtgccgtgtcacctcaggca

SEQ ID NO: 72811 - DNA, 30 bp, Homo sapiens
  chr7:1515968-1515998
  hypo
gatgaggctgcaggcggctgtgtccccgtc

SEQ ID NO: 72812 - DNA, 281 bp, Homo sapiens
  chr7:1519128-1519409
  hypo
caccagggcaccgccgtgtggggagctgagcagggtggcgagggcctgcaggacacgcaccgtgatgcccggcacctcggggctgccctggacgacgcgggccagctcctggcccagggcctgctgcagggcgagggccacggggcggggactggagctctgccaccgagggtccgggctgagcgggaaaatctggaacggggaaggccagtgtcaggaggaagcggaggagaaggaggaggagcgcagcggagaggctaagcgcccggtgcagctccgtg

SEQ ID NO: 72813 - DNA, 30 bp, Homo sapiens
  chr7:1521071-1521101
  hypo
gccaaacgactgcacgaacagcagcagctg

SEQ ID NO: 72814 - DNA, 30 bp, Homo sapiens
  chr7:1523812-1523842
  hypo
tgtggacaggggggcgtcagaggctccgag

SEQ ID NO: 72815 - DNA, 245 bp, Homo sapiens
  chr7:1524902-1525147
  hypo
gcggccccggtcagcgccctcacctgctgcagggccagggctgtggtgctcctgacgctgtcgaacagaggcaggcgaggcaggtcccgcagcagccactgatagccctgcagcacatctgtgtcccccacatcctcctccatggggggctccttctcctccccgtcccgcaggctgccctccgaaagcaccagcgacaaaccctgtggcagacactcatgagctgggccggctttcggcagtgc

SEQ ID NO: 72816 - DNA, 30 bp, Homo sapiens; identical to SEQ ID NO: 20924
  chr7:1526364-1526394
  hypo

SEQ ID NO: 72817 - DNA, 87 bp, Homo sapiens
  chr7:1532978-1533065
  hypo
ggtagggaggtgaggacgggggtgtggccggcagggtggggacccgcaagccctcggggcagagccacggacgaggcgcgagctgga

SEQ ID NO: 72818 - DNA, 551 bp, Homo sapiens
  chr7:1533907-1534458
  hypo
acctccaaagcctgaccggaaggccgcagtgaaggtgaacagagcgcccagggcacgaggtgggggcagggtgaactggcaggagccccaggcggggctggaggggagtgtagaccaagaacccacggggtcacccatggggcttgaagggggacagagctgtgaggccagccggctggggaaggacagtgtgcggctgtctggacagaagcaggggcagacggtgcatctgagactgcgtgaagggtggcgtgcccgtggacgccctggaagcaactggaaggcgggggtccgggggaggctgcggctggggcttggagtcacgtggacgcagacggcagctgaatccctacagtggcgctgggacgccagcatgggagtgggagaagggtggcacccaggattgtggaggaggagcaggatggtgctgtgaccatgggaacagccgcccaactcccactggcccttcctgccgcagccggcccggcaccccgcagccccgcccagcccggcacacaggagccccaggcggcagcgcactcacttgcggt

SEQ ID NO: 72819 - DNA, 145 bp, Homo sapiens
  chr7:1534751-1534896
  hypo
gccctttacaaaatcgctgcagagaaatgcagccccagcctggcagccccaccccaaccaaggcagaggctccacgggaggctccaatgcacagggtgacctgcctggagcctaacggctgctgctgtccgcagagaggggacag

SEQ ID NO: 72820 - DNA, 30 bp, Homo sapiens; identical to SEQ ID NO: 20928
  chr7:1535456-1535486
  hypo

SEQ ID NO: 72821 - DNA, 30 bp, Homo sapiens
  chr7:1537473-1537503
  hypo
cttcaaaggagacacggaaatccaagggtc

SEQ ID NO: 72822 - DNA, 69 bp, Homo sapiens; identical to SEQ ID NO: 20929
  chr7:1537960-1538029
  hypo

SEQ ID NO: 72823 - DNA, 31 bp, Homo sapiens; identical to SEQ ID NO: 20930
  chr7:1538765-1538796
  hypo

SEQ ID NO: 72824 - DNA, 30 bp, Homo sapiens
  chr7:1542754-1542784
  hypo
gtggacgccgttttcgattcattggcctga

SEQ ID NO: 72825 - DNA, 36 bp, Homo sapiens
  chr7:1547436-1547472
  hypo
ttttatggccaggcgcgatggctcacgcctgtaatc

SEQ ID NO: 72826 - DNA, 69 bp, Homo sapiens
  chr7:1554244-1554313
  hypo
tctgaagaccctcacacggagctcccacccctccaggatccaggcttgccgctgcgtttggccaggccc

SEQ ID NO: 72827 - DNA, 159 bp, Homo sapiens
  chr7:1556124-1556283
  hypo
ggccgaactttcctttaaaaaaacaaaaaaaaaaaagccaatacatgtcccagggattccaacccatgtcctatcgcagttcccagatggcatttctttcactgagtcgtgccacaacaaactcacaccagatcatgcgtcctgacttttggctcagac

SEQ ID NO: 72828 - DNA, 136 bp, Homo sapiens
  chr7:1560606-1560742
  hypo
ccgggaatgaggcatgtctcccgggtggtggactcctgggcggtttcagtctggggcgattatgaacaaggctaggacaagcctgatttcacctgcacgcacgtctatgggccacggtcctggctctctggtcctc

SEQ ID NO: 72829 - DNA, 31 bp, Homo sapiens; identical to SEQ ID NO: 20931
  chr7:1563389-1563420
  hypo

SEQ ID NO: 72830 - DNA, 352 bp, Homo sapiens
  chr7:1574076-1574428
  hypo
ggttttgtggattgcacctgccgtgggagtcactggtcggggggcgggagggcgcttgctgctgtgctgctgggtttctgaacccgtgtctctcgcacagagctcccgtcctccgttcctggtcttcctcctgcccctcctccctctcccgcatcccacatcctcggagacccgcggagaatagaagtggaagggccactccgtcttggtcagactggctgggcagctgagggggtggggcatggagtctgtgtcatcattcaccccttgggcaagaacaagtgacccatccagagcccccatgctggcctcgtagagcgagcggcagccccgatgcgtcctctcatctggg

SEQ ID NO: 72831 - DNA, 211 bp, Homo sapiens
  chr7:1575802-1576013
  hypo
tcggctgctggggccccacagcggaaactcagacccgcccacccaggcccccgctgtggcgctgaacactgcacttctctggtgaccaccgaaactcagaggagctcggggtgtcgggtgcttgtgcgtggcgatgctggtgttttgttagctgctgggcgtaagacacaatgcgaggacgtcgttcctcgggggctgctggaggggagct

SEQ ID NO: 72832 - DNA, 723 bp, Homo sapiens
  chr7:1578571-1579294
  hypo
ccctcaggcagggacagaggccgggccaggatgcctcaccccctgggaagcccctcaggacgggctgggcccggatggtgccccgtcttgttttcatggtgctgtgactgtccaccccgggctgagaagcatccctgcatgggaggtgggcaccctgtccggcgctgccggccctgacctgtgctggcttctctgcttgtccatgttttccagctacgagttccagggagctctgtcctggtgaccgtgcccgggttatgacgactaatcccaaaccgaataaggcattaaaggtaaggctggttccaagcaggccccgtctcaagcacaggcgtgggaaaggcccccggcccgacagcccctgctatcccagggccgtcctgagcctgtgatggaggcctccctgttgccaggaggaggggggctgctgtggccgagggatgttcacaggagaggtggagtcaggatcggggactgtggttccaggcgatgactcccaggctgagggcgtggcagggtctgctgccttcccgcctgggctgtgtgtccgccgggcgctactgcatgagctcatcccctggctccaggcgtgggcagcgtggccagcgtggcctctggtgaacgcgatgctccagctcccaaggcccgagcccacctgtgcctggcgcttgccgcctccacaatggcgtgtgcctgtgggccggctcagtcccagcagcagga

SEQ ID NO: 72833 - DNA, 56 bp, Homo sapiens; identical to SEQ ID NO: 20935
  chr7:1579573-1579629
  hypo

SEQ ID NO: 72834 - DNA, 30 bp, Homo sapiens
  chr7:1581243-1581273
  hypo
gtccaggagagcttcgtggacgtggctcct

SEQ ID NO: 72835 - DNA, 30 bp, Homo sapiens
  chr7:1582207-1582237
  hypo
ggagccgctgtcaccgcccagagctgggcc

SEQ ID NO: 72836 - DNA, 64 bp, Homo sapiens
  chr7:1582573-1582637
  hypo
ccgccgccctgccccgtccctgcggccaccacctaatttattgccgtgcgtcctgctgctgtga

SEQ ID NO: 72837 - DNA, 30 bp, Homo sapiens
  chr7:1583906-1583936
  hypo
agacaccgccccgcccggccatgcagcctg

SEQ ID NO: 72838 - DNA, 274 bp, Homo sapiens
  chr7:1584137-1584411
  hypo
ttttagcagcgatgacgacactggaaccacgctagtctccgtccctcccgctcacatgcgcccacgctccccctcgaggcaggttgagccccggcctggaccgccccacgctgccttccgtccacgcagagcgggctcggccctcagggctttccttcgagtcgtgttggaaagaagcagaagcagcctcacccgtggggcggaggcgtctgagggtcaggaggcagggaggagagagggcctctgtggagccggctgcctggtgtccaagtcc

SEQ ID NO: 72839 - DNA, 327 bp, Homo sapiens
  chr7:1589280-1589607
  hypo
ctagcccagccggacgccaggcctgccttgttgggccccaccgctgggccccaggggacccagtgcccacctcatgccaggtgcccccgcagctcccaccttacttgagcccagctggacgccaagtccgcctcgttgggccccactcccgggccccgggggacccagtgcccacctcatgccaggtgtccccgcagctcccgccttacttgaagtccccgtcgtggtatttgccaaatgcctggaggatgatggtggtgacggccatgacgggcttcaccaggcagaactgcagagtggcctgggggcgacggcacccggtgggcc

SEQ ID NO: 72840 - DNA, 58 bp, Homo sapiens
  chr7:1590460-1590518
  hypo
cagtcccgcacagagtcgaagtagacgtagtactggtggtctccgaggaggaggaggc

SEQ ID NO: 72841 - DNA, 37 bp, Homo sapiens
  chr7:1596341-1596378
  hypo
gaaaacatttgttttctgggccgggcgtggtggctca

SEQ ID NO: 72842 - DNA, 31 bp, Homo sapiens
  chr7:1597683-1597714
  hypo
gtcctgcagcctcaggcgtcacctctggaga

SEQ ID NO: 72843 - DNA, 830 bp, Homo sapiens
  chr7:1598548-1599378
  hypo
cggctgagccagatgcgccagctcgggaaccgtggaccaagtgtactggtctggggatgtcaggagcagggcctggtccccagggaggggcagtcgggaggttgaccgctctgccacctgctcacagggctcgccggctgatcgaggcctcacccggtgctggtgtcacagcctctgcgcccggtcacaggaggcggcagggccggctgggcctgatttttctggcgggggcgggacactgaccaagcccattgcaggacagacctgtctgcccagatccaggcgacggggccctctgaccattgttcactgcgtccaggtgcccagagctgtggggaggctgagaagccgcccagccagtcccacaccctggccctggcacagccacctcctcctgctctcatgagaaacccggctgagggcccatgagctgttgcctggttccaggccggctgccctgctagtgcccaccccgaccccctgcctgcccgtctctctgcagatgcggacaggcatggtgtacccccctgcctgcctccttcactgctgggtggaactcggggcgcccaggagccgcctcctcagggctggctcatttgatgtcccaggctgagctgcacactagggggatgaggtgaccggtgggcacccatctcagacacccggcttcccaggtcccgcggccctcccctgggggccctggccagcagttcaccaaggcagcagccccgggtgtgagcagggggtgacagggatggggctccacatcctcccggctctgcttctgggattcccccggctcctgtccacgggcacggcctcctgagagc

SEQ ID NO: 72844 - DNA, 744 bp, Homo sapiens
  chr7:1599699-1600443
  hypo
ccactgtctcagctgacctggcgacctggcaggtcataggggggcgcttgcctcagcttctgactctcgagcaattctgttctgcctgagcccatcagccccagatcccagggtggggccgtcccaaggatctgctctcttcctcccataggtctcccgtcctgtcctccggggccaagcccccacctccctgctcctgtccctggtccctctgttgcccccatccccagaaagtcacccagggcctgcctatacttgccttcacctgagggagctgccagccctgggcgtgtacgggtcgggggcaccctttcatctggagccaggatggggggtgctcgtctggcctggacttgccaggctggctggagaccctgtttggtgtccaggtgccgtcctggggcccagcctctgaggtggcggtgaggcttaggggttggcggactgtgattctccgaatttcaaggtatgttttttttttcgaggagccccccaccccattgaagtgcaggggctcagcctggacaccatacccctctggtatgcacccccttcccccacacacacactctcgcactcccacacccacgcagctcacctccctggtggcgctcagcctgtcaggcaggttggctgcaggtctctgggcctgaggggggggccaaggcggggtgggcctgaagctcggcccccggcctcctggcctctgctgccgcctcctcacagcggcgggcagcctgggtc

SEQ ID NO: 72845 - DNA, 31 bp, Homo sapiens
  chr7:1601633-1601664
  hypo
ttacaggcgtgagcctcgcacccggcattat

SEQ ID NO: 72846 - DNA, 242 bp, Homo sapiens
  chr7:1607230-1607472
  hypo
aagttcctccctccaccggggagggaggtgagacttgagtccctgagtgggtgtctgggtgttcacgtgtcctgctgagcagcgcggggcggctgcctccaggtcaccacacctggcacacccggatcacctccctcagcgccttcagcccctccatgcttttgtccttcacggccacggcgaggaggactgctctgtttccagcttcttgagacacaaacgctaccaggttctttgcaaag

SEQ ID NO: 72847 - DNA, 324 bp, Homo sapiens
  chr7:1607696-1608020
  hypo
tttcccagcgccttccgcagccccgcctcttctggctctctctcatctaaaagaacccaggaaagagaagcctgcagaagcgagtgctgtcgaatctcacgtgtgatctccacagagcacagcacagccagccgcctgctcacgtaatgtaccatggcaggggaggcggctcgaatgacaaaactgctgcttctgcttgtctgctggataaaatgcctgcgggctggacaaagcatccactgagggcaagcagggcgccttgagacccacaaatgcccggaaaatgctatcgctgtaggggtatttgtccgccagatgccccat

SEQ ID NO: 72848 - DNA, 574 bp, Homo sapiens
  chr7:1615004-1615578
  hypo
ggagttttatgtgaactgaagtatttcgtttaacaccacacagtaaacacaaaggaaacccaccgttgctgggccgccttccatcatggcgcagaattgagagtcgagcacgtcgctttgttttctgccaaacttagccaagctccggtcttaaaatcttttcgttcctagcgtgaggctttctgtctttgttgcaaatattgaaacctgccacgtcacctcttgcactatttgtttagttctttaagaaatgaaaccttaatccatgtacaatttctaaaagcctttatttcaatattttaagaagttatttcccctggcaaagaagccgccctgttgcccggtgtggagctcgatgacaaagctcatcagcctgagtggaagctcattcattattgctgcgttttcgctcttccaggagagaacggagagccagtgtgctgtgtgtcacggtccctggatgaacgtttgtggaactggattgaattaaacaagacgtgcaaagcaagtggttcacgaggtagtgtgggggtgtagggatggggactgacccgggaggcaggacacagcccaa

SEQ ID NO: 72849 - DNA, 30 bp, Homo sapiens
  chr7:1624972-1625002
  hypo
ccagggcgccggagcgccactgcggatctc

SEQ ID NO: 72850 - DNA, 345 bp, Homo sapiens
  chr7:1627212-1627557
  hypo
agtcttggattctctcgccatcttcaatgtcggagcccagacggggcaaggcgaggaggagcccggggcgaagacgccacccacattcctccttcccgcaggcttcttctccttctagcccttccaggagagaaaccatcccacaagtccagagtagtggcgtccccggggccatgtctcctgagcaaacactgttttctaggagtccgaggggcctcagccatctaggtcaatccctttgcagaacggtgaaggaatctgaagcccagagagggaaaacaatgcctcctgggtcacacagcccatcaggggcagggcagggacgaacggcgagaaaaggaccag

SEQ ID NO: 72851 - DNA, 197 bp, Homo sapiens
  chr7:1641739-1641936
  hypo
ctgggtcagcccggacgcaccggcctctgtctgggtcccagtcttctcaccgccaggcgggcaggtcagcagaccaggcaggaccgagcccgtcgcccggggctcttgttgtctgtgccatttcggtgccttttgtccttgcttcccgccgctccttgaggatgtttaccggctgctggggccgtgccttccaggtg

SEQ ID NO: 72852 - DNA, 31 bp, Homo sapiens
  chr7:1642382-1642413
  hypo
gatggtatttggagcccgggccttgaaagag

SEQ ID NO: 72853 - DNA, 77 bp, Homo sapiens; identical to SEQ ID NO: 20944
  chr7:1650397-1650474
  hypo

SEQ ID NO: 72854 - DNA, 59 bp, Homo sapiens
  chr7:1659705-1659764
  hypo
caccctggagcctccgacggggcggccacgggcagcgaagaacccggaaaaacaggttc

SEQ ID NO: 72855 - DNA, 348 bp, Homo sapiens
  chr7:1660352-1660700
  hypo
gtgtgaactgcgcggcggcgtcccccaccaggcaccacaggtgattcattcgtttccctgaaaaggcgcctggatgctgtttctagctcccgttatccccagcgatgctgcacctgccccaggacacacgctagggtggaaccgccgggcatggagcaggtgtggtctcaaccgcaggagaaacagccgggtagcctccaaagggacgtgccacttggcgctcctgcaaggggagaggcactgaggctctcggtcctcaccagcacgtccttgtgccacactcaggcccggcgggtggtgtgggggccgcatctcatggaggtctccgtccacgttgcccccattgtg

SEQ ID NO: 72856 - DNA, 30 bp, Homo sapiens
  chr7:1680592-1680622
  hypo
gtgctggcccatgcacgtgcactctgcagc

SEQ ID NO: 72857 - DNA, 161 bp, Homo sapiens; identical to SEQ ID NO: 20946
  chr7:1681116-1681277
  hypo

SEQ ID NO: 72858 - DNA, 87 bp, Homo sapiens; identical to SEQ ID NO: 20947
  chr7:1689039-1689126
  hypo

SEQ ID NO: 72859 - DNA, 92 bp, Homo sapiens
  chr7:1694554-1694646
  hypo
gcatgcagggggagcgaagggggtgcccagcctcgccccgcccagcgcacccctgcagcagcccgggagggcaggccgtggctcctgggaac

SEQ ID NO: 72860 - DNA, 30 bp, Homo sapiens
  chr7:1694918-1694948
  hypo
cccacgcctgggcctcgcggtacagcctgt

SEQ ID NO: 72861 - DNA, 3500 bp, Homo sapiens; identical to SEQ ID NO: 43800
  chr7:1704118-1707618
  hypo

SEQ ID NO: 72862 - DNA, 656 bp, Homo sapiens; identical to SEQ ID NO: 43802
  chr7:1708905-1709561
  hypo

SEQ ID NO: 72863 - DNA, 47 bp, Homo sapiens; identical to SEQ ID NO: 5305
  chr7:1709617-1709664
  hypo

SEQ ID NO: 72864 - DNA, 10 bp, Homo sapiens
  chr7:1709955-1709965
  hypo
cgggcgcagc

SEQ ID NO: 72865 - DNA, 77 bp, Homo sapiens; identical to SEQ ID NO: 43805
  chr7:1710166-1710243
  hypo

SEQ ID NO: 72866 - DNA, 22 bp, Homo sapiens
  chr7:1710324-1710346
  hypo
cgtccgcaccctgcccggcgcc

SEQ ID NO: 72867 - DNA, 227 bp, Homo sapiens
  chr7:1718470-1718697
  hypo
cacagcagcgaaatcgggagtgtggggtgcgggcatcgcgtggacacgctgtgaactgggatttggagcacgggtgatgccagagtgggtgatgtcaggggctggcctgtgctcccaggagtgctcaccccgaggaactggccttgggtggcagaggagaggagaggcctggggaccctgaccctcatctcccatcacctccgctgggctgcgtgaccctgagttac

SEQ ID NO: 72868 - DNA, 309 bp, Homo sapiens
  chr7:1734782-1735091
  hypo
gctccagagctcatgcgcagcccgctggggctgtgagggttctgtccatccaccaggaaggccaccaggaccctgctcctgcctgagaaccccaggaagtagtagcgtgccaggtgcgtggccggcctcccagcccttcccagcaccagctgcgtcctcctcctccagggctgcagctcagggctcaggtgtccgcgtcgagggcactccctaaagggcaggagcaggaccattggcacaagcctgggcgagtctcgctgggaggcaggagcagactcagcccgccaagcccatgaaccccactttgaa

SEQ ID NO: 72869 - DNA, 169 bp, Homo sapiens; identical to SEQ ID NO: 20954
  chr7:1775574-1775743
  hypo

SEQ ID NO: 72870 - DNA, 118 bp, Homo sapiens
  chr7:1778727-1778845
  hypo
ctggagattgtgtctggaggccggattctcctccacgcgtggaggactggacgccctcagggctgcgcggggccgcaggaccgccttggtggttagcgaggctccctctggctgtgga

SEQ ID NO: 72871 - DNA, 1381 bp, Homo sapiens
  chr7:1783931-1785312
  hypo
tcttgcagcaggaacgtcggagcaggaggagtcagtggagccatcaggacacccaggcccatggggcaggaggcctcggtcaccacaggactggggcggaagacgagaggcggccggccgtgagggaggcgccctccctccccgcgcttacgtcgcgcggccatgcggtttgggacaggacacccctgagagtgcaggcacctccccctcccgcccctccatccctctgggggctggcgcctggccccccacctggtccccctgggcaggctgaattggggctccctgcagggcggtcccgatggccgggcgtgggtggggcgcgctgtgggtgtgcgtggcggccgccaccctgctgcacgctggcggcctggcccgcgcagactgctggctgatcgagggcgacaagggcttcgtgtggctggccatctgcagccagaaccaacccccctacgaggccatcccacagcagatcaacagcaccatcgtggacctgcggctcaacgagaaccgtatccgcagcgtgcagtacgcctcgctcagccgctttggcaacctcacgtacctcaacctcaccaagaacgagatcggctacatcgaggacggcgccttctcgggccagttcaacctgcaggtgctgcagctgggctacaaccggctgcgcaacctcacggagggcatgctgcgcggcctgggcaagctggagtacctgtacctgcaggccaacctcatcgaggtggtcatggccagcagcttctgggagtgtcccaacatcgtcaacatcgacctgtccatgaaccgcatccagcagctcaacagcggcaccttcgccggcctggccaagctgtcggtgtgcgagctctacagcaaccccttctactgctcctgcgagctgctgggcttcctgcgctggctggccgccttcaccaacgccacacagacgtacgaccgcatgcagtgcgagtcgccgcccgtctactccggctactacctcctgggccagggccgccgcggccaccgcagcatcctcagcaaactgcagtcagtctgcaccgaggactcgtacgcggctgaggtggtcgggcccccacgtccagcatccgggcgctcacagccgggccgctccccgccgcccccgcctccgccggagcccagtgacatgccctgtgccgatgatgagtgcttctccggggacggcaccacgccactggtggccctgcccacgctggccacgcaggccgaggcccgccccctcatcaaggtcaagcagctcactcagaactcggccaccatcaccgtccagctgcccagcccgttccaccggatgtacaccctggagcatttcaacaacagcaaggcctccaccgtgtccaggctgacc

SEQ ID NO: 72872 - DNA, 1073 bp, Homo sapiens; identical to SEQ ID NO: 43808
  chr7:1785929-1787002
  hypo

SEQ ID NO: 72873 - DNA, 30 bp, Homo sapiens
  chr7:1787244-1787274
  hypo
cttcattgccgcctccggagtccactgcag

SEQ ID NO: 72874 - DNA, 144 bp, Homo sapiens
  chr7:1827530-1827674
  hypo
cctggcgggcacaggcgctctcatcaggcacggaggagcgccacattgggggtgttcaattaatctggtgtatctgcctcgaaagccaccttcacagtgactcagattttagcatgtgtgagcatcacctggacagcttcttaa

SEQ ID NO: 72875 - DNA, 72 bp, Homo sapiens
  chr7:1846091-1846163
  hypo
gctttttctttaaactacaaactccgtctccttcccacgtacatttctcccgctctcagtgaccaccactgt

SEQ ID NO: 72876 - DNA, 76 bp, Homo sapiens
  chr7:1847552-1847628
  hypo
ttgtctatatgacacggcgcacacatgatgtaactgcttgtctatatgacacggtgcacacgtgatgtctgtagct

SEQ ID NO: 72877 - DNA, 30 bp, Homo sapiens
  chr7:1849767-1849797
  hypo
gctccctcggtgaacgtgacaaggcccctc

SEQ ID NO: 72878 - DNA, 364 bp, Homo sapiens
  chr7:1855555-1855919
  hypo
ccgacgtaggtcccagcgtgtctgtcagtcatgctgctgccctgtggggctggagaggcaggacgtgcacccagcctgtggctggcggggcaggggacctgcaggtcaggccaagcagagtggctccggctatgcccccgagcctgcaggctacgccacggtctggcggctgaagagctcgagggtgagcgagctgaggaaggcagggatgctgtcctggcgccgcaggtgcacctcgatgagctcgcccacggtgtgtgagaactctgtctccagtagctgcatcttggaacccgaggggctggtggcctgcggggcagtcaagaaagagacaagacagcggtcagcccgacaggcctctccc

SEQ ID NO: 72879 - DNA, 290 bp, Homo sapiens; identical to SEQ ID NO: 20959
  chr7:1865908-1866198
  hypo

SEQ ID NO: 72880 - DNA, 31 bp, Homo sapiens; identical to SEQ ID NO: 20960
  chr7:1867561-1867592
  hypo

SEQ ID NO: 72881 - DNA, 123 bp, Homo sapiens; identical to SEQ ID NO: 20961
  chr7:1885180-1885303
  hypo

SEQ ID NO: 72882 - DNA, 30 bp, Homo sapiens
  chr7:1892788-1892818
  hypo
tgggggccctgatgcggaagggactgcgga

SEQ ID NO: 72883 - DNA, 30 bp, Homo sapiens; identical to SEQ ID NO: 20962
  chr7:1897359-1897389
  hypo

SEQ ID NO: 72884 - DNA, 31 bp, Homo sapiens
  chr7:1906135-1906166
  hypo
ctctggggcagagacacgagggtgcactgtg

SEQ ID NO: 72885 - DNA, 56 bp, Homo sapiens
  chr7:1906782-1906838
  hypo
ggtgagatggatggcacggtcagtgccacagacatgggcaccgtaggcctcccctg

SEQ ID NO: 72886 - DNA, 30 bp, Homo sapiens
  chr7:1908699-1908729
  hypo
tggtccaggccacacgtggacggtgaggcc

SEQ ID NO: 72887 - DNA, 30 bp, Homo sapiens
  chr7:1912901-1912931
  hypo
cacgggctggggcgcgagtccgggtcctgt

SEQ ID NO: 72888 - DNA, 30 bp, Homo sapiens
  chr7:1913490-1913520
  hypo
ctgaaactgctccccgtggctgaacgagaa

SEQ ID NO: 72889 - DNA, 191 bp, Homo sapiens
  chr7:1913833-1914024
  hypo
gccgtctcggtgcacggctggtaagacccggggtctcccaccagcgcatcagctttggggaggtgacacacactggcagacaaccgtgtcatcgcacggccaggctgggccacagtgcagaggacagagggggtgaccgtggcttgggatggtcagggaagcgtctcaggaggagacgttgcagcagcacc

SEQ ID NO: 72890 - DNA, 31 bp, Homo sapiens
  chr7:1924361-1924392
  hypo
gagcggaccacgcctgcgccctgaggccccc

SEQ ID NO: 72891 - DNA, 288 bp, Homo sapiens; identical to SEQ ID NO: 20964
  chr7:1931659-1931947
  hypo

SEQ ID NO: 72892 - DNA, 235 bp, Homo sapiens; identical to SEQ ID NO: 20965
  chr7:1932168-1932403
  hypo

SEQ ID NO: 72893 - DNA, 31 bp, Homo sapiens; identical to SEQ ID NO: 20966
  chr7:1932816-1932847
  hypo

SEQ ID NO: 72894 - DNA, 30 bp, Homo sapiens
  chr7:1937724-1937754
  hypo
ccatcccctttggacgcgaggctgctcctt

SEQ ID NO: 72895 - DNA, 30 bp, Homo sapiens
  chr7:1939799-1939829
  hypo
ctatgaacacgatccgatccccaatccaca

SEQ ID NO: 72896 - DNA, 80 bp, Homo sapiens
  chr7:1946382-1946462
  hypo
gtgcgtgttgaacacgcaggtgagcgaagccaccatcccctacagacctgagctcctgcccctgcgcaagctacacagtc

SEQ ID NO: 72897 - DNA, 30 bp, Homo sapiens
  chr7:1947153-1947183
  hypo
aggacaatcctactcggcgtaggcccggcc

SEQ ID NO: 72898 - DNA, 30 bp, Homo sapiens
  chr7:1947437-1947467
  hypo
tcacgggtgctcggcgcgggatctgagtgg

SEQ ID NO: 72899 - DNA, 30 bp, Homo sapiens
  chr7:1949162-1949192
  hypo
gtaggaggtggggacgcacctgtaggctgg

SEQ ID NO: 72900 - DNA, 153 bp, Homo sapiens
  chr7:1950265-1950418
  hypo
ctccctagagctcacgagcatctgagatcgcgtgtttgcccgtgtcctggcctctcttccacctggaacacgttcgtcaggtgagagcctgctcgggctttgagtaggtgcctgtccggggcaggaacacgcagcctcgctgcacccatccca

SEQ ID NO: 72901 - DNA, 181 bp, Homo sapiens
  chr7:1950692-1950873
  hypo
ttcataactgcaggcgtgcctcatgtctaagtgctactcccacagttcccgctcctgggcggccgcctctccctccatcccccgcaccccttgagccagacaacttgagttgccttcggccttcctggattcagcactcaacacccgctggacaccaggtttcaacgctctgtcctcacca

SEQ ID NO: 72902 - DNA, 192 bp, Homo sapiens; identical to SEQ ID NO: 20970
  chr7:1962361-1962553
  hypo

SEQ ID NO: 72903 - DNA, 31 bp, Homo sapiens; identical to SEQ ID NO: 20971
  chr7:1963283-1963314
  hypo

SEQ ID NO: 72904 - DNA, 30 bp, Homo sapiens; identical to SEQ ID NO: 20972
  chr7:1969178-1969208
  hypo

SEQ ID NO: 72905 - DNA, 254 bp, Homo sapiens
  chr7:1970776-1971030
  hypo
cacccccaactcctcaccccacgcacggtcacaggagcgagggcgcgtcgtggggtccacgtcaagggtctgctgacaccacgggaacacccccaactcctcaccccacgcacggtcacaggagcgagggcgcgtcgtggggtccacgtcaagggtctgctgacactgcgggcacacccttgctcctcatctggagaatggggaggggacagccctctctggcagcaagcggcgtgacctggacttttctcttt

SEQ ID NO: 72906 - DNA, 30 bp, Homo sapiens
  chr7:1973076-1973106
  hypo
tgcatctatcaatccgggctcagttcaagc

SEQ ID NO: 72907 - DNA, 30 bp, Homo sapiens
  chr7:1974823-1974853
  hypo
tgcatcctcagctccgaaacttgccaataa

SEQ ID NO: 72908 - DNA, 30 bp, Homo sapiens
  chr7:1987182-1987212
  hypo
cacaggcagaggcccggccttcccatctcc

SEQ ID NO: 72909 - DNA, 30 bp, Homo sapiens
  chr7:1993582-1993612
  hypo
tgtcctgcccagtgcggcctccactggacg

SEQ ID NO: 72910 - DNA, 119 bp, Homo sapiens; identical to SEQ ID NO: 20973
  chr7:1995852-1995971
  hypo

SEQ ID NO: 72911 - DNA, 156 bp, Homo sapiens; identical to SEQ ID NO: 20974
  chr7:1997188-1997344
  hypo

SEQ ID NO: 72912 - DNA, 30 bp, Homo sapiens
  chr7:1997577-1997607
  hypo
tggaggagcctgtgcggagaaagtctctgt

SEQ ID NO: 72913 - DNA, 182 bp, Homo sapiens; identical to SEQ ID NO: 20975
  chr7:2006410-2006592
  hypo

SEQ ID NO: 72914 - DNA, 30 bp, Homo sapiens
  chr7:2007845-2007875
  hypo
aggtccaccgtcgacgcctcagtccggcgg

SEQ ID NO: 72915 - DNA, 336 bp, Homo sapiens
  chr7:2019123-2019459
  hypo
cactggatggggcagcgccaacacaggcaccaaagcggagcccggagctccacctgcatctgcctggaaacctcttgcctgaggaccctgatgggtccacaaggcgggggagaggcagagagctctagaaaagcagcccggcctgcagaccctgctctaggggcgccgtgtgcaagcaggagctggggtgagggtggcctaggacagtgcagtggcagagagctggcagcatgtctgaagcggagcccaagggctgctggacacgcctggctgctgcactgcctgggctctgctctgagccacactcccgtgcagccatctcggcacagcactgcc

SEQ ID NO: 72916 - DNA, 326 bp, Homo sapiens; identical to SEQ ID NO: 20976
  chr7:2024688-2025014
  hypo

SEQ ID NO: 72917 - DNA, 30 bp, Homo sapiens
  chr7:2025468-2025498
  hypo
tctcatgcaacccccggcctcaccgtctct

SEQ ID NO: 72918 - DNA, 30 bp, Homo sapiens; identical to SEQ ID NO: 20977
  chr7:2027224-2027254
  hypo

SEQ ID NO: 72919 - DNA, 30 bp, Homo sapiens
  chr7:2037513-2037543
  hypo
ccctcgggagccctgcggctccaaacaaag

SEQ ID NO: 72920 - DNA, 30 bp, Homo sapiens
  chr7:2037955-2037985
  hypo
atgccagctccgaggcgtccgtgcctctgt

SEQ ID NO: 72921 - DNA, 97 bp, Homo sapiens; identical to SEQ ID NO: 20978
  chr7:2040769-2040866
  hypo

SEQ ID NO: 72922 - DNA, 507 bp, Homo sapiens
  chr7:2041376-2041883
  hypo
ctggacagacccctcgtaggctctcacacctgctttgccccgacaccgtggcctcatgcggcaaacatgtcactggccccctgccacaaacacggtggtggggcccgaggggctgtgctccccgccggcgcatgccacctgtcactagtagagatgggactcaggctcctcacacacccttccccgctcaacgcagcttccgacgacagaagaggcagccatgcactggcgcctgcagcctaaaggcttatggggacaggcgtccctgcccagacccagggtccaggtgccctgaatcccagccactcccgcgtctgactcaccatgtctgctctttgtttctggcctcccagctcctccagggcctgcgacagctgagcctgcaagacaagacaggattcggcctgagactgtggtgggccaggccccatttctaggactgcagggaacacaacccccaccaccccgcagcctccactctctggggagcaacgggacccaggagct

SEQ ID NO: 72923 - DNA, 30 bp, Homo sapiens
  chr7:2045473-2045503
  hypo
agttcgtttgtaaccggctgcatcttccca

SEQ ID NO: 72924 - DNA, 73 bp, Homo sapiens
  chr7:2046905-2046978
  hypo
cgacagtgccacagcggagcgttctcccagctctggtgccgacagcctgtgcagtaacgcgtcactggacccc

SEQ ID NO: 72925 - DNA, 31 bp, Homo sapiens
  chr7:2051726-2051757
  hypo
agggaggggcaaggtccgcaacatacatccc

SEQ ID NO: 72926 - DNA, 30 bp, Homo sapiens
  chr7:2052459-2052489
  hypo
ggacctgtcattctcgccaagtgccatccc

SEQ ID NO: 72927 - DNA, 102 bp, Homo sapiens
  chr7:2053459-2053561
  hypo
ctccgcccaggccctgcgatacccagctccttcttcccactgcacaggtgagagctgctcagagctagacaagggcacggagcgtcacggtggcccatgggg

SEQ ID NO: 72928 - DNA, 30 bp, Homo sapiens
  chr7:2054049-2054079
  hypo
ctccacctccccgccgcaggctctgccaag

SEQ ID NO: 72929 - DNA, 30 bp, Homo sapiens
  chr7:2055084-2055114
  hypo
ccagtcaggggccccgggagctgtgtgctg

SEQ ID NO: 72930 - DNA, 30 bp, Homo sapiens
  chr7:2056573-2056603
  hypo
gacgccgcgcaaggccggggcgggggactt

SEQ ID NO: 72931 - DNA, 137 bp, Homo sapiens
  chr7:2056918-2057055
  hypo
ggggcgtcccagactcgctttaagaagcacccagcagagttacattgtccactggctgctcctccttaggtacagaaacgtcccggttctaaggaatagaatgtgctcatcatgcaacgaacggccatgtgaagaga

SEQ ID NO: 72932 - DNA, 43 bp, Homo sapiens
  chr7:2067733-2067776
  hypo
gaaaacattatgaaacaatttcgagagaaaataagtatgacct

SEQ ID NO: 72933 - DNA, 164 bp, Homo sapiens
  chr7:2068944-2069108
  hypo
acacgaaagattacacgctgcatggctccatttcacaacatttttaaatgggcagaactggcgtgtgagaatcgggaaggcagggctttgggggaggtggaggagccggcaggtgaacttgggagccctggtgacaccgtgttcccgaccgtggagctgagaca

SEQ ID NO: 72934 - DNA, 135 bp, Homo sapiens
  chr7:2069774-2069909
  hypo
agagtgccccagaaacgcggaacccagagctgtgtacaggtgcatgtccgctacgccccgccccgcgctccacggaaggtccacacacagcctgaggaggttcccccagcccacagtgacgcccggggtggaggt

SEQ ID NO: 72935 - DNA, 30 bp, Homo sapiens; identical to SEQ ID NO: 20981
  chr7:2070211-2070241
  hypo

SEQ ID NO: 72936 - DNA, 36 bp, Homo sapiens; identical to SEQ ID NO: 20982
  chr7:2071760-2071796
  hypo

SEQ ID NO: 72937 - DNA, 30 bp, Homo sapiens
  chr7:2072888-2072918
  hypo
agaacacctgggtgcggagccccagtttga

SEQ ID NO: 72938 - DNA, 30 bp, Homo sapiens
  chr7:2076618-2076648
  hypo
acagcacgagcttccgcgtgcccacccacg

SEQ ID NO: 72939 - DNA, 106 bp, Homo sapiens
  chr7:2083090-2083196
  hypo
ttctgacaatcccacgctccttaggaggccctcggcacgacctggcacatcctgtgggctggaggtggccggaatgggcgggcttgggaacgtgatgcccgggtac

SEQ ID NO: 72940 - DNA, 30 bp, Homo sapiens
  chr7:2086318-2086348
  hypo
aggaaaggggtgagcgctgcccgcctgtgc

SEQ ID NO: 72941 - DNA, 204 bp, Homo sapiens
  chr7:2091643-2091847
  hypo
agggaaacagccaggcggaaagacaaccattcatgcagagtcaacacctgtgcaccccctgcattccacgaaggagcccccggcaggccaagacccacgctccgcacacatcagagaggaggggctggcctcagagaagcgagagcaggagcagggtgaccacggacaagggcagaaccctatcgtcctcgccacgcgcacagc

SEQ ID NO: 72942 - DNA, 30 bp, Homo sapiens
  chr7:2092075-2092105
  hypo
aggcagggagggcgccggacagctcactag

SEQ ID NO: 72943 - DNA, 640 bp, Homo sapiens
  chr7:2094462-2095102
  hypo
ctgaacttgagctgcgctcggctgggccgtgccctcgcagtgatgggagagcggggaacacatgcggtactcagggctgctccttggacatccccagaggctaaagcccaggagacaagatgggttgcatgggtcacagtagcaggaggagccgagcggtggggccgggactcagggacgacggcagggcccgaactccatctgtcctgtgttcacgtacacagtgcagagcttgtcacaaagggcgggggcagcagagacagaggaagcggggccaagcctccctccaggcactaggcaggcagcacagcgaggcggtgcgtgccacgacagcaccaggcagaggcacgccacaaaccctgacagaaagcagggagtgaatgagcacacgccaggacgtgtgtcctctcggaggcagacagtgaggacagcaggtaggcagtggtcttcagagggagctgggggtgagccaggcctagggccagtcagcagcatccacatcagctgtgtgacccggcccctgtggcccgcatcgtagggcacgatccaggcctctgccacccctgacagaactggcccggagcagcacaggagcgccaccagggaaccggtgagacatggggaccgcaggctgcacccc

SEQ ID NO: 72944 - DNA, 48 bp, Homo sapiens; identical to SEQ ID NO: 20984
  chr7:2099513-2099561
  hypo

SEQ ID NO: 72945 - DNA, 60 bp, Homo sapiens
  chr7:2100208-2100268
  hypo
aacactggaaggaggaggcaacgacgacagcatggaatcgtaaacaaataaaaaaagagc

SEQ ID NO: 72946 - DNA, 263 bp, Homo sapiens
  chr7:2102521-2102784
  hypo
aacacgctgcattcccagggacgaaggtcaaaaggataacgctaagataaaaacaaagagaagccacagaagcgtggctctatgtacagaaaacataaaaatgggaaaagcggagcaatgtttaaagatatacacacaattaaactagaaagaaaaatgagggaagggactgctctacgtttagagcacggctccgtctgacagcggaggctgttctgtttcttacactgggactgagacacgggaacttgctgtattctttg

SEQ ID NO: 72947 - DNA, 30 bp, Homo sapiens; identical to SEQ ID NO: 20985
  chr7:2105370-2105400
  hypo

SEQ ID NO: 72948 - DNA, 30 bp, Homo sapiens
  chr7:2106676-2106706
  hypo
cccaaagtgctgcccgcctggccggtgtgg

SEQ ID NO: 72949 - DNA, 63 bp, Homo sapiens
  chr7:2108163-2108226
  hypo
gaggcaggcagggggagtctccgcccagcaaactggacacccgccctggcccagagagcatct

SEQ ID NO: 72950 - DNA, 229 bp, Homo sapiens
  chr7:2110059-2110288
  hypo
cagccaggagagatgagaggccgcccgagaggaggagagtcaggactccacagtgaggtacgagagctctcccaggaaaggacacagccaggaaagaagagaggccacaccggggagggtgcgagtccgcggagggagggcccatccctactcagacagcccaggcaggcgcagagcggaacggcgctggaacacgggagctgcacacgactctattgagtaccacaaa

SEQ ID NO: 72951 - DNA, 267 bp, Homo sapiens
  chr7:2113679-2113946
  hypo
ccaagaaccatgtccgggatgtttgccactcacacctgactggcaggcgagtctacccagtctgttcagcacacgggatgtgggtgaggacggccacatgccgttccaggcagcagagatggcagcacggaacaccgcagccagcctgggctcgctgggcctccattctactggggtgggaatctcaagcaaagaagccacgcgtgtggcatgagcagagaatctcacggcgggtgcaggtactgaggtcaccgagagcagaaggaa

SEQ ID NO: 72952 - DNA, 43 bp, Homo sapiens
  chr7:2120253-2120296
  hypo
gactcaaagaacagcgctgggctctgacgccaagtccatcccc

SEQ ID NO: 72953 - DNA, 30 bp, Homo sapiens; identical to SEQ ID NO: 20987
  chr7:2122327-2122357
  hypo

SEQ ID NO: 72954 - DNA, 30 bp, Homo sapiens
  chr7:2122670-2122700
  hypo
ccagggggaagagccgtccctccctgcgcg

SEQ ID NO: 72955 - DNA, 30 bp, Homo sapiens
  chr7:2130393-2130423
  hypo
cccttggagcccgggcggggccctcatcgc

SEQ ID NO: 72956 - DNA, 48 bp, Homo sapiens
  chr7:2130635-2130683
  hypo
tcagcctgattcacccgcgtttatttgacgcgtcgggttataagtcac

SEQ ID NO: 72957 - DNA, 30 bp, Homo sapiens
  chr7:2130946-2130976
  hypo
gggtgtgcctgcctccgggccccgcagcag

SEQ ID NO: 72958 - DNA, 30 bp, Homo sapiens
  chr7:2135933-2135963
  hypo
acccagtcctccggcgcaaagagctgtggt

SEQ ID NO: 72959 - DNA, 80 bp, Homo sapiens
  chr7:2138294-2138374
  hypo
cggcacatgcaagagccgcctgctgccactgctccaggaggcccaagggagcgcactaccacacccgatagctgcccggc

SEQ ID NO: 72960 - DNA, 30 bp, Homo sapiens
  chr7:2142538-2142568
  hypo
acccactcctaaagcgggcctctcctcagg

SEQ ID NO: 72961 - DNA, 30 bp, Homo sapiens; identical to SEQ ID NO: 20988
  chr7:2143492-2143522
  hypo

SEQ ID NO: 72962 - DNA, 30 bp, Homo sapiens; identical to SEQ ID NO: 20989
  chr7:2148950-2148980
  hypo

SEQ ID NO: 72963 - DNA, 30 bp, Homo sapiens
  chr7:2155029-2155059
  hypo
ggacagggtccccacgtgttctggggtcag

SEQ ID NO: 72964 - DNA, 30 bp, Homo sapiens; identical to SEQ ID NO: 20990
  chr7:2158608-2158638
  hypo

SEQ ID NO: 72965 - DNA, 171 bp, Homo sapiens
  chr7:2160715-2160886
  hypo
aaggacactcccggcgcaggctcccagggcaggcgccccgccacagcattcaccaggacgagctggaccaggtggctctggggcccttcccgcctgaggcctcacgatctgagtctccactcactggtgagccccatttccatgtgaggtgtaggcgctgggtgctgccaa

SEQ ID NO: 72966 - DNA, 164 bp, Homo sapiens; identical to SEQ ID NO: 20992
  chr7:2162502-2162666
  hypo

SEQ ID NO: 72967 - DNA, 502 bp, Homo sapiens
  chr7:2162965-2163467
  hypo
agctcagccagctcagggactgagatgaaactgcacgctacagcttggagacattgcgggagggctcccagcaagcgaaactgggctggggtgcaggacggagagagggcgctggtgaggccctggtcctgtgtgtgagggcggctgacacccggtgggctctgtttgcgcttgagctggtgacggtagggtttccttccctgtcaagcaggagagcaccccagtccacccagggagcacccaggaggagccagccccgccaagggcacgcatgggaggcgtcaatccgctggagggcagcagccctcaagcgaggactcacggggacatgcgataccaggaagcgagtcggaggcaattaagcctgtttcagagtgcacttcgcaggcggcgctgaatcgatagatcctccggcggcgtggtgctgcaggtgaggaatcagtcaggtaaatgcctcccaatctgttcctgctgtgcaaagaatcagcgctgtttaccactc

SEQ ID NO: 72968 - DNA, 30 bp, Homo sapiens
  chr7:2163772-2163802
  hypo
tcagaggccacgccacgcccctgctcaact

SEQ ID NO: 72969 - DNA, 30 bp, Homo sapiens
  chr7:2165797-2165827
  hypo
gttcctgcaaagaccgggcaggatgaagga

SEQ ID NO: 72970 - DNA, 123 bp, Homo sapiens
  chr7:2169044-2169167
  hypo
cagcaggctcacggcggctcctgtccacacggctcctgctaggcagcgcccctcctgccgtgggtctgaatccgtcacctgccagtgacgaggacgcgaggaacacgcgcttctcagagtcca

SEQ ID NO: 72971 - DNA, 31 bp, Homo sapiens
  chr7:2172532-2172563
  hypo
ggtgggtccctcatgacggctcatgctgaag

SEQ ID NO: 72972 - DNA, 30 bp, Homo sapiens
  chr7:2182167-2182197
  hypo
tgccactgagcccacggtgaagggcacggt

SEQ ID NO: 72973 - DNA, 100 bp, Homo sapiens
  chr7:2183943-2184043
  hypo
ctcagcgtccccatcgtcattcatcgccgggattacagatgatacacctgaaccctggagccctcacggggtcctgagaggccccgctcccgccaccagc

SEQ ID NO: 72974 - DNA, 30 bp, Homo sapiens; identical to SEQ ID NO: 20995
  chr7:2191748-2191778
  hypo

SEQ ID NO: 72975 - DNA, 203 bp, Homo sapiens; identical to SEQ ID NO: 43809
  chr7:2195724-2195927
  hypo

SEQ ID NO: 72976 - DNA, 447 bp, Homo sapiens
  chr7:2196793-2197240
  hypo
gatatatactggaacgtcttcaaaagagtgctaagtaatacaatattttaagaatagaaatcaatagtaagaaggcgatgggaacactgttgtggggaggcctggctccactgaccactccagcagtgcaggtcaccgtgatcaggaagcggtaatgatggaacaaatcacagcactcagagggctcctccccttcatgttaccatttgagctccccaccatgcaagtccacacctcacatgcgtaagaacccgcaaaaactaagagactgagaagagaaaagcagcacagcatgctcccgacacggaagacgctgcccatctgggaggagtgggagagccggtcccctacagtctctgctcagtgcagcacaggcccagggccctgggacacagggcagagggtgtctgaaagaggagggcagacacctcccgagaagccctggga

SEQ ID NO: 72977 - DNA, 532 bp, Homo sapiens; identical to SEQ ID NO: 20998
  chr7:2208424-2208956
  hypo

SEQ ID NO: 72978 - DNA, 142 bp, Homo sapiens; identical to SEQ ID NO: 20999
  chr7:2212438-2212580
  hypo

SEQ ID NO: 72979 - DNA, 31 bp, Homo sapiens; identical to SEQ ID NO: 21000
  chr7:2214040-2214071
  hypo

SEQ ID NO: 72980 - DNA, 241 bp, Homo sapiens
  chr7:2222235-2222476
  hypo
tgacacaatggggtatgaccacgtgccatgtggtggaagggagcgctgatccgtgccacagggtagacgccccttgagaacgtgctgagaggaaagcgccagcacagaggccacctatggtgcgattccactgatacacaacgtccagaacaggtaaacccagagacaaagagcagaggagtgactgccaggggctggggaaaggagaacagggaacttcggccaactgggcttcctttgg

SEQ ID NO: 72981 - DNA, 634 bp, Homo sapiens
  chr7:2232843-2233477
  hypo
aggtgcaggctcacaaaccatcggcccaagccacgccccagcatactcacttgcccaagcaaccggggtgagacaagggccacccagctccgacagccaccacgtcctggagagaaagcgtccccgcccagaggacggtccttgtcctagaacagcaaggccctccaactcttggtcctcaaagcccttccccgcctccgcacccagcaccacattgctgtgctgagtttcagcacagggaccgtgcgtcctgctctctgctgcatctcccagccagtatacaccacggtacgtcataagccctcaacaaatatttgttgaatggaacagacgtgatcacaatatgtgctcctgggaaccctcggctaccagaaaaaaaggcgagacagaaatgagcacttctcaaccctgggagcaaatttataagggttttatcccttcaaaattattaccaaggggtaacacggccgcgggtaactccagattcctccggaaaacctcactgtgcactgccaaggctccagccagagcaggtgctgagccgcgatccgggagacgccagtctcaccctaggctctcttccacaaccaccctcaggcaaggccacaccgtcgcccaactgtcccaaatctgg

SEQ ID NO: 72982 - DNA, 157 bp, Homo sapiens
  chr7:2236060-2236217
  hypo
caactaagatactcccgcaaaacgctcctgcggcatcttccaaaagattgcatctgaggaggcacccctgttgttttcattgtttaaagctgtctgtgtgtgtgcactacgtgggcagactgtgctgtgctcgtcacagcgtcgccagagccagccc

SEQ ID NO: 72983 - DNA, 138 bp, Homo sapiens
  chr7:2237099-2237237
  hypo
tctcatctcccgccccgacccacgcatcactccgccgacgcctggtacacacgacgtgcactgcacagccaccttctccctgcacacgggcccaagctcggacacaggcacgaccaggactggcgggctgcagagctc

SEQ ID NO: 72984 - DNA, 340 bp, Homo sapiens; identical to SEQ ID NO: 21003
  chr7:2237967-2238307
  hypo

SEQ ID NO: 72985 - DNA, 111 bp, Homo sapiens
  chr7:2241773-2241884
  hypo
tcaaaggctcagcacacgcctactgcacgtctggctcaggggcgctaaagggagaccccagctcttaactcacaatgctcaggattgagaggatgcgtttacggaaaacca

SEQ ID NO: 72986 - DNA, 30 bp, Homo sapiens
  chr7:2250259-2250289
  hypo
gtcacccgagatcacggcctgatgcagaac

SEQ ID NO: 72987 - DNA, 30 bp, Homo sapiens
  chr7:2252758-2252788
  hypo
ctgcgctggtgagccggaagcaggctctgc

SEQ ID NO: 72988 - DNA, 275 bp, Homo sapiens; identical to SEQ ID NO: 21004
  chr7:2255762-2256037
  hypo

SEQ ID NO: 72989 - DNA, 101 bp, Homo sapiens
  chr7:2256930-2257031
  hypo
cactaacagagtccatcgccctgccagccagaaaatcctgagaggtggactgagggctgcgaggggccagggaccaccaccaggagcggacatggcagagg

SEQ ID NO: 72990 - DNA, 73 bp, Homo sapiens
  chr7:2259944-2260017
  hypo
tcatggaacccgcacgcgacagaaccgccaggcttcctcctgaccactcccaccaggcgaccttctgaggacc

SEQ ID NO: 72991 - DNA, 30 bp, Homo sapiens
  chr7:2260984-2261014
  hypo
tcgggagccaatcacgcctcctctcctgcc

SEQ ID NO: 72992 - DNA, 30 bp, Homo sapiens; identical to SEQ ID NO: 21006
  chr7:2261322-2261352
  hypo

SEQ ID NO: 72993 - DNA, 93 bp, Homo sapiens
  chr7:2262277-2262370
  hypo
gacactgcctgttgcgctccagctgctcctgcatcttctcctccgccccggcctcccgctcctgaagctgccggatgcgcgtcaggagctcct

SEQ ID NO: 72994 - DNA, 510 bp, Homo sapiens
  chr7:2263997-2264507
  hypo
cccacccaggccatgagcaaacgccccacctctcagggaaaacagctctcaaagcagcaacggagccaaccctgaggcagtggcccccaccccagcggtgcctcagtctcactgagcccacacaacgcacaccgcagtcaggatctgcaggccaggggcaagcaatccaaccagcatcacaccccggaagacgtgagctatttttctagggcccaggagagtgtgtgaatacaccgcatgatgtcagggcggggctggacatccacccgccaagagagggcacggaggccagggagactttccgcccaatactctgcctgaaccttggcagcatttccacaactgatcagcactgactgaaaccctggcaaagtgctgttaatcagagcagaggggatccgcgcactcagtggaaacctaattccctccccaaggacagggtgttttccctgctgccctggggagccaggagcaacacagagccgccattgagaccggcaccctttgcta

SEQ ID NO: 72995 - DNA, 661 bp, Homo sapiens; identical to SEQ ID NO: 21010
  chr7:2264961-2265622
  hypo

SEQ ID NO: 72996 - DNA, 20 bp, Homo sapiens
  chr7:2279837-2279857
  hypo
cagagcgagactctgtctca

SEQ ID NO: 72997 - DNA, 30 bp, Homo sapiens
  chr7:2289660-2289690
  hypo
ccctccccactatgcgggtcccatctcctg

SEQ ID NO: 72998 - DNA, 30 bp, Homo sapiens; identical to SEQ ID NO: 21012
  chr7:2290711-2290741
  hypo

SEQ ID NO: 72999 - DNA, 195 bp, Homo sapiens; identical to SEQ ID NO: 21013
  chr7:2293742-2293937
  hypo

SEQ ID NO: 73000 - DNA, 126 bp, Homo sapiens; identical to SEQ ID NO: 21014
  chr7:2294643-2294769
  hypo

SEQ ID NO: 73001 - DNA, 30 bp, Homo sapiens
  chr7:2296688-2296718
  hypo
ggcccagccggcgacgggagcaccaaggcc

SEQ ID NO: 73002 - DNA, 30 bp, Homo sapiens
  chr7:2297038-2297068
  hypo
ctcgcggttctgcgcggtggcgctcatcat

SEQ ID NO: 73003 - DNA, 30 bp, Homo sapiens
  chr7:2298035-2298065
  hypo
ctttctcaggccttcgcaaagccggcgact

SEQ ID NO: 73004 - DNA, 99 bp, Homo sapiens; identical to SEQ ID NO: 21015
  chr7:2298363-2298462
  hypo

SEQ ID NO: 73005 - DNA, 54 bp, Homo sapiens
  chr7:2299327-2299381
  hypo
tctaaaactctagagagaaaacgccagctgaccgcaggtgcccagctcccacct

SEQ ID NO: 73006 - DNA, 150 bp, Homo sapiens
  chr7:2300172-2300322
  hypo
acacagaccctactccgagtctcacgtgtcttgctgggatatggctaccttcagctcctaataggtctggggagagtataactggtgtaagtacaagcagacttaggaaaaacggtcctcgctgcccccgactgaacagcaagggtgaga

SEQ ID NO: 73007 - DNA, 35 bp, Homo sapiens; identical to SEQ ID NO: 21017
  chr7:2300781-2300816
  hypo

SEQ ID NO: 73008 - DNA, 30 bp, Homo sapiens; identical to SEQ ID NO: 21018
  chr7:2303966-2303996
  hypo

SEQ ID NO: 73009 - DNA, 20 bp, Homo sapiens
  chr7:2312473-2312493
  hypo
aatactttttttgagacgga

SEQ ID NO: 73010 - DNA, 143 bp, Homo sapiens
  chr7:2313677-2313820
  hypo
gtgcagtttccaggcgctgaacgccagccagcgctcatcaactcggatgcccaggcctgagccagcatcacacatccctgtcgcgtcctctgctctctgctgccctgagcgcccgtgtgcccttcagcgtgagctgaatgatc

SEQ ID NO: 73011 - DNA, 30 bp, Homo sapiens
  chr7:2314932-2314962
  hypo
agagcccgggaaaacgacagcaccaagtgc

SEQ ID NO: 73012 - DNA, 30 bp, Homo sapiens; identical to SEQ ID NO: 21019
  chr7:2316621-2316651
  hypo

SEQ ID NO: 73013 - DNA, 31 bp, Homo sapiens
  chr7:2324509-2324540
  hypo
cttacacattctgagtcggctaataaataaa

SEQ ID NO: 73014 - DNA, 260 bp, Homo sapiens
  chr7:2328671-2328931
  hypo
tgtttttatattatgtaaccacggtcgaaagtcagttcctttgttcctgacgtctttccctcagcatcaggctgcgagacctgttgtgcacgtggctgtggggcgatggctgcccctgtggtgggcgccgctgcgtgactatgtgtcctcgtcgcctcctcctccctctgctgcggggcatctgggagggttccagcacctccctgttccacacggtgctgttacgaacattccagcacgtggctcttggtggacatatg

SEQ ID NO: 73015 - DNA, 396 bp, Homo sapiens
  chr7:2349363-2349759
  hypo
ctcaaaaaaaaaaaagtataaactttaagtgacagcgcaatgaattctgaccaacgtattcacacagagaacagacctgacatgagcgagcagctgcaggtaagggttgatgggagcccagggtgcatggaagtcgcccaggcaagaggggaaggctcggggcaggggtgaaggagccccgagggtcagcaaaggccctggacctgcctcaatgacactcaaggagtcatcgccaggtcaacgcggacaaacagcacggagcttccgaaccgaatggaatgtatggaatgccatgggatgagccgcaagtgaagcgtgactcaccctcgttctaaagagtcaatgtagggccgcaggactgtatacggcagagccaggatacgccgtggtcatctg

SEQ ID NO: 73016 - DNA, 30 bp, Homo sapiens
  chr7:2360969-2360999
  hypo
gaatgtgcaccgacacgtctgccttcagca

SEQ ID NO: 73017 - DNA, 30 bp, Homo sapiens
  chr7:2405735-2405765
  hypo
gatcttggagaaaccggagcgcctgcagcg

SEQ ID NO: 73018 - DNA, 30 bp, Homo sapiens; identical to SEQ ID NO: 21021
  chr7:2414933-2414963
  hypo

SEQ ID NO: 73019 - DNA, 30 bp, Homo sapiens
  chr7:2418600-2418630
  hypo
tgggtggggggcagcgttgggggaaaagtg

SEQ ID NO: 73020 - DNA, 30 bp, Homo sapiens
  chr7:2419152-2419182
  hypo
gtctgcagggggcgcgatgggggtcctgtt

SEQ ID NO: 73021 - DNA, 440 bp, Homo sapiens
  chr7:2420147-2420587
  hypo
agcgacgccactggcggcaccttctcctgcgcccagtgatgtttccacggtgcctgtacacagccgagcagcatttccgttgaaggacttgcatccccattgcgggcagtgctggacgtgtcccggagacccaccgggagggcgccgccatgccttgtacccccaccgtgcaggttgtggccggttttctccgcaggttgaacatggaaataaaagcaaacttgtatgaaaaaccggtctttctcctctctttgaatgtagatagagaccttgaacttggtgcctgcctccctccccagtggcaagggcctgcttgccaagccagacctctgcagggcgctgtcccgtccggtcgtcacgcacactcggccaccctgtgtccagcgatgcactagtcatgccacagtctcttctgttgcgttgttttctgtgaaagatgc

SEQ ID NO: 73022 - DNA, 30 bp, Homo sapiens
  chr7:2465680-2465710
  hypo
ggacctgcatagtccgggatgggagtaggt

SEQ ID NO: 73023 - DNA, 30 bp, Homo sapiens
  chr7:2472349-2472379
  hypo
tgggacagcgcaggcgccgcgcacttctac

SEQ ID NO: 73024 - DNA, 479 bp, Homo sapiens
  chr7:2472799-2473278
  hypo
accaactggaagcgcgtgatgatcgtgctgagcggaagcctgctgcaccgcggtgcgccctaccgcgacccgctgcgcatcccgcgcgagcacgtgcacaacgccagcgcgcacctgaccttcaacaagttctggcgccgctacgggaagctctcccgccacctcatgaaggtcaagctcaagaagtacaccaagttcctcttcgtgcgcgaccccttcgtgcgcctgatctccgccttccgcagcaagttcgagctggagaacgaggagttctaccgcaagttcgccgtgcccatgctgcggctgtacgccaaccacaccagcctgcccgcctcggcgcgcgaggccttccgcgctggcctcaaggtgtccttcgccaacttcatccagtacctgctggacccgcacacggagaagctggcgcccttcaacgagcactggcggcaggtgtaccgcctctgccacccgtgccagatcga

SEQ ID NO: 73025 - DNA, 338 bp, Homo sapiens; identical to SEQ ID NO: 21024
  chr7:2473779-2474117
  hypo

SEQ ID NO: 73026 - DNA, 30 bp, Homo sapiens
  chr7:2476920-2476950
  hypo
ggagggcacctcgcccgtttacagttgggc

SEQ ID NO: 73027 - DNA, 281 bp, Homo sapiens
  chr7:2477348-2477629
  hypo
acacacacacacacgcgcgcacacacacacacacacacacactctctctcacacacacatcgggatatttttcttgtttccttcttccagagggtgtaggagttgtgttccaagtttgttcctgcaaaccctccgatgaggccagctgcattcatcggggcctggatggccgcacctctctctccccgccctgtctcctgcactcaggtgagaggctggcagggctgccgtaggggtggagagtgaacgcagggtggctaagccctcgtccctgtgaggga

SEQ ID NO: 73028 - DNA, 30 bp, Homo sapiens; identical to SEQ ID NO: 21025
  chr7:2480819-2480849
  hypo

SEQ ID NO: 73029 - DNA, 11 bp, Homo sapiens
  chr7:2500185-2500196
  hypo
ccaccacatag

SEQ ID NO: 73030 - DNA, 3 bp, Homo sapiens
  chr7:2500212-2500215
  hypo
gag

SEQ ID NO: 73031 - DNA, 176 bp, Homo sapiens; identical to SEQ ID NO: 21028
  chr7:2539249-2539425
  hypo

SEQ ID NO: 73032 - DNA, 31 bp, Homo sapiens
  chr7:2540087-2540118
  hypo
tccagtggtgggaagcgcgtttgccaggtgg

SEQ ID NO: 73033 - DNA, 256 bp, Homo sapiens
  chr7:2544412-2544668
  hypo
cgtgggaaggggcttcgggggaggtccctgtggacacacctgagcagcccggcctcctgggggctgcgggagaggcagcagagccagcccgctcaacagcagggccacaattgcctgtggcccctggggagtgacaccccccccccccccccccggctccacagaggcgaggatgggaagaggcggaggaaccggctgtgcgggacacctgagccccggaccaggcctcccagggggtggccgccttggggctgag

SEQ ID NO: 73034 - DNA, 31 bp, Homo sapiens
  chr7:2546548-2546579
  hypo
agccctccctcaggggcgactccacggatgg

SEQ ID NO: 73035 - DNA, 78 bp, Homo sapiens; identical to SEQ ID NO: 43815
  chr7:2555343-2555421
  hypo

SEQ ID NO: 73036 - DNA, 30 bp, Homo sapiens; identical to SEQ ID NO: 21029
  chr7:2557159-2557189
  hypo

SEQ ID NO: 73037 - DNA, 30 bp, Homo sapiens; identical to SEQ ID NO: 21030
  chr7:2565964-2565994
  hypo

SEQ ID NO: 73038 - DNA, 737 bp, Homo sapiens; identical to SEQ ID NO: 21031
  chr7:2566358-2567095
  hypo

SEQ ID NO: 73039 - DNA, 30 bp, Homo sapiens
  chr7:2578292-2578322
  hypo
cggcgtggccgtcccgcagccactcagtga

SEQ ID NO: 73040 - DNA, 30 bp, Homo sapiens
  chr7:2581086-2581116
  hypo
gacgcctggggccacggtgaagggcgctgg

SEQ ID NO: 73041 - DNA, 30 bp, Homo sapiens
  chr7:2581384-2581414
  hypo
gcggcacaggaggccggcgcaggacgactt

SEQ ID NO: 73042 - DNA, 30 bp, Homo sapiens
  chr7:2583246-2583276
  hypo
cacgaacgagtgtgcggcggggatggggtc

SEQ ID NO: 73043 - DNA, 30 bp, Homo sapiens
  chr7:2583526-2583556
  hypo
agctgactggccgccgaggccacaaacagg

SEQ ID NO: 73044 - DNA, 30 bp, Homo sapiens; identical to SEQ ID NO: 21032
  chr7:2586666-2586696
  hypo

SEQ ID NO: 73045 - DNA, 38 bp, Homo sapiens
  chr7:2593552-2593590
  hypo
ttacaggtatgagccactgcatccggcccctactttca

SEQ ID NO: 73046 - DNA, 54 bp, Homo sapiens
  chr7:2609244-2609298
  hypo
agcagcccgtgtgccgaccttgtgcgtacgaatgtgttcgtgaccctgtaaatc

SEQ ID NO: 73047 - DNA, 302 bp, Homo sapiens; identical to SEQ ID NO: 21033
  chr7:2611214-2611516
  hypo

SEQ ID NO: 73048 - DNA, 153 bp, Homo sapiens; identical to SEQ ID NO: 21034
  chr7:2612208-2612361
  hypo

SEQ ID NO: 73049 - DNA, 33 bp, Homo sapiens
  chr7:2612480-2612513
  hypo
ctctttatccacgtgtttcccacctatcctcct

SEQ ID NO: 73050 - DNA, 30 bp, Homo sapiens
  chr7:2614208-2614238
  hypo
cggttggaagactgcgctgaatgaactcag

SEQ ID NO: 73051 - DNA, 30 bp, Homo sapiens
  chr7:2618065-2618095
  hypo
gctacaccgaaggccgtcttcatgtctcaa

SEQ ID NO: 73052 - DNA, 43 bp, Homo sapiens
  chr7:2629285-2629328
  hypo
atgacttctgcctgcgccctggcttggcgggggtctgcgcgtg

SEQ ID NO: 73053 - DNA, 270 bp, Homo sapiens
  chr7:2632065-2632335
  hypo
tgacaggggctctgcgaagcactctagggttgctggcatttaatacagagactcacaggccctgagcagtcggggctcgcagacagcatacagtccatctgagactcggacagaagtctccgtcgaaggccagtgtgtggccatcacaccgcatgggacgcaagaaacgcatctgggagcagttcagctggagccccgcacaggcagtgccacggtctaggcggggcaggcccctgccccattcacggaccccgcgcctgcctgcagcac

SEQ ID NO: 73054 - DNA, 30 bp, Homo sapiens; identical to SEQ ID NO: 21037
  chr7:2632756-2632786
  hypo

SEQ ID NO: 73055 - DNA, 30 bp, Homo sapiens; identical to SEQ ID NO: 21038
  chr7:2650012-2650042
  hypo

SEQ ID NO: 73056 - DNA, 31 bp, Homo sapiens; identical to SEQ ID NO: 43820
  chr7:2671600-2671631
  hypo

SEQ ID NO: 73057 - DNA, 31 bp, Homo sapiens
  chr7:2674427-2674458
  hypo
tagcaaactgaggctccgaatcacatagtga

SEQ ID NO: 73058 - DNA, 31 bp, Homo sapiens; identical to SEQ ID NO: 21039
  chr7:2678377-2678408
  hypo

SEQ ID NO: 73059 - DNA, 552 bp, Homo sapiens
  chr7:2679579-2680131
  hypo
tctctcccaatgcctcgggcagccatcatcctcagctgtggtcacgctgcctggcctgccagctcacccgcccccgctgtgtgactgtggactctggaactccctgtgcctagcagcgtggctccaggacacgggccctatgtcttcgcttccctccctgctcagggcagacccgcagcagtgtccagccgaggagcgagcagccgtggctggaatggcagggtggtgggatcgtggccactgcctgtggctggggctggaggctgcatcgggccaaacttctcatcagagtccctgtgagcaccccccagtgggccagggcctcctcagcccagccacgcgccacggtagcccacaggttggtggcacagagcggcgtgtgggtccgtggcgcagggtagcggggtgggcagctgctcccaggcgtgtgcatgtagagcagccgcctgtgtgtgtgtggggggggacgtgtgttccataggccggccgtgacttgctgtgcaccctcccgagtggcatgcttcctcacacgctgccaggcccaggtcctgc

SEQ ID NO: 73060 - DNA, 31 bp, Homo sapiens
  chr7:2683829-2683860
  hypo
tacaggtctgttctgccgttggcctctgagc

SEQ ID NO: 73061 - DNA, 30 bp, Homo sapiens
  chr7:2686390-2686420
  hypo
taaatgggagtctgcgccaggtcccctgct

SEQ ID NO: 73062 - DNA, 133 bp, Homo sapiens
  chr7:2686829-2686962
  hypo
tagggccacctactcgctccgccacgccaaccgcacggtggccggggtccaggaccgcgtgagtggccgcggagttggggccaggagcactcttgctgctccggagccccacgtctgcgcgaggacgggcggg

SEQ ID NO: 73063 - DNA, 30 bp, Homo sapiens
  chr7:2687203-2687233
  hypo
cttttggaggaacacggcggtgtcgctgga

SEQ ID NO: 73064 - DNA, 141 bp, Homo sapiens
  chr7:2690601-2690742
  hypo
cagcagctctgtgctgcgggaccataagctgtactgtgggtgggggagcaggtctggaggtggggggcagggagctggggcatcgggagtttcggccccctcgggaggtttgcgatgtgtgtcggacggcacagaggcagg

SEQ ID NO: 73065 - DNA, 185 bp, Homo sapiens
  chr7:2691941-2692126
  hypo
ggcccagcaggcctggcgcctggctcctcagcctgcaggactggggaactgggggagggagctggacaaaggctgtgtggatgtcaccaacagcccctggggttaccatgccggtgacctggtgacctggctgagagcctttcggggggacctgctcaatgcacccgcatcgctgggactgcttt

SEQ ID NO: 73066 - DNA, 56 bp, Homo sapiens; identical to SEQ ID NO: 21042
  chr7:2695697-2695753
  hypo

SEQ ID NO: 73067 - DNA, 272 bp, Homo sapiens
  chr7:2697945-2698217
  hypo
aggccgctccagggccgcggcaggcgcacgacagcctctaccgcgtccacatgcccagcctgtacagctgtggcagcagctacggcagtgagaccagcatcccggccgcggcccacaccgtcagcaacgccccggtcactgagtacatgtgagttgacgtgggcctagtggggccagcggacacgtcagctgcggctgagagcgcggatctgggctggggctagctcgaggcaaggggctggagaaggggcggcctccgggctgggcagccc

SEQ ID NO: 73068 - DNA, 183 bp, Homo sapiens
  chr7:2698473-2698656
  hypo
gcccatctgggcacagcgggcctacccatgggccccccgacctgcagctgggactgcatggccagcaggcactcacagcctctctcccctcatgcctcaggagccagaacgctaatttccagaacccccgctgtgagaacaccccactcattgggcgcgagtccccgccgccctcagtaagtc

SEQ ID NO: 73069 - DNA, 152 bp, Homo sapiens
  chr7:2699683-2699835
  hypo
caccggtcccccatcccgcacggccacccgcctgcgcctcccgcctccaccctgcactcactgccgccctcccgtcggcactgagctggggctccatctgtccggctcctgttggcagggccagctctgagtgccacggctcagccagagac

SEQ ID NO: 73070 - DNA, 31 bp, Homo sapiens
  chr7:2705243-2705274
  hypo
ggagtgctgatccgatcgacgtagtgaaagc

SEQ ID NO: 73071 - DNA, 30 bp, Homo sapiens; identical to SEQ ID NO: 21045
  chr7:2731759-2731789
  hypo

SEQ ID NO: 73072 - DNA, 243 bp, Homo sapiens
  chr7:2740187-2740430
  hypo
gccttctcccctgccgagcggctcttcctggccgaggcctacaacccgcagaggacgctcttctgcaccctgctcatccgcacgggcttcgactggctcctgagccgacccgaggctcccgaggacttccagaccttccacgcctccctgcagcaccggaagccccgcctggctcggaagcacatctacctacagccgataggtacgggacgcctgcagccatcggcacgctcctgggggacc

SEQ ID NO: 73073 - DNA, 240 bp, Homo sapiens
  chr7:2742259-2742499
  hypo
ttcacccagcaggccggtgtctgcgagtgattcccggggagagggtcccaggcgggcaggggcgtcgcagggctgacggtgctgctctcccaccagacctgagcgaggagccggtgggaagctccctgctgcaccagctgtgcagctgcacagaggccttcttcctgggcctgcgcgtcaagtgcctgccgtcggtggcagccgcgtccatccgctgctcctcgcggcccagccgggact

SEQ ID NO: 73074 - DNA, 324 bp, Homo sapiens
  chr7:2751964-2752288
  hypo
gactctacacctggactcaggcggtggtggggacgtggcccagccaggaggcgggggagccgtcagtgtgggaggacaccccgcctgccagcgccgactcgggcatgtgctgtgagagtgactcggagcccggcaccagtgtgtcggagcccctcacccctgatgccgggagtcacaccttcgcctcggggccagaggaagggctgagctacctggcagcctcagaggctccgctgccacctgggggccctgcggaggccatcaaggagcatgaacggtggctggccatgtgcatccaggccctgcagcgggaagtggcagagg

SEQ ID NO: 73075 - DNA, 30 bp, Homo sapiens
  chr7:2754203-2754233
  hypo
cagaaggtgaaagccggagcctggtggctg

SEQ ID NO: 73076 - DNA, 30 bp, Homo sapiens
  chr7:2763900-2763930
  hypo
gggctcaccagcgccgggcaaggccagacc

SEQ ID NO: 73077 - DNA, 31 bp, Homo sapiens; identical to SEQ ID NO: 21048
  chr7:2764249-2764280
  hypo

SEQ ID NO: 73078 - DNA, 416 bp, Homo sapiens
  chr7:2770637-2771053
  hypo
catgtccttttgcctagagctcgctggctggctggtctgacagcattcctgagccaggtattccagggcacggatccgagaaacccactcaaggaccacacagacaacacacacccaagagtctgaccgacagccgtgggggctgctcaacgacgacaaaccccggggcttcctcgctcactgcagcatgatgtccttcaggttctcctgcaggatggtgtctttcacagcatggaacacgaagcggacgttctcggtgtcgatggcggtggtgaagtggtggaagagtggcttgctgcggttccgtctcttcctgtcgaagcactggaccaggtagcgctggacgtcctccagcctgtgcgggtcgcccctgaagtccgggaagtgcttcttgatgctcacggtcttcaccttct

SEQ ID NO: 73079 - DNA, 33 bp, Homo sapiens
  chr7:2783183-2783216
  hypo
tcagggaggatccaagatggccgaataggaaca

SEQ ID NO: 73080 - DNA, 79 bp, Homo sapiens; identical to SEQ ID NO: 21049
  chr7:2798450-2798529
  hypo

SEQ ID NO: 73081 - DNA, 30 bp, Homo sapiens
  chr7:2801233-2801263
  hypo
ctttacacagggcacgttcccgaaccggcc

SEQ ID NO: 73082 - DNA, 30 bp, Homo sapiens
  chr7:2801817-2801847
  hypo
gtcaacccaggcttcgtttctaggagaagt

SEQ ID NO: 73083 - DNA, 164 bp, Homo sapiens
  chr7:2804417-2804581
  hypo
cccagcgtgagccggcggaccctgaagggaacactgagactgaccacagctggacttgcgccgcctcgtcctcttagtgaatgaggtcctcagaggcttaagcacgcgttagttatccaaaatgcttctgttcaggtgaatgcacaaagcgttgaggtaggtca

SEQ ID NO: 73084 - DNA, 38 bp, Homo sapiens; identical to SEQ ID NO: 21051
  chr7:2815343-2815381
  hypo

SEQ ID NO: 73085 - DNA, 31 bp, Homo sapiens; identical to SEQ ID NO: 21052
  chr7:2834425-2834456
  hypo

SEQ ID NO: 73086 - DNA, 30 bp, Homo sapiens
  chr7:2836919-2836949
  hypo
aggcatgcctcgttacgcccggctaatttt

SEQ ID NO: 73087 - DNA, 31 bp, Homo sapiens; identical to SEQ ID NO: 21053
  chr7:2864021-2864052
  hypo

SEQ ID NO: 73088 - DNA, 45 bp, Homo sapiens
  chr7:2871309-2871354
  hypo
tacaggcatgaaccaccgcgccccgcctggaacttcattttctta

SEQ ID NO: 73089 - DNA, 31 bp, Homo sapiens; identical to SEQ ID NO: 21054
  chr7:2873500-2873531
  hypo

SEQ ID NO: 73090 - DNA, 10 bp, Homo sapiens
  chr7:2900159-2900169
  hypo
gtgctggcat

SEQ ID NO: 73091 - DNA, 30 bp, Homo sapiens
  chr7:2921535-2921565
  hypo
cccatgggcaccatcggtgtgtcctgtggg

SEQ ID NO: 73092 - DNA, 228 bp, Homo sapiens; identical to SEQ ID NO: 21055
  chr7:2931115-2931343
  hypo

SEQ ID NO: 73093 - DNA, 241 bp, Homo sapiens
  chr7:2935117-2935358
  hypo
cccccacccctctcatttttcagcactgcctcctgagcacctgggaactccagtcttcctgaattttgtctgaccttgacctctgtccttggacctgatgcacacctcagtgaagcttgtaccaagtaagccctgaggcggccgtgagaagccctcgaaagttcccctgttcattattatagttacttttagagacagggtctcactctgtggctcaggctggattgtaccatcacggatt

SEQ ID NO: 73094 - DNA, 50 bp, Homo sapiens
  chr7:2946304-2946354
  hypo
gcgctgctcctcgccgatcttgtccttgacaacgcggagcagctcctcta

SEQ ID NO: 73095 - DNA, 244 bp, Homo sapiens
  chr7:2951741-2951985
  hypo
gtggcctcatgaggatcatcacggagggtcctggccccatccaacctcccagtccccgcctcaccttggcggccacagcttcaatgttggcaggggcgatgcattcgaacgcgttggggttcttctctcgggagtagatgatggtctccgtcttctgccttctgaggaactcatctcttgtgacgatatctgcagagagaggggccagtcctgagggcagcacgaggtggccttgggttgacca

SEQ ID NO: 73096 - DNA, 70 bp, Homo sapiens
  chr7:2952964-2953034
  hypo
agcctctgcaccagcgtcttggccagcacggtgggtgtgaagagcacgggccggcggcgctcgcagtaga

SEQ ID NO: 73097 - DNA, 127 bp, Homo sapiens
  chr7:2958269-2958396
  hypo
caccgggaagccagcggggccgcagcaccgcactggcatgggtggggcgcgtgtccgactctgcgtagggatggccctgtggctggtgtgcgctctgagcccagggggcgcccggggagaagatgtg

SEQ ID NO: 73098 - DNA, 84 bp, Homo sapiens
  chr7:2959052-2959136
  hypo
agggtcgacccgcgcgcacagccactcgtgcctgtcctggtacatggtgtcacggacgtgcacaacatcgtcacacttcaggga

SEQ ID NO: 73099 - DNA, 30 bp, Homo sapiens; identical to SEQ ID NO: 21059
  chr7:2962830-2962860
  hypo

SEQ ID NO: 73100 - DNA, 322 bp, Homo sapiens
  chr7:2967958-2968280
  hypo
ggggctgtggggcccgggaacctgatttctgggcagcatggagccacgggtcataggttttgtccttggacaggcagctgggtgaacccagggaggccgcttccctcctctgagcctcagcctcctcatctgtacaatgagcagtaccctgcctttcagggttgcttcgaggacagctgggtcagcaagcgtggactggcccagagacggggtaaggaggcttggcatggtggcacggggcaaaagcccagtcctccctcacctgccacccacctgcgatggggcgcgtcctccttgtagcgtctgacgatggagtcgtttc

SEQ ID NO: 73101 - DNA, 193 bp, Homo sapiens
  chr7:2972304-2972497
  hypo
aaatagagagaggccagccatcgtgtccctcgtcatacggccaccaggttcagcccggaacgcacacggaccgatgctcatctcccgcggccgggacgacaagacacagcggctcccctgggcttgaatcaggcagctgctggtatagacaagctctcctcccagggcggccgtgtaatatggctcatggcag

SEQ ID NO: 73102 - DNA, 287 bp, Homo sapiens; identical to SEQ ID NO: 21062
  chr7:2976622-2976909
  hypo

SEQ ID NO: 73103 - DNA, 30 bp, Homo sapiens
  chr7:2977495-2977525
  hypo
gctgtgcagcctcgccgccctgcacgctgc

SEQ ID NO: 73104 - DNA, 30 bp, Homo sapiens
  chr7:2983722-2983752
  hypo
ctggcaggaagctccggcagaccacgtgca

SEQ ID NO: 73105 - DNA, 283 bp, Homo sapiens; identical to SEQ ID NO: 21063
  chr7:3012962-3013245
  hypo

SEQ ID NO: 73106 - DNA, 43 bp, Homo sapiens
  chr7:3015333-3015376
  hypo
ataaagcatgaaacctacatccggtgctcttattatcacaatt

SEQ ID NO: 73107 - DNA, 274 bp, Homo sapiens; identical to SEQ ID NO: 21064
  chr7:3026287-3026561
  hypo

SEQ ID NO: 73108 - DNA, 583 bp, Homo sapiens
  chr7:3033383-3033966
  hypo
gtcccgtgggttttgacgcagaaccggctctcggtaaacctgtccctgccacaccctgcaaagctcccgcccctgcctcctcttgtctggagctgtctcccttctagctcgccaaatgctcagggttcctatattttaaaaaatcttgtcccatcaaactctgctttcaggaatggcacgaagagccgacacgcacggtgagcagctgccttctgcagatggaacgcctcacctgggacgcctcacctgggacgcctcacctgggacgcaggcgttcctgttcctagtcacgccctgagccctggattcctgcccaagctcacatagcagggactggcccagccccattcactcatgcatgtctgaccccaaggcagggctggtggcctctaaatcctcccgctagggtttcagcgcctggctgcgttgaaggtatcaccttttctacgaacacctgttctgaacagtgaaaatagctattcctaacagaggagttgcaagctccagggatctgtgtgtgcgttggggagagtggagtacatcatttctggaaaacggggcctcaaaacgtagcgccgtttac

SEQ ID NO: 73109 - DNA, 30 bp, Homo sapiens
  chr7:3034521-3034551
  hypo
gcgctagtcacaaagcgaagatggaatcaa

SEQ ID NO: 73110 - DNA, 216 bp, Homo sapiens
  chr7:3049090-3049306
  hypo
ggagaggatgcccaatgtgaacgtggtcctctccccaggaaacactagacactggaggaaagccaacgccgtaagagaaacaaccaagcacggtcaaggaaagcgttcacagggccagcagaacaagccattagattgtgcgtgcttcatgtcctcagaaagacgcaagagagcattggctccacaaatagaaattaaaacaaaacatcaccgctg

SEQ ID NO: 73111 - DNA, 30 bp, Homo sapiens
  chr7:3074518-3074548
  hypo
gccaagagcctctgcgtgcctcagggactc

SEQ ID NO: 73112 - DNA, 363 bp, Homo sapiens; identical to SEQ ID NO: 43822
  chr7:3082924-3083287
  hypo

SEQ ID NO: 73113 - DNA, 370 bp, Homo sapiens; identical to SEQ ID NO: 43823
  chr7:3083330-3083700
  hypo

SEQ ID NO: 73114 - DNA, 30 bp, Homo sapiens
  chr7:3140458-3140488
  hypo
agggccggggcaagccgactccagcacacg

SEQ ID NO: 73115 - DNA, 43 bp, Homo sapiens
  chr7:3150399-3150442
  hypo
agtggctaaattttaaaagatcgacagtcccaaatgctgacaa

SEQ ID NO: 73116 - DNA, 45 bp, Homo sapiens; identical to SEQ ID NO: 21067
  chr7:3179216-3179261
  hypo

SEQ ID NO: 73117 - DNA, 116 bp, Homo sapiens
  chr7:3211448-3211564
  hypo
caaatgctgtcaagtaacagtcgcggtcgaccgaatttgctgttggcagaggctgcgcgctgccacacaaggctgtgtctattccacacaagcccggctccctccaccaggagatc

SEQ ID NO: 73118 - DNA, 43 bp, Homo sapiens
  chr7:3239122-3239165
  hypo
tgggattacaggcgtgagccaccgcgcccggcctattttctct

SEQ ID NO: 73119 - DNA, 30 bp, Homo sapiens
  chr7:3280631-3280661
  hypo
ggtggcaggagccacgcagagcggtggagc

SEQ ID NO: 73120 - DNA, 184 bp, Homo sapiens
  chr7:3283450-3283634
  hypo
caggccgtgagccaccgcgcccagcctcagaagtgctccttttttaccaatggagaaacagcccagagaggaaaagcgatttgcacagagtcacgcagctgaagactggcagatccaggctgtttgctgtcagtctgagctctcgaattctaagacgagccacttctctcgggaagccaggaag

SEQ ID NO: 73121 - DNA, 469 bp, Homo sapiens; identical to SEQ ID NO: 43824
  chr7:3340345-3340814
  hypo

SEQ ID NO: 73122 - DNA, 122 bp, Homo sapiens; identical to SEQ ID NO: 5314
  chr7:3341286-3341408
  hypo

SEQ ID NO: 73123 - DNA, 468 bp, Homo sapiens; identical to SEQ ID NO: 5315
  chr7:3341569-3342037
  hypo

SEQ ID NO: 73124 - DNA, 22 bp, Homo sapiens
  chr7:3381926-3381948
  hypo
aaggagaaagttagccaggtgc

SEQ ID NO: 73125 - DNA, 36 bp, Homo sapiens
  chr7:3513738-3513774
  hypo
ttttttttttttttttgagaccgtgtctctctgttg

SEQ ID NO: 73126 - DNA, 21 bp, Homo sapiens
  chr7:3575689-3575710
  hypo
ataatttttttttttcttaga

SEQ ID NO: 73127 - DNA, 43 bp, Homo sapiens
  chr7:3624122-3624165
  hypo
acctgaagtcccctgtggggccgctccttgagagttgaacctt

SEQ ID NO: 73128 - DNA, 183 bp, Homo sapiens; identical to SEQ ID NO: 21070
  chr7:3727108-3727291
  hypo

SEQ ID NO: 73129 - DNA, 30 bp, Homo sapiens
  chr7:3771086-3771116
  hypo
ccagctgacagcttccgacgagttgccaga

SEQ ID NO: 73130 - DNA, 43 bp, Homo sapiens
  chr7:3864236-3864279
  hypo
aaaacatctaaataagtgatgcgctgtcacccagctaacagga

SEQ ID NO: 73131 - DNA, 158 bp, Homo sapiens; identical to SEQ ID NO: 21071
  chr7:3880278-3880436
  hypo

SEQ ID NO: 73132 - DNA, 31 bp, Homo sapiens
  chr7:3949423-3949454
  hypo
gcgtgcttgcctaaagcgaggcacctcttca

SEQ ID NO: 73133 - DNA, 29 bp, Homo sapiens
  chr7:3981825-3981854
  hypo
ctgcacccggccaagacttcagtcttctc

SEQ ID NO: 73134 - DNA, 98 bp, Homo sapiens
  chr7:3991157-3991255
  hypo
tagcccttgagcagaatgcatcgtcaatgcgtgctgggagggagtagagttacatctagattgagttttcagtgtccgttgttcaacccaccatgcac

SEQ ID NO: 73135 - DNA, 132 bp, Homo sapiens
  chr7:3991579-3991711
  hypo
gccagcatctcagatagcatccgacactgactcttctgcagaaacaaaatagcgtatttcagtggctttatttgtaactcggcaaatgaaggtgaggttgagtttaccttcgaaatccttcctagccttctt

SEQ ID NO: 73136 - DNA, 31 bp, Homo sapiens
  chr7:4015316-4015347
  hypo
tgtgtagcagtcagtccggaaggccctgtgg

SEQ ID NO: 73137 - DNA, 31 bp, Homo sapiens
  chr7:4027689-4027720
  hypo
aacttgacatctgtatcgggttgtctcacgg

SEQ ID NO: 73138 - DNA, 237 bp, Homo sapiens
  chr7:4030120-4030357
  hypo
agaagagtttcctgaggatggcgtggccatgctgcctgtacgtaaaacaggacttgacagtgatctggacggagagaatgggacaggggagagctcgtgtcatctgaattctggttcgcatccaccctaaggacagcccccatcaggcgctgtcgcctcgggcttcaggactgtgtctcctttgtcttcgtgctcctcattccctgcacttagtacgtactcagcaaatgaggtgaa

SEQ ID NO: 73139 - DNA, 30 bp, Homo sapiens
  chr7:4030580-4030610
  hypo
cctacctgttacagcggtgaagccagctgg

SEQ ID NO: 73140 - DNA, 43 bp, Homo sapiens
  chr7:4047168-4047211
  hypo
caatgtatgtgatttcatactcggggagtcttgggggttatat

SEQ ID NO: 73141 - DNA, 244 bp, Homo sapiens
  chr7:4056897-4057141
  hypo
cacagtatgagatacaggtggcggcgtacaacggggccggtctgggcgtcttcagcagggcagtgaccgagtacaccttgcagggaggtaagcttgtctccaaaaccacgaggtggcgggatctttgccggggaatgggatttgcaaggtttgactggagtacgttagaaagaaaaacagagaatccagtcccctagggagcgtttacaagaaaattcatcacgtatttaatgggatctctcca

SEQ ID NO: 73142 - DNA, 19 bp, Homo sapiens
  chr7:4062703-4062722
  hypo
cccttgtttttcttttcaa

SEQ ID NO: 73143 - DNA, 170 bp, Homo sapiens
  chr7:4116726-4116896
  hypo
atctctcaccacctacaccatcgacgtggccgctgtgactgccgtgggcactggcctggtgacttcatccaccatttcttctggagtgcccccaggtcagtagaatcgtgtgcggtcctcctgctgtcacctttctcttggagattcccgaggctagaagttgattggca

SEQ ID NO: 73144 - DNA, 117 bp, Homo sapiens
  chr7:4139330-4139447
  hypo
tggaagtggtggctaatgcaccgtgggcagggccaagcaggcacagagtggggcgtgtgtgagcgggatgtgatgggagatggcccaaggggagccgcagctggtgggaaaggccat

SEQ ID NO: 73145 - DNA, 12 bp, Homo sapiens
  chr7:4140781-4140793
  hypo
tttttttttttt

SEQ ID NO: 73146 - DNA, 35 bp, Homo sapiens; identical to SEQ ID NO: 21074
  chr7:4141092-4141127
  hypo

SEQ ID NO: 73147 - DNA, 179 bp, Homo sapiens
  chr7:4146922-4147101
  hypo
tgcacagaccaggcaaggacccggaaggcaggaggctgccgggaaaagcgcccaccggtcacttggcaccgtgagctacgcacgtgagccacgtgcgccctgactgctggctctttccttagtgcttatacgtgattgataaaaggtgctaaattgacggcctgaaatggaagtcatcc

SEQ ID NO: 73148 - DNA, 258 bp, Homo sapiens; identical to SEQ ID NO: 21075
  chr7:4152826-4153084
  hypo

SEQ ID NO: 73149 - DNA, 409 bp, Homo sapiens; identical to SEQ ID NO: 21076
  chr7:4153552-4153961
  hypo

SEQ ID NO: 73150 - DNA, 30 bp, Homo sapiens
  chr7:4169615-4169645
  hypo
tgctggcaggcctgcgcaagttcgtgctct

SEQ ID NO: 73151 - DNA, 43 bp, Homo sapiens
  chr7:4171197-4171240
  hypo
cattgcctcttacctgggaatcggtcagttattaattccaaca

SEQ ID NO: 73152 - DNA, 201 bp, Homo sapiens
  chr7:4171859-4172060
  hypo
ttactgcagccagctgaccctcggaatcctgtgtaacctgtcacgcacccaaggaacactgtcttgagatctgaatccctgtggtttttcccttcagccccaggcccaccagtgaggctcgtgttccccgaagtgagactcacctccgtgcggatagtgtggcaacctccggaggagcccaacggcatcatcctgggtaag

SEQ ID NO: 73153 - DNA, 30 bp, Homo sapiens
  chr7:4177362-4177392
  hypo
tcctccctcgcacacgccgccgtcttctgg

SEQ ID NO: 73154 - DNA, 316 bp, Homo sapiens
  chr7:4183233-4183549
  hypo
gtgtccttcctttgaagggcccgctagcttctattggagaggatgcttctgcgcagtgggccctggggtccgtggttccgagcaacggggacctggcgaggggatgctctccctttgctcacagatcggcatgggtgtttgcttctcccaggaagagtaggcacccatggggctccagcccgactctctcgtcactttctcgctggggacccatcttggagcttcacagcctcgtcctcatccttgtcttgtatgcttcctgacaggcctgcggcgagggtctggcatgggaagcgttgcagggatgcagcagggt

SEQ ID NO: 73155 - DNA, 239 bp, Homo sapiens; identical to SEQ ID NO: 21078
  chr7:4185349-4185588
  hypo

SEQ ID NO: 73156 - DNA, 358 bp, Homo sapiens
  chr7:4187737-4188095
  hypo
agtccaagagagcctttgaaacgggatacgctgggccacctcccctccggagaccaggtgaaatcacaagggccagaacgtgtgcttacggaggcaagtgctgatgaagtgagacgggagccctcctcccacacccgccactgggggccgacaatcaattgcagctttacacacgccacgcattctaatcagaatcaataatcttcatgataaacaattaaacaattattccttccgccgcggaacttctctgctgaaatcgatggggtgcagaggcacagcggcggcagatgatgggcactccaggccgggcctggccccaggcaccccgcgtcccgcatccaagctactgcacaca

SEQ ID NO: 73157 - DNA, 141 bp, Homo sapiens
  chr7:4198501-4198642
  hypo
tttccccatttttctcattcacgagccactctttgacaacagcgcaggtaagtgatgggaagcgaggtctcctcagagctccaggtggcgttttcagccgctccgtcctacctcggcggcgtcaggcctgaagatggattg

SEQ ID NO: 73158 - DNA, 273 bp, Homo sapiens
  chr7:4201342-4201615
  hypo
tgagggtggccctgggaagggcggcagaacataacaaccaccctgacccccgctttcctctcctgtgtgtttcagttccaggagagcccccgggatctgtctcagcgacgccacacaccacgtcctctgtcctgatacagtggcaggtaagagcgcggggaatcacgcgcgttttgtcaaatgtgttctcatttccctgcgcattcagccacaacggctgacatggactgcaagctgagccctgagctaagcgtttgagagtagaaccaagga

SEQ ID NO: 73159 - DNA, 136 bp, Homo sapiens
  chr7:4203269-4203405
  hypo
tgccagagatgcctgctgggccgggagagagacgtgctgagtgagcagcgccagccgcagccttcctgggcatggtcttgaggtgcgtagtgctagagatgccagagaggaacccggtgagcagagccaggctggg

SEQ ID NO: 73160 - DNA, 318 bp, Homo sapiens
  chr7:4211344-4211662
  hypo
cagataatagcccaactccaccgtccatttgagaatttggagctagatgccgggcagtgccatttccccatctctggtctgtggtgggcagcgggagtcctcggacctggggctgcaagcccgcaggatggatacgtgacccttgtaactttctgcaaaattgaagagggctgtggggcattgacaagcacaccgtggggggaacacaggggactcagacgcgcccccacccccagacgacagctctctcagcccctgggtttgctcactggggtccgacacccctgggccaggagcggagctgtgtccaggctggag

SEQ ID NO: 73161 - DNA, 226 bp, Homo sapiens; identical to SEQ ID NO: 21080
  chr7:4214558-4214784
  hypo

SEQ ID NO: 73162 - DNA, 30 bp, Homo sapiens
  chr7:4214985-4215015
  hypo
tacgcacctggtcgcgcagctctccctgag

SEQ ID NO: 73163 - DNA, 139 bp, Homo sapiens
  chr7:4218109-4218248
  hypo
cctgcagatttaaagaagtaccggcgctatgaagtaataatgaccgcctataacatcatcggcgagagcccagccagcgcgcccgtggaggtctttgtcggcgaggctggtaagctccgtgcacccccaaccccactgc

SEQ ID NO: 73164 - DNA, 803 bp, Homo sapiens
  chr7:4219128-4219931
  hypo
agcaccaagggtcaagcccagcggattttttccggaatggtcaagcggtatttgcatacaaatgaggatgcgtggagagaggcatcaagagcatacggtatttctgcctctctttgcacgaaaatatgttcaaaggggtcactcagagccaccgaggtacggctcagctttccctcagggatggacctggctgtagaggagcccattgagggccatggtggggccaccaagggtgctgtcagagaggggtgccagggtgccgtcagtaaagggtgggtgccactgcggacggcggccatggcagattctgtgctctccagttgtattcgggtgactgggccccagttggcccccatggctgggggtgggtcagcctgtggcatcgggggagcacaggaaaggagggccgggaactacagtgtctgaactgcaagcagaaggtgtgggtgtcagagctctgcctgagggtctgcctgcgcctgggcataggacaccaggaaccagggggctcagggcacttgggcaggccctgagaccgaggcagacgtccagagaaaagagcttcagcaagcggtagggaagccaggggtggtgcgggaaactggggagtcgcgccagggccagccaagcggcaacaggactggatgcccagcaaacagctccagctctatgcccagcgcccagctccagctctatgcccagcgcccggctccagctctatgcccagcgcccagctccagctctatgcccagtgcccggctccagctctatgcccagtacccggctctagctctatgccctgt

SEQ ID NO: 73165 - DNA, 30 bp, Homo sapiens; identical to SEQ ID NO: 21083
  chr7:4230870-4230900
  hypo

SEQ ID NO: 73166 - DNA, 172 bp, Homo sapiens
  chr7:4246745-4246917
  hypo
catcctgcaggtggaaatgaacgatgctcaccagtcagggcctgcccagcaagagcaaggcgggcgggtgtgcgaggcaggcgtgccagccctggggcgctccaggctgcctccccgaagcctccgtgctgccttttcacatgggcaagccgctctaacagcctggccctgg

SEQ ID NO: 73167 - DNA, 200 bp, Homo sapiens; identical to SEQ ID NO: 21084
  chr7:4247840-4248040
  hypo

SEQ ID NO: 73168 - DNA, 189 bp, Homo sapiens
  chr7:4249810-4249999
  hypo
gggagatgggagcgcgggccacaccagtgcccagccctctgcagtctacacagtgagccgcacctgaccgcttctgtgggccaggagccttctggcgcctgaagtggggggttttggaatctgagctggacggggctggagctgagtgcgaggggagcggggactcgcggggaaaggcctgtgaggaaa

SEQ ID NO: 73169 - DNA, 165 bp, Homo sapiens; identical to SEQ ID NO: 21085
  chr7:4254666-4254831
  hypo

SEQ ID NO: 73170 - DNA, 94 bp, Homo sapiens
  chr7:4256586-4256680
  hypo
tgtccagagcaccaggccacccggagcaccacaccacccggagcaccaggccacccggagcaccacaccacccggagcaccaggccacccggag

SEQ ID NO: 73171 - DNA, 264 bp, Homo sapiens
  chr7:4265022-4265286
  hypo
gagcactcttgtgtgggagagcggcctgtgggatggggcggtaccagccagacacgggtgcctgggctcagcctcttaacgctgtgaacacatctcagcattttccaggcagcgataaggcattggttctcaggcttgccgagagagcccttgactttctcctcaggttctcatatgctgctccgccggctgcacgaagggaacaggacgcctgttggttactggtgcggcccagggagcctggcaggccgtgcggattagaag

SEQ ID NO: 73172 - DNA, 123 bp, Homo sapiens
  chr7:4265507-4265630
  hypo
gctcaacattcaaaagcaggtcgccaacgatctcccctttcggatcatgaagggaacccaagcaggccgcgggacccgtgttctttcatgggaagttgagacgccccctcccttcaatgatta

SEQ ID NO: 73173 - DNA, 317 bp, Homo sapiens
  chr7:4272744-4273061
  hypo
attcagcactcactccgcatccagtgcccctgatgcctcatccagggctgctgcaagccgacccaccaggcaggtgcatggggctcgcatctgggacttcgcacttctaacctctgctctcgcctccccatccctcttgcagatgaaggcttatgggacatgtttgtgaaggacatcccgcggagcgccacatcctacaccctcagcctggataagctccggcaaggagtgacttacgagttccgggtggtggctgtgaatgaggcgggctacggggagcccagcaacccctccacggctgtgtcaggtaggccctc

SEQ ID NO: 73174 - DNA, 241 bp, Homo sapiens; identical to SEQ ID NO: 21088
  chr7:4273569-4273810
  hypo

SEQ ID NO: 73175 - DNA, 210 bp, Homo sapiens
  chr7:4277416-4277626
  hypo
gtgcaggtccagccccttcctcgcgtgtcccacgatgccactcagccaaaacatagcgttcgttctctcgtggatctgccgggcccgtgtctgcttttccatttcatttgcttgtaggtgctgagagaaatgcaataggttttctttctgggggcagccaggcacagtgcagcaaacgctctatgcctcgggacccagatgctgaccctg

SEQ ID NO: 73176 - DNA, 184 bp, Homo sapiens; identical to SEQ ID NO: 21090
  chr7:4285296-4285480
  hypo

SEQ ID NO: 73177 - DNA, 183 bp, Homo sapiens
  chr7:4286817-4287000
  hypo
aattcaggccttattgagccccggggctctatcgaatggcttcttttcaactgtgggttgtagatgaactcccggcgggaagggccagcaggtgggtgtggtgaggccgattctgctttgctttgcgtgttctgtttacagaggatgccgggtttgctgtccgcaccatagccttgggcttgg

SEQ ID NO: 73178 - DNA, 30 bp, Homo sapiens
  chr7:4300167-4300197
  hypo
gaagatgtgttcatcgtcacctgatggaga

SEQ ID NO: 73179 - DNA, 116 bp, Homo sapiens
  chr7:4307406-4307522
  hypo
cttagtaaaccttgatctgtacggagcggcctgtccgaggctacgccggcctcctggctgctgctggactgtgcttaggacagcgcccatgcctcggagggactctgtcccatgag

SEQ ID NO: 73180 - DNA, 236 bp, Homo sapiens
  chr7:4308247-4308483
  hypo
catgatgtttgcctaatggttcgtagcatggtttttatttcttacgcattcttggcacacagtgtagctatcctcctgacgagcaacccgtctgcgtacctaagtgtggctccccgtgggtcagcgtcctggtagcatggatccagtctgaaaggtgaggacaacgtggaaactcatgagctgagcctgcccgctgggacacgtctccttcccgcgtcaccttctggtttagggag

SEQ ID NO: 73181 - DNA, 25 bp, Homo sapiens
  chr7:4322036-4322061
  hypo
tgacgagagtgaaactctgcctcaa

SEQ ID NO: 73182 - DNA, 156 bp, Homo sapiens
  chr7:4348037-4348193
  hypo
gatccagccctccatgctcctcgccatgttactgtgccaggcctcacacaggagagcggatcccctctccgttctggagatccaggtgtctgcagggctgcgcccctctgaaggtgcagggaaggaatctggcccgggtccctctccagcttctgg

SEQ ID NO: 73183 - DNA, 209 bp, Homo sapiens; identical to SEQ ID NO: 21091
  chr7:4349560-4349769
  hypo

SEQ ID NO: 73184 - DNA, 358 bp, Homo sapiens
  chr7:4410635-4410993
  hypo
tggagctgcagccctagtggtcgctgtgcctctagacccacagccaagggtctgcatgtggagtcagtgggaggtgccggccgtcaatggagctgaaggcctgtgcacccccaggtggagtgggggtcggcggggacagctggacccacaagcacgttaggtccatccttcccttcaccagactaggatgctcagggaatagtggttgctctttcctcttccaaatcccctgtgaactcctctttccagaaacgctaaccagaagcttatggggcagggtcctctcggacatgcagtttttggtctcagcgacattgcgcagataatcccgcccatcggtgcatgataaagcaggact

SEQ ID NO: 73185 - DNA, 82 bp, Homo sapiens
  chr7:4540650-4540732
  hypo
ctagtacctcctccagggctgcgcagagtagaaaggtagtggtgacctggcgcggtggctcaggcctgtaatcctagcactt

SEQ ID NO: 73186 - DNA, 220 bp, Homo sapiens
  chr7:4730595-4730815
  hypo
cctggaaataggcccctgcatcgtgacttgttgggcgatcttgtacttaattttcattgcgactattacttttcacgagtttctagtttcctggtaaaatgttgccgggtaattaaaaaggataaaaaacagaatgtgcgtaaccaagaaggcgtgtggcgtgctgccaggaatcggaggaaccagggttcaagaactcgcctcacctgacccatttcta

SEQ ID NO: 73187 - DNA, 30 bp, Homo sapiens
  chr7:4743131-4743161
  hypo
ccgaccctgctgcgcgggagggaaagagcc

SEQ ID NO: 73188 - DNA, 30 bp, Homo sapiens
  chr7:4743379-4743409
  hypo
cactttcagagcatcgtgactagataaaag

SEQ ID NO: 73189 - DNA, 30 bp, Homo sapiens; identical to SEQ ID NO: 21093
  chr7:4748935-4748965
  hypo

SEQ ID NO: 73190 - DNA, 30 bp, Homo sapiens; identical to SEQ ID NO: 21094
  chr7:4749191-4749221
  hypo

SEQ ID NO: 73191 - DNA, 710 bp, Homo sapiens
  chr7:4751217-4751927
  hypo
ggtctcaagagtgccactcctcggcattgtgtggatgggcggtagtgagaataattactaagggcgtcataccctctcgtatctgcatcacccataaggggtgggcagtggtgctgccgtgtcttgtcaggaggccagctctgtgtcacccaccaggctgggctcagccacaagtcggcaacgtagtgcctccagggcagatgccacggaccgtagagaagcaacgcaaggtcagagagaaaagattgcggccggccggtgtcaaggcgggggacctgtgagctgggcctggagctgaggcagaacttgatggactatgactcaaggttgagatggggcagggactccgggggaggggcagagggcaggtgccgccgagcaggagggaggacgcggcaggtcacagagcccaccaagtccgaagctggaagttcagattctttgatattcagaggtggatcatctgtgcttttttttttttatcagtctctcactttttatccatcatctaattgtgacagcttatttgcctttataccataagatggggagtagggttgagatgaaatccaagcatcgtttcccttccccgatggtcgcctccctggggtgagacgttcgacgtgtcagacttcaccaagagcatctcccgcctcggtgcagtaatggacttggaaacgatttactccggcacttggttcctgtctcca

SEQ ID NO: 73192 - DNA, 36 bp, Homo sapiens
  chr7:4753918-4753954
  hypo
gtttgtttgttgagacagtctcgctgtgtcacccag

SEQ ID NO: 73193 - DNA, 148 bp, Homo sapiens
  chr7:4754251-4754399
  hypo
ttgtgtgtcaaagtaggagtgcgtgcttgctttgctttgttttttcaaggctcatcttaaggattttggcttacgtattttctaagtaggcgttacattcccgcggttcaaaactcaaaaggtatgcggttaaaaattttgttttggt

SEQ ID NO: 73194 - DNA, 30 bp, Homo sapiens
  chr7:4761820-4761850
  hypo
gatgctggatttcacgtccacggccgcctg

SEQ ID NO: 73195 - DNA, 30 bp, Homo sapiens
  chr7:4762727-4762757
  hypo
gatggtaacggcaccgtgctcactccaacg

SEQ ID NO: 73196 - DNA, 204 bp, Homo sapiens
  chr7:4767391-4767595
  hypo
tgggaacccgcgcacggaggaaacactttaccagagtaaacgagattataacttgtttgccagagaacctctcctgtggccatgcctgaacctctcctgggactgtccgtggtcttcacattggtgcttggacacccgtccttcgggaggggaggaaaagcggccggtaaaatggagacagtcggtggcgtgtgtttgccgatt

SEQ ID NO: 73197 - DNA, 30 bp, Homo sapiens
  chr7:4768232-4768262
  hypo
tgctaccagctaggcgtggtggtgcaagcc

SEQ ID NO: 73198 - DNA, 30 bp, Homo sapiens
  chr7:4768682-4768712
  hypo
aagcaagctctgcccgggtcagccccagag

SEQ ID NO: 73199 - DNA, 30 bp, Homo sapiens
  chr7:4768936-4768966
  hypo
gctggggccaccgccgtttggccgtgtcag

SEQ ID NO: 73200 - DNA, 30 bp, Homo sapiens
  chr7:4769923-4769953
  hypo
gagccgagtacactcggccagggtgagtga

SEQ ID NO: 73201 - DNA, 51 bp, Homo sapiens; identical to SEQ ID NO: 5316
  chr7:4770078-4770129
  hypo

SEQ ID NO: 73202 - DNA, 120 bp, Homo sapiens; identical to SEQ ID NO: 43829
  chr7:4770152-4770272
  hypo

SEQ ID NO: 73203 - DNA, 220 bp, Homo sapiens
  chr7:4771495-4771715
  hypo
ctgaagcacattttcagtaaccgcttgctacgtgccagccgtccggtcaggactgatgttcacggcatggagacctgaggccacacggaggccgggctggccagggcggggctcagattcagtgacttgcccaggtgcccccagggcatctgagcagcccaggctccagccaggcaggtctgacttcacctcccttgccgtgagccgctgcactgttcca

SEQ ID NO: 73204 - DNA, 30 bp, Homo sapiens
  chr7:4780501-4780531
  hypo
gatccagttcacgtcgctctatcacaaaga

SEQ ID NO: 73205 - DNA, 581 bp, Homo sapiens
  chr7:4781491-4782072
  hypo
gagtcacacacgaacctcaggcgacagcctggatgcatggcacacagccctggccctggtcctgtcatacagggatgcaaaaacagacgtgtacttgaggctggagggttcatacattctttaatgatttacctcttcattgcggacatttctaaacgtggctggcttttctctcccaaccgcacgtctgtggctctgcagatgcgtggctgcgcgtggtttggtgccggagctgtggctcctccgcagcaccagcagtttctgcgtcgctcgcgcgtcaccagcaaaggtcaccccagtggaaaaagcagatcacatcttagggctgttgtgaacatggtgttgacctcacatataccctgaaaggggctcagggccctcggggacatctgtgaagcacgctctgggcatgctgatctgttggagcgagcgctgtggcaatcccaggctggtcacgtcagtccctccctgctgatctgcgcactctgctgaaccccggccgcaccttggcttgcttttttctttttttcctcttgcagctgtaggagaagaaagggcttttgtttgtatttcagagacag

SEQ ID NO: 73206 - DNA, 145 bp, Homo sapiens
  chr7:4783195-4783340
  hypo
atggtgaattttatgttatgggaattgcatctgaagaaagcagttgagcgcagtatatgtacttaagtcttcacctagtaccaccttaaaggcgctgtagaaatggtggccaagaccagctcacgtgctagtggaagctcacacc

SEQ ID NO: 73207 - DNA, 30 bp, Homo sapiens
  chr7:4789661-4789691
  hypo
tgtgagcacagctccgggagacccgtactc

SEQ ID NO: 73208 - DNA, 30 bp, Homo sapiens
  chr7:4794294-4794324
  hypo
ccatagtgacccggcgcgggcggcacagac

SEQ ID NO: 73209 - DNA, 30 bp, Homo sapiens
  chr7:4796640-4796670
  hypo
acctctctttgaaccgttactttatcaaag

SEQ ID NO: 73210 - DNA, 30 bp, Homo sapiens
  chr7:4798456-4798486
  hypo
cccctctcatggaacggagcctcccccatg

SEQ ID NO: 73211 - DNA, 30 bp, Homo sapiens
  chr7:4800782-4800812
  hypo
ggtccccggacacacggtcaccatcctgca

SEQ ID NO: 73212 - DNA, 1121 bp, Homo sapiens; identical to SEQ ID NO: 21100
  chr7:4801820-4802941
  hypo

SEQ ID NO: 73213 - DNA, 30 bp, Homo sapiens
  chr7:4803533-4803563
  hypo
acaacgagaaacagcgacagattcgacgca

SEQ ID NO: 73214 - DNA, 30 bp, Homo sapiens; identical to SEQ ID NO: 21101
  chr7:4804926-4804956
  hypo

SEQ ID NO: 73215 - DNA, 30 bp, Homo sapiens; identical to SEQ ID NO: 21102
  chr7:4805928-4805958
  hypo

SEQ ID NO: 73216 - DNA, 105 bp, Homo sapiens
  chr7:4806606-4806711
  hypo
cctcagtgggaaaaatgaaaacgtaatggaacacggggaggtgtcggagaagaaaggattttccccttcgctttcagagccggcgggagtgcaggtctgttttgc

SEQ ID NO: 73217 - DNA, 30 bp, Homo sapiens
  chr7:4807541-4807571
  hypo
gcccttacccacaccgtgcggcttgaattc

SEQ ID NO: 73218 - DNA, 30 bp, Homo sapiens
  chr7:4822792-4822822
  hypo
ggggtgggcctgcgcgggacatcctccctg

SEQ ID NO: 73219 - DNA, 30 bp, Homo sapiens
  chr7:4823842-4823872
  hypo
gtcaccgaggtggacggggcggtagccaca

SEQ ID NO: 73220 - DNA, 30 bp, Homo sapiens; identical to SEQ ID NO: 21103
  chr7:4824491-4824521
  hypo

SEQ ID NO: 73221 - DNA, 31 bp, Homo sapiens; identical to SEQ ID NO: 21104
  chr7:4825297-4825328
  hypo

SEQ ID NO: 73222 - DNA, 30 bp, Homo sapiens
  chr7:4827231-4827261
  hypo
agccgtgtccgaaccgctgtgctgtgccca

SEQ ID NO: 73223 - DNA, 30 bp, Homo sapiens
  chr7:4828436-4828466
  hypo
gcgggcagcactcacggccacactgtgtcc

SEQ ID NO: 73224 - DNA, 30 bp, Homo sapiens
  chr7:4829241-4829271
  hypo
agcgacacctctgccgggggcacttgggcc

SEQ ID NO: 73225 - DNA, 30 bp, Homo sapiens
  chr7:4839082-4839112
  hypo
tcttcccgccatgacggatcaggtccacag

SEQ ID NO: 73226 - DNA, 30 bp, Homo sapiens
  chr7:4839337-4839367
  hypo
cgctgcggggctgcccgggagcagggtctg

SEQ ID NO: 73227 - DNA, 178 bp, Homo sapiens
  chr7:4839826-4840004
  hypo
agcccggaggggcctcgttccagctccaccgtgaagacgtagcagaagtcctcggtgctggagctgcggctggacggggctggaggggactcctccgcaagggctgcagagtctcctgggtgggggccaggaaaggtgggtgggagtgaggcgccaggaatcacgacgaggaatggga

SEQ ID NO: 73228 - DNA, 1590 bp, Homo sapiens
  chr7:4855713-4857303
  hypo
tcacccctcagggacaccagacgctcagggagcaggaggccaaaaagggcagagccgcctccaggagctggcgagggaggcgccagcagccgtcatgtccaggaatgtgagcccccgacccctcaaccctgcacgaggccctcacccctgtcgaggagctggttgagaagcagtgtcccggagaagaagaagaggtaggcgagcatctgcgaggccacctcggggtgcacctgcagctgccgcaggaggtccagggctgcctggtacacagacaccacgcggcgcagctcctcgggcagttcgggggccgaggaccagctctcacggcgctccgtctggaatggcgggcactccaggagtgccgggaggcagatgtacagggactggcgggggcaagaggagaacagcaaccagcatttccaggagcgctggcggccgaacggggggcctgacccagcgagctccccacccacgcactgcttgcagggacccggcctcggtagcttcctgctggacaggccatggctttgcaaatgtccagtgtgggatgtggggacacaggagctgcctcctggggctgctgggagcagaggtggggtgcagggggctcagggggatctgctgtcggaggcacagatgaactcagaaggcgcacagaggtggcgcctggggggatgggctccaacaaaggggctccaacaaaatgacgggagagtcaccactcccccagaaagtggctcaccgcacccccgatgcaccccaagctggccagggccacagggggaccggcggcagcacctctggcacccgtgggtccagggtgacaacagggccatgtcccttgcgccccatgctggggcctcccccacctcatccctgaccctcgaaatactggcaggaagggggcgtttcaaggcgagggaaagggagctgggatggttctagggcttctgtgcgacctgaggaggagcgggtgtggggggtgcagctgggcctgtgcagaacctgcagccactgctccctgatgaagtggagcttgtcacggtcccctccctcagccccccagaaggctccttaggagagccacaggcacaagcttgagccccacttgatcccaggagctgcctgagtgcagaagcagagcccgtccgtgcaccttggagacatagtagacgcactgctggaaggcgtacagcaccacctcctccagcaccgccatggcctcctcgctggccgtcagcgtgcaggagaacagcgattccttcgagcctgccgggagacagccacgccaatggtcacaacgggcacagcgctcaggaacgcagcaactcagccagccgccagctctttccctggcgcgggcaccacccaacgcgcccatctggggtccagatgcgataaactggccgagggactctgggccctggctgggacgagcgcagcaaacctgccgccactcttacctggggaggggaatgccgggaggggcaggaggggtccagacacccaacatctcaatgcccagcccagcccagcccaagcgctcattcactcccacgttctggatacgttttctgttacaaccaactg

SEQ ID NO: 73229 - DNA, 30 bp, Homo sapiens; identical to SEQ ID NO: 21108
  chr7:4858252-4858282
  hypo

SEQ ID NO: 73230 - DNA, 30 bp, Homo sapiens
  chr7:4862005-4862035
  hypo
agggcagcgccagccgtacctgtgatgtcc

SEQ ID NO: 73231 - DNA, 30 bp, Homo sapiens
  chr7:4864571-4864601
  hypo
tttcgggatcagactcgggccaggttggca

SEQ ID NO: 73232 - DNA, 193 bp, Homo sapiens
  chr7:4864846-4865039
  hypo
tcagcaggggcagcacggcccggcaggaggaacgggcgcagctggctgaggcaggctggtcaaggcgcgggtatctcctgcgggtggagggaagcactggagtcccactcctgggaaccaaggcgatggaaacactcgcagggcccacaaggagcacagagaccagagcatgggctgccggccacagcctatg

SEQ ID NO: 73233 - DNA, 35 bp, Homo sapiens; identical to SEQ ID NO: 21109
  chr7:4867283-4867318
  hypo

SEQ ID NO: 73234 - DNA, 399 bp, Homo sapiens; identical to SEQ ID NO: 21110
  chr7:4874065-4874464
  hypo

SEQ ID NO: 73235 - DNA, 30 bp, Homo sapiens; identical to SEQ ID NO: 21111
  chr7:4876213-4876243
  hypo

SEQ ID NO: 73236 - DNA, 30 bp, Homo sapiens
  chr7:4913396-4913426
  hypo
cgggctgctggaaggcgcagagctcaccat

SEQ ID NO: 73237 - DNA, 233 bp, Homo sapiens
  chr7:4913744-4913977
  hypo
gatgtgcacagaggccgcctccaacccacggaaaggccgtgcaggtgtctcacgcagggaacagttccaagtgggagactgtgtgtgtgagcacctgtgtggacatttctctgtccaggtacccatgtgtcaccacaacaaccgaacacactctagcgcaaagcttctgggcgcgggcctgtttgaggcagggctgtccagctacagtaaggtctgtgcggggtcatccccag

SEQ ID NO: 73238 - DNA, 201 bp, Homo sapiens; identical to SEQ ID NO: 21112
  chr7:4915209-4915410
  hypo

SEQ ID NO: 73239 - DNA, 470 bp, Homo sapiens
  chr7:4917081-4917551
  hypo
aggcttcaaacatccaggacacgggctccgactgcctcctgcagagcgagcccgccccacgcatgtcccctgcaccactccttctccgcctacctcggctggccttctcagcgctcagacccacggctcttcctgaacctgtggcccccctcacctgccgtgatggtgtccacctccttggctgccagctcctccacgtccgacctcttcctcagctcaaacctccgggataaaccttctcggggtttccataattcctggatcaagaggggcttctcactgtccccaaacacccgaaagcaccgggcctgccaccgctgcccagcatcgccggcttggcccaccacgtcacacagcacgtactggccggcctgcctggggtccagggcgtaccgctccagcgcctccttcaccagctcacgggcgctggaggtgccggtggccaggacgctcttgtagtgggttcctgt

SEQ ID NO: 73240 - DNA, 188 bp, Homo sapiens
  chr7:4918324-4918512
  hypo
gaaacacaatgaggtcgcctaagtaagacacgctccgctgcagggcttggatttctggaaagtgctgggcgcagcgcccgtgtgcagtgagcatcaaggagcgccccacccggagccggccccagcaccatcacagccacagaagagcagcgggcagcccaagggcaaagcttcgcctctccgtaaac

SEQ ID NO: 73241 - DNA, 30 bp, Homo sapiens
  chr7:4937172-4937202
  hypo
ggccttaagaagcagcgaggcctgcacctg

SEQ ID NO: 73242 - DNA, 78 bp, Homo sapiens; identical to SEQ ID NO: 21114
  chr7:4985612-4985690
  hypo

SEQ ID NO: 73243 - DNA, 138 bp, Homo sapiens; identical to SEQ ID NO: 21115
  chr7:4985869-4986007
  hypo

SEQ ID NO: 73244 - DNA, 275 bp, Homo sapiens
  chr7:5157632-5157907
  hypo
acccggccatctacacgctgcggaaccgggacatgcaggaggccctgcaatgcatggtcggccagaggacgctggggatggccaccaggtggattttgcctgatgctgggtgccaggcggtgtctgtcctgagatttctcccactgaggggaatctcaccattctggagccatctaagcctccccaacgcctacggggtgtaaatctaagtatagcacgcaaagaccagcaatccgactccagcctagcgctgctgtgtccgttgacgtcttgcg

SEQ ID NO: 73245 - DNA, 260 bp, Homo sapiens
  chr7:5230932-5231192
  hypo
gtgagccaccgtgcgcggccctccctgttctttttgggacatcaactttgatgtcttctccagcaagtaacaaacttagcaataaccttggcatctgacctagctagggagaaactgagccaagagaggcgttacggaccagtgccccaggagtctcagagctccagcgggtgggtcatcctcagggcaagagaaggccttaatgccagcccgtgcattcggaacgctgtttgtccccactgatacgggttggatgctgc

SEQ ID NO: 73246 - DNA, 90 bp, Homo sapiens
  chr7:5240135-5240225
  hypo
cagtcctccttgtgctcgtttgtgtgtgcgtaggttctgtgcagtcttttttgtttgtttttttttgagacggagttttgctcttactgc

SEQ ID NO: 73247 - DNA, 89 bp, Homo sapiens
  chr7:5240284-5240373
  hypo
ccagcgattctgaactttgtgctggtgacttttaattatggtgttctcctggcccgccagcaggtgcggcctttcggactcgctcctgg

SEQ ID NO: 73248 - DNA, 105 bp, Homo sapiens
  chr7:5242900-5243005
  hypo
aggagaaaccacgagcgtcccttggcctaaatctgtggtgctggaatgctggcctcttaccttgcatcctggcggagccgcagacacacacggaagtggattcaa

SEQ ID NO: 73249 - DNA, 30 bp, Homo sapiens
  chr7:5252744-5252774
  hypo
tggaagacggtggccgctagtctgagatgc

SEQ ID NO: 73250 - DNA, 30 bp, Homo sapiens; identical to SEQ ID NO: 21118
  chr7:5253001-5253031
  hypo

SEQ ID NO: 73251 - DNA, 115 bp, Homo sapiens
  chr7:5253972-5254087
  hypo
tcctgaggctccagcgaatcaagaccctcagacccccgggctgtccccaccccatgaccacatgttccgcaggcaccctcagcgctgtgccctgcgtgtcgcccaggcaggtgtt

SEQ ID NO: 73252 - DNA, 603 bp, Homo sapiens
  chr7:5262385-5262988
  hypo
aacccccaggagaattccacacgagcatttctagcccggctgggtcaccgggtaagatctgggcgtcggtcttgtcatgggaattgaagagcactttcagaaaagcaaattgggtttttgtttgcgatcccaccagctagcgtgagagttgtgaagagctcacgcaaccaggtgggccctccagtgcccggcagctcccagcctgctgtaagggacggggcggcgacgtcatgggtagcacaccctcccctttaaaggccacgctctgagaacctgttccagctctccagctccgcctccaccctcagcaaatggcattggccccttcttttaacccagaagccgcagcctggagttctcttgtcttcctccctccaggctgcaaagcttccctcatcggtgcttacatgcctcctgtggcgcctgctttggaggcaggactgtccctccctcgtcggacagtagagcgggggaggcctcgggctctggagcccgtgcctcagattggagccctagggagcactttcagtcgcatggccgtggtcggcgggaccccacctcaggtctgtggctccacgtctcggatcagtacctccctccctg

SEQ ID NO: 73253 - DNA, 30 bp, Homo sapiens
  chr7:5265707-5265737
  hypo
tccgcatccaggctcggcagtgaggaggat

SEQ ID NO: 73254 - DNA, 30 bp, Homo sapiens; identical to SEQ ID NO: 21121
  chr7:5267979-5268009
  hypo

SEQ ID NO: 73255 - DNA, 30 bp, Homo sapiens; identical to SEQ ID NO: 21122
  chr7:5269146-5269176
  hypo

SEQ ID NO: 73256 - DNA, 515 bp, Homo sapiens; identical to SEQ ID NO: 21123
  chr7:5272773-5273288
  hypo

SEQ ID NO: 73257 - DNA, 30 bp, Homo sapiens; identical to SEQ ID NO: 21124
  chr7:5273495-5273525
  hypo

SEQ ID NO: 73258 - DNA, 20 bp, Homo sapiens
  chr7:5284487-5284507
  hypo
cttgagaggcttgaaacagg

SEQ ID NO: 73259 - DNA, 30 bp, Homo sapiens
  chr7:5304898-5304928
  hypo
gggctggtgggcacacgcccgctgtggccc

SEQ ID NO: 73260 - DNA, 30 bp, Homo sapiens
  chr7:5305461-5305491
  hypo
aagtgcgtgcatctgcgtgagattgagtgt

SEQ ID NO: 73261 - DNA, 31 bp, Homo sapiens; identical to SEQ ID NO: 5323
  chr7:5329219-5329250
  hypo

SEQ ID NO: 73262 - DNA, 31 bp, Homo sapiens
  chr7:5331444-5331475
  hypo
ctgcacaggtaggaaccggggcccaaggggg

SEQ ID NO: 73263 - DNA, 30 bp, Homo sapiens; identical to SEQ ID NO: 21126
  chr7:5334519-5334549
  hypo

SEQ ID NO: 73264 - DNA, 99 bp, Homo sapiens; identical to SEQ ID NO: 21127
  chr7:5334868-5334967
  hypo

SEQ ID NO: 73265 - DNA, 79 bp, Homo sapiens
  chr7:5342788-5342867
  hypo
ccagcactgtgttctgcgtttggtctcatacctgcgtctaccttccatctgtgtccagcggccccggctccagcccagc

SEQ ID NO: 73266 - DNA, 30 bp, Homo sapiens
  chr7:5349057-5349087
  hypo
ctggcaggctctgccgcttgggactctggg

SEQ ID NO: 73267 - DNA, 30 bp, Homo sapiens
  chr7:5350421-5350451
  hypo
ccacacctacagcacgttgggggctccctg

SEQ ID NO: 73268 - DNA, 111 bp, Homo sapiens; identical to SEQ ID NO: 21128
  chr7:5353277-5353388
  hypo

SEQ ID NO: 73269 - DNA, 396 bp, Homo sapiens
  chr7:5372387-5372783
  hypo
caggaagatgcgctcgctgcggcgccgcgtccacaggtcgtcgtcgctggcctcgggccccgcctcgaagccaggctccttggggccccgcagcttccgggccttgcgccccttctccaccgccagcttggccttgtctgggctgctggggtcgggaccgcgggcgccaggcgtgggtgcggccagggagggtcccggctcccccagccccttcttgggccgcagcagccccgcaggcgaccgcttgcgcaccttgacctcgctctctgagtcggtgtactcgaactctgtgcctgaacgcgggaggagggcgtgctggtcacagcctcgtggggaccccttccctcccacccagccacatggacaccattcctccccggcgggacctccccgcca

SEQ ID NO: 73270 - DNA, 43 bp, Homo sapiens
  chr7:5373541-5373584
  hypo
cctgaccctgggaagcagatccgagttctctgggatctccagc

SEQ ID NO: 73271 - DNA, 119 bp, Homo sapiens
  chr7:5384804-5384923
  hypo
gtctcgggtaaccccacgtctctctcacgggccagactgggtgtcaccaacctggagtggcccccacaaaccccaggctgggtcagggacctccatggagctcccgcagcccctcaagt

SEQ ID NO: 73272 - DNA, 30 bp, Homo sapiens
  chr7:5389256-5389286
  hypo
caagctcagtgacccgctgcgccgtctgcc

SEQ ID NO: 73273 - DNA, 30 bp, Homo sapiens
  chr7:5389501-5389531
  hypo
cagtggtggactggcgggggtggagggggg

SEQ ID NO: 73274 - DNA, 103 bp, Homo sapiens
  chr7:5390476-5390579
  hypo
tccgtcccttgatgcggcaacggagccgctttcgtattgaatgacagagaccaggggtgtcaaaggctctgggccctgcactgcctacgcacccttcaaaaca

SEQ ID NO: 73275 - DNA, 56 bp, Homo sapiens
  chr7:5391378-5391434
  hypo
ccctctcgctcactcgcacgcactctctcgctaggaaacacggaaggtattttgtg

SEQ ID NO: 73276 - DNA, 31 bp, Homo sapiens; identical to SEQ ID NO: 21131
  chr7:5391824-5391855
  hypo

SEQ ID NO: 73277 - DNA, 232 bp, Homo sapiens
  chr7:5396666-5396898
  hypo
tggaggatttcagagacaggccgaggcccttggccagcgccttcctgttcttccccagcaggctgtcgtaaggagtcaagtacctgccgcagcccccgctagttttcgatttccccccagcactgtccgaaaacttgaagggcgacttcaacttgtcctgcttggtgagggagagggccttgtcgagcttgcttgccaactgctcctggtcgctggccatcttcttcttctt

SEQ ID NO: 73278 - DNA, 104 bp, Homo sapiens
  chr7:5398874-5398978
  hypo
aagattggagaagagtcattccggcattgaagacaaccacttctaaggtttctgtacaggaacaaagggcctgcgaagggagcgtgaactcttaacacaccctc

SEQ ID NO: 73279 - DNA, 30 bp, Homo sapiens
  chr7:5413857-5413887
  hypo
gggtggcttggacacgtcctccagcttctg

SEQ ID NO: 73280 - DNA, 30 bp, Homo sapiens
  chr7:5426816-5426846
  hypo
ctgagtatcaagaccgtgaggatgttggaa

SEQ ID NO: 73281 - DNA, 558 bp, Homo sapiens
  chr7:5428493-5429051
  hypo
tgcgccgcagcagccgcgcgccctcgtcctgccgggcagcctccttggcacccccgcgccccgcttcggccaccagcgcgggcagccccacgtccccggcgccgccgttgcacatggtcagtaccgacggctgcagcgccgcattcttggtcttggactcagccaggaagggcgacaggcgctcagccaggcgcgggggcccccggtcctggcggccctcggcgcgcgcctcctgggtcaggtccaccacgccccgtggccccgaggcctcctcgccccgggcgcgcgggtccttcttgccgaaaagcggaggcggctccccgccgcggcccgcccgctccttggctggaccgtcccgcgacgacgagcctttggccggggcgcccgaggagtggccgccgccaggggtccgggccgagggcgcgtgagagtgcagggagcccggagcccccgcggtgggcaggtagaaaccgtctgcggagaagggaacagcaggcagtgagcgagcgccacctcccctcccacccctgcctgggcggaggcggacccctgagaggg

SEQ ID NO: 73282 - DNA, 30 bp, Homo sapiens
  chr7:5429413-5429443
  hypo
ggtgcagggagccccgaggtttcacaccaa

SEQ ID NO: 73283 - DNA, 31 bp, Homo sapiens; identical to SEQ ID NO: 21133
  chr7:5437033-5437064
  hypo

SEQ ID NO: 73284 - DNA, 89 bp, Homo sapiens
  chr7:5441349-5441438
  hypo
ccagcattactaggtatgctacgagttattttttattcctagtcctatgctgcacatcggaggtactcaagtagtatttacggtaggaa

SEQ ID NO: 73285 - DNA, 281 bp, Homo sapiens
  chr7:5446691-5446972
  hypo
tctgtgccccggcctcgcagggacgtctggggcacccccacactccggtgatagagctcgaggctggggtggtgggacagggggctcaccctgcacgtccttggcactgcggctgggctatcagacctgtggccaccgccgccgttctggaactcccatcggcgcagaaaagaggcaggtgagagtccgaggctgcagtctcctccaagctatgctgggaccagaaccaggaccaagactgcagtagccaccagcccagatcaacccgcttcagccctgcc

SEQ ID NO: 73286 - DNA, 82 bp, Homo sapiens; identical to SEQ ID NO: 21136
  chr7:5449225-5449307
  hypo

SEQ ID NO: 73287 - DNA, 161 bp, Homo sapiens
  chr7:5453844-5454005
  hypo
cgggattacaggcatgaaccccgtgcccagcctcactgtcttttttgatatgatacttgatgtaccatcgtctcccataaatatatatattatatatgtatatttatagatataaaatagatattttttcttttcctgaaccattccgaggacaagttgta

SEQ ID NO: 73288 - DNA, 21 bp, Homo sapiens
  chr7:5455294-5455315
  hypo
agccaccgtgcccagcctgca

SEQ ID NO: 73289 - DNA, 222 bp, Homo sapiens; identical to SEQ ID NO: 5325
  chr7:5462089-5462311
  hypo

SEQ ID NO: 73290 - DNA, 31 bp, Homo sapiens
  chr7:5473942-5473973
  hypo
tgtgcgccaccgcgcccggccaccaccttaa

SEQ ID NO: 73291 - DNA, 31 bp, Homo sapiens; identical to SEQ ID NO: 21139
  chr7:5480613-5480644
  hypo

SEQ ID NO: 73292 - DNA, 31 bp, Homo sapiens; identical to SEQ ID NO: 21140
  chr7:5483111-5483142
  hypo

SEQ ID NO: 73293 - DNA, 191 bp, Homo sapiens
  chr7:5491668-5491859
  hypo
gtggctcctcgagtgacgggggctggtcatggacgttgaaccacctggagggaggctgtgtggagaggccgagctcaagagacagagccttggtcctcctgcctgccccagggtggcctgtggtcctgggctggccaccacctctcggggcctcagtctccccatctgcactggagcgggtgggcacactt

SEQ ID NO: 73294 - DNA, 30 bp, Homo sapiens
  chr7:5515980-5516010
  hypo
ggagaaaagcctcccgggaccaaccctcat

SEQ ID NO: 73295 - DNA, 30 bp, Homo sapiens
  chr7:5521406-5521436
  hypo
caccaccacaggttcggcggttcctcggcc

SEQ ID NO: 73296 - DNA, 103 bp, Homo sapiens
  chr7:5521755-5521858
  hypo
aggagcacggcagccgggaacaggccacacgcttctctccaggctcagggggcacccgctccatgccagccacgaggatcagaggccccggaggccaaccctg

SEQ ID NO: 73297 - DNA, 30 bp, Homo sapiens
  chr7:5540519-5540549
  hypo
gggacaggactgcacgcccacacgcacttt

SEQ ID NO: 73298 - DNA, 255 bp, Homo sapiens
  chr7:5541326-5541581
  hypo
gcagcagggcaccacgccgtaggagggagtgaacagcgtctgcttgagctcccgcacgcggctcagggtggccttgcactcgctgctcagctggctggcgtcgaagccggggctcacgtcgatggccagcgagcgcaggtgctgcagggccgagagcatcttggagaggcgcagggaagtgaggtggcagcccgagaggttcaccttcaccaggctgcggcagcgggccacgtgttccacggtggagccaggcag

SEQ ID NO: 73299 - DNA, 493 bp, Homo sapiens; identical to SEQ ID NO: 43847
  chr7:5594637-5595130
  hypo

SEQ ID NO: 73300 - DNA, 18 bp, Homo sapiens
  chr7:5625736-5625754
  hypo
cagtgctcgggctgggcg

SEQ ID NO: 73301 - DNA, 920 bp, Homo sapiens; identical to SEQ ID NO: 5333
  chr7:5632265-5633185
  hypo

SEQ ID NO: 73302 - DNA, 215 bp, Homo sapiens; identical to SEQ ID NO: 43851
  chr7:5633395-5633610
  hypo

SEQ ID NO: 73303 - DNA, 30 bp, Homo sapiens
  chr7:5641951-5641981
  hypo
tgagccaccgcacccggcccttttataagt

SEQ ID NO: 73304 - DNA, 30 bp, Homo sapiens
  chr7:5643006-5643036
  hypo
acggccaccgggggcgtgcagtccaccgcc

SEQ ID NO: 73305 - DNA, 30 bp, Homo sapiens
  chr7:5644925-5644955
  hypo
gtgggcagtgactccgcggtcaccagcagc

SEQ ID NO: 73306 - DNA, 30 bp, Homo sapiens
  chr7:5646462-5646492
  hypo
agcgggggatggagcgctgggagggggtgg

SEQ ID NO: 73307 - DNA, 587 bp, Homo sapiens
  chr7:5647832-5648419
  hypo
gggggaagccaggccaggggccgggggcatctctggggtcccaggtgagatgcgggtcgagggagccaggccacggttctccagactcgcgtggaggccacgagcgtcttctggaggagcgggcactgcgcggaccggcagactctggggcgctcaggctccccatctcctgaccttttcctaccttcagttccctcctgtcaggacaggttctggggctcgccggggcagggagccagggcagagggtgcagtttccgctcctgcctgagtcaccttcgctttctcagcgattcttcattcacaagggcgtggcccatcacacgcactcacacacttgtgaacttgcacgcacacacacatatggacctgtgcaaagagccccatgcacaggcaggtacacgtgcatgtaggcgtgcacacagacacgcacagatgcaggcagaccaactcccaggaatctgtctccagcctacagggattcagcactcagggtaccagcctctgtcccgtgcacccccattcccggcagttctcccaggtgggtcgggggccactagggaccccataccccgagggtggctcctc

SEQ ID NO: 73308 - DNA, 100 bp, Homo sapiens
  chr7:5697662-5697762
  hypo
tcagtgtaatgtgcacgcacacacggcaggggagcatgcatgtgcatgcagaggagaaagaggtgagtcagacaaggattctttgcggagctgacatctt

SEQ ID NO: 73309 - DNA, 198 bp, Homo sapiens
  chr7:5870908-5871106
  hypo
tactgtgtaaggagcagggagcgctggagggtggttgaaccgtgtccagccaggagttgagtgggcggtgggctggtcaccatggttaccgcagtgggccactagcttcacaattccgtagcatcgctttgtgctgcgaatgggaccttccgctcttgatcccctccttgtgttgacggctgctgcttgcatctccag

SEQ ID NO: 73310 - DNA, 151 bp, Homo sapiens
  chr7:5877161-5877312
  hypo
tccccactcccacatagctcccggtccctgctgctgcccccgggctgtgccctgcttgttgcccctcctctgcacgcgcttgtctcaccactggggacaatttgggtcgcccatttgcctatgaacatccgtcatcaccccagcagcatgt

SEQ ID NO: 73311 - DNA, 30 bp, Homo sapiens
  chr7:5883630-5883660
  hypo
ccacaccaaaatcacgtggggaacttcaaa

SEQ ID NO: 73312 - DNA, 30 bp, Homo sapiens; identical to SEQ ID NO: 21148
  chr7:5886707-5886737
  hypo

SEQ ID NO: 73313 - DNA, 92 bp, Homo sapiens
  chr7:5896977-5897069
  hypo
aagtgttcagaggggcgttgccttcgtggtgcggcagaattggccctagactaagggttggtctagttctgcaagtctcaaaaggaccacgc

SEQ ID NO: 73314 - DNA, 24 bp, Homo sapiens
  chr7:5917879-5917903
  hypo
cactgcgcccggccagtagtcaaa

SEQ ID NO: 73315 - DNA, 95 bp, Homo sapiens
  chr7:5920561-5920656
  hypo
agcgctccaggaatgccgaggtagaggggacgtgaggcgggggtgggatttcctcacagctttgcacctccagcgagtcaacacaaaatcaaaat

SEQ ID NO: 73316 - DNA, 84 bp, Homo sapiens
  chr7:5997466-5997550
  hypo
aaatatacatgtgttgagaatcggcggagcatccgcctctgggtataagctgctaccccgcccgggcgtacctggatgcccctc

SEQ ID NO: 73317 - DNA, 100 bp, Homo sapiens
  chr7:6034994-6035094
  hypo
agctgggggccatctgcggtagacttctgtaaatgcacaaaataagataatgttaaagccatgtttctcaaagtcccgagctccacgtaaactgcctatt

SEQ ID NO: 73318 - DNA, 126 bp, Homo sapiens
  chr7:6054903-6055029
  hypo
atgtaaccaacataatccaagcggatgagcccacgactttaaccaccaatgcgctggacttgaattcagtgcttgggaaggtaggttcgttttgaaagctgaaacgttagtaggtactgagtggtt

SEQ ID NO: 73319 - DNA, 127 bp, Homo sapiens
  chr7:6058728-6058855
  hypo
gaataatttcacagccgcctccagcgtggggagtgtctgcttcaatctgcttcagacaccctgtgacgctaatcatctcggtgtgagcagctaattcatctctccaggaaattgcatgttgcagtca

SEQ ID NO: 73320 - DNA, 42 bp, Homo sapiens
  chr7:6059657-6059699
  hypo
aaaaaaaaaaagggaaattcatgaaggcgtcactatagctgc

SEQ ID NO: 73321 - DNA, 57 bp, Homo sapiens
  chr7:6060715-6060772
  hypo
ggcactcagagccccacgagttaacaccaagggcgtcaaagtcgtctacttgccccc

SEQ ID NO: 73322 - DNA, 152 bp, Homo sapiens; identical to SEQ ID NO: 21154
  chr7:6068149-6068301
  hypo

SEQ ID NO: 73323 - DNA, 30 bp, Homo sapiens
  chr7:6075065-6075095
  hypo
ccattctagggacacgacaggcctcaccac

SEQ ID NO: 73324 - DNA, 54 bp, Homo sapiens; identical to SEQ ID NO: 21155
  chr7:6077025-6077079
  hypo

SEQ ID NO: 73325 - DNA, 31 bp, Homo sapiens
  chr7:6116791-6116822
  hypo
ccaccgtgccgggccaccagggcctaatctt

SEQ ID NO: 73326 - DNA, 101 bp, Homo sapiens; identical to SEQ ID NO: 21156
  chr7:6124620-6124721
  hypo

SEQ ID NO: 73327 - DNA, 28 bp, Homo sapiens
  chr7:6154602-6154630
  hypo
gagccactgtgcccggccctatatatat

SEQ ID NO: 73328 - DNA, 30 bp, Homo sapiens; identical to SEQ ID NO: 21158
  chr7:6188239-6188269
  hypo

SEQ ID NO: 73329 - DNA, 464 bp, Homo sapiens; identical to SEQ ID NO: 21159
  chr7:6188604-6189068
  hypo

SEQ ID NO: 73330 - DNA, 30 bp, Homo sapiens
  chr7:6189903-6189933
  hypo
tttgctaaggcaaacggtcttcctggaaag

SEQ ID NO: 73331 - DNA, 218 bp, Homo sapiens
  chr7:6193771-6193989
  hypo
tcggaggagccctgcgagcagccactccttgttcaccccagcggggaccacgcccgggacgctcaggacccatcccagagcttgggcgcacccgaggccgcagagcggccgccagctcctgtgctggacatggccccggccggtcacccggaaggggacgctgagcctagccccggcgagagggtcgaggacgccgcggcgccgaaagccccaggccc

SEQ ID NO: 73332 - DNA, 30 bp, Homo sapiens; identical to SEQ ID NO: 21160
  chr7:6198831-6198861
  hypo

SEQ ID NO: 73333 - DNA, 30 bp, Homo sapiens; identical to SEQ ID NO: 21161
  chr7:6203252-6203282
  hypo

SEQ ID NO: 73334 - DNA, 30 bp, Homo sapiens; identical to SEQ ID NO: 21162
  chr7:6204506-6204536
  hypo

SEQ ID NO: 73335 - DNA, 239 bp, Homo sapiens
  chr7:6204759-6204998
  hypo
cggctttggcagcccggccctctggggtttctggagacagaaggtccactcttgcacacggaagcatccatgttccagaccatcccccgccctccaaccggcacgagaagacgggcctggccccgcccccgaggccccactcacttgatggatttcatccactcctccttctcctccgggctcggggctgagatccggtacaccacatggttcccctctaccacgcggccgtcggcctc

SEQ ID NO: 73336 - DNA, 491 bp, Homo sapiens
  chr7:6207762-6208253
  hypo
ccgttagcaggcaggcgcgtacgtgcacacacaggtccacatgcacacactttctgtatggcagctcggattgggccacctcctaggattttttttttttttttttttctggtgattgattcaagactcgaagtcttaagttaccaacaatcgtaagccacgcctgtgtacacagcagggctcctacgctctggcaaagcatccaggcctttttaagaccacctgttctaaaagcaaatctacaataagaatgcaaccaagccaggccgcactccccgctgagcacacgcctggaagcacgttctagatcctgcacccatctcgtctgcctccagccagggccctggctcgccagcctttggtctcgaactttgtttctgagaacacagcagacatacagggtgctgggagaggacaaggaagccagcccctagagcagcaggtgctcaccgggccgcccaccacactgaggccacgccagctggaccagc

SEQ ID NO: 73337 - DNA, 30 bp, Homo sapiens
  chr7:6208560-6208590
  hypo
ccccagagtgcctgccggcatttccggtta

SEQ ID NO: 73338 - DNA, 20 bp, Homo sapiens
  chr7:6209131-6209151
  hypo
gcacccggctgataaaattt

SEQ ID NO: 73339 - DNA, 31 bp, Homo sapiens
  chr7:6217462-6217493
  hypo
aggtagtccccaatgacggtcttatttaggc

SEQ ID NO: 73340 - DNA, 200 bp, Homo sapiens
  chr7:6222703-6222903
  hypo
gccacccaccgaggacgctgcctgttttcacggactaagtgctccctcttgcttttcccacctggagacacaatcactgctagacacaaggtcaggagagcgtgaccagtctcgacgtccctcccacagtcctgttccctgaatgtacctcctctgcactcggggaactctgaagctgctcttgccgcccccggcagttc

SEQ ID NO: 73341 - DNA, 45 bp, Homo sapiens
  chr7:6229681-6229726
  hypo
aaaaaacaaacaaaaaaacatattagttaacgaaagagggtctca

SEQ ID NO: 73342 - DNA, 31 bp, Homo sapiens; identical to SEQ ID NO: 21166
  chr7:6260173-6260204
  hypo

SEQ ID NO: 73343 - DNA, 30 bp, Homo sapiens
  chr7:6288056-6288086
  hypo
ttctctgagcctatcgtgttgcttttgttt

SEQ ID NO: 73344 - DNA, 83 bp, Homo sapiens; identical to SEQ ID NO: 21167
  chr7:6308100-6308183
  hypo

SEQ ID NO: 73345 - DNA, 30 bp, Homo sapiens; identical to SEQ ID NO: 21168
  chr7:6370702-6370732
  hypo

SEQ ID NO: 73346 - DNA, 95 bp, Homo sapiens
  chr7:6405540-6405635
  hypo
tgcagaatttgggttgacatacggctgttcgctgtatatttctttcaacttttcggtgcatttgaaaatttgtaggccgggtacagtggctcatg

SEQ ID NO: 73347 - DNA, 161 bp, Homo sapiens; identical to SEQ ID NO: 21169
  chr7:6432514-6432675
  hypo

SEQ ID NO: 73348 - DNA, 52 bp, Homo sapiens
  chr7:6438080-6438132
  hypo
ccatcgttgaacttaacgcctgcttttgaccaggtagcgtggagtgtttcag

SEQ ID NO: 73349 - DNA, 209 bp, Homo sapiens; identical to SEQ ID NO: 21170
  chr7:6443273-6443482
  hypo

SEQ ID NO: 73350 - DNA, 508 bp, Homo sapiens
  chr7:6443683-6444191
  hypo
tggagacagtcattttcaatgcgtgtctccacacaggagggacagggagtgccacctccaggggagaactgggtgagcccaaatacggcaggagtggaggtgacattcatgtttggacctgtcgaacagtggcgaagctctgagggagaagcgcctatcggggtgtgtgtgcacatcctggcccagagctaggggctgaagatggagatgttgggaccctagactggccctggaagagtagaggttggtgaaccacatgcccttaagatcctttccagaggctgagtgcgtggcttacgcctctaagcccgacgctttgggaggctgacacaggaggagcgcttaagcccaggagttctagaccagcctggacaagaaagagacctacccaaaaaaaaaatgcaagagcctgaacttgtactacataaaggttcatgttagaattcgttttcttaatattcctttttattgctttgaagattgtttttgagtttttgtttttttttta

SEQ ID NO: 73351 - DNA, 30 bp, Homo sapiens; identical to SEQ ID NO: 21172
  chr7:6448918-6448948
  hypo

SEQ ID NO: 73352 - DNA, 30 bp, Homo sapiens
  chr7:6449600-6449630
  hypo
attttgctgaattccgcttcgtgtgaccac

SEQ ID NO: 73353 - DNA, 100 bp, Homo sapiens
  chr7:6450103-6450203
  hypo
tgccctttgacccagaaaccccgcttggaagactccagcaaagatgcaccggcgagctgtgctgggtggcagccacctcggctcaggacaaggctctatg

SEQ ID NO: 73354 - DNA, 17 bp, Homo sapiens
  chr7:6483609-6483626
  hypo
ataggtgatcagacgcg

SEQ ID NO: 73355 - DNA, 89 bp, Homo sapiens; identical to SEQ ID NO: 21174
  chr7:6484555-6484644
  hypo

SEQ ID NO: 73356 - DNA, 30 bp, Homo sapiens
  chr7:6484891-6484921
  hypo
tgtggtccattcattcgatgctcttattca

SEQ ID NO: 73357 - DNA, 30 bp, Homo sapiens
  chr7:6485702-6485732
  hypo
tgcatgagatacaacgtcagaatgccaatc

SEQ ID NO: 73358 - DNA, 17 bp, Homo sapiens
  chr7:6499370-6499387
  hypo
ttttttttttttttttt

SEQ ID NO: 73359 - DNA, 43 bp, Homo sapiens; identical to SEQ ID NO: 21175
  chr7:6500863-6500906
  hypo

SEQ ID NO: 73360 - DNA, 45 bp, Homo sapiens; identical to SEQ ID NO: 21176
  chr7:6524567-6524612
  hypo

SEQ ID NO: 73361 - DNA, 181 bp, Homo sapiens; identical to SEQ ID NO: 21177
  chr7:6524911-6525092
  hypo

SEQ ID NO: 73362 - DNA, 30 bp, Homo sapiens
  chr7:6542458-6542488
  hypo
tttgggctgtccatcgttgagatagttgcc

SEQ ID NO: 73363 - DNA, 30 bp, Homo sapiens
  chr7:6550346-6550376
  hypo
aataatgtcattaccgtatctgagctctac

SEQ ID NO: 73364 - DNA, 31 bp, Homo sapiens
  chr7:6560392-6560423
  hypo
ctgctgggaccacaggcgggagaggcatgag

SEQ ID NO: 73365 - DNA, 430 bp, Homo sapiens; identical to SEQ ID NO: 43863
  chr7:6570432-6570862
  hypo

SEQ ID NO: 73366 - DNA, 305 bp, Homo sapiens; identical to SEQ ID NO: 43864
  chr7:6570900-6571205
  hypo

SEQ ID NO: 73367 - DNA, 118 bp, Homo sapiens
  chr7:6597054-6597172
  hypo
tgactgcaatgaccacggagttcagagcacagtgctcccgggacgcccaaggacactcgcttgtggccggccctctgctgctcagggccttggcatcagttaccgatgtgcccgcagt

SEQ ID NO: 73368 - DNA, 42 bp, Homo sapiens; identical to SEQ ID NO: 21178
  chr7:6619098-6619140
  hypo

SEQ ID NO: 73369 - DNA, 30 bp, Homo sapiens
  chr7:6628987-6629017
  hypo
ccaggcctgccttccggccagtatgggctt

SEQ ID NO: 73370 - DNA, 31 bp, Homo sapiens
  chr7:6641614-6641645
  hypo
gaaatgtagtatgaggcgctcttgctgtctt

SEQ ID NO: 73371 - DNA, 29 bp, Homo sapiens
  chr7:6643896-6643925
  hypo
ttcataccgatgcagttactaactagcaa

SEQ ID NO: 73372 - DNA, 333 bp, Homo sapiens; identical to SEQ ID NO: 21180
  chr7:6644209-6644542
  hypo

SEQ ID NO: 73373 - DNA, 25 bp, Homo sapiens
  chr7:6645338-6645363
  hypo
ttcttttttgagacagagtctcgct

SEQ ID NO: 73374 - DNA, 204 bp, Homo sapiens; identical to SEQ ID NO: 21182
  chr7:6645602-6645806
  hypo

SEQ ID NO: 73375 - DNA, 53 bp, Homo sapiens
  chr7:6646145-6646198
  hypo
gagagaccagtgcaggcgctgcagacacaggacccagccggagcaagatcctg

SEQ ID NO: 73376 - DNA, 1291 bp, Homo sapiens; identical to SEQ ID NO: 21183
  chr7:6647170-6648461
  hypo

SEQ ID NO: 73377 - DNA, 301 bp, Homo sapiens; identical to SEQ ID NO: 43866
  chr7:6654834-6655135
  hypo

SEQ ID NO: 73378 - DNA, 30 bp, Homo sapiens; identical to SEQ ID NO: 43867
  chr7:6655443-6655473
  hypo

SEQ ID NO: 73379 - DNA, 30 bp, Homo sapiens; identical to SEQ ID NO: 43868
  chr7:6655696-6655726
  hypo

SEQ ID NO: 73380 - DNA, 102 bp, Homo sapiens
  chr7:6661789-6661891
  hypo
ccggtggagctaggcgcccagcagcaggaggtgcagctggagctgacccccgtgcagccggagctgcagctggaactggtgccagccgcagggggcggcgga

SEQ ID NO: 73381 - DNA, 30 bp, Homo sapiens
  chr7:6662314-6662344
  hypo
ggggagcgaccctacgcctgcggggactgt

SEQ ID NO: 73382 - DNA, 31 bp, Homo sapiens; identical to SEQ ID NO: 21185
  chr7:6682330-6682361
  hypo

SEQ ID NO: 73383 - DNA, 30 bp, Homo sapiens; identical to SEQ ID NO: 21186
  chr7:6682769-6682799
  hypo

SEQ ID NO: 73384 - DNA, 31 bp, Homo sapiens; identical to SEQ ID NO: 21187
  chr7:6686318-6686349
  hypo

SEQ ID NO: 73385 - DNA, 31 bp, Homo sapiens; identical to SEQ ID NO: 21188
  chr7:6687041-6687072
  hypo

SEQ ID NO: 73386 - DNA, 30 bp, Homo sapiens; identical to SEQ ID NO: 21189
  chr7:6689203-6689233
  hypo

SEQ ID NO: 73387 - DNA, 30 bp, Homo sapiens
  chr7:6692430-6692460
  hypo
ccgtgcccggactgcggcaagcgcttcgtc

SEQ ID NO: 73388 - DNA, 187 bp, Homo sapiens
  chr7:6692858-6693045
  hypo
ggcggacggagaggcggaggccgcggccgaggagagagaggaggcggcggtggcggcgcccacccccagcggcaaggtggaccccgcgccggaacggcgcttcctggagctgggcaacggcctgggggagggcgaaggcccctcctcccacccgctgggcttccacttccccgtgcaccccaagtcc

SEQ ID NO: 73389 - DNA, 30 bp, Homo sapiens; identical to SEQ ID NO: 21191
  chr7:6693319-6693349
  hypo

SEQ ID NO: 73390 - DNA, 30 bp, Homo sapiens; identical to SEQ ID NO: 21192
  chr7:6693823-6693853
  hypo

SEQ ID NO: 73391 - DNA, 30 bp, Homo sapiens
  chr7:6694358-6694388
  hypo
cttccctcagccctcgccctgcggccccgg

SEQ ID NO: 73392 - DNA, 30 bp, Homo sapiens
  chr7:6694720-6694750
  hypo
gacttgggccctcccggtcatccgagtctg

SEQ ID NO: 73393 - DNA, 173 bp, Homo sapiens
  chr7:6694963-6695136
  hypo
ccttattctcgagccgcctcctcttctctacccacacttgcaccgaggtcaccccggcaccctccgcaccggttcggttttggtctctgcttgtcctctcagtccttggtactttcgtctccctcagccggaggtggcaaactcagacatctacgggcgcccgaggccctcgc

SEQ ID NO: 73394 - DNA, 31 bp, Homo sapiens; identical to SEQ ID NO: 43871
  chr7:6967024-6967055
  hypo

SEQ ID NO: 73395 - DNA, 30 bp, Homo sapiens; identical to SEQ ID NO: 5339
  chr7:7044631-7044661
  hypo

SEQ ID NO: 73396 - DNA, 218 bp, Homo sapiens
  chr7:7097446-7097664
  hypo
aaatccaggggcacacccctgcgatattgtgtgtaaagtccgggggtggagagaaggtgtacacacccctgcgattttgtccataatatccagaaagggagacgatgatgtatctctccatatcgcaggaggtgtacaccctactgcgatattgtccataataaccagggggtaaggatgctgttactccccatatcgcaggggctgtacaccctcca

SEQ ID NO: 73397 - DNA, 377 bp, Homo sapiens
  chr7:7097927-7098304
  hypo
taccaatcatatcgccgtgtgtgtgtgcccccctgcgatattcttcgggatattcagtggtggagaggataatattactctctgtatcacggggggtgtacaccacactgacatattgttacccccagcgatatgaggagtagtagcaaccccctttccccccccggctactacgatccacatcgcagggggctgcacacaccccaccgtgatgcggggagtagtagcaaccccctctccccacctgactattacgatccacggtggacctacacagtgtttatgatattgtgagtaaatcatgtccccctcagcaaattacgaactatttcacagacgggtgtacaacctctgccgtattgggaacaatatcatcc

SEQ ID NO: 73398 - DNA, 156 bp, Homo sapiens
  chr7:7099523-7099679
  hypo
tatatgaaacaatatgacaggcggggtggacacacctcgccatatagggagtaatatcaccctgtctccctccctggatattacgatccacgtggacacaccacgttgtttacgatattgtgagtaatgtcatctccccctctagaaattacgaac

SEQ ID NO: 73399 - DNA, 100 bp, Homo sapiens
  chr7:7102932-7103032
  hypo
tgttatattgttttttttttccggcaatgaagaaattgatactattgtcaaaacagaatgcgcggtacaccccgcatgagatattgtttctaatatccat

SEQ ID NO: 73400 - DNA, 44 bp, Homo sapiens
  chr7:7103151-7103195
  hypo
caccgcccctgtgatatcgttctcaatatcgatgggggtagaaa

SEQ ID NO: 73401 - DNA, 30 bp, Homo sapiens
  chr7:7103796-7103826
  hypo
ggctgatattactcccaatatcgcaggggg

SEQ ID NO: 73402 - DNA, 50 bp, Homo sapiens
  chr7:7188992-7189042
  hypo
gtgtgtgtgtgcgtgcgtgtatgtgcgcacatgggcgcaaatgcctacca

SEQ ID NO: 73403 - DNA, 30 bp, Homo sapiens
  chr7:7247775-7247805
  hypo
tattaggttgactctcgtggtattgcagtg

SEQ ID NO: 73404 - DNA, 37 bp, Homo sapiens; identical to SEQ ID NO: 21195
  chr7:7249347-7249384
  hypo

SEQ ID NO: 73405 - DNA, 33 bp, Homo sapiens
  chr7:7284845-7284878
  hypo
tagctaagtaatttcttttttcggagactgtct

SEQ ID NO: 73406 - DNA, 217 bp, Homo sapiens
  chr7:7605216-7605433
  hypo
aaacttggaatcctctttcaccgtcattcacttggtcagtcaccaagctctgttcatcccgccttctaagtattccccagggcccccacttctctccatgcccactctccgtgccactggtaacctgcgtttctatcatccctcattctgatactctatccctccagctctctgcgcaaaaactgatcatactggccgggcacagtggctcatgcct

SEQ ID NO: 73407 - DNA, 405 bp, Homo sapiens; identical to SEQ ID NO: 5341
  chr7:7605663-7606068
  hypo

SEQ ID NO: 73408 - DNA, 101 bp, Homo sapiens; identical to SEQ ID NO: 21198
  chr7:7612730-7612831
  hypo

SEQ ID NO: 73409 - DNA, 180 bp, Homo sapiens; identical to SEQ ID NO: 21199
  chr7:7613123-7613303
  hypo

SEQ ID NO: 73410 - DNA, 165 bp, Homo sapiens
  chr7:7621497-7621662
  hypo
ttcccttgattcgctcggtgaactgagtaagggccttaattatatctgcaaaatgctttcacctctgctgtattctgttatctcgagacaagttacagattctacctgtacgcaaggggaggggtttacacaagagtgtggttggcggggcgggagggcgggcca

SEQ ID NO: 73411 - DNA, 90 bp, Homo sapiens
  chr7:7666891-7666981
  hypo
aggattaaataaattagggaacgtttggtacaatgggctattttgcaaccattaaagacaatgagattattctatatgtcagttgccaag

SEQ ID NO: 73412 - DNA, 30 bp, Homo sapiens
  chr7:7678616-7678646
  hypo
aaaattagaaacatcggcaacaaaccaaat

SEQ ID NO: 73413 - DNA, 82 bp, Homo sapiens
  chr7:7807036-7807118
  hypo
tgagccaccgcgcccagccagaaattaagctcttaaacaaaagtaggattaaacaatgtgcgttgctaagcatgtttatttt

SEQ ID NO: 73414 - DNA, 31 bp, Homo sapiens; identical to SEQ ID NO: 21201
  chr7:7824632-7824663
  hypo

SEQ ID NO: 73415 - DNA, 30 bp, Homo sapiens
  chr7:7839223-7839253
  hypo
ttatagtgcgttatacgtattttcttagaa

SEQ ID NO: 73416 - DNA, 62 bp, Homo sapiens
  chr7:7880899-7880961
  hypo
gaatgcaaggaattatagctacgaactgtcaatataacaagtgatctttttttttttttttt

SEQ ID NO: 73417 - DNA, 16 bp, Homo sapiens
  chr7:7999008-7999024
  hypo
atcttggctaaccaca

SEQ ID NO: 73418 - DNA, 30 bp, Homo sapiens; identical to SEQ ID NO: 21202
  chr7:8153354-8153384
  hypo

SEQ ID NO: 73419 - DNA, 30 bp, Homo sapiens
  chr7:8254696-8254726
  hypo
caagcttaggccctcgcaatcccttctcca

SEQ ID NO: 73420 - DNA, 24 bp, Homo sapiens
  chr7:8343760-8343784
  hypo
ctcctcccccggaattttcttaat

SEQ ID NO: 73421 - DNA, 627 bp, Homo sapiens; identical to SEQ ID NO: 5353
  chr7:8483359-8483986
  hypo

SEQ ID NO: 73422 - DNA, 37 bp, Homo sapiens
  chr7:8954795-8954832
  hypo
gtaatataaaaagaaagttgccgggcgcggtggctca

SEQ ID NO: 73423 - DNA, 26 bp, Homo sapiens
  chr7:9017653-9017679
  hypo
ataaagcatatagaaaacacacggcc

SEQ ID NO: 73424 - DNA, 30 bp, Homo sapiens; identical to SEQ ID NO: 5354
  chr7:9580107-9580137
  hypo

SEQ ID NO: 73425 - DNA, 705 bp, Homo sapiens
  chr7:9766086-9766791
  hypo
caatcaaactcaaggtgcccacgggcctccggggccaggcgcttctgaaagtgtggggccgcggctggcaggcggaggaggggctcctctttcacaaccagacctcggtgaccgtggacggccggggcgcttctgtattcatccagacggacaagcctgtgtacagaccccagcaccgagtgctcataagcatcttcaccgtctctccaaatctgaggcctgtcaacgagaagctggaagccaacatcctggacccccgaggctctcggatgatagagtggagacacttgaagccgttctgctgcggcatcaccaacatgagcttccccttgtccgaccagcctgtgttgggagaatggttcatttttgttgaaatgcaaggccacgcgtacaacaagtcttttgaagttcagaagtatgtgttgcccaagttcgagcttctgattgacccgccccggtatatccaagacctggacgcctgtgagacaggcactgtgcgggccaggtatacctttgggaaacctgtggctggtgccttaacgatcaacatgactgttaatggtgtagggtactacagccacgaggtgggacgccccgtcctcagaacatccaagatcctcggctcccgggacttcgacatctgcgtgagggacatgatcccagcggacgtccctgagcacttccggggcagggtcagcatctggg

SEQ ID NO: 73426 - DNA, 27 bp, Homo sapiens
  chr7:10357576-10357603
  hypo
tattttattttatttatttatcgttat

SEQ ID NO: 73427 - DNA, 25 bp, Homo sapiens
  chr7:10650170-10650195
  hypo
tttttttttttttttcccagacgca

SEQ ID NO: 73428 - DNA, 24 bp, Homo sapiens
  chr7:10704173-10704197
  hypo
tgagatagatagacagacagacgg

SEQ ID NO: 73429 - DNA, 30 bp, Homo sapiens
  chr7:12395027-12395057
  hypo
tgaaactccgtctcaaaaaaaaaaaaaagt

SEQ ID NO: 73430 - DNA, 30 bp, Homo sapiens
  chr7:12510757-12510787
  hypo
cagagggggcgtagcggaacgggagcgggc

SEQ ID NO: 73431 - DNA, 31 bp, Homo sapiens
  chr7:12740190-12740221
  hypo
gctcagtgcccaagaccgcccctgatcctca

SEQ ID NO: 73432 - DNA, 100 bp, Homo sapiens
  chr7:12750830-12750930
  hypo
acttttcttatggcttagaagttcacagagttcataggcaattcatgtaaactcaaaatgtttgaatagccacacgaacgacttcagcttggcagtccct

SEQ ID NO: 73433 - DNA, 31 bp, Homo sapiens
  chr7:12751553-12751584
  hypo
tacaggcgtgagccaccgcacccggcctgtt

SEQ ID NO: 73434 - DNA, 33 bp, Homo sapiens
  chr7:12763982-12764015
  hypo
gccaccatgcctagccttcgatggcttttaatg

SEQ ID NO: 73435 - DNA, 18 bp, Homo sapiens
  chr7:12779952-12779970
  hypo
gcccggcccttactgttg

SEQ ID NO: 73436 - DNA, 45 bp, Homo sapiens
  chr7:12795791-12795836
  hypo
acttttatatagacagcgtctcttaccatacgtggcatatactag

SEQ ID NO: 73437 - DNA, 31 bp, Homo sapiens
  chr7:12802525-12802556
  hypo
attatagatttggaagcgtgctttgaaagaa

SEQ ID NO: 73438 - DNA, 31 bp, Homo sapiens; identical to SEQ ID NO: 21209
  chr7:12971156-12971187
  hypo

SEQ ID NO: 73439 - DNA, 35 bp, Homo sapiens
  chr7:13761023-13761058
  hypo
tcattaagagaaaacacagggcgggcgcggtggct

SEQ ID NO: 73440 - DNA, 28 bp, Homo sapiens
  chr7:14352863-14352891
  hypo
ttcaattaaaacaacatattgcggggag

SEQ ID NO: 73441 - DNA, 32 bp, Homo sapiens
  chr7:15128781-15128813
  hypo
ccaccgtgcccggccagatgtgtacacatctt

SEQ ID NO: 73442 - DNA, 79 bp, Homo sapiens
  chr7:16189281-16189360
  hypo
attacagttaagttctaattacgtctatataattgataaaaactattggccaggagcgggggctcacgcctgtaatccc

SEQ ID NO: 73443 - DNA, 19 bp, Homo sapiens
  chr7:16189599-16189618
  hypo
gagtcattaaaaaaaaaaa

SEQ ID NO: 73444 - DNA, 30 bp, Homo sapiens
  chr7:16313256-16313286
  hypo
cagcctgattcctcccggacaccgaacaag

SEQ ID NO: 73445 - DNA, 16 bp, Homo sapiens
  chr7:16313945-16313961
  hypo
acggacgtgagccacc

SEQ ID NO: 73446 - DNA, 39 bp, Homo sapiens; identical to SEQ ID NO: 21210
  chr7:16370911-16370950
  hypo

SEQ ID NO: 73447 - DNA, 132 bp, Homo sapiens
  chr7:16436344-16436476
  hypo
tgtgatggaatacattcgtatgacatgactgatagaaaacgtgtgacatacatgtgaaggaagacgtgatatgtgtgtaactaaagatgtgtggcatgtgtgatggaatacgctatacgtatgtgacacgta

SEQ ID NO: 73448 - DNA, 30 bp, Homo sapiens
  chr7:16437432-16437462
  hypo
taacatgtgactgacgtgatccacaaagga

SEQ ID NO: 73449 - DNA, 136 bp, Homo sapiens
  chr7:16438007-16438143
  hypo
acatgtgactgacacgtgaccaacataagtgattcacacatgattgacgtgaccgaggtttgtgacacgtgactcacgtgtgcgattgacatgattggcacatgacctatatcattggcacgtgattggcataggt

SEQ ID NO: 73450 - DNA, 30 bp, Homo sapiens
  chr7:16439150-16439180
  hypo
acacgtgactgacacgagattgacatgaat

SEQ ID NO: 73451 - DNA, 482 bp, Homo sapiens
  chr7:16439978-16440460
  hypo
acacatgaccaacacgtttgtgacacactgacctggttgacaggcctggcacatgactaacaggtgactgacatatgatcgacttgtgatcaacacttgtgtgacacatgaccgacacctgattgacccatgaccaacatgtataacacccgaacgacacgactggcacatgattgacactactgacacgtcgacacgatcgacacttgactgacacatttgtgacacacaattgacacgattggcatgtgatcaacacaaccgacatgatgtgatcgagtcatttttgacacgtgactgacacgtgtccataaccaacttgtgagatacataaccaactcgtgtatgacacgttacacgtttgtgacacgtgaccaacacctgtgacgtggcacatgaccaatatgtgtgatggaagacgtggacacatgcccaacatatgcccaacacatgcctgacacgtgtgtgacatttataaaagt

SEQ ID NO: 73452 - DNA, 31 bp, Homo sapiens
  chr7:16542229-16542260
  hypo
cccttcactagtcctacgaaggggtcaggga

SEQ ID NO: 73453 - DNA, 30 bp, Homo sapiens
  chr7:16566246-16566276
  hypo
gactgccgttgaggcgctctgacctcctcc

SEQ ID NO: 73454 - DNA, 30 bp, Homo sapiens
  chr7:16566869-16566899
  hypo
gctacgagcggtggcgaacccccctcagca

SEQ ID NO: 73455 - DNA, 30 bp, Homo sapiens
  chr7:16625231-16625261
  hypo
ctccattgataccacgggcctcagaacctg

SEQ ID NO: 73456 - DNA, 43 bp, Homo sapiens; identical to SEQ ID NO: 43915
  chr7:16793111-16793154
  hypo

SEQ ID NO: 73457 - DNA, 29 bp, Homo sapiens
  chr7:16810118-16810147
  hypo
gccaccgcgcccagcccccttttatcttt

SEQ ID NO: 73458 - DNA, 183 bp, Homo sapiens
  chr7:16844193-16844376
  hypo
ctatggggctttgctttagcccgtgggaaagaaagctttagatggtgactgagacgaaaatccctggaccctgtcccaggcttgaaaaatcctaggattcacctactcttggaaattttgtttcgcaaaagagaaagcatttctctgaactaactcgggaacgtcacactgtgccagctctag

SEQ ID NO: 73459 - DNA, 29 bp, Homo sapiens
  chr7:16917187-16917216
  hypo
ctttgagaatattttcttggccgggcgcg

SEQ ID NO: 73460 - DNA, 43 bp, Homo sapiens
  chr7:17214892-17214935
  hypo
taactgaattgcagtgaatagcggggcttagcctgagcttcag

SEQ ID NO: 73461 - DNA, 31 bp, Homo sapiens
  chr7:17324454-17324485
  hypo
taagccacccccaccccggccttttttctga

SEQ ID NO: 73462 - DNA, 123 bp, Homo sapiens; identical to SEQ ID NO: 5368
  chr7:17338150-17338273
  hypo

SEQ ID NO: 73463 - DNA, 196 bp, Homo sapiens; identical to SEQ ID NO: 43917
  chr7:17338542-17338738
  hypo

SEQ ID NO: 73464 - DNA, 31 bp, Homo sapiens; identical to SEQ ID NO: 5370
  chr7:17339051-17339082
  hypo

SEQ ID NO: 73465 - DNA, 37 bp, Homo sapiens; identical to SEQ ID NO: 21217
  chr7:17413226-17413263
  hypo

SEQ ID NO: 73466 - DNA, 31 bp, Homo sapiens
  chr7:17705052-17705083
  hypo
ccaccgcccacagagccggtgggaagcggac

SEQ ID NO: 73467 - DNA, 31 bp, Homo sapiens; identical to SEQ ID NO: 21218
  chr7:17891210-17891241
  hypo

SEQ ID NO: 73468 - DNA, 34 bp, Homo sapiens
  chr7:18041862-18041896
  hypo
aggcatgagccgccacacccggcatgaacgttct

SEQ ID NO: 73469 - DNA, 195 bp, Homo sapiens; identical to SEQ ID NO: 5372
  chr7:18125866-18126061
  hypo

SEQ ID NO: 73470 - DNA, 375 bp, Homo sapiens; identical to SEQ ID NO: 5373
  chr7:18126082-18126457
  hypo

SEQ ID NO: 73471 - DNA, 229 bp, Homo sapiens; identical to SEQ ID NO: 5374
  chr7:18126465-18126694
  hypo

SEQ ID NO: 73472 - DNA, 40 bp, Homo sapiens; identical to SEQ ID NO: 21222
  chr7:18927744-18927784
  hypo

SEQ ID NO: 73473 - DNA, 442 bp, Homo sapiens; identical to SEQ ID NO: 5381
  chr7:19156303-19156745
  hypo

SEQ ID NO: 73474 - DNA, 511 bp, Homo sapiens; identical to SEQ ID NO: 5382
  chr7:19157055-19157566
  hypo

SEQ ID NO: 73475 - DNA, 41 bp, Homo sapiens
  chr7:19379033-19379074
  hypo
tcttaccattcaaattgtctgcgagccaaaattttcatgga

SEQ ID NO: 73476 - DNA, 186 bp, Homo sapiens
  chr7:20628396-20628582
  hypo
ggagccccagaatcatcgtcctcctccagccgcccaagctcctccgccactcgtcagagtcctccttcagccgttcccagcccggggcctcccaggtgatgagggccaagtaccctccggcaggagccacacagcagtgacttccagaccctctggggcagcggactggctcgcactgcagattct

SEQ ID NO: 73477 - DNA, 31 bp, Homo sapiens; identical to SEQ ID NO: 21226
  chr7:20664637-20664668
  hypo

SEQ ID NO: 73478 - DNA, 39 bp, Homo sapiens
  chr7:20719882-20719921
  hypo
gtgctaagagtgacttgaggccgagcgcggtggtcacgc

SEQ ID NO: 73479 - DNA, 24 bp, Homo sapiens
  chr7:20797449-20797473
  hypo
gccgacaatttaaaggtttaaaat

SEQ ID NO: 73480 - DNA, 676 bp, Homo sapiens; identical to SEQ ID NO: 43940
  chr7:20817280-20817956
  hypo

SEQ ID NO: 73481 - DNA, 2035 bp, Homo sapiens; identical to SEQ ID NO: 43946
  chr7:20824835-20826870
  hypo

SEQ ID NO: 73482 - DNA, 70 bp, Homo sapiens; identical to SEQ ID NO: 43953
  chr7:20837556-20837626
  hypo

SEQ ID NO: 73483 - DNA, 182 bp, Homo sapiens; identical to SEQ ID NO: 43954
  chr7:20837650-20837832
  hypo

SEQ ID NO: 73484 - DNA, 31 bp, Homo sapiens
  chr7:20852609-20852640
  hypo
tttaaaaaccttctcccggaaaagggcaata

SEQ ID NO: 73485 - DNA, 121 bp, Homo sapiens; identical to SEQ ID NO: 21233
  chr7:20855064-20855185
  hypo

SEQ ID NO: 73486 - DNA, 43 bp, Homo sapiens
  chr7:20930361-20930404
  hypo
gattattccttaatcttgcatcggtgatttattcaagtgcctt

SEQ ID NO: 73487 - DNA, 38 bp, Homo sapiens; identical to SEQ ID NO: 21234
  chr7:21409420-21409458
  hypo

SEQ ID NO: 73488 - DNA, 38 bp, Homo sapiens; identical to SEQ ID NO: 21235
  chr7:21501379-21501417
  hypo

SEQ ID NO: 73489 - DNA, 30 bp, Homo sapiens
  chr7:21946101-21946131
  hypo
actggggactctctcgaataaaagccgtct

SEQ ID NO: 73490 - DNA, 1128 bp, Homo sapiens; identical to SEQ ID NO: 43960
  chr7:21984771-21985899
  hypo

SEQ ID NO: 73491 - DNA, 38 bp, Homo sapiens
  chr7:22083772-22083810
  hypo
gctaaaaaagtaaacttggcccgacacggtggttcacg

SEQ ID NO: 73492 - DNA, 185 bp, Homo sapiens; identical to SEQ ID NO: 43961
  chr7:22143357-22143542
  hypo

SEQ ID NO: 73493 - DNA, 31 bp, Homo sapiens; identical to SEQ ID NO: 5407
  chr7:22396516-22396547
  hypo

SEQ ID NO: 73494 - DNA, 30 bp, Homo sapiens; identical to SEQ ID NO: 21238
  chr7:22704301-22704331
  hypo

SEQ ID NO: 73495 - DNA, 30 bp, Homo sapiens
  chr7:22704869-22704899
  hypo
tccagggatccctccgccccccacccccgg

SEQ ID NO: 73496 - DNA, 1258 bp, Homo sapiens; identical to SEQ ID NO: 5409
  chr7:22893442-22894700
  hypo

SEQ ID NO: 73497 - DNA, 793 bp, Homo sapiens; identical to SEQ ID NO: 43966
  chr7:23052999-23053792
  hypo

SEQ ID NO: 73498 - DNA, 219 bp, Homo sapiens; identical to SEQ ID NO: 43967
  chr7:23053819-23054038
  hypo

SEQ ID NO: 73499 - DNA, 30 bp, Homo sapiens; identical to SEQ ID NO: 21241
  chr7:23211106-23211136
  hypo

SEQ ID NO: 73500 - DNA, 105 bp, Homo sapiens; identical to SEQ ID NO: 21242
  chr7:23211636-23211741
  hypo

SEQ ID NO: 73501 - DNA, 27 bp, Homo sapiens
  chr7:23321891-23321918
  hypo
gcgtgagcactgcgcccagccacttga

SEQ ID NO: 73502 - DNA, 40 bp, Homo sapiens
  chr7:23345799-23345839
  hypo
cgaaactcaaaacaagaacgtctcaattaaaaaaaaaaaa

SEQ ID NO: 73503 - DNA, 2172 bp, Homo sapiens; identical to SEQ ID NO: 43971
  chr7:23507682-23509854
  hypo

SEQ ID NO: 73504 - DNA, 957 bp, Homo sapiens; identical to SEQ ID NO: 43972
  chr7:23510067-23511024
  hypo

SEQ ID NO: 73505 - DNA, 1274 bp, Homo sapiens; identical to SEQ ID NO: 43973
  chr7:23513225-23514499
  hypo

SEQ ID NO: 73506 - DNA, 77 bp, Homo sapiens
  chr7:23529547-23529624
  hypo
gccgggattacaggcgtgatctcatttaattattaaatgaaattctaggaagttacggtaaacttatttcaccttct

SEQ ID NO: 73507 - DNA, 41 bp, Homo sapiens; identical to SEQ ID NO: 21246
  chr7:23550216-23550257
  hypo

SEQ ID NO: 73508 - DNA, 43 bp, Homo sapiens; identical to SEQ ID NO: 21247
  chr7:23556806-23556849
  hypo

SEQ ID NO: 73509 - DNA, 38 bp, Homo sapiens
  chr7:23568875-23568913
  hypo
aaaattgcttttatggacctacgtatttacttattttt

SEQ ID NO: 73510 - DNA, 33 bp, Homo sapiens
  chr7:23569152-23569185
  hypo
tacaggcgtgagccactgcgcccggccagaaac

SEQ ID NO: 73511 - DNA, 84 bp, Homo sapiens; identical to SEQ ID NO: 21248
  chr7:23578780-23578864
  hypo

SEQ ID NO: 73512 - DNA, 30 bp, Homo sapiens
  chr7:23626047-23626077
  hypo
cagcacccccgcggcgatgaagtgctgctc

SEQ ID NO: 73513 - DNA, 483 bp, Homo sapiens
  chr7:23749617-23750100
  hypo
aagtcacagcttgaagccttgcgaaaggaactggccctagaccccaccccggcctataaatcaccagggcgcagcctcagtgcctgggggtcggcagcagccagcgtcaggcggctcccgcacgcttcttcctaggcggcaggccgtggctgccacgtgactcccgctaacaccggatgatggcgcagcgctgtgcacgcaggcgcagtgtggggcccttgcggtcgaagctcacgcggtaagccgctgcacgtgtgctacggcgggcggagggccgaaagtccagtatgtgggtccagggtcactcttctagagcttccgcaacggaaagtgtgaggtcagtagtagtttttgtggtacgtgcagtggtggccgcttcaaggactattttcgtcgctgcttgcgttttaagtctccaatcctgggacgaggcccatttcagggttttctgtcaccttctagccgcccgccaccccagagggg

SEQ ID NO: 73514 - DNA, 150 bp, Homo sapiens
  chr7:24099248-24099398
  hypo
ctgtgcagattctctgtgccacgcagctggagacagcctaagactactgagttcccagggggaggggcggctgccatcaccgcagctccgccattgacagagttggggaggctgggcagtatggactagggaggtattccccacagcaca

SEQ ID NO: 73515 - DNA, 26 bp, Homo sapiens
  chr7:24323302-24323328
  hypo
ctcactccaacagcgcgcagttgtgc

SEQ ID NO: 73516 - DNA, 30 bp, Homo sapiens; identical to SEQ ID NO: 5421
  chr7:24323556-24323586
  hypo

SEQ ID NO: 73517 - DNA, 217 bp, Homo sapiens; identical to SEQ ID NO: 5422
  chr7:24323801-24324018
  hypo

SEQ ID NO: 73518 - DNA, 30 bp, Homo sapiens
  chr7:24516449-24516479
  hypo
cagccgagcagaagcgaggtcactggtcag

SEQ ID NO: 73519 - DNA, 620 bp, Homo sapiens; identical to SEQ ID NO: 43981
  chr7:24796416-24797036
  hypo

SEQ ID NO: 73520 - DNA, 434 bp, Homo sapiens; identical to SEQ ID NO: 43982
  chr7:24797067-24797501
  hypo

SEQ ID NO: 73521 - DNA, 38 bp, Homo sapiens
  chr7:24990041-24990079
  hypo
caatacacaaaacatgtaggccgggcgcggtggctcac

SEQ ID NO: 73522 - DNA, 1201 bp, Homo sapiens; identical to SEQ ID NO: 5425
  chr7:25019059-25020260
  hypo

SEQ ID NO: 73523 - DNA, 30 bp, Homo sapiens; identical to SEQ ID NO: 5427
  chr7:25043520-25043550
  hypo

SEQ ID NO: 73524 - DNA, 31 bp, Homo sapiens
  chr7:25100241-25100272
  hypo
cttaactgtcactcaccgcccccaggaggct

SEQ ID NO: 73525 - DNA, 34 bp, Homo sapiens; identical to SEQ ID NO: 21258
  chr7:25132699-25132733
  hypo

SEQ ID NO: 73526 - DNA, 45 bp, Homo sapiens
  chr7:25133412-25133457
  hypo
tcaaaatgcaaatctttaggccgggcgcggtggctcacgcctgta

SEQ ID NO: 73527 - DNA, 147 bp, Homo sapiens
  chr7:25158786-25158933
  hypo
tgcattacatagctctcgcccccaacttggcaacatcttattggttttcagaatatactgatgacggattgccaaaagagctcatgaatgaatattttccattctaaggaaactttttttctttttgagacggagtttcactattgt

SEQ ID NO: 73528 - DNA, 30 bp, Homo sapiens; identical to SEQ ID NO: 21261
  chr7:25218726-25218756
  hypo

SEQ ID NO: 73529 - DNA, 572 bp, Homo sapiens; identical to SEQ ID NO: 43986
  chr7:25219528-25220100
  hypo

SEQ ID NO: 73530 - DNA, 84 bp, Homo sapiens
  chr7:25783408-25783492
  hypo
aggagggaaagggcttattgccgttgataaagaatgctgttcctggaggaggagccaagatggccgaataggaacagctccggt

SEQ ID NO: 73531 - DNA, 532 bp, Homo sapiens; identical to SEQ ID NO: 5429
  chr7:25891898-25892430
  hypo

SEQ ID NO: 73532 - DNA, 31 bp, Homo sapiens; identical to SEQ ID NO: 21264
  chr7:25936760-25936791
  hypo

SEQ ID NO: 73533 - DNA, 255 bp, Homo sapiens; identical to SEQ ID NO: 43996
  chr7:25989998-25990253
  hypo

SEQ ID NO: 73534 - DNA, 78 bp, Homo sapiens; identical to SEQ ID NO: 21266
  chr7:26217155-26217233
  hypo

SEQ ID NO: 73535 - DNA, 181 bp, Homo sapiens
  chr7:26259533-26259714
  hypo
tacaggcgtgaaccaccgcgccctgcccatagactcccttttatccttattctagaagttttgcattttagctccttaaaggagaaaataatatgacactaaaactaatattaaataatctttcatgccaacctttttccttatatgtcaatttctttttttttttttttctttttttgag

SEQ ID NO: 73536 - DNA, 241 bp, Homo sapiens
  chr7:26283742-26283983
  hypo
ggtctcgactaatggtttctccgggagcccagttaacagggaaaaattcgcatggcctctcggtttcttcggtccgaaaatccaacgttggtccaagaaggctctggtgtgtgccaggcactcactgatcatctggtcttacggagacgcctctaagccatttgatcccgttccgggaacgaaaatggcagcggtgacggttgctccttttatggtctccctccggctgtccaggacggtc

SEQ ID NO: 73537 - DNA, 37 bp, Homo sapiens; identical to SEQ ID NO: 21268
  chr7:26291674-26291711
  hypo

SEQ ID NO: 73538 - DNA, 18 bp, Homo sapiens
  chr7:26317524-26317542
  hypo
gatcgcaccactgcactc

SEQ ID NO: 73539 - DNA, 320 bp, Homo sapiens
  chr7:26439681-26440001
  hypo
tagaaaagtgaatactgtgtacgcactgtaacaactattccataagtatttttggtgtacactgttcctcagcactcacaggcttcggagtaggggctcccggagtatgcattgacacgatgcgctgcaaatgatccgggcgtggggaagtccccgagtgtgcattgattccacacacggccacggctcctacagggcttttatggtgcagctcgccaatgatccgtgtgttaaagactccccaaatacacattgacacgatagactggagttgtttgggtctatcgtggcaatgatccggggataatggcagtgtctta

SEQ ID NO: 73540 - DNA, 43 bp, Homo sapiens
  chr7:26667939-26667982
  hypo
aagcaaagtggtacttcaccacggggcagattaaaatatgcat

SEQ ID NO: 73541 - DNA, 30 bp, Homo sapiens
  chr7:26686711-26686741
  hypo
attctaaagtcatacgttgtaccaaattct

SEQ ID NO: 73542 - DNA, 45 bp, Homo sapiens
  chr7:26753489-26753534
  hypo
ttacaggcatgagccatcgcgcccgacctaagatgcttatttgta

SEQ ID NO: 73543 - DNA, 17 bp, Homo sapiens
  chr7:26762352-26762369
  hypo
tcttcttactcttgaaa

SEQ ID NO: 73544 - DNA, 30 bp, Homo sapiens
  chr7:26941672-26941702
  hypo
taagatacaactatttggggccgggcgcag

SEQ ID NO: 73545 - DNA, 31 bp, Homo sapiens
  chr7:27021024-27021055
  hypo
tttttattttttttgagatggcgtttcgctc

SEQ ID NO: 73546 - DNA, 28 bp, Homo sapiens
  chr7:27031760-27031788
  hypo
tttgtttgtttgtttttgaggcggagtt

SEQ ID NO: 73547 - DNA, 88 bp, Homo sapiens; identical to SEQ ID NO: 21271
  chr7:27032267-27032355
  hypo

SEQ ID NO: 73548 - DNA, 30 bp, Homo sapiens
  chr7:27087892-27087922
  hypo
agcccctggcttctcgccgcctcacgcgga

SEQ ID NO: 73549 - DNA, 22 bp, Homo sapiens
  chr7:27089486-27089508
  hypo
cggaagttattgaagaaatatt

SEQ ID NO: 73550 - DNA, 609 bp, Homo sapiens; identical to SEQ ID NO: 5441
  chr7:27135161-27135770
  hypo

SEQ ID NO: 73551 - DNA, 956 bp, Homo sapiens; identical to SEQ ID NO: 44011
  chr7:27135979-27136935
  hypo

SEQ ID NO: 73552 - DNA, 30 bp, Homo sapiens; identical to SEQ ID NO: 44012
  chr7:27163863-27163893
  hypo

SEQ ID NO: 73553 - DNA, 104 bp, Homo sapiens; identical to SEQ ID NO: 44014
  chr7:27191549-27191653
  hypo

SEQ ID NO: 73554 - DNA, 588 bp, Homo sapiens; identical to SEQ ID NO: 44026
  chr7:27212395-27212983
  hypo

SEQ ID NO: 73555 - DNA, 1073 bp, Homo sapiens; identical to SEQ ID NO: 5454
  chr7:27213188-27214261
  hypo

SEQ ID NO: 73556 - DNA, 1836 bp, Homo sapiens; identical to SEQ ID NO: 44030
  chr7:27223221-27225057
  hypo

SEQ ID NO: 73557 - DNA, 35 bp, Homo sapiens; identical to SEQ ID NO: 5471
  chr7:27278958-27278993
  hypo

SEQ ID NO: 73558 - DNA, 131 bp, Homo sapiens; identical to SEQ ID NO: 5472
  chr7:27279237-27279368
  hypo

SEQ ID NO: 73559 - DNA, 594 bp, Homo sapiens; identical to SEQ ID NO: 44050
  chr7:27279453-27280047
  hypo

SEQ ID NO: 73560 - DNA, 36 bp, Homo sapiens
  chr7:27336399-27336435
  hypo
cctggttgacagaccgagactgtgtcttagaaaaaa

SEQ ID NO: 73561 - DNA, 39 bp, Homo sapiens
  chr7:27514342-27514381
  hypo
tacatatttgggaggccgaggcgggcggatcacgaggtc

SEQ ID NO: 73562 - DNA, 532 bp, Homo sapiens
  chr7:27531191-27531723
  hypo
ggagccatggggttggagtgccggctccagcagagttgtctgagcagcggcctgaggtgctgggtctgacatgattgttggccgtggaaggcctcgggccatcctgagctcagatcttggctgccggccgctagggcggctgcttctgcagcagggctagggtgtcccgcttctcaatggagcgcagctgctgctgctttgcccgcttgagcttggcagggtttcggatcacttggacgatctccaccttccgctcgttctccaggcggcatttcaggttctccgcccgacgctgtttcttctcctggcggcgcctctcctactcctcctccaggtgacgggcaaagtccttggccagcttcctctcctgcttcatcttccgctgccacgatatacgcaggggcttgtcctaaagcatctgagagaatcttttcttggagcggtccttccacacttgccccgacttgggcttccccttcgggattacaggaagctcctcctccttcagcttcttggacgctggggcctggga

SEQ ID NO: 73563 - DNA, 30 bp, Homo sapiens
  chr7:27561067-27561097
  hypo
aaaataaaaggtgtcgctgcagatactgaa

SEQ ID NO: 73564 - DNA, 130 bp, Homo sapiens
  chr7:27651037-27651167
  hypo
atgtctagcattcattatagacgagagctgatcaagttggaaccaacactgtggtagcagacccactgcgtgtgtgcgcgcacacacacacacccacccacccacacacgtgtatgtatccaaaatggca

SEQ ID NO: 73565 - DNA, 189 bp, Homo sapiens
  chr7:27679514-27679703
  hypo
ttttatttccctaataatccacgtacagtcaagcaaaagagatacgttctgagaaatgcgttgtgagaaaagaaaaataacttgaagtagtctgaactatgtgaggtttgcaaaatttatcaggcccagagagacgtaagcataggactttggtcaccgccaccctccgtgcccagtggcaattgctta

SEQ ID NO: 73566 - DNA, 29 bp, Homo sapiens
  chr7:27682557-27682586
  hypo
ccgcgcccggccaaatgtctagtctttag

SEQ ID NO: 73567 - DNA, 181 bp, Homo sapiens
  chr7:27686736-27686917
  hypo
gctttggaccattatgaaataaaataagggttacctgaaaataagcacgcgatatcacaacacccgatcactgaggcggctagtaagtgactaatgggccagggagtgtctgcagcatggagacgctggacaaagggatgattcacatccaggttgggacagagctggacagcacaagatt

SEQ ID NO: 73568 - DNA, 42 bp, Homo sapiens
  chr7:27782387-27782429
  hypo
cacgttcttaaattgtagaccgctgtttatagttctcactgc

SEQ ID NO: 73569 - DNA, 168 bp, Homo sapiens; identical to SEQ ID NO: 21284
  chr7:27831633-27831801
  hypo

SEQ ID NO: 73570 - DNA, 226 bp, Homo sapiens
  chr7:27882583-27882809
  hypo
cactggatcaaaagcgatcagcccgaggcgttgaagcagcctacactgtctgcgtctcagggggaaggcacgtggtatccagccccaggcagggcaggaaggggacacacagcttaccctgcaagttggaacacttctgagagggaaaggtagtgtaggccgacaggtggtaagttggaactatcccaggcaaggtgggacacacaccactcggcagcagcttacc

SEQ ID NO: 73571 - DNA, 122 bp, Homo sapiens
  chr7:27903626-27903748
  hypo
caggggctgcctcctccaagccgccagctttgtgaacagagcccggactcaccaggagcgcagggccctgactaccgcctggccgctgtgacgagaccgtcgtcatcctaagggctaatgat

SEQ ID NO: 73572 - DNA, 401 bp, Homo sapiens; identical to SEQ ID NO: 21286
  chr7:27907758-27908159
  hypo

SEQ ID NO: 73573 - DNA, 31 bp, Homo sapiens; identical to SEQ ID NO: 21287
  chr7:27914926-27914957
  hypo

SEQ ID NO: 73574 - DNA, 30 bp, Homo sapiens
  chr7:27956692-27956722
  hypo
taaaaaagaaataaccgattgtaccttaaa

SEQ ID NO: 73575 - DNA, 180 bp, Homo sapiens
  chr7:27984543-27984723
  hypo
cacaccctttccggaacgctgtcatctgctacggtgtgactggtaatacatttcggagttcgagaaataatccttgacacctccccactatgcattatcatcttaaaactatcacaagacccacaggaaaacagttcttctatctaggatctttggaaaagtgatcgagaactcactttg

SEQ ID NO: 73576 - DNA, 30 bp, Homo sapiens
  chr7:28000984-28001014
  hypo
gatgtgtatatgaaacgtaattgcctgagg

SEQ ID NO: 73577 - DNA, 106 bp, Homo sapiens; identical to SEQ ID NO: 21288
  chr7:28012335-28012441
  hypo

SEQ ID NO: 73578 - DNA, 30 bp, Homo sapiens
  chr7:28072435-28072465
  hypo
taacattagcacaacgggcccagtctttga

SEQ ID NO: 73579 - DNA, 30 bp, Homo sapiens; identical to SEQ ID NO: 21289
  chr7:28109346-28109376
  hypo

SEQ ID NO: 73580 - DNA, 65 bp, Homo sapiens
  chr7:28109611-28109676
  hypo
atgcctttctctccctgctcacggcacactgcactttgtaaaacgtcttcagatgtggagagctg

SEQ ID NO: 73581 - DNA, 121 bp, Homo sapiens
  chr7:28110707-28110828
  hypo
tgcctaaaacggaatcggctctggagagccagaatccctgtgtgtagcgaaatactacaggtcagcaagcaatgcggtgtgatacaaagatccaactaggtgtagccggaagccagtgcac

SEQ ID NO: 73582 - DNA, 31 bp, Homo sapiens
  chr7:28139359-28139390
  hypo
gctgggattacaggcacgatccaccgcgcct

SEQ ID NO: 73583 - DNA, 130 bp, Homo sapiens
  chr7:28190079-28190209
  hypo
ttcatcaaaaggcatcaccttcgaataaaggccacaaatgccgccgtatctaacttgaagaaacagtcatgacagcgtgtctatgtttttttctcattgcatgaggaccggtgggaacactgtcatgggg

SEQ ID NO: 73584 - DNA, 30 bp, Homo sapiens; identical to SEQ ID NO: 21290
  chr7:28230539-28230569
  hypo

SEQ ID NO: 73585 - DNA, 192 bp, Homo sapiens
  chr7:28811873-28812065
  hypo
gttagtagccgaaaaccgctggaagttggggcaaaagagcaatgagggctgcagggtgacctgggcagcccaaggggtgactgcttgaggcaacactgggaatggagagcagggtgctcaggaagccaggtggaacggggagcccaactcactaccaaaggctgggagcccaggcgccgctcgagcctcgcc

SEQ ID NO: 73586 - DNA, 85 bp, Homo sapiens
  chr7:28989194-28989279
  hypo
tgggcgagagtgagacaccgtctcaaaaaaaaaaaaaaaagtacagctgaccttcctgagtctcggattatgtatctgtgaattc

SEQ ID NO: 73587 - DNA, 30 bp, Homo sapiens
  chr7:28989666-28989696
  hypo
aaccaactacgcacgcgtgcacacacacac

SEQ ID NO: 73588 - DNA, 30 bp, Homo sapiens
  chr7:29084189-29084219
  hypo
taaaacatctacgtcgactttttacatctc

SEQ ID NO: 73589 - DNA, 50 bp, Homo sapiens
  chr7:29105617-29105667
  hypo
tggtttttaaaatgtcattaccgtgcaccgcaaaaagttatagtaattac

SEQ ID NO: 73590 - DNA, 30 bp, Homo sapiens
  chr7:29109781-29109811
  hypo
acctgcttggggttccggtttctgacgtat

SEQ ID NO: 73591 - DNA, 609 bp, Homo sapiens; identical to SEQ ID NO: 5488
  chr7:29185639-29186248
  hypo

SEQ ID NO: 73592 - DNA, 43 bp, Homo sapiens
  chr7:29210727-29210770
  hypo
gtgctggacataatgaactgccggtttccccccagttctgact

SEQ ID NO: 73593 - DNA, 987 bp, Homo sapiens; identical to SEQ ID NO: 5489
  chr7:29234079-29235066
  hypo

SEQ ID NO: 73594 - DNA, 161 bp, Homo sapiens
  chr7:29362349-29362510
  hypo
tattcctagtcagggacggcctagagttagaggatagacatgcctcgatttgggaagcactgtgtagccatgcctaacagcttcttgtaatggggaacgacctacctcctgaagcaacttttggagaccactagtgtgcttccttgtggctgggtgcggtg

SEQ ID NO: 73595 - DNA, 101 bp, Homo sapiens
  chr7:29410048-29410149
  hypo
aatgagttataattttttctacgtacgttttcctattacatctcatccgttagctaagagcccgcatcttcctcttctacgcagctctgggccctttttct

SEQ ID NO: 73596 - DNA, 33 bp, Homo sapiens
  chr7:29452224-29452257
  hypo
gtgagccaccgcgccaggacactaaagagtctt

SEQ ID NO: 73597 - DNA, 31 bp, Homo sapiens
  chr7:29516192-29516223
  hypo
acatatatatgcaaagcgctgagtataacac

SEQ ID NO: 73598 - DNA, 29 bp, Homo sapiens
  chr7:29522724-29522753
  hypo
ccgcgcccggcctgcacttttttctagag

SEQ ID NO: 73599 - DNA, 104 bp, Homo sapiens
  chr7:29682477-29682581
  hypo
aatcaatagcacagctattctcgggagccgcggggtcaaaaggggtgtaagtccgatgggcctctgggaggcattctagaaacgctcctggtgactcatcaggc

SEQ ID NO: 73600 - DNA, 30 bp, Homo sapiens
  chr7:29690008-29690038
  hypo
agtaagctcaaaagcgtaggctcaagagcc

SEQ ID NO: 73601 - DNA, 370 bp, Homo sapiens; identical to SEQ ID NO: 5493
  chr7:29724331-29724701
  hypo

SEQ ID NO: 73602 - DNA, 55 bp, Homo sapiens; identical to SEQ ID NO: 5494
  chr7:29725076-29725131
  hypo

SEQ ID NO: 73603 - DNA, 30 bp, Homo sapiens
  chr7:29844753-29844783
  hypo
caggctgcaatccacgtgtgagatcttccc

SEQ ID NO: 73604 - DNA, 1247 bp, Homo sapiens; identical to SEQ ID NO: 44079
  chr7:30028510-30029757
  hypo

SEQ ID NO: 73605 - DNA, 23 bp, Homo sapiens
  chr7:30048555-30048578
  hypo
ccgtctccaaaaaaaaaaaaaga

SEQ ID NO: 73606 - DNA, 30 bp, Homo sapiens
  chr7:30053482-30053512
  hypo
tatatgttattaaccgtgtttcttttcttt

SEQ ID NO: 73607 - DNA, 247 bp, Homo sapiens; identical to SEQ ID NO: 5498
  chr7:30067777-30068024
  hypo

SEQ ID NO: 73608 - DNA, 63 bp, Homo sapiens; identical to SEQ ID NO: 21298
  chr7:30341569-30341632
  hypo

SEQ ID NO: 73609 - DNA, 31 bp, Homo sapiens; identical to SEQ ID NO: 21299
  chr7:30490902-30490933
  hypo

SEQ ID NO: 73610 - DNA, 31 bp, Homo sapiens
  chr7:30495017-30495048
  hypo
gagttcttagtacagccggtagctatgccat

SEQ ID NO: 73611 - DNA, 150 bp, Homo sapiens
  chr7:30516405-30516555
  hypo
taagatttcagacttaaagcccgctaaggccctgagcggggcagcagggcaggagaaggaatggagcgttgaagggaacattttatagacattctccctcatagtggctgtactaagtaaacaattaacgggcacaaactgccactccag

SEQ ID NO: 73612 - DNA, 169 bp, Homo sapiens; identical to SEQ ID NO: 5499
  chr7:30517955-30518124
  hypo

SEQ ID NO: 73613 - DNA, 182 bp, Homo sapiens
  chr7:30603385-30603567
  hypo
gagccatgctcctgctgaagccgctgggggaggctccgtgtagtttctgggagccccaggcatttgtggcgtgtggcagcatctctccgatctctgcctccatcttcacacggcggtctctgctctgtgtgtgtccagatttccctcttcttaataaggacgcttgtcccactgggttcaga

SEQ ID NO: 73614 - DNA, 31 bp, Homo sapiens; identical to SEQ ID NO: 21302
  chr7:30656877-30656908
  hypo

SEQ ID NO: 73615 - DNA, 165 bp, Homo sapiens
  chr7:30675596-30675761
  hypo
gtgatacctgagtgagggagacgggccggcagcagagctctctggttctgtctgtaccatgtttgcttgattttaagaacaagcagttgaagtgctgttttctaaatgaagagactctttacccacgagtttgcgtatgcatacgcacacacctcttctgttcaa

SEQ ID NO: 73616 - DNA, 668 bp, Homo sapiens; identical to SEQ ID NO: 44083
  chr7:30721274-30721942
  hypo

SEQ ID NO: 73617 - DNA, 369 bp, Homo sapiens; identical to SEQ ID NO: 44084
  chr7:30722018-30722387
  hypo

SEQ ID NO: 73618 - DNA, 196 bp, Homo sapiens; identical to SEQ ID NO: 21305
  chr7:30817951-30818147
  hypo

SEQ ID NO: 73619 - DNA, 277 bp, Homo sapiens; identical to SEQ ID NO: 21306
  chr7:30857132-30857409
  hypo

SEQ ID NO: 73620 - DNA, 31 bp, Homo sapiens
  chr7:30899815-30899846
  hypo
ttgtggtgcccaggggcgggaggtcacagca

SEQ ID NO: 73621 - DNA, 96 bp, Homo sapiens
  chr7:30902137-30902233
  hypo
aaggtttgcggtgattcgcagggcaatgataacagttctggggctggaatcccacctctgcctgctgcctccggggctagccgctggcaaaggcct

SEQ ID NO: 73622 - DNA, 51 bp, Homo sapiens; identical to SEQ ID NO: 21307
  chr7:30921726-30921777
  hypo

SEQ ID NO: 73623 - DNA, 174 bp, Homo sapiens
  chr7:30922907-30923081
  hypo
cagatgtggcaagtaccgttaggcccgaaggaggcaggacaggggtgcttacctgagggtgggggaggcttgagcaggataggaagctgggaggcctggcccagcctgggggtggcaggaggtgctgcctggagcgacaccctctgcttgcggaggagccggaggagcagctcc

SEQ ID NO: 73624 - DNA, 43 bp, Homo sapiens
  chr7:30928161-30928204
  hypo
cctcccctttctgtgcctgtccgcagttgttggttgcatatgc

SEQ ID NO: 73625 - DNA, 121 bp, Homo sapiens
  chr7:30934600-30934721
  hypo
ctgagcccaaagggaacacagcgttgggggcaggacccagcccatccagaacaccagccgtggaagaggagcagcagcgctcccgcccgccgtgagggccggggctggtgaagtctcagag

SEQ ID NO: 73626 - DNA, 31 bp, Homo sapiens
  chr7:30938647-30938678
  hypo
tccttgctgcccctaccgcagggtgtggtct

SEQ ID NO: 73627 - DNA, 140 bp, Homo sapiens; identical to SEQ ID NO: 21308
  chr7:30944105-30944245
  hypo

SEQ ID NO: 73628 - DNA, 116 bp, Homo sapiens
  chr7:30946538-30946654
  hypo
gtgctcagctctgcagcggggcatggtgggcagagacacagaggccaaggccctgcttcggggacggtgggcctgggatgagcatggccttggccttcgccgagagttctcttgtg

SEQ ID NO: 73629 - DNA, 30 bp, Homo sapiens
  chr7:30963960-30963990
  hypo
aggggcatgactgtcgccacacgcctctgt

SEQ ID NO: 73630 - DNA, 43 bp, Homo sapiens
  chr7:30971901-30971944
  hypo
aactcattttatttaagcaagcgtttaccaaacttgtttgtcc

SEQ ID NO: 73631 - DNA, 217 bp, Homo sapiens; identical to SEQ ID NO: 21309
  chr7:30972823-30973040
  hypo

SEQ ID NO: 73632 - DNA, 153 bp, Homo sapiens
  chr7:31018778-31018931
  hypo
cttctgccagcctggaggacccgtgctaagtggaccacgccttcccgctcggcggcaaaggtgctgacatctatgtgctaggctgcctcatcacgccactggagtccacacttgaatttgggcagctaccacgggtctgccatgctctggagg

SEQ ID NO: 73633 - DNA, 463 bp, Homo sapiens; identical to SEQ ID NO: 5502
  chr7:31091703-31092166
  hypo

SEQ ID NO: 73634 - DNA, 457 bp, Homo sapiens; identical to SEQ ID NO: 5503
  chr7:31092241-31092698
  hypo

SEQ ID NO: 73635 - DNA, 166 bp, Homo sapiens; identical to SEQ ID NO: 44087
  chr7:31092713-31092879
  hypo

SEQ ID NO: 73636 - DNA, 30 bp, Homo sapiens; identical to SEQ ID NO: 5508
  chr7:31568350-31568380
  hypo

SEQ ID NO: 73637 - DNA, 18 bp, Homo sapiens
  chr7:31938752-31938770
  hypo
tttttttttttttttttg

SEQ ID NO: 73638 - DNA, 226 bp, Homo sapiens; identical to SEQ ID NO: 44095
  chr7:32337756-32337982
  hypo

SEQ ID NO: 73639 - DNA, 174 bp, Homo sapiens; identical to SEQ ID NO: 44096
  chr7:32338043-32338217
  hypo

SEQ ID NO: 73640 - DNA, 681 bp, Homo sapiens; identical to SEQ ID NO: 44097
  chr7:32338283-32338964
  hypo

SEQ ID NO: 73641 - DNA, 32 bp, Homo sapiens
  chr7:32416316-32416348
  hypo
tgagaccaagtctcactctgtcgtccaggctg

SEQ ID NO: 73642 - DNA, 32 bp, Homo sapiens
  chr7:32416587-32416619
  hypo
agcgctcggccgacttcccctttctaaagatc

SEQ ID NO: 73643 - DNA, 30 bp, Homo sapiens
  chr7:32537570-32537600
  hypo
tagttctaaatgtgcgctgagattgtgcat

SEQ ID NO: 73644 - DNA, 131 bp, Homo sapiens
  chr7:32609660-32609791
  hypo
gcagcagcatcatcttctctccgatgtcaccgttcgggggtttgttgctggagctactaacatcctttttcgacaacagaaacacctcagtgatgccattgtggaagtacgtttatgtgtgagtgtgtgta

SEQ ID NO: 73645 - DNA, 197 bp, Homo sapiens
  chr7:32630924-32631121
  hypo
tggaggagagccctgtcagcccgcggacaggggaaagccttcaagggtttcccacaggcaggtggcaggttggctgggtgttgcctgtggaaagttctttcggtcgtgggcaccactgcttctgctttgccctttgctgtaaagttagtgatgttcctcagctgacctctgaactcaaccaccgcccctttcccttc

SEQ ID NO: 73646 - DNA, 31 bp, Homo sapiens
  chr7:32648439-32648470
  hypo
agctgtgtggccaggacgctgtaggtgcctg

SEQ ID NO: 73647 - DNA, 376 bp, Homo sapiens; identical to SEQ ID NO: 44102
  chr7:32768219-32768595
  hypo

SEQ ID NO: 73648 - DNA, 31 bp, Homo sapiens
  chr7:32963858-32963889
  hypo
aactgaataacacatgcgtaaccaatccatg

SEQ ID NO: 73649 - DNA, 1045 bp, Homo sapiens; identical to SEQ ID NO: 44103
  chr7:32981926-32982971
  hypo

SEQ ID NO: 73650 - DNA, 895 bp, Homo sapiens; identical to SEQ ID NO: 44104
  chr7:32996716-32997611
  hypo

SEQ ID NO: 73651 - DNA, 33 bp, Homo sapiens; identical to SEQ ID NO: 21321
  chr7:33026794-33026827
  hypo

SEQ ID NO: 73652 - DNA, 31 bp, Homo sapiens; identical to SEQ ID NO: 21322
  chr7:33139662-33139693
  hypo

SEQ ID NO: 73653 - DNA, 208 bp, Homo sapiens
  chr7:33542771-33542979
  hypo
attttacttacaaaacgcaagctcaaaaataaaattactaagaatttcaaggcagagacagcagagcgttaaacaagttcaggcccgtcaaagctcgagcacagtttgcacaccctgcgtacagtcctgggcaaataccttatatttgctgagccgcagagttctcatctgtgaaagaaaatatcaactaagtcgcaggggagatgtg

SEQ ID NO: 73654 - DNA, 288 bp, Homo sapiens
  chr7:33725729-33726017
  hypo
aaacagctcctctagtggcagcgcaattgggcatcctggctgctgtgtgtggcgcacgcggcccaggcctgagcgaggtgttcaggaggcgggagatcactcaggctgattctgcagggtgttctccttttgttcctgttagaactctctcttaccgtctgtcagaaagacaagctttctattgagaaagattacgccaggtcccactcggtaagcactgaggcggtaacctaacactcttgcgaggtgctttgggcttagctggccgattcctcattgaatgatgtt

SEQ ID NO: 73655 - DNA, 37 bp, Homo sapiens
  chr7:33899152-33899189
  hypo
gtgagccaccgcgcccggcctgagcctggctttctaa

SEQ ID NO: 73656 - DNA, 1559 bp, Homo sapiens; identical to SEQ ID NO: 44107
  chr7:33943753-33945312
  hypo

SEQ ID NO: 73657 - DNA, 43 bp, Homo sapiens; identical to SEQ ID NO: 21324
  chr7:34034216-34034259
  hypo

SEQ ID NO: 73658 - DNA, 31 bp, Homo sapiens
  chr7:34192957-34192988
  hypo
gcagtatttgtgtgcccgattctgtaaacac

SEQ ID NO: 73659 - DNA, 98 bp, Homo sapiens; identical to SEQ ID NO: 21325
  chr7:34349351-34349449
  hypo

SEQ ID NO: 73660 - DNA, 45 bp, Homo sapiens
  chr7:34526628-34526673
  hypo
ggaaaaaaatccagttctggccgggcgcggtggctcacgcctgta

SEQ ID NO: 73661 - DNA, 98 bp, Homo sapiens
  chr7:35042665-35042763
  hypo
gccaccgtgcccggccagcaaccaacaatgttttcaagtctagagttcaacactcggccaaacagtgaaccaaatacgaaagcaaataaacacatttt

SEQ ID NO: 73662 - DNA, 38 bp, Homo sapiens; identical to SEQ ID NO: 21327
  chr7:35190134-35190172
  hypo

SEQ ID NO: 73663 - DNA, 37 bp, Homo sapiens; identical to SEQ ID NO: 21328
  chr7:35190411-35190448
  hypo

SEQ ID NO: 73664 - DNA, 30 bp, Homo sapiens; identical to SEQ ID NO: 44109
  chr7:35226217-35226247
  hypo

SEQ ID NO: 73665 - DNA, 49 bp, Homo sapiens; identical to SEQ ID NO: 44110
  chr7:35226473-35226522
  hypo

SEQ ID NO: 73666 - DNA, 84 bp, Homo sapiens; identical to SEQ ID NO: 44111
  chr7:35226556-35226640
  hypo

SEQ ID NO: 73667 - DNA, 161 bp, Homo sapiens
  chr7:35349990-35350151
  hypo
cttctgggctacgggcgatgtgcattgcttgacctgggagatggttacactggtataatcattttcactcaatgctcatgaatgtcttaactgccccatgcctcccacacccagacctcactccctggaagcgatcactgctaattacatccagttagaat

SEQ ID NO: 73668 - DNA, 30 bp, Homo sapiens
  chr7:35808182-35808212
  hypo
gcgggtgcccagagcgcgcgcaggctgcag

SEQ ID NO: 73669 - DNA, 29 bp, Homo sapiens
  chr7:35844772-35844801
  hypo
tgagccatcacgcccggccaagtgtttgt

SEQ ID NO: 73670 - DNA, 42 bp, Homo sapiens
  chr7:35994750-35994792
  hypo
ggcatccgaggggagacggtcagaggtcgactgctgtctcag

SEQ ID NO: 73671 - DNA, 30 bp, Homo sapiens
  chr7:36005384-36005414
  hypo
atgagccaccatgccggccaagtggaatga

SEQ ID NO: 73672 - DNA, 134 bp, Homo sapiens
  chr7:36008764-36008898
  hypo
gtgagccaggatggggacttgcgcgtccgagtgtccggagcaggcggcagaggcttcagtgtggcaaccacagccccggagcttgtgtggcaccagcagcgtcttaaagcctcgggtatatgctgagaactact

SEQ ID NO: 73673 - DNA, 290 bp, Homo sapiens; identical to SEQ ID NO: 21331
  chr7:36124377-36124667
  hypo

SEQ ID NO: 73674 - DNA, 30 bp, Homo sapiens
  chr7:36124979-36125009
  hypo
gtagttataactgctcgtctgtgctgcaac

SEQ ID NO: 73675 - DNA, 113 bp, Homo sapiens
  chr7:36134136-36134249
  hypo
gcttccaagctgcatgcgtcaagaggaggcatgcatctgtgcctgcaagaagctggacggaggctccaaggcctgagtgactgtgtcctgcagaagttcgccccagttggcag

SEQ ID NO: 73676 - DNA, 911 bp, Homo sapiens; identical to SEQ ID NO: 44125
  chr7:36192381-36193292
  hypo

SEQ ID NO: 73677 - DNA, 507 bp, Homo sapiens
  chr7:36338989-36339496
  hypo
tggcgtgccaggcgcgtaccccaccaggtgggcaaagcagaaacctgcggggagcggagacgccttttatctctggatgccacagacctgagcagcattgggctggctgtccgctgctgactggatggcagcacaaagacaatatgagcagagggaggagaagaaggggtgctcaggctgcgggccacagtccagcagcgccagaagcactcatttctgaccaccaggctatgacgttcctgctgcgcattacagaaagcttttaactgtgatcaggcactctgctcagatacattgagtggcgatttttagttttgttttgaaaaaataaacagattaacctgcctcgctgcagtgagagcatgggacaagtccgccacagccctcccccgcccccttcccccgccccccaacgcgcagtgtgtatttgcaccacggcaggtgcctctgtgtggagctagggtcaagccctgagcagcttcacttcccctgcgccttttatgtccc

SEQ ID NO: 73678 - DNA, 36 bp, Homo sapiens
  chr7:36349958-36349994
  hypo
aacttttttttttgtttgaagcggagttttgctctg

SEQ ID NO: 73679 - DNA, 341 bp, Homo sapiens
  chr7:36352554-36352895
  hypo
agaggtccccttgagcggggacctgaccgggtgagtagcagatggcatccccggaagaggggaccaggagggccggggtgtggagggaggacagcagtgatgtggctgctcctggcaagagcttaggacgagatatggagaggagactgacgggagccacaggccagctcttccaaggcaggctaaggatgttgaggtggttctgcggcgctggggagcattgcaggcttgtgtgggagtaggaacaggtagaggagggggcctgcatccgcagtgccgggagcggcgcaggtatcggggcagggatgggggatggctctcgttgccggcatattattgtg

SEQ ID NO: 73680 - DNA, 23 bp, Homo sapiens
  chr7:36379758-36379781
  hypo
gagccaccgcgcttggcctgctt

SEQ ID NO: 73681 - DNA, 89 bp, Homo sapiens
  chr7:36428639-36428728
  hypo
agctactgaaggccaacgggctagcagcacctgaaacacaagggctctttgtctggctctgtagcccaggctggaatgcagtggtgtga

SEQ ID NO: 73682 - DNA, 30 bp, Homo sapiens
  chr7:36453632-36453662
  hypo
agaaagaaaactttcgagaaggaaggcatg

SEQ ID NO: 73683 - DNA, 25 bp, Homo sapiens
  chr7:36524505-36524530
  hypo
ctgcggccatattaagtacaaaagg

SEQ ID NO: 73684 - DNA, 30 bp, Homo sapiens; identical to SEQ ID NO: 21334
  chr7:36585405-36585435
  hypo

SEQ ID NO: 73685 - DNA, 30 bp, Homo sapiens; identical to SEQ ID NO: 21335
  chr7:36672672-36672702
  hypo

SEQ ID NO: 73686 - DNA, 110 bp, Homo sapiens
  chr7:36836026-36836136
  hypo
ggcacattctccccatgcctgcgtggattttctccagggcctcaggtttcctcccgcatcccaaagatgtgcacgtcaagtactttgacgtgtctcttttgtcccagtct

SEQ ID NO: 73687 - DNA, 453 bp, Homo sapiens; identical to SEQ ID NO: 21336
  chr7:36894940-36895393
  hypo

SEQ ID NO: 73688 - DNA, 178 bp, Homo sapiens
  chr7:36901364-36901542
  hypo
caccttaaggaaaatcggcacatttcattttgcagttgcaaatggctgcacattgaccatggcatagggccagcttgtctagccaagcggagctgcaatgaggctgatggaaggaggaaccatgctcttcaaggttcacggcatgattccttctctccattcacggcggtctgtgaac

SEQ ID NO: 73689 - DNA, 30 bp, Homo sapiens; identical to SEQ ID NO: 5526
  chr7:37078723-37078753
  hypo

SEQ ID NO: 73690 - DNA, 105 bp, Homo sapiens; identical to SEQ ID NO: 21338
  chr7:37250875-37250980
  hypo

SEQ ID NO: 73691 - DNA, 118 bp, Homo sapiens
  chr7:37264493-37264611
  hypo
gtggaatgagctggccgatggtgatctcctgcgccactttctggtagaggtcatggctattgagcaccatcgactccaaaatggccaaggaccgctgcaggatcgagatgtctatggc

SEQ ID NO: 73692 - DNA, 30 bp, Homo sapiens; identical to SEQ ID NO: 21340
  chr7:37265720-37265750
  hypo

SEQ ID NO: 73693 - DNA, 69 bp, Homo sapiens; identical to SEQ ID NO: 21341
  chr7:37299039-37299108
  hypo

SEQ ID NO: 73694 - DNA, 43 bp, Homo sapiens
  chr7:37424295-37424338
  hypo
ctgggcgaaagagcaagactccgtctcaaaaaaaaaaaaaaga

SEQ ID NO: 73695 - DNA, 311 bp, Homo sapiens
  chr7:37458221-37458532
  hypo
tgaatagcaacaccatggatgcgtcagagtcagctcagataacctcggtcagatgctgacctgcagaagtctcaggcagggccaagcgtggagatggaaaatccagaaacacacagatgcgggcaggcagaatcacagaagtcatctcgcaggtattataaggaggtgtcagtcatcaggttaagcgtgggaggcaaactgcagcttctgcagtgaaggggcagtgaggcgagatggggatggtaagagtcaagtgcccagctctcagggtgctgcagaggctaggagtcgggtactcgcaacaagactaa

SEQ ID NO: 73696 - DNA, 119 bp, Homo sapiens; identical to SEQ ID NO: 44131
  chr7:37487145-37487264
  hypo

SEQ ID NO: 73697 - DNA, 130 bp, Homo sapiens; identical to SEQ ID NO: 5528
  chr7:37487323-37487453
  hypo

SEQ ID NO: 73698 - DNA, 210 bp, Homo sapiens; identical to SEQ ID NO: 5529
  chr7:37487755-37487965
  hypo

SEQ ID NO: 73699 - DNA, 1106 bp, Homo sapiens; identical to SEQ ID NO: 44134
  chr7:37487984-37489090
  hypo

SEQ ID NO: 73700 - DNA, 19 bp, Homo sapiens
  chr7:37727748-37727767
  hypo
atgtagtaggctgggcgcg

SEQ ID NO: 73701 - DNA, 30 bp, Homo sapiens
  chr7:37780141-37780171
  hypo
agtgaccaccatggcggtcattaacttggt

SEQ ID NO: 73702 - DNA, 30 bp, Homo sapiens
  chr7:37959671-37959701
  hypo
aggtgtgtgagcctcgctcattccatatta

SEQ ID NO: 73703 - DNA, 371 bp, Homo sapiens; identical to SEQ ID NO: 5532
  chr7:37960165-37960536
  hypo

SEQ ID NO: 73704 - DNA, 585 bp, Homo sapiens; identical to SEQ ID NO: 5533
  chr7:37960562-37961147
  hypo

SEQ ID NO: 73705 - DNA, 30 bp, Homo sapiens
  chr7:37988229-37988259
  hypo
atgagccatcatgctcggtctgacctgtga

SEQ ID NO: 73706 - DNA, 143 bp, Homo sapiens
  chr7:38089575-38089718
  hypo
agctgcctccctgccgggcagggctcaggacctgcagcccgcctgcaggatccccgccccccaccaagggctgaagggtgcgggtgcctgcatgggactggcaggcagccccaccttccgtcgggtgtgggatccactaagca

SEQ ID NO: 73707 - DNA, 30 bp, Homo sapiens; identical to SEQ ID NO: 21349
  chr7:38469039-38469069
  hypo

SEQ ID NO: 73708 - DNA, 25 bp, Homo sapiens
  chr7:38508455-38508480
  hypo
cagtagaacatacagacggccgggc

SEQ ID NO: 73709 - DNA, 30 bp, Homo sapiens
  chr7:38725615-38725645
  hypo
ctgctccgtgggtccggggctctctcggcg

SEQ ID NO: 73710 - DNA, 276 bp, Homo sapiens
  chr7:38726297-38726573
  hypo
gacgaacagggcggcggcacacggacgccctggtagtaacagaggaagggccgggcaggaagttccttgaggtagggtactgggaaggggcgacattagtcagcttgggcaaacgggtagggcagaaaatcgaacaacttggacggctctggagaggaggctgacggcaggaagtttgaggagtaacggggggaaggagggctggaagacgagagcgggaaggaacagaaagaaaatgaggctggggttgaggccgagaaattggaggtagctttc

SEQ ID NO: 73711 - DNA, 67 bp, Homo sapiens
  chr7:38787792-38787859
  hypo
agtagacacacacaacacatgcgcgcgcgtgcgcgcacacacacgcggacaatgcagtgaaaataga

SEQ ID NO: 73712 - DNA, 132 bp, Homo sapiens
  chr7:38974186-38974318
  hypo
cccagcacacgtgcacgcgtgcacacacacacggtggtgtaaggactaaaattaaggttcaatgttatgtactgccttgatatctggtaaaactggaacagctttgactcacttaaccgcaagctcccctcc

SEQ ID NO: 73713 - DNA, 30 bp, Homo sapiens
  chr7:39383738-39383768
  hypo
cttgcatggcaggacgcaggataatctttt

SEQ ID NO: 73714 - DNA, 30 bp, Homo sapiens; identical to SEQ ID NO: 21350
  chr7:39390643-39390673
  hypo

SEQ ID NO: 73715 - DNA, 30 bp, Homo sapiens
  chr7:39446055-39446085
  hypo
ttcgccacgcccctccggtgggttccaggc

SEQ ID NO: 73716 - DNA, 866 bp, Homo sapiens; identical to SEQ ID NO: 44143
  chr7:39453505-39454371
  hypo

SEQ ID NO: 73717 - DNA, 30 bp, Homo sapiens
  chr7:39500273-39500303
  hypo
gctacagagggccccgcgtacagccagtcg

SEQ ID NO: 73718 - DNA, 31 bp, Homo sapiens; identical to SEQ ID NO: 21352
  chr7:39761549-39761580
  hypo

SEQ ID NO: 73719 - DNA, 38 bp, Homo sapiens
  chr7:39942870-39942908
  hypo
aaaataccaaagcagcgcggctcagtggttcacgcctg

SEQ ID NO: 73720 - DNA, 18 bp, Homo sapiens
  chr7:40069545-40069563
  hypo
tggcctagattagattct

SEQ ID NO: 73721 - DNA, 33 bp, Homo sapiens
  chr7:40156752-40156785
  hypo
tcccactggagtgcagtggcacgatctcggctc

SEQ ID NO: 73722 - DNA, 31 bp, Homo sapiens
  chr7:40243014-40243045
  hypo
aggattaacattaagtcgagtgaacatgaga

SEQ ID NO: 73723 - DNA, 107 bp, Homo sapiens; identical to SEQ ID NO: 21353
  chr7:40766264-40766371
  hypo

SEQ ID NO: 73724 - DNA, 30 bp, Homo sapiens; identical to SEQ ID NO: 44148
  chr7:40866647-40866677
  hypo

SEQ ID NO: 73725 - DNA, 152 bp, Homo sapiens
  chr7:40938948-40939100
  hypo
cggtggctataaatacgccctgtgaatgcaattacgtgatggaacgcaggctgcgccaaagcctctttgctccaggctatggtgtcagccatttacctctgtgaagcatataaaaagacacgcgactcaagaggcaacgcacacgctgagac

SEQ ID NO: 73726 - DNA, 43 bp, Homo sapiens
  chr7:41764887-41764930
  hypo
actctatccacactcaataaacgctgcttaataatgacaatga

SEQ ID NO: 73727 - DNA, 37 bp, Homo sapiens; identical to SEQ ID NO: 21354
  chr7:41840522-41840559
  hypo

SEQ ID NO: 73728 - DNA, 1366 bp, Homo sapiens; identical to SEQ ID NO: 21355
  chr7:42004851-42006217
  hypo

SEQ ID NO: 73729 - DNA, 30 bp, Homo sapiens; identical to SEQ ID NO: 21356
  chr7:42007425-42007455
  hypo

SEQ ID NO: 73730 - DNA, 31 bp, Homo sapiens
  chr7:42096566-42096597
  hypo
gcgaaactccgtctcaaaaaaaaaaaaaaaa

SEQ ID NO: 73731 - DNA, 32 bp, Homo sapiens
  chr7:42169113-42169145
  hypo
gaagccatgggctgggttgggcgcggtggctc

SEQ ID NO: 73732 - DNA, 32 bp, Homo sapiens; identical to SEQ ID NO: 21357
  chr7:42169384-42169416
  hypo

SEQ ID NO: 73733 - DNA, 2120 bp, Homo sapiens; identical to SEQ ID NO: 44152
  chr7:42275702-42277822
  hypo

SEQ ID NO: 73734 - DNA, 43 bp, Homo sapiens
  chr7:42353123-42353166
  hypo
aaggagcattatgttagaatccgccttgtataaccccaacata

SEQ ID NO: 73735 - DNA, 27 bp, Homo sapiens
  chr7:42369987-42370014
  hypo
tatttattttgctttttgagacggagt

SEQ ID NO: 73736 - DNA, 179 bp, Homo sapiens
  chr7:42812189-42812368
  hypo
ctagactgtgagaagaaacaccgtctaatttagtcctgctgtacccgccatgtctggagtcgtgcctgacacttggtgagcactccattcattcgtgatgaagtgttcacttccagttagagatgtgcggagcctcctgcacacagcatagagggcacgatggagggaggagagcagat

SEQ ID NO: 73737 - DNA, 222 bp, Homo sapiens
  chr7:42834366-42834588
  hypo
gttgagcacctcttggagaatcgctcgggttcgctccacgctgtcgcagccaccgctgtggtcgccagtcagccgaggggctgcgatactggttgcccgcggtgtgagcagaattcaacgtgtaccgctgccgtgaaaatggagaggcctttgtccgtgtttggggaccgcagcactggggaggcgatctgctcccagaacgttatggctgcagctttgatt

SEQ ID NO: 73738 - DNA, 34 bp, Homo sapiens
  chr7:42909817-42909851
  hypo
aaaggtactgggagtaatggccgggcgcggtggc

SEQ ID NO: 73739 - DNA, 30 bp, Homo sapiens; identical to SEQ ID NO: 5545
  chr7:43016820-43016850
  hypo

SEQ ID NO: 73740 - DNA, 17 bp, Homo sapiens
  chr7:43037171-43037188
  hypo
caaaaaaaaagaaaaaa

SEQ ID NO: 73741 - DNA, 198 bp, Homo sapiens
  chr7:43116309-43116507
  hypo
aaatcggcaacctttccgggtccccttccaccacgtggaagctttattttcgctttaataagtcttgctaccgcacactcattgggtctgtgcgtttctctaatcaagctgtaacactcgccgctgcggtccacagcttcattccttgaagcccgtgagaccacgaacgcttcaatcgagaaaaacctttgatctgaa

SEQ ID NO: 73742 - DNA, 208 bp, Homo sapiens; identical to SEQ ID NO: 44157
  chr7:43151999-43152207
  hypo

SEQ ID NO: 73743 - DNA, 786 bp, Homo sapiens; identical to SEQ ID NO: 5547
  chr7:43152413-43153199
  hypo

SEQ ID NO: 73744 - DNA, 464 bp, Homo sapiens; identical to SEQ ID NO: 44159
  chr7:43153229-43153693
  hypo

SEQ ID NO: 73745 - DNA, 145 bp, Homo sapiens
  chr7:43237313-43237458
  hypo
tgggcaggtgggggactctgacgaacacagaccgcttccaggactggcaacataaccgtggccccagtgacaaaggaaaatgcgggacagcttgtgcaaaaattattaaggatttcaagatggcgacagcagagcattaaaccca

SEQ ID NO: 73746 - DNA, 33 bp, Homo sapiens
  chr7:43279647-43279680
  hypo
aatgtcatcttttgccaggcacggtggctcacg

SEQ ID NO: 73747 - DNA, 33 bp, Homo sapiens
  chr7:43279919-43279952
  hypo
gagcaagactccgtctcaaataaagtaataata

SEQ ID NO: 73748 - DNA, 78 bp, Homo sapiens
  chr7:43313711-43313789
  hypo
agtgctggagaaaagcgcgggtggcggcaggcacggaaaggacgccatgaaggcctcgggtgcactaaaagagtacaa

SEQ ID NO: 73749 - DNA, 28 bp, Homo sapiens
  chr7:43799757-43799785
  hypo
tggcatgagtcaccgcgcccggccgatc

SEQ ID NO: 73750 - DNA, 16 bp, Homo sapiens
  chr7:43805151-43805167
  hypo
atttatttatttttaa

SEQ ID NO: 73751 - DNA, 186 bp, Homo sapiens
  chr7:43827244-43827430
  hypo
actttctgtgggtactcggaaggttttcaacctaaagacatggtggagcaccttcaagaacaggttttggcgggactgacttctctccaagcccccatttcggggactgtctcatcccatcctgatgctgtggcttcctgtgtgttttgggctggcttccatcttgctcgtcgggaccctgccagc

SEQ ID NO: 73752 - DNA, 30 bp, Homo sapiens; identical to SEQ ID NO: 5550
  chr7:43896240-43896270
  hypo

SEQ ID NO: 73753 - DNA, 21 bp, Homo sapiens
  chr7:44083439-44083460
  hypo
cgtgcccggcaggatttatat

SEQ ID NO: 73754 - DNA, 20 bp, Homo sapiens
  chr7:44089053-44089073
  hypo
cccagcccaaagttcttatg

SEQ ID NO: 73755 - DNA, 120 bp, Homo sapiens
  chr7:44097727-44097847
  hypo
aaggaggaggagaaccgtcggctggaggaaaagcggcgggccgaggaggcacagcggcagctggagcaggagcgccgggagcgtgagctgcgtgaggctgcacgccgggagcagcgctat

SEQ ID NO: 73756 - DNA, 30 bp, Homo sapiens
  chr7:44142958-44142988
  hypo
actgtgctgtgtcacgccctgccatactaa

SEQ ID NO: 73757 - DNA, 30 bp, Homo sapiens; identical to SEQ ID NO: 21366
  chr7:44150873-44150903
  hypo

SEQ ID NO: 73758 - DNA, 31 bp, Homo sapiens
  chr7:44152190-44152221
  hypo
tggagaagaaccccttcgtgctgggagcaaa

SEQ ID NO: 73759 - DNA, 486 bp, Homo sapiens; identical to SEQ ID NO: 21367
  chr7:44153136-44153622
  hypo

SEQ ID NO: 73760 - DNA, 30 bp, Homo sapiens; identical to SEQ ID NO: 21368
  chr7:44154307-44154337
  hypo

SEQ ID NO: 73761 - DNA, 37 bp, Homo sapiens
  chr7:44250465-44250502
  hypo
aactattcttggaccgagtctcgacacctagaggtga

SEQ ID NO: 73762 - DNA, 30 bp, Homo sapiens; identical to SEQ ID NO: 21369
  chr7:44259032-44259062
  hypo

SEQ ID NO: 73763 - DNA, 30 bp, Homo sapiens
  chr7:44259795-44259825
  hypo
gagccggatgtaagcgatgcaggcggcatc

SEQ ID NO: 73764 - DNA, 30 bp, Homo sapiens
  chr7:44279147-44279177
  hypo
cgggcgggagcgggcgggacgctggtcgag

SEQ ID NO: 73765 - DNA, 77 bp, Homo sapiens
  chr7:44279665-44279742
  hypo
cgcacacggagtgtcggacgacggagaagccacaggtacagcttgtccagacctgggctgccggctccactccgggg

SEQ ID NO: 73766 - DNA, 31 bp, Homo sapiens; identical to SEQ ID NO: 21370
  chr7:44291703-44291734
  hypo

SEQ ID NO: 73767 - DNA, 38 bp, Homo sapiens
  chr7:44301707-44301745
  hypo
ggtgatgagggttcagcgaccttcggagccaggcccag

SEQ ID NO: 73768 - DNA, 31 bp, Homo sapiens; identical to SEQ ID NO: 21371
  chr7:44302563-44302594
  hypo

SEQ ID NO: 73769 - DNA, 100 bp, Homo sapiens
  chr7:44311756-44311856
  hypo
ctctggagatctggggcggggaattgggggggtgggcagcgaggacttggggagcccagtggtaggtctgaggcaggaataaccccggcccaaggtctgg

SEQ ID NO: 73770 - DNA, 230 bp, Homo sapiens; identical to SEQ ID NO: 44176
  chr7:44364448-44364678
  hypo

SEQ ID NO: 73771 - DNA, 383 bp, Homo sapiens; identical to SEQ ID NO: 44177
  chr7:44364698-44365081
  hypo

SEQ ID NO: 73772 - DNA, 467 bp, Homo sapiens; identical to SEQ ID NO: 44178
  chr7:44365117-44365584
  hypo

SEQ ID NO: 73773 - DNA, 227 bp, Homo sapiens
  chr7:44430994-44431221
  hypo
tacgatgtattaatacgtgctgtaccggaaggtaagactaagacaatccagatacaccacaaggtaaggttcctccaagagacaaaatgagaagaaaatatcgatcagcgatcttcagggggaggaggcggtccgtgtttacagaacaaaaataaggagactgtgcccagcagatgacccctccccactgactcaaggctgcactgcgtccgcgtgccctgctgtac

SEQ ID NO: 73774 - DNA, 16 bp, Homo sapiens
  chr7:44452248-44452264
  hypo
gggcgcagtggctcac

SEQ ID NO: 73775 - DNA, 28 bp, Homo sapiens
  chr7:44492663-44492691
  hypo
aatgttggccgggtgcggtggctcacgc

SEQ ID NO: 73776 - DNA, 44 bp, Homo sapiens
  chr7:44517849-44517893
  hypo
gatgggttatttactttgggccgggcgcggtggctcacgcctgt

SEQ ID NO: 73777 - DNA, 31 bp, Homo sapiens; identical to SEQ ID NO: 21373
  chr7:44582325-44582356
  hypo

SEQ ID NO: 73778 - DNA, 40 bp, Homo sapiens
  chr7:44583393-44583433
  hypo
caatgtttacgactcttacgtggacagctcatttctttcc

SEQ ID NO: 73779 - DNA, 142 bp, Homo sapiens; identical to SEQ ID NO: 21374
  chr7:44611080-44611222
  hypo

SEQ ID NO: 73780 - DNA, 61 bp, Homo sapiens
  chr7:44612062-44612123
  hypo
ccagctccaagggccgctaattgtagtaactggcttccagccaccccgctctcgtcccaac

SEQ ID NO: 73781 - DNA, 30 bp, Homo sapiens
  chr7:44723439-44723469
  hypo
ttcccctcatcgatgcgtgtgaagtttcca

SEQ ID NO: 73782 - DNA, 32 bp, Homo sapiens; identical to SEQ ID NO: 21376
  chr7:44740321-44740353
  hypo

SEQ ID NO: 73783 - DNA, 92 bp, Homo sapiens; identical to SEQ ID NO: 21377
  chr7:44740652-44740744
  hypo

SEQ ID NO: 73784 - DNA, 217 bp, Homo sapiens; identical to SEQ ID NO: 21378
  chr7:44746821-44747038
  hypo

SEQ ID NO: 73785 - DNA, 30 bp, Homo sapiens; identical to SEQ ID NO: 21379
  chr7:44748195-44748225
  hypo

SEQ ID NO: 73786 - DNA, 30 bp, Homo sapiens
  chr7:44748826-44748856
  hypo
gaatgcggcagaggcggcctgggctgccgg

SEQ ID NO: 73787 - DNA, 30 bp, Homo sapiens
  chr7:44750562-44750592
  hypo
gctagatgtgagagcgtcagcttgctccac

SEQ ID NO: 73788 - DNA, 376 bp, Homo sapiens
  chr7:44801184-44801560
  hypo
ataatgaggtgagctccgcctggcccccacctgacccccacgaggctctgttcctcctcccacactctcagggcccgttttctgggtgtccacccatcttcctgagcaggcctgacctggagctgcaattcaagtgctaccaccacgaggaccggcagatgaacaccaactggccagcctcggtgcaggtcagcgtcaatgccacgccgctcaccatcgagcgtggcgacaacaagacctcgcacaagccactctacctgaagcatgtgtgccagccaggccgcaacaccatccagatcaccgtcaccgcctgctgctgcgtgcgtgtcctgcgccgagggggcggtgctgtggcgtggggcggggtgtggtgggg

SEQ ID NO: 73789 - DNA, 335 bp, Homo sapiens
  chr7:44835103-44835438
  hypo
tccgggctcaagcaatcctccccgcccagcctcctgagtagcgagcgcctcgacgcccagctaatttttatttttatttatttttttgtagagacggcgtctctctaagatgcccaggctggtggccggtgtcgaactcctaagatgaagcgatcctccccggccttggcctccgcgcctcctaaagcgccaggtatgagccaccgcgcctggcctacaagtgcattttaattaaagtattattaatgtctttgcctgaagaaattcgcttttaaattgtgacttatctttcacccaaaaatcaaagcacaattcagccccgaggcgggggcggt

SEQ ID NO: 73790 - DNA, 33 bp, Homo sapiens
  chr7:44844993-44845026
  hypo
tgagtttgctgtatatatccacgccttacacag

SEQ ID NO: 73791 - DNA, 97 bp, Homo sapiens
  chr7:44912166-44912263
  hypo
tccaggctccgcaagagagggagactgtagaaagagggagacggagagtgagagcgagagcgggagggagagagacggagagggagagggagaggga

SEQ ID NO: 73792 - DNA, 24 bp, Homo sapiens
  chr7:44918922-44918946
  hypo
gccgcatttggaatctcaaatgga

SEQ ID NO: 73793 - DNA, 700 bp, Homo sapiens; identical to SEQ ID NO: 44183
  chr7:44924078-44924778
  hypo

SEQ ID NO: 73794 - DNA, 30 bp, Homo sapiens; identical to SEQ ID NO: 21382
  chr7:45006456-45006486
  hypo

SEQ ID NO: 73795 - DNA, 31 bp, Homo sapiens; identical to SEQ ID NO: 21383
  chr7:45015221-45015252
  hypo

SEQ ID NO: 73796 - DNA, 556 bp, Homo sapiens; identical to SEQ ID NO: 44184
  chr7:45026072-45026628
  hypo

SEQ ID NO: 73797 - DNA, 121 bp, Homo sapiens
  chr7:45046868-45046989
  hypo
tttgtgctctgggatctgtggcgggagcagtgagcccagccatgtcctctgcatgcatcgctgtgtccttgtgaacagtggatctttgttagcgcgcttcgcactccttggcttttttatc

SEQ ID NO: 73798 - DNA, 164 bp, Homo sapiens
  chr7:45091549-45091713
  hypo
cgcctcggcctcccaaagtgctggggttacaggcgtgagggtattttataggacattgaattccgtgatcatgtgcctactgctgtacctcctttagcactaagtgagtcccttgatccaaggtgatgatggtacttgctgtcccacatcggaaaccacatgct

SEQ ID NO: 73799 - DNA, 139 bp, Homo sapiens
  chr7:45115573-45115712
  hypo
gggatgagtgggaccgcatgatctcggacatcagcagcgacattgaggcgctgggctgcagcatggaccaggactcagcatgatggacagtggatgggggggcacccacaccttccgcgcagtcgtcataggccttccc

SEQ ID NO: 73800 - DNA, 30 bp, Homo sapiens
  chr7:45115939-45115969
  hypo
agagccagtcctgtcggctgggcccttgga

SEQ ID NO: 73801 - DNA, 227 bp, Homo sapiens
  chr7:45125648-45125875
  hypo
cacagggctcccgccggtcccctcccaggatggtggtggcagcggccgcatcgcaggacagatctgtggagatagagaagatcatgaggtgcccctggatgcatctcccaggcaagggccaggcccggggagatgaattccggctgcatagggcccagaggaaggtggatccaggaaggcaggagagaaaagagaagaccctctgcacgctgcgtttgagggagaac

SEQ ID NO: 73802 - DNA, 30 bp, Homo sapiens; identical to SEQ ID NO: 21387
  chr7:45139765-45139795
  hypo

SEQ ID NO: 73803 - DNA, 30 bp, Homo sapiens
  chr7:45144059-45144089
  hypo
tactgaatttgacacggctgcaggcatctg

SEQ ID NO: 73804 - DNA, 30 bp, Homo sapiens
  chr7:45146792-45146822
  hypo
catccttctgtgtgcgtacccccatgagac

SEQ ID NO: 73805 - DNA, 215 bp, Homo sapiens; identical to SEQ ID NO: 21388
  chr7:45222824-45223039
  hypo

SEQ ID NO: 73806 - DNA, 104 bp, Homo sapiens
  chr7:45252687-45252791
  hypo
agttgaagggttgaatgtgaacgctctcccttttgtggctgtccccagtgcccgggaccccgtctcgctgctgctgtgtgtgcggtgaagggggtgctgtcagc

SEQ ID NO: 73807 - DNA, 154 bp, Homo sapiens; identical to SEQ ID NO: 21389
  chr7:45262244-45262398
  hypo

SEQ ID NO: 73808 - DNA, 189 bp, Homo sapiens; identical to SEQ ID NO: 44188
  chr7:45299683-45299872
  hypo

SEQ ID NO: 73809 - DNA, 97 bp, Homo sapiens
  chr7:45431197-45431294
  hypo
caccacaaacagagctcaaagcggccagaggcaggctgcctcctccgcctccaggcaggcctccaggggcttggacggtggtgcccctgctccccaa

SEQ ID NO: 73810 - DNA, 241 bp, Homo sapiens
  chr7:45439017-45439258
  hypo
ctctgattttggagcgaagttgaggccgagcctgggcactgttgtgatcctgccaggtgtacgcgtacttggggtggtgctgagacgccagccccctgctgccttggcctcctccagactttgggcgctgacaagcatgggagaaaggccgagaggaactgaaggaggctcctcaccggcctgtaggtgcccctcagaacgaacagcctgggtaccatggacgacaggattgatggcggta

SEQ ID NO: 73811 - DNA, 267 bp, Homo sapiens; identical to SEQ ID NO: 5555
  chr7:45613546-45613813
  hypo

SEQ ID NO: 73812 - DNA, 712 bp, Homo sapiens; identical to SEQ ID NO: 5556
  chr7:45613857-45614569
  hypo

SEQ ID NO: 73813 - DNA, 424 bp, Homo sapiens; identical to SEQ ID NO: 5557
  chr7:45614580-45615004
  hypo

SEQ ID NO: 73814 - DNA, 181 bp, Homo sapiens
  chr7:45632338-45632519
  hypo
cctccttctctccctgcagctcggtgccaatgccttgctcttcgtcggtgtgaacatgtatggggtctttgtgcggattctgactgagcgttcacagaggaaggcgttcctgcaggcccggagctgcattgaggaccgactgaggctggaggatgagaacgagaagcaggtcagtggcttg

SEQ ID NO: 73815 - DNA, 62 bp, Homo sapiens
  chr7:45743035-45743097
  hypo
acctcctgccggcccacgtcgcccagcacttcctcatgtccaaccctcggaacatggtgagc

SEQ ID NO: 73816 - DNA, 30 bp, Homo sapiens
  chr7:45766804-45766834
  hypo
ccatcatctcagggcggcttcacgtcccct

SEQ ID NO: 73817 - DNA, 46 bp, Homo sapiens
  chr7:45809382-45809428
  hypo
tctcaccttggccatcagagttgtcgggattacaggcatgagggac

SEQ ID NO: 73818 - DNA, 148 bp, Homo sapiens; identical to SEQ ID NO: 21394
  chr7:47088918-47089066
  hypo

SEQ ID NO: 73819 - DNA, 96 bp, Homo sapiens; identical to SEQ ID NO: 5561
  chr7:47294095-47294191
  hypo

SEQ ID NO: 73820 - DNA, 30 bp, Homo sapiens
  chr7:47317247-47317277
  hypo
agcgcccatgcggacgggcgaagcatggca

SEQ ID NO: 73821 - DNA, 30 bp, Homo sapiens
  chr7:47340415-47340445
  hypo
caggcacacagcatccggccgcagagaggc

SEQ ID NO: 73822 - DNA, 30 bp, Homo sapiens
  chr7:47340864-47340894
  hypo
taggaatcctgactccgtcttccaggcact

SEQ ID NO: 73823 - DNA, 320 bp, Homo sapiens
  chr7:47343227-47343547
  hypo
agacacctgaagaccagcaagcgtcacccacacgggaagacagggatggggaagtgggtgctgaggccctccaggcagcacaggaggtattttccaaaatatgtacactaaggccctctctgagctcacgctgcctgcctttcaagcccccatttcatgcctggatgctgcagcccgcatgagggcacccaggggagccgccccatgaaggcctccacatgcgcagatgctgctccctcggcccctgcgccttccctcctgcatcttcaccgggtcaaggccctttcgtcctttaagacgcagctcagctgtgcacccac

SEQ ID NO: 73824 - DNA, 135 bp, Homo sapiens
  chr7:47370840-47370975
  hypo
agagggatactagaatgcctccgagggaccaggcactgcagactgagatcctcagctttattcgaatgtacttgtttgttcctgagaattacgtgctggccagcaccccagggcgagctctactctggggttctt

SEQ ID NO: 73825 - DNA, 45 bp, Homo sapiens
  chr7:47384307-47384352
  hypo
gcgcctgagtgccgcgcgcctgtgacccgcgggtagatttcttac

SEQ ID NO: 73826 - DNA, 126 bp, Homo sapiens
  chr7:47394756-47394882
  hypo
gcgcagggtcacctgagactccgccacgcccagcgggatctgggattcaccacagggtgcaaaaggacaccgagcctgcgaggcaggaggacgctcagtcattccggccccacaggaggagctggg

SEQ ID NO: 73827 - DNA, 43 bp, Homo sapiens
  chr7:47410376-47410419
  hypo
gggcacctggaatttgagagacgtgagccactacctaacagca

SEQ ID NO: 73828 - DNA, 143 bp, Homo sapiens
  chr7:47420375-47420518
  hypo
cacacacacaaatgctctctgcttaccttccttcaaaacagcccagcggctctctcagtctgcacctctgagcccagttttccttgacacaggctttcacagcaggacagtggcatgccagaggagggcgggggcgtgccacc

SEQ ID NO: 73829 - DNA, 429 bp, Homo sapiens
  chr7:47440317-47440746
  hypo
aatcaaccaaggaggttcaaccgcagctgcccacaagcacagggccgccagctccgcgcctcacctttgctggcattgtccagatcctccttcccaaacaccagcccgtagccctgcacagccccagtgtgaaactgcaggcggaaaatgacgtcacgggtggccgagcggtatttcttgtggtagcatttcacctgggttagagagacaaaacaaaacaaagtagctgcagcgggggacacacgttcccggcaaggaacacactccgcggaggccggcacagcagggcctcccctctggactctggctgggagttcacgctttggagtggaacttcagccctggggcacaggcgcctgcagacagctggggtgcaggcagaggcaccacactgctgctgctgggtgcggggctccactggaggcttca

SEQ ID NO: 73830 - DNA, 30 bp, Homo sapiens
  chr7:47479237-47479267
  hypo
gggactcaggatgacgggcctgcgagagag

SEQ ID NO: 73831 - DNA, 307 bp, Homo sapiens
  chr7:47515266-47515573
  hypo
gctggtatgaatcaatcgcttgcagagtgtatgaaggtaaacacaggatggaaaaaaacaaggacactctgcccttgaacttcaatcaaaagctgtggggccaccattcggaccactgttaggccgcagcatcatgaaaagatcctgcaaacctgcaactaccaaggacagactcgcatgcgcccttgttctgaccgtggtgcctccaagtctgcaaatgcgggatcacaggaatcatctactgtgtctgtcatcggtgccctcaccctcaggaagcaggggacacgctctggaactcatcagactg

SEQ ID NO: 73832 - DNA, 72 bp, Homo sapiens; identical to SEQ ID NO: 21399
  chr7:47581606-47581678
  hypo

SEQ ID NO: 73833 - DNA, 452 bp, Homo sapiens
  chr7:47605259-47605711
  hypo
cgcttggccagttttttatttcttaaggtaataagccagtaggtgggggacaaagttaaatataaacaaatgctgaaaatacgcacaaatttacactagttaacaccaacctcgctttccaatttcgcactctgctggatttcttaatcttaggcaaaaattcacattgggggttcagggagctaaaaggagttctcctaagtatgagaactgtaaatgcagcttattcctcacacgggcgctgggaggctttggaagagcaaccagccacagtctgatggcatgatatgcgtggattactgcaaagccacatggaactttaaagacatctcaattaacagcttcactggggtttcagattagtatacatattggaaaaaagattaatccagatgagtggttctaaaccctgccgagccgcaacccaaagtgtctgacgcaggaggtctgtc

SEQ ID NO: 73834 - DNA, 39 bp, Homo sapiens; identical to SEQ ID NO: 21401
  chr7:47615109-47615148
  hypo

SEQ ID NO: 73835 - DNA, 222 bp, Homo sapiens; identical to SEQ ID NO: 5564
  chr7:47621698-47621920
  hypo

SEQ ID NO: 73836 - DNA, 32 bp, Homo sapiens
  chr7:47628645-47628677
  hypo
agtgccatcaaaagaaactagcggctgggtgc

SEQ ID NO: 73837 - DNA, 30 bp, Homo sapiens; identical to SEQ ID NO: 21403
  chr7:47679975-47680005
  hypo

SEQ ID NO: 73838 - DNA, 63 bp, Homo sapiens
  chr7:47711088-47711151
  hypo
agaacacataggcatacgtggaaggttgagccatggcatttgggaacccgcctaaccccccgg

SEQ ID NO: 73839 - DNA, 18 bp, Homo sapiens
  chr7:47733260-47733278
  hypo
ttctgacatagagtctcg

SEQ ID NO: 73840 - DNA, 30 bp, Homo sapiens
  chr7:47784645-47784675
  hypo
gagccttctcatgccggcagaagagaggct

SEQ ID NO: 73841 - DNA, 916 bp, Homo sapiens; identical to SEQ ID NO: 5565
  chr7:48075043-48075959
  hypo

SEQ ID NO: 73842 - DNA, 34 bp, Homo sapiens
  chr7:48093727-48093761
  hypo
ttggctgagcatggtggctcacgcctgtaatccc

SEQ ID NO: 73843 - DNA, 263 bp, Homo sapiens; identical to SEQ ID NO: 5566
  chr7:48127994-48128257
  hypo

SEQ ID NO: 73844 - DNA, 30 bp, Homo sapiens
  chr7:48147029-48147059
  hypo
atgcagccggcgtccgcaatatcgagatgg

SEQ ID NO: 73845 - DNA, 32 bp, Homo sapiens
  chr7:48212092-48212124
  hypo
gtacaaaagttttaagttggccgggcgcggtg

SEQ ID NO: 73846 - DNA, 50 bp, Homo sapiens; identical to SEQ ID NO: 21407
  chr7:48964016-48964066
  hypo

SEQ ID NO: 73847 - DNA, 54 bp, Homo sapiens; identical to SEQ ID NO: 21408
  chr7:49740606-49740660
  hypo

SEQ ID NO: 73848 - DNA, 267 bp, Homo sapiens; identical to SEQ ID NO: 44202
  chr7:49812750-49813017
  hypo

SEQ ID NO: 73849 - DNA, 283 bp, Homo sapiens; identical to SEQ ID NO: 5568
  chr7:49813809-49814092
  hypo

SEQ ID NO: 73850 - DNA, 629 bp, Homo sapiens; identical to SEQ ID NO: 5569
  chr7:49814121-49814750
  hypo

SEQ ID NO: 73851 - DNA, 133 bp, Homo sapiens; identical to SEQ ID NO: 5570
  chr7:49815116-49815249
  hypo

SEQ ID NO: 73852 - DNA, 116 bp, Homo sapiens; identical to SEQ ID NO: 5571
  chr7:49815656-49815772
  hypo

SEQ ID NO: 73853 - DNA, 30 bp, Homo sapiens
  chr7:50198833-50198863
  hypo
aggctgcttctccgcgctgcgcagtgtggt

SEQ ID NO: 73854 - DNA, 96 bp, Homo sapiens
  chr7:50221916-50222012
  hypo
ttcacaaacatttgctgccaccggccacttacagaggctatgctaggcactgagggtgctagcgccattaggaatgccagataaaaataattgtca

SEQ ID NO: 73855 - DNA, 113 bp, Homo sapiens
  chr7:50231277-50231390
  hypo
gtcagtaatgtgagaaggaggcgatcctggcttctcgtctcattgattctcgcacgtcttttcaacgtgagcggccgagctgagtgaatggcgatagtattttgtttagattt

SEQ ID NO: 73856 - DNA, 221 bp, Homo sapiens
  chr7:50251516-50251737
  hypo
ccctcacactggcatcgggaggaggtacctacatgcttgaatagggaggaggtgctcacacgctggcatcgggaggcaggtgtccacacgctggtatcgggaggcaggtgtcagcatgctggcattgggaagaggcaccctcacactggcatcgggaggaggtgtccatatgttggcatcaggaggaggtgtccacacgctggtatcgggaagcaggtgtc

SEQ ID NO: 73857 - DNA, 105 bp, Homo sapiens
  chr7:50294026-50294131
  hypo
caggagctaacacagccatagcggaagctgccataggattttgtttattttcttttccttctgttttgtatttgtgaattttctttataagatcaagaaaggatt

SEQ ID NO: 73858 - DNA, 181 bp, Homo sapiens; identical to SEQ ID NO: 21415
  chr7:50342134-50342315
  hypo

SEQ ID NO: 73859 - DNA, 166 bp, Homo sapiens; identical to SEQ ID NO: 44207
  chr7:50343323-50343489
  hypo

SEQ ID NO: 73860 - DNA, 765 bp, Homo sapiens; identical to SEQ ID NO: 5573
  chr7:50343974-50344739
  hypo

SEQ ID NO: 73861 - DNA, 86 bp, Homo sapiens
  chr7:50365026-50365112
  hypo
atgaaagaggtgaaaacgctaagatatttagcaattattactttaaacattttctatttataggccgggcgcagtggctcatgcct

SEQ ID NO: 73862 - DNA, 154 bp, Homo sapiens
  chr7:50415430-50415584
  hypo
tttacatgtttgacgcgtgtcacatgattccacaagtcactcaagggcaggaggattaccatcgatacggaaagatttcttagaaagcttaagtgaaagggaaaccagggagaaagtgtgcttcgtgagaataggtatgcggacggctctttgt

SEQ ID NO: 73863 - DNA, 147 bp, Homo sapiens
  chr7:50441145-50441292
  hypo
tttatgaagtcaagccgcgtaggggaacatgccaagaggattatcccaatgcctgttctgcgtggtgtcctttttctagcctcggaagcactaggcctacaccttcgctatagccctcgtcttagcgcctgtatttgaaaaacttgc

SEQ ID NO: 73864 - DNA, 181 bp, Homo sapiens
  chr7:50443886-50444067
  hypo
cagaccactcctgacgtgaacctgcttaaagtgagggcccaattctaaagtgggaactatgtaaatacctttctagtgcattttcagataatcgccactgggcctatggatggagagggctggcagatctccctgtaaccccaggtgcatcccgaggcctgccaccgaagcccactcaagg

SEQ ID NO: 73865 - DNA, 30 bp, Homo sapiens; identical to SEQ ID NO: 21419
  chr7:50447780-50447810
  hypo

SEQ ID NO: 73866 - DNA, 168 bp, Homo sapiens
  chr7:50450250-50450418
  hypo
ccagtgcaatcagtgcggggcctcattcacccagaagggcaacctgctccggcacatcaagctgcattccggggagaagcccttcaaatgccacctctgcaactacgcctgccgccggagggacgccctcactggccacctgaggacgcactccggtaggtcccctgg

SEQ ID NO: 73867 - DNA, 104 bp, Homo sapiens; identical to SEQ ID NO: 21420
  chr7:50514845-50514949
  hypo

SEQ ID NO: 73868 - DNA, 30 bp, Homo sapiens; identical to SEQ ID NO: 21421
  chr7:50533497-50533527
  hypo

SEQ ID NO: 73869 - DNA, 44 bp, Homo sapiens
  chr7:50537913-50537957
  hypo
aagctggcttccttttcggctcaccggctcgcctatttctcttg

SEQ ID NO: 73870 - DNA, 424 bp, Homo sapiens; identical to SEQ ID NO: 21422
  chr7:50560480-50560904
  hypo

SEQ ID NO: 73871 - DNA, 30 bp, Homo sapiens; identical to SEQ ID NO: 21423
  chr7:50611869-50611899
  hypo

SEQ ID NO: 73872 - DNA, 31 bp, Homo sapiens; identical to SEQ ID NO: 21424
  chr7:50655023-50655054
  hypo

SEQ ID NO: 73873 - DNA, 30 bp, Homo sapiens; identical to SEQ ID NO: 21425
  chr7:50658403-50658433
  hypo

SEQ ID NO: 73874 - DNA, 104 bp, Homo sapiens; identical to SEQ ID NO: 21426
  chr7:50659742-50659846
  hypo

SEQ ID NO: 73875 - DNA, 302 bp, Homo sapiens; identical to SEQ ID NO: 21427
  chr7:50660381-50660683
  hypo

SEQ ID NO: 73876 - DNA, 30 bp, Homo sapiens
  chr7:50667342-50667372
  hypo
acgggcggcaccagccgggctgatttgggg

SEQ ID NO: 73877 - DNA, 203 bp, Homo sapiens
  chr7:50687515-50687718
  hypo
acactgaagcccgcacgcacatcatggaatagttcttgtcaaccgaattacacgtgaaggcagggaagaaaacacactccatcctccagcacccgctgtggacacgtacacacacacacatgcacgtacgcacacgcctccttcacagcatcttacatagcagcactgtcccccagaaagggaaaagtcgcttccctcactgt

SEQ ID NO: 73878 - DNA, 31 bp, Homo sapiens
  chr7:50708877-50708908
  hypo
gcactgtccacctgttcgtctgttcgatgaa

SEQ ID NO: 73879 - DNA, 204 bp, Homo sapiens
  chr7:50709529-50709733
  hypo
ctcagtggcctgaggatttaccgtgagcgagcccagagtgtgtctgcagactggcgccgaggaggcaagggcgtgggaaggctcaacctggccagcggcagagtaccaggaagtctgcacgaactcactgctgctcacctgaggaacacggggtggggagaaggtgaggagttccgcggcagcgacagaggctctacatagagg

SEQ ID NO: 73880 - DNA, 191 bp, Homo sapiens
  chr7:50715837-50716028
  hypo
cgcagagaggggagacggagcaccaaggcccagtgactgaagagccagcaacgatggctgagaaggaaagtccagcaaagagggtggaaacccagacggagctgtggaaaggagagcagcgagcgacaggagccctcatgctgctgcaggcccggcaagcggaagacagagaaccccgctggctttagcca

SEQ ID NO: 73881 - DNA, 109 bp, Homo sapiens; identical to SEQ ID NO: 21429
  chr7:50720335-50720444
  hypo

SEQ ID NO: 73882 - DNA, 45 bp, Homo sapiens
  chr7:50734032-50734077
  hypo
gagctcagagggaggcggcattggaggaatcgcgtgctgttgaat

SEQ ID NO: 73883 - DNA, 38 bp, Homo sapiens
  chr7:50740986-50741024
  hypo
tcccacggagccccacgccatcccgactgcgacagggc

SEQ ID NO: 73884 - DNA, 30 bp, Homo sapiens
  chr7:50741327-50741357
  hypo
agaccacttccaaaccggccatgctctgcc

SEQ ID NO: 73885 - DNA, 30 bp, Homo sapiens; identical to SEQ ID NO: 21430
  chr7:50772852-50772882
  hypo

SEQ ID NO: 73886 - DNA, 30 bp, Homo sapiens
  chr7:50801205-50801235
  hypo
aaatcaccaaagaacgccccagaacacttt

SEQ ID NO: 73887 - DNA, 74 bp, Homo sapiens
  chr7:50821780-50821854
  hypo
gcctgcccgtgagcacggcactccctgattcagcttcgcagggctgccttcctgaagctcgcacacctgcctga

SEQ ID NO: 73888 - DNA, 30 bp, Homo sapiens
  chr7:50822184-50822214
  hypo
ccctctcctcactggcgccaggaccctctc

SEQ ID NO: 73889 - DNA, 31 bp, Homo sapiens
  chr7:50823199-50823230
  hypo
caactcctgaggctcacgaggagtgcccaga

SEQ ID NO: 73890 - DNA, 173 bp, Homo sapiens
  chr7:50853191-50853364
  hypo
ccctggcccatggtgacgggcactgacaggagatacatcctccaccccaaccccttcccagcactgtctggaggactgggagctcgtgacacaagccagccccacatgtggaaccattggcttcactcaattctaggcactgcccaccgcgggcaccccgcctcaccctgcac

SEQ ID NO: 73891 - DNA, 43 bp, Homo sapiens
  chr7:50905758-50905801
  hypo
ctctgaatggagtatgtgcagcggatgtgagtgagtgcgtgtg

SEQ ID NO: 73892 - DNA, 132 bp, Homo sapiens; identical to SEQ ID NO: 21431
  chr7:50935590-50935722
  hypo

SEQ ID NO: 73893 - DNA, 31 bp, Homo sapiens
  chr7:51082824-51082855
  hypo
tggcttgatgttgatacgggacatgggggcg

SEQ ID NO: 73894 - DNA, 31 bp, Homo sapiens; identical to SEQ ID NO: 21432
  chr7:51083467-51083498
  hypo

SEQ ID NO: 73895 - DNA, 31 bp, Homo sapiens; identical to SEQ ID NO: 21433
  chr7:51087890-51087921
  hypo

SEQ ID NO: 73896 - DNA, 31 bp, Homo sapiens
  chr7:51088280-51088311
  hypo
gacaaagacagtcagacgcatacagctttgc

SEQ ID NO: 73897 - DNA, 362 bp, Homo sapiens
  chr7:51092656-51093018
  hypo
gtgagagacacagtgacgccggctctctctcaacccactcccatgtgaccgcctcgcagctcctgcccacaggcaagcgtgtccctggatctacgctgcacctccaaccctctggccccattgaaatgcgcacacacagtcgccatcacctttctcagtctcgcagcccctgtgccggagcggatggcgtccatcaaggcttgccttgcgtctgcggtgttgctgagggtgcccgtgctgaacctggaggccgtccttggtgcagagagagcctgggagggtggagggggtggtgggggaatggctggtggggacagaagaccaaggtcttctagcagaggactttccgagccctgagcaga

SEQ ID NO: 73898 - DNA, 185 bp, Homo sapiens
  chr7:51098964-51099149
  hypo
tccaccgcacaaaagacggttcacgtgatccaggatttgcttgcatctgtgccttgcgctacagcagtcccctgcacctggcacctggcaagaaggagtgaagccatctggaggccaagcatgtgcacgtggctggaggctggtccacctcacctcaacactgcacagcccggctgttccttggc

SEQ ID NO: 73899 - DNA, 41 bp, Homo sapiens
  chr7:51111295-51111336
  hypo
cagctgccaactgacacggtctcctccgcctctgacagcac

SEQ ID NO: 73900 - DNA, 168 bp, Homo sapiens
  chr7:51126557-51126725
  hypo
aacgactttcgttcagcgtcatcttattatcccaggccggggctactgtctgtgcagattacaccttctcggcaggtctgcatgggttttctctggctgcgctcatgtcctcccatgtccccagactgcacatgttagggtcactggggtgtccgaattgtccccatg

SEQ ID NO: 73901 - DNA, 174 bp, Homo sapiens
  chr7:51130437-51130611
  hypo
tcagcctgccatcccaggagtcgtgcctgccagcaccagggactgcgtctgcagggggtggcatgagcaaggctgctggtcccggctcagctgtcctggaagaggctgtgagacacccgtggagagcgctggggcacacacaggagcaaccacggtgaagtcctgagtccttga

SEQ ID NO: 73902 - DNA, 31 bp, Homo sapiens; identical to SEQ ID NO: 21436
  chr7:51150748-51150779
  hypo

SEQ ID NO: 73903 - DNA, 31 bp, Homo sapiens; identical to SEQ ID NO: 21437
  chr7:51194780-51194811
  hypo

SEQ ID NO: 73904 - DNA, 70 bp, Homo sapiens
  chr7:51323447-51323517
  hypo
tggtgtcacctcaggaggttccgatgacctcacatcaaggtggtgtgccgatgcaggagcaatgcaggcc

SEQ ID NO: 73905 - DNA, 43 bp, Homo sapiens
  chr7:51374680-51374723
  hypo
tggccaacgatgaggacgtggacactgacgagagacgtcagag

SEQ ID NO: 73906 - DNA, 30 bp, Homo sapiens; identical to SEQ ID NO: 5579
  chr7:51793410-51793440
  hypo

SEQ ID NO: 73907 - DNA, 23 bp, Homo sapiens
  chr7:51819590-51819613
  hypo
cctttttttttttttttttgacg

SEQ ID NO: 73908 - DNA, 43 bp, Homo sapiens
  chr7:51873290-51873333
  hypo
tgcctaatctacttttattaccgtcaacaatcttctgtaattt

SEQ ID NO: 73909 - DNA, 242 bp, Homo sapiens
  chr7:52736844-52737086
  hypo
cccattccatgcctgaggagtcgggcaggcggcccgcccaggccacgctttccgtgtcctctggcccgcgaggctttgcatggacagaaccaacggcgagccgcgccctggggactccaggctgccgggatccagtcccgcctccagcgcaggctccaccctggggagctcccgagaggcctgcgcgctcctgccactctccaagcctgcaaggaagaaccgaaagacctttattacattcc

SEQ ID NO: 73910 - DNA, 95 bp, Homo sapiens
  chr7:53071289-53071384
  hypo
tccagagcccccatttgtaaacgaacctgtgtcatatttgataaacacgattctgggcacagccctaggccaccgctgagtgacaccaaagccct

SEQ ID NO: 73911 - DNA, 387 bp, Homo sapiens
  chr7:53103718-53104105
  hypo
tgcatgaaaggggggctgtgtcgtgcctggaacccaggacggacctggagcccggtgaccatcgggatcgcgccccctgagcgtcaggagagcccctggagatcccctggacagagagcccgccccgcaggccgccccgccgcccaggagctcctggacccctgcacccgggagactctgctgggggcgctcagccagtgccccaagggaagcgctaggttcgacgggccgttgtggttcgaggtctcagacagcaagggtggcaggcggaacctgcagccccggccctctgccttcaagcccctgagcaaaaatggagcggttgcttccttcgtgcccaggccagggcctctgaagccgagcctcggcccctggagcctcagtttt

SEQ ID NO: 73912 - DNA, 150 bp, Homo sapiens
  chr7:53155252-53155402
  hypo
aaaactgcctggcagccttgtcgctgcccatgtgcgcacatgacgcctccctgggcccttggaatgatcgagctcatgtaaagcttgaatcgcatatttgacatcatgctcaagcccgtggggctgggcggccagtgtggatgtacttac

SEQ ID NO: 73913 - DNA, 42 bp, Homo sapiens
  chr7:53364396-53364438
  hypo
cccatgctccaggccatggaccgatactgttaggaactgggc

SEQ ID NO: 73914 - DNA, 43 bp, Homo sapiens
  chr7:54332182-54332225
  hypo
atccatgaaatgtgttttttacgtaaatattattctttctaat

SEQ ID NO: 73915 - DNA, 30 bp, Homo sapiens
  chr7:54537654-54537684
  hypo
caactgcaccagccgcggtgttccagagcc

SEQ ID NO: 73916 - DNA, 30 bp, Homo sapiens
  chr7:54825232-54825262
  hypo
cctttacaaactgccgacttggctcaacaa

SEQ ID NO: 73917 - DNA, 675 bp, Homo sapiens
  chr7:55145872-55146547
  hypo
ggagaaggagcaaggcggcagggaggggatgaggaccaccctgtccatgggacaggccctgggccccgcacacaccccaagccccgcgtcccgcgtcctcactgtcctgggacaccccccaccccaccccaccgccacagcccagagcggtgccaggaagccgcctcgacgcagccgtatcttgaggctccagccccatccccagggtaccacgccacgtagagacactatttttcacttcgtgtttgtcactcctaaagcatgtgtgctagctgcaccaaccctgggatgcctcggtgcatagggtttatgtgcgtcctcctccttccctctgagctggtcccccgtggggaactgctgcccagactgacctgcgtccttccgcacgtgcaggaaaatgtccacgtgcacttgtcagggtgggggccacacgggcaccaccactgatcatctgtgggatcgagttactgcccatgcagatcccacgtgcagggcccagtcgctttggtgagagagtggacgctgtggtgactccacggtctgtggctgtgctcaggaggacagagaggggacatcctgagatggtttgggcagcccgcggatcctgtgcatgtccccagagcgtccactttctccatggagcagtggagtggcgttgctgagacagaaagttca

SEQ ID NO: 73918 - DNA, 51 bp, Homo sapiens; identical to SEQ ID NO: 21440
  chr7:55212335-55212386
  hypo

SEQ ID NO: 73919 - DNA, 61 bp, Homo sapiens
  chr7:55312948-55313009
  hypo
ggaagtctcctcagtcatcaacgcaggctcttgacctctcgtgcactatatgaccaaagtc

SEQ ID NO: 73920 - DNA, 38 bp, Homo sapiens; identical to SEQ ID NO: 21441
  chr7:55323528-55323566
  hypo

SEQ ID NO: 73921 - DNA, 59 bp, Homo sapiens
  chr7:55323990-55324049
  hypo
gagggtcactggtcctcaaagcggcatggcggcatggcgtggctggttctgccacatgc

SEQ ID NO: 73922 - DNA, 30 bp, Homo sapiens
  chr7:55410949-55410979
  hypo
agaaatcgcccaagcggctcaaggactccc

SEQ ID NO: 73923 - DNA, 30 bp, Homo sapiens
  chr7:55463507-55463537
  hypo
attacagtcatgcatcgcttcacatcatgg

SEQ ID NO: 73924 - DNA, 219 bp, Homo sapiens
  chr7:55464088-55464307
  hypo
ggtttatcgcagccccgcctacccggagcaagggagatgcctagctccagctggttctagctttcagcattggggaagggagatgatcagctgcagcttctgctggccatcctggccaactgagggcgtggggatgggaggcactggtgcagttcacagtccaaaggcacaggctggccagaaggttgagcctgctcacaggcgcgtgctccccagcac

SEQ ID NO: 73925 - DNA, 132 bp, Homo sapiens
  chr7:55473707-55473839
  hypo
tacagcctgcagctaatcatacgtagccttgggctagaagccagaaatattctgagggagtggaaagggagcaggaacgtatgccaagccaggtggccgaatgtatgtgtcggtgagctgcaggaggagtgg

SEQ ID NO: 73926 - DNA, 175 bp, Homo sapiens; identical to SEQ ID NO: 21442
  chr7:55506180-55506355
  hypo

SEQ ID NO: 73927 - DNA, 109 bp, Homo sapiens
  chr7:55541704-55541813
  hypo
aagtcagaccatgggaatctgcgcatgtgcggaaggagagcatgtagaacagaagcacaggccaggcctgcactgtctctcactgagcgctctcaactgccaggagggc

SEQ ID NO: 73928 - DNA, 30 bp, Homo sapiens; identical to SEQ ID NO: 21443
  chr7:55545173-55545203
  hypo

SEQ ID NO: 73929 - DNA, 230 bp, Homo sapiens
  chr7:55552438-55552668
  hypo
agaatactgtgaacaagtatgcgttcatactccctcagagtctcccaaagcaacccaccctactgacacaccgacttctggcctctagaactgggggaagacacgttcttgctgttttaagccaccagtctgtgtagtactttgtgagggcagccccgggacatgaatccagtacgcaccttctcctgctgtcaacagcacaagcccacgtcagcccacagcatgcaaga

SEQ ID NO: 73930 - DNA, 615 bp, Homo sapiens; identical to SEQ ID NO: 21445
  chr7:55553219-55553834
  hypo

SEQ ID NO: 73931 - DNA, 224 bp, Homo sapiens; identical to SEQ ID NO: 21446
  chr7:55557172-55557396
  hypo

SEQ ID NO: 73932 - DNA, 52 bp, Homo sapiens
  chr7:55570140-55570192
  hypo
ctctccgcattcttgcggctcatctgcggcgctggcccggctcccattgtgg

SEQ ID NO: 73933 - DNA, 200 bp, Homo sapiens
  chr7:55571327-55571527
  hypo
tggggcttttggaaggtgatccggttaccaaggtgaagccctcgtgacagggttgggggtctctgtaagaagagccatgaagagggcttgctgcttgctccactccccaccacgtgaggatggaacaagacagtgcctacgaaccacggacagagccctcaacagacaccagagctgacggaaccttggtcttggacttc

SEQ ID NO: 73934 - DNA, 43 bp, Homo sapiens; identical to SEQ ID NO: 21447
  chr7:55585936-55585979
  hypo

SEQ ID NO: 73935 - DNA, 138 bp, Homo sapiens
  chr7:55588551-55588689
  hypo
agaatttcaggctgtcctcaacgtaactggtctgagtgggccagacaccacggtgaggtcacctgctcatcccccagtgaggcaagcctggcaccgcagcagaggctgggccacgccgggctttccccatcccacacc

SEQ ID NO: 73936 - DNA, 43 bp, Homo sapiens
  chr7:55589956-55589999
  hypo
caacgtcacgccagtgacattcgatgggttatgaaaatgacat

SEQ ID NO: 73937 - DNA, 116 bp, Homo sapiens; identical to SEQ ID NO: 5587
  chr7:55593335-55593451
  hypo

SEQ ID NO: 73938 - DNA, 66 bp, Homo sapiens; identical to SEQ ID NO: 21449
  chr7:55619128-55619194
  hypo

SEQ ID NO: 73939 - DNA, 146 bp, Homo sapiens
  chr7:55923001-55923147
  hypo
gatcacaactttttaaaaactcatcctagtactgacgtttcaggtcgaccaattgttccagaatcgaaggagagacagaaacccacaggaaaagacaagatgggagcatcaacttttctaggcaagaaagacgcagacatcagtga

SEQ ID NO: 73940 - DNA, 83 bp, Homo sapiens
  chr7:55960567-55960650
  hypo
aaaaaaaaaaaaaaggcggagtaataggagacaaggcatacaaatttacccaggctggagtgcagtggtgtgatctctgctca

SEQ ID NO: 73941 - DNA, 21 bp, Homo sapiens
  chr7:56018234-56018255
  hypo
aatcccagcactttgggaagc

SEQ ID NO: 73942 - DNA, 81 bp, Homo sapiens
  chr7:56018494-56018575
  hypo
aaagaaagaaacccactgctgtttaaaggtaggtgtgtgtgtgcgtgtgtgtatgtttcaatgtatcgatagctacatctg

SEQ ID NO: 73943 - DNA, 106 bp, Homo sapiens
  chr7:56030888-56030994
  hypo
tgagccaccgtgcctggctcatttgtggctttttaaaaaatcttcctggaggacacatttttccctctatagcgccagccacccagatccacgcctttgcttaagt

SEQ ID NO: 73944 - DNA, 31 bp, Homo sapiens
  chr7:56031246-56031277
  hypo
catggccagtgcccaccggtgctgaaatgaa

SEQ ID NO: 73945 - DNA, 77 bp, Homo sapiens
  chr7:56031536-56031613
  hypo
ctctctttctttctttcgctacaggacgtcgtgtgtttgcccaggctggagtgcagtggcacgatcatagttcacta

SEQ ID NO: 73946 - DNA, 77 bp, Homo sapiens
  chr7:56031792-56031869
  hypo
ccaaagtgctgggatgacaggcgtgagctattgcgtccggccccagaatgcacttgttaaagcgttgtggggctttt

SEQ ID NO: 73947 - DNA, 152 bp, Homo sapiens
  chr7:56037251-56037403
  hypo
cttgtctgtttgagttgtgatcgtgtttgtctgtctgccctcaccagcaaactgagctcccgtgaagtcagggccaggttcatctgtgcatcgtcagtggctgacaggtgtagtgcacagtctgtaaataacagtgatcatattgccgggcg

SEQ ID NO: 73948 - DNA, 30 bp, Homo sapiens
  chr7:56075689-56075719
  hypo
tagtgtaggcatgtgcgtaactcctgggag

SEQ ID NO: 73949 - DNA, 166 bp, Homo sapiens
  chr7:56144505-56144671
  hypo
gcctccttgctctcctcgcaggtcaagtttacccatgggggaactggttccagccaaaccgcaccaacctgtggcaggtaagacctacgttcctcctttcaccaagcattgacagagacctgctggaggctgggcactgtgttgttaggccgcggcatccagaagg

SEQ ID NO: 73950 - DNA, 18 bp, Homo sapiens
  chr7:56172895-56172913
  hypo
gcccggccactttaatct

SEQ ID NO: 73951 - DNA, 31 bp, Homo sapiens
  chr7:56346702-56346733
  hypo
aagctgaaggacctggctgggcgcggtggct

SEQ ID NO: 73952 - DNA, 22 bp, Homo sapiens
  chr7:56357548-56357570
  hypo
cgagactccatctcaaaaaaaa

SEQ ID NO: 73953 - DNA, 33 bp, Homo sapiens
  chr7:56362764-56362797
  hypo
tctttttttttttttttgagacggagtctagct

SEQ ID NO: 73954 - DNA, 29 bp, Homo sapiens
  chr7:56363036-56363065
  hypo
gccaccgcgccaggccacacagctctagt

SEQ ID NO: 73955 - DNA, 24 bp, Homo sapiens
  chr7:56436533-56436557
  hypo
ctctctctgcgtgggatgtgccgg

SEQ ID NO: 73956 - DNA, 21 bp, Homo sapiens
  chr7:56443055-56443076
  hypo
agagtccgctgtgaggccgat

SEQ ID NO: 73957 - DNA, 105 bp, Homo sapiens
  chr7:56636908-56637013
  hypo
caggcatgagccaccgcgcccagccaccagatcctcttgatcacccatagtggcagaggctcccacagggtctgtgcgacggacggaagcagatagtgtctctga

SEQ ID NO: 73958 - DNA, 156 bp, Homo sapiens
  chr7:56665469-56665625
  hypo
cagccatgactcctacctacccgcagtttgagcaatcagaaacggagactgttcatctgtttatccaggctctatcagtcggtgtcatcatcggcaagcagggccaagcacatcaagcagctttctcgctttgccggagcttcaattaacattgct

SEQ ID NO: 73959 - DNA, 469 bp, Homo sapiens; identical to SEQ ID NO: 21454
  chr7:57247597-57248066
  hypo

SEQ ID NO: 73960 - DNA, 336 bp, Homo sapiens
  chr7:57324291-57324627
  hypo
agctcctcccacccaggaatgcggcacctcgagttgggattctcccctgaagattccccagaggtcccgcacaacttggggaaatgcggggctgtgggcgtggagctgtcccgggagggctggagcgagccaaagtcaccgaccagggaccaggcgatactggacgcccgggctcccggcggccgccttgctaccatcttgcaccttagcagactgagggcggagctgcgccgaagaggactcgaatcctggtccctgcaccgaccgcgaggaggcccgggttccccccacagccggttccgaccaggcgcctccggcacactcaccagtggttgt

SEQ ID NO: 73961 - DNA, 30 bp, Homo sapiens; identical to SEQ ID NO: 5590
  chr7:57351679-57351709
  hypo

SEQ ID NO: 73962 - DNA, 219 bp, Homo sapiens; identical to SEQ ID NO: 21456
  chr7:57706363-57706582
  hypo

SEQ ID NO: 73963 - DNA, 278 bp, Homo sapiens; identical to SEQ ID NO: 21457
  chr7:57706641-57706919
  hypo

SEQ ID NO: 73964 - DNA, 142 bp, Homo sapiens
  chr7:57711529-57711671
  hypo
atgtgtttcacaggaggcatacggggcgacggcgaaacacacggtgttgtccaggtatgtgccggtggaaggggggaacgagtgacctgtccatcaatgtccaggaaaatcgaagaacaccggggacctggtgggttggggg

SEQ ID NO: 73965 - DNA, 40 bp, Homo sapiens
  chr7:57712630-57712670
  hypo
gggccaggccttcacacacccaaagcggatccgcggcagt

SEQ ID NO: 73966 - DNA, 69 bp, Homo sapiens; identical to SEQ ID NO: 21458
  chr7:57878612-57878681
  hypo

SEQ ID NO: 73967 - DNA, 150 bp, Homo sapiens
  chr7:63027889-63028039
  hypo
cacatgcatgcacacacgtgcatgcacacacgtgcatgcacacgggcacacacatgcacaaacatgctcacccgggcgtccacgtgcacacctggccccatgctcacgcctgcaggagcgctcgcatgcacacaacgcacatggtctcca

SEQ ID NO: 73968 - DNA, 150 bp, Homo sapiens
  chr7:63392779-63392929
  hypo
accacagctgcctccaggcctcggcctggtttcaccgcattctcgggattacacccctgacccccaaatcccgccccccaccagcgcttctcccactattggcttaactggcccgctggccctccctacgcccaggagagggtgacaccc

SEQ ID NO: 73969 - DNA, 36 bp, Homo sapiens; identical to SEQ ID NO: 21459
  chr7:63423513-63423549
  hypo

SEQ ID NO: 73970 - DNA, 35 bp, Homo sapiens; identical to SEQ ID NO: 21460
  chr7:63423788-63423823
  hypo

SEQ ID NO: 73971 - DNA, 160 bp, Homo sapiens; identical to SEQ ID NO: 21461
  chr7:63569122-63569282
  hypo

SEQ ID NO: 73972 - DNA, 373 bp, Homo sapiens; identical to SEQ ID NO: 21462
  chr7:63652609-63652982
  hypo

SEQ ID NO: 73973 - DNA, 45 bp, Homo sapiens; identical to SEQ ID NO: 21463
  chr7:63666705-63666750
  hypo

SEQ ID NO: 73974 - DNA, 45 bp, Homo sapiens; identical to SEQ ID NO: 21464
  chr7:63667109-63667154
  hypo

SEQ ID NO: 73975 - DNA, 170 bp, Homo sapiens
  chr7:63757330-63757500
  hypo
gctgtgtgaacatatacgccacaatcacacctgcgggaaggaccaggaataaatttcacaattctacatatttcccagctttaggtctgagagtcaacacctcttgtgagttgcatccaaatacacgagacacagtcttaacatcggacaggatccgtgcatgagagctc

SEQ ID NO: 73976 - DNA, 438 bp, Homo sapiens; identical to SEQ ID NO: 5594
  chr7:63767573-63768011
  hypo

SEQ ID NO: 73977 - DNA, 104 bp, Homo sapiens; identical to SEQ ID NO: 21466
  chr7:63864995-63865099
  hypo

SEQ ID NO: 73978 - DNA, 43 bp, Homo sapiens
  chr7:63867872-63867915
  hypo
aagaaattttccttgcttagccgatttgtcctccctctctgct

SEQ ID NO: 73979 - DNA, 27 bp, Homo sapiens
  chr7:63925194-63925221
  hypo
aagagcgagacttcatttcaaaaaaaa

SEQ ID NO: 73980 - DNA, 438 bp, Homo sapiens
  chr7:64146483-64146921
  hypo
agacctcctaaccgtcgaaaaaggtgggctatgcacctttttaggggaagattgtttttccaccaaccagtctggactagtacgagatgctgcctcgcagttaaatgaaaaggcttctaaaatcagacaatgtctttcagacttttaacaccaatctttggagctgggcgttgtggcttctccctatagctgggcccctcatttccatcattctccttctcctatttggaccctgcctcttccgtctagcctctcagttcctacaaaatctcattcaagctattaccaatcaatctatgcgacaaatgctactcctaactgcccctcaatgtcacccccaccccaagatctctctcccaattaggagtccatgccgccccaagtcccgctcgaagaatccctgagaaacatcaccccgtccacttcttttcttattaa

SEQ ID NO: 73981 - DNA, 531 bp, Homo sapiens
  chr7:64330353-64330884
  hypo
ttctttagatcagaccggctatgcccgtactattttcccctgcttaggcaggctgacatccctgacagctgggcgcccgagccggcctcgcgaatgcacatacgccagttgcggggcaccaggcacgagtggtgagctgcggctgtcgtcacagtgaacgccaccgttgcctggccacgggtccctgcggcttggcaaaccagtagacttctgtggacgtgcatcgccgctggactctcacccgtcttctctgagagatccacgggatagtcccctgatcctagaattgggcagggccgacccagggtgaagaaacctcaagcggactcccagggctgcagatcgaaatccctaaggatcccaggggacccgcaggatgtgtcaggcatgcctaggcggtgtgggggtgagtctatttgatagttgccccccggtgatttctaggtaaaccctgcctgtgtttcccggggctgctctctccccggagggacttcctggtggagcagaaccgggttgcctcagaatgtgctg

SEQ ID NO: 73982 - DNA, 536 bp, Homo sapiens
  chr7:64332669-64333205
  hypo
actcctgcacacagcctctttcgggaattgaatcagaagagcagtttccagcgcccacctcacagtctcaaagcgcctcctactccagcagggtcgaccaccgagacgccccaaagaggctgtacggtcaagactttaagggtccctcggtgtttgtcataggcagccttttccccgagaccaggccggctctgcttgtaccattttcctctgcttaggcaggctgacagccctgacagccaggtgccccagcctacctcgcgaatgcccatgctccagtcgcaggacacctggcggaagcggggagccctggctcgcatcacagtgaaggccacctttgcctggtgacgagtccctgcggcttggcggagcaggagacctctgtgaacatgcgtcggtgttggactcacacctgtcttcactggggaatccaccggatagtcccgcgttcctagaagtggtcagtgccgacccagcctgaagaaacgtcaagcggagccccggggatgcagcacgaaatcactaaggatttcaaa

SEQ ID NO: 73983 - DNA, 382 bp, Homo sapiens
  chr7:64345084-64345466
  hypo
gtattcccttctccctgggaccggattcttgcacacagactctttcgggaatggagtccaaagagaagttcccagcgcccacctcacattctcgaatcgccttttcctccagcgggacccgactaatgagacggcccgaggatgccctatggtagttacttttaggcttccacagtgattgtcgcaggcagcattttccctagactaggccggctctgccttcccattttcctctgctcaggcaggctgacagccctgacagccctgacagcctggccccagcacctgcctcgcggattcgcatgcgccagtcgcgggacacctgtcgcgagcggtgagccttggctcgcgtgtcagtgtatgccaccgttgcctggtgaca

SEQ ID NO: 73984 - DNA, 790 bp, Homo sapiens; identical to SEQ ID NO: 44243
  chr7:64349041-64349831
  hypo

SEQ ID NO: 73985 - DNA, 36 bp, Homo sapiens
  chr7:64358372-64358408
  hypo
ggtattacaggcgtgagccaccgcacccggcctcat

SEQ ID NO: 73986 - DNA, 30 bp, Homo sapiens
  chr7:64358739-64358769
  hypo
cgtttgagtgttcttcgtttgagtagtact

SEQ ID NO: 73987 - DNA, 30 bp, Homo sapiens; identical to SEQ ID NO: 21473
  chr7:64373789-64373819
  hypo

SEQ ID NO: 73988 - DNA, 30 bp, Homo sapiens; identical to SEQ ID NO: 21474
  chr7:64374109-64374139
  hypo

SEQ ID NO: 73989 - DNA, 144 bp, Homo sapiens; identical to SEQ ID NO: 21475
  chr7:64458252-64458396
  hypo

SEQ ID NO: 73990 - DNA, 139 bp, Homo sapiens
  chr7:64478037-64478176
  hypo
ggtgatagagcgagactccgtctcagaaaaaagcaaaacaagttagagaagggttttttttttaacttcattttgaaattgtgaagacaggcagtgagagtgagtgagttgtccaaattcaggccgcaagctggagagc

SEQ ID NO: 73991 - DNA, 30 bp, Homo sapiens; identical to SEQ ID NO: 5597
  chr7:64691764-64691794
  hypo

SEQ ID NO: 73992 - DNA, 30 bp, Homo sapiens; identical to SEQ ID NO: 21477
  chr7:64711253-64711283
  hypo

SEQ ID NO: 73993 - DNA, 39 bp, Homo sapiens
  chr7:64824059-64824098
  hypo
gcgtgagtcaccgcacccggcaataaacactttttttta

SEQ ID NO: 73994 - DNA, 43 bp, Homo sapiens; identical to SEQ ID NO: 21478
  chr7:64851807-64851850
  hypo

SEQ ID NO: 73995 - DNA, 412 bp, Homo sapiens
  chr7:64895202-64895614
  hypo
atgatggacatgtgtgtgacacgtgtttgactcgaccaaattttttcacacctggctgacactgtgcgaaacctgacggacatgaatgagacatgtgtgtgacatatgactgacacgtgtgtgacatgtgaccaacacgtgggtcacaagtaattgacgtggtggacacgtgtataacgtgacatgtgactgacaggtttgtgatgtgaccaacacgtgactgacatgtgtgacatgtgattgatgtgacacgtggctgacatgtgtgacacgtgactgacacatgactgacgcgtcttttaaaagtaactgacgtaatagacatatgacttacacatgtgacacgtgaaaaattaacacgactgacacgtttgcgacatgtgactgaaacgtgatggatacatgtgtgacc

SEQ ID NO: 73996 - DNA, 2 bp, Homo sapiens
  chr7:64973912-64973914
  hypo
cc

SEQ ID NO: 73997 - DNA, 148 bp, Homo sapiens; identical to SEQ ID NO: 5600
  chr7:64974033-64974181
  hypo

SEQ ID NO: 73998 - DNA, 741 bp, Homo sapiens; identical to SEQ ID NO: 44252
  chr7:64974273-64975014
  hypo

SEQ ID NO: 73999 - DNA, 117 bp, Homo sapiens; identical to SEQ ID NO: 44253
  chr7:65037618-65037735
  hypo

SEQ ID NO: 74000 - DNA, 29 bp, Homo sapiens
  chr7:65236286-65236315
  hypo
atgaggctccctgggccgtgctatcccgg

SEQ ID NO: 74001 - DNA, 24 bp, Homo sapiens
  chr7:65410591-65410615
  hypo
tccgtctcaaaaaaaaaaggtgga

SEQ ID NO: 74002 - DNA, 31 bp, Homo sapiens; identical to SEQ ID NO: 21482
  chr7:65439501-65439532
  hypo

SEQ ID NO: 74003 - DNA, 105 bp, Homo sapiens
  chr7:65441720-65441825
  hypo
ccagcctgggtaacatagggaaaccacttcttccctaaaaatacaaacaatcagccggtcgtggtggtgcgtgcttgcagccccggcagccccagctacttggga

SEQ ID NO: 74004 - DNA, 100 bp, Homo sapiens
  chr7:65442035-65442135
  hypo
cagctccttaggaattcatcacggaagactcccagaaagggagtttccccagtaataatcggtgctgtctcatccttacgagcagcctgtcctgaattct

SEQ ID NO: 74005 - DNA, 39 bp, Homo sapiens; identical to SEQ ID NO: 5604
  chr7:65541036-65541075
  hypo

SEQ ID NO: 74006 - DNA, 23 bp, Homo sapiens
  chr7:65589331-65589354
  hypo
gcgagactccttctcaaaaaaaa

SEQ ID NO: 74007 - DNA, 30 bp, Homo sapiens; identical to SEQ ID NO: 21484
  chr7:65610394-65610424
  hypo

SEQ ID NO: 74008 - DNA, 108 bp, Homo sapiens
  chr7:65611004-65611112
  hypo
aagttctgttgcttctgtcttcgttcttgcttctctcccccgtgtactgcgttgatttctgccattatttcttcacgcggctcttgcggttatcctctccccattctc

SEQ ID NO: 74009 - DNA, 160 bp, Homo sapiens
  chr7:65647878-65648038
  hypo
cgtgagccaccgcgccaggcctctcatggcatttttgcagctctaaagagcggcaagagaacgtgccccaaagtgcaagcccttttcaagcctctcctggcttcacaattgctaagtttccattgaccaatgcaagaccgaatgaccaagcccagagtcc

SEQ ID NO: 74010 - DNA, 25 bp, Homo sapiens
  chr7:65772396-65772421
  hypo
gcccggcccacttcattcactttaa

SEQ ID NO: 74011 - DNA, 25 bp, Homo sapiens
  chr7:65819313-65819338
  hypo
caggtgcggtggttcacgcctgtaa

SEQ ID NO: 74012 - DNA, 31 bp, Homo sapiens
  chr7:65841451-65841482
  hypo
ccactttgggccacatcgaggaaggcagctt

SEQ ID NO: 74013 - DNA, 31 bp, Homo sapiens
  chr7:65841862-65841893
  hypo
gaggcagccactggaccgggggaggccgact

SEQ ID NO: 74014 - DNA, 148 bp, Homo sapiens; identical to SEQ ID NO: 21485
  chr7:65877890-65878038
  hypo

SEQ ID NO: 74015 - DNA, 121 bp, Homo sapiens
  chr7:65879508-65879629
  hypo
tgggtgacaggacagagtgagatcatgtctttaaaaaaatatatatgcaagtgacagcttttcttccagtgctaatgctcaaactgagtaaagtaattgggccggccccgtggctcagggg

SEQ ID NO: 74016 - DNA, 22 bp, Homo sapiens
  chr7:65879868-65879890
  hypo
cgacagagtgagacactgtgtc

SEQ ID NO: 74017 - DNA, 29 bp, Homo sapiens
  chr7:65937775-65937804
  hypo
ttttttttttttgagacggagtctcactc

SEQ ID NO: 74018 - DNA, 29 bp, Homo sapiens
  chr7:65938043-65938072
  hypo
caggcatgagccaccgtgccaggccctct

SEQ ID NO: 74019 - DNA, 205 bp, Homo sapiens
  chr7:65939522-65939727
  hypo
gccctgagcggactgccggacatctcgcagacttcgggcagcgatcgtggcggccgcctccccggggctccacggccgacctgccgcctgccgcggccatccccggcccactcctgccaggcccccgaccggagccccggaggcacccgctctgagcggccgcgcagcccggctgcatggagcccagcgcggtgctccggctggc

SEQ ID NO: 74020 - DNA, 30 bp, Homo sapiens
  chr7:65967818-65967848
  hypo
acacacaccccacacgtggccccacacatg

SEQ ID NO: 74021 - DNA, 30 bp, Homo sapiens
  chr7:65968145-65968175
  hypo
cgggtccccttgtgcgatctgggccctcag

SEQ ID NO: 74022 - DNA, 78 bp, Homo sapiens
  chr7:65969577-65969655
  hypo
ttgtgaagaggagaggcgcactgggcgtcaataactttaaaaaggggggaaaatatcagttcccgagtctccatgcgt

SEQ ID NO: 74023 - DNA, 30 bp, Homo sapiens
  chr7:66021461-66021491
  hypo
ggctgcctgaccttcgagcgctttgtggcc

SEQ ID NO: 74024 - DNA, 30 bp, Homo sapiens; identical to SEQ ID NO: 21491
  chr7:66022059-66022089
  hypo

SEQ ID NO: 74025 - DNA, 37 bp, Homo sapiens
  chr7:66064298-66064335
  hypo
tgctgggactacaggcgtgagccactgcacccagcca

SEQ ID NO: 74026 - DNA, 41 bp, Homo sapiens
  chr7:66076555-66076596
  hypo
taataattactgaaaattggccgggcgcggtggctcacgcc

SEQ ID NO: 74027 - DNA, 138 bp, Homo sapiens; identical to SEQ ID NO: 5606
  chr7:66094048-66094186
  hypo

SEQ ID NO: 74028 - DNA, 30 bp, Homo sapiens
  chr7:66105645-66105675
  hypo
agctacttgggcacacgcctgtagtccagg

SEQ ID NO: 74029 - DNA, 30 bp, Homo sapiens
  chr7:66106110-66106140
  hypo
acgttctgagatatgcgctctctctattgt

SEQ ID NO: 74030 - DNA, 30 bp, Homo sapiens; identical to SEQ ID NO: 21493
  chr7:66115943-66115973
  hypo

SEQ ID NO: 74031 - DNA, 39 bp, Homo sapiens
  chr7:66150977-66151016
  hypo
attataggccaggtgcggtggctcacgcctgtaatccca

SEQ ID NO: 74032 - DNA, 19 bp, Homo sapiens
  chr7:66214949-66214968
  hypo
gactccatctcaaaaacaa

SEQ ID NO: 74033 - DNA, 189 bp, Homo sapiens
  chr7:66265793-66265982
  hypo
agtagggcatggttcactgggcgacagctggtagcgagtgtttgtgtgacccatcagtggtgaaagtagaggtgggtggcccaagggatcaggaaagcatagctgtgttccatgaatagtgggactcgataggagaggctgcccgttaagttacacagtgtgggtcacgttcttctagggcaggaggct

SEQ ID NO: 74034 - DNA, 141 bp, Homo sapiens; identical to SEQ ID NO: 21495
  chr7:66293248-66293389
  hypo

SEQ ID NO: 74035 - DNA, 30 bp, Homo sapiens; identical to SEQ ID NO: 21496
  chr7:66369061-66369091
  hypo

SEQ ID NO: 74036 - DNA, 30 bp, Homo sapiens; identical to SEQ ID NO: 21497
  chr7:66370315-66370345
  hypo

SEQ ID NO: 74037 - DNA, 31 bp, Homo sapiens; identical to SEQ ID NO: 21498
  chr7:66412369-66412400
  hypo

SEQ ID NO: 74038 - DNA, 340 bp, Homo sapiens
  chr7:66423873-66424213
  hypo
cactaagcctgtatgcccagccgcaggtgcccagcccgctctgcggtctcctgttgcagagctctggcccgctctagacctcctttgccaagacagtgcatcctctgcagtttccatagctaaagggagatcgtattcactaatgtgaatccttcccctttccagcagccagaggctctgtgtcccttcccttccctccccagcaggtgctggggtcgcaaggtcagtctcatggttgaggaaggtgctactcaatgagctctttgttccttctgcctccacctctccctgcctcctgcctggaacaggcaaactctgcgtggagcgcagtgttatttcc

SEQ ID NO: 74039 - DNA, 30 bp, Homo sapiens
  chr7:66424413-66424443
  hypo
gttccctcacactcacggatctgtaaggat

SEQ ID NO: 74040 - DNA, 37 bp, Homo sapiens; identical to SEQ ID NO: 21499
  chr7:66626983-66627020
  hypo

SEQ ID NO: 74041 - DNA, 32 bp, Homo sapiens
  chr7:66694224-66694256
  hypo
ttaagaatttagaatataggccgggtgcggtg

SEQ ID NO: 74042 - DNA, 79 bp, Homo sapiens; identical to SEQ ID NO: 21500
  chr7:66766507-66766586
  hypo

SEQ ID NO: 74043 - DNA, 23 bp, Homo sapiens
  chr7:66844111-66844134
  hypo
gacagagtttcactcttgttgcg

SEQ ID NO: 74044 - DNA, 181 bp, Homo sapiens
  chr7:66847452-66847633
  hypo
gactccatctcaaaaaaaaaaaaaaattgtttcaatcctactttccatatcatgtctgttgtatgagtctttggaagattaaataaggtgctgcatgagatgggctcagttcagtgtctcctcgtggtaaaagactcagtgagtgctattattattagctatgatttatttatttattatt

SEQ ID NO: 74045 - DNA, 30 bp, Homo sapiens
  chr7:66877601-66877631
  hypo
accgcgcccggcctggaaaattcttttaac

SEQ ID NO: 74046 - DNA, 142 bp, Homo sapiens
  chr7:66880055-66880197
  hypo
gatttagcatctgatgagggacgggtttccggttcatagacagcaaattcttgctgtgtcctcacataatgaaaaaggcaagggttctctctcaggtctcttttataaaggccgtaatcccattcatgaagcctccaccccc

SEQ ID NO: 74047 - DNA, 25 bp, Homo sapiens
  chr7:66935893-66935918
  hypo
ttttttttttgttttttgagacgga

SEQ ID NO: 74048 - DNA, 22 bp, Homo sapiens
  chr7:66946467-66946489
  hypo
cgcaagccactacaccccagcc

SEQ ID NO: 74049 - DNA, 22 bp, Homo sapiens
  chr7:66948786-66948808
  hypo
ctggccaggtgcagtagctgac

SEQ ID NO: 74050 - DNA, 141 bp, Homo sapiens
  chr7:66960264-66960405
  hypo
acagagcgagactccatctcaagaaaaccaaaacccaaaaaactctgtttaatgtaatttgtcaaaacttttttttttttcgtaagtgtctctacccagacgaggcaaaatgtctcctccgtgccaggcatgaagctgcat

SEQ ID NO: 74051 - DNA, 22 bp, Homo sapiens
  chr7:66961153-66961175
  hypo
cgacagagtgagactctgtctc

SEQ ID NO: 74052 - DNA, 242 bp, Homo sapiens
  chr7:67006547-67006789
  hypo
ctttgggccttttataaataccgcagatccttaaataacatgaatagtaacatctattcatcgcgtactctgtatcacgcagtgtattaaaagccttctgtctaataactcatttaaacctttaagaatcctacaaggtcggtattattatcgccagtcccagttttacagatgaggaaacggaggcccagaaaaattaagtaatgtacccaaggttacccgggcagtaaatgatggtgtct

SEQ ID NO: 74053 - DNA, 33 bp, Homo sapiens; identical to SEQ ID NO: 21502
  chr7:67027847-67027880
  hypo

SEQ ID NO: 74054 - DNA, 17 bp, Homo sapiens
  chr7:67047346-67047363
  hypo
caaaaaaaaaaaaaaaa

SEQ ID NO: 74055 - DNA, 171 bp, Homo sapiens
  chr7:67067245-67067416
  hypo
ctgctaactctcctatgttcccgcaagactatgcagaagttgttttactcactcttattgagtacggctgcaatttttgtgagcatatctatctctaaactctggggacaacgtggctgaccattgcgattccagacccaaggttgtcgcggacctaagggaagaaaggag

SEQ ID NO: 74056 - DNA, 18 bp, Homo sapiens
  chr7:67074362-67074380
  hypo
ttgttttttgagatggag

SEQ ID NO: 74057 - DNA, 81 bp, Homo sapiens
  chr7:67103481-67103562
  hypo
ggctttaaaagagtgaactgtcgtgaagtttattctgatgccaaaagggggtttgagagagacttaaagagcagttgtgac

SEQ ID NO: 74058 - DNA, 134 bp, Homo sapiens
  chr7:67113979-67114113
  hypo
tgtttgtcttctgaaaggtaacgggttggaaagatgcgttggatgaggatatcatgttggcagagtctcgtatgaaggaaccatttgagaaatggcgccagaggtggataagcgttgggatatggaacttcagc

SEQ ID NO: 74059 - DNA, 28 bp, Homo sapiens
  chr7:67148162-67148190
  hypo
cactcccgtctcaaaaaaaaaaaaaaat

SEQ ID NO: 74060 - DNA, 19 bp, Homo sapiens
  chr7:67151928-67151947
  hypo
ctcaaaacaaaaaacaaaa

SEQ ID NO: 74061 - DNA, 37 bp, Homo sapiens
  chr7:67180646-67180683
  hypo
ttttgtttttgttttttttttcgctgttgttgttgta

SEQ ID NO: 74062 - DNA, 111 bp, Homo sapiens
  chr7:67202218-67202329
  hypo
tttactgaacttgatgccttccgccatatgggatacctggggtgctgtcagagagaggggctgtcaacatgattgaagtgaagactgggcgtgaatcataagagaaatcag

SEQ ID NO: 74063 - DNA, 43 bp, Homo sapiens
  chr7:67274833-67274876
  hypo
catagagtataaattagatcacgtcacttctctgcttaatact

SEQ ID NO: 74064 - DNA, 99 bp, Homo sapiens
  chr7:67318538-67318637
  hypo
aatgggcccagcatcaaaatgcgggaggaacagaaacaaaattcagactccacgctgacatcagctgggaagttccatcagacaaaatccaaagtctga

SEQ ID NO: 74065 - DNA, 106 bp, Homo sapiens
  chr7:67322984-67323090
  hypo
aattaaaacaaaagaagaagacggatggtgtgcaccacttgcagataagagctgctggcgaaaagaggtgacctgaagagtccgcgttccattttgtagcttacct

SEQ ID NO: 74066 - DNA, 121 bp, Homo sapiens
  chr7:67353382-67353503
  hypo
tctgcccggtaggccaactgactgggaagtgaggagcacctcttcccggccgccaactgtctgggaaacgtggagaacttctgcacggctgccaattgtcagggaagtgaggagagcctct

SEQ ID NO: 74067 - DNA, 92 bp, Homo sapiens
  chr7:67355826-67355918
  hypo
aaccatcctggaagtgaagagcgcctctgcccatctgtccacagtccgggaagtgaggagcctctctccccggctgccaactgtctgggaag

SEQ ID NO: 74068 - DNA, 99 bp, Homo sapiens
  chr7:67375595-67375694
  hypo
gaaggcagaggtgggaggacacgtgtgctaatctttatgcctcattattttttgggttttttgaaatagagtcttaccctgtcgcccaggctagagtgc

SEQ ID NO: 74069 - DNA, 34 bp, Homo sapiens
  chr7:67388759-67388793
  hypo
gaaaatacttgtggccaggtgcggtggctcacgc

SEQ ID NO: 74070 - DNA, 31 bp, Homo sapiens
  chr7:67405317-67405348
  hypo
tttttctttgagatggagtctcgctttatca

SEQ ID NO: 74071 - DNA, 421 bp, Homo sapiens
  chr7:67405587-67406008
  hypo
cgtgagccaccgcgcccggccaccacgtactctttgtgtcagttcatttcatttcaaatcatttcagttatttcctcaaaattcatttgttgagtctataagtgcaaatcaagctttcaaataatacaacgcaaaggacattagaacaaccattaggtgaattatacttacattattaaatatttttctttttggtgactaagggaaaaggctgagaatgctggactcttcatggtgccaggtctgtgcaggcaagatgagctgccgataaacgacaacagtgacagaaactttaaccacaaaaaccatcgctctcacatgtgctggctctgtgctactaagcacgcatgtgcattatatgctttgatcctcaataagacacattaaagctggtttttgtttgtttgtttgttttgagatg

SEQ ID NO: 74072 - DNA, 25 bp, Homo sapiens
  chr7:67408839-67408864
  hypo
tttttttgagacagagtctcacgcg

SEQ ID NO: 74073 - DNA, 91 bp, Homo sapiens
  chr7:67417183-67417274
  hypo
tcctccttcagggaagacattcgttttaggaaatcttgaatggttattcatgcgaacaccttcttccttttttttttgagttggagtcttg

SEQ ID NO: 74074 - DNA, 88 bp, Homo sapiens
  chr7:67424154-67424242
  hypo
tctgggtaacaagagcgacactttgtctcaaaaaaataaaataaaataaaataatcagggcaccatcggagaagaaagctgaaatcct

SEQ ID NO: 74075 - DNA, 43 bp, Homo sapiens
  chr7:67451826-67451869
  hypo
gtctgtggctttattttggaacgtacagatcatagtaagcagg

SEQ ID NO: 74076 - DNA, 40 bp, Homo sapiens
  chr7:67534655-67534695
  hypo
ttttttgtgtggacagagtctcgctctgtcaccaggatgg

SEQ ID NO: 74077 - DNA, 27 bp, Homo sapiens
  chr7:67539901-67539928
  hypo
caccgcgcccagcctcttctggcatct

SEQ ID NO: 74078 - DNA, 116 bp, Homo sapiens
  chr7:67540135-67540251
  hypo
ggaaaatggtcattgtgtagtcgctagggatgcagacaggcctcacccgcaaggctgggcggagtggctgcatcaccctgaggttctcattcttcgcttagaaggaggtatctacc

SEQ ID NO: 74079 - DNA, 30 bp, Homo sapiens
  chr7:67543978-67544008
  hypo
tccagtgggcagtaccgtggtttctgcagc

SEQ ID NO: 74080 - DNA, 22 bp, Homo sapiens
  chr7:67562868-67562890
  hypo
agtctagctggaggtcagtggc

SEQ ID NO: 74081 - DNA, 43 bp, Homo sapiens
  chr7:67563167-67563210
  hypo
tactaatttagagtgactttacggctgtccacctccttaccac

SEQ ID NO: 74082 - DNA, 35 bp, Homo sapiens
  chr7:67579759-67579794
  hypo
ggtggctcacacctgtaatcccggcgctttaggag

SEQ ID NO: 74083 - DNA, 36 bp, Homo sapiens
  chr7:67637854-67637890
  hypo
tgcaggccttagtacgaagcatctaacattgccagg

SEQ ID NO: 74084 - DNA, 43 bp, Homo sapiens
  chr7:67642883-67642926
  hypo
gtccagaggcaaagaacagctcggtgtgggcacttaggccagc

SEQ ID NO: 74085 - DNA, 109 bp, Homo sapiens
  chr7:67648537-67648646
  hypo
gacagccacttgtgcactgatcgcaccgcttgggggaggtggtaggacgggagggctctcttgggtttccagagcctgagctggtatcgccaccattccagcttcaagg

SEQ ID NO: 74086 - DNA, 22 bp, Homo sapiens
  chr7:67655690-67655712
  hypo
cgaaactctgtgtcaaaaagaa

SEQ ID NO: 74087 - DNA, 40 bp, Homo sapiens
  chr7:67659327-67659367
  hypo
tacaggcgtgagccaccgcgtcaggcccatagttcatcct

SEQ ID NO: 74088 - DNA, 31 bp, Homo sapiens
  chr7:67663623-67663654
  hypo
atgagccaccgcacccaccctttgtataact

SEQ ID NO: 74089 - DNA, 43 bp, Homo sapiens
  chr7:67665220-67665263
  hypo
cctcctttcagtcatccatcacgcaggcccttccatgctaaca

SEQ ID NO: 74090 - DNA, 122 bp, Homo sapiens
  chr7:67737922-67738044
  hypo
caaaagcagtgcagcaatgggcgcatgctcgtgggattcagtggtttgatcaggttccccagtattcataagaagctggcttggtaaaacagtggaatagcgctttgaagactcagttacac

SEQ ID NO: 74091 - DNA, 45 bp, Homo sapiens; identical to SEQ ID NO: 21507
  chr7:67812979-67813024
  hypo

SEQ ID NO: 74092 - DNA, 31 bp, Homo sapiens
  chr7:67862011-67862042
  hypo
ttttttaatttttttttgagacggagtctca

SEQ ID NO: 74093 - DNA, 121 bp, Homo sapiens
  chr7:68000298-68000419
  hypo
cccggcgcaccctctgcagctgctggcggaggtgctaagcccctccctgccagggctggcggggctggctggtggctccgactgtggggccctctgagcccacgcccacccgaaacttgtg

SEQ ID NO: 74094 - DNA, 284 bp, Homo sapiens
  chr7:68003148-68003432
  hypo
agagcttcttgatccctaacccgatactgggagaagagaaaacgctgcaaaactggtgcaaactggaataggtgaccgttagttgccttccaattattaacatatcattatgatgctaaaactctctcccctgaaaaaagatctccactgttttgtgtacatgtgatgcaggaagacgtgtttatgaattatgcctgtgtgtctggagtcccaccggacacaggctcacattcttctcttgccctgaacctagtccttaaaaatcccatgcttttggccaggcg

SEQ ID NO: 74095 - DNA, 82 bp, Homo sapiens
  chr7:68008894-68008976
  hypo
acagcagtattactggggcatcggttttacctacaatttaaatacgcacttgctagtattcattctaaagtaataagcaaag

SEQ ID NO: 74096 - DNA, 91 bp, Homo sapiens
  chr7:68058865-68058956
  hypo
ctgctatgttcagggctgctacgttcaggtctgttctaggagctttctttttctctcttttttgtttttgtttttgagacggagtctcgca

SEQ ID NO: 74097 - DNA, 131 bp, Homo sapiens
  chr7:68111545-68111676
  hypo
gaatacagctgattgaagacacggtagacgcagaagacaaccagtggcagacaagtaaggtagagcagagttgaatgtcttgtcacttgcacggtgtatttgtaactaacgccttgatggaatcaattaga

SEQ ID NO: 74098 - DNA, 56 bp, Homo sapiens; identical to SEQ ID NO: 21508
  chr7:68185671-68185727
  hypo

SEQ ID NO: 74099 - DNA, 43 bp, Homo sapiens
  chr7:68263364-68263407
  hypo
aattgaccagggagagcagtccggtgcctcaaggtgaggcaca

SEQ ID NO: 74100 - DNA, 22 bp, Homo sapiens
  chr7:68263867-68263889
  hypo
gggtgggacggaatctcgctcc

SEQ ID NO: 74101 - DNA, 29 bp, Homo sapiens
  chr7:68269766-68269795
  hypo
tgtttatttgtttgtttgagacggagtct

SEQ ID NO: 74102 - DNA, 45 bp, Homo sapiens
  chr7:68303944-68303989
  hypo
tttttattttgcaccaggttccgcgcattatgtagccagaagaag

SEQ ID NO: 74103 - DNA, 42 bp, Homo sapiens; identical to SEQ ID NO: 21509
  chr7:68418435-68418477
  hypo

SEQ ID NO: 74104 - DNA, 101 bp, Homo sapiens; identical to SEQ ID NO: 21510
  chr7:68418716-68418817
  hypo

SEQ ID NO: 74105 - DNA, 81 bp, Homo sapiens
  chr7:68564600-68564681
  hypo
gttctcctaataaggtggatgcggtgacttcatgagagaaacgcatcaatcaaatccactggacttgagggccgggtgcgg

SEQ ID NO: 74106 - DNA, 31 bp, Homo sapiens
  chr7:68678433-68678464
  hypo
ccaatcaacaaaaacacggtcgatctcaggt

SEQ ID NO: 74107 - DNA, 96 bp, Homo sapiens
  chr7:68960049-68960145
  hypo
tagctgagtgtcaacctaggacgaagagtcggaagccctgctgagaacagagccagcttggaacaaaccgagctgagacatggaggagggaggaag

SEQ ID NO: 74108 - DNA, 2540 bp, Homo sapiens; identical to SEQ ID NO: 5609
  chr7:69062231-69064771
  hypo

SEQ ID NO: 74109 - DNA, 533 bp, Homo sapiens; identical to SEQ ID NO: 44268
  chr7:69064833-69065366
  hypo

SEQ ID NO: 74110 - DNA, 81 bp, Homo sapiens; identical to SEQ ID NO: 21513
  chr7:69478665-69478746
  hypo

SEQ ID NO: 74111 - DNA, 153 bp, Homo sapiens
  chr7:69501074-69501227
  hypo
aagcaggctgccaaaaggtagcggcgccggccagaggtggtttgagaggcaaagcagcaccacagacaggggtccaaggcaagaaaacgctgagctgctctcaggtgctggaaagccagtgtggcttgaagcgtgctaagagtgagactggaa

SEQ ID NO: 74112 - DNA, 24 bp, Homo sapiens
  chr7:69521194-69521218
  hypo
tccggacctcaggcaatccatcct

SEQ ID NO: 74113 - DNA, 30 bp, Homo sapiens; identical to SEQ ID NO: 44269
  chr7:69538625-69538655
  hypo

SEQ ID NO: 74114 - DNA, 30 bp, Homo sapiens; identical to SEQ ID NO: 44270
  chr7:69553461-69553491
  hypo

SEQ ID NO: 74115 - DNA, 22 bp, Homo sapiens
  chr7:69627132-69627154
  hypo
tttaagaaataaaggagaggcc

SEQ ID NO: 74116 - DNA, 30 bp, Homo sapiens; identical to SEQ ID NO: 44271
  chr7:69677254-69677284
  hypo

SEQ ID NO: 74117 - DNA, 30 bp, Homo sapiens; identical to SEQ ID NO: 44272
  chr7:69807320-69807350
  hypo

SEQ ID NO: 74118 - DNA, 30 bp, Homo sapiens; identical to SEQ ID NO: 44273
  chr7:69827455-69827485
  hypo

SEQ ID NO: 74119 - DNA, 30 bp, Homo sapiens; identical to SEQ ID NO: 44274
  chr7:69917036-69917066
  hypo

SEQ ID NO: 74120 - DNA, 30 bp, Homo sapiens; identical to SEQ ID NO: 44275
  chr7:70041731-70041761
  hypo

SEQ ID NO: 74121 - DNA, 17 bp, Homo sapiens
  chr7:70046462-70046479
  hypo
aagccagtgagttctag

SEQ ID NO: 74122 - DNA, 30 bp, Homo sapiens; identical to SEQ ID NO: 44277
  chr7:70084964-70084994
  hypo

SEQ ID NO: 74123 - DNA, 30 bp, Homo sapiens; identical to SEQ ID NO: 44278
  chr7:70085970-70086000
  hypo

SEQ ID NO: 74124 - DNA, 30 bp, Homo sapiens; identical to SEQ ID NO: 44279
  chr7:70092963-70092993
  hypo

SEQ ID NO: 74125 - DNA, 30 bp, Homo sapiens; identical to SEQ ID NO: 44280
  chr7:70119677-70119707
  hypo

SEQ ID NO: 74126 - DNA, 30 bp, Homo sapiens; identical to SEQ ID NO: 44281
  chr7:70142308-70142338
  hypo

SEQ ID NO: 74127 - DNA, 30 bp, Homo sapiens; identical to SEQ ID NO: 44282
  chr7:70160670-70160700
  hypo

SEQ ID NO: 74128 - DNA, 30 bp, Homo sapiens; identical to SEQ ID NO: 44283
  chr7:70161177-70161207
  hypo

SEQ ID NO: 74129 - DNA, 30 bp, Homo sapiens; identical to SEQ ID NO: 44284
  chr7:70170333-70170363
  hypo

SEQ ID NO: 74130 - DNA, 31 bp, Homo sapiens; identical to SEQ ID NO: 21515
  chr7:70234743-70234774
  hypo

SEQ ID NO: 74131 - DNA, 31 bp, Homo sapiens
  chr7:70250820-70250851
  hypo
acaggccaggtgggggcgtagagagggcagg

SEQ ID NO: 74132 - DNA, 30 bp, Homo sapiens
  chr7:70252320-70252350
  hypo
caggggagctggagcgcagcgcgtccgctg

SEQ ID NO: 74133 - DNA, 141 bp, Homo sapiens; identical to SEQ ID NO: 21516
  chr7:70255441-70255582
  hypo

SEQ ID NO: 74134 - DNA, 228 bp, Homo sapiens
  chr7:70255789-70256017
  hypo
catcagccccaccgcgggcaaccagaacggactcctcaacaagacccctccgacagcagcgctgagcgcacctcccccgctcatctccacgctggggggccgcccggtctctcccagaaggacgactcctctgtccgcagagataagggagaggcccccttcccacacgctgaaggatatcgaggcccgataagccgagaacaggagcaagaacgaggaagaagaaac

SEQ ID NO: 74135 - DNA, 30 bp, Homo sapiens; identical to SEQ ID NO: 44285
  chr7:70259342-70259372
  hypo

SEQ ID NO: 74136 - DNA, 30 bp, Homo sapiens; identical to SEQ ID NO: 44288
  chr7:70294766-70294796
  hypo

SEQ ID NO: 74137 - DNA, 30 bp, Homo sapiens; identical to SEQ ID NO: 44289
  chr7:70333599-70333629
  hypo

SEQ ID NO: 74138 - DNA, 40 bp, Homo sapiens
  chr7:70340871-70340911
  hypo
tatttttttttttttttgacacggagtctcgctctgtcgc

SEQ ID NO: 74139 - DNA, 30 bp, Homo sapiens; identical to SEQ ID NO: 44290
  chr7:70373975-70374005
  hypo

SEQ ID NO: 74140 - DNA, 188 bp, Homo sapiens
  chr7:70378263-70378451
  hypo
gtggtcacctagacaggtaaccgtgttacctgatatctattactcggcacactcagaacaattgtttaacgtctgtcttctccagtagagcgtccatacaagctagcaccattgactccctttcccctcactgcttgtgaaagtccagtcattagacatctacatgcgccatgcttcatgctaagttc

SEQ ID NO: 74141 - DNA, 18 bp, Homo sapiens
  chr7:70382504-70382522
  hypo
gcccgccttggcctgtgt

SEQ ID NO: 74142 - DNA, 30 bp, Homo sapiens; identical to SEQ ID NO: 44291
  chr7:70384684-70384714
  hypo

SEQ ID NO: 74143 - DNA, 30 bp, Homo sapiens; identical to SEQ ID NO: 44292
  chr7:70388688-70388718
  hypo

SEQ ID NO: 74144 - DNA, 121 bp, Homo sapiens
  chr7:70542995-70543116
  hypo
tcagggctgcgcggcggcactcgcaagccagtgcagttccgggtgggcatgggcttggccgccccacactgggagcagcaggccggcgtcaccagccccgggcagtgaggggcttagcacc

SEQ ID NO: 74145 - DNA, 358 bp, Homo sapiens; identical to SEQ ID NO: 44293
  chr7:70596057-70596415
  hypo

SEQ ID NO: 74146 - DNA, 257 bp, Homo sapiens; identical to SEQ ID NO: 44294
  chr7:70596453-70596710
  hypo

SEQ ID NO: 74147 - DNA, 504 bp, Homo sapiens; identical to SEQ ID NO: 44295
  chr7:70597367-70597871
  hypo

SEQ ID NO: 74148 - DNA, 30 bp, Homo sapiens; identical to SEQ ID NO: 44297
  chr7:70601107-70601137
  hypo

SEQ ID NO: 74149 - DNA, 30 bp, Homo sapiens; identical to SEQ ID NO: 44298
  chr7:70611826-70611856
  hypo

SEQ ID NO: 74150 - DNA, 31 bp, Homo sapiens; identical to SEQ ID NO: 21518
  chr7:70645461-70645492
  hypo

SEQ ID NO: 74151 - DNA, 30 bp, Homo sapiens; identical to SEQ ID NO: 44299
  chr7:70651397-70651427
  hypo

SEQ ID NO: 74152 - DNA, 30 bp, Homo sapiens; identical to SEQ ID NO: 5614
  chr7:70734445-70734475
  hypo

SEQ ID NO: 74153 - DNA, 15 bp, Homo sapiens
  chr7:70868708-70868723
  hypo
cagttattccactcc

SEQ ID NO: 74154 - DNA, 57 bp, Homo sapiens
  chr7:70921260-70921317
  hypo
gtgagatgccagtgacctgaccgccaagtatattgcgagagtcagtgaattgttagt

SEQ ID NO: 74155 - DNA, 30 bp, Homo sapiens; identical to SEQ ID NO: 44302
  chr7:70926804-70926834
  hypo

SEQ ID NO: 74156 - DNA, 32 bp, Homo sapiens
  chr7:71048821-71048853
  hypo
cctcctggctgggcgcggtggctcacgcctgt

SEQ ID NO: 74157 - DNA, 30 bp, Homo sapiens; identical to SEQ ID NO: 44303
  chr7:71062903-71062933
  hypo

SEQ ID NO: 74158 - DNA, 30 bp, Homo sapiens; identical to SEQ ID NO: 44304
  chr7:71117865-71117895
  hypo

SEQ ID NO: 74159 - DNA, 38 bp, Homo sapiens; identical to SEQ ID NO: 21520
  chr7:71119292-71119330
  hypo

SEQ ID NO: 74160 - DNA, 30 bp, Homo sapiens; identical to SEQ ID NO: 44305
  chr7:71120821-71120851
  hypo

SEQ ID NO: 74161 - DNA, 30 bp, Homo sapiens; identical to SEQ ID NO: 44306
  chr7:71190931-71190961
  hypo

SEQ ID NO: 74162 - DNA, 89 bp, Homo sapiens; identical to SEQ ID NO: 44307
  chr7:71198520-71198609
  hypo

SEQ ID NO: 74163 - DNA, 30 bp, Homo sapiens; identical to SEQ ID NO: 44309
  chr7:71242950-71242980
  hypo

SEQ ID NO: 74164 - DNA, 163 bp, Homo sapiens
  chr7:71251955-71252118
  hypo
tctatgttatagagatgcccacgattatgcttctttttttctctaatggcagcacaggcggcaaagctgggagaaaggctctctgcaggttccaaaatgctggtgcgggatgggctctaggaacagaaagccaagtgccgacggaaactgagagcaccccagc

SEQ ID NO: 74165 - DNA, 86 bp, Homo sapiens
  chr7:71276626-71276712
  hypo
ttatattaggtttgatagtgtcgctttcttttttctttttttttttttttttccgaaatggagtcttgcttccatctcgcaggctg

SEQ ID NO: 74166 - DNA, 25 bp, Homo sapiens
  chr7:71276951-71276976
  hypo
ctgcgcctggccagtagtgtcactt

SEQ ID NO: 74167 - DNA, 39 bp, Homo sapiens; identical to SEQ ID NO: 21521
  chr7:71287515-71287554
  hypo

SEQ ID NO: 74168 - DNA, 44 bp, Homo sapiens
  chr7:71335071-71335115
  hypo
taagaaacaaagagtggctggcgcagtggctcacgcctgtaatc

SEQ ID NO: 74169 - DNA, 27 bp, Homo sapiens
  chr7:71348937-71348964
  hypo
tgccaggttggagtgaagtggcgcgat

SEQ ID NO: 74170 - DNA, 43 bp, Homo sapiens
  chr7:71396556-71396599
  hypo
ccatggttttcttgggccctacgaaaacaggtagtgagttaga

SEQ ID NO: 74171 - DNA, 36 bp, Homo sapiens; identical to SEQ ID NO: 21522
  chr7:71397498-71397534
  hypo

SEQ ID NO: 74172 - DNA, 31 bp, Homo sapiens
  chr7:71400691-71400722
  hypo
gcgaaactccgtctcaaaaaacagaaacaaa

SEQ ID NO: 74173 - DNA, 25 bp, Homo sapiens
  chr7:71669265-71669290
  hypo
caccgcacccagccaaagccaagag

SEQ ID NO: 74174 - DNA, 23 bp, Homo sapiens
  chr7:71794642-71794665
  hypo
gtgagacctttcttggttgggcg

SEQ ID NO: 74175 - DNA, 140 bp, Homo sapiens; identical to SEQ ID NO: 5617
  chr7:71802206-71802346
  hypo

SEQ ID NO: 74176 - DNA, 23 bp, Homo sapiens
  chr7:71845545-71845568
  hypo
tacctgggcggtgaccgtgtctg

SEQ ID NO: 74177 - DNA, 28 bp, Homo sapiens
  chr7:71885891-71885919
  hypo
cctggccgggatgcatcttaaacatgca

SEQ ID NO: 74178 - DNA, 94 bp, Homo sapiens
  chr7:71913526-71913620
  hypo
tggcatcccacactatggagtcggtttttccgagatctttctttagtcaatatggtggcaccttgcgtgatcttttttttttttgacggagtct

SEQ ID NO: 74179 - DNA, 31 bp, Homo sapiens
  chr7:72325008-72325039
  hypo
atgacagctggggcagcgagctggctggcca

SEQ ID NO: 74180 - DNA, 44 bp, Homo sapiens
  chr7:75935605-75935649
  hypo
ctcctactgtcatacaggctggcgtgcagtagtgggatcttggt

SEQ ID NO: 74181 - DNA, 22 bp, Homo sapiens
  chr7:75975251-75975273
  hypo
cgcctcaaaaaaaaatttaaaa

SEQ ID NO: 74182 - DNA, 27 bp, Homo sapiens
  chr7:75977564-75977591
  hypo
caagagccttagacttcgttttttttt

SEQ ID NO: 74183 - DNA, 30 bp, Homo sapiens
  chr7:76009144-76009174
  hypo
gctctttgtaagttgcgagtggccgcatag

SEQ ID NO: 74184 - DNA, 46 bp, Homo sapiens
  chr7:76033250-76033296
  hypo
attgcaggtgtgagtcaccgagcccggccttcttcttatgtttgga

SEQ ID NO: 74185 - DNA, 30 bp, Homo sapiens
  chr7:76054740-76054770
  hypo
ggcactgaggtcaccggacccagggcagct

SEQ ID NO: 74186 - DNA, 31 bp, Homo sapiens
  chr7:76059753-76059784
  hypo
tgggtataagatgatgcggccaggtatggtg

SEQ ID NO: 74187 - DNA, 268 bp, Homo sapiens
  chr7:76106228-76106496
  hypo
tttagctgatgtcctcgcctgtatttcccaggctgtttttgcagagttgtgagagttggttcatccgggccatgaggacatgttgggacataccccgtgtgccgatgatggaggcggccgtggctgcccgagagatgcgtgacacccaggagtaattggcttggaaggcagtcctctgatttgtacctcattgtggttacagaaacttccaattgaagacactgagctgaaccattccgcccgcccgcccgcccgagggcactccagg

SEQ ID NO: 74188 - DNA, 30 bp, Homo sapiens; identical to SEQ ID NO: 21526
  chr7:76246556-76246586
  hypo

SEQ ID NO: 74189 - DNA, 283 bp, Homo sapiens
  chr7:76604302-76604585
  hypo
gaggctgcgtgccttcgtggaaagttttagctgaagtcctcgcctatatttcccaggctgttttgcagagttgtgagagttggttcatcgggccatgaggacatgttgggacataccccgtgtgccgatgatggaggcggccgtggctgcccgagagatgcgtgacacccaggagtaattggcttggaaggcagtcctctgatttgtacctcattgtggttacagaaacttccaattgaagacactgagctgaaccattccgcccgcccgcccgcctgcccgc

SEQ ID NO: 74190 - DNA, 112 bp, Homo sapiens
  chr7:76631492-76631604
  hypo
gcatggagaagctgtccgcagcgtctggatacagcgatgtgactgacagcaaggcaatcgggcccctggctgtgggctgcctcaccaagtgcagccacgccttccacctgct

SEQ ID NO: 74191 - DNA, 160 bp, Homo sapiens
  chr7:76632094-76632254
  hypo
ctggtcctgggccccacggtagcctacacatgaagagccacgcccagaccgacccccagctgctctccctgcatcggccttcaggcgggatgggcagagtttagaggcttagagaaccgagtcgtggcgcatcggagcctggctcggccttccctagtat

SEQ ID NO: 74192 - DNA, 91 bp, Homo sapiens
  chr7:77036054-77036145
  hypo
atatggagctctcttcactatcgagggaccctcccaaaaaggttcctgcaggatcacggatacaggagccgagggtagggagagggagaag

SEQ ID NO: 74193 - DNA, 43 bp, Homo sapiens; identical to SEQ ID NO: 21528
  chr7:77129871-77129914
  hypo

SEQ ID NO: 74194 - DNA, 30 bp, Homo sapiens; identical to SEQ ID NO: 44323
  chr7:77167570-77167600
  hypo

SEQ ID NO: 74195 - DNA, 30 bp, Homo sapiens; identical to SEQ ID NO: 44324
  chr7:77167847-77167877
  hypo

SEQ ID NO: 74196 - DNA, 40 bp, Homo sapiens
  chr7:77184919-77184959
  hypo
gttttttaaaaaaatctctagcgtttcttaggccgggcac

SEQ ID NO: 74197 - DNA, 18 bp, Homo sapiens
  chr7:77296352-77296370
  hypo
ccccgtcagtcagtatat

SEQ ID NO: 74198 - DNA, 121 bp, Homo sapiens
  chr7:77305018-77305139
  hypo
ggttacaggcgtgagccaccaggcacagcctggtacattttttaatcgggtgttttcttattgatgagttttaagattctttgtcagccgggggcgttggctcacgcctgtaatcccagca

SEQ ID NO: 74199 - DNA, 22 bp, Homo sapiens
  chr7:77309368-77309390
  hypo
ctctgctggagtgcagtggtcc

SEQ ID NO: 74200 - DNA, 114 bp, Homo sapiens
  chr7:77309569-77309683
  hypo
gtgctgggattacaggcgtgagccatcgtgcccggccagacgatagatggattctttttttttttttttttttttgagcaaattgagctacttgagcctcggcctcccaaagtg

SEQ ID NO: 74201 - DNA, 91 bp, Homo sapiens
  chr7:77315383-77315474
  hypo
actgactaaacacttaatatacgtgaaaaataagaaaaagtagacttattgggttagctttaaaagttaaataaaagagtggttaggcccg

SEQ ID NO: 74202 - DNA, 121 bp, Homo sapiens; identical to SEQ ID NO: 21534
  chr7:77323832-77323953
  hypo

SEQ ID NO: 74203 - DNA, 241 bp, Homo sapiens; identical to SEQ ID NO: 21535
  chr7:77324192-77324433
  hypo

SEQ ID NO: 74204 - DNA, 30 bp, Homo sapiens
  chr7:77409072-77409102
  hypo
gtagtgcaaatgtacgtaattcaaatctag

SEQ ID NO: 74205 - DNA, 102 bp, Homo sapiens; identical to SEQ ID NO: 21536
  chr7:77413232-77413334
  hypo

SEQ ID NO: 74206 - DNA, 27 bp, Homo sapiens
  chr7:77456621-77456648
  hypo
tcattttcttttcttagaattcgtgga

SEQ ID NO: 74207 - DNA, 89 bp, Homo sapiens
  chr7:77459675-77459764
  hypo
ggtccccaaccagttggtctgcggcctggtaggaaccgtgggctgcactacgggaggtgagccagtgggcaagtgagcgaagcttcatc

SEQ ID NO: 74208 - DNA, 30 bp, Homo sapiens
  chr7:77464289-77464319
  hypo
ttagtccaaaggaaagctggccgggtgcgg

SEQ ID NO: 74209 - DNA, 863 bp, Homo sapiens; identical to SEQ ID NO: 44331
  chr7:79082171-79083034
  hypo

SEQ ID NO: 74210 - DNA, 635 bp, Homo sapiens; identical to SEQ ID NO: 44332
  chr7:79083190-79083825
  hypo

SEQ ID NO: 74211 - DNA, 27 bp, Homo sapiens
  chr7:79197433-79197460
  hypo
cgcctcggcctcccaaaaaactgtgaa

SEQ ID NO: 74212 - DNA, 32 bp, Homo sapiens
  chr7:79851711-79851743
  hypo
ttttttcctgagacagagtttcgttcttgttt

SEQ ID NO: 74213 - DNA, 31 bp, Homo sapiens
  chr7:79851982-79852013
  hypo
gtgagccaccgcacctggccaaaatattttt

SEQ ID NO: 74214 - DNA, 31 bp, Homo sapiens
  chr7:80019541-80019572
  hypo
cacagttgtagggtgccgaggtgggaggatc

SEQ ID NO: 74215 - DNA, 24 bp, Homo sapiens
  chr7:80163430-80163454
  hypo
taacataaagaaacaaaaatacgg

SEQ ID NO: 74216 - DNA, 154 bp, Homo sapiens
  chr7:80168618-80168772
  hypo
cctcgggaggtatttaggtcacgagggcggagccttcatgaatggccttagtgtccctacaaaagagcctccaaggtgattctttgcccctattactaggtgaagacacagcaagaaggcttcttttggccgggcgcggtggctcacgcctgta

SEQ ID NO: 74217 - DNA, 30 bp, Homo sapiens
  chr7:80171532-80171562
  hypo
cattaaaaacccttacggtgcagactagta

SEQ ID NO: 74218 - DNA, 35 bp, Homo sapiens
  chr7:80541272-80541307
  hypo
gtgttcgtatgaccgattaacaaaacactcaagct

SEQ ID NO: 74219 - DNA, 37 bp, Homo sapiens
  chr7:80544780-80544817
  hypo
tatttgaaatttgaggccaggcgtggtggctcacctc

SEQ ID NO: 74220 - DNA, 510 bp, Homo sapiens; identical to SEQ ID NO: 44337
  chr7:80548257-80548767
  hypo

SEQ ID NO: 74221 - DNA, 31 bp, Homo sapiens
  chr7:80565299-80565330
  hypo
attaatttttgactatcgggtaaaaaggctg

SEQ ID NO: 74222 - DNA, 43 bp, Homo sapiens
  chr7:80572547-80572590
  hypo
gaggcagtcaaatgtagagaacgcagaagcaactcttctttta

SEQ ID NO: 74223 - DNA, 20 bp, Homo sapiens
  chr7:80619356-80619376
  hypo
gatgccgtctcaataataat

SEQ ID NO: 74224 - DNA, 16 bp, Homo sapiens
  chr7:80716381-80716397
  hypo
gccatagatgaatttt

SEQ ID NO: 74225 - DNA, 29 bp, Homo sapiens
  chr7:80752215-80752244
  hypo
tttttttttgagatggagtctcgctctgt

SEQ ID NO: 74226 - DNA, 29 bp, Homo sapiens
  chr7:80752483-80752512
  hypo
gctaccgcgcccagccctatgtcaatatt

SEQ ID NO: 74227 - DNA, 61 bp, Homo sapiens
  chr7:80790076-80790137
  hypo
ccaaagtgatgggattacaggtgagccactgcgcccagccgcttttctcactcttaagaaa

SEQ ID NO: 74228 - DNA, 37 bp, Homo sapiens; identical to SEQ ID NO: 21542
  chr7:80917899-80917936
  hypo

SEQ ID NO: 74229 - DNA, 37 bp, Homo sapiens; identical to SEQ ID NO: 21543
  chr7:80918175-80918212
  hypo

SEQ ID NO: 74230 - DNA, 32 bp, Homo sapiens
  chr7:80965881-80965913
  hypo
ctaaaataaaggtaaatggcacgcctggctag

SEQ ID NO: 74231 - DNA, 21 bp, Homo sapiens
  chr7:82010654-82010675
  hypo
gtccttgacagcaacaaagct

SEQ ID NO: 74232 - DNA, 93 bp, Homo sapiens; identical to SEQ ID NO: 44342
  chr7:82791916-82792009
  hypo

SEQ ID NO: 74233 - DNA, 297 bp, Homo sapiens; identical to SEQ ID NO: 44343
  chr7:82792128-82792425
  hypo

SEQ ID NO: 74234 - DNA, 613 bp, Homo sapiens; identical to SEQ ID NO: 21545
  chr7:86415570-86416183
  hypo

SEQ ID NO: 74235 - DNA, 103 bp, Homo sapiens; identical to SEQ ID NO: 5646
  chr7:86849533-86849636
  hypo

SEQ ID NO: 74236 - DNA, 18 bp, Homo sapiens
  chr7:86959423-86959441
  hypo
ggacgagaagaatgtgca

SEQ ID NO: 74237 - DNA, 30 bp, Homo sapiens; identical to SEQ ID NO: 44356
  chr7:87079053-87079083
  hypo

SEQ ID NO: 74238 - DNA, 30 bp, Homo sapiens; identical to SEQ ID NO: 44358
  chr7:87124806-87124836
  hypo

SEQ ID NO: 74239 - DNA, 12 bp, Homo sapiens
  chr7:87254294-87254306
  hypo
gggcgcggcggc

SEQ ID NO: 74240 - DNA, 19 bp, Homo sapiens
  chr7:87254605-87254624
  hypo
ttacctcatcatttaagat

SEQ ID NO: 74241 - DNA, 987 bp, Homo sapiens; identical to SEQ ID NO: 5649
  chr7:87256906-87257893
  hypo

SEQ ID NO: 74242 - DNA, 536 bp, Homo sapiens; identical to SEQ ID NO: 44361
  chr7:87257922-87258458
  hypo

SEQ ID NO: 74243 - DNA, 22 bp, Homo sapiens
  chr7:87372415-87372437
  hypo
cgagattccgtctcaaaaaaaa

SEQ ID NO: 74244 - DNA, 30 bp, Homo sapiens; identical to SEQ ID NO: 44363
  chr7:87564330-87564360
  hypo

SEQ ID NO: 74245 - DNA, 372 bp, Homo sapiens; identical to SEQ ID NO: 5651
  chr7:87849419-87849791
  hypo

SEQ ID NO: 74246 - DNA, 42 bp, Homo sapiens
  chr7:88858570-88858612
  hypo
ggctgtgaggactgccagcacgctgtcacctctcaatagttc

SEQ ID NO: 74247 - DNA, 30 bp, Homo sapiens
  chr7:89856300-89856330
  hypo
acaatattcaagcgcgacaacaggttattg

SEQ ID NO: 74248 - DNA, 1058 bp, Homo sapiens; identical to SEQ ID NO: 44378
  chr7:90225566-90226624
  hypo

SEQ ID NO: 74249 - DNA, 23 bp, Homo sapiens
  chr7:90269563-90269586
  hypo
tcggccatcttggctcctccctc

SEQ ID NO: 74250 - DNA, 66 bp, Homo sapiens; identical to SEQ ID NO: 21555
  chr7:90635232-90635298
  hypo

SEQ ID NO: 74251 - DNA, 30 bp, Homo sapiens; identical to SEQ ID NO: 5662
  chr7:90895012-90895042
  hypo

SEQ ID NO: 74252 - DNA, 30 bp, Homo sapiens; identical to SEQ ID NO: 21557
  chr7:90916005-90916035
  hypo

SEQ ID NO: 74253 - DNA, 22 bp, Homo sapiens
  chr7:91218962-91218984
  hypo
agaggcagcagccaagatggcc

SEQ ID NO: 74254 - DNA, 146 bp, Homo sapiens
  chr7:91531326-91531472
  hypo
gcctttgagtaattcctattacgccaacagctacctttccttgatattaaggtactagactgaatttttagaatggcaagccattgcgacatcacgttaaagtgcaaacatgggccgggcacggtggctcacgcctgtaatcccag

SEQ ID NO: 74255 - DNA, 25 bp, Homo sapiens
  chr7:91539029-91539054
  hypo
tttcgattggctcctgtacatcatt

SEQ ID NO: 74256 - DNA, 30 bp, Homo sapiens
  chr7:91765498-91765528
  hypo
cttaaaagtttcaccgtttcttccgtccag

SEQ ID NO: 74257 - DNA, 41 bp, Homo sapiens; identical to SEQ ID NO: 21558
  chr7:92075853-92075894
  hypo

SEQ ID NO: 74258 - DNA, 144 bp, Homo sapiens; identical to SEQ ID NO: 5665
  chr7:92219763-92219907
  hypo

SEQ ID NO: 74259 - DNA, 30 bp, Homo sapiens; identical to SEQ ID NO: 21560
  chr7:92370176-92370206
  hypo

SEQ ID NO: 74260 - DNA, 1229 bp, Homo sapiens; identical to SEQ ID NO: 44386
  chr7:92462187-92463416
  hypo

SEQ ID NO: 74261 - DNA, 86 bp, Homo sapiens; identical to SEQ ID NO: 5667
  chr7:92463862-92463948
  hypo

SEQ ID NO: 74262 - DNA, 253 bp, Homo sapiens; identical to SEQ ID NO: 5668
  chr7:92466275-92466528
  hypo

SEQ ID NO: 74263 - DNA, 17 bp, Homo sapiens
  chr7:92602320-92602337
  hypo
cagaagggaagaaattt

SEQ ID NO: 74264 - DNA, 89 bp, Homo sapiens
  chr7:92745364-92745453
  hypo
ttattgtgctgctagcgtgcgctggctcctgaggcctcatacctatggctctcatcccccatctcgccgcttcccaccagtaccctttt

SEQ ID NO: 74265 - DNA, 30 bp, Homo sapiens
  chr7:92779409-92779439
  hypo
ccgactaggtgtgatcgagaagcactagga

SEQ ID NO: 74266 - DNA, 130 bp, Homo sapiens; identical to SEQ ID NO: 21564
  chr7:92939971-92940101
  hypo

SEQ ID NO: 74267 - DNA, 29 bp, Homo sapiens
  chr7:93549240-93549269
  hypo
attaacaaaaaattagtcaggcgtggtag

SEQ ID NO: 74268 - DNA, 30 bp, Homo sapiens
  chr7:93629922-93629952
  hypo
gcagaagagttcatcggcctgagttagtcc

SEQ ID NO: 74269 - DNA, 95 bp, Homo sapiens
  chr7:94138371-94138466
  hypo
gcactagagcttgggcgacagggtgagactccctctcaaaaaaaacgaatttttttggcacatcgacctagccaaacttgcgtaaatacaagtga

SEQ ID NO: 74270 - DNA, 30 bp, Homo sapiens
  chr7:94142348-94142378
  hypo
cttagaaacagtaattcaggccgggcgcag

SEQ ID NO: 74271 - DNA, 64 bp, Homo sapiens
  chr7:94293683-94293747
  hypo
gccggtgggaggtgcccgcatgcgcctgacgcaggaagaaaaagaaagacgcagaaagctgaac

SEQ ID NO: 74272 - DNA, 30 bp, Homo sapiens
  chr7:94539837-94539867
  hypo
agttcactgagactcgaaagatgtttgaga

SEQ ID NO: 74273 - DNA, 438 bp, Homo sapiens; identical to SEQ ID NO: 44404
  chr7:95064140-95064578
  hypo

SEQ ID NO: 74274 - DNA, 352 bp, Homo sapiens; identical to SEQ ID NO: 5684
  chr7:96635619-96635971
  hypo

SEQ ID NO: 74275 - DNA, 340 bp, Homo sapiens; identical to SEQ ID NO: 5685
  chr7:96636033-96636373
  hypo

SEQ ID NO: 74276 - DNA, 678 bp, Homo sapiens; identical to SEQ ID NO: 44434
  chr7:96746746-96747424
  hypo

SEQ ID NO: 74277 - DNA, 28 bp, Homo sapiens
  chr7:97044825-97044853
  hypo
acagcaagaggtggctgggtgcggtggc

SEQ ID NO: 74278 - DNA, 27 bp, Homo sapiens
  chr7:97045092-97045119
  hypo
ctgggcgacacagtgagactccatctc

SEQ ID NO: 74279 - DNA, 44 bp, Homo sapiens
  chr7:97137337-97137381
  hypo
aagtggaagaaaaaagaccttcgtaaagatgtgtgctaggttgg

SEQ ID NO: 74280 - DNA, 37 bp, Homo sapiens; identical to SEQ ID NO: 44438
  chr7:97501886-97501923
  hypo

SEQ ID NO: 74281 - DNA, 30 bp, Homo sapiens; identical to SEQ ID NO: 21571
  chr7:97598477-97598507
  hypo

SEQ ID NO: 74282 - DNA, 181 bp, Homo sapiens
  chr7:97600008-97600189
  hypo
catttggatgataaaataaaatcttattttcctcctgaaacatgaggaaacagaagcacatcatgaatagaaacatttcatcttagctattgaaaacgctaagttcagtgtcgacctcttgtgtcgcacatgctaatgacaaaaccaaagaaaaaccggttttagaaaaacaggaattgta

SEQ ID NO: 74283 - DNA, 39 bp, Homo sapiens
  chr7:97600248-97600287
  hypo
agcctgggcaacaccgtgagacctcgtctctatttaaaa

SEQ ID NO: 74284 - DNA, 97 bp, Homo sapiens
  chr7:97627564-97627661
  hypo
tggcacaagtcccctaattaccgctggccccgtaatctgtgggctccggtgcacggtgaaaatgcaagtcctgccgggcgcggtggctggtgtctgt

SEQ ID NO: 74285 - DNA, 187 bp, Homo sapiens
  chr7:97670350-97670537
  hypo
agggccctcccagttccggcgctccctatggagtccgctgaggccttcatcgagactgcactgcagctcagctttccccgctgttcaatcctgcttccttcccagcctgccttcctcactctcttcccctgatcactgctctgcagacttatccccatctgccacgcatcctcgactggaacaatct

SEQ ID NO: 74286 - DNA, 34 bp, Homo sapiens
  chr7:97706015-97706049
  hypo
ggattacaggtgcgttccattgtgcttggccaga

SEQ ID NO: 74287 - DNA, 20 bp, Homo sapiens
  chr7:97738172-97738192
  hypo
tttttttttttttttttgag

SEQ ID NO: 74288 - DNA, 19 bp, Homo sapiens
  chr7:97738491-97738510
  hypo
tttttattccattctttta

SEQ ID NO: 74289 - DNA, 226 bp, Homo sapiens
  chr7:97748928-97749154
  hypo
ccgacaatcagatgctggtaccgtgagctgagaatcttggtgccagtcctggaccaccaggcctcagctcactgcagctagagtcagggtggcaggtgactcgtagggaaattttgagagcaggtataaaaccgtgacattcttaattcccttggtgataaatgggtgtgctgtaacgtgagaacccctgattcgtaatctatacggtaacttgcagggtgttttg

SEQ ID NO: 74290 - DNA, 30 bp, Homo sapiens
  chr7:97778819-97778849
  hypo
tgctgtcagttaattcgatagaggtgcagt

SEQ ID NO: 74291 - DNA, 30 bp, Homo sapiens; identical to SEQ ID NO: 21573
  chr7:97797622-97797652
  hypo

SEQ ID NO: 74292 - DNA, 224 bp, Homo sapiens
  chr7:97804193-97804417
  hypo
tgcacacctgttgctcactaccgccccagcaggagagtggaaacgcatgttctcatttggcagggtgtttgccgtgttccatgcatttgcagaacgttctgtgagtagtgatttgatcgtcagggccaccccacgtgccacgaggcaggtgccattattcatcccagttacagaggagaatactgaggcttggggtgctgagcggttggtctgtctcagccact

SEQ ID NO: 74293 - DNA, 152 bp, Homo sapiens; identical to SEQ ID NO: 21574
  chr7:97806160-97806312
  hypo

SEQ ID NO: 74294 - DNA, 160 bp, Homo sapiens
  chr7:97807168-97807328
  hypo
agttgcctctgtgtgctttatcggaatcctcttgttttaatcctctcctggtacgtctccatcccatcttagagtgttaagtgcagagtcccttcggaagcttaagtctttgtggctgccagagtcagaatgacgtgacgagcagagggaggctttggaa

SEQ ID NO: 74295 - DNA, 232 bp, Homo sapiens
  chr7:97807629-97807861
  hypo
agaaccccgaagacgcgcaaactagtcctagcgtgagtgagcagcaagcagtggtacttccttgtgaatcggggtgggaacccttcagaaccgcgagctcccactttctgtcgatcgctctgctcatgcggccctgagtctcatggttactgtggtctcagtcacagcaagtgctgccaagctcaggcgacgctgccagagccttctgagagccgggcggggctggtgccac

SEQ ID NO: 74296 - DNA, 49 bp, Homo sapiens
  chr7:97808577-97808626
  hypo
catccaggaaatgcctgagctcgacatcgcccaagctagcctcaggctg

SEQ ID NO: 74297 - DNA, 30 bp, Homo sapiens
  chr7:97824751-97824781
  hypo
taaaaatgtaacagcggataattcaagcat

SEQ ID NO: 74298 - DNA, 30 bp, Homo sapiens
  chr7:97826730-97826760
  hypo
cctggcatcgcattcgacttttagcacttg

SEQ ID NO: 74299 - DNA, 31 bp, Homo sapiens; identical to SEQ ID NO: 21575
  chr7:97832524-97832555
  hypo

SEQ ID NO: 74300 - DNA, 210 bp, Homo sapiens; identical to SEQ ID NO: 21576
  chr7:97833193-97833403
  hypo

SEQ ID NO: 74301 - DNA, 245 bp, Homo sapiens
  chr7:97833959-97834204
  hypo
ccagcatcctgagtgtgctctcggggccatgccccctgcctgttgtggtcactctcaggctcgttaccggccaccctgtggggccaggctgaggcagaggggctctgggtcccaggaacgcccaggctgcgcgccatctcctctttttctcctgtggctgcatagtccctcctccgcactctgtctcctcctttcccagagagaacctgctcttcagcaggctcgtaagagcacttgacccctgg

SEQ ID NO: 74302 - DNA, 500 bp, Homo sapiens
  chr7:97841576-97842076
  hypo
cctcaccttcctgccgccacctcctaggacagccagtccagggccatgaagaccaagaaccggcccccacggcgccgggccccggtgcaggacacagaggccacccccggggaggggacgcccgacgggtccctgccgaacccggggccagagccggccaagggtctgcggagccggccggcccgggccgcagcaagggctccgggcgagggcaggcgcaggcggccaggaccctccgggcccggtggccgtcgtgacagcagcatccagcggcggctggagagcaacgagagggagcggcagcggatgcacaagctaaataacgccttccaggccctgcgtgaagtcatcccccacgtgcgcgcggacaagaagctctccaagatcgagacgctcacgctggccaagaactacatcaaatcgctgacggccaccatcctgaccatgtccagcagccgcctcccaggcctggaggggccgggccccaagctctaccagca

SEQ ID NO: 74303 - DNA, 112 bp, Homo sapiens
  chr7:97844376-97844488
  hypo
gggagcccctgcctcggccatcgggatgaggtccctcaagtccctgcacaagcaggtcagagacccacccacatgccgttcctgggctacgccacgcgccatcccccggggc

SEQ ID NO: 74304 - DNA, 166 bp, Homo sapiens
  chr7:97846966-97847132
  hypo
ggtgataacacagcccaaggccgcgggccccgctcaccccgatgccgtagtcccagccgtggcccttgggctcgtgaggctgcacgccggtgcgatgacacactgtcccccggctcaggctgtggctgccctgcactttgttggcgatcacccagacctggagcac

SEQ ID NO: 74305 - DNA, 30 bp, Homo sapiens; identical to SEQ ID NO: 21579
  chr7:97857477-97857507
  hypo

SEQ ID NO: 74306 - DNA, 257 bp, Homo sapiens
  chr7:97869427-97869684
  hypo
acaaacaaaagaaaaaccctgtgagtaatcggaaatcggctggttttattggacttgccgctgataagatgcaaaagacaagcagtgactagaggatggggaggcgcttggttaatcaagggcttcaggaaattcgcttccgattcttcgaaatgttgcagcctattaggtgatacttgcagttgctgcatttgggtaccagcgtgtgggtggaagaggattttacggcacaaaacgtcctggagattggcaacaat

SEQ ID NO: 74307 - DNA, 44 bp, Homo sapiens
  chr7:97882342-97882386
  hypo
aaggagaaaaaagaaagatgtcggccaggtgcggcggttcatac

SEQ ID NO: 74308 - DNA, 295 bp, Homo sapiens
  chr7:97925156-97925451
  hypo
cgcagcaagaagcaccgactcctgccaggaggactgaggaggaaaaagaacgcttaagatgacagctggaagccactcagtgttgggccaaccccgtgcacgcatgcctggggcccaacaatcctgctccctgtaggaacaagcagggcacacacccatgggcaccgagacactcgggcagccctggagaaacagcccagaccagaaacaccagacgcccgtcaatgggagagtcagaaccagcttctgtgcagacagcaggtcaccacacagcactgagcgactgtccctacgg

SEQ ID NO: 74309 - DNA, 31 bp, Homo sapiens
  chr7:97942776-97942807
  hypo
tgtcctctccagcctgcgaccctggtgccac

SEQ ID NO: 74310 - DNA, 31 bp, Homo sapiens
  chr7:97947129-97947160
  hypo
gctgggactgtcaccccgtagttcacaccat

SEQ ID NO: 74311 - DNA, 18 bp, Homo sapiens
  chr7:97947878-97947896
  hypo
ccacgcccagtgaacaca

SEQ ID NO: 74312 - DNA, 133 bp, Homo sapiens
  chr7:97968885-97969018
  hypo
ccgggaatgcggctggcgtggccaggcctcactcgcttcatgattctagccgcatccatctttgagtatccctctcttcagcctgtcacgggagctacgccctttgctgctacctgtgcgtgtgaccgcagca

SEQ ID NO: 74313 - DNA, 225 bp, Homo sapiens
  chr7:97984207-97984432
  hypo
tcaatttccacagaccgcggtgaagtagaaccacagcatgctggcccagatctctcctctgttctggactgggccatcccacgcgtttctcttggggttcacaggatgacaagtggggtttatgtataaagggacagatcgctcacccagttcagttgacacgggggacccagtggcaatctcaccgatcttggccactccatcgtagtaggcttttcctgccag

SEQ ID NO: 74314 - DNA, 43 bp, Homo sapiens
  chr7:97989648-97989691
  hypo
ccagcctgccttgtgttctaacgtaactgtggactgcacacct

SEQ ID NO: 74315 - DNA, 36 bp, Homo sapiens; identical to SEQ ID NO: 21581
  chr7:98012254-98012290
  hypo

SEQ ID NO: 74316 - DNA, 28 bp, Homo sapiens
  chr7:98019241-98019269
  hypo
ttttgagaggtagtctcgcactgtcgcc

SEQ ID NO: 74317 - DNA, 28 bp, Homo sapiens
  chr7:98019508-98019536
  hypo
gagccactgcgcccggtctcgggttagt

SEQ ID NO: 74318 - DNA, 191 bp, Homo sapiens; identical to SEQ ID NO: 5694
  chr7:98030419-98030610
  hypo

SEQ ID NO: 74319 - DNA, 344 bp, Homo sapiens; identical to SEQ ID NO: 21583
  chr7:98115910-98116254
  hypo

SEQ ID NO: 74320 - DNA, 22 bp, Homo sapiens
  chr7:98163401-98163423
  hypo
cgagactctgtctcaaaacaaa

SEQ ID NO: 74321 - DNA, 203 bp, Homo sapiens; identical to SEQ ID NO: 5696
  chr7:98246304-98246507
  hypo

SEQ ID NO: 74322 - DNA, 1240 bp, Homo sapiens; identical to SEQ ID NO: 44447
  chr7:98246533-98247773
  hypo

SEQ ID NO: 74323 - DNA, 117 bp, Homo sapiens
  chr7:98254319-98254436
  hypo
ctgcctgagctgtacgccttcaccatctgcctgtggctgcggtccagcgcctcaccaggcattggcacccccttctcctatgcggtgccagggcaggccaacgagatcgtgctgatc

SEQ ID NO: 74324 - DNA, 30 bp, Homo sapiens
  chr7:98579514-98579544
  hypo
agcctggccatccgcgagtggcggcggctg

SEQ ID NO: 74325 - DNA, 30 bp, Homo sapiens
  chr7:98581398-98581428
  hypo
ctcaggtggctctgcgtggccttttctggt

SEQ ID NO: 74326 - DNA, 43 bp, Homo sapiens
  chr7:98586156-98586199
  hypo
tttatatgaaatgtacagaaccggtcaatccacagagacagaa

SEQ ID NO: 74327 - DNA, 30 bp, Homo sapiens
  chr7:98586418-98586448
  hypo
gctgtgcagatgcacgatgtgctggtgaaa

SEQ ID NO: 74328 - DNA, 30 bp, Homo sapiens
  chr7:98591105-98591135
  hypo
gccctggcgtctgtcggttttgcgctgaca

SEQ ID NO: 74329 - DNA, 136 bp, Homo sapiens
  chr7:98599225-98599361
  hypo
aagtgcagtgggtctcagacacgcacagccagagctcatccaccttccgctctcctgtacacaggggaggctgtttctgtctctttgtctgtgttccgttcgtggaatgcagtccgattctctagcagagctgcat

SEQ ID NO: 74330 - DNA, 447 bp, Homo sapiens
  chr7:98599780-98600227
  hypo
gaagggcagccaagggcatcccgtgctgatggtgcagctcagcaactgattgtgctggtggctctgcgaggccacacagtgacatgaccagaggtgtgcgcatgcatacacacatgtgcgcacacacacgtgcacacataactggtgaagtctgaatcagctcttcagctctttggactgtgccaatgtcactttttggtgttggcatcgcactgggttgcataggatgctggtgtgggaggaagagggttaggagtacatgggactttctgtatattttgtttgcatcctgttgtgaatctctaggaatttcagaataaaagttaaaaagagatcaggcatgagcttggcagcacgttcttggtccagcgtggagagggaacaatgaggtggcctgcgtccttggtggtggcctctgtctctcgcggctctgctgggggatctcac

SEQ ID NO: 74331 - DNA, 82 bp, Homo sapiens
  chr7:98601683-98601765
  hypo
gaaacttcatctcaaaacaaacaaacaaaacatgtaattcgtagctggtaggggcttgagcgttttttgcagtgtgttagaa

SEQ ID NO: 74332 - DNA, 365 bp, Homo sapiens
  chr7:98602531-98602896
  hypo
ctctccctcctccttgacttccgtccgtggctgctgaattgaaaatattgtgactcatttacaccgcatcagggtgaggcagggtacaaataaattgataaacgaccgctggcctacacagtccgttttcccgtgacagttcggacattcctagcttcttctcaagacaaggactggtagcagagatgcagggcatgtcctcatggcttctcgctctggcaggttcatgccccgggtagagattgtgcagaagcacaacaccgcagcccggcggctgtacatccggggacacaatggcaagatctacccatacctcgtcatgaacgacgcctgcctcacagagtcacggcgagaggagcgtgtgt

SEQ ID NO: 74333 - DNA, 30 bp, Homo sapiens
  chr7:98606144-98606174
  hypo
ggctacggtgcaggcgcggggaacccaagc

SEQ ID NO: 74334 - DNA, 30 bp, Homo sapiens
  chr7:98609998-98610028
  hypo
cggaatgtgaagggcgctccgggctctgag

SEQ ID NO: 74335 - DNA, 30 bp, Homo sapiens
  chr7:98625691-98625721
  hypo
caagcctgaaaagccgggcccctgaagcat

SEQ ID NO: 74336 - DNA, 216 bp, Homo sapiens
  chr7:98636081-98636297
  hypo
gatccgcccgaaggcgttgtgttccacgcagaaggtgtggtccagtacaggcgtgatgtcgttctctctgttgaaataagacagaaggatgtaggttagaactctgccaccacgcggggccattgggtagacagaaaacatttacgactgccaaacccggggctgcaagacaggacagcctcgggcagacacagaacctgcgtgggggtggcacag

SEQ ID NO: 74337 - DNA, 222 bp, Homo sapiens
  chr7:98639037-98639259
  hypo
gaaccattctagaaccagagccgttctggtcttaactcaggaaccacacgtctctactttcaggtttgaattatgttcacctcaaaaaatgaatcaaaactctgcttccatgttggtaaaaggttcttccacatttgaatgcacaagcggagcctgtcccgacttcgcctcagtggcctgtgcaggacgctggtgaaggccgtggtgccacaggaggagtcc

SEQ ID NO: 74338 - DNA, 203 bp, Homo sapiens
  chr7:98639737-98639940
  hypo
tacggggttgattgaagaatccggatttatttgcaacatgtaaatattgtccgtagaatactggaagagcccgtaataaggattcagcatttcatggcacagcaagtaaagccactccctgggagcaaacaacaaaaatgcatttgagacgcgctaaaatttctacattttttttttttccctgagatggagtctcactctgt

SEQ ID NO: 74339 - DNA, 44 bp, Homo sapiens; identical to SEQ ID NO: 21588
  chr7:98704237-98704281
  hypo

SEQ ID NO: 74340 - DNA, 163 bp, Homo sapiens; identical to SEQ ID NO: 21589
  chr7:98704340-98704503
  hypo

SEQ ID NO: 74341 - DNA, 42 bp, Homo sapiens
  chr7:98705847-98705889
  hypo
aattttgttttgatacggagtctcgctctgtcgcccaggctg

SEQ ID NO: 74342 - DNA, 45 bp, Homo sapiens
  chr7:98738341-98738386
  hypo
ttcactatctttgcactgaatttcgctctgtgtctattcattgac

SEQ ID NO: 74343 - DNA, 130 bp, Homo sapiens
  chr7:98775354-98775484
  hypo
ctactcaaagatgacccgatacagcagggataggcgagacacattaacttcagaggatgtggcaggagtgaagaccacctgcccagtcacctgccacacgcaacagcccaggccccggcagggtgaccct

SEQ ID NO: 74344 - DNA, 30 bp, Homo sapiens; identical to SEQ ID NO: 21590
  chr7:98805069-98805099
  hypo

SEQ ID NO: 74345 - DNA, 42 bp, Homo sapiens
  chr7:98814529-98814571
  hypo
ttccaggtcttattaacggtattgagtcgcttcctctggttg

SEQ ID NO: 74346 - DNA, 31 bp, Homo sapiens; identical to SEQ ID NO: 21591
  chr7:98821689-98821720
  hypo

SEQ ID NO: 74347 - DNA, 31 bp, Homo sapiens; identical to SEQ ID NO: 21592
  chr7:98845138-98845169
  hypo

SEQ ID NO: 74348 - DNA, 73 bp, Homo sapiens; identical to SEQ ID NO: 21593
  chr7:98870777-98870850
  hypo

SEQ ID NO: 74349 - DNA, 187 bp, Homo sapiens
  chr7:98876192-98876379
  hypo
cgccctgtaagacactcgattttcacgtgcatcgtacagggtagaaaactcagtttggcagacatttagagatttgatcaaagtcccaggcccattggtagaaaacccagccctggaaggggcccaattccatctccagtcctccctgctctgccacggccatctctgtagccgtgagcatgtgtgg

SEQ ID NO: 74350 - DNA, 31 bp, Homo sapiens
  chr7:98877234-98877265
  hypo
gaggaagagggcatggcggcctcactgagtg

SEQ ID NO: 74351 - DNA, 196 bp, Homo sapiens
  chr7:98879379-98879575
  hypo
cccaggcccactgtcacggctaaggttccagaatgcagagccggctctgaccggccaccagtgctgacctccagagaaacaggggcaaagagccagacagtggacccctcgtccctgtgtttgctgataccgtgaatccacatgtcccctgagtgcctctccctgctgcctcgggaactaccgcccttgccctgtg

SEQ ID NO: 74352 - DNA, 31 bp, Homo sapiens; identical to SEQ ID NO: 21595
  chr7:98881512-98881543
  hypo

SEQ ID NO: 74353 - DNA, 31 bp, Homo sapiens
  chr7:98882347-98882378
  hypo
ggaggtacgtgcttttcggcaggttcaaggc

SEQ ID NO: 74354 - DNA, 119 bp, Homo sapiens
  chr7:98885540-98885659
  hypo
tgagctgctgaagctgcggcgggagctggaagaggccgccctgcagagcgaggcgacggcctccacactgcgcaagaagcacgtggactccatggccgagctgacggagcatgtggaga

SEQ ID NO: 74355 - DNA, 25 bp, Homo sapiens
  chr7:98889549-98889574
  hypo
gagtgaaactcggtctcaggaaaaa

SEQ ID NO: 74356 - DNA, 35 bp, Homo sapiens
  chr7:98889890-98889925
  hypo
ctgtggaaagcccccacgggcgcctgacaggctgg

SEQ ID NO: 74357 - DNA, 31 bp, Homo sapiens
  chr7:98894702-98894733
  hypo
gcagtgtaactttaggcgagttgcttaatct

SEQ ID NO: 74358 - DNA, 38 bp, Homo sapiens
  chr7:98901752-98901790
  hypo
agcacaggcccatgtccggcccacggtagaccctcatg

SEQ ID NO: 74359 - DNA, 217 bp, Homo sapiens
  chr7:98904286-98904503
  hypo
atgacgctgaggaccgggctggcatggcagagactgccctaaacaagctgcgcaccagacaccgcgtggccggcaagggcatcacctctgtggagatcatccaggtgtccaagacaggcacctcgaaaaccctttctgaggagtgaggccctccgtgtcctaggccacaactggtaggtgtggactccgctctggacggtctcgctcagagcgctcc

SEQ ID NO: 74360 - DNA, 30 bp, Homo sapiens
  chr7:98945876-98945906
  hypo
cgtcctatgtaatccgaaatctcacgaaaa

SEQ ID NO: 74361 - DNA, 166 bp, Homo sapiens; identical to SEQ ID NO: 21596
  chr7:98955508-98955674
  hypo

SEQ ID NO: 74362 - DNA, 30 bp, Homo sapiens; identical to SEQ ID NO: 21597
  chr7:98956010-98956040
  hypo

SEQ ID NO: 74363 - DNA, 45 bp, Homo sapiens
  chr7:98960331-98960376
  hypo
gccatccccttcccagcgtcggggaagaggcgggtaagttctaga

SEQ ID NO: 74364 - DNA, 147 bp, Homo sapiens; identical to SEQ ID NO: 21598
  chr7:98966331-98966478
  hypo

SEQ ID NO: 74365 - DNA, 96 bp, Homo sapiens
  chr7:98966738-98966834
  hypo
aagcatgtgctccccactgggcgagggaaataccttagtggcagccccttttcagctcacccacgctcaggggcagggccctgtcactggaactga

SEQ ID NO: 74366 - DNA, 30 bp, Homo sapiens; identical to SEQ ID NO: 21600
  chr7:98969184-98969214
  hypo

SEQ ID NO: 74367 - DNA, 30 bp, Homo sapiens
  chr7:98970797-98970827
  hypo
cagtggaaaagagagcggcggctaagggca

SEQ ID NO: 74368 - DNA, 80 bp, Homo sapiens; identical to SEQ ID NO: 44448
  chr7:98971520-98971600
  hypo

SEQ ID NO: 74369 - DNA, 30 bp, Homo sapiens; identical to SEQ ID NO: 5700
  chr7:98971837-98971867
  hypo

SEQ ID NO: 74370 - DNA, 123 bp, Homo sapiens; identical to SEQ ID NO: 44450
  chr7:98972089-98972212
  hypo

SEQ ID NO: 74371 - DNA, 87 bp, Homo sapiens
  chr7:98985727-98985814
  hypo
ggacgctgaagggccgcacatggaagcccacgctggtcatcctgcggatcaaccgggctgcccgctgcgtgcgctgggcccccaacg

SEQ ID NO: 74372 - DNA, 165 bp, Homo sapiens
  chr7:98991539-98991704
  hypo
cttctcactaaagcccgctccccaagaagtctgggagcgcctggtggacagggtgggcctgagcccagcgccagcacaggttgaattcataagctcctcttcctctttgcagccagatctcggtgctcagcggcggcaaggccaagtgctcgcagttctgcacca

SEQ ID NO: 74373 - DNA, 223 bp, Homo sapiens
  chr7:98994223-98994446
  hypo
cagggcacagggtgggcgagacacagcagaggtcctggcagcgcggcccaggtccccggcatctcctcccacgggtcgcagttacttattcagggagagtgactgcattcgttttcctgacaatgtggcatcgtcttttgctgaggggtgggagaagggcaggggttaaaacaaagcaaccccccaccccctcccaacacacgtgccagaaccctagaacttt

SEQ ID NO: 74374 - DNA, 181 bp, Homo sapiens
  chr7:98997416-98997597
  hypo
tacatgatcttgatcctcatacgactcttgaggaagatatttacagcttcattttcacacaggacttgcagaggcctgggacagctggctgagctgcgctgggctggactgccttctggccggcacaggctcgcagcccccttccagtccccatggccacgacattacagatggatgcagg

SEQ ID NO: 74375 - DNA, 30 bp, Homo sapiens
  chr7:99019876-99019906
  hypo
gtgacacctgcacggcgttcctgaccccgc

SEQ ID NO: 74376 - DNA, 77 bp, Homo sapiens
  chr7:99020628-99020705
  hypo
ttttttttttcaccaccacaccgggcgagagctcttctttctttcgcctattaaacttcagctcttaacctcttttt

SEQ ID NO: 74377 - DNA, 16 bp, Homo sapiens
  chr7:99020764-99020780
  hypo
tggctcacaacaaatc

SEQ ID NO: 74378 - DNA, 74 bp, Homo sapiens
  chr7:99021092-99021166
  hypo
tgccacctgaggcagcgggaacaccaatcccgaagcaggcaagaggttggtggcctctgcgaactgacagaagg

SEQ ID NO: 74379 - DNA, 30 bp, Homo sapiens
  chr7:99021445-99021475
  hypo
gaccacttcgttcaccgggaccctgttctg

SEQ ID NO: 74380 - DNA, 121 bp, Homo sapiens
  chr7:99032513-99032634
  hypo
tccgttccccaaaccgcaggttatggaactgggctgcggatttgcggaatagtctccgggaggagtatttgtcagagagggtcccaaaactctcctcctcctcctcgtcttcttcctgcgt

SEQ ID NO: 74381 - DNA, 71 bp, Homo sapiens
  chr7:99065117-99065188
  hypo
cccaggcagtgaaaatcgcatatacaattataggtgtgtgaaagcacggccagcatcgccagtgggaatta

SEQ ID NO: 74382 - DNA, 31 bp, Homo sapiens; identical to SEQ ID NO: 5704
  chr7:99070937-99070968
  hypo

SEQ ID NO: 74383 - DNA, 27 bp, Homo sapiens
  chr7:99073692-99073719
  hypo
tgggattataggcgtgagccaccgtgc

SEQ ID NO: 74384 - DNA, 30 bp, Homo sapiens
  chr7:99073939-99073969
  hypo
gccccgttggaattccgggtcccagatctg

SEQ ID NO: 74385 - DNA, 236 bp, Homo sapiens
  chr7:99084624-99084860
  hypo
gtgttttcggcagctcgcgtatcttgttgaacataagaggattcacaccaaagaaaaaccttataaatgtagcaaatgtgaaaaaacgtttagtcagaattcaacccttattcgacatcaggtgatccatagtggagaaaaacgccataaatgccttgagtgtggaaaagcctttggccggcattcaacccttctatgtcatcaacagattcacagtaaaccgaacacccataaat

SEQ ID NO: 74386 - DNA, 33 bp, Homo sapiens; identical to SEQ ID NO: 21610
  chr7:99101318-99101351
  hypo

SEQ ID NO: 74387 - DNA, 30 bp, Homo sapiens
  chr7:99104020-99104050
  hypo
agaagaggcggtggccgtgatagaaaatat

SEQ ID NO: 74388 - DNA, 451 bp, Homo sapiens
  chr7:99140776-99141227
  hypo
tccaggtgcctcaccgtcccttttgcttgtgtcccacgctccagactccgcgcgcgcctgggcgaggctgttgggtagggcgtgcgcacgaggcacccaggatgggggacggaggtgttcactgcaggcgccaaccgcatgctcacaatgctcacctgcaggccttgccacccagggtgggtatggagcactggagtcttctgtataactacagttctggctctggattttccgagatcgcgactgtggccgaggcaggggcaccagcaaccagtggcgctcagtgaagggcaggctgggtctgttccgccatttgccggaccggggtggccgagccgaggacctggaggagaagcgccctgcgccctcggtccgcccactcccaaagcctttcttcgctatcccaggaagcagccctgagttgtggtttgcgcccgggtgtgggttctgt

SEQ ID NO: 74389 - DNA, 1137 bp, Homo sapiens; identical to SEQ ID NO: 44461
  chr7:99155931-99157068
  hypo

SEQ ID NO: 74390 - DNA, 175 bp, Homo sapiens
  chr7:99227355-99227530
  hypo
cggaggacgcacaccggggagaagccctacacctgcgagtgtggcaagagcttcagcaggaatgccaatctggcggtgcaccggcgtgcccacactggcgagaagccatatgggtgccaggtgtgcgggaagcggttcagcaaaggggagcggctggtccgacaccagagaatcc

SEQ ID NO: 74391 - DNA, 30 bp, Homo sapiens; identical to SEQ ID NO: 21613
  chr7:99236608-99236638
  hypo

SEQ ID NO: 74392 - DNA, 39 bp, Homo sapiens
  chr7:99391323-99391362
  hypo
tcatccattttttttgcggttcatccattctgtagcatg

SEQ ID NO: 74393 - DNA, 99 bp, Homo sapiens
  chr7:99391421-99391520
  hypo
tttatttatccatccatcgatggacatgtgggctattagcaccttttggcccttgtgaattggactgttagaaatatgtgagtccgtgtattttagtaa

SEQ ID NO: 74394 - DNA, 31 bp, Homo sapiens; identical to SEQ ID NO: 21614
  chr7:99538810-99538841
  hypo

SEQ ID NO: 74395 - DNA, 145 bp, Homo sapiens
  chr7:99552783-99552928
  hypo
acaggcgtgagccacagcgcccggcctgaaaactcttttacacaaacccaagcgtcttctgtgcctcagtttccccacactccttggcttcctgggagacccggcccttcactccagccgctccgcatctccacaccatgttggt

SEQ ID NO: 74396 - DNA, 31 bp, Homo sapiens; identical to SEQ ID NO: 21615
  chr7:99589185-99589216
  hypo

SEQ ID NO: 74397 - DNA, 94 bp, Homo sapiens
  chr7:99602414-99602508
  hypo
tccacccaaggacaccaccagcggggcgttcccagtacgccactcaaagccttacgtggagaggccaggcgcagtggcgcagacctgtaatccc

SEQ ID NO: 74398 - DNA, 31 bp, Homo sapiens; identical to SEQ ID NO: 21616
  chr7:99611394-99611425
  hypo

SEQ ID NO: 74399 - DNA, 29 bp, Homo sapiens
  chr7:99625681-99625710
  hypo
aattaagtacttggggctgggcgcagtga

SEQ ID NO: 74400 - DNA, 17 bp, Homo sapiens
  chr7:99649203-99649220
  hypo
cacggcgccgggccccc

SEQ ID NO: 74401 - DNA, 314 bp, Homo sapiens
  chr7:99691589-99691903
  hypo
tttccctccacggacgctgtgcgtgccctgctggagcagcaagtacccacagtgcggtagcacggagaggaccactatctgcactgtcagcactttagccccggcagggctggagcgggaggtggggaggcggcaatgagagcacggtaaggagctacccctttaagggtcaaaacagatggccctccagcaatttgggcacttaccagagcagtggaaaggcgcaggatagccagcagggtccgggcagaagtataggtggcatccttactagcccaagcctctcgcctcatctccacgtatgctgctgtgat

SEQ ID NO: 74402 - DNA, 30 bp, Homo sapiens; identical to SEQ ID NO: 21619
  chr7:99707615-99707645
  hypo

SEQ ID NO: 74403 - DNA, 166 bp, Homo sapiens
  chr7:99723168-99723334
  hypo
acatagctagctggtcgatgaggcagcacccagaatggccgctgtcttgttaagctcaagctccagcctgagcaacatagtgaaaccccaattctacacacacacacacacacaaagaagactgcagggctggtggtgcagcgcctgtagtcccagttactgcaga

SEQ ID NO: 74404 - DNA, 24 bp, Homo sapiens
  chr7:99761982-99762006
  hypo
ttcctttaaaaccccccgctctcg

SEQ ID NO: 74405 - DNA, 38 bp, Homo sapiens
  chr7:99782062-99782100
  hypo
atatgcagttgtacagcgtgttagtttttttttttttt

SEQ ID NO: 74406 - DNA, 266 bp, Homo sapiens; identical to SEQ ID NO: 21621
  chr7:99839731-99839997
  hypo

SEQ ID NO: 74407 - DNA, 93 bp, Homo sapiens
  chr7:99849462-99849555
  hypo
gcaggatcaataagtatgtcacgaaccaaaaattctgagtcatcaaattctgcacgcctgaggtccatttaaaaaaaggagcctgggccgggt

SEQ ID NO: 74408 - DNA, 31 bp, Homo sapiens; identical to SEQ ID NO: 5713
  chr7:99869133-99869164
  hypo

SEQ ID NO: 74409 - DNA, 31 bp, Homo sapiens; identical to SEQ ID NO: 21623
  chr7:99939850-99939881
  hypo

SEQ ID NO: 74410 - DNA, 142 bp, Homo sapiens
  chr7:99964959-99965101
  hypo
cccctcctgcaggtagcagggcgccaagcagtgacttctgaccaacagagtgtggggagaagggatgtgtattagccccggaggacgtgatgtgagacccgcttgtgagtcctccacactcgttccccattggcaagataca

SEQ ID NO: 74411 - DNA, 77 bp, Homo sapiens; identical to SEQ ID NO: 21624
  chr7:100024903-100024980
  hypo

SEQ ID NO: 74412 - DNA, 136 bp, Homo sapiens; identical to SEQ ID NO: 21625
  chr7:100025339-100025475
  hypo

SEQ ID NO: 74413 - DNA, 129 bp, Homo sapiens; identical to SEQ ID NO: 21626
  chr7:100030627-100030756
  hypo

SEQ ID NO: 74414 - DNA, 31 bp, Homo sapiens
  chr7:100039691-100039722
  hypo
cctgtcacacgagacacgctggaagatggga

SEQ ID NO: 74415 - DNA, 30 bp, Homo sapiens
  chr7:100054427-100054457
  hypo
gggcagcatggcatcggacgtggtgccgtc

SEQ ID NO: 74416 - DNA, 278 bp, Homo sapiens; identical to SEQ ID NO: 21627
  chr7:100064565-100064843
  hypo

SEQ ID NO: 74417 - DNA, 38 bp, Homo sapiens
  chr7:100065386-100065424
  hypo
gggcctcccaggccccggtggggcgggggcccagatgt

SEQ ID NO: 74418 - DNA, 31 bp, Homo sapiens; identical to SEQ ID NO: 21628
  chr7:100076281-100076312
  hypo

SEQ ID NO: 74419 - DNA, 229 bp, Homo sapiens
  chr7:100086231-100086460
  hypo
gccccatgcccaccgccgcccagcttcagccctcccgagccggagggacgggacgcccaccaagaccactccttgtgaaatccccccgcccttccccaacctccttcagcaccggcctccactcctggccttcccccaagccaagtctgcttcccgaacccctggcgatggggtctcaaggctacctgtcctctgccactccaaggagccagccggctccaccccagct

SEQ ID NO: 74420 - DNA, 158 bp, Homo sapiens; identical to SEQ ID NO: 21629
  chr7:100088161-100088319
  hypo

SEQ ID NO: 74421 - DNA, 31 bp, Homo sapiens; identical to SEQ ID NO: 21630
  chr7:100116513-100116544
  hypo

SEQ ID NO: 74422 - DNA, 26 bp, Homo sapiens
  chr7:100153793-100153819
  hypo
cagccacaatggctcacgcctgcaat

SEQ ID NO: 74423 - DNA, 26 bp, Homo sapiens
  chr7:100153938-100153964
  hypo
aaacaaacgaacgaacaaacaaaacc

SEQ ID NO: 74424 - DNA, 31 bp, Homo sapiens; identical to SEQ ID NO: 21631
  chr7:100160494-100160525
  hypo

SEQ ID NO: 74425 - DNA, 34 bp, Homo sapiens; identical to SEQ ID NO: 21632
  chr7:100170148-100170182
  hypo

SEQ ID NO: 74426 - DNA, 30 bp, Homo sapiens
  chr7:100171602-100171632
  hypo
aaccccgcgacgcacgtgctctcagacaca

SEQ ID NO: 74427 - DNA, 30 bp, Homo sapiens
  chr7:100174929-100174959
  hypo
gctgctgctgccgccgttcccgctcctgcc

SEQ ID NO: 74428 - DNA, 187 bp, Homo sapiens
  chr7:100179297-100179484
  hypo
ccatgtataagctacccggtctgcagtgttttcgttaccgcagcctgagccaactgggacgcacatacaaacacctcctctccagttcttcattcttctcaccttcgggcagcgtactgagctggttcctccggacattgaggtcccgcagggaagagaggccacacagttccgagggcagggattg

SEQ ID NO: 74429 - DNA, 214 bp, Homo sapiens
  chr7:100179713-100179927
  hypo
gcttgttgttgctgacgatgaggaccctcaggggcagctggcagatgtagggtggcagcagcgacagctggtttcggctgtggaagggagaaaggcagcggactggctccccaggcatggcatcccagcactgccatcctctcggggtcactgggtgggtcactcagtagtacttgagactgagaagcacacgctcccacgtggccctggctcg

SEQ ID NO: 74430 - DNA, 37 bp, Homo sapiens
  chr7:100189308-100189345
  hypo
ccaggcatttggaggccgccgccgatgtctcagcaag

SEQ ID NO: 74431 - DNA, 31 bp, Homo sapiens
  chr7:100190396-100190427
  hypo
ttcccccagtttgcctcggacccaaggtgtg

SEQ ID NO: 74432 - DNA, 87 bp, Homo sapiens
  chr7:100198414-100198501
  hypo
atgcccctgatggccgcacagaaggacttcttctgggaggccctggacatgctgcagagggctgaaggaggcgggggtggtgtaggg

SEQ ID NO: 74433 - DNA, 31 bp, Homo sapiens; identical to SEQ ID NO: 21634
  chr7:100212727-100212758
  hypo

SEQ ID NO: 74434 - DNA, 30 bp, Homo sapiens; identical to SEQ ID NO: 21635
  chr7:100218066-100218096
  hypo

SEQ ID NO: 74435 - DNA, 292 bp, Homo sapiens
  chr7:100218440-100218732
  hypo
tcttgactgggggacggggatgtgaggatccccagggcctcagaagttgttatcaatgttccagacatccccgctaagcgcattggctgccccttgcagcgtccaggtgagcagggctagctgacgccggaaacggctctcctggaagccagtggaggaggtggccccgggggtcccggagctgttggagcgcagcagccgcaggtggtccagcagggcgcccagcgtgtggtctccacggcccatgaagatgtggcggaacggggagtcggctggcgacacgtactgggaa

SEQ ID NO: 74436 - DNA, 30 bp, Homo sapiens; identical to SEQ ID NO: 21637
  chr7:100229850-100229880
  hypo

SEQ ID NO: 74437 - DNA, 30 bp, Homo sapiens; identical to SEQ ID NO: 21638
  chr7:100255028-100255058
  hypo

SEQ ID NO: 74438 - DNA, 33 bp, Homo sapiens
  chr7:100258216-100258249
  hypo
gtgcagtggggagctcagatacgcacagaagag

SEQ ID NO: 74439 - DNA, 254 bp, Homo sapiens
  chr7:100275848-100276102
  hypo
agctgtgggacgtgcgggattccatgtgccgacagaccttcatcggccatgaatccgacatcaatgcagtggctgtgagttttggggcgagctaggccaggccctccccaccaggctcccggccctgctcctcaccctcaccctcaccccatctgggtcccgtgtcctgcagttcttccccaacggctacgccttcaccaccggctctgacgacgccacgtgccgcctcttcgacctgcgggccgatcaggagc

SEQ ID NO: 74440 - DNA, 30 bp, Homo sapiens; identical to SEQ ID NO: 21640
  chr7:100279780-100279810
  hypo

SEQ ID NO: 74441 - DNA, 30 bp, Homo sapiens
  chr7:100281744-100281774
  hypo
gccttttctcggagcgcgcactgtgggagc

SEQ ID NO: 74442 - DNA, 30 bp, Homo sapiens; identical to SEQ ID NO: 21641
  chr7:100283197-100283227
  hypo

SEQ ID NO: 74443 - DNA, 31 bp, Homo sapiens; identical to SEQ ID NO: 21642
  chr7:100283961-100283992
  hypo

SEQ ID NO: 74444 - DNA, 114 bp, Homo sapiens
  chr7:100284948-100285062
  hypo
tttcccgggggcttcgtccaaaggccccatcgccttcttcgatgcttctttggtaaaagcagctgtcaccacggccgcggcctagagaagaggccagacgcacaatgaaacctg

SEQ ID NO: 74445 - DNA, 682 bp, Homo sapiens
  chr7:100285460-100286142
  hypo
cctgcagcaccgcggcgaactccttgtcctgcagctcttccgggacctggcagtgggttgggacagccaagacaccacatgctgccagatcccctccacaggcagaggccaccaccgccaacccccctcgcccacgcacccaccttgttctccttgacgtagagagccagcatttcctctcgcccataacggtagtcagccagcttgtatttgggcatggcaggggacgggggtggggaggccacgctgccgcccccggacagggccctgagcctggacacaacacagagagaagaagacagaggtcagggcagcctgactgtgctttctcgaatctccacggcagccgaggcacaagtgactcaccactcaggcccaaagttgagtgtctctgctgccatcgtggggctgggcgtgtttgagaggccgggggtggggaggaggggacctggcgttcactgtccaaacacctgtgggggaacaggggccatgaagaacagcacacgaaggagaactttaaagcgcagggaggacaccatgggggacatcctagtgggcacaacaatgggccccggactagctggtgggtcacctggggtctaaaaggactcacctgagccagccacgtggccactcacaccatgagttacccagagatgagtccagacggtgaaagacctgg

SEQ ID NO: 74446 - DNA, 50 bp, Homo sapiens
  chr7:100388724-100388774
  hypo
cgcttccccaggtgcacggcctggaagggatgaggcgggggaggtgaaca

SEQ ID NO: 74447 - DNA, 784 bp, Homo sapiens
  chr7:100402518-100403302
  hypo
gctagaagtgagaggcggaagcgcgatggcccagggctgtgatggcaggaggaggtgaggcgggcaggctggccccaaagagtccttgggtcctcagctccatggggctgtgactgctcctctggggcccttctaggcatggcatgagcgcagtgcaagaagacagcattggcacccgaagctgaccccaaaagcccctggagaccccgtgggcctgactccagctgccccgctctcccagccccactccagctcctgccactgcttactcagcagagatctggctgaccagctcgaaggagccaaagccagcggctgcgaaactttcttcgtatcttcccattttgatggcccgaagccactcgcccacagagccaaaagctgagtagtgaggctgccgctggtccaggagagggtgtgaggccctagggggcaaggatggggaggaatgctgagtaccaggcccaggtccgggggaggaggtggaacccagccttgcagaggcggacagaggccctcccacccaacaccaatgaacggacacttctgggcaaggagtgggggcagagagcgggaaggagggcccattctctgcagtcctcacccgccattctcccgggccacgattttgaggctggcggggttccggatcatcttgtccagggcgctgaccacctgggggaagcggggccgggcattccggtctttctgccaacagtccagcatgagctggtggagggaggtgggacagtctgggggcgggggcagccggtagtcctgttca

SEQ ID NO: 74448 - DNA, 192 bp, Homo sapiens
  chr7:100405095-100405287
  hypo
gccaggtctcggtggacgtagctcatctcggcaaggtaccgcatgcccgaggcgatgccccgcagcatgcccacgagctggatgactgtgaactgtccgtcgtttagctggagagcagatagggtgggggcttggtgaggacagcccacccaccgttccccctcccatccacatcttttttttttagagaca

SEQ ID NO: 74449 - DNA, 81 bp, Homo sapiens; identical to SEQ ID NO: 21645
  chr7:100407981-100408062
  hypo

SEQ ID NO: 74450 - DNA, 254 bp, Homo sapiens
  chr7:100410667-100410921
  hypo
gcccacccccgcttcgttcccaggtgcccgggcagccttcggctctcacctgcaccaatcacctcttcaatcttgacgtaggagacatcgatctcttttgcaaattccctcacagcctcattagggtcttcataagtgaaggggtcgatgtagaccttagtacctgagaaatcaggcagggccccgtcagctgggaattaactcccactggactcggaggctcggctcatagcttttagccccaaacccctgtc

SEQ ID NO: 74451 - DNA, 38 bp, Homo sapiens
  chr7:100414989-100415027
  hypo
gaggtagtggggtggccgtcacccgggaacccaagttc

SEQ ID NO: 74452 - DNA, 30 bp, Homo sapiens
  chr7:100415897-100415927
  hypo
acaggcgtgagccaccgcacccaacctcag

SEQ ID NO: 74453 - DNA, 45 bp, Homo sapiens; identical to SEQ ID NO: 21647
  chr7:100417051-100417096
  hypo

SEQ ID NO: 74454 - DNA, 99 bp, Homo sapiens
  chr7:100420025-100420124
  hypo
caccacgcagctaccggccacgggcacaaccagctcccgaggcacagtctccgggaatcgagtcaggttcacagtcagctgggcgcactttttgtagaa

SEQ ID NO: 74455 - DNA, 285 bp, Homo sapiens; identical to SEQ ID NO: 21648
  chr7:100421274-100421559
  hypo

SEQ ID NO: 74456 - DNA, 1031 bp, Homo sapiens; identical to SEQ ID NO: 44490
  chr7:100424501-100425532
  hypo

SEQ ID NO: 74457 - DNA, 30 bp, Homo sapiens
  chr7:100454498-100454528
  hypo
ggcccagtgggctccgggtcctgccccagg

SEQ ID NO: 74458 - DNA, 123 bp, Homo sapiens; identical to SEQ ID NO: 21650
  chr7:100480481-100480604
  hypo

SEQ ID NO: 74459 - DNA, 30 bp, Homo sapiens
  chr7:100483856-100483886
  hypo
ctgccctccagctccgggagtgtgagctga

SEQ ID NO: 74460 - DNA, 298 bp, Homo sapiens
  chr7:100489967-100490265
  hypo
agttggcccagtatcgcatcagtcgctgggcgaagattttctcctctgccgtgtagtttcgagaggggtccagggggatcccaaagatgaactcgatctcgtagccgtggggcacccccatccacaggggccaggagagcgtggaagcacggtgttcaaagacgtaggcgtagacccgggcaccctgggcagccagtcgcccagccagctgggccacggggcacacgacattgtggtcgcccaccacatcgctcagggcctccctcaggcgtgccgggtcctcgggatgcagccagtc

SEQ ID NO: 74461 - DNA, 44 bp, Homo sapiens
  chr7:100490910-100490954
  hypo
ggttcaccaggacctgcgctggtcgtgtccgaaggcaggctacc

SEQ ID NO: 74462 - DNA, 144 bp, Homo sapiens
  chr7:100512578-100512722
  hypo
cttgccctgttgcccaggcctcgaactcctgacctcaagtctcaaactcttctcttcaagtgatccacccgtctcggcctcttggcctcccaaattgctgggattatgggcatgaaccaccgcgcccagcccccaccactttct

SEQ ID NO: 74463 - DNA, 66 bp, Homo sapiens
  chr7:100514734-100514800
  hypo
agatccaagaaccctctcttgcggactgaattaggacctgtttccggtaaaagtgctttcctgaat

SEQ ID NO: 74464 - DNA, 89 bp, Homo sapiens; identical to SEQ ID NO: 44493
  chr7:100609019-100609108
  hypo

SEQ ID NO: 74465 - DNA, 39 bp, Homo sapiens
  chr7:100650570-100650609
  hypo
tattattgactatagtcactctgtcgtgttaaatactag

SEQ ID NO: 74466 - DNA, 31 bp, Homo sapiens
  chr7:100731010-100731041
  hypo
cagacccacacccaccgcgtggtggacctgg

SEQ ID NO: 74467 - DNA, 344 bp, Homo sapiens
  chr7:100732094-100732438
  hypo
tgcctggagacaagcggtccccccggatcaccgggctctgtcccttcggtccccgggagatcctggtggcggatgagcagaaccgggcactgaaacgcttctccctcaacggcgactacaagggcaccgtgccggtccctgagggctgctccccttgcagcgtggccgccctgcagagcgcggtggccttctccgctagcgcacggctctatctcatcaaccccaacggcgaagtgcagtggcgcagggccctgagcctctcccaggccagccacgcggtggcggcactgcctagcggggaccgcgtggctgtcagcgtggcgggccacgtggaggtgtacaat

SEQ ID NO: 74468 - DNA, 21 bp, Homo sapiens
  chr7:100768457-100768478
  hypo
ccaaatccagctgggcgcggt

SEQ ID NO: 74469 - DNA, 30 bp, Homo sapiens
  chr7:100803926-100803956
  hypo
ttcttggtgggactcggctgcccctcctct

SEQ ID NO: 74470 - DNA, 675 bp, Homo sapiens; identical to SEQ ID NO: 44500
  chr7:100808389-100809064
  hypo

SEQ ID NO: 74471 - DNA, 125 bp, Homo sapiens; identical to SEQ ID NO: 44506
  chr7:100823225-100823350
  hypo

SEQ ID NO: 74472 - DNA, 431 bp, Homo sapiens; identical to SEQ ID NO: 44507
  chr7:100823380-100823811
  hypo

SEQ ID NO: 74473 - DNA, 37 bp, Homo sapiens
  chr7:100834972-100835009
  hypo
tatatatatatatttttgagacggagtttcgctcttg

SEQ ID NO: 74474 - DNA, 96 bp, Homo sapiens
  chr7:100838060-100838156
  hypo
cgtgagccaccgcgcccagcctcagctgtgttcttaactctatttttccttcactggggatggtaccatttccccgtcctgttaagtgcccttgac

SEQ ID NO: 74475 - DNA, 85 bp, Homo sapiens
  chr7:100840808-100840893
  hypo
tctcatagtcattttctcattcggtctttgcaataacaacatcgtggcaaggtaggtatcagccctcttcgcaagtaaagaaaca

SEQ ID NO: 74476 - DNA, 24 bp, Homo sapiens
  chr7:100841132-100841156
  hypo
agcgagactctgtctcaacaacaa

SEQ ID NO: 74477 - DNA, 30 bp, Homo sapiens
  chr7:100849043-100849073
  hypo
aggcgtgagccaccgcgcccggcccctctc

SEQ ID NO: 74478 - DNA, 306 bp, Homo sapiens
  chr7:100849346-100849652
  hypo
acgaacccctgtgggcggaggagagaggcggggactccgggagcttcctgagagggccgtgtcttgggagcaaggtgacatattcagttcaggcacgcggaacatgaactcaggaagtggggagacagagagacccatcccccaactcccaggacgggggccaggccccctaaaaaggcacaatggcagggcaggtttggcagagtggttgagtgtcaggggtcgacaaaggacaccatgatgtagcgtgtgccccaggtcgttggcagcccctcgtggtagtgggtgaggcggccggggtgcagg

SEQ ID NO: 74479 - DNA, 30 bp, Homo sapiens
  chr7:100859446-100859476
  hypo
cagaattgaggaagcgcttccccgtgccca

SEQ ID NO: 74480 - DNA, 95 bp, Homo sapiens
  chr7:100865917-100866012
  hypo
tggaccgggctgcccggcagcgtcgcatcaaccggcagctggaggccctggagaatgacaacttccaggatgacccccacgcgggactccctcag

SEQ ID NO: 74481 - DNA, 158 bp, Homo sapiens
  chr7:100866247-100866405
  hypo
tggataagctctgacacgaagccttaggcttgggggcatggaggtgactgtcagctgggattggagaattggggtggagggcagaggctggtagcgaggggccgacttagagccaggagggcagggccaggtgtggtggctcacgcctgtaatcccag

SEQ ID NO: 74482 - DNA, 30 bp, Homo sapiens; identical to SEQ ID NO: 21655
  chr7:100877568-100877598
  hypo

SEQ ID NO: 74483 - DNA, 30 bp, Homo sapiens; identical to SEQ ID NO: 21656
  chr7:100883537-100883567
  hypo

SEQ ID NO: 74484 - DNA, 30 bp, Homo sapiens
  chr7:100889031-100889061
  hypo
cagcaaactagtatcggggtttcttgggcc

SEQ ID NO: 74485 - DNA, 30 bp, Homo sapiens
  chr7:100913042-100913072
  hypo
ggcaggtggcaaggcgccacgcctgagtgg

SEQ ID NO: 74486 - DNA, 30 bp, Homo sapiens; identical to SEQ ID NO: 21657
  chr7:100921854-100921884
  hypo

SEQ ID NO: 74487 - DNA, 92 bp, Homo sapiens
  chr7:100961429-100961521
  hypo
gctcgaattcacagcccgtgcctttgttgttgctggtaacatgcgggttctcaaattctaggatcctaaaaggaaaaagaagagcagtaggc

SEQ ID NO: 74488 - DNA, 35 bp, Homo sapiens; identical to SEQ ID NO: 44516
  chr7:101006043-101006078
  hypo

SEQ ID NO: 74489 - DNA, 85 bp, Homo sapiens; identical to SEQ ID NO: 44517
  chr7:101006293-101006378
  hypo

SEQ ID NO: 74490 - DNA, 203 bp, Homo sapiens
  chr7:101131925-101132128
  hypo
ggattacaggcgtaagccaccgcgcccgaactttaaccagttttaagcgttcaattcagccgtgttaggtaccgtcacactgtcgtccagccatctccactgtccatcttcagaactttttcattgtcccaattaaattgcagacttttaaaggaggaaaaaaagtttattgtgtgtgtcctgtctagcgcactcttccaggt

SEQ ID NO: 74491 - DNA, 78 bp, Homo sapiens; identical to SEQ ID NO: 21660
  chr7:101195309-101195387
  hypo

SEQ ID NO: 74492 - DNA, 424 bp, Homo sapiens
  chr7:101241665-101242089
  hypo
ctctgagctgcctcccaccctcgcctagcctctggcagggcctctggccaggcaggaacggccaacagagtcacctcctgctgacaagcctggcgctgacagccaggatctgggagaacaagaagtccattcaaggcgcagggccgggcgggcccactttcaggtgtatgatctcacctctcggaaactggcaagccgccggagggcctcgtcaaggctttgatgaccctgtgctgaggacgcaaatcctaggcctggccgacaccctgctccaaggaccaatgactgaggccagagagggtcccagatggagcctgggtaggggtgaaactgcacaggcggacgggcagagcgtccaccctggagaagagacccaggcccaaccaggccccagagcctgcacgagcacctggagtggcaggga

SEQ ID NO: 74493 - DNA, 31 bp, Homo sapiens; identical to SEQ ID NO: 21662
  chr7:101270579-101270610
  hypo

SEQ ID NO: 74494 - DNA, 30 bp, Homo sapiens
  chr7:101279963-101279993
  hypo
cctcgtcctgctggacggctgaggaaactg

SEQ ID NO: 74495 - DNA, 31 bp, Homo sapiens; identical to SEQ ID NO: 21663
  chr7:101382584-101382615
  hypo

SEQ ID NO: 74496 - DNA, 80 bp, Homo sapiens; identical to SEQ ID NO: 5741
  chr7:101457689-101457769
  hypo

SEQ ID NO: 74497 - DNA, 468 bp, Homo sapiens; identical to SEQ ID NO: 5742
  chr7:101458245-101458713
  hypo

SEQ ID NO: 74498 - DNA, 191 bp, Homo sapiens; identical to SEQ ID NO: 5743
  chr7:101459182-101459373
  hypo

SEQ ID NO: 74499 - DNA, 90 bp, Homo sapiens; identical to SEQ ID NO: 5744
  chr7:101460880-101460970
  hypo

SEQ ID NO: 74500 - DNA, 147 bp, Homo sapiens
  chr7:101465440-101465587
  hypo
tcttaaatattaatggcagggccctctggattgactgtgttatttgacccattccagttttcaaggcgtggtcttgaaaagctgtcgatcaccctggttttgggatgtgtttcagaaccaagtttcgatggtgtgtcagtgttggat

SEQ ID NO: 74501 - DNA, 455 bp, Homo sapiens
  chr7:101475653-101476108
  hypo
gtggtcatcagtgtcccccaccgacatggcacatccagcgagcccactgtgtccccagcacctgcggtgcagggggctggcaccttcaggggcgggcttcgtgcagacgtccacccagtcagtccccacaggtttatcaaacacaagtggggcgacaggacccacacttcggcgttggacgtgactcacgcggggagttggcttggagttcctttattcatccctatttgctttctgtctgtaatcctttgtaattccctggtttcatgatgtaattctaatggaaataaacccgaacctttcaaaattatgtaattaattgcattcagcttcaatgacaatgactaattatagtgatacctggtggcaaggcaggtacctactgctggggggctcctgtctgcttggtactaggactgccacttctgggcgcgtcggagcggctgcacaggggg

SEQ ID NO: 74502 - DNA, 38 bp, Homo sapiens
  chr7:101476345-101476383
  hypo
ggaggagggtgcgttcgactgaacgtgaagcgttcaag

SEQ ID NO: 74503 - DNA, 30 bp, Homo sapiens
  chr7:101492262-101492292
  hypo
ttacaagttgggccccgggttttgttttct

SEQ ID NO: 74504 - DNA, 140 bp, Homo sapiens
  chr7:101497174-101497314
  hypo
gcaggagggacctgaccgcagtggcattttgcacacctgcccggcctccaagtcctgcagctcgaatgagcttgcttgctgcaggcggcctgctccatcttgaggcttgtctggaaaggcggcttcggctttccagtgct

SEQ ID NO: 74505 - DNA, 153 bp, Homo sapiens; identical to SEQ ID NO: 21670
  chr7:101504315-101504468
  hypo

SEQ ID NO: 74506 - DNA, 30 bp, Homo sapiens; identical to SEQ ID NO: 21671
  chr7:101512514-101512544
  hypo

SEQ ID NO: 74507 - DNA, 43 bp, Homo sapiens
  chr7:101521620-101521663
  hypo
ggtccttttagagaccaacctcgcagttagccagcaacaggct

SEQ ID NO: 74508 - DNA, 57 bp, Homo sapiens
  chr7:101533918-101533975
  hypo
tatagagaggttggtgcgaaaatagcagcttgtttctgcttgcgtatttctactcac

SEQ ID NO: 74509 - DNA, 174 bp, Homo sapiens; identical to SEQ ID NO: 21672
  chr7:101536662-101536836
  hypo

SEQ ID NO: 74510 - DNA, 112 bp, Homo sapiens; identical to SEQ ID NO: 5746
  chr7:101559393-101559505
  hypo

SEQ ID NO: 74511 - DNA, 240 bp, Homo sapiens
  chr7:101566715-101566955
  hypo
ccccagccctcatcctggtgacgtcagtcggcccagtcctactccagaacgcttcttgggtgtctgtctgcaggactttgctcagttaatttttgtctcctctaaaacagaccccgttgctctgggaggagagccgagctgcggctcaggggccgtcactggtcatttttgccctgatgtatttttgcctctacatttcttgatctctggaacgttaatcccaacgatgcctggtctgcg

SEQ ID NO: 74512 - DNA, 184 bp, Homo sapiens; identical to SEQ ID NO: 21675
  chr7:101583546-101583730
  hypo

SEQ ID NO: 74513 - DNA, 159 bp, Homo sapiens
  chr7:101586045-101586204
  hypo
ccagactctgggtcagagggcagcttgagctcctccaccgactgctccaagcctttgccccagctcttggtgcctggggtggtgggagcagcatgggcttcgctgcacacggacctgggcccagatcttggttccatcggctgctgggagatcagttcc

SEQ ID NO: 74514 - DNA, 106 bp, Homo sapiens; identical to SEQ ID NO: 21676
  chr7:101596070-101596176
  hypo

SEQ ID NO: 74515 - DNA, 418 bp, Homo sapiens
  chr7:101603153-101603571
  hypo
actctttatagggtaataactcgattaattttgcaaggctttttagaataccattgttctcttgaaaagaacaggtttgctgttttaacaagactttaatgccatcgagatgcctcacattggcacggttgcgtaagaatcgcacggtcccatgaaatgaaattgagagagctttttccggcgcctggttggttggggcggcctccgttcggtgcttttttcatcctcgacccagtgaccaactgtgtttgccctgatgtttctttcaattccaccattccgaaatgtctccggaatctgtcgttttagcttttgcagcaaggttcgttgtgtttgtcttgcccgcttcaggtttctctaatgagattcacgtgtaaaggaggattggcaattaatcggatgactgattaattgtgag

SEQ ID NO: 74516 - DNA, 158 bp, Homo sapiens; identical to SEQ ID NO: 21678
  chr7:101616561-101616719
  hypo

SEQ ID NO: 74517 - DNA, 46 bp, Homo sapiens; identical to SEQ ID NO: 21679
  chr7:101624112-101624158
  hypo

SEQ ID NO: 74518 - DNA, 391 bp, Homo sapiens
  chr7:101627639-101628030
  hypo
gtacccaccctgtaagattgtcgtgggacaatgtagataaaaacctcgatatacagcctagtacacaaaggacggtgtaaatattctcttccgtgcttcgtagatttcatttttgaacgctcagattgttctccggcaaaaaaaaaaaaaaaaaaaagtgcttgcagtgagaacctgccctgcactctcaggcgagctgttgggtgcaagtcctgcaggactgagctctgaaggccacccacaccctgggttgtgcttggatgatggcatccctcctggcacaagcgcagatgggcagtcgggagggaacatcagcctgggaaaactagatgtcagtgaaaaatgctggaggtggctggcgttcgcaaaactcagtcgtaaaaaacagcac

SEQ ID NO: 74519 - DNA, 164 bp, Homo sapiens
  chr7:101629391-101629555
  hypo
ccctcacagacaattcaggaacgcttacagatagaaaccggtcctggttttaaggtgtaattttgcacaagtgttaacaacaagagatggaattggtaacgaggcactggggtcggatcttcatatttttgtcacatttcatcggtgagatcagtaggtctgtc

SEQ ID NO: 74520 - DNA, 147 bp, Homo sapiens
  chr7:101630531-101630678
  hypo
ccgtgcgtgagccacgacggtaaacagaggcgctcctcttgtcctaatgtggaactccccaagctacgggaaaggggtgcatatggaccgctgctcactcacggctcagatacttccacggtaatgggttggcgacagtgactcagc

SEQ ID NO: 74521 - DNA, 31 bp, Homo sapiens
  chr7:101632780-101632811
  hypo
tcaaacccgagtggagcgttctgttgcttca

SEQ ID NO: 74522 - DNA, 30 bp, Homo sapiens
  chr7:101648516-101648546
  hypo
ctccactgggccgggcgcggtggctcacgc

SEQ ID NO: 74523 - DNA, 456 bp, Homo sapiens
  chr7:101649202-101649658
  hypo
agggtctaaagagaaaggtcacgaggagcgagcggccgcgtggatgaggttggccagagaaactggtttgttttggaagccgatggaagatgcgcttggaaggctaaggctgccgaggttgaagtccgtcattctcagtgcagaccctagggaggaagtagcaggaccccagtggggctgcaggcattcagaaagagagctgcctggggtttcccttcagaacctccctccttttaacccgggagtaaagagaaaaagacccgcggggtccactggctcggaagtcggtctctttcagtttggagcctccagttggaaacctgccttttaatggccaggctgatggtctagttactctttgaacagggaagcctcgtcaggctctctgctgaccacgcctcagtgctccctcgaaggacaactctggaatgccagtttttatctcatctcggtaga

SEQ ID NO: 74524 - DNA, 30 bp, Homo sapiens
  chr7:101650974-101651004
  hypo
cctcccccctccctcgccaccacccacctc

SEQ ID NO: 74525 - DNA, 389 bp, Homo sapiens
  chr7:101652323-101652712
  hypo
cagtgttcagaggctcggcctgccagccacagcggttccagatgaaatgcagcttagaaggcagcatggtgtagtagctttggcgccagccgcacccagagtttggattgtagccagatggcctcaggtgcaatgtataacctctgggaattccagatttcctatttacacgacagggatgattccatacctgaagggctgtttggaagcatctagaagcaagcacagtggagtggctgtcatgacgctgaccgcacaaatgatggtgttaggatccctccacggatgtggccaggtgacacccctcacctaggccgcacagcaccctaatgtacacactgaagaaaggctgcgtggggctgcagagcggctcatttctaagaaggcca

SEQ ID NO: 74526 - DNA, 91 bp, Homo sapiens
  chr7:101653286-101653377
  hypo
tgctctgacctctcagaactgcggacttcttaaaaaagaaagagtgaggtgggcggcctcccttgctgccggtgctagattccatgatatg

SEQ ID NO: 74527 - DNA, 236 bp, Homo sapiens
  chr7:101656269-101656505
  hypo
tcaggttaaattcttgcggtaatccttacggccctgtggtgttcgctaagatgtagcaagaatgtaaatagctaggtactttgatctacctcaaatacttactagtttaaacattctgccattctgccgtcataccaaaaaaaaaaaaaaagcaccatcccagggttatgaatgacgttactgtctttggacatgctgtcttgtgtggctgagacgtagatcaagagaaatttgta

SEQ ID NO: 74528 - DNA, 49 bp, Homo sapiens; identical to SEQ ID NO: 5747
  chr7:101671376-101671425
  hypo

SEQ ID NO: 74529 - DNA, 32 bp, Homo sapiens; identical to SEQ ID NO: 21685
  chr7:101694627-101694659
  hypo

SEQ ID NO: 74530 - DNA, 18 bp, Homo sapiens
  chr7:101695197-101695215
  hypo
aaacctcatactggccgg

SEQ ID NO: 74531 - DNA, 30 bp, Homo sapiens; identical to SEQ ID NO: 21686
  chr7:101712197-101712227
  hypo

SEQ ID NO: 74532 - DNA, 80 bp, Homo sapiens; identical to SEQ ID NO: 5748
  chr7:101713617-101713697
  hypo

SEQ ID NO: 74533 - DNA, 139 bp, Homo sapiens; identical to SEQ ID NO: 5749
  chr7:101740642-101740781
  hypo

SEQ ID NO: 74534 - DNA, 125 bp, Homo sapiens; identical to SEQ ID NO: 5750
  chr7:101747614-101747739
  hypo

SEQ ID NO: 74535 - DNA, 78 bp, Homo sapiens; identical to SEQ ID NO: 5751
  chr7:101754976-101755054
  hypo

SEQ ID NO: 74536 - DNA, 68 bp, Homo sapiens; identical to SEQ ID NO: 5752
  chr7:101758485-101758553
  hypo

SEQ ID NO: 74537 - DNA, 50 bp, Homo sapiens; identical to SEQ ID NO: 5753
  chr7:101801838-101801888
  hypo

SEQ ID NO: 74538 - DNA, 106 bp, Homo sapiens; identical to SEQ ID NO: 5754
  chr7:101813724-101813830
  hypo

SEQ ID NO: 74539 - DNA, 190 bp, Homo sapiens; identical to SEQ ID NO: 5755
  chr7:101821747-101821937
  hypo

SEQ ID NO: 74540 - DNA, 60 bp, Homo sapiens; identical to SEQ ID NO: 5756
  chr7:101833091-101833151
  hypo

SEQ ID NO: 74541 - DNA, 50 bp, Homo sapiens; identical to SEQ ID NO: 5757
  chr7:101837120-101837170
  hypo

SEQ ID NO: 74542 - DNA, 98 bp, Homo sapiens; identical to SEQ ID NO: 5758
  chr7:101838785-101838883
  hypo

SEQ ID NO: 74543 - DNA, 673 bp, Homo sapiens; identical to SEQ ID NO: 5759
  chr7:101839912-101840585
  hypo

SEQ ID NO: 74544 - DNA, 67 bp, Homo sapiens; identical to SEQ ID NO: 5760
  chr7:101842080-101842147
  hypo

SEQ ID NO: 74545 - DNA, 103 bp, Homo sapiens; identical to SEQ ID NO: 5761
  chr7:101843349-101843452
  hypo

SEQ ID NO: 74546 - DNA, 846 bp, Homo sapiens; identical to SEQ ID NO: 5762
  chr7:101844638-101845484
  hypo

SEQ ID NO: 74547 - DNA, 167 bp, Homo sapiens; identical to SEQ ID NO: 5763
  chr7:101847669-101847836
  hypo

SEQ ID NO: 74548 - DNA, 58 bp, Homo sapiens; identical to SEQ ID NO: 5764
  chr7:101848392-101848450
  hypo

SEQ ID NO: 74549 - DNA, 304 bp, Homo sapiens; identical to SEQ ID NO: 5765
  chr7:101870645-101870949
  hypo

SEQ ID NO: 74550 - DNA, 190 bp, Homo sapiens; identical to SEQ ID NO: 5766
  chr7:101877330-101877520
  hypo

SEQ ID NO: 74551 - DNA, 266 bp, Homo sapiens; identical to SEQ ID NO: 5767
  chr7:101882598-101882864
  hypo

SEQ ID NO: 74552 - DNA, 9823 bp, Homo sapiens; identical to SEQ ID NO: 5768
  chr7:101891690-101901513
  hypo

SEQ ID NO: 74553 - DNA, 129 bp, Homo sapiens; identical to SEQ ID NO: 5769
  chr7:101916635-101916764
  hypo

SEQ ID NO: 74554 - DNA, 68 bp, Homo sapiens; identical to SEQ ID NO: 5770
  chr7:101917513-101917581
  hypo

SEQ ID NO: 74555 - DNA, 114 bp, Homo sapiens; identical to SEQ ID NO: 5771
  chr7:101918516-101918630
  hypo

SEQ ID NO: 74556 - DNA, 118 bp, Homo sapiens; identical to SEQ ID NO: 5772
  chr7:101921218-101921336
  hypo

SEQ ID NO: 74557 - DNA, 85 bp, Homo sapiens; identical to SEQ ID NO: 5773
  chr7:101923327-101923412
  hypo

SEQ ID NO: 74558 - DNA, 58 bp, Homo sapiens; identical to SEQ ID NO: 5774
  chr7:101924094-101924152
  hypo

SEQ ID NO: 74559 - DNA, 82 bp, Homo sapiens; identical to SEQ ID NO: 5775
  chr7:101925130-101925212
  hypo

SEQ ID NO: 74560 - DNA, 66 bp, Homo sapiens; identical to SEQ ID NO: 5776
  chr7:101926002-101926068
  hypo

SEQ ID NO: 74561 - DNA, 939 bp, Homo sapiens; identical to SEQ ID NO: 5777
  chr7:101926311-101927250
  hypo

SEQ ID NO: 74562 - DNA, 28 bp, Homo sapiens
  chr7:102086680-102086708
  hypo
cgaccacgctggcctcttctgtactgtt

SEQ ID NO: 74563 - DNA, 587 bp, Homo sapiens
  chr7:102087174-102087761
  hypo
gctggcctggggcttctccaccgtgcttggcatcctactcttcctggccgaggtggtgctgctctgctggatcaagttcctccccgtggatgcccggcgccagcctggccccccacctggccctgggagtcacacgggctggcaggccgccctggtgtccaccatcatcatggtgcccgtgggcctcatcttcgtggtcttcaccatccacttctaccgctccctggtgcgccacaaaacggagcgccacaaccgcgagatcgaggagctccacaagctcaaggtccagctggacgggcatgagcgcagcctgcaggtcttgtgaggggccgagggccggggctgggagcggccctgtgcccgggagtccgcagaggcggggatttgtcagatgcagacattttgcaaggctgccgggtagttcaagaccaaagttttcctcttgtcttaataccataaggactggatgacttctcctgagatagaaccgtttggttcaatgagggactgtgttgctaagagcgttgggggcaaagccaggctggttccttggcctcggggtttcctgggtcggggacacggtgaag

SEQ ID NO: 74564 - DNA, 67 bp, Homo sapiens; identical to SEQ ID NO: 21718
  chr7:102088065-102088132
  hypo

SEQ ID NO: 74565 - DNA, 31 bp, Homo sapiens; identical to SEQ ID NO: 21719
  chr7:102093187-102093218
  hypo

SEQ ID NO: 74566 - DNA, 39 bp, Homo sapiens
  chr7:102094840-102094879
  hypo
tcaacccctttcacagcccgtctgcggcccacccaccca

SEQ ID NO: 74567 - DNA, 40 bp, Homo sapiens
  chr7:102096999-102097039
  hypo
tttcctacttgttaacagcgttatggggctggaaggaggc

SEQ ID NO: 74568 - DNA, 30 bp, Homo sapiens
  chr7:102098199-102098229
  hypo
tgaggctgaccagccgctccccccacagcc

SEQ ID NO: 74569 - DNA, 30 bp, Homo sapiens
  chr7:102100206-102100236
  hypo
ggcccagccggtgtcggagcagtaaatgaa

SEQ ID NO: 74570 - DNA, 30 bp, Homo sapiens
  chr7:102756100-102756130
  hypo
cgaaatataattcaacggcaagccagtggt

SEQ ID NO: 74571 - DNA, 39 bp, Homo sapiens
  chr7:102756772-102756811
  hypo
gctgggatcacagacgtgagccaccgcgcccagctgcca

SEQ ID NO: 74572 - DNA, 142 bp, Homo sapiens; identical to SEQ ID NO: 21720
  chr7:102782153-102782295
  hypo

SEQ ID NO: 74573 - DNA, 101 bp, Homo sapiens; identical to SEQ ID NO: 44565
  chr7:102921427-102921528
  hypo

SEQ ID NO: 74574 - DNA, 30 bp, Homo sapiens
  chr7:102988229-102988259
  hypo
tcagttgacatgggccggagctcggagctg

SEQ ID NO: 74575 - DNA, 30 bp, Homo sapiens
  chr7:102989097-102989127
  hypo
ttctcgctcttgtcgcgtctgttcaaaccg

SEQ ID NO: 74576 - DNA, 18 bp, Homo sapiens
  chr7:103032991-103033009
  hypo
agttcttgtgccttccat

SEQ ID NO: 74577 - DNA, 31 bp, Homo sapiens
  chr7:103080374-103080405
  hypo
ctccttcaccaccttccggtctatgctcaat

SEQ ID NO: 74578 - DNA, 1041 bp, Homo sapiens; identical to SEQ ID NO: 44568
  chr7:103085749-103086790
  hypo

SEQ ID NO: 74579 - DNA, 640 bp, Homo sapiens; identical to SEQ ID NO: 44570
  chr7:103629154-103629794
  hypo

SEQ ID NO: 74580 - DNA, 746 bp, Homo sapiens; identical to SEQ ID NO: 44571
  chr7:103630363-103631109
  hypo

SEQ ID NO: 74581 - DNA, 45 bp, Homo sapiens; identical to SEQ ID NO: 21725
  chr7:104629826-104629871
  hypo

SEQ ID NO: 74582 - DNA, 96 bp, Homo sapiens
  chr7:104764716-104764812
  hypo
tgtccctctttccttccttcccgctgtgcacagtatggagtcctcgatcccctcaacagacagacgattaacaaagacaaataaatgcacagccag

SEQ ID NO: 74583 - DNA, 68 bp, Homo sapiens
  chr7:104869240-104869308
  hypo
gcgagagcttgttcccgtgttggcgcctggagcagccagccggatcccgcactcgctcgctcacatgc

SEQ ID NO: 74584 - DNA, 113 bp, Homo sapiens
  chr7:104869938-104870051
  hypo
taacataaaaaatccagacatctaaatatgtcatttttattatatcaaatacgtagctttgatcttagctatggaggaggtatctctccctctccttccgcagtgcccacaac

SEQ ID NO: 74585 - DNA, 85 bp, Homo sapiens; identical to SEQ ID NO: 21726
  chr7:104917804-104917889
  hypo

SEQ ID NO: 74586 - DNA, 30 bp, Homo sapiens; identical to SEQ ID NO: 21727
  chr7:104941883-104941913
  hypo

SEQ ID NO: 74587 - DNA, 38 bp, Homo sapiens; identical to SEQ ID NO: 21728
  chr7:105016767-105016805
  hypo

SEQ ID NO: 74588 - DNA, 21 bp, Homo sapiens
  chr7:105061906-105061927
  hypo
ttatttattatttttttgaga

SEQ ID NO: 74589 - DNA, 501 bp, Homo sapiens
  chr7:105254042-105254543
  hypo
gcactcactgcactggggtgtcgtgaggactcagtgaggtaataaccgtaaagtgccgagaacagtgtctagcacatagtgagcgtggtatcaagtacttgttcagtaaagtgctctcaaagcagagggtgaaaactgccttcggggaaaacgagaacaggaatcaagcttgtgttacctgtcggagccgcccggctaagcaggggcgctgcccagctccccctgccccccagagccggtgaaggcggtgccaggaggtcccttacctgccgagaggaggtgctgttaacgggatcgggcaccggtgcgagaaggctgggcgggttctttttgtgaacgctattcataccaggcattttagtgattttacaggctttgctactagaactcgagttcttacgcttttttccttctgatttgtcaaaagagaggggcagagaagacacagcattgtgtgaggccagagagaggtcccctgcgtggagcgcaagggagggcaca

SEQ ID NO: 74590 - DNA, 30 bp, Homo sapiens
  chr7:105258651-105258681
  hypo
ggagcaaagagctgcgaggatcaccagggc

SEQ ID NO: 74591 - DNA, 30 bp, Homo sapiens; identical to SEQ ID NO: 21730
  chr7:105278433-105278463
  hypo

SEQ ID NO: 74592 - DNA, 349 bp, Homo sapiens
  chr7:105279329-105279678
  hypo
gatgaaaggcaactgcgagggaatgctagagttaatccaggtgcaggtgggaggctcgattcggcccagacaaacagagccaccaagcagagagggccatcgccttgatcccaagaagcactagcagttcagcatgaaatacagggctttgggcgacccaatggcggccgccttgggtcagctgttcccctggccaccccggtgtggctggatcaggggcgcggcatatcatcctcccctccagggctgcctttcagggcgctgccgccgccgccgccgccgctgccgctgctcctgcatacattaaaacgtagcaggctttagaaccgcctgtgagtgcctataaata

SEQ ID NO: 74593 - DNA, 92 bp, Homo sapiens
  chr7:105280245-105280337
  hypo
cttcggcagcaccgccgaacgcagcacaaggctcggggaatagggcgggagcaggcaccgaagggaaggagaggagccgtgctgctcttaat

SEQ ID NO: 74594 - DNA, 24 bp, Homo sapiens
  chr7:105340662-105340686
  hypo
acaaggggggctgggcgcggtggc

SEQ ID NO: 74595 - DNA, 190 bp, Homo sapiens
  chr7:105399235-105399425
  hypo
cttccttcttagcaaacgaagtgtatcagttcataggaaaccactctgctgatgacactcaacatctgaacacaggacagtaaaaaaggcccttgatttgggaggtacggggaagagaatggagacaggcacgattctgtctttacatcttgagccatccctgcggaagggggtccgtggggtggccggg

SEQ ID NO: 74596 - DNA, 30 bp, Homo sapiens
  chr7:105415955-105415985
  hypo
ccttgagaatactccgagggcctccctaaa

SEQ ID NO: 74597 - DNA, 30 bp, Homo sapiens; identical to SEQ ID NO: 21732
  chr7:105432638-105432668
  hypo

SEQ ID NO: 74598 - DNA, 157 bp, Homo sapiens
  chr7:105445967-105446124
  hypo
tggggtacagagaaatgaatgcgatgatttatgccctcaaggagctcacagatcatgaaaagagacagggcgagactcacaagcccacagtacacttggcaagtgataaataggacgtgtgcgtggctcatgctgcggcagagggcagggagagctt

SEQ ID NO: 74599 - DNA, 30 bp, Homo sapiens; identical to SEQ ID NO: 44585
  chr7:105517674-105517704
  hypo

SEQ ID NO: 74600 - DNA, 162 bp, Homo sapiens
  chr7:105586618-105586780
  hypo
ccctatgtggggaaggcgcagttcaccgtcaggactgcaggaagcctgggaggacgccatggagacctgcaggtctctgaggcagggtgatggtgtgtcagaagcagcaggccagcagagcaccaagaagggggtgccctctccccacgccctcacgcagcc

SEQ ID NO: 74601 - DNA, 30 bp, Homo sapiens; identical to SEQ ID NO: 21733
  chr7:105680140-105680170
  hypo

SEQ ID NO: 74602 - DNA, 39 bp, Homo sapiens; identical to SEQ ID NO: 21734
  chr7:105722824-105722863
  hypo

SEQ ID NO: 74603 - DNA, 31 bp, Homo sapiens; identical to SEQ ID NO: 44586
  chr7:105752146-105752177
  hypo

SEQ ID NO: 74604 - DNA, 30 bp, Homo sapiens
  chr7:105753777-105753807
  hypo
ccactgaggttattccgtcagggttgacaa

SEQ ID NO: 74605 - DNA, 22 bp, Homo sapiens
  chr7:105754012-105754034
  hypo
attaagaactgggcgcggtggc

SEQ ID NO: 74606 - DNA, 30 bp, Homo sapiens; identical to SEQ ID NO: 21735
  chr7:106435445-106435475
  hypo

SEQ ID NO: 74607 - DNA, 31 bp, Homo sapiens; identical to SEQ ID NO: 21736
  chr7:106507803-106507834
  hypo

SEQ ID NO: 74608 - DNA, 565 bp, Homo sapiens; identical to SEQ ID NO: 44589
  chr7:106508305-106508870
  hypo

SEQ ID NO: 74609 - DNA, 19 bp, Homo sapiens
  chr7:106604414-106604433
  hypo
tcctccgccgggcgccgtg

SEQ ID NO: 74610 - DNA, 24 bp, Homo sapiens
  chr7:106613156-106613180
  hypo
gatcaggagcgcagcagacacctg

SEQ ID NO: 74611 - DNA, 30 bp, Homo sapiens
  chr7:106622440-106622470
  hypo
aggcgtgagccaccgcgcccaaagtgaggt

SEQ ID NO: 74612 - DNA, 227 bp, Homo sapiens
  chr7:106622689-106622916
  hypo
caccggaacaatgtgcggcacatattagacactcaatacatgtttgccaaatgaatacgtgaatgattgtagtcttggacaagtcaaatggcccttagggactatttgttcattgattattttcccacctgcgtcacagcatggctgctgtcttggaaagcgtaaactgctcatgagtggcaggtgtgaagaagagaggctgacggagtgaacggtggtgaggcaca

SEQ ID NO: 74613 - DNA, 17 bp, Homo sapiens
  chr7:106631395-106631412
  hypo
caaaaaaaaaaaaaaaa

SEQ ID NO: 74614 - DNA, 38 bp, Homo sapiens; identical to SEQ ID NO: 21740
  chr7:106675695-106675733
  hypo

SEQ ID NO: 74615 - DNA, 87 bp, Homo sapiens
  chr7:106683488-106683575
  hypo
gtaaaaataataatgcttacacggtagagagtagtactaacattgtgctccaaccggtgacatgtgaggctcaccatattttataaa

SEQ ID NO: 74616 - DNA, 1325 bp, Homo sapiens; identical to SEQ ID NO: 44590
  chr7:106684837-106686162
  hypo

SEQ ID NO: 74617 - DNA, 24 bp, Homo sapiens
  chr7:106796950-106796974
  hypo
caaaacctcttcatttagggccgg

SEQ ID NO: 74618 - DNA, 23 bp, Homo sapiens
  chr7:106797273-106797296
  hypo
ttagaaaccgagacagcttgttc

SEQ ID NO: 74619 - DNA, 38 bp, Homo sapiens
  chr7:106836714-106836752
  hypo
cttttttgtttgtttttgagacggagtctcgctgtgtc

SEQ ID NO: 74620 - DNA, 38 bp, Homo sapiens; identical to SEQ ID NO: 21744
  chr7:106836991-106837029
  hypo

SEQ ID NO: 74621 - DNA, 42 bp, Homo sapiens; identical to SEQ ID NO: 21745
  chr7:106837816-106837858
  hypo

SEQ ID NO: 74622 - DNA, 43 bp, Homo sapiens
  chr7:107060906-107060949
  hypo
atttgtttgtttgttttgagacggagtcttgctctgtcgctca

SEQ ID NO: 74623 - DNA, 96 bp, Homo sapiens
  chr7:107148302-107148398
  hypo
cataatgcttctatgacgtatttggttttaagaatattctctcatggggtgggtggagctaagatggctgaacaggaacagctcccagcgtgagcg

SEQ ID NO: 74624 - DNA, 31 bp, Homo sapiens
  chr7:107202109-107202140
  hypo
ggcactatccttagaacggagcagagactcg

SEQ ID NO: 74625 - DNA, 43 bp, Homo sapiens
  chr7:107202439-107202482
  hypo
agaaagaaaggagcagaggctccacttccgttgcaattgaaaa

SEQ ID NO: 74626 - DNA, 30 bp, Homo sapiens
  chr7:107272619-107272649
  hypo
ataaggaattggttccggggccgggagatg

SEQ ID NO: 74627 - DNA, 401 bp, Homo sapiens
  chr7:107483555-107483956
  hypo
acaggtctatcaatgaacacacgagaaaaagctgaagaccgtgatcagtgaagcacacaaacggggcatggtgatagagaaaaacagtgggcacgcaatctagcttgggaaaatgaggtagcacccctttcaggaggtgatttcagcagagacccgcaggtacaaggacaccacccaggcgaggagccagaaagagcagccgcagcaggtggagcgcatgggcagaggggcggtggtgggacacgcgactgtttgggattgagcgaggccacctaagcagattgcggtgagtgagcgcggaatgacgtcactgacctccaatcaactgtcacatgaaaataccaaaagcggcagtgttcctttagtcatgtggatcacgcggatccaaaatggtttttaca

SEQ ID NO: 74628 - DNA, 202 bp, Homo sapiens
  chr7:107524447-107524649
  hypo
aagcctatactcatgccactgcgctccagcctggacttgccccacgcccaacactgtatcagacattccattttcagctcctgttcatgctccctcataacgtttttttaaaaacatgctatccttattgaattcatctattcccatatgtgtcgacatgccagcaaatttccgagtccacgtctggagcttgtaagctcta

SEQ ID NO: 74629 - DNA, 323 bp, Homo sapiens; identical to SEQ ID NO: 44596
  chr7:107531674-107531997
  hypo

SEQ ID NO: 74630 - DNA, 31 bp, Homo sapiens
  chr7:107621457-107621488
  hypo
agtttcataagaatgtcggccgggcgtggta

SEQ ID NO: 74631 - DNA, 45 bp, Homo sapiens; identical to SEQ ID NO: 21748
  chr7:107633906-107633951
  hypo

SEQ ID NO: 74632 - DNA, 29 bp, Homo sapiens
  chr7:108076611-108076640
  hypo
tcacacacgtataccacccttcctctctc

SEQ ID NO: 74633 - DNA, 349 bp, Homo sapiens; identical to SEQ ID NO: 5799
  chr7:108095228-108095577
  hypo

SEQ ID NO: 74634 - DNA, 1084 bp, Homo sapiens; identical to SEQ ID NO: 44600
  chr7:108095780-108096864
  hypo

SEQ ID NO: 74635 - DNA, 28 bp, Homo sapiens
  chr7:108165222-108165250
  hypo
cctgggcgacagagagagactcccaaca

SEQ ID NO: 74636 - DNA, 161 bp, Homo sapiens
  chr7:108168535-108168696
  hypo
cagaatttcttgaatcgttcctctgctccacattcgcatttccactgctctagttcaggctttcatccttgctcttcagtttcatctaaactggttttccagcctgtaactaacctctgacccagtcagtctcttctgtgcaaccacggtaatcttttgaa

SEQ ID NO: 74637 - DNA, 38 bp, Homo sapiens
  chr7:108298192-108298230
  hypo
gtgaggactgccagcacgctgtcacctctcagtgggag

SEQ ID NO: 74638 - DNA, 31 bp, Homo sapiens; identical to SEQ ID NO: 21752
  chr7:108498633-108498664
  hypo

SEQ ID NO: 74639 - DNA, 90 bp, Homo sapiens
  chr7:110163601-110163691
  hypo
taacctgagaaagtaacaatacgtatagaatgagctggcttactgttttgttgttgttgttgttgtttgtgttttttttttttgagacag

SEQ ID NO: 74640 - DNA, 82 bp, Homo sapiens
  chr7:110471984-110472066
  hypo
ggttttttttaaaactgcttccgaactgatttgactttaaaaccactctgtagggctgggcgcggtggctcacgcctgtaat

SEQ ID NO: 74641 - DNA, 30 bp, Homo sapiens; identical to SEQ ID NO: 21753
  chr7:110585125-110585155
  hypo

SEQ ID NO: 74642 - DNA, 31 bp, Homo sapiens; identical to SEQ ID NO: 21754
  chr7:112149177-112149208
  hypo

SEQ ID NO: 74643 - DNA, 30 bp, Homo sapiens; identical to SEQ ID NO: 5803
  chr7:112149590-112149620
  hypo

SEQ ID NO: 74644 - DNA, 1257 bp, Homo sapiens; identical to SEQ ID NO: 44616
  chr7:113726353-113727610
  hypo

SEQ ID NO: 74645 - DNA, 3 bp, Homo sapiens
  chr7:113727622-113727625
  hypo
cgg

SEQ ID NO: 74646 - DNA, 62 bp, Homo sapiens; identical to SEQ ID NO: 5813
  chr7:113727753-113727815
  hypo

SEQ ID NO: 74647 - DNA, 58 bp, Homo sapiens
  chr7:114410864-114410922
  hypo
acattgacatactctactttgcgagctcctctaggtcgaaatcatgctttatttattt

SEQ ID NO: 74648 - DNA, 30 bp, Homo sapiens
  chr7:116764213-116764243
  hypo
tatattcaagaccttcgtcggtcccaaatt

SEQ ID NO: 74649 - DNA, 293 bp, Homo sapiens; identical to SEQ ID NO: 5823
  chr7:116962853-116963146
  hypo

SEQ ID NO: 74650 - DNA, 244 bp, Homo sapiens; identical to SEQ ID NO: 44636
  chr7:116963330-116963574
  hypo

SEQ ID NO: 74651 - DNA, 30 bp, Homo sapiens
  chr7:120477652-120477682
  hypo
accttgcccggcctgagtgtgctttatttt

SEQ ID NO: 74652 - DNA, 588 bp, Homo sapiens; identical to SEQ ID NO: 44646
  chr7:120496862-120497450
  hypo

SEQ ID NO: 74653 - DNA, 31 bp, Homo sapiens; identical to SEQ ID NO: 21761
  chr7:121756493-121756524
  hypo

SEQ ID NO: 74654 - DNA, 199 bp, Homo sapiens; identical to SEQ ID NO: 5840
  chr7:121863465-121863664
  hypo

SEQ ID NO: 74655 - DNA, 30 bp, Homo sapiens; identical to SEQ ID NO: 5861
  chr7:122844521-122844551
  hypo

SEQ ID NO: 74656 - DNA, 158 bp, Homo sapiens; identical to SEQ ID NO: 44684
  chr7:123174505-123174663
  hypo

SEQ ID NO: 74657 - DNA, 31 bp, Homo sapiens
  chr7:123175907-123175938
  hypo
acaggagtgagccaccgcgcccggcctatca

SEQ ID NO: 74658 - DNA, 39 bp, Homo sapiens
  chr7:125532055-125532094
  hypo
tgggcgacagcgagaatcggtctcaaaaaagcaaaacaa

SEQ ID NO: 74659 - DNA, 33 bp, Homo sapiens
  chr7:126013968-126014001
  hypo
agggcacggtggctcacgcctgtaatcccagca

SEQ ID NO: 74660 - DNA, 135 bp, Homo sapiens
  chr7:126173533-126173668
  hypo
tgaataacagagaaaaatccccgttaggagcacgtaactaagttcgcgtcctgaagccctcacgataggtgtgtcattatagcggacaaaggtcacgatcacaaaggtggtggcgatgattcccaatattgcaac

SEQ ID NO: 74661 - DNA, 3130 bp, Homo sapiens; identical to SEQ ID NO: 44691
  chr7:126891134-126894264
  hypo

SEQ ID NO: 74662 - DNA, 14 bp, Homo sapiens
  chr7:126987825-126987839
  hypo
cccgtggagacggc

SEQ ID NO: 74663 - DNA, 163 bp, Homo sapiens; identical to SEQ ID NO: 44693
  chr7:126988120-126988283
  hypo

SEQ ID NO: 74664 - DNA, 210 bp, Homo sapiens
  chr7:127235492-127235702
  hypo
gggtgctttctactgcgtttccaccggaacagcaagtggaccctccagtgcctaatctctggtcgttatttggagtccaatggcaaggacgtgttttgcacttcccacgtcctctcagcttaccacatgtggaccccccgaccagccctccatgtccacgtgatcctctacagccccatccaccgctgctatgcccgggctgaccccact

SEQ ID NO: 74665 - DNA, 340 bp, Homo sapiens
  chr7:127371079-127371419
  hypo
ctggagaggcttgttttagaacgactggcatgcggaagcggtaggtggaggtctgggaggagctgcgtagccagggctccccttccagcctcccgtctcccttaggctctttctggcctgaggcatggtcgccatgggtgggggcactgcccgcccgattctggttggaccccctttcctctacttcataccgcagctgctgtgagcgagtgcactgtgctctgcacaggagaattggcagacagttccatatgctggttttggccattgggacattcaggattattaggccagtttgtactttaagaggagggagacttgacatcgctcaaagcagctt

SEQ ID NO: 74666 - DNA, 30 bp, Homo sapiens
  chr7:127474582-127474612
  hypo
tcattgttctatgcacgccgtgcctttgat

SEQ ID NO: 74667 - DNA, 161 bp, Homo sapiens
  chr7:127544830-127544991
  hypo
aagaaggaagtgcctatccaccgtgttgcagatatatctggggtgagtcgagtccctgaatcaagctgtgtggctcagaggctcaagagcgtgtctgcatatttgctgaaggacttcagcttatgtattttctctagctcgctccttttcaggcactgact

SEQ ID NO: 74668 - DNA, 30 bp, Homo sapiens
  chr7:127615393-127615423
  hypo
gcatgtgcgcacgcgcgtgtgtatgtgaga

SEQ ID NO: 74669 - DNA, 114 bp, Homo sapiens
  chr7:127615837-127615951
  hypo
tgtgcgctgtagcgccgagcacgctaccccgttcttctctctgctccactccactctgacacccccacagaggtgctcatggctgttagtaggcaggtccggctccattcagca

SEQ ID NO: 74670 - DNA, 30 bp, Homo sapiens
  chr7:127669489-127669519
  hypo
agatccttgggtggcgggaggcgtggctga

SEQ ID NO: 74671 - DNA, 216 bp, Homo sapiens
  chr7:127670439-127670655
  hypo
ttctccatgaggttgaggtaccgggtgttcgagggaataccctgcgggacctcggagaggccccggcgcgtgcacaccaccttgctgaactggttactgcacgagcagacggaggggcagttctggggcccggctgaggcggcagcagcgatggctgcacacagaatccacacttgcgccgtgaggtagacgaacgggagcaggatggcattccag

SEQ ID NO: 74672 - DNA, 109 bp, Homo sapiens; identical to SEQ ID NO: 21769
  chr7:127673454-127673563
  hypo

SEQ ID NO: 74673 - DNA, 30 bp, Homo sapiens; identical to SEQ ID NO: 21770
  chr7:127682564-127682594
  hypo

SEQ ID NO: 74674 - DNA, 288 bp, Homo sapiens; identical to SEQ ID NO: 21771
  chr7:127693922-127694210
  hypo

SEQ ID NO: 74675 - DNA, 30 bp, Homo sapiens
  chr7:127732231-127732261
  hypo
gtgtggaaatgtctcgtggggtggcatcgg

SEQ ID NO: 74676 - DNA, 438 bp, Homo sapiens; identical to SEQ ID NO: 44701
  chr7:127744130-127744568
  hypo

SEQ ID NO: 74677 - DNA, 31 bp, Homo sapiens
  chr7:127846529-127846560
  hypo
gggcaattctccattccgtggaagaccacag

SEQ ID NO: 74678 - DNA, 30 bp, Homo sapiens; identical to SEQ ID NO: 21773
  chr7:128064475-128064505
  hypo

SEQ ID NO: 74679 - DNA, 31 bp, Homo sapiens
  chr7:128086258-128086289
  hypo
gaggggctgaggggttcggtgtgggtagggc

SEQ ID NO: 74680 - DNA, 27 bp, Homo sapiens
  chr7:128097001-128097028
  hypo
caccgcgcctggcctaagaaagtaaaa

SEQ ID NO: 74681 - DNA, 31 bp, Homo sapiens; identical to SEQ ID NO: 21775
  chr7:128098036-128098067
  hypo

SEQ ID NO: 74682 - DNA, 25 bp, Homo sapiens
  chr7:128180584-128180609
  hypo
tgccggggccaaggaactctttttc

SEQ ID NO: 74683 - DNA, 24 bp, Homo sapiens
  chr7:128197985-128198009
  hypo
caccacgctcggccagttatatct

SEQ ID NO: 74684 - DNA, 30 bp, Homo sapiens
  chr7:128434596-128434626
  hypo
aactggaggagacccgggaactggcagggc

SEQ ID NO: 74685 - DNA, 548 bp, Homo sapiens; identical to SEQ ID NO: 5877
  chr7:128470508-128471056
  hypo

SEQ ID NO: 74686 - DNA, 30 bp, Homo sapiens; identical to SEQ ID NO: 21778
  chr7:128478655-128478685
  hypo

SEQ ID NO: 74687 - DNA, 258 bp, Homo sapiens
  chr7:128484036-128484294
  hypo
tgtcacttgccctccacgcagaggtggctgtgggacaggaacaagcattctctgtgaacacacgaggggctggcggtcagggccaactggatgtgcggatgacttcgccctctcgccggcccatcccctgcaagctggagccaggcggtggagcggaagcccaggctgtgcgctacatgcccccggaggaggggccctacaaggtggatatcacctacgatggtcacccggtgcctggcagcccgtttgctgtggagg

SEQ ID NO: 74688 - DNA, 130 bp, Homo sapiens
  chr7:128484992-128485122
  hypo
gcgggccagtggaccgggcctggagcgcggcaaggtcggtgaggcagccaccttcactgtggactgctcagaggcaggcgaggcggagctgaccattgagatcctgtcggatgccggggtcaaggccgag

SEQ ID NO: 74689 - DNA, 30 bp, Homo sapiens
  chr7:128488729-128488759
  hypo
gcacgggacgcgggcgaggggttgctcact

SEQ ID NO: 74690 - DNA, 31 bp, Homo sapiens
  chr7:128489033-128489064
  hypo
caggtgggtgcccacccgctgcccgtgccct

SEQ ID NO: 74691 - DNA, 203 bp, Homo sapiens
  chr7:128489437-128489640
  hypo
gatgccaaggcagccggtgaggggaaggtgacatgcacggtgtccacgccggatggggcagagctcgatgtggatgtggttgagaaccatgacggtacctttgacatctactacacagcgcccgagccgggcaagtacgtcatcaccatccgcttcgggggtgagcacatccccaacagccccttccacgtgctggtaagttc

SEQ ID NO: 74692 - DNA, 439 bp, Homo sapiens
  chr7:128492720-128493159
  hypo
tctgagccagctgaccgccagcatccgtgccccctcgggcaacgaggagccctgcctgctgaagcgcctgcccaaccggcacattggtgagcgtggggcctcacggggacctcaggggtgggggcccacaggatgctctgcctaacacccactttccacagggatctccttcacccccaaggaggtcggggagcacgtggtgagcgtgcgcaagagtggcaagcatgtcaccaacagccccttcaagatcctggtggggccatctgagatcggggacgccagcaaggtgcgggtctggggcaaggggctttccgagggacacacattccaggtggcagagttcatcgtggacactcgcaatgcaggtacctcctgccccagagagcccccattccagcgggtgcctcccacaggcacttgtcctcgtcctgcccagcac

SEQ ID NO: 74693 - DNA, 113 bp, Homo sapiens; identical to SEQ ID NO: 44717
  chr7:128509597-128509710
  hypo

SEQ ID NO: 74694 - DNA, 240 bp, Homo sapiens; identical to SEQ ID NO: 44718
  chr7:128509981-128510221
  hypo

SEQ ID NO: 74695 - DNA, 239 bp, Homo sapiens
  chr7:128528776-128529015
  hypo
caaaggtgagggagtcggagagtgagagaaaagtatggtggagcggcaggcagtgggagggctgggaggaaagtggaatcggtgagaaaggcaccccgggagccccagcagggggaatggaagggcaggtgtggctctaccctggcaggtcgggcagcagtgcccagaggggatgagtgggtggctgcagcccggaggctcacagggccggcggccgcaggtcacgaagcctccaagac

SEQ ID NO: 74696 - DNA, 109 bp, Homo sapiens
  chr7:128532125-128532234
  hypo
tgtgtacctgtgtttgacacacgccctcacacagactctctatgcgggcagggacgtgtcccatgcatcccagcacccggcctcctacgtggcaggctcaagtgcctgc

SEQ ID NO: 74697 - DNA, 43 bp, Homo sapiens
  chr7:128533895-128533938
  hypo
tgggtgtctgcagggcactggcgggcagggcagaggctcacac

SEQ ID NO: 74698 - DNA, 43 bp, Homo sapiens
  chr7:128534158-128534201
  hypo
ctcctggccttcatgggcccccgagcagggccacccatcaatt

SEQ ID NO: 74699 - DNA, 31 bp, Homo sapiens; identical to SEQ ID NO: 21781
  chr7:128587360-128587391
  hypo

SEQ ID NO: 74700 - DNA, 94 bp, Homo sapiens
  chr7:128602075-128602169
  hypo
ttattttagactgaaacgtcccagctttcttcaagttgaccaactaaaaaagctagggaattggccaggcgcggtggctcacacctgtaatccc

SEQ ID NO: 74701 - DNA, 33 bp, Homo sapiens; identical to SEQ ID NO: 21783
  chr7:128602408-128602441
  hypo

SEQ ID NO: 74702 - DNA, 30 bp, Homo sapiens
  chr7:128767009-128767039
  hypo
gagcacatggatggcggctccctggaccag

SEQ ID NO: 74703 - DNA, 30 bp, Homo sapiens
  chr7:128767460-128767490
  hypo
cagggtcccccgggcgccccaacagcggtt

SEQ ID NO: 74704 - DNA, 302 bp, Homo sapiens; identical to SEQ ID NO: 44724
  chr7:128828287-128828589
  hypo

SEQ ID NO: 74705 - DNA, 31 bp, Homo sapiens
  chr7:128845244-128845275
  hypo
ttcaccctggtcagccgcgggagggcaggcc

SEQ ID NO: 74706 - DNA, 95 bp, Homo sapiens; identical to SEQ ID NO: 21784
  chr7:129096501-129096596
  hypo

SEQ ID NO: 74707 - DNA, 82 bp, Homo sapiens
  chr7:129172366-129172448
  hypo
tgtgtgcatgcatgtgcgtgtgcccgtgtgcatgcgtacactctgtgtatgtccatatgcatgtgtgcgtgtgtctgtgtgc

SEQ ID NO: 74708 - DNA, 24 bp, Homo sapiens
  chr7:129205463-129205487
  hypo
caccgcacccggctggatactttt

SEQ ID NO: 74709 - DNA, 45 bp, Homo sapiens
  chr7:129287557-129287602
  hypo
atataaaagcatcattgttaactggattatcgtgttattagtatt

SEQ ID NO: 74710 - DNA, 94 bp, Homo sapiens
  chr7:129330280-129330374
  hypo
ggagtctgctctggcagaacacgcccctgcgccacaggaggttaactcagaactgccgcctctcaccatcgacggaattccagtctctgtggac

SEQ ID NO: 74711 - DNA, 185 bp, Homo sapiens
  chr7:129392672-129392857
  hypo
ggccaaggcctggcccttctgcgtgcttcccccatgcccacgtgcacttggaggctggcctctctcctcctcctttcaggcctgcattgcaagtgtgggggcgactggccacgtcttccatttcggtgagggcacaccagaggagccagggtttctagtgatgcgtcaccataacagcaagtctc

SEQ ID NO: 74712 - DNA, 30 bp, Homo sapiens
  chr7:129402206-129402236
  hypo
tctgtccaaaacagcggtcaaacgacaagg

SEQ ID NO: 74713 - DNA, 76 bp, Homo sapiens
  chr7:129410251-129410327
  hypo
gcaagtctagaaccaccggatcctgttacctcaccagtgtgagttctaccattgccaaaaacggggggaggcaagc

SEQ ID NO: 74714 - DNA, 114 bp, Homo sapiens; identical to SEQ ID NO: 21786
  chr7:129414552-129414666
  hypo

SEQ ID NO: 74715 - DNA, 113 bp, Homo sapiens
  chr7:129435133-129435246
  hypo
agtccctcagcccacccgagctccttgacacgtttccaggaccataggacagtgcggtgcaggtcgtgcagagtggcttctaggtctgagccggcactcgagggcggggtcct

SEQ ID NO: 74716 - DNA, 30 bp, Homo sapiens
  chr7:129436501-129436531
  hypo
tgtggcagagctgacgagggctgggaacag

SEQ ID NO: 74717 - DNA, 30 bp, Homo sapiens
  chr7:129444383-129444413
  hypo
ctgagatggccgctcggccccagccagcat

SEQ ID NO: 74718 - DNA, 236 bp, Homo sapiens
  chr7:129470902-129471138
  hypo
ctcagatgagtggaaaacctgcgcatgacagggccggctcccccttctcaaagggcttcctcccactcatcccatccctaacagaatcgccgaggtgttcacgggccagagaaagcacaaacatggattcagaagtccaaagaaatgcagttcgttgcgcccaatcagagatagatgatttcattcaacaaggctggaagcccagttgggaagtcgataaaaaatcttgctaactt

SEQ ID NO: 74719 - DNA, 40 bp, Homo sapiens
  chr7:129483109-129483149
  hypo
attacaggagtgagccactgcgcccggcccattaacagta

SEQ ID NO: 74720 - DNA, 297 bp, Homo sapiens; identical to SEQ ID NO: 21789
  chr7:129483350-129483647
  hypo

SEQ ID NO: 74721 - DNA, 27 bp, Homo sapiens
  chr7:129492849-129492876
  hypo
gccaccgtgcccagcctacaacttaat

SEQ ID NO: 74722 - DNA, 17 bp, Homo sapiens
  chr7:129609407-129609424
  hypo
tggagtgcggtggcgcg

SEQ ID NO: 74723 - DNA, 32 bp, Homo sapiens
  chr7:129665424-129665456
  hypo
tcagcctggtgtggtggctcacgcctgtaatc

SEQ ID NO: 74724 - DNA, 46 bp, Homo sapiens; identical to SEQ ID NO: 21790
  chr7:129689364-129689410
  hypo

SEQ ID NO: 74725 - DNA, 241 bp, Homo sapiens; identical to SEQ ID NO: 21791
  chr7:129689709-129689950
  hypo

SEQ ID NO: 74726 - DNA, 30 bp, Homo sapiens
  chr7:129774820-129774850
  hypo
gattcagccaaaagcgacctcttctctagt

SEQ ID NO: 74727 - DNA, 148 bp, Homo sapiens; identical to SEQ ID NO: 21792
  chr7:129778854-129779002
  hypo

SEQ ID NO: 74728 - DNA, 326 bp, Homo sapiens
  chr7:129780406-129780732
  hypo
ctcctgggacccggcggcaggcacatgggcctggatagttactgagaaaattctttcagaagggctttcggggacgtgaagtcacccctggcttcccgggattctgggttgggagcagccgcgcaggggcggtgaagccaggggccagggcggtccgtgctgcgggcggctccccaaggcccggtgcgctgggctacccgcccgctggccatggacttgccgcctgcagcgcacatggctggggaggaagagccgtggatttcagtctgtacacccagacgactaagaagctgccgcccgctagcggggaggggactcggccggga

SEQ ID NO: 74729 - DNA, 686 bp, Homo sapiens; identical to SEQ ID NO: 21793
  chr7:129782251-129782937
  hypo

SEQ ID NO: 74730 - DNA, 78 bp, Homo sapiens
  chr7:129794661-129794739
  hypo
tgtgcaacccccatgccgcagcccgtcgcctcctgctccagcctccgccaggactgtcctgtgcgcccatcagggtgt

SEQ ID NO: 74731 - DNA, 204 bp, Homo sapiens; identical to SEQ ID NO: 21795
  chr7:129800275-129800479
  hypo

SEQ ID NO: 74732 - DNA, 39 bp, Homo sapiens
  chr7:129844184-129844223
  hypo
atctatttatttgttttgagacggagtcttgctgtctcc

SEQ ID NO: 74733 - DNA, 79 bp, Homo sapiens
  chr7:129851261-129851340
  hypo
gtgctgggattacaggcatgagccaccgtgtctggccagaaagtggtatcttaaaagtgaactccgctttcaagatttt

SEQ ID NO: 74734 - DNA, 31 bp, Homo sapiens
  chr7:129861967-129861998
  hypo
tggcgatgtccagctacgttaagtatcacga

SEQ ID NO: 74735 - DNA, 26 bp, Homo sapiens
  chr7:129924772-129924798
  hypo
actccgtctcaaaaaaaaaaaagaaa

SEQ ID NO: 74736 - DNA, 31 bp, Homo sapiens
  chr7:129937094-129937125
  hypo
ccattctgtcttacatcggtccctttttttc

SEQ ID NO: 74737 - DNA, 275 bp, Homo sapiens
  chr7:129948128-129948403
  hypo
ccttggtggctttttcagaaccgattatggaggaagacgcggtcccgaaatcctggaagctcctgcattggtgctgacccaaatagaaactggaacgctagttttgcaggtaggcggtggggagacagttctcaaatcctgctgtccctgggctcgcctggtctaccagtgctctgagctggccgggacggagcgcgtttccactttggttccgttgctgcgtcactgagagactgaggagcactccttaggctctgacttagtgttttgtttgt

SEQ ID NO: 74738 - DNA, 30 bp, Homo sapiens; identical to SEQ ID NO: 44740
  chr7:130667105-130667135
  hypo

SEQ ID NO: 74739 - DNA, 30 bp, Homo sapiens; identical to SEQ ID NO: 44741
  chr7:130680505-130680535
  hypo

SEQ ID NO: 74740 - DNA, 30 bp, Homo sapiens
  chr7:130752081-130752111
  hypo
cccgctccatgtggcgatgatgcttgggct

SEQ ID NO: 74741 - DNA, 2 bp, Homo sapiens
  chr7:130858994-130858996
  hypo
tg

SEQ ID NO: 74742 - DNA, 30 bp, Homo sapiens
  chr7:130934904-130934934
  hypo
ccaactgaccatggcgatcagccacaggcg

SEQ ID NO: 74743 - DNA, 30 bp, Homo sapiens; identical to SEQ ID NO: 21797
  chr7:130970110-130970140
  hypo

SEQ ID NO: 74744 - DNA, 45 bp, Homo sapiens
  chr7:130982738-130982783
  hypo
caagttaagatatacacatgacggccgggcgcggtggctcacgcc

SEQ ID NO: 74745 - DNA, 127 bp, Homo sapiens; identical to SEQ ID NO: 21798
  chr7:131041469-131041596
  hypo

SEQ ID NO: 74746 - DNA, 84 bp, Homo sapiens; identical to SEQ ID NO: 21799
  chr7:131231113-131231197
  hypo

SEQ ID NO: 74747 - DNA, 31 bp, Homo sapiens; identical to SEQ ID NO: 21800
  chr7:131329430-131329461
  hypo

SEQ ID NO: 74748 - DNA, 30 bp, Homo sapiens
  chr7:131422237-131422267
  hypo
agaagacgctctggtcgagtaggcgaagga

SEQ ID NO: 74749 - DNA, 282 bp, Homo sapiens
  chr7:131422549-131422831
  hypo
catgttgttattcagcgggaagaaagaagaggaagaaaagcaaagggagaaggtattgtttgggtacaatctgtgtttgcaattttccacatcggttctttttatgaacgctccaaaaacaagacaacagcagcggctgattcaatatgcgccatgcaggaaaacaataaggaaaaaaataagggtttttaataagcacttggaaaggctgtaattaaatctccggctctgtttggaaaacaagaatctcatttagtgcctttgccccggcgctccctaata

SEQ ID NO: 74750 - DNA, 31 bp, Homo sapiens
  chr7:131496158-131496189
  hypo
gcgagactccgtctcataaaaaaaaaaaaaa

SEQ ID NO: 74751 - DNA, 30 bp, Homo sapiens
  chr7:131831424-131831454
  hypo
gctgtcggggctgcccgtgtaccggatcat

SEQ ID NO: 74752 - DNA, 250 bp, Homo sapiens; identical to SEQ ID NO: 21801
  chr7:131864447-131864697
  hypo

SEQ ID NO: 74753 - DNA, 30 bp, Homo sapiens
  chr7:132107214-132107244
  hypo
ctgagatcaaaagtacggctgccgacttcc

SEQ ID NO: 74754 - DNA, 30 bp, Homo sapiens
  chr7:132170071-132170101
  hypo
aacatccagggaagacgcaatcaccagcga

SEQ ID NO: 74755 - DNA, 539 bp, Homo sapiens; identical to SEQ ID NO: 44754
  chr7:132261534-132262073
  hypo

SEQ ID NO: 74756 - DNA, 142 bp, Homo sapiens; identical to SEQ ID NO: 44755
  chr7:132262338-132262480
  hypo

SEQ ID NO: 74757 - DNA, 161 bp, Homo sapiens
  chr7:132418867-132419028
  hypo
caagaccaccctggcttgccacgcccccacctgagcctataaaaaccggataccctagcaaggcagagacagaagctgttggacggtgagaggaacacgttggcggaagaagacaagcagctggatatcgaggggacatcgaggggagcatgctggcagaa

SEQ ID NO: 74758 - DNA, 30 bp, Homo sapiens
  chr7:132468168-132468198
  hypo
cttcccctggatttcgcccactttagacgc

SEQ ID NO: 74759 - DNA, 106 bp, Homo sapiens; identical to SEQ ID NO: 21804
  chr7:132527722-132527828
  hypo

SEQ ID NO: 74760 - DNA, 46 bp, Homo sapiens; identical to SEQ ID NO: 21805
  chr7:132527947-132527993
  hypo

SEQ ID NO: 74761 - DNA, 204 bp, Homo sapiens; identical to SEQ ID NO: 21806
  chr7:132637909-132638113
  hypo

SEQ ID NO: 74762 - DNA, 30 bp, Homo sapiens; identical to SEQ ID NO: 21807
  chr7:132733565-132733595
  hypo

SEQ ID NO: 74763 - DNA, 93 bp, Homo sapiens; identical to SEQ ID NO: 21808
  chr7:133234085-133234178
  hypo

SEQ ID NO: 74764 - DNA, 31 bp, Homo sapiens; identical to SEQ ID NO: 21809
  chr7:133318547-133318578
  hypo

SEQ ID NO: 74765 - DNA, 103 bp, Homo sapiens
  chr7:133828851-133828954
  hypo
agacaagttggagtgcagttgcgcattcttgtctcaccacaacttcagcctcctgggctcaagtgatcctgtcgcccaggctggagtgcagtggcgcaatctt

SEQ ID NO: 74766 - DNA, 20 bp, Homo sapiens
  chr7:134116469-134116489
  hypo
acagagtgagactctatctc

SEQ ID NO: 74767 - DNA, 43 bp, Homo sapiens
  chr7:134135182-134135225
  hypo
gaggggagggccagggctgaccgtgcctcatggctgtgtgcac

SEQ ID NO: 74768 - DNA, 601 bp, Homo sapiens; identical to SEQ ID NO: 44761
  chr7:134142985-134143586
  hypo

SEQ ID NO: 74769 - DNA, 439 bp, Homo sapiens; identical to SEQ ID NO: 5899
  chr7:134143700-134144139
  hypo

SEQ ID NO: 74770 - DNA, 22 bp, Homo sapiens
  chr7:134335374-134335396
  hypo
taagacattaaaagccttggcc

SEQ ID NO: 74771 - DNA, 30 bp, Homo sapiens; identical to SEQ ID NO: 21812
  chr7:134377948-134377978
  hypo

SEQ ID NO: 74772 - DNA, 51 bp, Homo sapiens
  chr7:134378382-134378433
  hypo
gtgagccttattccgcgcttgggttgcacatggcagcgagggagctgatgg

SEQ ID NO: 74773 - DNA, 178 bp, Homo sapiens; identical to SEQ ID NO: 21814
  chr7:134613458-134613636
  hypo

SEQ ID NO: 74774 - DNA, 139 bp, Homo sapiens
  chr7:134673292-134673431
  hypo
tgtaaactaatgtcccgaaataagctcttaaagcttactttagctatttaaaggatttatggctttctgtgtttttctttttgttaatttaatttttttttttttcttgagccagagtttgagatcgctcttgttgctc

SEQ ID NO: 74775 - DNA, 24 bp, Homo sapiens
  chr7:134673670-134673694
  hypo
gagccgccacgcccggccaatttt

SEQ ID NO: 74776 - DNA, 185 bp, Homo sapiens; identical to SEQ ID NO: 21816
  chr7:134853336-134853521
  hypo

SEQ ID NO: 74777 - DNA, 30 bp, Homo sapiens
  chr7:134867101-134867131
  hypo
gagctcggacaccacgctccctccctgtgc

SEQ ID NO: 74778 - DNA, 445 bp, Homo sapiens; identical to SEQ ID NO: 21817
  chr7:134880721-134881166
  hypo

SEQ ID NO: 74779 - DNA, 30 bp, Homo sapiens; identical to SEQ ID NO: 21818
  chr7:134884375-134884405
  hypo

SEQ ID NO: 74780 - DNA, 148 bp, Homo sapiens
  chr7:134890760-134890908
  hypo
tgttgctcctctttcttcagtcggtggatttcagcttgcaatgcaaaaagctatacaggggtgggactgagttagccaatgatctcacctaaccttccctctgcggaggaagatttctagacacatcgcatccaagcccactggtctg

SEQ ID NO: 74781 - DNA, 22 bp, Homo sapiens
  chr7:134895079-134895101
  hypo
cgacagagtgagactttctgtc

SEQ ID NO: 74782 - DNA, 20 bp, Homo sapiens
  chr7:134898016-134898036
  hypo
tgacaataggccgggcgcgg

SEQ ID NO: 74783 - DNA, 200 bp, Homo sapiens
  chr7:134898275-134898475
  hypo
cagcctggtcgacagagcgagactccgtctcaaaaaaaaaaaaatggtgacaataacacccaccttgcacagtagtaatgaagatttaataagacagtgtatgtaaaacgcttagcacagtgaatggcctattggtaaaatgcatggagtgttcccttctccttccctcgaatggtatgacttttcgtgtttgtcaaaat

SEQ ID NO: 74784 - DNA, 578 bp, Homo sapiens
  chr7:134918298-134918876
  hypo
atgaaggctgtgtggagcccccgagctgattactgacgcgagggtcccctccctgacccctcgcgaccctgcgaggtgagtcagccccgcccctccctcttctctctcctcccttttctgtcgccttcggacaacttgtaacactgtttcttccactgcccacacgcccattggcccgtcaccacgcatccccattggctgtggcggccagggacagggccgcgattggtccccacccctgtaacgaggtgccaggtctgttttctgacccagacaggaaccgcgatccccactccggcgcacgaagccgggtgactgctgtcccgggagtggggacgtcgcgtgcaccgttggcgagtaagtatcctttgaacgctcctctccagaaaggtgcccttgggcatatgagtgtttgtgtagacttgaaagaattcagtgcagcggagcctaacaggtgaacttttagcgcggggttcacaggagccttttgtatccgtcactgtggctacctacatttttgagagtgattctggatgatgatgatgatgatgatgatgattattattattatcattttg

SEQ ID NO: 74785 - DNA, 37 bp, Homo sapiens
  chr7:134922345-134922382
  hypo
gataaaaagagctctgtccaccgggcgtggtggctca

SEQ ID NO: 74786 - DNA, 30 bp, Homo sapiens
  chr7:134931429-134931459
  hypo
ctcgctggtctccacgcccgaggaggtgag

SEQ ID NO: 74787 - DNA, 44 bp, Homo sapiens
  chr7:135125369-135125413
  hypo
taagagtagaaaactgcaggccgggtgcagtggctcacgcctat

SEQ ID NO: 74788 - DNA, 31 bp, Homo sapiens
  chr7:135247629-135247660
  hypo
atgatcttgccaaacccgttttctgtactgc

SEQ ID NO: 74789 - DNA, 98 bp, Homo sapiens; identical to SEQ ID NO: 21824
  chr7:135360967-135361065
  hypo

SEQ ID NO: 74790 - DNA, 30 bp, Homo sapiens
  chr7:135391067-135391097
  hypo
ggggcagagcgtccacggaacacacatccc

SEQ ID NO: 74791 - DNA, 121 bp, Homo sapiens
  chr7:135401688-135401809
  hypo
gccaagggtctttttcgcatgaactgctggcatttatccttattagacttcattttgtcagtttcagtccattgtctcttcctgtccgcatgtctcattctgccaccgtacattagcaccg

SEQ ID NO: 74792 - DNA, 30 bp, Homo sapiens; identical to SEQ ID NO: 44766
  chr7:135405128-135405158
  hypo

SEQ ID NO: 74793 - DNA, 30 bp, Homo sapiens; identical to SEQ ID NO: 44767
  chr7:135405190-135405220
  hypo

SEQ ID NO: 74794 - DNA, 21 bp, Homo sapiens
  chr7:135440300-135440321
  hypo
ccctcaagggttgccagcata

SEQ ID NO: 74795 - DNA, 87 bp, Homo sapiens
  chr7:135440342-135440429
  hypo
cctctgccaggccgggccagaacatccacctgcaacgtggagtccactgtgtatagcatgttctgcgccagatcaaataatcattgg

SEQ ID NO: 74796 - DNA, 31 bp, Homo sapiens; identical to SEQ ID NO: 21825
  chr7:135495522-135495553
  hypo

SEQ ID NO: 74797 - DNA, 195 bp, Homo sapiens; identical to SEQ ID NO: 21826
  chr7:135611087-135611282
  hypo

SEQ ID NO: 74798 - DNA, 97 bp, Homo sapiens; identical to SEQ ID NO: 21827
  chr7:136437908-136438005
  hypo

SEQ ID NO: 74799 - DNA, 74 bp, Homo sapiens
  chr7:136849128-136849202
  hypo
ggcatcctcggggccgggggcaagatcctcacttttgaccagctggcccctgatgccccgaaaggctgtggcac

SEQ ID NO: 74800 - DNA, 22 bp, Homo sapiens
  chr7:136968989-136969011
  hypo
accgcgccgggccgagcatcat

SEQ ID NO: 74801 - DNA, 30 bp, Homo sapiens; identical to SEQ ID NO: 21828
  chr7:137080295-137080325
  hypo

SEQ ID NO: 74802 - DNA, 18 bp, Homo sapiens
  chr7:137491477-137491495
  hypo
ctgaacctctgcatctat

SEQ ID NO: 74803 - DNA, 193 bp, Homo sapiens; identical to SEQ ID NO: 21829
  chr7:137564611-137564804
  hypo

SEQ ID NO: 74804 - DNA, 30 bp, Homo sapiens; identical to SEQ ID NO: 21830
  chr7:137624004-137624034
  hypo

SEQ ID NO: 74805 - DNA, 38 bp, Homo sapiens; identical to SEQ ID NO: 21831
  chr7:137637555-137637593
  hypo

SEQ ID NO: 74806 - DNA, 38 bp, Homo sapiens; identical to SEQ ID NO: 21832
  chr7:137637832-137637870
  hypo

SEQ ID NO: 74807 - DNA, 84 bp, Homo sapiens
  chr7:137664094-137664178
  hypo
taaagcacagcaagggcgggtcatcaggccaagacatcaaaaagcacaggctgcaactggtcctaccagtccttagtttaatat

SEQ ID NO: 74808 - DNA, 205 bp, Homo sapiens; identical to SEQ ID NO: 21834
  chr7:137670024-137670229
  hypo

SEQ ID NO: 74809 - DNA, 30 bp, Homo sapiens; identical to SEQ ID NO: 21835
  chr7:137678214-137678244
  hypo

SEQ ID NO: 74810 - DNA, 195 bp, Homo sapiens; identical to SEQ ID NO: 21836
  chr7:137706783-137706978
  hypo

SEQ ID NO: 74811 - DNA, 301 bp, Homo sapiens; identical to SEQ ID NO: 21837
  chr7:138042027-138042328
  hypo

SEQ ID NO: 74812 - DNA, 40 bp, Homo sapiens; identical to SEQ ID NO: 21838
  chr7:138042567-138042607
  hypo

SEQ ID NO: 74813 - DNA, 31 bp, Homo sapiens
  chr7:138094770-138094801
  hypo
ctttctgtagaaagaacgcttatggtgtaaa

SEQ ID NO: 74814 - DNA, 31 bp, Homo sapiens
  chr7:138122332-138122363
  hypo
attttaatctttaaaccgtaagaatgtgtta

SEQ ID NO: 74815 - DNA, 31 bp, Homo sapiens
  chr7:138125640-138125671
  hypo
tctcctcccccatggacgctgtgacagaagc

SEQ ID NO: 74816 - DNA, 31 bp, Homo sapiens
  chr7:138127125-138127156
  hypo
gaggtccagaggggtccgtggccccttgctg

SEQ ID NO: 74817 - DNA, 35 bp, Homo sapiens
  chr7:138247006-138247041
  hypo
tgtccaggtgaactgcgactcgccccatttgcgac

SEQ ID NO: 74818 - DNA, 21 bp, Homo sapiens
  chr7:138376268-138376289
  hypo
aagttttgctgttgttgctgt

SEQ ID NO: 74819 - DNA, 25 bp, Homo sapiens
  chr7:138397736-138397761
  hypo
caggagtaaagacatgcggccgggc

SEQ ID NO: 74820 - DNA, 30 bp, Homo sapiens
  chr7:138435360-138435390
  hypo
tggacgagtgctcacggtcccagcttcaat

SEQ ID NO: 74821 - DNA, 31 bp, Homo sapiens
  chr7:138487654-138487685
  hypo
ctgcccacaagcagcccggtgctgccgcaca

SEQ ID NO: 74822 - DNA, 30 bp, Homo sapiens
  chr7:138554481-138554511
  hypo
gacttgtgccgcagcgcggtctgaatctga

SEQ ID NO: 74823 - DNA, 39 bp, Homo sapiens
  chr7:138636037-138636076
  hypo
gacacttccctccacccgtgtcttcgcctctcccacttc

SEQ ID NO: 74824 - DNA, 142 bp, Homo sapiens; identical to SEQ ID NO: 5914
  chr7:138720771-138720913
  hypo

SEQ ID NO: 74825 - DNA, 34 bp, Homo sapiens; identical to SEQ ID NO: 21841
  chr7:138778535-138778569
  hypo

SEQ ID NO: 74826 - DNA, 33 bp, Homo sapiens; identical to SEQ ID NO: 21842
  chr7:138845465-138845498
  hypo

SEQ ID NO: 74827 - DNA, 28 bp, Homo sapiens
  chr7:138909621-138909649
  hypo
tccctctccctctcccttcttcggtctc

SEQ ID NO: 74828 - DNA, 94 bp, Homo sapiens
  chr7:138912953-138913047
  hypo
tagttcccttggcctccatcacggcaagtagtagcggcattggggcagcagcagtgatcaaaatgcggtgagggagattgtggacattctgctt

SEQ ID NO: 74829 - DNA, 42 bp, Homo sapiens
  chr7:138913396-138913438
  hypo
atttgaagactgcgtcgtaatcaagaacgtacggtgaaatta

SEQ ID NO: 74830 - DNA, 121 bp, Homo sapiens; identical to SEQ ID NO: 21844
  chr7:138974787-138974908
  hypo

SEQ ID NO: 74831 - DNA, 16 bp, Homo sapiens
  chr7:138974967-138974983
  hypo
ccgtgccttgccaact

SEQ ID NO: 74832 - DNA, 271 bp, Homo sapiens; identical to SEQ ID NO: 5916
  chr7:139167555-139167826
  hypo

SEQ ID NO: 74833 - DNA, 499 bp, Homo sapiens; identical to SEQ ID NO: 5917
  chr7:139168114-139168613
  hypo

SEQ ID NO: 74834 - DNA, 216 bp, Homo sapiens
  chr7:139245493-139245709
  hypo
cccagtcccagcaggatgtggcgtttcttaggcttgctgaggtggagctgctgcaggcacagcgcctggacggggctgtggcgcacgtagctcaagtgcgcagtggcaagggccctggcaatgggccagcaagccacgaggctccgggtgctgatggtgtctggtgagacggcagggcctgggtgcggaggatccgggatgcatattggaaagctt

SEQ ID NO: 74835 - DNA, 30 bp, Homo sapiens
  chr7:139251600-139251630
  hypo
ttgggcaagtccagcggggggcatcgggaa

SEQ ID NO: 74836 - DNA, 46 bp, Homo sapiens
  chr7:139256589-139256635
  hypo
ggcgccgagggccacgcggggagggcggcgcgtgcacacccacacg

SEQ ID NO: 74837 - DNA, 271 bp, Homo sapiens
  chr7:139257803-139258074
  hypo
gcgagggcaggacccgggggcccatgctcacggggacctggtggacgatgctggctgggtaggcagtgtgctgcacggtgtggcgcgcagagccttgcgaggccaccaggtgggccacggtgccggtggagcccagggccgccggcgcagtgtaggtgtagaggtggggctgggtggggaggtgggcagcggcagcggctgcagccagatgcgggtgcacagtgccgtggctggggctgttgtgcgggaaggagtacggagcctgggccat

SEQ ID NO: 74838 - DNA, 31 bp, Homo sapiens; identical to SEQ ID NO: 21849
  chr7:139298886-139298917
  hypo

SEQ ID NO: 74839 - DNA, 30 bp, Homo sapiens; identical to SEQ ID NO: 21850
  chr7:139412981-139413011
  hypo

SEQ ID NO: 74840 - DNA, 197 bp, Homo sapiens; identical to SEQ ID NO: 44794
  chr7:139478236-139478433
  hypo

SEQ ID NO: 74841 - DNA, 21 bp, Homo sapiens
  chr7:139622185-139622206
  hypo
ccaccgcgcccagccgagaac

SEQ ID NO: 74842 - DNA, 30 bp, Homo sapiens
  chr7:139657553-139657583
  hypo
tgccgaagaggtaacgtattttaataggac

SEQ ID NO: 74843 - DNA, 30 bp, Homo sapiens
  chr7:139658330-139658360
  hypo
ttccttagctggctcgtgcaagatgcaact

SEQ ID NO: 74844 - DNA, 30 bp, Homo sapiens
  chr7:139688861-139688891
  hypo
ttagaagatcctcccggtgttcttcctccc

SEQ ID NO: 74845 - DNA, 162 bp, Homo sapiens; identical to SEQ ID NO: 21851
  chr7:139690813-139690975
  hypo

SEQ ID NO: 74846 - DNA, 218 bp, Homo sapiens
  chr7:139717410-139717628
  hypo
agggctgcagaggggagggagcgggtgttctgggccagccctgaccacacggacctgcaggttcacggctgaggcccggcagcagcaccggcccttcacgtacctgcccttcggggccggcccacggagctgcctcggggtgcgtctagggctgcttgaggtcaagttgacactgctccacgtgctgcacaagttccggttccaagcctgccctgaga

SEQ ID NO: 74847 - DNA, 347 bp, Homo sapiens; identical to SEQ ID NO: 21852
  chr7:139733610-139733957
  hypo

SEQ ID NO: 74848 - DNA, 30 bp, Homo sapiens
  chr7:139763644-139763674
  hypo
gggaggtagggttacgtgggaacagtgtgg

SEQ ID NO: 74849 - DNA, 43 bp, Homo sapiens
  chr7:139842730-139842773
  hypo
aaatctacaagttaatcaaggcgggcggatcacgaggtcagga

SEQ ID NO: 74850 - DNA, 45 bp, Homo sapiens
  chr7:139866423-139866468
  hypo
cactgcacctggaggaatactgtcttaatacgacaaattagtact

SEQ ID NO: 74851 - DNA, 66 bp, Homo sapiens
  chr7:139897107-139897173
  hypo
cactcccccatccagagagggcgttaatctattcctgagggatccgccccagtaacctaaacccct

SEQ ID NO: 74852 - DNA, 876 bp, Homo sapiens; identical to SEQ ID NO: 44797
  chr7:139929833-139930709
  hypo

SEQ ID NO: 74853 - DNA, 30 bp, Homo sapiens; identical to SEQ ID NO: 44798
  chr7:139931030-139931060
  hypo

SEQ ID NO: 74854 - DNA, 161 bp, Homo sapiens
  chr7:139992307-139992468
  hypo
ggtaaagtgctggccgcgaagggcgcgcgaggagccgccacccgctcagcgtgggctttggtgtcggggtcgttgtgtgttgacaatcactccagtagccgtttccgatacagcatgtgcggcctctttagccttgagcgggctccgcggctgcctggcgg

SEQ ID NO: 74855 - DNA, 275 bp, Homo sapiens
  chr7:140026927-140027202
  hypo
agcgagattctgtctcaaaaaaaaaaaaaatctgttaaggaggattatgaggctctacactctctccaagagcttgttcacagaataatctcttttcggaacctgagtagaaccaataaaagtaaaacccactggggcgtgtggggaaggagcgctctctgccaccagtactttggtcacgactgttgcccctcgcagccccgccttcctggctccagaatggttgctctttattttataaccctattaacatcttcattcgtcattctaggaca

SEQ ID NO: 74856 - DNA, 161 bp, Homo sapiens; identical to SEQ ID NO: 21856
  chr7:140027766-140027927
  hypo

SEQ ID NO: 74857 - DNA, 165 bp, Homo sapiens
  chr7:140030061-140030226
  hypo
aaagagctcactgttcgctgccgctgagccctcagggagagctggcgaggctgccaagagccagaggagaggagaatgcactcaaaacccacgtagtccgagaacctgggcagcgccgacagtctgcggccattaattgcaggcgtgcagcgtcctgagtaaagc

SEQ ID NO: 74858 - DNA, 32 bp, Homo sapiens
  chr7:140045117-140045149
  hypo
cctctgccaaccgtacgcgaagatctgaatct

SEQ ID NO: 74859 - DNA, 138 bp, Homo sapiens
  chr7:140045705-140045843
  hypo
actcagggcaagaaccggcgctctcttctgtagtacatcagagatgaagccttgcaaagttccaccttcaagcagagtgtcgagcaatcaaaatcacttctaatttagctcgctcacctgaggcgtgctccccatttg

SEQ ID NO: 74860 - DNA, 30 bp, Homo sapiens
  chr7:140047821-140047851
  hypo
agaaattaacaataacgacaaaatagaaaa

SEQ ID NO: 74861 - DNA, 141 bp, Homo sapiens
  chr7:140048425-140048566
  hypo
ctatgatccctccaacgtcgtaccaaatggacagcttgtcggcttccgcctccttccagccgaagttgttactcagataaaaggggagccagaagaagaaggagtaattcactaacttcaagcaggcgtaggccagtgagt

SEQ ID NO: 74862 - DNA, 191 bp, Homo sapiens
  chr7:140050011-140050202
  hypo
gggaaggggaactgagacacacggacgggttgcgtgactcaccccaggtgtcacagaaagttagtgggtaagctggaaacataacctaggcctcttaacttccactccagtgctagagtgcccgaaacatcaagacagaaaaactgcagcagaagggatttagtgtagacgttagaaggctttcctgactg

SEQ ID NO: 74863 - DNA, 93 bp, Homo sapiens; identical to SEQ ID NO: 21857
  chr7:140063542-140063635
  hypo

SEQ ID NO: 74864 - DNA, 30 bp, Homo sapiens
  chr7:140080169-140080199
  hypo
gaagcatggagcaacgaataactacaaaat

SEQ ID NO: 74865 - DNA, 172 bp, Homo sapiens; identical to SEQ ID NO: 5922
  chr7:140098302-140098474
  hypo

SEQ ID NO: 74866 - DNA, 43 bp, Homo sapiens
  chr7:140130675-140130718
  hypo
ttgggggcaggtacttggcagcgtgtgtgcatgtgcccagccc

SEQ ID NO: 74867 - DNA, 213 bp, Homo sapiens; identical to SEQ ID NO: 21859
  chr7:140156472-140156685
  hypo

SEQ ID NO: 74868 - DNA, 30 bp, Homo sapiens; identical to SEQ ID NO: 21860
  chr7:140157040-140157070
  hypo

SEQ ID NO: 74869 - DNA, 31 bp, Homo sapiens; identical to SEQ ID NO: 21861
  chr7:140169421-140169452
  hypo

SEQ ID NO: 74870 - DNA, 20 bp, Homo sapiens
  chr7:140176252-140176272
  hypo
cagagcgacactccatctca

SEQ ID NO: 74871 - DNA, 121 bp, Homo sapiens
  chr7:140180183-140180304
  hypo
tcaaaataataataatagtaatagataatagtacctacttcagagatggctgtgaaagttaaatgagaatctgtttaaaaacctttgtactggccgggcgcggtggctcacgcctgtaatc

SEQ ID NO: 74872 - DNA, 118 bp, Homo sapiens
  chr7:140205261-140205379
  hypo
gggcaagttggaaggccgtcagagctaggaaagggtagcggtgacattggctcctcgagaaagcagcaggggcctgtgggaagaggtgtctgtccagaggtcccgggaatccaggagt

SEQ ID NO: 74873 - DNA, 78 bp, Homo sapiens
  chr7:140217362-140217440
  hypo
ctgcctcagctgtgttcggggcttttcctgcctccccgctgtccctgctgtccccactgtccccgctgcaggacagct

SEQ ID NO: 74874 - DNA, 30 bp, Homo sapiens
  chr7:140219361-140219391
  hypo
aaccggctgggactccgagacagacagctc

SEQ ID NO: 74875 - DNA, 38 bp, Homo sapiens
  chr7:140219800-140219838
  hypo
gttttaaagatgaaccggagtggccagtcatggtggtt

SEQ ID NO: 74876 - DNA, 281 bp, Homo sapiens
  chr7:140221610-140221891
  hypo
ggagctctagctgactcggccccaacagagaagatgcccctcacctttggcatcctgccggcgcagctcccgctcctggatgaagccccgaaacatctgagtctccatgaagacctccaggaagtggcggaggctcttggaggagacagctttgcggaaggcctcccgctgcagggttctctcctcacgctcgcccgacgtcaggaacaaagagtagtgtcccacaatctccacgaagaagcggacaaaggcttcagacaccacctcgttcaaggggctgg

SEQ ID NO: 74877 - DNA, 31 bp, Homo sapiens; identical to SEQ ID NO: 21864
  chr7:140255213-140255244
  hypo

SEQ ID NO: 74878 - DNA, 178 bp, Homo sapiens; identical to SEQ ID NO: 44802
  chr7:140340054-140340232
  hypo

SEQ ID NO: 74879 - DNA, 567 bp, Homo sapiens; identical to SEQ ID NO: 44803
  chr7:140340368-140340935
  hypo

SEQ ID NO: 74880 - DNA, 30 bp, Homo sapiens
  chr7:140394664-140394694
  hypo
tatggcagctgggacgttttaaaattggga

SEQ ID NO: 74881 - DNA, 206 bp, Homo sapiens
  chr7:140402596-140402802
  hypo
gaggagttttggatgacttaacgctttgagaatgtagcacgctgtctgccatgttgttttgtcttgcagtgccggtggtggtgtgcacattgagccccggtatagacagttcccccagctgaccagatcccaggtgttccagagcgagttcttcagcggactcatgtggttctggattctctggcgcttttggcatgactcagaag

SEQ ID NO: 74882 - DNA, 33 bp, Homo sapiens; identical to SEQ ID NO: 21865
  chr7:140427686-140427719
  hypo

SEQ ID NO: 74883 - DNA, 30 bp, Homo sapiens; identical to SEQ ID NO: 5925
  chr7:140453121-140453151
  hypo

SEQ ID NO: 74884 - DNA, 43 bp, Homo sapiens
  chr7:140643305-140643348
  hypo
tttgttttgttttgcttgagacggcatttcgctctgtcactca

SEQ ID NO: 74885 - DNA, 31 bp, Homo sapiens; identical to SEQ ID NO: 21867
  chr7:140710388-140710419
  hypo

SEQ ID NO: 74886 - DNA, 338 bp, Homo sapiens; identical to SEQ ID NO: 5927
  chr7:140772337-140772675
  hypo

SEQ ID NO: 74887 - DNA, 1932 bp, Homo sapiens; identical to SEQ ID NO: 44811
  chr7:140772716-140774648
  hypo

SEQ ID NO: 74888 - DNA, 18 bp, Homo sapiens
  chr7:140799646-140799664
  hypo
tgagacagagtctggctt

SEQ ID NO: 74889 - DNA, 189 bp, Homo sapiens
  chr7:141096127-141096316
  hypo
aataccctaccactttcccatcgcccatgcctactcccacctgccactcgcctgcctttttcccaaaggcgccccatacttactctgctgtgccgcaggggtccctggttctgcggcatttgccgccttgaaggtctttgagagccagaatgaccttcagggctcaacgggtctgggcctctcatactg

SEQ ID NO: 74890 - DNA, 30 bp, Homo sapiens; identical to SEQ ID NO: 21870
  chr7:141248787-141248817
  hypo

SEQ ID NO: 74891 - DNA, 30 bp, Homo sapiens
  chr7:141490041-141490071
  hypo
agattacggaaggacgaggccaaatccaga

SEQ ID NO: 74892 - DNA, 775 bp, Homo sapiens; identical to SEQ ID NO: 5930
  chr7:142985428-142986203
  hypo

SEQ ID NO: 74893 - DNA, 162 bp, Homo sapiens
  chr7:143000866-143001028
  hypo
tttgttacagatgagactgatcgtggggttgaccaacaagatggaaagaaccacgcaggatcccctgggtgcgaggagagtgatgccggtaaagaaaagttgccgaagatgagactgcccacgcgctcagacatgatatgcggctatgcctgcctcaaaggt

SEQ ID NO: 74894 - DNA, 145 bp, Homo sapiens
  chr7:143013313-143013458
  hypo
atcccggtcacagcagcgtgggggtgaacaaagctggtggggtagtgacccccagtaccagtatatgccctttgaacactgcaccagctacggactgccctctgagaatgggggcctccagcacaggctccggaaggatgcaggc

SEQ ID NO: 74895 - DNA, 31 bp, Homo sapiens
  chr7:143018532-143018563
  hypo
tcctcatcctcttcagcgccctcttctgcca

SEQ ID NO: 74896 - DNA, 58 bp, Homo sapiens
  chr7:143096712-143096770
  hypo
ttcctcaggttctcaccgcctccgttcttaccaacacatgcttcgccactgccacctt

SEQ ID NO: 74897 - DNA, 80 bp, Homo sapiens; identical to SEQ ID NO: 21874
  chr7:143097072-143097152
  hypo

SEQ ID NO: 74898 - DNA, 30 bp, Homo sapiens
  chr7:143599967-143599997
  hypo
tttagcattacattcgtgtatgaagaagac

SEQ ID NO: 74899 - DNA, 30 bp, Homo sapiens; identical to SEQ ID NO: 44823
  chr7:144074913-144074943
  hypo

SEQ ID NO: 74900 - DNA, 23 bp, Homo sapiens
  chr7:144253180-144253203
  hypo
tcgtctcaaacaaaacaaaacaa

SEQ ID NO: 74901 - DNA, 340 bp, Homo sapiens; identical to SEQ ID NO: 44827
  chr7:145813945-145814285
  hypo

SEQ ID NO: 74902 - DNA, 30 bp, Homo sapiens; identical to SEQ ID NO: 44828
  chr7:145814654-145814684
  hypo

SEQ ID NO: 74903 - DNA, 30 bp, Homo sapiens; identical to SEQ ID NO: 5939
  chr7:145815251-145815281
  hypo

SEQ ID NO: 74904 - DNA, 30 bp, Homo sapiens; identical to SEQ ID NO: 44830
  chr7:145836197-145836227
  hypo

SEQ ID NO: 74905 - DNA, 30 bp, Homo sapiens; identical to SEQ ID NO: 5940
  chr7:145864150-145864180
  hypo

SEQ ID NO: 74906 - DNA, 30 bp, Homo sapiens; identical to SEQ ID NO: 44832
  chr7:145883062-145883092
  hypo

SEQ ID NO: 74907 - DNA, 153 bp, Homo sapiens; identical to SEQ ID NO: 44833
  chr7:145981900-145982053
  hypo

SEQ ID NO: 74908 - DNA, 30 bp, Homo sapiens; identical to SEQ ID NO: 5942
  chr7:145984491-145984521
  hypo

SEQ ID NO: 74909 - DNA, 30 bp, Homo sapiens; identical to SEQ ID NO: 44835
  chr7:146042514-146042544
  hypo

SEQ ID NO: 74910 - DNA, 30 bp, Homo sapiens; identical to SEQ ID NO: 44836
  chr7:146051335-146051365
  hypo

SEQ ID NO: 74911 - DNA, 30 bp, Homo sapiens; identical to SEQ ID NO: 5943
  chr7:146072421-146072451
  hypo

SEQ ID NO: 74912 - DNA, 30 bp, Homo sapiens; identical to SEQ ID NO: 44838
  chr7:146188564-146188594
  hypo

SEQ ID NO: 74913 - DNA, 30 bp, Homo sapiens; identical to SEQ ID NO: 5944
  chr7:146415862-146415892
  hypo

SEQ ID NO: 74914 - DNA, 133 bp, Homo sapiens; identical to SEQ ID NO: 21882
  chr7:146425092-146425225
  hypo

SEQ ID NO: 74915 - DNA, 30 bp, Homo sapiens; identical to SEQ ID NO: 44840
  chr7:146657554-146657584
  hypo

SEQ ID NO: 74916 - DNA, 30 bp, Homo sapiens; identical to SEQ ID NO: 44841
  chr7:146658239-146658269
  hypo

SEQ ID NO: 74917 - DNA, 39 bp, Homo sapiens
  chr7:147179512-147179551
  hypo
tttcaaaataagaatcaggcccgtgtggtggctcacgcc

SEQ ID NO: 74918 - DNA, 32 bp, Homo sapiens
  chr7:147216089-147216121
  hypo
tccagcctggcgacagactctgtctcaaaaaa

SEQ ID NO: 74919 - DNA, 43 bp, Homo sapiens
  chr7:147354931-147354974
  hypo
atgaaatatttgcctgagtatcgggtttagaagtttcactgaa

SEQ ID NO: 74920 - DNA, 30 bp, Homo sapiens; identical to SEQ ID NO: 5945
  chr7:147729233-147729263
  hypo

SEQ ID NO: 74921 - DNA, 34 bp, Homo sapiens
  chr7:147975332-147975366
  hypo
aggagaactctgtgacctcctcgatgtactaaaa

SEQ ID NO: 74922 - DNA, 704 bp, Homo sapiens; identical to SEQ ID NO: 44845
  chr7:148036378-148037082
  hypo

SEQ ID NO: 74923 - DNA, 30 bp, Homo sapiens; identical to SEQ ID NO: 44846
  chr7:148038075-148038105
  hypo

SEQ ID NO: 74924 - DNA, 31 bp, Homo sapiens; identical to SEQ ID NO: 21885
  chr7:148042016-148042047
  hypo

SEQ ID NO: 74925 - DNA, 284 bp, Homo sapiens
  chr7:148079628-148079912
  hypo
ggttcacaatagataacagaacggcttcagcaaagggcaagcaagcgtagagagatgctggagaagaacaaggcactttatccatgtcccccacagcaccctgcctcagcgccggggcaaaagaatctttgtgtgagcccagggagtcggcagggacatgaggggttgatgcggcacttgctcagagcaatcgcagtgctgccgctggaattatctttctcacacagttcccagtagtggttaaaaggctctgaggtcagtccgcctggcccactagctaaggg

SEQ ID NO: 74926 - DNA, 30 bp, Homo sapiens; identical to SEQ ID NO: 21887
  chr7:148142954-148142984
  hypo

SEQ ID NO: 74927 - DNA, 31 bp, Homo sapiens; identical to SEQ ID NO: 21888
  chr7:148162309-148162340
  hypo

SEQ ID NO: 74928 - DNA, 129 bp, Homo sapiens
  chr7:148296994-148297123
  hypo
tgtttacagacacacagcttacgcgtccaaactccatctacacgcccataaacagccaccccttggccactttgggaggacaggctgcgtgtaggaaagagcctcctcgatccctggaaatgaacttag

SEQ ID NO: 74929 - DNA, 152 bp, Homo sapiens; identical to SEQ ID NO: 21889
  chr7:148448803-148448955
  hypo

SEQ ID NO: 74930 - DNA, 532 bp, Homo sapiens
  chr7:148480933-148481465
  hypo
aatgtctgcattcaacaatgacgctggctttgtggctgctcttgataaggtaggtgcgtgagggttgtgacttgcctgtagtatgtatggatggggcgtttgtctctaactatattccgtgtaacgcaggcttgtggtcgcttcataaacaacaacgcggttaccaagatggcccaatcatccagtaaatcccctgagttgctggctcgatactgtgactccttgttgaagaaaaggtattaaatgaccctatgttttcttagtatgcctgtttaaaatctcagcttttatatgaggaattaaaacctacattacattttacatacattaaattggaatttttgtaccttatgagaaaaatgcttaaacataatcgtccttgccgttgaaaatctgcattccctcccactggctgtttttcaaacagaaatgtctcaatgtattgtgggactttggttattctccatccaagcactaaccaggccccaccctgttcgcttctgagatcagacaagatcgggcacgttcagtt

SEQ ID NO: 74931 - DNA, 30 bp, Homo sapiens
  chr7:148481891-148481921
  hypo
aggctagcataaccccgatacaaaaaagac

SEQ ID NO: 74932 - DNA, 197 bp, Homo sapiens
  chr7:148500529-148500726
  hypo
tgctggtctcttcagttcctccgggatcaagcaggcacttgggtaagtaccttggtcccatggaaattcctcacggtaagcgaaggtgagctgagtgatgggtgagtcgggagttcgccccacaccttcagattcctggcctttacctgctccccttcgcactgggtaagtgtaccgtcttgactggtgtgaaagaa

SEQ ID NO: 74933 - DNA, 30 bp, Homo sapiens; identical to SEQ ID NO: 5947
  chr7:148506156-148506186
  hypo

SEQ ID NO: 74934 - DNA, 80 bp, Homo sapiens; identical to SEQ ID NO: 5948
  chr7:148506411-148506491
  hypo

SEQ ID NO: 74935 - DNA, 90 bp, Homo sapiens; identical to SEQ ID NO: 5949
  chr7:148507423-148507513
  hypo

SEQ ID NO: 74936 - DNA, 101 bp, Homo sapiens; identical to SEQ ID NO: 5950
  chr7:148508711-148508812
  hypo

SEQ ID NO: 74937 - DNA, 185 bp, Homo sapiens; identical to SEQ ID NO: 5951
  chr7:148511049-148511234
  hypo

SEQ ID NO: 74938 - DNA, 108 bp, Homo sapiens; identical to SEQ ID NO: 5952
  chr7:148512013-148512121
  hypo

SEQ ID NO: 74939 - DNA, 35 bp, Homo sapiens; identical to SEQ ID NO: 5953
  chr7:148513817-148513852
  hypo

SEQ ID NO: 74940 - DNA, 122 bp, Homo sapiens; identical to SEQ ID NO: 5954
  chr7:148514300-148514422
  hypo

SEQ ID NO: 74941 - DNA, 77 bp, Homo sapiens; identical to SEQ ID NO: 5955
  chr7:148515085-148515162
  hypo

SEQ ID NO: 74942 - DNA, 201 bp, Homo sapiens; identical to SEQ ID NO: 5956
  chr7:148523535-148523736
  hypo

SEQ ID NO: 74943 - DNA, 30 bp, Homo sapiens; identical to SEQ ID NO: 5957
  chr7:148525927-148525957
  hypo

SEQ ID NO: 74944 - DNA, 120 bp, Homo sapiens; identical to SEQ ID NO: 5958
  chr7:148526815-148526935
  hypo

SEQ ID NO: 74945 - DNA, 30 bp, Homo sapiens; identical to SEQ ID NO: 5959
  chr7:148543654-148543684
  hypo

SEQ ID NO: 74946 - DNA, 30 bp, Homo sapiens; identical to SEQ ID NO: 5960
  chr7:148544315-148544345
  hypo

SEQ ID NO: 74947 - DNA, 144 bp, Homo sapiens
  chr7:148692792-148692936
  hypo
cgccgcgcccggcctcagttgggaaagttttctaaacagcctttctgaagatccaggagttctttacctgaactgttatgggacaagtgtgtgctgcaaacagcccctctggagagcagcacaggcccccgctttagctggttt

SEQ ID NO: 74948 - DNA, 30 bp, Homo sapiens
  chr7:148700272-148700302
  hypo
aggtggggctgccacgtgggtggcctctcc

SEQ ID NO: 74949 - DNA, 226 bp, Homo sapiens; identical to SEQ ID NO: 21906
  chr7:148703453-148703679
  hypo

SEQ ID NO: 74950 - DNA, 136 bp, Homo sapiens
  chr7:148717799-148717935
  hypo
gtgaccatcagaggacgtattcatctttaacccactggactgagacaagaagacatcgccttccatgagggctggctcactggccgttcaacgcacagtggtagaacgagtgagctcccagcgttcttaaagctag

SEQ ID NO: 74951 - DNA, 31 bp, Homo sapiens; identical to SEQ ID NO: 21907
  chr7:148759940-148759971
  hypo

SEQ ID NO: 74952 - DNA, 28 bp, Homo sapiens
  chr7:148763573-148763601
  hypo
agattccgtctcaaaaaaaaaaaaaaag

SEQ ID NO: 74953 - DNA, 11 bp, Homo sapiens
  chr7:148819021-148819032
  hypo
ttttgagacgg

SEQ ID NO: 74954 - DNA, 34 bp, Homo sapiens
  chr7:148819751-148819785
  hypo
tagctgtgttttacattgagacgtgggttttttg

SEQ ID NO: 74955 - DNA, 25 bp, Homo sapiens
  chr7:148841965-148841990
  hypo
tcaccgtgcccggcttctcggctac

SEQ ID NO: 74956 - DNA, 201 bp, Homo sapiens
  chr7:148846150-148846351
  hypo
ggccgggggctgaggcggaagaatcacttgagtccaggagttcgaggcagtccacaccgcgtctctaaaataaaaaaaatttttgagaagttaaaaaataaatagatgaaattaattttaattatatatctaactcaatatatgcaaaatattatttcaacatgtcatcaatttatttatttatttattttttgaggtgga

SEQ ID NO: 74957 - DNA, 180 bp, Homo sapiens; identical to SEQ ID NO: 21909
  chr7:148851180-148851360
  hypo

SEQ ID NO: 74958 - DNA, 30 bp, Homo sapiens; identical to SEQ ID NO: 5963
  chr7:148857608-148857638
  hypo

SEQ ID NO: 74959 - DNA, 30 bp, Homo sapiens
  chr7:148876624-148876654
  hypo
taatgaaacaccagcgcatccacaccgggg

SEQ ID NO: 74960 - DNA, 30 bp, Homo sapiens; identical to SEQ ID NO: 21911
  chr7:148879362-148879392
  hypo

SEQ ID NO: 74961 - DNA, 30 bp, Homo sapiens
  chr7:148895430-148895460
  hypo
gaatgggacatggacgcccggcggccaatg

SEQ ID NO: 74962 - DNA, 85 bp, Homo sapiens
  chr7:148901647-148901732
  hypo
gaagaggtgaagggcacataccgtcggccttggatttgcaaggagaggggcaagaaaggagcttgccggcgcctacctgagatca

SEQ ID NO: 74963 - DNA, 247 bp, Homo sapiens
  chr7:148921395-148921642
  hypo
actcgggcctcatccgccaccagatgacgcaccgcggcgagcggccctacaagtgctcggagtgcgagaagacctacagccgtaaggagcacctgcagaaccaccagcggctgcacacgggcgagcggcctttccaatgtgcactgtgcggcaagagcttcatccgcaagcagaacctgctcaagcaccagcgcatccacacgggcgagcgcccctacacgtgcggcgagtgcggcaagagcttccg

SEQ ID NO: 74964 - DNA, 30 bp, Homo sapiens
  chr7:148921993-148922023
  hypo
ccctcacacctcctcgagtgccctgggacc

SEQ ID NO: 74965 - DNA, 30 bp, Homo sapiens
  chr7:148923203-148923233
  hypo
agacccctttttgccgtgcaaagggaattc

SEQ ID NO: 74966 - DNA, 46 bp, Homo sapiens
  chr7:148930558-148930604
  hypo
ctaaaaaaaatggaggatggtcgggcatggtggctcatgcctgtaa

SEQ ID NO: 74967 - DNA, 159 bp, Homo sapiens; identical to SEQ ID NO: 44870
  chr7:148936557-148936716
  hypo

SEQ ID NO: 74968 - DNA, 30 bp, Homo sapiens
  chr7:148951545-148951575
  hypo
ggcattggttcccccgaagagacactgcag

SEQ ID NO: 74969 - DNA, 30 bp, Homo sapiens
  chr7:148975484-148975514
  hypo
tccaggcctccctccgtatccagagcacct

SEQ ID NO: 74970 - DNA, 187 bp, Homo sapiens
  chr7:148979095-148979282
  hypo
atgtaccactgcagcgagtgcctgcgcttcttccagcagcgcaagagcctgctgctgcaccagcgcctgcacaccggcaatggccagggctggcccgcctgcccctactgcggcaaggccttccgccggccctcggacctcttccggcaccagcgcatccacaccggtgagcggccctaccagtgcc

SEQ ID NO: 74971 - DNA, 130 bp, Homo sapiens; identical to SEQ ID NO: 21916
  chr7:148984551-148984681
  hypo

SEQ ID NO: 74972 - DNA, 30 bp, Homo sapiens
  chr7:148985992-148986022
  hypo
ctctaggactcccacgctgcactctgcaca

SEQ ID NO: 74973 - DNA, 30 bp, Homo sapiens
  chr7:148990310-148990340
  hypo
actgccatgtcacacgtccccaggatgtgc

SEQ ID NO: 74974 - DNA, 30 bp, Homo sapiens
  chr7:148991723-148991753
  hypo
gtgcgccgcaccagcgcgtgcatcgtggcc

SEQ ID NO: 74975 - DNA, 30 bp, Homo sapiens
  chr7:148992083-148992113
  hypo
gcccttccagtgtgcgcagtgcgacaagcg

SEQ ID NO: 74976 - DNA, 49 bp, Homo sapiens
  chr7:148992354-148992403
  hypo
tgtgagagggactcctcgaccgatgagccgcccacgggcctcaggggtg

SEQ ID NO: 74977 - DNA, 179 bp, Homo sapiens
  chr7:149005004-149005183
  hypo
gcggagcagccctttccgccccgctcccagagcactgcggcctcctcctcacttgcttcctgcaggtgagaggtggtggacaggacctgtgagggtctgggccagcctcctggcttcataggtaaggaatggggttttgtgtggtgtgtgcgtctcagccttcacggagcattcctaac

SEQ ID NO: 74978 - DNA, 19 bp, Homo sapiens
  chr7:149084383-149084402
  hypo
ccagcccctaactttcaat

SEQ ID NO: 74979 - DNA, 33 bp, Homo sapiens
  chr7:149114319-149114352
  hypo
ttaagcaaatagatggcagggcgcagtggctca

SEQ ID NO: 74980 - DNA, 30 bp, Homo sapiens; identical to SEQ ID NO: 21917
  chr7:149128221-149128251
  hypo

SEQ ID NO: 74981 - DNA, 30 bp, Homo sapiens
  chr7:149128921-149128951
  hypo
cacttggcgcagtgcgtgcaggggtagggc

SEQ ID NO: 74982 - DNA, 30 bp, Homo sapiens
  chr7:149129297-149129327
  hypo
tgcccgcgtgcacgcgctgatggatcacca

SEQ ID NO: 74983 - DNA, 30 bp, Homo sapiens
  chr7:149130000-149130030
  hypo
ctctgtcttgatcacgatcccctctgctcc

SEQ ID NO: 74984 - DNA, 30 bp, Homo sapiens
  chr7:149133712-149133742
  hypo
tcgctggagccttccgtggactcctccagc

SEQ ID NO: 74985 - DNA, 30 bp, Homo sapiens
  chr7:149151980-149152010
  hypo
tccacggctctcatcggccttcgctttgcc

SEQ ID NO: 74986 - DNA, 31 bp, Homo sapiens
  chr7:149153083-149153114
  hypo
cgacagaggtgatgagcgttggttctccatg

SEQ ID NO: 74987 - DNA, 431 bp, Homo sapiens
  chr7:149171586-149172017
  hypo
ggaggtgcgggcggcgtcgggagtggctggcctcgggccggggtcttggcgcccgctgcatggttgcgctggtgcttgcggaggtggtccttgcggatgaagcttttgccgcagacggtgcaggtgaagggccgcacgcccgtgtgcgttcggtagtggtcgatgagcttggagcgttcggtgaagcgcttctcacactcggtgcaggggaagggccgctcgccggtgtgcagcatgcgatggcggatgaggtgcgcggggcgcgtgaagcaacggccgcactccccacaccgaagggcgctgccatcccgtgcgctgcccccaccgctgccgccaccgccgccgccactgccgctgccgccaccgcctgtgcccgggcccgacccgtcgggcgccccacagctgcgctggtgcgcgctcaggctgacttg

SEQ ID NO: 74988 - DNA, 30 bp, Homo sapiens
  chr7:149172216-149172246
  hypo
tcgggccccgtcctcgggttcaggcccact

SEQ ID NO: 74989 - DNA, 30 bp, Homo sapiens
  chr7:149257708-149257738
  hypo
ctaaggcttggaagcgggtgactagactca

SEQ ID NO: 74990 - DNA, 31 bp, Homo sapiens; identical to SEQ ID NO: 21919
  chr7:149315325-149315356
  hypo

SEQ ID NO: 74991 - DNA, 310 bp, Homo sapiens; identical to SEQ ID NO: 44879
  chr7:149411417-149411727
  hypo

SEQ ID NO: 74992 - DNA, 530 bp, Homo sapiens; identical to SEQ ID NO: 5971
  chr7:149411834-149412364
  hypo

SEQ ID NO: 74993 - DNA, 329 bp, Homo sapiens
  chr7:149416659-149416988
  hypo
ggccgtgcggttctcggaggaggagtggcggctcctggaggaggggcagagggagttctaccgagacgtgatgcgggagaactacgagacgctggtctctgtgggtaaggacgggagggagcagcacgtgtggcaggagcctggtgggcggtggaagggaggccggagtccctggacccggcagccttagtctttccacctgagaaatgaacacggggatcgttcacgctgctgctattctatgtcccgggaccgggttctaggtacaattcggtgggggtatgcggcggcctctgaggttccgaccactctgcggttctttgagttta

SEQ ID NO: 74994 - DNA, 99 bp, Homo sapiens
  chr7:149418048-149418147
  hypo
ccagcctggatggagagagagcgagccccgagggtaagtcagacagtggggcagtgcacgcagcctcctctgcactccgcatgatgaagcacaagtcca

SEQ ID NO: 74995 - DNA, 433 bp, Homo sapiens
  chr7:149420319-149420752
  hypo
tgttgctttgcattgacgccaggcatgatgcatggggtgggcttgggctctggacagcatggtggaggggccggggcacaggtcttggagtcagacccggagaggctcctgatgccttgagcctaggctgttcccactcacagggccgcagtgagcttagctgcagtaatgtacttactgtacaactccattttcctcaaatgtaagttctgttcaggaccccagagctgtctcaaacagtgaccctgacagcccacttccttcaatttgtcctcagagtgatgccacttgtctgcctgcagggcgaattccatggcttccctctttgccctgtccggttctggcaggtgtgtggacccaggcactgggaagactcagcgagccactggaagagcctcatcttcagagttggccccacgcccttctaacttgt

SEQ ID NO: 74996 - DNA, 31 bp, Homo sapiens
  chr7:149427376-149427407
  hypo
tctgaaggagaagacccgaggccagagcctg

SEQ ID NO: 74997 - DNA, 590 bp, Homo sapiens
  chr7:149462573-149463163
  hypo
atgaggagaagcggacgagtcgggagagggcctggccgggccggccgtctggtgcaccctttggtgccgcaccaagtgctgcttgtgcgtgaagctgcgtgcgcactgtgcgcactggtagggcctctcgcccgtatggatgcgctggtgccgaatcaagtgcgtcttcttgcgaaagcgcttctcgcattccgtgcaggggaagggccgctcgccggtgtgggtcttttggtgcgagcccaggtggatcttctggctgaagcgcttgccgcactccgcgcacgggtagggccgctcgcccgtgtgcgtgcgcaggtggcgggtcagatgggccttcttgctgaagcgcttgtcgcactcggagcacgggaaaggccgctcgccgcggtggctgcgctgatgcagtagcatgtgggcgcgctgcgtgaagctgcggccgcagtccgggcaggcgcaggggccctcgccccggtgcagccgctggtgcagtcgcaacgtcagctggtcccggaagcgccgctcacactccccgcagccgtagggcttctccggcatcggaccccacccagacagcgcgagcccactcagtg

SEQ ID NO: 74998 - DNA, 31 bp, Homo sapiens; identical to SEQ ID NO: 21924
  chr7:149513356-149513387
  hypo

SEQ ID NO: 74999 - DNA, 30 bp, Homo sapiens
  chr7:149577241-149577271
  hypo
ggcaatgtgagtggcgctatgggacgggcc

SEQ ID NO: 75000 - DNA, 137 bp, Homo sapiens; identical to SEQ ID NO: 21925
  chr7:150006589-150006726
  hypo

SEQ ID NO: 75001 - DNA, 121 bp, Homo sapiens; identical to SEQ ID NO: 21926
  chr7:150006785-150006906
  hypo

SEQ ID NO: 75002 - DNA, 30 bp, Homo sapiens
  chr7:150026539-150026569
  hypo
gtgagtgtgggagccgcaggtctgcagcgg

SEQ ID NO: 75003 - DNA, 30 bp, Homo sapiens
  chr7:150028485-150028515
  hypo
tgttgcatcctgggcgccacatgctcatgg

SEQ ID NO: 75004 - DNA, 44 bp, Homo sapiens
  chr7:150039377-150039421
  hypo
agtgggggagccttcgggtgtggcagaacggcatgatggaattc

SEQ ID NO: 75005 - DNA, 90 bp, Homo sapiens
  chr7:150049532-150049622
  hypo
taccagaatgtcttatcgttgaaattattttttacttccttttgaaatgcttgagtttttttgtttgttttggtttggtttttgagacgg

SEQ ID NO: 75006 - DNA, 1535 bp, Homo sapiens
  chr7:150068714-150070249
  hypo
gtggccctggttctgcatctgcgggcccattcagctgcaaagcggcccatcgcttgtcccaaatgcgagagacgcttctggcgacgaaagcagcttcgagctcatctgcggcggtgccaccctcccgccccggaggcccggcccttcatatgcggcaactgtggccggagctttgcccagtgggaccagctagttgcccacaagcgggtgcacgtagctgaggccctggaggaggccgcagccaaggctctggggccccggcccaggggccgccccgcggtgaccgccccccggcccggtggagatgccgtcgaccgccccttccagtgtgcctgttgtggcaagcgcttccggcacaagcccaacttgatcgctcaccgccgcgtgcacacgggcgagcggccccaccagtgccccgagtgcgggaagcgctttaccaataagccctatctgacttcgcaccggcgcatccacaccggcgagaagccctacccgtgcaaagagtgcggccgccgcttccggcacaaacccaacctgctgtctcacagcaagattcacaagcgatccgaggggtcggcccaggccgcccccggcccggggagcccccagctgccagccggcccccaggagtccgcggccgagcccaccccggcggtacctctgaaaccggcccaggagccgccgccaggggccccgccagagcacccgcaggacccgatcgaagcccccccctccctctacagctgcgacgactgcggcaggagcttccggctggagcgcttcctgcgggcccaccagcggcagcacaccggggagcggcccttcacctgcgccgagtgcgggaagaacttcggcaagaagacgcacctggtggcgcactcgcgcgtgcactccggcgagcggcccttcgcctgcgaggagtgcggccgccgcttctcccagggcagccatctggcggcgcatcggcgcgaccacgcccccgatcggcccttcgtgtgtcccgactgcggcaaggccttccgccacaaaccctacctggcggcgcaccggcgcatccacaccggcgagaagccctacgtctgccccgactgcggcaaagccttcagccagaagtccaacctggtgtcgcaccggcgcatccacacgggcgagcggccctacgcctgtcccgactgcgaccgcagcttcagccagaagtccaacctcatcacccaccgcaagagccacatccgggacggcgccttctgctgtgccatctgtggccagaccttcgacgacgaggagagactcctggcccaccagaagaagcacgatgtctgagacggtgggcggggccgtgttggctgagagagggctggggtccttcgtggtgggagtcgcagtgggctgggggtgcctgcctagtgctggagtaggggacaatgggaatcctagaggggatggaagacgcggggagtgagctgggtgggccctgctagcgagagaggtcaaccccggtggccagggaacccacttccaagcgcagggacgccggc

SEQ ID NO: 75007 - DNA, 233 bp, Homo sapiens
  chr7:150079257-150079490
  hypo
gaggctcctgtgtggcgctgggggcctctgagattcccaactggctggaaggagtgatggcttaggaggagtgagtggcagcggggacgctggcagagaggcttgtacagatactgcccgatgcatccggctcaggcttgccgccctgtggtgctcctcccaaactcagggagcaggtatttccgttcacctgcgccttcaagaacctgagctcaaagcgctgcaatgactgg

SEQ ID NO: 75008 - DNA, 30 bp, Homo sapiens
  chr7:150079845-150079875
  hypo
cttatcccaccccagcgcaggtcatccaac

SEQ ID NO: 75009 - DNA, 243 bp, Homo sapiens
  chr7:150081213-150081456
  hypo
gcctgacccggtgcgcggagggccgggccagggccaggcgtgggaagggggcccctgtgtgtcctgctcccctcagagcccgaggggcagcagagaggaaaggtggtccggtaggggcccgggggcccttgtgcgatagacaaagcggccttccaagacttggtgtgggcactggtgggagatggcgcatctggcccttgatgcctgtcttccagccggggcgctttgctgggcagcctgctc

SEQ ID NO: 75010 - DNA, 31 bp, Homo sapiens; identical to SEQ ID NO: 21930
  chr7:150087538-150087569
  hypo

SEQ ID NO: 75011 - DNA, 30 bp, Homo sapiens
  chr7:150093044-150093074
  hypo
cccgacagtatagacggtgctgcagtgacc

SEQ ID NO: 75012 - DNA, 30 bp, Homo sapiens
  chr7:150093649-150093679
  hypo
gcagacgctggcgccgcaggccatgcttgt

SEQ ID NO: 75013 - DNA, 30 bp, Homo sapiens
  chr7:150094146-150094176
  hypo
gccccgagtgcgagcgctgcttccgtcacc

SEQ ID NO: 75014 - DNA, 30 bp, Homo sapiens
  chr7:150095069-150095099
  hypo
ccctacctgtgtcccgcctgcggccgcggc

SEQ ID NO: 75015 - DNA, 58 bp, Homo sapiens
  chr7:150097103-150097161
  hypo
ctgtgactcaggtgccggaggatgcagtgtcagcagatgctgacgagatcagtcctgc

SEQ ID NO: 75016 - DNA, 30 bp, Homo sapiens
  chr7:150097428-150097458
  hypo
ggactgcacggcattcgttcactaaagaag

SEQ ID NO: 75017 - DNA, 233 bp, Homo sapiens
  chr7:150098290-150098523
  hypo
aagaaagatggtgtaggttctcggaaaatggttgttttttggcaagggacacgagcttcaagtcgtccggtaaggcagtcggcctcattgagagggtttggtgtcccactgcccagtcccggggagctgcctgacggagggtagactgcagtgaccagaggcagccgctcagccatgcaatagcacaggccgagggagagggcaggcccctcgtggacttggcagagagaaat

SEQ ID NO: 75018 - DNA, 90 bp, Homo sapiens
  chr7:150099968-150100058
  hypo
acagggttcacctgagctacacgtttacccatggtctacaggagccacgagcaacacatctacccacacgggagccatggtctgctgttc

SEQ ID NO: 75019 - DNA, 182 bp, Homo sapiens; identical to SEQ ID NO: 21932
  chr7:150100653-150100835
  hypo

SEQ ID NO: 75020 - DNA, 155 bp, Homo sapiens
  chr7:150104946-150105101
  hypo
tcgaggtgcaccagcgcacgcacaccggggagcggcccttcccctgccccgagtgcggccgctgcttcagcctcaagcagaacctgctcacgcaccagcgcatccacagcggcgagaagccgcaccagtgcgcgcagtgcggccgctgcttccgc

SEQ ID NO: 75021 - DNA, 54 bp, Homo sapiens; identical to SEQ ID NO: 21934
  chr7:150105547-150105601
  hypo

SEQ ID NO: 75022 - DNA, 30 bp, Homo sapiens
  chr7:150109689-150109719
  hypo
cagagcctcagtgacgagctattgtaggct

SEQ ID NO: 75023 - DNA, 30 bp, Homo sapiens
  chr7:150446890-150446920
  hypo
atgggtatagtgcccgtgaagaagaaaatg

SEQ ID NO: 75024 - DNA, 819 bp, Homo sapiens; identical to SEQ ID NO: 44891
  chr7:150497118-150497937
  hypo

SEQ ID NO: 75025 - DNA, 30 bp, Homo sapiens
  chr7:150554405-150554435
  hypo
cctcccacaagccccgcggggacttcccca

SEQ ID NO: 75026 - DNA, 875 bp, Homo sapiens; identical to SEQ ID NO: 5978
  chr7:150671456-150672331
  hypo

SEQ ID NO: 75027 - DNA, 30 bp, Homo sapiens; identical to SEQ ID NO: 44895
  chr7:150676514-150676544
  hypo

SEQ ID NO: 75028 - DNA, 31 bp, Homo sapiens; identical to SEQ ID NO: 21938
  chr7:150699034-150699065
  hypo

SEQ ID NO: 75029 - DNA, 1354 bp, Homo sapiens; identical to SEQ ID NO: 44897
  chr7:150714958-150716312
  hypo

SEQ ID NO: 75030 - DNA, 30 bp, Homo sapiens
  chr7:150718468-150718498
  hypo
ggcagaccagacttcgggagtgaggaaaaa

SEQ ID NO: 75031 - DNA, 189 bp, Homo sapiens
  chr7:150720587-150720776
  hypo
gctgtagatgtggctgcgtgtcaaggaacaagcctgaggcacggggggcctctcctgaggacacctcccctcagccccaacaagtctcccacccatgacgccctcacggagtctccctgccaagaacagtgccagctccaagaggaccttcccatgccacctctgcaggcctagcgcaaaggatatctt

SEQ ID NO: 75032 - DNA, 30 bp, Homo sapiens; identical to SEQ ID NO: 21940
  chr7:150721503-150721533
  hypo

SEQ ID NO: 75033 - DNA, 30 bp, Homo sapiens
  chr7:150732819-150732849
  hypo
tcaggagcaggtaccggcattcctggccat

SEQ ID NO: 75034 - DNA, 30 bp, Homo sapiens
  chr7:150738289-150738319
  hypo
cggggccaggttgtcggcttcatcagccag

SEQ ID NO: 75035 - DNA, 30 bp, Homo sapiens; identical to SEQ ID NO: 21941
  chr7:150742444-150742474
  hypo

SEQ ID NO: 75036 - DNA, 51 bp, Homo sapiens
  chr7:150745458-150745509
  hypo
ccctaggattactgcggtttcctcctggcgcctctcgtcttggacagccat

SEQ ID NO: 75037 - DNA, 30 bp, Homo sapiens
  chr7:150745991-150746021
  hypo
cagaggaggcccggcggccagcctcggaca

SEQ ID NO: 75038 - DNA, 30 bp, Homo sapiens
  chr7:150746265-150746295
  hypo
ccgctcgcgcctaacgcccaacgacctgca

SEQ ID NO: 75039 - DNA, 125 bp, Homo sapiens; identical to SEQ ID NO: 21942
  chr7:150753895-150754020
  hypo

SEQ ID NO: 75040 - DNA, 464 bp, Homo sapiens
  chr7:150758776-150759240
  hypo
tcctccctctactcagcctctcggcccttttcggcccccctcgcctcagtcctctcctgtctccttgttcttctcttttcttcctataaataactctcctctgtgctgtggctgccgctaagggccactctgaggcccttcatactccaggaggatccccagcagcgcagcctgcgcgtggtggctcctgccctcccagggctctcgatggtgatcaggcctctcccccatccaggttatgcctccgcctcgttgccctgaaagccgcagcgacagcgaaaagggctaagattcggccatgagcagcgcccctcggcgccccgccaagggcgcagattctttctgtacggtgagtgtggcccccaggtcgccagcccaaccttccctccctgggcagccttgggtgctccggccaagggtcctcgccaaccaggggtgtgagcgtgtgtgagtgtggagactgg

SEQ ID NO: 75041 - DNA, 30 bp, Homo sapiens
  chr7:150763518-150763548
  hypo
ccctccctggctaccgcctgcgtgggtgct

SEQ ID NO: 75042 - DNA, 30 bp, Homo sapiens
  chr7:150768373-150768403
  hypo
ccaagataagggtacggccagggcgggctg

SEQ ID NO: 75043 - DNA, 30 bp, Homo sapiens
  chr7:150773211-150773241
  hypo
tcacagtgccgctccgcatggtggtgctca

SEQ ID NO: 75044 - DNA, 55 bp, Homo sapiens
  chr7:150773441-150773496
  hypo
catgcctgtgtagccgccaccgagggacagccgagggaccgatggacgaggggac

SEQ ID NO: 75045 - DNA, 592 bp, Homo sapiens
  chr7:150773888-150774480
  hypo
ctctctgggactccagttcctcgaagggtagctgtggggagaggagagggcggcaggttacccgcaggctgggagtgaggatgcgccacgggccaggccagggccactcaccggcaggagctggtagcccatcaggcctaggtgccgctccctcagggccctcgagcccagcagcacccggccgtcccggcagaaatgccagcgttcccgcaacaccagcaccaccctgcagggggagggacgtggctcagggcatggcgggcaaggtggccagggctcccccaccctgcctcctttacctctgggcagggtctcgagtagtggcgctagaggcagcctggccctgtgggcaggaccttggtgggtatggcaggaaggggtcctgggtcctcacgggaagcacagcaccagagctgctggcgcacagcaggaagtctggaggggagcagggccggcggccttagccagggctccgtctccccgggcctgccgcctgccccttgctcacctgtgcagtagcctggaggcacagtcaggtcctggcggtatttctcctcccccagcagctggcgcaacccctcagctactatgt

SEQ ID NO: 75046 - DNA, 202 bp, Homo sapiens
  chr7:150774698-150774900
  hypo
cccatccacctgtacttgcagcgggcacggtcggtgatgagaggctggggaaagatgggcacttgctgccttcggggaaggcggggaccccggtatcctgggagctccagctccacggccgtgtccagcagggagaggtagcgacgcacaatcagagcatgaggggtgcctgtggggaggcggggactggggctctgggctg

SEQ ID NO: 75047 - DNA, 30 bp, Homo sapiens; identical to SEQ ID NO: 21946
  chr7:150776459-150776489
  hypo

SEQ ID NO: 75048 - DNA, 62 bp, Homo sapiens; identical to SEQ ID NO: 21947
  chr7:150776688-150776750
  hypo

SEQ ID NO: 75049 - DNA, 30 bp, Homo sapiens; identical to SEQ ID NO: 21948
  chr7:150777337-150777367
  hypo

SEQ ID NO: 75050 - DNA, 943 bp, Homo sapiens; identical to SEQ ID NO: 44904
  chr7:150784072-150785015
  hypo

SEQ ID NO: 75051 - DNA, 490 bp, Homo sapiens
  chr7:150811140-150811630
  hypo
tgcccttaggcaggacgcttaactcagtccagacagatgagtatcttctggattttataatctccaaagaagacagcctcagtcatcaacagaaaccgactgtagcagccagcaactctcgacctcagaatgtcagagccgaaactaagacaggaccacctcgttgaagctcgcgtgctgcagacgaggacacgcgcgcagacccggcatggctgcctctgacgtctcactcaggcttgtcatacttctgggcctcatgttcttggctcttctggctcttcctttgaagaatgagaaatggcccgcttttctccaaaatggggcccagtgtgtggtggactgaggactgttatttagttggcctgctcgtaatgacagctcctcacctacctgccggatcctaggaggcgccctgggctggaatttcctgttttcgagggctcccaggggctgccccagcaggccggctcccccgcgccgcgccgccgtt

SEQ ID NO: 75052 - DNA, 335 bp, Homo sapiens
  chr7:150812875-150813210
  hypo
ggtcttcggcagtggccgaggaggacaggccggagggggagctctcgggtgcggcccaggaaaggaagaggagactcaccagagtcagagggctctgggctaggccagacacctttcctagttccctgtcggggcagcgcgctcgcctccggttgcccctgtgcatgaggttagggactgctgtggacctggtcgtcataactgctctttgacacaaacttgggacagtgcctctgggagccagggagggaagcagtgctgcccagctagagaggggttcccagagctagcccgagcacccatgtggaacctggaggtgacggagatgggggcct

SEQ ID NO: 75053 - DNA, 207 bp, Homo sapiens
  chr7:150813835-150814042
  hypo
tgtgtgccaccctggccctgacggggcggctctgtcttccgcagactcgtttgtgaacagccaggagtggacgctgagccgctccgtaccggagcttaaagtggtgagtgtggcccatgggcagcaccggcggcctggagctgggggggcgaggctgggtgccgcgggcctgggccttgcttctccggcttctgtccccttctctgc

SEQ ID NO: 75054 - DNA, 30 bp, Homo sapiens; identical to SEQ ID NO: 21955
  chr7:150814259-150814289
  hypo

SEQ ID NO: 75055 - DNA, 30 bp, Homo sapiens
  chr7:150815376-150815406
  hypo
tactatgagacgtgcgcgacctacgggctc

SEQ ID NO: 75056 - DNA, 393 bp, Homo sapiens
  chr7:150816819-150817212
  hypo
agaagcactcctgccggggccccaggacgagggtttgctgccctagtggggcagccctggcaaggtgacagtagatcctgctggcctccaggccaggtgaatgttccccccatatcatctgtaggggctagtggcccctctgctgcccatgagccccggccaggcccccattagcacagggattcccggcacccgcctggtgcccgtcccgcccctgacccggagctgccctcagcagccctctttgtccttaggccacgaatggcggcggcagcgccttcagcgactactcgtcctcagtcccctccacccccagcatcagccagcgggagctgcgcatcgagaccatcgctgcctcctccacccccacacccatccgaaagcagtccaagc

SEQ ID NO: 75057 - DNA, 167 bp, Homo sapiens
  chr7:150817671-150817838
  hypo
gagtcagagcccaggcctccccgtcgccttccggctctttttccgttaccccactgccgaggggaaaattcatgctttccacccaccgctgtgattggtttaacaaaggcttagccatcttttcctgggcttcaccacgctgcctcgttcctccctctcaggtttgt

SEQ ID NO: 75058 - DNA, 30 bp, Homo sapiens; identical to SEQ ID NO: 21957
  chr7:150819539-150819569
  hypo

SEQ ID NO: 75059 - DNA, 30 bp, Homo sapiens
  chr7:150823633-150823663
  hypo
tttgtgtgctgggggcggggcggggggtat

SEQ ID NO: 75060 - DNA, 30 bp, Homo sapiens
  chr7:150823865-150823895
  hypo
ccaagaggcagggcccgcttgccttgtgga

SEQ ID NO: 75061 - DNA, 30 bp, Homo sapiens
  chr7:150827283-150827313
  hypo
accctagcttggtgcgctgtctgtgccctc

SEQ ID NO: 75062 - DNA, 30 bp, Homo sapiens
  chr7:150828256-150828286
  hypo
agccctgagccccgcgcccgattctcgccg

SEQ ID NO: 75063 - DNA, 36 bp, Homo sapiens
  chr7:150828562-150828598
  hypo
ctctcctgagcagccgccaccgccaccatgctcccc

SEQ ID NO: 75064 - DNA, 34 bp, Homo sapiens; identical to SEQ ID NO: 5987
  chr7:150869803-150869837
  hypo

SEQ ID NO: 75065 - DNA, 30 bp, Homo sapiens
  chr7:150870837-150870867
  hypo
agcgagcccgcactcgcatgatacccagac

SEQ ID NO: 75066 - DNA, 306 bp, Homo sapiens
  chr7:150889242-150889548
  hypo
ccagcagcccttccagaagaccgggctgtgggggtgagggctcgcagcagcaatggggtatggggcgggaggtgggcaggctttggtaggcgcagccgtccccacatccccaggcctcaccatagcgggatgcgtagtcaggccggggcatgaagaggatccgctcgtagacccggcacagaccccgcatctcggccagctgtggccgggaggttgtcccaatcagcatcacacggtctccgggagtcagcagccgcaaggccttggtgaggtccttctttatccgctttgggtccatctgctcca

SEQ ID NO: 75067 - DNA, 30 bp, Homo sapiens
  chr7:150933491-150933521
  hypo
aggggcagcagtatcgctcatttgaactgg

SEQ ID NO: 75068 - DNA, 203 bp, Homo sapiens
  chr7:150934635-150934838
  hypo
gggggctagcagggcggacgtgggtgatgcgttggagactgccctggagcagctcaatcggcgctatcagccccgcctgcgcttccagaagcagcgactgctcaacggctatcggcgcttcgacccagcacggggcatggagtacaccctggacctgctgttggaatgtgtgacacagcgtgggcaccggcgggccctggctc

SEQ ID NO: 75069 - DNA, 30 bp, Homo sapiens
  chr7:150935755-150935785
  hypo
aatagcacttagcccgcctgggggccctaa

SEQ ID NO: 75070 - DNA, 236 bp, Homo sapiens
  chr7:150936102-150936338
  hypo
cagaggagtgatgctggagcccggggcaaaatgctggggcccgggacacggctgaaagttccgtcgtgctgcttatttttgggctcctaggtgttgcgcacaaccagcgactgctccagctcctgcctgcgctgctggatctttagaggaagtgagaacaggagcaggtgtcagtgttctggtgagtgatcaggacaatcccacctactgacaccgcctgccctgaaagagcatct

SEQ ID NO: 75071 - DNA, 48 bp, Homo sapiens; identical to SEQ ID NO: 44911
  chr7:150948762-150948810
  hypo

SEQ ID NO: 75072 - DNA, 25 bp, Homo sapiens
  chr7:151035057-151035082
  hypo
agcaagactccgcctcaaaaaaaaa

SEQ ID NO: 75073 - DNA, 390 bp, Homo sapiens; identical to SEQ ID NO: 44913
  chr7:151038573-151038963
  hypo

SEQ ID NO: 75074 - DNA, 218 bp, Homo sapiens
  chr7:151073503-151073721
  hypo
tggctgctccctgacgcacccgacttgagtcttccaagcccccttccaggttgctctacgctcacattgcacagaagcatgacttgtgcacaaagggccatggtgcacacgccgggagctcttaaacatgagagtcggctgtccactcgtatggctgacgggggtggcagaagaggcgccaggggctgatgctgtgacccctgcgctctcccctagtt

SEQ ID NO: 75075 - DNA, 52 bp, Homo sapiens
  chr7:151074138-151074190
  hypo
ctagtgcctcaacagacgaagacatggagacagaggccgtcaatgagatact

SEQ ID NO: 75076 - DNA, 35 bp, Homo sapiens; identical to SEQ ID NO: 21961
  chr7:151074642-151074677
  hypo

SEQ ID NO: 75077 - DNA, 30 bp, Homo sapiens; identical to SEQ ID NO: 21962
  chr7:151076990-151077020
  hypo

SEQ ID NO: 75078 - DNA, 30 bp, Homo sapiens
  chr7:151077409-151077439
  hypo
atccctggcggccccggccgtctctgatga

SEQ ID NO: 75079 - DNA, 30 bp, Homo sapiens
  chr7:151091587-151091617
  hypo
cttgccgcaggggtcggacctgccctggag

SEQ ID NO: 75080 - DNA, 127 bp, Homo sapiens; identical to SEQ ID NO: 44914
  chr7:151106438-151106565
  hypo

SEQ ID NO: 75081 - DNA, 399 bp, Homo sapiens; identical to SEQ ID NO: 44915
  chr7:151106589-151106988
  hypo

SEQ ID NO: 75082 - DNA, 266 bp, Homo sapiens; identical to SEQ ID NO: 44916
  chr7:151107395-151107661
  hypo

SEQ ID NO: 75083 - DNA, 30 bp, Homo sapiens; identical to SEQ ID NO: 21965
  chr7:151126442-151126472
  hypo

SEQ ID NO: 75084 - DNA, 245 bp, Homo sapiens
  chr7:151129033-151129278
  hypo
ggggtccctgggagtccgggaaagcgccctggatcatccagctcctcccagggctgggatgcccactgccgagagagcactcagaagccgcccgttggctttgaggacttttatcgcccaaggtcccgaggtctgggtgggaccgcaaggggttgcccctgtccccagagctgcgcccggccatcccggtgggagggctcggctggaagaagttgaccaccttgtggagcgactgcactcgtgcg

SEQ ID NO: 75085 - DNA, 34 bp, Homo sapiens; identical to SEQ ID NO: 21966
  chr7:151134319-151134353
  hypo

SEQ ID NO: 75086 - DNA, 313 bp, Homo sapiens
  chr7:151165387-151165700
  hypo
tcttgctgctcctttccctctcggtcagctcagactcagcaggccaccatggcgccactgtacttcaactcccttccctaccaactgtcgctggcacggtgcccgcggccacaccgtaaacgctgcccagggaaaacacacaccgctcactgctgacctcacacccatgaccaggaacctggcgcagacacttggtgctgcctagccacccgcctgcatccctggatctgggcactccccagagaaagcatccacgccttgtcccttctcctcaaatgttccccgtgcttacgctcagctgaaaaccttgttt

SEQ ID NO: 75087 - DNA, 37 bp, Homo sapiens; identical to SEQ ID NO: 21968
  chr7:151214438-151214475
  hypo

SEQ ID NO: 75088 - DNA, 65 bp, Homo sapiens; identical to SEQ ID NO: 44920
  chr7:151217152-151217217
  hypo

SEQ ID NO: 75089 - DNA, 29 bp, Homo sapiens
  chr7:151218583-151218612
  hypo
ctttcttttttttttttgagacggagtct

SEQ ID NO: 75090 - DNA, 30 bp, Homo sapiens
  chr7:151264638-151264668
  hypo
ttcaactactaaagcggctgcattcccaga

SEQ ID NO: 75091 - DNA, 98 bp, Homo sapiens
  chr7:151266426-151266524
  hypo
aggagtttttttaaagagtgtatttagtgattttatttgaaagacgatgaaacctaaatccttagaaaagcaaacagatacatcgtattggcaagaga

SEQ ID NO: 75092 - DNA, 5 bp, Homo sapiens
  chr7:151290073-151290078
  hypo
gataa

SEQ ID NO: 75093 - DNA, 271 bp, Homo sapiens
  chr7:151326269-151326540
  hypo
tgagaccataacacccgcaaaggctaaaatatttactatctgaccctttacagaaaaagttggccggcccatgtcctgttattccaagaggggtctgtgaaccggcagcaggagcggcccctgtgctaggcaagtcccaccccagacctagagaactggaatctgcctttcaaaaagatctgtggctattcttatgcacagagagggaggggcactgagcctgcggagtaagagaagtctgcacctgtcggatatacggacagaggaacgt

SEQ ID NO: 75094 - DNA, 206 bp, Homo sapiens; identical to SEQ ID NO: 21970
  chr7:151358666-151358872
  hypo

SEQ ID NO: 75095 - DNA, 31 bp, Homo sapiens
  chr7:151361418-151361449
  hypo
ccatttaacagaggcccgggtacagtgggat

SEQ ID NO: 75096 - DNA, 231 bp, Homo sapiens
  chr7:151411310-151411541
  hypo
tatgcagttactcaccggcctaacttacgtttgacttctaagccttgaggaaaatgtgtgccaaggtatgggggaggcggcagggcttccgagagagccgtcctcccatcccagccctgccatcctcccacacgcacgctgccgtcctcccatccgcgccccgccgtgcctaggtggagaggcggcagggcttcccggagagccgtcctcccatccgcgacccgccgtcct

SEQ ID NO: 75097 - DNA, 195 bp, Homo sapiens
  chr7:151412756-151412951
  hypo
aaaaattccaatttgagttgtgatctagaaagggaggatggagtggaagaagagaaagatagggggaaggctgaagaattaaagatcatgccagggaggcagcgaacaggaaagccaagaccacagaaaacaggtgctcaaggcgaaaggcaaaggcaggagagagggcggggcggggcaaggagccttggtgcg

SEQ ID NO: 75098 - DNA, 30 bp, Homo sapiens
  chr7:151421901-151421931
  hypo
acagagggtggcaccggcaccagaaagcac

SEQ ID NO: 75099 - DNA, 202 bp, Homo sapiens
  chr7:151423509-151423711
  hypo
ccacattatttactatggctgcgtgcgtaccctactaccagtaatcttagtacgagtccaacagaaaggcacaccaacgcacaagagtgcccatgagagcactctgtcacagccccgactggaaaccacggtgtccattaacaactggacggacgcaggagtcgttgtctgggcagacagcggagggttctgcagcaatgaa

SEQ ID NO: 75100 - DNA, 30 bp, Homo sapiens; identical to SEQ ID NO: 21972
  chr7:151468781-151468811
  hypo

SEQ ID NO: 75101 - DNA, 31 bp, Homo sapiens
  chr7:151474643-151474674
  hypo
taccccggctttccttcgccttcctccatga

SEQ ID NO: 75102 - DNA, 148 bp, Homo sapiens
  chr7:151476538-151476686
  hypo
atgatgtagagggaggcggagggtgatggttcctgccagagcttcaagaccttcccatgggagccagctcacagctcctacactcctttgggcacccttccgatcatcaggttccctgtgctgctctccgccccgctcagaaagcctg

SEQ ID NO: 75103 - DNA, 36 bp, Homo sapiens
  chr7:151496735-151496771
  hypo
gtgtcctccagactgacgggcgcggacactctgcat

SEQ ID NO: 75104 - DNA, 249 bp, Homo sapiens
  chr7:151505822-151506071
  hypo
tcccaagtctctcctcacaggcgaaccacgacagatggctgcgcggcctgagggccggcctccaggcagccagggaggagcagctgcaagtcctgcagtctgtgagacccccgaagggtctgggccagcatccaaggctaaagccttggctatcctaacgccgcagtggggcacttaaagctcctcacgcccaagcccaggcctggtgggagcacggttctctcccgcgctccccctcctccccactcc

SEQ ID NO: 75105 - DNA, 150 bp, Homo sapiens
  chr7:151506370-151506520
  hypo
cccctaccccgagacgggtgcagaatcagcagcggggatcatccagagactctcgcagtccacggcaggtgtcggagtgggcctcattccagagttgtggtggccgctccacctggcgagcttcgaggggactccggcaggcgctcgctg

SEQ ID NO: 75106 - DNA, 27 bp, Homo sapiens
  chr7:151528530-151528557
  hypo
aatatttcgttacgtgaaagaagtcat

SEQ ID NO: 75107 - DNA, 30 bp, Homo sapiens; identical to SEQ ID NO: 21974
  chr7:151542113-151542143
  hypo

SEQ ID NO: 75108 - DNA, 53 bp, Homo sapiens
  chr7:151554549-151554602
  hypo
gcaacagcccactcctctccacgcattttctcgggttgcatgctgccttccgg

SEQ ID NO: 75109 - DNA, 397 bp, Homo sapiens; identical to SEQ ID NO: 44922
  chr7:151572747-151573144
  hypo

SEQ ID NO: 75110 - DNA, 215 bp, Homo sapiens; identical to SEQ ID NO: 21976
  chr7:151624664-151624879
  hypo

SEQ ID NO: 75111 - DNA, 87 bp, Homo sapiens
  chr7:151712355-151712442
  hypo
ctggatctattccctccgttcccacctccagggaattgtcccacacctgaagcaaatagcttctccttgccccgtccccatgtgcaa

SEQ ID NO: 75112 - DNA, 108 bp, Homo sapiens; identical to SEQ ID NO: 21978
  chr7:151720361-151720469
  hypo

SEQ ID NO: 75113 - DNA, 693 bp, Homo sapiens; identical to SEQ ID NO: 5993
  chr7:151722450-151723143
  hypo

SEQ ID NO: 75114 - DNA, 77 bp, Homo sapiens; identical to SEQ ID NO: 44925
  chr7:151723167-151723244
  hypo

SEQ ID NO: 75115 - DNA, 237 bp, Homo sapiens
  chr7:151791343-151791580
  hypo
atgggtgcctttttacatctgcgacctggacagttttgctttttgtttatttcaacttcagtgaagtgactcagccacttaagaatgtgcccgtcaaggggtctgggccccacggaccatctccaaaaaaattctatccccgtttcactcgaggcccaagtcgagtgctcgagccacagttcaaagcaaacaaaattgacgatgtgatagacagtcgtgttgaagatccagaagaag

SEQ ID NO: 75116 - DNA, 184 bp, Homo sapiens; identical to SEQ ID NO: 21982
  chr7:151802390-151802574
  hypo

SEQ ID NO: 75117 - DNA, 30 bp, Homo sapiens
  chr7:151805229-151805259
  hypo
attgacatcatcagcgccgacacgctggcc

SEQ ID NO: 75118 - DNA, 336 bp, Homo sapiens
  chr7:151812520-151812856
  hypo
ttagtatcctgtgtgagtatgcgtgctcatacaaaaagcacttctgctgtgtactgaagtacggtgcttggttcaaggaaaaacacttgtgcagttgtttgagttatgggcggagctagcggctgctctccagaacactctttttatatgttaagactgactcacaaaccatagttactcgtatttgggtaaaacgaactaaataatgaaaatgaaaacaactgacagtatttgttgcaaatgacaaaattcaagccctcaagtgaaaattagaattttgaaaaacttacatttaccgccaggagcttgacagcttcctagtacttaaaaatttta

SEQ ID NO: 75119 - DNA, 30 bp, Homo sapiens
  chr7:151818875-151818905
  hypo
gttccctgtcctcccggagatgcctgggtg

SEQ ID NO: 75120 - DNA, 30 bp, Homo sapiens
  chr7:151826349-151826379
  hypo
gagggatgagacagcgctgccgcgggccag

SEQ ID NO: 75121 - DNA, 30 bp, Homo sapiens
  chr7:151829650-151829680
  hypo
caaacgggcaccgtcggtctactcacctcc

SEQ ID NO: 75122 - DNA, 31 bp, Homo sapiens; identical to SEQ ID NO: 21984
  chr7:151845095-151845126
  hypo

SEQ ID NO: 75123 - DNA, 115 bp, Homo sapiens; identical to SEQ ID NO: 21985
  chr7:151874696-151874811
  hypo

SEQ ID NO: 75124 - DNA, 42 bp, Homo sapiens
  chr7:151876084-151876126
  hypo
ttttaaattgagacagagtctcgttctgtctcccaggctgga

SEQ ID NO: 75125 - DNA, 30 bp, Homo sapiens
  chr7:152122648-152122678
  hypo
cgaaactccgtctcaaaaacaaacaaacac

SEQ ID NO: 75126 - DNA, 149 bp, Homo sapiens
  chr7:152152773-152152922
  hypo
cttcggtttattgttcgaacaatttgaacatttattaagtgccaacccttgtaaagaattacccagcaaccagaattcaacttggtcagcaggcaaggagtctcgatcagacaaactcgccattttgaaatatgaaaaattatgccggg

SEQ ID NO: 75127 - DNA, 98 bp, Homo sapiens
  chr7:152159702-152159800
  hypo
gtcaatttatccttacgttcaagagcagccatttacaaaacgagctcagaaaattaaaaaaaaaatacaaactttaaatcgccagaatactgcataaa

SEQ ID NO: 75128 - DNA, 45 bp, Homo sapiens
  chr7:152243972-152244017
  hypo
gcgtgacccaccgcacctggctatttcttacgattaatgagccca

SEQ ID NO: 75129 - DNA, 31 bp, Homo sapiens
  chr7:152252877-152252908
  hypo
tgaactcctgacctcacgatccacctgtaaa

SEQ ID NO: 75130 - DNA, 361 bp, Homo sapiens; identical to SEQ ID NO: 21986
  chr7:152273142-152273503
  hypo

SEQ ID NO: 75131 - DNA, 86 bp, Homo sapiens
  chr7:152371351-152371437
  hypo
tgttctgattgcaaaaatcatcggaccttaacctgggtttcaaataatcatttaaatataaggttttggccgggcgcagtggctca

SEQ ID NO: 75132 - DNA, 30 bp, Homo sapiens; identical to SEQ ID NO: 21988
  chr7:152374302-152374332
  hypo

SEQ ID NO: 75133 - DNA, 22 bp, Homo sapiens
  chr7:152374743-152374765
  hypo
cggagtagagacatattttttc

SEQ ID NO: 75134 - DNA, 31 bp, Homo sapiens
  chr7:152397925-152397956
  hypo
tgtatattaaaatacacgcagagcctggcat

SEQ ID NO: 75135 - DNA, 30 bp, Homo sapiens; identical to SEQ ID NO: 21990
  chr7:152455689-152455719
  hypo

SEQ ID NO: 75136 - DNA, 43 bp, Homo sapiens; identical to SEQ ID NO: 21991
  chr7:152455924-152455967
  hypo

SEQ ID NO: 75137 - DNA, 30 bp, Homo sapiens; identical to SEQ ID NO: 21992
  chr7:152537574-152537604
  hypo

SEQ ID NO: 75138 - DNA, 31 bp, Homo sapiens
  chr7:152543181-152543212
  hypo
tcccagtgagccccagcgcctgggctgcagt

SEQ ID NO: 75139 - DNA, 79 bp, Homo sapiens
  chr7:152543572-152543651
  hypo
gcccgggctgtagtctgtagtgagctctagtgccgggctgtagtgtgtagtgagccccagcgcccgggctgcagtctgt

SEQ ID NO: 75140 - DNA, 30 bp, Homo sapiens
  chr7:152549342-152549372
  hypo
gccagaggcctccacgcagtgcctggggct

SEQ ID NO: 75141 - DNA, 181 bp, Homo sapiens
  chr7:152551645-152551826
  hypo
ctgaacgcgtcgttcgatggtgtcacgttggggaacaagtgtccttcagaacccagagaaggccgccgttctgtaaatagcgacgtcggtgttgctgcccagcagcgtgcttgcattgccggtgcatgaggcgcggcgcgggcccttcagtaaaagccatttatccgtgtgccgaccgctg

SEQ ID NO: 75142 - DNA, 31 bp, Homo sapiens
  chr7:152553622-152553653
  hypo
atctcacagtgggcaccgtcattcccacctc

SEQ ID NO: 75143 - DNA, 174 bp, Homo sapiens; identical to SEQ ID NO: 21995
  chr7:152555645-152555819
  hypo

SEQ ID NO: 75144 - DNA, 215 bp, Homo sapiens
  chr7:152562696-152562911
  hypo
gaccagatcgcagagtcggggccaccgcacctccagaccagaccgcagggttggggccaccgcacctccagaccagatcacagagtcggggccactgcacctccagaccagaccgcagggtcggggccaccgcacctccagaccagaactcagagtcggtgctaccgcagagtcagggccactgcatctccagaccagatcgcagagtcagggag

SEQ ID NO: 75145 - DNA, 163 bp, Homo sapiens
  chr7:152564283-152564446
  hypo
atgaacgccggccccgtgagcgcaggcagaggctgttccctccaagcccgctctgcaagggcctgggcgccgtcctgcccgcgtggcgaaggctcctgggggcacgggagcaggaggcatcatggagaagagggaagctccggggtgccgagggggtgctgta

SEQ ID NO: 75146 - DNA, 31 bp, Homo sapiens
  chr7:152566125-152566156
  hypo
gggcaagtgacccagtcgctgtaactctaac

SEQ ID NO: 75147 - DNA, 31 bp, Homo sapiens
  chr7:152567398-152567429
  hypo
cggaccatgcagtagacggttagccgtgccc

SEQ ID NO: 75148 - DNA, 30 bp, Homo sapiens
  chr7:152569934-152569964
  hypo
tggtccggtggctgcgcaggagggttggtc

SEQ ID NO: 75149 - DNA, 40 bp, Homo sapiens; identical to SEQ ID NO: 21996
  chr7:152647710-152647750
  hypo

SEQ ID NO: 75150 - DNA, 236 bp, Homo sapiens
  chr7:152716532-152716768
  hypo
accagcagtgagctgagatctcgccccacctcataaggcactgaatcttgctctcggccctgtgagctcagaggcgaagcctcagtcgagacctcagatgagactccagccctggccgatgccttgagtgcaacccgatgagatacgttggtgcggcagaggagcccgctgagtcgtgcctggattcctgatagacaaactgggtcataatatacgtgcattgttttaaactacca

SEQ ID NO: 75151 - DNA, 43 bp, Homo sapiens
  chr7:152738786-152738829
  hypo
attgagtagaagttgtgattgcgtccccagctttcattccacc

SEQ ID NO: 75152 - DNA, 30 bp, Homo sapiens
  chr7:153992071-153992101
  hypo
ggagcatggtggtgccgtgccatcgagggc

SEQ ID NO: 75153 - DNA, 92 bp, Homo sapiens
  chr7:154062696-154062788
  hypo
taattaccatgcctggtcttgcggttcacattcaccgtccttcttaaaagtggggaagggggccaggcgcggtggctcatgcctgtaatccc

SEQ ID NO: 75154 - DNA, 31 bp, Homo sapiens; identical to SEQ ID NO: 67308
  chr7:154063027-154063058
  hypo

SEQ ID NO: 75155 - DNA, 206 bp, Homo sapiens
  chr7:154072002-154072208
  hypo
atagttttaattaattctttcaacaaatatctctaagtactcattatgtgacagacactttgaaggcgctgtattgaagcataggaacttggtcctgagcaaatgagggacttaatgagagcacatgggcttgcaaaccgtgaacccatctcagggactggaaggctctgacaaaagaggagcgtgagtcccggggaagagagggc

SEQ ID NO: 75156 - DNA, 70 bp, Homo sapiens
  chr7:154128039-154128109
  hypo
tgtcactaggctccacggtgctagagaggtggatcctgatgatgtcctgtgctcacggcgcttactttga

SEQ ID NO: 75157 - DNA, 36 bp, Homo sapiens
  chr7:154382566-154382602
  hypo
aaaaatatattctgcgagtaagtgatccactgtatc

SEQ ID NO: 75158 - DNA, 191 bp, Homo sapiens; identical to SEQ ID NO: 21997
  chr7:154542177-154542368
  hypo

SEQ ID NO: 75159 - DNA, 277 bp, Homo sapiens
  chr7:154673973-154674250
  hypo
cacccccacaccctgtacccccgcactcagctccgccgaggacatctgtctgagctccgtgctggggatctttcctttgccattctgcccagtggatcccgggcgtctttccagagcataagcatctctgttttgttttaacaagccttagatagaggtccgtagaccccacaatggtatttctcctctgaagaataaagcgtcaatccttttagtggcttggcatgttgcggcctgtccattctgtttcctcctcgcatgtgccccagtgatctgg

SEQ ID NO: 75160 - DNA, 212 bp, Homo sapiens
  chr7:154875880-154876092
  hypo
aacagccccagatggtgttcacggtccgccacgccaccgtcaccttccagccagaaggggacacgtggcgggagcagaaggagcagcgggccgccctcatggtgggcatcctcattggcgtgttcgtgctctgctggatccccttctttctcaccgagctcatcagtcccctctgctcctgtgacatccccgccatctggaaaagcatcttc

SEQ ID NO: 75161 - DNA, 95 bp, Homo sapiens; identical to SEQ ID NO: 21998
  chr7:154926246-154926341
  hypo

SEQ ID NO: 75162 - DNA, 30 bp, Homo sapiens
  chr7:154959026-154959056
  hypo
gcagcccaggcccgcgctgcaagggagcca

SEQ ID NO: 75163 - DNA, 30 bp, Homo sapiens; identical to SEQ ID NO: 21999
  chr7:155017976-155018006
  hypo

SEQ ID NO: 75164 - DNA, 30 bp, Homo sapiens
  chr7:155064887-155064917
  hypo
agctctttcctagctcggctctacctgtga

SEQ ID NO: 75165 - DNA, 205 bp, Homo sapiens
  chr7:155077345-155077550
  hypo
tcctcttcatcgctttcgcactccaaccccagggacttatggaacataggtcccggcaggacctaatgtcaaggaagaaccaggccgatgtcatttctgcctccttccgtattttttttactgtggtaagtcatatataacataaaacttaccctttaatcatgttcaagtgcacagttctgtggcattacgcacactcgcatcg

SEQ ID NO: 75166 - DNA, 31 bp, Homo sapiens; identical to SEQ ID NO: 22000
  chr7:155105652-155105683
  hypo

SEQ ID NO: 75167 - DNA, 434 bp, Homo sapiens; identical to SEQ ID NO: 22001
  chr7:155130272-155130706
  hypo

SEQ ID NO: 75168 - DNA, 2314 bp, Homo sapiens; identical to SEQ ID NO: 44944
  chr7:155164456-155166770
  hypo

SEQ ID NO: 75169 - DNA, 486 bp, Homo sapiens; identical to SEQ ID NO: 44946
  chr7:155167174-155167660
  hypo

SEQ ID NO: 75170 - DNA, 708 bp, Homo sapiens; identical to SEQ ID NO: 44948
  chr7:155170270-155170978
  hypo

SEQ ID NO: 75171 - DNA, 31 bp, Homo sapiens; identical to SEQ ID NO: 6011
  chr7:155244946-155244977
  hypo

SEQ ID NO: 75172 - DNA, 621 bp, Homo sapiens; identical to SEQ ID NO: 44956
  chr7:155246858-155247479
  hypo

SEQ ID NO: 75173 - DNA, 487 bp, Homo sapiens; identical to SEQ ID NO: 44957
  chr7:155247650-155248137
  hypo

SEQ ID NO: 75174 - DNA, 55 bp, Homo sapiens; identical to SEQ ID NO: 6016
  chr7:155250323-155250378
  hypo

SEQ ID NO: 75175 - DNA, 589 bp, Homo sapiens; identical to SEQ ID NO: 44960
  chr7:155250669-155251258
  hypo

SEQ ID NO: 75176 - DNA, 203 bp, Homo sapiens; identical to SEQ ID NO: 6018
  chr7:155251346-155251549
  hypo

SEQ ID NO: 75177 - DNA, 193 bp, Homo sapiens; identical to SEQ ID NO: 6019
  chr7:155251661-155251854
  hypo

SEQ ID NO: 75178 - DNA, 112 bp, Homo sapiens; identical to SEQ ID NO: 6020
  chr7:155251890-155252002
  hypo

SEQ ID NO: 75179 - DNA, 30 bp, Homo sapiens; identical to SEQ ID NO: 44964
  chr7:155252228-155252258
  hypo

SEQ ID NO: 75180 - DNA, 503 bp, Homo sapiens; identical to SEQ ID NO: 6025
  chr7:155259119-155259622
  hypo

SEQ ID NO: 75181 - DNA, 124 bp, Homo sapiens; identical to SEQ ID NO: 6026
  chr7:155259833-155259957
  hypo

SEQ ID NO: 75182 - DNA, 852 bp, Homo sapiens; identical to SEQ ID NO: 6027
  chr7:155260038-155260890
  hypo

SEQ ID NO: 75183 - DNA, 30 bp, Homo sapiens; identical to SEQ ID NO: 22015
  chr7:155314777-155314807
  hypo

SEQ ID NO: 75184 - DNA, 30 bp, Homo sapiens
  chr7:155333885-155333915
  hypo
agcctccccgttcccgctgttctgaagaca

SEQ ID NO: 75185 - DNA, 157 bp, Homo sapiens
  chr7:155343622-155343779
  hypo
tctagacatcccaaagtgtggcgggccccactctgtgctacgaggaggccatgagaagaggctgaaacccaatgacgagctgcgcctgtgcagaggccggggtgagctggatgttgctgtgcacggcctcctgggcgccccaggcctggctaactca

SEQ ID NO: 75186 - DNA, 31 bp, Homo sapiens; identical to SEQ ID NO: 22016
  chr7:155352343-155352374
  hypo

SEQ ID NO: 75187 - DNA, 80 bp, Homo sapiens; identical to SEQ ID NO: 22017
  chr7:155352612-155352692
  hypo

SEQ ID NO: 75188 - DNA, 30 bp, Homo sapiens; identical to SEQ ID NO: 22018
  chr7:155363313-155363343
  hypo

SEQ ID NO: 75189 - DNA, 30 bp, Homo sapiens
  chr7:155366654-155366684
  hypo
cgcatacactcgcacgctcttgcgggaatt

SEQ ID NO: 75190 - DNA, 210 bp, Homo sapiens
  chr7:155385398-155385608
  hypo
tggagtgcttttctcccgctcaattggaattccatcccacccatgacactggcctccctctctgcgggccctggttttccaaactgatagctcccttcctgccacccctacaacccacactacaagagaagctaccaggaacacgcttgcgctcaggtttgttaagaacgacttcactggttctccagtgaggcccgggggatggggtat

SEQ ID NO: 75191 - DNA, 36 bp, Homo sapiens
  chr7:155436111-155436147
  hypo
ggattacaggcgtgagccaccgcgcccggccagcat

SEQ ID NO: 75192 - DNA, 31 bp, Homo sapiens; identical to SEQ ID NO: 22020
  chr7:155469875-155469906
  hypo

SEQ ID NO: 75193 - DNA, 30 bp, Homo sapiens
  chr7:155493740-155493770
  hypo
attgcggctgccgtccggagagtggccgga

SEQ ID NO: 75194 - DNA, 30 bp, Homo sapiens
  chr7:155494174-155494204
  hypo
actgctgctgattcacggagacttttaata

SEQ ID NO: 75195 - DNA, 169 bp, Homo sapiens; identical to SEQ ID NO: 22021
  chr7:155502688-155502857
  hypo

SEQ ID NO: 75196 - DNA, 156 bp, Homo sapiens
  chr7:155503997-155504153
  hypo
gcaccacccatccccgcctcagggaatgcacatgcctccccagctagagaccccaaggatgatgatgaccccgccacccgtgactccacagcagcccaagaacatacacatcaacccgcacttcaaagggacggtggtcacgcctgttcaaggtct

SEQ ID NO: 75197 - DNA, 21 bp, Homo sapiens
  chr7:155520435-155520456
  hypo
tgacattgccaaaaaggtaac

SEQ ID NO: 75198 - DNA, 178 bp, Homo sapiens
  chr7:155530781-155530959
  hypo
tctttttctggaacagcgaagtccccctccaccaccaccgcctcctacccttcttaacagtagccatcctgttcctactcagagtcctctaccattcactcagccaggaccagcatttaatcagcaaggacagcagccagtgttcccaagagagcggcccgtacgaccagccttgcag

SEQ ID NO: 75199 - DNA, 30 bp, Homo sapiens; identical to SEQ ID NO: 22024
  chr7:155532000-155532030
  hypo

SEQ ID NO: 75200 - DNA, 196 bp, Homo sapiens
  chr7:155532478-155532674
  hypo
cacagcaccagcctccgcaccagcccccgcaccagcccccgccccagcaccagcccccaccccagcacccaccacagcacccgccgcagcaccagcaccaccaccaccaccaccacctgtccgtcccgccccctcctttgatgccgatgtctcagccacagttccggcctcacgtacagaccgctcagcctcaggc

SEQ ID NO: 75201 - DNA, 112 bp, Homo sapiens
  chr7:155559196-155559308
  hypo
cccatgggccgggggcgcctgatgccaaacaagcagaacctgcgggtggtggagtgcaagccccagccctgcgtggtgtctgtggaggggctgtcctcgtccaccacggatg

SEQ ID NO: 75202 - DNA, 127 bp, Homo sapiens; identical to SEQ ID NO: 22026
  chr7:155559942-155560069
  hypo

SEQ ID NO: 75203 - DNA, 30 bp, Homo sapiens; identical to SEQ ID NO: 22027
  chr7:155567826-155567856
  hypo

SEQ ID NO: 75204 - DNA, 30 bp, Homo sapiens
  chr7:155572916-155572946
  hypo
aacattttcaataacgcgcgcacagcacac

SEQ ID NO: 75205 - DNA, 214 bp, Homo sapiens
  chr7:155573669-155573883
  hypo
cgcccctctgctttcgcaggagctcttgtgcttgagttcagtgttagtggtagcgtggctcactccacttggaggtggcggccgtctgaccgtgtgttactgctttgccgacggggcctcccggccctgatgcgtgtacactctgcgggctgcaccgggtggctctggttgggggcgaagctgtgttgactgggagagcgttggaaattgagac

SEQ ID NO: 75206 - DNA, 63 bp, Homo sapiens
  chr7:155574315-155574378
  hypo
tgggttgcagcccgcggctttcacgcagctctctcattagtgggccacgaaggtcaagggcag

SEQ ID NO: 75207 - DNA, 231 bp, Homo sapiens; identical to SEQ ID NO: 44981
  chr7:155580181-155580412
  hypo

SEQ ID NO: 75208 - DNA, 201 bp, Homo sapiens; identical to SEQ ID NO: 44982
  chr7:155580725-155580926
  hypo

SEQ ID NO: 75209 - DNA, 1141 bp, Homo sapiens
  chr7:155581210-155582351
  hypo
aaaaaaaaaaatccaaccaaaaccacacccagcgaagtaacaaagcgacaatcggccttggtcctgcgagggcagggagggcagggagggcagggagggcagggagggcagggagggcagggtccactgcccagccggggatgcaaggacggccatggggctccagcacagggaccgggccccgcgggctttgagtgacgcggtaggccaggacgagccccatccacacttggacaatgagcaaccgcagccggccgcgcagcctgggggccgtctccctctccagcccccgtgtcctctggtccacgactggctcttgccctcattccgttggggctgagtcacagccagggaaagggctgaggcagagcaacgctgggtgaaccccgtcttcctgaggccacgtttgcaccgggaagagaacacagtgaaccccctgagcaccaacacgctcccacaccccccacgagcagcccagccctggggaggagcccgtccttctccctgcttgccacaccggccacgtccgtaaccctgcccagcatcccacccaggttgtgtgggtccccacgtggtcaccagcgtcctttcaggacaagagaaaactgagcaggaccagggcttccgcctgccgcattcatctgccccccttcggctgtgccaggtgccttcccatgtggcctcttgctcctcggcatccctgggggagggaaaggcaagtgtctccctgtttcatgcagccgcgcaggcctaaacgcagcctctcctgttccaacaggcctttctggggcctgtcctgcttgccttgcggcagccaagggatataatgggtgccggccagcctcccctcccatgaccccgaggaagtccctccagcccctccctgagtctgctcctggcagaatccctctgtaagtggatgcggggtccagagatgccaccggctgggccagaccccatgaggagaagctgtgccggagcctgcaggactgggtccaggtcagggctctcacacccgctgggcggcctttgcttcccggtgctggctgtgcccagacgcctgggcttgtgcgtgtttaacccgcccagagactggtgctgccgcatttgttcatcggtttgttttgttttgttttgtttt

SEQ ID NO: 75210 - DNA, 31 bp, Homo sapiens
  chr7:155613134-155613165
  hypo
gaagacgtcccaggagcgtgtcagagaagga

SEQ ID NO: 75211 - DNA, 767 bp, Homo sapiens
  chr7:155623718-155624485
  hypo
gagaaatcttgtttccgaagcgcctctgcgttccgggcaccaagggagagtgagttctgaccgggttgtcggggggtcagggactctgccctcagccactttggctgctggttctgccgagccactgcccgaacagcaccccggatgcacccgaggaggtgaggctctgcggaccgggtgccctgtgagtgacaggggagaggcccctgaggtttgcacagtgcctgtcacttctcaaagcacctccttcgttctggcaatttagtgagggaggctgggcagccggggctgtccattttatagaggaggacaccaagcctcagggagggagagggaagccggtggagccgggcagaagcctgtggagctgggtagaggccggcgggtttcccagcagcggtcttctgcatcttctggctgagtcctccgctgtcaggagaccccggcctgggccaggaggtccgattctgggatgcgaacgtggtggggctgttgccatagataccgatgtggtcaccagcctgaaacccttgagccacggagagatcagacggtggtccccactcctcagcctggagcctggcagagacgctcaaggaagagggtgggctgaccgcgcacgcctctcctttcttcatatcctgcgcggctcgggcgctgtgcaggaggcctgtgctcagcgaggagagagacagagagtgcagtgggaggagcgcggggtcggggggctctgcttcccacggtgcgcctgggagcctctttgcctc

SEQ ID NO: 75212 - DNA, 267 bp, Homo sapiens
  chr7:155637255-155637522
  hypo
tcagaacatgcaccaagagttcgggcaaacctccagacgtgcttccatggaagatcccgggcagctgggacttcagcgcccccgagctccacgagggcatggaacctgcttgggccttttcctatctctccgtaggcactggggatgtttccccgctgaggtcgccattctgctcttcctagcggcccgtcctccccatgccccagcccgagcacatcactccccgtcccctccttgcccctctccgcccatggcctgggacagctc

SEQ ID NO: 75213 - DNA, 470 bp, Homo sapiens; identical to SEQ ID NO: 22033
  chr7:155679094-155679564
  hypo

SEQ ID NO: 75214 - DNA, 165 bp, Homo sapiens; identical to SEQ ID NO: 22034
  chr7:155828141-155828306
  hypo

SEQ ID NO: 75215 - DNA, 98 bp, Homo sapiens; identical to SEQ ID NO: 22035
  chr7:155828365-155828463
  hypo

SEQ ID NO: 75216 - DNA, 319 bp, Homo sapiens
  chr7:155855974-155856293
  hypo
cttgttctcaggtaggcattccgtcttaatagtaggaaataatggccaggcttagacggtccgaaccgagagtggtctcaagggggaaagagagagagcgcctctcaccgagtcaagcatattcgtccccggaaatgactccaagcaccgcctcttggccagcccctctgcgccgggccgtgagctctcctggctgggccctaccagatgatgagaacttggggagaggctgttgccacgtgggagagattgcggacagggaagcttctgctcagaccgtgacctctgcttccctttccaccgcgctgctccgagggcc

SEQ ID NO: 75217 - DNA, 74 bp, Homo sapiens
  chr7:155859953-155860027
  hypo
gggcaactggacatatgcctgcggggctttgaaaaggatgacactggagatccgaaatgggggctgtggctggc

SEQ ID NO: 75218 - DNA, 312 bp, Homo sapiens
  chr7:155868044-155868356
  hypo
gcagaatggccagccccaggccggtcgcacgggtgctcgtgggacttggctcttggtacctgcctggctgggaacatgcgtgcttctctccgccacctcatcaggatcctcccttgacacctgatcccgtgtccccttgttctgtggggcactagcccggctcacagtcgctcatgcattcccgaacctgttcccggcatgcagaccctcagaaagatctgtgcgttcatggcatgtgccctccctggtcctggcagcacccggccttctccacacctctgatctgcaaacgaaagcagcttcctttgtgtc

SEQ ID NO: 75219 - DNA, 167 bp, Homo sapiens
  chr7:155897786-155897953
  hypo
gccacccaaagtggcagagcccgtgtcagcggtgggacagggccctgccgaaccaccccgggagcacagcgtgggaagaaatgcgcgcttgacaagcgaagccccgtgtgttcgcccgtctgatggcaacagctgcgcgtccttccgtcttccactctagtggggga

SEQ ID NO: 75220 - DNA, 187 bp, Homo sapiens; identical to SEQ ID NO: 22036
  chr7:155898219-155898406
  hypo

SEQ ID NO: 75221 - DNA, 207 bp, Homo sapiens; identical to SEQ ID NO: 22037
  chr7:155900804-155901011
  hypo

SEQ ID NO: 75222 - DNA, 289 bp, Homo sapiens; identical to SEQ ID NO: 22038
  chr7:155913342-155913631
  hypo

SEQ ID NO: 75223 - DNA, 330 bp, Homo sapiens; identical to SEQ ID NO: 22039
  chr7:155916054-155916384
  hypo

SEQ ID NO: 75224 - DNA, 30 bp, Homo sapiens
  chr7:155919820-155919850
  hypo
gtgcccggcgtgtgttctcttttaaaatga

SEQ ID NO: 75225 - DNA, 252 bp, Homo sapiens
  chr7:155920328-155920580
  hypo
caggtttggcctttaagattacgcactccgtgcaccctggggtagccaaccccccgaaggaaaacacgatggaagtcttcatccttagaacaggaggacaacgggctcgggttgaagcagctgacccggtgctgggaatgagtgagaggaggcgcggcacctgccccggcccgcatggacgcaggcacattagatgccaagtagtagggagccctggttcacttcttacctggctcgctgcaaagagaacac

SEQ ID NO: 75226 - DNA, 287 bp, Homo sapiens; identical to SEQ ID NO: 22041
  chr7:155935865-155936152
  hypo

SEQ ID NO: 75227 - DNA, 149 bp, Homo sapiens
  chr7:155948644-155948793
  hypo
ggtgtagacgtagaacaagtggggatgtcacaggtgtggacacggtgcaggtgtaggcgtaggacaagtgagaacctcacaggtgtgggtatagacatagtccaggtgtggacacagtgcagatgtagacatggcgcaggtgtagaccc

SEQ ID NO: 75228 - DNA, 255 bp, Homo sapiens
  chr7:155985232-155985487
  hypo
ctacatttctttgaaaatatacgtgtttctctaaaaccgctctctgtagttcaggccctgagctacccctccaaacgggccgctagtaacaaaaatgcctgagtgctgccgtttggcttctgtcgcttctggttgcgtcgttgctatcagcatgtctagctccgtgatgggcttctttccgccagggcagacctactgagaacggtcaccaaggagcttctcggagattcctacgtccaatccccaatacattcc

SEQ ID NO: 75229 - DNA, 43 bp, Homo sapiens
  chr7:156000100-156000143
  hypo
cacagccctcttgaggaagaacggccaagacccagcccctgta

SEQ ID NO: 75230 - DNA, 151 bp, Homo sapiens; identical to SEQ ID NO: 22043
  chr7:156012927-156013078
  hypo

SEQ ID NO: 75231 - DNA, 30 bp, Homo sapiens
  chr7:156025787-156025817
  hypo
gcggcagagcaggccgcacctcccgggcac

SEQ ID NO: 75232 - DNA, 31 bp, Homo sapiens
  chr7:156181998-156182029
  hypo
cagtgggcagcagccccggtgctctggctag

SEQ ID NO: 75233 - DNA, 31 bp, Homo sapiens
  chr7:156233573-156233604
  hypo
ccatccgagacaccgccgcttctcacctgcc

SEQ ID NO: 75234 - DNA, 31 bp, Homo sapiens
  chr7:156264382-156264413
  hypo
aaaagctgaaagctgacgtggaatcccggtt

SEQ ID NO: 75235 - DNA, 31 bp, Homo sapiens
  chr7:156289999-156290030
  hypo
acaaagaggaacttgccgagcacctccacgg

SEQ ID NO: 75236 - DNA, 55 bp, Homo sapiens
  chr7:156290643-156290698
  hypo
cttgaaaaaggcgcccgcggagcaggtggatgcttgctgccgatggctgcggtgt

SEQ ID NO: 75237 - DNA, 291 bp, Homo sapiens
  chr7:156347362-156347653
  hypo
gacaggatcccaccacacagccgcgggacgggtaaatggaaagacccttcagcgccaaacactgctgaggaggtagagcaggtggaacacgcatatgccacaggcgggaaagaacaatgacaaacactttgcaaaatggatgggcaggtttgtttggtttttcatttgtttgttttaacgtgcccttactatgcagcctagcaattctactcttgggtatttacctaaaacaagaaaaaatatccacacaaatacttgtcgcccaagtgttcataacgcttcattcgtatc

SEQ ID NO: 75238 - DNA, 30 bp, Homo sapiens; identical to SEQ ID NO: 22044
  chr7:156371598-156371628
  hypo

SEQ ID NO: 75239 - DNA, 88 bp, Homo sapiens
  chr7:156393240-156393328
  hypo
attcacaatagcaaagacgtggagtgaacctaagtatccatcaacagaggagaggattagacaatgcggtgtatatatatggaggtca

SEQ ID NO: 75240 - DNA, 160 bp, Homo sapiens
  chr7:156397738-156397898
  hypo
ccagcctccatcacccgcacccacactggcagaggctgcccacgagcaggcccctggggcttccaagactaggactgtgagggatcattttactcataaacaggacaggataatacttgtatttttaaaagtgttttacgcactgcgtgaagaaaggctg

SEQ ID NO: 75241 - DNA, 30 bp, Homo sapiens; identical to SEQ ID NO: 22045
  chr7:156436008-156436038
  hypo

SEQ ID NO: 75242 - DNA, 188 bp, Homo sapiens
  chr7:156613329-156613517
  hypo
aaattgttgaatctggcgcctcctgcatcaaaaaagaggcataacatctagcaggcctctctggacttcgaagacaacacatttctcatttgcgtgtgttgctccagctggtttactgagcggcctgaaaagctgctggttttgagtacagcccagaaggagggaaggctctgcggcagctccaggct

SEQ ID NO: 75243 - DNA, 121 bp, Homo sapiens; identical to SEQ ID NO: 22046
  chr7:156733809-156733930
  hypo

SEQ ID NO: 75244 - DNA, 38 bp, Homo sapiens; identical to SEQ ID NO: 22047
  chr7:156733989-156734027
  hypo

SEQ ID NO: 75245 - DNA, 33 bp, Homo sapiens; identical to SEQ ID NO: 22048
  chr7:156734691-156734724
  hypo

SEQ ID NO: 75246 - DNA, 154 bp, Homo sapiens
  chr7:156744699-156744853
  hypo
ggttttgatttttatcatataaacttagatattacttttaaacaagtttgaaattgtttttaggacactttccctccaaaattagcggtttgtttaatttaggttcttgtatgctactgtgcctgcagtaagttaaggccgagcaaaagcgcag

SEQ ID NO: 75247 - DNA, 30 bp, Homo sapiens
  chr7:156746442-156746472
  hypo
tttttctaacaacacgtcctaaggctggac

SEQ ID NO: 75248 - DNA, 30 bp, Homo sapiens
  chr7:156755760-156755790
  hypo
gagtgcggagcagacgggtcgctggtggat

SEQ ID NO: 75249 - DNA, 30 bp, Homo sapiens
  chr7:156759348-156759378
  hypo
caggagcacctcgtcggttcacagtgcacc

SEQ ID NO: 75250 - DNA, 30 bp, Homo sapiens
  chr7:156759782-156759812
  hypo
aaaggttcgtgtaacgtgtgaaaatattga

SEQ ID NO: 75251 - DNA, 124 bp, Homo sapiens
  chr7:156760915-156761039
  hypo
tcgcccaggcattgcgctcatcctggaacagcacagatgctaccaccgatgagcgggagaggcgtggcaggagcacaccctcaggcgtagagctttagagatgccccccgccctgcccctccgg

SEQ ID NO: 75252 - DNA, 188 bp, Homo sapiens
  chr7:156782594-156782782
  hypo
actctcgagggctcctcgtccactgtggcgagtgcagaggacgcggcctgggcagtgcctgcggggagaccgtgctggcctgggcttcccagtgagcggggctcctcaggcttcctgggccctcgtcctcccggactggtggcactgtgtgcctgttggggggtggcaggcagcgggaaggcccaggt

SEQ ID NO: 75253 - DNA, 2671 bp, Homo sapiens; identical to SEQ ID NO: 45005
  chr7:156801943-156804614
  hypo

SEQ ID NO: 75254 - DNA, 979 bp, Homo sapiens; identical to SEQ ID NO: 45013
  chr7:156812846-156813825
  hypo

SEQ ID NO: 75255 - DNA, 243 bp, Homo sapiens; identical to SEQ ID NO: 45014
  chr7:156813986-156814229
  hypo

SEQ ID NO: 75256 - DNA, 56 bp, Homo sapiens
  chr7:156832822-156832878
  hypo
caagcggacttgggagcgacggggtttgggcatctgggagacgggaactccttccc

SEQ ID NO: 75257 - DNA, 438 bp, Homo sapiens
  chr7:156880357-156880795
  hypo
aagttgaattgttttcagaagcgtaaggttctacgtagcaagaggcttttctcatatgcacctcactttctcggttggagtggcagaaatacctaaacgcagaagaatgtgcatgcaagggctcgcgctggcatacagtagggcttgctattgacgatgagcgcacccacggctccggcaactacaaggcggtgctcacggacagcacggccctcggcgtggatatccggaaggcagccaccaccttcttctgcgttcttgttttgcattttccttcatttctatcaaccgactttgctgctatagccgctgcttagcaaagccggtaaacatgaggttgtaatcgttgaatacggcactctggcaaccgagacgctgaaaggctgccttttccgggatgaagaaggactgtgtggcgttgagatatctaattacata

SEQ ID NO: 75258 - DNA, 223 bp, Homo sapiens
  chr7:156883427-156883650
  hypo
aggggcaagaccagccaactgcgttttggggacacggtggccctgagaacagcatctcaggggacgcaggctgagacaggacaggagctgtgcagggtgggacaccgcaggtaagggcagggactgccaggatgagctgccttgcggctgacaccgtgactttcgggtggcacagaagctgtaggcatcagcggagagcagcgcaaagtggacagcagagatt

SEQ ID NO: 75259 - DNA, 30 bp, Homo sapiens
  chr7:156905581-156905611
  hypo
cgaggagtggctcatcgaccggggcagggc

SEQ ID NO: 75260 - DNA, 198 bp, Homo sapiens
  chr7:156918514-156918712
  hypo
ggacagctgctgacgcgtggcccgacctctcctggggaagttcaactcaaggtgcagaacaagtcaggtcagggcagagagcctggtggggggtgtgggcagggggaggctcccggtgaccccacgggaaaccccgcagaggctctggggcaggagtcactgtgaggtgaggagagaaccatccggagtcgccatcca

SEQ ID NO: 75261 - DNA, 18 bp, Homo sapiens
  chr7:156922806-156922824
  hypo
gcccggccggatgttatc

SEQ ID NO: 75262 - DNA, 87 bp, Homo sapiens; identical to SEQ ID NO: 22054
  chr7:156937633-156937720
  hypo

SEQ ID NO: 75263 - DNA, 31 bp, Homo sapiens; identical to SEQ ID NO: 22055
  chr7:156974992-156975023
  hypo

SEQ ID NO: 75264 - DNA, 30 bp, Homo sapiens
  chr7:157009427-157009457
  hypo
gcgggtttggtgtccggctcgacctgggtt

SEQ ID NO: 75265 - DNA, 405 bp, Homo sapiens
  chr7:157052685-157053090
  hypo
gtcaatcatcgacgccgttatgttctggaagtaatgaataataaagacgtataaacttaaacgtgttagtgaataccatcactcaatgatatcagtagaaatgataatcttccaaattgttggagagaaaaaataaccatgcaaataaaacaggacaaacagaaccaactctgtttaccagatatggggggtgggggtgggaagtaacattcagaatcgtaaaatagaaaacatagaatgagagaagcctgaatgttacaacagtgagtgcggagaaactgacgtaatgaaagaaaaagactttgagacagggccaggaaaacgctgccgcctacaagcaacacacctaaacggagtgacccagaagggtttagtggcacgtccaggttcgtgtgtgaagaaata

SEQ ID NO: 75266 - DNA, 30 bp, Homo sapiens
  chr7:157055997-157056027
  hypo
taacgccaccttcccgggcatacagagaat

SEQ ID NO: 75267 - DNA, 30 bp, Homo sapiens
  chr7:157060853-157060883
  hypo
tctgagggctgagacgccatggggccgctg

SEQ ID NO: 75268 - DNA, 223 bp, Homo sapiens
  chr7:157072933-157073156
  hypo
tcccttccagaaagggggagccgcccgggaaggtgttccggcgtgctcagtccttcagtgacagcactgtgaccactccaggtgcctggcacaggcagaggtggtggccgccagagctgggggacgctcccagggtgtaaggccaaggccttggtcaggaggacgtgatgcttggtgtcactggggcgaagctccggaccccggagggaggagctgctccccc

SEQ ID NO: 75269 - DNA, 74 bp, Homo sapiens
  chr7:157073388-157073462
  hypo
agaggagccctgcccgtggacccgggatttgtggggggcacttctgccgggcggggggtcggtgtccaggtgct

SEQ ID NO: 75270 - DNA, 212 bp, Homo sapiens; identical to SEQ ID NO: 22057
  chr7:157084612-157084824
  hypo

SEQ ID NO: 75271 - DNA, 151 bp, Homo sapiens
  chr7:157085383-157085534
  hypo
gggcccgtgtgtccgcgtggagctggacatgcttctgtgggccaggcaccctgaccctgatcctctccagtgaagaggccgggggcaggcggaactgggtcaggctccaggacacagcctcaccctatcagggcagcgagggctggggcgg

SEQ ID NO: 75272 - DNA, 355 bp, Homo sapiens
  chr7:157085963-157086318
  hypo
gtctcaggccctccccgccctgatgagtctccgctcccaacacaagggccacgtggtctggagggaccttttgcccagctgcaggggccatctcagggagaccccgccttggaggacttgttctccggatctccagacgtttaggctgaaagtgcagagatttagaagtcggacagggagttggggagcagcgctgtgcacgttccactcacctgaacggcatcgtctgagtcgcgtttgataaaattcgtaggaggccactggtctggcctgagctcctgcaggaggcctggcagaacagaccaaaacgcagccactcgtgctagagctccacgtcatcaagccaaaactaact

SEQ ID NO: 75273 - DNA, 21 bp, Homo sapiens
  chr7:157086592-157086613
  hypo
aactggggccgggcgcggtgg

SEQ ID NO: 75274 - DNA, 137 bp, Homo sapiens
  chr7:157106436-157106573
  hypo
ctctcgtgaactgccccgagttgtacgtgccctaaagtgaggaaagcatctcgccgagccggtccggagaggcaggctatgtgcctgtgtccactgcctcctgcctccagtaagcacacatcgtgtgtccatccagc

SEQ ID NO: 75275 - DNA, 22 bp, Homo sapiens
  chr7:157110376-157110398
  hypo
tttgtttttgagatggaatctc

SEQ ID NO: 75276 - DNA, 141 bp, Homo sapiens
  chr7:157110637-157110778
  hypo
attacaggcatgagccaccgcacccagcccacttgattattttttcaaattttctgtaggtttgaaaaatgaaatcagaaacggggacagtgttttgtgttttgtgttaaagggacggtcagctggcgcatgggacctctg

SEQ ID NO: 75277 - DNA, 150 bp, Homo sapiens
  chr7:157122529-157122679
  hypo
ccccggaggtggagacgcagcaccaggtgcttctgtctcgccctttctactccacatttcctcttggtctatttattctatatgtgaatacattcccatgccacgaggttcaaacaagaagtataaaggacagtgtgtgaaaattcctat

SEQ ID NO: 75278 - DNA, 76 bp, Homo sapiens
  chr7:157128227-157128303
  hypo
aggcttaaacgatcacgaattcataagcgttgttagttcagaaggtggctgagcaggcccccggaattcagtgtca

SEQ ID NO: 75279 - DNA, 232 bp, Homo sapiens; identical to SEQ ID NO: 45019
  chr7:157129085-157129317
  hypo

SEQ ID NO: 75280 - DNA, 43 bp, Homo sapiens
  chr7:157139857-157139900
  hypo
cattttgttgtttctgtaatgcgtatttgtatttaatttatat

SEQ ID NO: 75281 - DNA, 30 bp, Homo sapiens; identical to SEQ ID NO: 45022
  chr7:157150828-157150858
  hypo

SEQ ID NO: 75282 - DNA, 30 bp, Homo sapiens
  chr7:157151298-157151328
  hypo
gagacatgcctcacccgaggatattaaaaa

SEQ ID NO: 75283 - DNA, 30 bp, Homo sapiens; identical to SEQ ID NO: 22061
  chr7:157162187-157162217
  hypo

SEQ ID NO: 75284 - DNA, 30 bp, Homo sapiens
  chr7:157190318-157190348
  hypo
ctgggccctgggcacgtccccgtgccgtca

SEQ ID NO: 75285 - DNA, 30 bp, Homo sapiens
  chr7:157199424-157199454
  hypo
ccatgcctgcctggcggtctcagcctctga

SEQ ID NO: 75286 - DNA, 30 bp, Homo sapiens
  chr7:157199794-157199824
  hypo
gggggggtcccaaccgcagctgagctggaa

SEQ ID NO: 75287 - DNA, 30 bp, Homo sapiens
  chr7:157202005-157202035
  hypo
ggctcccgtgggcgccgccgctgctgccac

SEQ ID NO: 75288 - DNA, 671 bp, Homo sapiens
  chr7:157202474-157203145
  hypo
cgctgtgcctgcaggtgtggccgacgacgatgccctcgctgaggagcgcatgcggagaggccagaacgccctgccagcccagcctgccggcctccgcccgccgaagccgccccggcctgcctcgctgctgagacacgcgcctcactgtctctctgaggaggagggcgagcaggaccgacctcgggcacccgggccctgggaccccctcgcgtccgcagcaggtgtgcaaagggaggcagccgtggagcaggcgcagagtgagacttctctgggtgccagaggacagcgaggacacaaaccgcgcctgggctgctgtgttctgacctgagcgggcgtgggcggtcgggcggggcgggaggaggtagcctcgctctgctcctctcccgctcgcggcgccccacgccacggtggctccgggccccccaccgttaaaacggggtccgcgtgtcctgtacgcagcgtgttgctccgcaaaggatgacagagctgccacggcagtgcgaggtgctgcttttaccgtagacgtgccttttcgtagctttcagcgtagagcttgaggcctgtggcttaggccgggtggtctcgtgctggtggggtctgcgtttgcccctgcccctccgtcagcttcaccttctcgtgccttcttctgcgctgggtgcagaacaaaagac

SEQ ID NO: 75289 - DNA, 30 bp, Homo sapiens
  chr7:157205530-157205560
  hypo
cccccaggcctgggcggttctagggcatga

SEQ ID NO: 75290 - DNA, 31 bp, Homo sapiens; identical to SEQ ID NO: 22062
  chr7:157205930-157205961
  hypo

SEQ ID NO: 75291 - DNA, 30 bp, Homo sapiens
  chr7:157207321-157207351
  hypo
gggcggttaggacgcgctcctctggcgagg

SEQ ID NO: 75292 - DNA, 30 bp, Homo sapiens
  chr7:157208867-157208897
  hypo
ctaggtagcagcgtcggtcaggactgtctc

SEQ ID NO: 75293 - DNA, 30 bp, Homo sapiens
  chr7:157218611-157218641
  hypo
agccctccagaggacgggctctgatgtgct

SEQ ID NO: 75294 - DNA, 31 bp, Homo sapiens; identical to SEQ ID NO: 22063
  chr7:157221589-157221620
  hypo

SEQ ID NO: 75295 - DNA, 97 bp, Homo sapiens
  chr7:157233127-157233224
  hypo
cgcagcgtcagctgcgcgcccgcctgtcctccactgcgggctctggaggtaatggaagggtctgccgccagtgctggcgaccgtcttccccagccag

SEQ ID NO: 75296 - DNA, 30 bp, Homo sapiens; identical to SEQ ID NO: 22064
  chr7:157236078-157236108
  hypo

SEQ ID NO: 75297 - DNA, 126 bp, Homo sapiens
  chr7:157255144-157255270
  hypo
cactgcgcagacccgcgagctcctcatttccccggaagatgaacgagaaggttcgcgcgagattctctgcaaagccctggcacaggccccgtccctgcagctgtttattgacgctgtggcggccga

SEQ ID NO: 75298 - DNA, 31 bp, Homo sapiens; identical to SEQ ID NO: 22065
  chr7:157259720-157259751
  hypo

SEQ ID NO: 75299 - DNA, 31 bp, Homo sapiens
  chr7:157260472-157260503
  hypo
tccaaggctgggggcacgggagcaagcgggt

SEQ ID NO: 75300 - DNA, 30 bp, Homo sapiens; identical to SEQ ID NO: 22066
  chr7:157261148-157261178
  hypo

SEQ ID NO: 75301 - DNA, 1222 bp, Homo sapiens
  chr7:157262478-157263700
  hypo
caaggggccggcggcgcctaattccaccttgtgtgccagtgcagttcatagcccagcagtcacccggggtggggtcaactctggaaggcccctgtgtgttgactccagggtgaacccgggactcctgagtgggcgcccaggcccctctagtgctggccgcctctgcttccctctccaggcccacctgccggccaccacagtggcccccagcgcccagcccaggtcccccacgccggcttctctcggcccaggtcactctcttcacactgtcatctgccagtcacttgcacactctgattcccaaggcgactctgctgcaggcacacgccctcagcaagacctggctgagtgccgtctgtgcccgtggatgcacgcgcagctctcctggggacactggccctggctccactccctggacagatctgtgcccggcactgggtctgctccctgcacagacccacacctggtgctggcgccactccccggacacacctgcccctggcgctggcctgggttgggtgtgtccgtgtgtccagcgctggcctggattgggtgtgtccgtgtgtccggcactggcctgcgttgggtgtgtccgtgtgtccggcgctggcctgggttgggtgtgtccgtgtgtccggcgctggcctgggttgggtgtgtccatgtgtccggcgctggcctgggttgggtgtgtccgtgtgtccggcgctggcctgggttgggtgtgtccgtgtgtccggcgctggcctgggttgggtgtgtccgtgtgtccggcgctggcctgggttgggtgtgtccgtgtgtccggcgctggcctgggttgggtgtgtccgtgtgtccggtgttggcctgtgttgggtgtgtccggcgctggcctgcattgggtgtgtctgtgtgtccggcgctggcctgggttgggtgtgtccgtgtgcccggtgctggcctgcgttgggtgtgtctgtgtgtctggcgctccagcggggagtctgtggggggcatgttgctgaggtgctgggagctgggcctgacacttctgtgttttattgaatctcccaacatccaacatcccatttccatttaacagatgaggaaatgaaaacacagagaggagaaggcactcgcctgaggtaccctgccagacgctggggacgggctcacacgcagcggcccaaagcctgctgcctctcggagcagcgggggtctgggacggatattgaggcac

SEQ ID NO: 75302 - DNA, 18 bp, Homo sapiens
  chr7:157271528-157271546
  hypo
gggcgtgaaccaccgcgc

SEQ ID NO: 75303 - DNA, 30 bp, Homo sapiens; identical to SEQ ID NO: 22070
  chr7:157273376-157273406
  hypo

SEQ ID NO: 75304 - DNA, 30 bp, Homo sapiens; identical to SEQ ID NO: 22071
  chr7:157276391-157276421
  hypo

SEQ ID NO: 75305 - DNA, 30 bp, Homo sapiens
  chr7:157294092-157294122
  hypo
gggcagatgctctgcgtgcgggaggctgcg

SEQ ID NO: 75306 - DNA, 238 bp, Homo sapiens
  chr7:157334626-157334864
  hypo
ctgcctttggtagtgtggccacgcggcctcttagtgtacgtgttagaacctattattaaaggagtcaactgagcctggcggccacctcagggtgggacccggggagatgtgtctgcctgcgccccgtctctctcccctctgcactgccagagggcacctttctgctcctcgaaattacgtgggagctgcccctgtgggggcaggggctcaggtcgggctgtgccgggaaggtccgcaa

SEQ ID NO: 75307 - DNA, 30 bp, Homo sapiens
  chr7:157335140-157335170
  hypo
gaagcgctgccgccccgcagccccatcatg

SEQ ID NO: 75308 - DNA, 151 bp, Homo sapiens
  chr7:157335510-157335661
  hypo
actgggccctgtgggcgtcggctggcaggaggagggggtgcttcccggaggggtgctgtgagcctcagagctggcgtttgaggggacaggggcttgtggatcatcttgtcctttatcgtgaagtgtcagctgcatgcggcgccgggatgta

SEQ ID NO: 75309 - DNA, 351 bp, Homo sapiens; identical to SEQ ID NO: 22073
  chr7:157336679-157337030
  hypo

SEQ ID NO: 75310 - DNA, 414 bp, Homo sapiens; identical to SEQ ID NO: 22074
  chr7:157340322-157340736
  hypo

SEQ ID NO: 75311 - DNA, 191 bp, Homo sapiens
  chr7:157345029-157345220
  hypo
ctcatttagaagggaagtcatcgtgcaaagcggctggccgtgtgaataatagctcagaaacggggaaatgtacaggctccatctaacactgggtctcgtaactcctcacacaccccaactgctgacctcagcgagatgctgacctggaccacgtggggaggggatgggccgaggtgcaggatgagggaggc

SEQ ID NO: 75312 - DNA, 162 bp, Homo sapiens; identical to SEQ ID NO: 22075
  chr7:157346266-157346428
  hypo

SEQ ID NO: 75313 - DNA, 573 bp, Homo sapiens
  chr7:157347301-157347874
  hypo
acaaggtgaaggagcagctaacgaaagttaaattccagggaaacagaaaggcccagtggtgtgacgctgacatcgaaaagcctgcaaacagtcgaggagtcagcgcacacacaaagaaaatccagatggaaggaaagaaaggaaccttaacgatgtctaccggggacagagcgtggggtccacggagaagtcccaggcgttttccacctaagaagcatcatggtgattcaaacaccagggaaatgaatggactcagtggagccactttctgctacttgaccaggtttaattcgagttgtccatgtcgggaatctacagggaagtgacgcaggctgccatcttgctcagcaccccagtgtggcgggcgccccagtgtggcgggcgtcccagtgtggtgagcaccggccaagtcagtttgggttgggctgcaccctcgtgcctgggacacccaggaagacccacctctctcgtgttagtggaccagggaggcagccacagacaccaggctctgcgtgctccgctggcacccgaatggccactgggtaccatcccgtgccaagctcagcaaatgta

SEQ ID NO: 75314 - DNA, 30 bp, Homo sapiens; identical to SEQ ID NO: 22077
  chr7:157350852-157350882
  hypo

SEQ ID NO: 75315 - DNA, 30 bp, Homo sapiens; identical to SEQ ID NO: 22078
  chr7:157353082-157353112
  hypo

SEQ ID NO: 75316 - DNA, 98 bp, Homo sapiens
  chr7:157364293-157364391
  hypo
aatcgcttgttttgacggagaaaataaaaatcatacgcataatatcaaacatttattcttcttctcaacatgacgttattaatcggagctttaaaacc

SEQ ID NO: 75317 - DNA, 596 bp, Homo sapiens
  chr7:157370330-157370926
  hypo
cttgttatatgggaccgggaccacgctgtgaggcgaatgttttttctactctgttatcatttggatttagaaaaatctaaaagataaaaaccacaccacactcccagggtctggttcatgagcacacagccgtgtgaaccatccacacgggcatgcggccctcgggggtgactcagcctccgtcccctgaacatggggtgcgctgagcctccctgcatgcggccctcgggggtggctcagcctccatcccctgaacatggggtgcgctgagcctccctgcatgcggccctggggggccctaacgaatcccattcggaggaggagcagggcccgtcctcgtccggctggtgggtcctgccctgggtggctctggtcggagtacctcatagatgtggtagagattggagccttcatccggccagtagtggtagcactgccggacgccgttctccgcgaggggtgtcagcatgacgatcaccacgcagccgctctcccacaccatctgcggacaaagaaggcccgtggccgcggtgtgactgtctcatcaccgcgtgacatgtgtaattactgcactcggaagcacagtccaaatttat

SEQ ID NO: 75318 - DNA, 240 bp, Homo sapiens; identical to SEQ ID NO: 22080
  chr7:157387163-157387403
  hypo

SEQ ID NO: 75319 - DNA, 333 bp, Homo sapiens; identical to SEQ ID NO: 22081
  chr7:157396443-157396776
  hypo

SEQ ID NO: 75320 - DNA, 30 bp, Homo sapiens
  chr7:157401784-157401814
  hypo
atatttcaggccggccgcggtggctcacac

SEQ ID NO: 75321 - DNA, 304 bp, Homo sapiens
  chr7:157402240-157402544
  hypo
ctcataaggatggaacgattcacgtggccacggcctcgtggtccacaggggagcacagggtttgactcccagccccactgcttgccagcgggcgatcctgggtaaactgttcagtgttcggagaatgcaggatgataacatacaactcacagcactgttgtggtaaatggcacgcagcaagcaatgaggagcaaggctgagatgacggtggacacgcacccaactgcgcaggtcagccaagctggcaaagcgtgttcttgctgccccgtggtggcagaacatatggagcgatttttcatagatg

SEQ ID NO: 75322 - DNA, 30 bp, Homo sapiens; identical to SEQ ID NO: 22083
  chr7:157403099-157403129
  hypo

SEQ ID NO: 75323 - DNA, 30 bp, Homo sapiens
  chr7:157404449-157404479
  hypo
aagacgaagacagccgcagtcatgctgggg

SEQ ID NO: 75324 - DNA, 387 bp, Homo sapiens
  chr7:157408488-157408875
  hypo
gttaaacttgactgtcaccaacggggggtggggggtgcgcgaggccctgggctccaccgaagaccttaaggaaaagactctggatgttagtgggttcggcctcagaatcagccggcgctgagatgtgcacctggcaggatgaacgtaacttctggtggataaagtgggaggcctgatccaggaagaagcacaccgtggcctggggcccctctggagggtaggtcttccaagtcacgggaaacagggcgcccaggagacggtgagcccggctgctgccaccccgaaggccaggctcgccccacactgtgagaccctccccacacgaagattctgtaagcggaatcggaaggaggatgtgagaaggacgggtagccatgccacaccagg

SEQ ID NO: 75325 - DNA, 109 bp, Homo sapiens
  chr7:157411080-157411189
  hypo
tgcatgcccagcatgcagactcgcttccatcgcgacacagaggacagcatggagcccagctcgagtgccgtccccccaccatgacagcgcagcatgggccttccaagcc

SEQ ID NO: 75326 - DNA, 194 bp, Homo sapiens; identical to SEQ ID NO: 22085
  chr7:157414206-157414400
  hypo

SEQ ID NO: 75327 - DNA, 43 bp, Homo sapiens
  chr7:157434604-157434647
  hypo
ctcatcttctgctccttccaccgtgaactccaattctgtgaac

SEQ ID NO: 75328 - DNA, 104 bp, Homo sapiens
  chr7:157446115-157446219
  hypo
gatgagtcggaaggtcggcgactctgatgcgttcctgcggcaccaacctgcatgtgctttctacagcctgtgtgtgccagggagggtggcggtcagtgccccga

SEQ ID NO: 75329 - DNA, 217 bp, Homo sapiens
  chr7:157446507-157446724
  hypo
cccaactgcacacgacgcccgccactccccacacccaccccgactccacacgatgcccgctgatccccacacccaccccaactccacatgacgcccgtctctccccacacccaccccaactgcacacgatgcccgctgctccccacacccaccccgactccacaccatgcccgccgctccccacacccaccccgactccacacgacgcccgcctctc

SEQ ID NO: 75330 - DNA, 30 bp, Homo sapiens; identical to SEQ ID NO: 22086
  chr7:157448550-157448580
  hypo

SEQ ID NO: 75331 - DNA, 30 bp, Homo sapiens; identical to SEQ ID NO: 22087
  chr7:157448929-157448959
  hypo

SEQ ID NO: 75332 - DNA, 124 bp, Homo sapiens; identical to SEQ ID NO: 22088
  chr7:157449202-157449326
  hypo

SEQ ID NO: 75333 - DNA, 45 bp, Homo sapiens
  chr7:157453760-157453805
  hypo
agagctggacaagccgacatcgcctcctccggcgggtggctcagt

SEQ ID NO: 75334 - DNA, 30 bp, Homo sapiens; identical to SEQ ID NO: 22090
  chr7:157461962-157461992
  hypo

SEQ ID NO: 75335 - DNA, 223 bp, Homo sapiens
  chr7:157464609-157464832
  hypo
gtttctaaaagtctacgctgtaccccaagaaggggacgggtggggcagcagccctggaggaaaacccgtgagcgagtcgtggagggagtgtgagggtttttggggagtgaactttgcagagggtgctgggagcagccggcccgaggacaccgctgactggggtacaggggccacgggtcgcacgtggggtgtcagctctgccgcctcacttggggttgatttg

SEQ ID NO: 75336 - DNA, 250 bp, Homo sapiens; identical to SEQ ID NO: 22092
  chr7:157467304-157467554
  hypo

SEQ ID NO: 75337 - DNA, 494 bp, Homo sapiens; identical to SEQ ID NO: 45027
  chr7:157476994-157477488
  hypo

SEQ ID NO: 75338 - DNA, 109 bp, Homo sapiens; identical to SEQ ID NO: 6065
  chr7:157477710-157477819
  hypo

SEQ ID NO: 75339 - DNA, 108 bp, Homo sapiens
  chr7:157502239-157502347
  hypo
ctgagaaattccctgcgagccccccagctctgtcttctatggggacttcgacctcgctccacgttgtgcagccacatggcccacaggaatgggcggtcctgctacatg

SEQ ID NO: 75340 - DNA, 30 bp, Homo sapiens
  chr7:157503473-157503503
  hypo
gcagccgggttacacgcgagagccccacgc

SEQ ID NO: 75341 - DNA, 274 bp, Homo sapiens
  chr7:157507357-157507631
  hypo
aagtcagggatccctggggaacgatgcccagtccgacgtgcttctcctgagccgattttgggtttcccgttttctaaagccagctccccagggaacggcgcccagtccgacatgcttctgaaaggattctaggtctcccgctttctgaagccaactccctggggaacggcactgagcttgaggcgcttctcctgagcagattctaggtctcccgctttctgaggccatttccccagggaatggctccaagcccgatcacttctcctgaatgtat

SEQ ID NO: 75342 - DNA, 326 bp, Homo sapiens; identical to SEQ ID NO: 22095
  chr7:157510157-157510483
  hypo

SEQ ID NO: 75343 - DNA, 247 bp, Homo sapiens; identical to SEQ ID NO: 22096
  chr7:157511384-157511631
  hypo

SEQ ID NO: 75344 - DNA, 369 bp, Homo sapiens; identical to SEQ ID NO: 22097
  chr7:157513067-157513436
  hypo

SEQ ID NO: 75345 - DNA, 65 bp, Homo sapiens; identical to SEQ ID NO: 22098
  chr7:157527706-157527771
  hypo

SEQ ID NO: 75346 - DNA, 334 bp, Homo sapiens
  chr7:157528456-157528790
  hypo
tggggagcaggtgggcgcctttggtccccgtcctcctggcaggcagtggctgagtaccttctcgggaaaggaggcccccgtgaggctgggtgggctctgaattcccggtgtgttgatagcgatcggcacatgcctcaagccacctggaagagaagctgccccaagattctccaggccctttctgagctgaaggtgacgtgacagacaggcttcaaagaagggtcagagacggccggtgggtgggccccgttcccaaacacccaccttggatctcatgccctggagcagagcatgtgtcctggtcctgcctgggcgaggccggcacccgctgccc

SEQ ID NO: 75347 - DNA, 30 bp, Homo sapiens; identical to SEQ ID NO: 22099
  chr7:157544565-157544595
  hypo

SEQ ID NO: 75348 - DNA, 343 bp, Homo sapiens; identical to SEQ ID NO: 22100
  chr7:157549922-157550265
  hypo

SEQ ID NO: 75349 - DNA, 172 bp, Homo sapiens
  chr7:157565438-157565610
  hypo
gaacatctttttgaacaaacacgtaaacacattgagtctttggtcgcttttgcatcttctttcttctctggcctctgcgccccagctcctttgtgcgaggtcccatgtgctgctaggccacgggtggctgtccagggtgtggcttggagccgtggagctggaggcctgggtg

SEQ ID NO: 75350 - DNA, 156 bp, Homo sapiens; identical to SEQ ID NO: 22101
  chr7:157567208-157567364
  hypo

SEQ ID NO: 75351 - DNA, 30 bp, Homo sapiens; identical to SEQ ID NO: 22102
  chr7:157568258-157568288
  hypo

SEQ ID NO: 75352 - DNA, 30 bp, Homo sapiens; identical to SEQ ID NO: 22103
  chr7:157579865-157579895
  hypo

SEQ ID NO: 75353 - DNA, 30 bp, Homo sapiens; identical to SEQ ID NO: 22104
  chr7:157581824-157581854
  hypo

SEQ ID NO: 75354 - DNA, 30 bp, Homo sapiens; identical to SEQ ID NO: 22105
  chr7:157584168-157584198
  hypo

SEQ ID NO: 75355 - DNA, 292 bp, Homo sapiens; identical to SEQ ID NO: 22106
  chr7:157589659-157589951
  hypo

SEQ ID NO: 75356 - DNA, 30 bp, Homo sapiens
  chr7:157605795-157605825
  hypo
cgtgctaaaaccacacgcatggcagcctcc

SEQ ID NO: 75357 - DNA, 749 bp, Homo sapiens
  chr7:157606032-157606781
  hypo
aaagaccaaggacagcggggaacggtggggagggaagagggtgggagaccagagtcagaggcggacaggggttcgatacgccattcaggtccccaaaacagcatgtgcagctctcgttaaatggaaaaggccctaatgtcatgggaaagtctaacaatttgttaaactttgttagtgtacaaaatgtggtgatcctactcgtataaaaaagaaagttcaaatgcgcagaagaaagatcagaggacaagatgcccacgaatgataagcgcctttgctgcctctgggcgggtccgggggagtcgcatttcttcctcactgcatcgctgtattttccagatgtccactgaggaatgagcattgctttttaattagcagctgccccgagtgctccagctgccctgcgtgtggctgtctacacagcacgcattccttaccccggtggttttcatctggaccctgagtcagaatggcctggagcgcgggtaaaacagctcggggccagccagagcttctgagccagggctgggcccaagaacgtgcatttgcgttgttccccaggtgatgctgctggtgaccccggggaccccgccgtgagagccccgacacaagtcgcggtttgtggtgctttggaggagtttgctccttagagtgagggggattgttctgccccaatggcctcttcagagctgcgagactgtgcccacgcgaggcagtggtcgccacacccacactgccgtgctgcgcaggtg

SEQ ID NO: 75358 - DNA, 213 bp, Homo sapiens; identical to SEQ ID NO: 22108
  chr7:157607747-157607960
  hypo

SEQ ID NO: 75359 - DNA, 251 bp, Homo sapiens; identical to SEQ ID NO: 22109
  chr7:157621928-157622179
  hypo

SEQ ID NO: 75360 - DNA, 479 bp, Homo sapiens
  chr7:157625851-157626330
  hypo
tcaggaagtatgcgacgtggccagcgcccatccatcctgtatgatggtgaacttatccaggagcgagatgtggccggtgcccatctatcccatatgattgtaaactcgtccaggaagtgtgtgatgtggccggtgcccatccatcctgtatgacggtgaactcgtccaggagcgagatgtggctggtgcccatccatcccatatgatggtaaactcgtccaggaagtgtgtgacgtggggggcgcccatccatcctgtatgatggtgaacttgtccaggagcgagatgtggccggtgcccatccatcccatatgatggtaaactcgtccaggaagtatgcgacgtggccggcgcccatccatcctgtatgacggtgaatttgtccaggagcgagatgtggccggtgcccatctatcccatatgattgtaaactcgttcaggaagtgtgtgacgtggccggagcccatccatcctgtatg

SEQ ID NO: 75361 - DNA, 30 bp, Homo sapiens; identical to SEQ ID NO: 22111
  chr7:157626571-157626601
  hypo

SEQ ID NO: 75362 - DNA, 30 bp, Homo sapiens; identical to SEQ ID NO: 22112
  chr7:157633237-157633267
  hypo

SEQ ID NO: 75363 - DNA, 245 bp, Homo sapiens; identical to SEQ ID NO: 22113
  chr7:157642942-157643187
  hypo

SEQ ID NO: 75364 - DNA, 108 bp, Homo sapiens
  chr7:157645736-157645844
  hypo
gatggtctctggggccgtcctctctccgcctccagatcagcaggcagtggatgggtatttgggtctttcttgtactcacacggatgcgatgtgtgattcctggtagga

SEQ ID NO: 75365 - DNA, 95 bp, Homo sapiens; identical to SEQ ID NO: 22115
  chr7:157646589-157646684
  hypo

SEQ ID NO: 75366 - DNA, 30 bp, Homo sapiens
  chr7:157647971-157648001
  hypo
agcggccccaacccacgcgccggcttctcg

SEQ ID NO: 75367 - DNA, 251 bp, Homo sapiens
  chr7:157659198-157659449
  hypo
tgctcatgacctactaaacagcgcatgtgcctctcagcccttgccatgacaaccatgaggtctgcaggaaacacgtccatagaggtggagctgaggctggtgtgcattctcccaggcacccagcatgagtgcccagctcagggtctgcaccgaggctgtctggcccgagtcccaggctcgccccagtgcttgccacacacaccctggggtctcctcagaagcagtgcctgtgccccgagatgcacggccac

SEQ ID NO: 75368 - DNA, 19 bp, Homo sapiens
  chr7:157660317-157660336
  hypo
ccccgcccagactgaaggg

SEQ ID NO: 75369 - DNA, 30 bp, Homo sapiens
  chr7:157660786-157660816
  hypo
ccttagaaagggcccgaaacagttcacgag

SEQ ID NO: 75370 - DNA, 30 bp, Homo sapiens; identical to SEQ ID NO: 22117
  chr7:157666153-157666183
  hypo

SEQ ID NO: 75371 - DNA, 283 bp, Homo sapiens
  chr7:157703228-157703511
  hypo
gccgtaggaacgggcgcagaatcacacacgtacaccgttctgcacagctggcggacgcttcctctttcccacatggtgtggtgtaacctgatcgtttgtatgcaaagcaaacccatgcacagctgactgtgtcaaaacacagccagaaagatgccatgcggcagggcacgtgtgtgtgtgtgtgtgtgcgagcgcgcgtgcgcccctgcgatcagcccagcagacagagcacgttcctgtaacgtgttgtgatccactgcgcggcaacaacacaaaacacaag

SEQ ID NO: 75372 - DNA, 30 bp, Homo sapiens
  chr7:157711246-157711276
  hypo
acatatcgaaaacaacgccgtccagaaaga

SEQ ID NO: 75373 - DNA, 31 bp, Homo sapiens
  chr7:157716856-157716887
  hypo
gacaggatgagggggcgcggccacaggcagg

SEQ ID NO: 75374 - DNA, 31 bp, Homo sapiens
  chr7:157722646-157722677
  hypo
cctggacctagacacccgtcccagctcagac

SEQ ID NO: 75375 - DNA, 281 bp, Homo sapiens; identical to SEQ ID NO: 22118
  chr7:157730032-157730313
  hypo

SEQ ID NO: 75376 - DNA, 30 bp, Homo sapiens; identical to SEQ ID NO: 6071
  chr7:157732029-157732059
  hypo

SEQ ID NO: 75377 - DNA, 269 bp, Homo sapiens; identical to SEQ ID NO: 22120
  chr7:157736785-157737054
  hypo

SEQ ID NO: 75378 - DNA, 315 bp, Homo sapiens; identical to SEQ ID NO: 22121
  chr7:157738092-157738407
  hypo

SEQ ID NO: 75379 - DNA, 187 bp, Homo sapiens; identical to SEQ ID NO: 22122
  chr7:157744266-157744453
  hypo

SEQ ID NO: 75380 - DNA, 341 bp, Homo sapiens
  chr7:157776640-157776981
  hypo
ctggaatccctgaggaggagccggctcacccagcgccgcgagcatctcttcctgactcgcagggggcccgtgagatggagaatctgcctgacagggtgcacttgcacagccaagcaccaagaaggaaaatggcatttcattagccatggagacagccgggaacccagcagccttctttattctggctcatattttctcatcattctcagggagttgtccaggtaacaatgaccttgtgtaaaccagcgtccctgcctgagtcctcttcacctgaaaccaccgccccacgccaggctccacctccccacgccaggctccaccccccacgccaggctccaccc

SEQ ID NO: 75381 - DNA, 96 bp, Homo sapiens
  chr7:157793806-157793902
  hypo
ggggctggggtttggccgcaggtggggtgcaaggtggggctggggtttggccgcaggtctggtgcaacgtggggctggggtcgggccgcaggcggg

SEQ ID NO: 75382 - DNA, 841 bp, Homo sapiens
  chr7:157794263-157795104
  hypo
ggcacttcagcctcacgggcgctcccaccatgcagacagacgcaggcagtgtagtagatggtaaaacggccgaaaaccatcagcagcctcaggaccgccctgtcatgatgccaactcccaatccgtgctgagagcccggcactgcctcagggagattagcaaacacttttcatctgtttatacacaaacagcaggcatgggcccgctggccttccaggaacatgagtctgcgtgactggctgttgtgccctcacccggaaccgtgccaggcaccgaggaggtgctcagtaaactatggggttgcatcgtatttgaggtcatccggaggcacccgctgctgcactgggactcctggagatcctcctccagccggaagctggccaagctgtctccaggtcctgggatcacgttgtttcagtggagacgatggccgccagcttcagattcagaaatggcacttagtgcctcttcccttggagtcacctcgggtgacatggggtggcccccatggccagcactgaccagctctgccccccaccgaggcgggagccacatctcaccaccaaatgcccttttatgggaactgaggtgcaaagcgggggcttgaggcaagcagcccccgcgggaaacacggcgtggtcatcaggcgagtgctgccttagagacccgccccctgcagaggctgtgctctggatggtcactcactcacccctttattaagagttggttctacggaggatgagagaggcagggacgtgttttgggagaaggtcatatgaaaaattagtgccacagagtttcggcccctaaaaagcttccagtttcacggtgaggggaaatg

SEQ ID NO: 75383 - DNA, 234 bp, Homo sapiens; identical to SEQ ID NO: 22124
  chr7:157795357-157795591
  hypo

SEQ ID NO: 75384 - DNA, 31 bp, Homo sapiens; identical to SEQ ID NO: 22125
  chr7:157845212-157845243
  hypo

SEQ ID NO: 75385 - DNA, 183 bp, Homo sapiens; identical to SEQ ID NO: 22126
  chr7:157847114-157847297
  hypo

SEQ ID NO: 75386 - DNA, 111 bp, Homo sapiens; identical to SEQ ID NO: 22127
  chr7:157849575-157849686
  hypo

SEQ ID NO: 75387 - DNA, 245 bp, Homo sapiens; identical to SEQ ID NO: 22128
  chr7:157860438-157860683
  hypo

SEQ ID NO: 75388 - DNA, 31 bp, Homo sapiens
  chr7:157868202-157868233
  hypo
caggtccagcaggagacgggcactgagcctg

SEQ ID NO: 75389 - DNA, 30 bp, Homo sapiens; identical to SEQ ID NO: 22129
  chr7:157885890-157885920
  hypo

SEQ ID NO: 75390 - DNA, 685 bp, Homo sapiens
  chr7:157890953-157891638
  hypo
gtgggcaggggacccgcaaaggatcctgcgggtgaggccaccgggggggctccctggggaggaggtggagaggtccagattcccgaaggctccgagggacgggcggcgggactcaggtttgactctgtaggaaagagggggccgccagtgtcctaaggcgggagatgcccgagggtgacgcttacccaggactgagcctggcaaagcccagccctgctcccggaatgcggagaagccgtccgtgctcagaatccgtcttccgacagcgaaggcggtggccaggagggccaggggcagggagcaggcacgggcgaggcccagctgctctgtgaaaccagaggctccccgaggcacacgcctccctcgcccgccccggcctggcatctgccagtcccaccattttgctgagactctgtgaaggtgaatggggttgcttgggctcggggactggaagaagaaggacgtttatctcgtgaacgcgggacgctccttatgggagaggagtgggagacatgaagcaaagcgtgaccaccgaggagctggggagaaagcgagaaagcaaggaagcagtgggggacggggaacggggccgcggggagggccggagaagatggtagaaggtgacagtgcggggtgcagcgttcctgggtccttgaggggagccgggcttctcagccttgaagac

SEQ ID NO: 75391 - DNA, 37 bp, Homo sapiens; identical to SEQ ID NO: 22132
  chr7:157916054-157916091
  hypo

SEQ ID NO: 75392 - DNA, 246 bp, Homo sapiens; identical to SEQ ID NO: 22133
  chr7:157916513-157916759
  hypo

SEQ ID NO: 75393 - DNA, 283 bp, Homo sapiens; identical to SEQ ID NO: 22134
  chr7:157919943-157920226
  hypo

SEQ ID NO: 75394 - DNA, 120 bp, Homo sapiens
  chr7:157931997-157932117
  hypo
aagtgaagagcacggcgtctgaaatttaaaatttatgtccattacgggtggacataacggaagaaacggtttgtgaatctgaagacagatcatagaagcgatcatcgttggaagaacaga

SEQ ID NO: 75395 - DNA, 238 bp, Homo sapiens; identical to SEQ ID NO: 22135
  chr7:157934534-157934772
  hypo

SEQ ID NO: 75396 - DNA, 266 bp, Homo sapiens; identical to SEQ ID NO: 22136
  chr7:157949152-157949418
  hypo

SEQ ID NO: 75397 - DNA, 147 bp, Homo sapiens; identical to SEQ ID NO: 22137
  chr7:157959847-157959994
  hypo

SEQ ID NO: 75398 - DNA, 56 bp, Homo sapiens
  chr7:157980854-157980910
  hypo
ggaaggccgccacgctcgccccgcgatggggaaggccgccacgctcgccgcctgat

SEQ ID NO: 75399 - DNA, 125 bp, Homo sapiens
  chr7:157981318-157981443
  hypo
ggggaaggccgccacgctcgccccctgatggggaaggccgccacgctcgccccctgtactggaaaggccgccacgcccgccccctgtagggggaaggccgccacgctcgccgccttgtatgggga

SEQ ID NO: 75400 - DNA, 158 bp, Homo sapiens; identical to SEQ ID NO: 22139
  chr7:157987112-157987270
  hypo

SEQ ID NO: 75401 - DNA, 274 bp, Homo sapiens
  chr7:158037748-158038022
  hypo
gaaatgagatgaggcgtccagccctgcatctgcagcgtggtcagcacagaggctgacatccatggtcatgccggaatccgtggtcatgccagaatccgtggccatgccggaatccatggccatgccggaatccgtggtcatgctggaatccacggtcatgccggaacccatggccatgccggaatccgtggtcatgctggaatccacggtcatgccggaacccatggccatgccagaatccgtggtcatgccagaatccgtggtcatgccggaa

SEQ ID NO: 75402 - DNA, 504 bp, Homo sapiens; identical to SEQ ID NO: 22141
  chr7:158039846-158040350
  hypo

SEQ ID NO: 75403 - DNA, 160 bp, Homo sapiens
  chr7:158044817-158044977
  hypo
tggcaactctgctctggttgccgcacagcctcaagcctcagctgcttggagtgggtgggaacgcgagagcacttgagcaccagtggcctgacaactctgcctcgtccccatcacctctgcggcgagaatcagagcagtcgcagaagctcctgccacacca

SEQ ID NO: 75404 - DNA, 878 bp, Homo sapiens
  chr7:158066279-158067157
  hypo
agacatgggaggagccgcagacacggggagccgcaggcatgggggagccgcagacagacatgggaggagccgcagacacgggaggagccgcagacacagggagccgcagacacagggggagctgcagacacaggaggagacacacaaggagccgcagacacagggggagccacagacagacatgggaggagccgcagacacggggagccgcagacacagggggagccgcaggcatgggggagccgcagacacagggggagccgcagacacaggaggagacacacgaggagccgcagacgcaggaggagccgcagacagacgcgggaggagccgcagacacagggggagccgcagacacagggggagctgcagacagacatgggaggagccgcagacacagggagccgcagacacagggagccgcagacacagggggagccgcagacacaggaggagacacacgaggagccgcaggcacagggggagccgcagacacagggggagctgcagacagacatgggaggagccgcagacacggggagccgcagacacagggagccgcagacacagggggagccgcagacacaggaggagacacacgaggagccgcagacacagggggagccgcagacagacatgggaggagccacagacacgggagccgcagacacggggagccgcagacacagggggagacgcagacacaggaggagacacacaaggagccgcagccacagggggagccgcagacgcgggagagccacagacacagggggagccgcagacacagggggagccgcaggcacagggggagccacaggcacagggggagccgcagacagacatgggaggagccgcagacacggggagccgcagac

SEQ ID NO: 75405 - DNA, 306 bp, Homo sapiens; identical to SEQ ID NO: 22142
  chr7:158072899-158073205
  hypo

SEQ ID NO: 75406 - DNA, 197 bp, Homo sapiens
  chr7:158103400-158103597
  hypo
tgagccggacagagcgcaagtcccacggagggcaagccctgagccggacagagcgcaagtcccacggagggcgagccctgagccggacagagcgcaagtcccacggagggcgagccctgagccggacagagcgcaaatcccacggagggcgagccctgagcctgacagagcgcgagtcacacggagggtgagcacca

SEQ ID NO: 75407 - DNA, 97 bp, Homo sapiens
  chr7:158109477-158109574
  hypo
cagccgccgagcctcggcccacgcccgccctacctgtgccggaaagcttctgcaacgccacgcgcaggcgctgcagggccacgggcgacacctcgta

SEQ ID NO: 75408 - DNA, 320 bp, Homo sapiens; identical to SEQ ID NO: 22145
  chr7:158113045-158113365
  hypo

SEQ ID NO: 75409 - DNA, 30 bp, Homo sapiens
  chr7:158136364-158136394
  hypo
gcaagcagagctcgcgcagaggctcaggca

SEQ ID NO: 75410 - DNA, 109 bp, Homo sapiens
  chr7:158188500-158188609
  hypo
gaggggcgagggctcccggcctgcgccgccttggatcccaccagccccgaattcgggcagagcgccatggagggcccagcctggagggggagctcggagcctgcagcag

SEQ ID NO: 75411 - DNA, 332 bp, Homo sapiens; identical to SEQ ID NO: 22146
  chr7:158216891-158217223
  hypo

SEQ ID NO: 75412 - DNA, 88 bp, Homo sapiens; identical to SEQ ID NO: 22147
  chr7:158235876-158235964
  hypo

SEQ ID NO: 75413 - DNA, 170 bp, Homo sapiens; identical to SEQ ID NO: 22148
  chr7:158240555-158240725
  hypo

SEQ ID NO: 75414 - DNA, 429 bp, Homo sapiens
  chr7:158267339-158267768
  hypo
aggtcagctaagaggcgggtgcccgtctgagagggacccttttcccaaggtcagctaagaggcgggtgcccatctgagagggaccctcttcccaaggtcggctaagaggcgggtgaccgtctgaccactgagggagtcgggagtggggctgcccatggctttggggaagcactcgctgttcagcgggagagaagtcaaagagagaggccgggtgatgccacggggtgccctgtgggactgtgcacactgcgttctgcagacatgggcatcctggacagctgaaaacagggcaatgatgcaaactggcatttgcgcctcctggtgccccacggagacaggccctgaggagcctggtggtcctcgttcagctccagggcagatgctggcgagggaggaaggtgatcataagaaccccggctgcagcacagt

SEQ ID NO: 75415 - DNA, 499 bp, Homo sapiens
  chr7:158270796-158271295
  hypo
gtgggacaggcacggcggcaaagagagtgggctgagtgggtcatcacacagcacgggagccgcggccccaggtgctgcttgaatgaagaaggctcagcccatgactgctacgtctggtccccaggacccaaactgtccagaaatcagccagcactcctgcaggtgcactgcagtggacggctagaggagggaaagcagcgccgtacagacactcggaaaactgcagactggaaggggcgtgaaagcacaaggtcttgatcattctcctggcattcggtgctgtgcgtagggtgagcaatggacgccactggggaagagtgggaaaggaaggctcagcacgtcggtaacgaatgaggaggcagaggcccgctctgcgtctcaaagaacgggtgggatgcggagccgtgacaagggcatgggaaagaaagtggagtgggaataacgccaaaattaacctgataaggaagctgctttcaacgcatccctgagctggacccac

SEQ ID NO: 75416 - DNA, 317 bp, Homo sapiens; identical to SEQ ID NO: 22150
  chr7:158277562-158277879
  hypo

SEQ ID NO: 75417 - DNA, 553 bp, Homo sapiens; identical to SEQ ID NO: 22151
  chr7:158281311-158281864
  hypo

SEQ ID NO: 75418 - DNA, 220 bp, Homo sapiens
  chr7:158282163-158282383
  hypo
aaaacttgccgaaggacagagcaaaacaaaatcagaaagcaagggttggtgcgagcgatgggcgcccagaacccgggcaacctcttctccccacccaccgaggccgcagcccatggctccggggttccatccgcctcctctcggcagcgcgccccgggcggccccagctccaggccagcggcggggctcaccaggctgggcgctgcgcacggcgggcagg

SEQ ID NO: 75419 - DNA, 740 bp, Homo sapiens
  chr7:158282720-158283460
  hypo
gctctgggctgagggtcaagccggcgtcatcacaggagactctctggccgcgggagcagcagcggggccggggcctccccttgaggcctcccctgggcccggcgcctcccctggaccgggtgctcaccgcacgcaccgcgtccctggaagcaaggctgccgggcgccggggagcggaggcttccagggaggtaacgagctccgcggggagcccggctgcgtgggaagcaaaccgtggcgtccgtggccacagacaagagacgcaggagagggtcgggagaggaaaggaggcagcggaggcagcagagacgaagacgggcaggaaaggccagcgcggctgggccaggccctggaggagacgcggggcagaggcagcgcctcagtccccacccaggaaggggctccagaagctccgcggtgcctgggtggccaggcgaccccaagccacgcatcccccgcggccgagcaggctggcaaaggttggcgttcggctccacgtccacgcctgtcttaaacacagagagatgggtccagaaagcaccaccccgctagggagcggctcccgcgagggcgtgagcaccctggacaccagaaccgggagggccccagggccactaggcgggagtcgcaccgccagcaaaggccaggtgtggtgtgaacgcgcagtgtctttcactcattcctgcaaagcacagtgccttcaatgctgcttcaccagccgacaaacgcctgttcatccgc

SEQ ID NO: 75420 - DNA, 118 bp, Homo sapiens
  chr7:158307738-158307856
  hypo
acaaagacgatgatccgaaaacagcaggcagaacaaggttgcactatggcgaggagaactgggatgcggagagaaaggggcagccccgggcacacaaagcggccgcgtgcaccagctg

SEQ ID NO: 75421 - DNA, 142 bp, Homo sapiens
  chr7:158315943-158316085
  hypo
gcagccagagtggtgcagacacgtcccacggtgagggctggtgcggacaagagattagccaaaggagcagccaccatgctgccgacagcgagtctgccctgaagtggagtctgccctggagtggagtcgtctgccctggagc

SEQ ID NO: 75422 - DNA, 30 bp, Homo sapiens
  chr7:158330980-158331010
  hypo
tcgtccggtgactggcgcacgctgcgctcc

SEQ ID NO: 75423 - DNA, 232 bp, Homo sapiens; identical to SEQ ID NO: 22153
  chr7:158331365-158331597
  hypo

SEQ ID NO: 75424 - DNA, 763 bp, Homo sapiens; identical to SEQ ID NO: 22154
  chr7:158349366-158350129
  hypo

SEQ ID NO: 75425 - DNA, 362 bp, Homo sapiens; identical to SEQ ID NO: 45037
  chr7:158379364-158379726
  hypo

SEQ ID NO: 75426 - DNA, 31 bp, Homo sapiens; identical to SEQ ID NO: 22155
  chr7:158381341-158381372
  hypo

SEQ ID NO: 75427 - DNA, 38 bp, Homo sapiens
  chr7:158414041-158414079
  hypo
ttggccaggcacagtggctcacgtctgtaatcccggca

SEQ ID NO: 75428 - DNA, 31 bp, Homo sapiens; identical to SEQ ID NO: 22156
  chr7:158451212-158451243
  hypo

SEQ ID NO: 75429 - DNA, 111 bp, Homo sapiens
  chr7:158516190-158516301
  hypo
tccactggtgaactgcggagcccaagtgttcatgctgggtgcaggtgaggcctctgctgtgagcctagaagtccttcctgcctacaggcctgggctcgcaggccgaagaca

SEQ ID NO: 75430 - DNA, 317 bp, Homo sapiens
  chr7:158550058-158550375
  hypo
aaacactagtcccgacgctcgcctctcttttaagtagccacacccaaagtttccctcgtagatgcccttagggcagtggagccaggggagaaagcagagaacggtggattgtggtcaatgagagcaccaggagcaccacagacagtgagaggcagagccaaaggatcccagagctcgcgggacgccccttaatccagcgccaaaggatcccagagctcgcgggacgccccttaatccagagccaaaggatcctagagcccgcgggacgccccttaatcccgcgccaggcaccccgcggctctgcaaagatcctttgc

SEQ ID NO: 75431 - DNA, 382 bp, Homo sapiens
  chr7:158552732-158553114
  hypo
catgcttcaacagcaccttgtcgaggtttgacgcatttggcattaacgtgagccactccagtctcaagtgtagcttccccttgggaacctcgtccagagtgaaccactgaagagaaaaaatgtttacgttcagcaaaagttcttctgaatcaaaaatccaaattaaacccagtctctacaaatgttccatgctgctcactaaccacgaggcatcaacagttctcagtaacgcgaaggctgagcctcaccatatccagctctacgctatgtggatgccagtgacctcacgtttggaggcgatggcagcaacaggtgtgagcgaccattctaagtgctttacacacaccaaccccgtgaccccgacagaaaccctaagcaagta

SEQ ID NO: 75432 - DNA, 164 bp, Homo sapiens; identical to SEQ ID NO: 22158
  chr7:158556264-158556428
  hypo

SEQ ID NO: 75433 - DNA, 380 bp, Homo sapiens; identical to SEQ ID NO: 22159
  chr7:158564137-158564517
  hypo

SEQ ID NO: 75434 - DNA, 157 bp, Homo sapiens; identical to SEQ ID NO: 22160
  chr7:158570615-158570772
  hypo

SEQ ID NO: 75435 - DNA, 30 bp, Homo sapiens; identical to SEQ ID NO: 22161
  chr7:158571466-158571496
  hypo

SEQ ID NO: 75436 - DNA, 36 bp, Homo sapiens
  chr7:158594952-158594988
  hypo
ataaattccatgtcctatgcacgatataagcatttt

SEQ ID NO: 75437 - DNA, 30 bp, Homo sapiens
  chr7:158595844-158595874
  hypo
caacgcgccgttccccggagcacacctaag

SEQ ID NO: 75438 - DNA, 30 bp, Homo sapiens
  chr7:158596431-158596461
  hypo
gagaaaggtgaggcgcgcgacaaacccaaa

SEQ ID NO: 75439 - DNA, 157 bp, Homo sapiens
  chr7:158598727-158598884
  hypo
ggaggacactagcagcagagccggcgccggggcacaccgcgtgggaggcgccggggcacaccgcgtgggaggcgccggggcacaccgcgtgggaggtgccggggcacaccgcgtaggaggcgctggcgcacaatgcgtaggaggcactggccttgag

SEQ ID NO: 75440 - DNA, 35 bp, Homo sapiens; identical to SEQ ID NO: 22162
  chr7:158623833-158623868
  hypo

SEQ ID NO: 75441 - DNA, 34 bp, Homo sapiens; identical to SEQ ID NO: 22163
  chr7:158624107-158624141
  hypo

SEQ ID NO: 75442 - DNA, 50 bp, Homo sapiens
  chr7:158659173-158659223
  hypo
ccccgagtatcctgggcgtcccctctctggtcactcgtgtcctgggttcc

SEQ ID NO: 75443 - DNA, 30 bp, Homo sapiens
  chr7:158669872-158669902
  hypo
ccggattggtgttccgcggtgcgggtgtgt

SEQ ID NO: 75444 - DNA, 30 bp, Homo sapiens; identical to SEQ ID NO: 22164
  chr7:158713060-158713090
  hypo

SEQ ID NO: 75445 - DNA, 30 bp, Homo sapiens
  chr7:158740893-158740923
  hypo
gtgggccgacagtgcgggaggcggttcctt

SEQ ID NO: 75446 - DNA, 30 bp, Homo sapiens
  chr7:158741423-158741453
  hypo
aaaattccatttgacgtaaactggagtcaa

SEQ ID NO: 75447 - DNA, 30 bp, Homo sapiens
  chr7:158749629-158749659
  hypo
ctcccgtgagctgccgtccacactcacccg

SEQ ID NO: 75448 - DNA, 498 bp, Homo sapiens
  chr7:158766791-158767289
  hypo
cggcggtctggcctggcgtctggagctccgggagcgcctgtcctcccagggccgatgccagcgcccgccctccgcgttcccggcattgacagaatgtccaggcgcgcagggcccgtgggtggggcctgggcacccggccctgccctcgcgcaccctccagacccgccacttcttagatagagagcggccgcctccccgccctcctttcagccactcgctccgcgcagtcagctctgctgactcttccggaggattctggaaggttccagagggtgtgccgccgaggccctgcgagagggcgttccctggggagaacattccagagcaaggtaacatccataaacggaggctgaaacggcctgagacgtcccgggagtaacgaagaccccaaggcggccccaacttgaggggggcgaggtagccaggaatgggggggtggtgggagggacgggaaggcaaacgcgctgcctgctggggacggacgcgccttggggcagc

SEQ ID NO: 75449 - DNA, 197 bp, Homo sapiens; identical to SEQ ID NO: 22166
  chr7:158792182-158792379
  hypo

SEQ ID NO: 75450 - DNA, 258 bp, Homo sapiens
  chr7:158817161-158817419
  hypo
ctaaagcactgctgcgtcctccgacgcgagatggctgtgtgccaccgactgtccaaatgccctgccaatgccatcgtgaagcatccgtgtgaaggaaaaagtccaccttaccgtgcgctgtggcatcgatcaggcgtgtggacagtcgcaggcacgcagcggtctcccaacatcagggcacaccgcgatcaggtgtgtggacagtcgcaggcacgcagcggtcctgcagcagcagggcgcaccgcgatcaggtgtgtg

SEQ ID NO: 75451 - DNA, 30 bp, Homo sapiens
  chr7:158856803-158856833
  hypo
ctggatggggaagccgcgcccggcgtgggt

SEQ ID NO: 75452 - DNA, 30 bp, Homo sapiens
  chr7:158886386-158886416
  hypo
gggagaccccgcagcgtccctgggtccgga

SEQ ID NO: 75453 - DNA, 43 bp, Homo sapiens
  chr7:158890571-158890614
  hypo
aggccaaggcttctggcctctcgtgtaaggattccaggctctg

SEQ ID NO: 75454 - DNA, 154 bp, Homo sapiens; identical to SEQ ID NO: 6072
  chr7:158936493-158936647
  hypo

SEQ ID NO: 75455 - DNA, 154 bp, Homo sapiens; identical to SEQ ID NO: 6073
  chr7:158936936-158937090
  hypo

SEQ ID NO: 75456 - DNA, 172 bp, Homo sapiens; identical to SEQ ID NO: 45043
  chr7:158937202-158937374
  hypo

SEQ ID NO: 75457 - DNA, 469 bp, Homo sapiens; identical to SEQ ID NO: 45044
  chr7:158937576-158938045
  hypo

SEQ ID NO: 75458 - DNA, 172 bp, Homo sapiens
  chr7:158951193-158951365
  hypo
gtctggtccagcagccgcactctcagctggacccttagacgggaaatcttagcgacttttctagggtgaagcttgatggcgttgtgatggggcgttctcgatgctgctttcttagcctagaaaagcacagagtgggcgccctccctgctccgtggtgcgcgtgttgattgtc

SEQ ID NO: 75459 - DNA, 678 bp, Homo sapiens
  chr7:158962973-158963651
  hypo
gagcagaaacatggatgatcacggctcactgacggggcagctctgaggatcacgtgagcagaaacacacagataatcacagaatcactgacgaggcctctgtgaggatcccgtgagcagaaacatggatgatcgcggcctgactggcggggctgctgtgaggatcatatgaccagaaacacgtggaagatcatggctcactgacggggctgctgtgactattgcgtgagcagaaacacgatgatcatggctcactgaatgggcagctctgaggatcgcgtgagcagaaacatggatgatcatggctcactgacagggaggtctgaggattgcgtgagcagaaacacagataatcacagaatcactgagggggccactgtgaggatcgcatgagcagaaacacacagatgatcacggctcactaatggggccgctgcgagaatcgcgtgagcagaaacacggatgatcatggctcactgacggggcaactctgaggatcacgtgagcagaaacacacaaataatcacagaatcactgacggggccactgtgaggatcgcgtgagcagaaacacacagataaccaaggcctgaccaacggggctgctgggaggatcccgtgagcagaaacacggacgatcacagcatcactatcgagacggctctgaggatcctgtgagc

SEQ ID NO: 75460 - DNA, 111 bp, Homo sapiens; identical to SEQ ID NO: 6077
  chr8:495721-495832
  hypo

SEQ ID NO: 75461 - DNA, 339 bp, Homo sapiens
  chr8:591504-591843
  hypo
ggttaatagcctgtatcgtaatgtatttcctcaaaggtgtctctcattccacatcgaaagaccttttcacacagattattcaaattatagcttaatatttcttgattaattgtactgggaggaggtagtgtgtctgagcgtgatctaatcagtggagaacgcagcggccgtcacgcctgggtacgctggcagcggagctcctcccggaggacccctccccctccccgccgattcctctcctgtctgcgttttccaggctcatctcagatgccgccttgtctatgaagctctctttggttcctgcccagacctcatcagaatcaacgccccggctctgtg

SEQ ID NO: 75462 - DNA, 158 bp, Homo sapiens
  chr8:593179-593337
  hypo
cacattctgcctctcgttaaacattgcatgcgattcctgcgagttctctggcatgagacgatgacctagtaatggggtcgcagcagggacgggaagctggccaggcgcaggctgtgctcgcagggacgggaagctggccaggcgcaggctgcggtgtg

SEQ ID NO: 75463 - DNA, 24 bp, Homo sapiens
  chr8:625100-625124
  hypo
agtgaggacagagacgtggcggcc

SEQ ID NO: 75464 - DNA, 30 bp, Homo sapiens
  chr8:626513-626543
  hypo
gcgcggcggcccctcgtgaggacagaggca

SEQ ID NO: 75465 - DNA, 285 bp, Homo sapiens
  chr8:636731-637016
  hypo
gcagctgagcaacaggtctctcgcaggacactcagagagagagagagagagcgcgcacagcagggcgcccctcccctcctctaggaccaggcgagcttggacacagctgaatgtgtgaactctcatatcaataaatcagcgtgacaagaatgaaacactgctagctctgactctgtcaggcccttgagagggtgagatgcgaggaatgcggagcggggggcagccccatcacccacccacgagccactctggaaaggctaagagaagtcacgctaggactccttc

SEQ ID NO: 75466 - DNA, 555 bp, Homo sapiens
  chr8:644634-645189
  hypo
gcagacaggagcaccacgaggggcctcacggcttgctcgtctgtgaatcacggtgaccatgtaacccataataccttctggttctaactttttatattcttttgggtaatgtatggtttactgtgaggacacttacgccttgcacaagttgaacgttacatgtcttgatcaggtgcaaggaagagaccggttacactttatggggtgggcggcagcgagagttccccgtcccatcatctcctccgccggacgcacagagaatgcagcgtctgtgagcacagctgccctggacctggcatctaagagtcagggtcagagaggggcagtcagaaacccacctccctgctggacaagtcacaagcaccagcatccctcgggaaaggcagaggggcgtggtggctcggagccctagggtgataggcggttggctgccctgtgggtttcaccagtgtcacctcttcgcaggtgtcattgacctggctcctttctccccgtcaggttcccctcagctcctctgggctgctcctggcagccgacagctatggaggggctcac

SEQ ID NO: 75467 - DNA, 30 bp, Homo sapiens
  chr8:647999-648029
  hypo
acgggggccaccggcgtgtacctgtgacat

SEQ ID NO: 75468 - DNA, 31 bp, Homo sapiens; identical to SEQ ID NO: 22175
  chr8:650716-650747
  hypo

SEQ ID NO: 75469 - DNA, 178 bp, Homo sapiens
  chr8:651286-651464
  hypo
gccggacgggagcacgccatacctacgggtctgccctgctggacgggagcacgccgtacccacgggtctaccctgctggacgggagcacgccatacctacgggtctgccccgccggacgggagcacgccttacccacgggtgtgccctgctggatgggaacacgccgtaggatgggag

SEQ ID NO: 75470 - DNA, 320 bp, Homo sapiens
  chr8:667714-668034
  hypo
ctggggcagccaacgcggacatgtggctgaagtcgcctccccaggcacagctgcctgcgagtgtctggagccaggaaaatgctatggagaaatcccaggccatggtcagagccaggcaatgctgcagaacgcctgaggctgggcaggcacaagacagtcccagggacgggggcaggccagggcaggccctgactaaacagccaccgccaggagacgctgggcccaagcaagcatcagatgacagagttttctgaaacaaggcagctgatcccaaagaaaatggcagaacacgccagggtaaggatcggagcgcactgaga

SEQ ID NO: 75471 - DNA, 75 bp, Homo sapiens; identical to SEQ ID NO: 45049
  chr8:686809-686884
  hypo

SEQ ID NO: 75472 - DNA, 55 bp, Homo sapiens; identical to SEQ ID NO: 45050
  chr8:687162-687217
  hypo

SEQ ID NO: 75473 - DNA, 128 bp, Homo sapiens; identical to SEQ ID NO: 6078
  chr8:687513-687641
  hypo

SEQ ID NO: 75474 - DNA, 138 bp, Homo sapiens; identical to SEQ ID NO: 6079
  chr8:687837-687975
  hypo

SEQ ID NO: 75475 - DNA, 241 bp, Homo sapiens; identical to SEQ ID NO: 45053
  chr8:688498-688739
  hypo

SEQ ID NO: 75476 - DNA, 21 bp, Homo sapiens
  chr8:689295-689316
  hypo
ggtcccagagcctggcggagc

SEQ ID NO: 75477 - DNA, 30 bp, Homo sapiens
  chr8:694455-694485
  hypo
cccagcccaacctgcgtccctccctcttct

SEQ ID NO: 75478 - DNA, 30 bp, Homo sapiens
  chr8:748433-748463
  hypo
cagaacctgcagccccgtgccccggcgctg

SEQ ID NO: 75479 - DNA, 30 bp, Homo sapiens
  chr8:748860-748890
  hypo
tgcagccccgtgtcccggcgccagccaggt

SEQ ID NO: 75480 - DNA, 170 bp, Homo sapiens; identical to SEQ ID NO: 45055
  chr8:798794-798964
  hypo

SEQ ID NO: 75481 - DNA, 30 bp, Homo sapiens; identical to SEQ ID NO: 45056
  chr8:799238-799268
  hypo

SEQ ID NO: 75482 - DNA, 86 bp, Homo sapiens; identical to SEQ ID NO: 22178
  chr8:833588-833674
  hypo

SEQ ID NO: 75483 - DNA, 30 bp, Homo sapiens; identical to SEQ ID NO: 22179
  chr8:852059-852089
  hypo

SEQ ID NO: 75484 - DNA, 30 bp, Homo sapiens; identical to SEQ ID NO: 22180
  chr8:853998-854028
  hypo

SEQ ID NO: 75485 - DNA, 325 bp, Homo sapiens; identical to SEQ ID NO: 22181
  chr8:893355-893680
  hypo

SEQ ID NO: 75486 - DNA, 30 bp, Homo sapiens; identical to SEQ ID NO: 22182
  chr8:923958-923988
  hypo

SEQ ID NO: 75487 - DNA, 30 bp, Homo sapiens
  chr8:962452-962482
  hypo
gcgggaacttccagcggcagtgtggacacc

SEQ ID NO: 75488 - DNA, 97 bp, Homo sapiens
  chr8:977338-977435
  hypo
ccaggtgtggtaccaggtgcccgttattctccaggtggggtgcttggtgcccgttattctccaggtggggtgctcggtgcctgttattctccaggtg

SEQ ID NO: 75489 - DNA, 30 bp, Homo sapiens
  chr8:986256-986286
  hypo
accccacatgttcacgtgtttaatgaacac

SEQ ID NO: 75490 - DNA, 269 bp, Homo sapiens; identical to SEQ ID NO: 22183
  chr8:1047977-1048246
  hypo

SEQ ID NO: 75491 - DNA, 30 bp, Homo sapiens; identical to SEQ ID NO: 22184
  chr8:1048750-1048780
  hypo

SEQ ID NO: 75492 - DNA, 232 bp, Homo sapiens
  chr8:1078115-1078347
  hypo
tgaggacctgctccccgtgttgtgttcggtgaggacctgctcccggtgttgtgttccgtgaggacctgctccccgtgttgtgttcggtgaggacctgctccccatgttgtgttcggtgaggacctgctcccggtgttgtgttcggtgaggacctgctcccggtgttgtgttccatgaggacctgctcctggtgttgtgttcggtgaggacctgcccccggtgttgtgttccg

SEQ ID NO: 75493 - DNA, 509 bp, Homo sapiens; identical to SEQ ID NO: 22185
  chr8:1132630-1133139
  hypo

SEQ ID NO: 75494 - DNA, 30 bp, Homo sapiens
  chr8:1138913-1138943
  hypo
gttgccttgtggtgcggcttccaggccggt

SEQ ID NO: 75495 - DNA, 609 bp, Homo sapiens; identical to SEQ ID NO: 22186
  chr8:1150804-1151413
  hypo

SEQ ID NO: 75496 - DNA, 151 bp, Homo sapiens
  chr8:1207573-1207724
  hypo
gatggcattacgtggcgtctcctctgtgggccccgggctgtcacgctggatggcagagtgtgtgcctctgtagctgacgtggaagagccagtgtctttctgagggcccgtgcaggccagtgctggcgtggaagagccggtgtcctcccgag

SEQ ID NO: 75497 - DNA, 30 bp, Homo sapiens
  chr8:1245657-1245687
  hypo
catgtggtgagaaacgtggcatgcgcgaac

SEQ ID NO: 75498 - DNA, 240 bp, Homo sapiens
  chr8:1246592-1246832
  hypo
cagcctacagaggccgcgtccttccacatgatggccccgcacctggcactgtcgccgtccctcagtggagacaccaggaagccctggatcacagtgtgacacgttctgtactggggtataaatacggtttcatggggacacacaggagggagctgagtgtgctcctctggccccggagagtgctgagaggcagcgtaccctgcagaagagtggcagtcgctgagcgtgggggacggctca

SEQ ID NO: 75499 - DNA, 227 bp, Homo sapiens
  chr8:1251025-1251252
  hypo
gctcttaggtactttccaaaacgtctggctgtaactcgcctccttctgccgtgcttttggtagattcagtaaaacatgcacgtccttggagattccatcgccgcaggagtcattccttagctgtcggctgcaggctgtgaggatgggccttcgtaaggacacagatggttggatgttcctggactccacctcgcaggggagcgagcgtccttggaagaggaaaaagc

SEQ ID NO: 75500 - DNA, 254 bp, Homo sapiens
  chr8:1269310-1269564
  hypo
gcatgcatccgtgcccgtatgtgtctgcgtccatgtgtctctacgtgtgcacgtgcatccatgtgcctctgcatgtgtgtgtgcatctgtgtctctgcatgtgcacgtgcatctgtgccatgtgcgtgtgcgtgcatctgtgtgtctctgtgtgcatctgtgtgtctctgcgtgtgcgtgtgtgtctgtgtgtctctgcatgtgcttatgcatccgtaccatgtgcgtgcatgtgtatccgtgtgtctctgcat

SEQ ID NO: 75501 - DNA, 261 bp, Homo sapiens
  chr8:1303162-1303423
  hypo
gcggatgagggtggaaagtcacggatgatgctgtggatgagggtggaaagtcacggatgatgctgtggatgagggtggaaagtcacggatgattctgtggatgaaggtggaaagtcacggaaatgtgcgttgtatgttttaagtggcaaagccgagcagaaagcaccgtgaaagcggtgacactgcatgcccgtgacagtggtggcacccgcgtgctggcgtgacagcggtgacacctgcgtgccagtgtgcacagcacag

SEQ ID NO: 75502 - DNA, 96 bp, Homo sapiens
  chr8:1307776-1307872
  hypo
ggctgatgctgtcggcggctgtccctgtgggtgatgcggtggcgctggcagatagccatcccctcccaatcccacggtagacgctggcctcagctc

SEQ ID NO: 75503 - DNA, 183 bp, Homo sapiens
  chr8:1308185-1308368
  hypo
gaagaacaggaccatcgcgagccactttccgcctcttcatccccgtccactgaggaaatccaccgaagccctttgtgtggggttcggaggagagcgggttgcagggacttgccttctgggtgtgaccttggtgcaggtgcataagggttagcgactcctgctgcttcccgggtgtgctcaggg

SEQ ID NO: 75504 - DNA, 302 bp, Homo sapiens
  chr8:1379942-1380244
  hypo
tgtaaaatgaagacactgatgcgtgcatgacagggactcttctgatgcctccgtgtcgatggccaccaagccctgagaaccctgccggcacccagcaccccatgccagccagcaccgctacggctgccatccatcagggctgaaccctgccggcacccagcaccccatgccagccagcaccgctacggctgccatccatcggggctgaatcctgccggcacccagcaccccatgccagccagcaccgctacggctgccatccatcggggctgaaccctgccggcacccagcaccccatgcca

SEQ ID NO: 75505 - DNA, 151 bp, Homo sapiens
  chr8:1411608-1411759
  hypo
atgctccccaggaactcccttcgaacccaccgtccaaagccagggtcaggcagcctcgggtatggttggctcagggtcctgttcccaggacgctcctgccccgggtggccccgagctggtccggcctcgcgttgaggggtccagtggttta

SEQ ID NO: 75506 - DNA, 30 bp, Homo sapiens; identical to SEQ ID NO: 22188
  chr8:1441371-1441401
  hypo

SEQ ID NO: 75507 - DNA, 97 bp, Homo sapiens
  chr8:1443579-1443676
  hypo
ttctgctgtgctgctctgagccggagactgagccggccagggcagccgaggccaagagtggcgctgctgaggggccgccatcatgaggggtcagaat

SEQ ID NO: 75508 - DNA, 14 bp, Homo sapiens
  chr8:1444164-1444178
  hypo
gtggggcccccggc

SEQ ID NO: 75509 - DNA, 348 bp, Homo sapiens
  chr8:1471386-1471734
  hypo
gatgtagctccctcacacacacgttgaatttggatttgcttgtctggcttctgctggggcgcaggatgtggggatggaaggaccaagacacacgacagagaacagcgtcacggggtcaccgtcccacttcccaccccgcgcctcacagcacagacgggggatttgccggcctcacgccggccgagccactgctgacttcacgcagccccagccatgcccccacgcagacacacggagccccaaggcgggccagatctcagggccggatggggctgtggagctgtgccttagacgggggggaaggactccctgccccaggccggcaccgcacagtccctgggtagaaaa

SEQ ID NO: 75510 - DNA, 299 bp, Homo sapiens
  chr8:1475084-1475383
  hypo
gcagggcaagagcaaaggaaacgtggtgtggcctcgagttaggctgcaagcagcgggtgccgtcacaagcccacccgttaccacgacttcgcatcgtctacattgcaggctcacgttcacatgccctatccaaccctctcctgcgagcagcgggtgccatcacaagcccacccgttaccacagcttcacatcgtctacaccgcgggctcacgttcacacgccctatccaaccctctcctgtgagttcacaaatccgtgactgacatggtgtgcacctcgtcctcttgtccaggcttctc

SEQ ID NO: 75511 - DNA, 30 bp, Homo sapiens
  chr8:1496332-1496362
  hypo
aacaactgcctggccgggtgtcctggctca

SEQ ID NO: 75512 - DNA, 305 bp, Homo sapiens
  chr8:1501386-1501691
  hypo
tgcagcctcccagtctcccaccgcgtcctgcgctcctggttttctcctcttctagtgtcttccccacctggcgtcgcccggccgcaaccctggccctcctggggaagaggttcggaccctactctttatttgacatgaagaggttcggactcccagttttattcggcatgttcacgggcagcagccccattttgtttggcgtgttcacgggcagcagccctgttttattcggcgtgttcacggtcagcagccccgttgtgcttggcgtgttcacgggcagccccgttagactttgggttttacct

SEQ ID NO: 75513 - DNA, 244 bp, Homo sapiens
  chr8:1579017-1579261
  hypo
ggtttcctgcagctcatgtcccgagggtctcggcgggaggtccgggtgtcccgagggtctgggcgggaggtccgggtgtcccgagggtctcggcgggaggtcccagtgtcccgagggtctcggcgggaggtccgggtgtcccgagggtctcggcgggaggtccgggtgtcccgagggtctgggcgggaggtccgggtgccccaagggtctgggcgggaggtccgggtgaacagatcattttaat

SEQ ID NO: 75514 - DNA, 30 bp, Homo sapiens
  chr8:1589150-1589180
  hypo
gagcacagtctctgcggagaggagggagac

SEQ ID NO: 75515 - DNA, 30 bp, Homo sapiens; identical to SEQ ID NO: 22192
  chr8:1592436-1592466
  hypo

SEQ ID NO: 75516 - DNA, 274 bp, Homo sapiens
  chr8:1615949-1616223
  hypo
cgatgacatgacctgcgtagaaatgacgccatgcctgtgcgctgtcctgcggggacacaccttgcctagctgtgtctctgctgctgggtttgctggtatttttaaatgatgccatgcctgtgcgctgtcctgcggggacacaccttgcctaggtgtgtctccgctgctggatttgttggtatttttaaatgacgccacacctgcgcactgtcctgaggggacgcacgttgcctagctgtgtctctgctgctggatttgtcggtatttttaaatg

SEQ ID NO: 75517 - DNA, 30 bp, Homo sapiens
  chr8:1616752-1616782
  hypo
agagcagctctgtgcggaccagcgacaagg

SEQ ID NO: 75518 - DNA, 30 bp, Homo sapiens
  chr8:1617853-1617883
  hypo
tggtccagggcctccgaaccaggtctccac

SEQ ID NO: 75519 - DNA, 30 bp, Homo sapiens; identical to SEQ ID NO: 22193
  chr8:1623363-1623393
  hypo

SEQ ID NO: 75520 - DNA, 30 bp, Homo sapiens
  chr8:1689282-1689312
  hypo
cccgacaggtagtggcgtcccaggtggtag

SEQ ID NO: 75521 - DNA, 29 bp, Homo sapiens
  chr8:1689590-1689619
  hypo
tgacaggtggccaggcgcgttggctcatg

SEQ ID NO: 75522 - DNA, 30 bp, Homo sapiens
  chr8:1692092-1692122
  hypo
cagcatcccttttccgctggtaggggggaa

SEQ ID NO: 75523 - DNA, 31 bp, Homo sapiens; identical to SEQ ID NO: 22194
  chr8:1717584-1717615
  hypo

SEQ ID NO: 75524 - DNA, 227 bp, Homo sapiens
  chr8:1725080-1725307
  hypo
tctggatggtttacacagacacggtgagagacgttacccggacgcaaaagagtacacagcgtgtgataccgttccatgtacagtcatacgttgcttaacgacgggctgtgttctgagaaatgtgtccttaggctattttgtcatcgagtggccgtcatagagtacctttctacatgtctaagccaactccacactcggctctatgcgacaaagcccattgttcccag

SEQ ID NO: 75525 - DNA, 31 bp, Homo sapiens
  chr8:1731056-1731087
  hypo
tcctgtatcttcatacgcgtgtgtggatgca

SEQ ID NO: 75526 - DNA, 45 bp, Homo sapiens
  chr8:1759475-1759520
  hypo
ggtaacttagcggaggcgtgcagggcccaccgtttgtaccggctg

SEQ ID NO: 75527 - DNA, 236 bp, Homo sapiens; identical to SEQ ID NO: 22195
  chr8:1777140-1777376
  hypo

SEQ ID NO: 75528 - DNA, 31 bp, Homo sapiens
  chr8:1779412-1779443
  hypo
gagggacagtggcagccgtggagggacagtg

SEQ ID NO: 75529 - DNA, 31 bp, Homo sapiens; identical to SEQ ID NO: 22196
  chr8:1783329-1783360
  hypo

SEQ ID NO: 75530 - DNA, 2 bp, Homo sapiens
  chr8:1784051-1784053
  hypo
aa

SEQ ID NO: 75531 - DNA, 31 bp, Homo sapiens
  chr8:1789553-1789584
  hypo
aagggggtcagagaggcggatggaaagctgt

SEQ ID NO: 75532 - DNA, 30 bp, Homo sapiens
  chr8:1792008-1792038
  hypo
ctccctcctctgagcggccgctcagggaca

SEQ ID NO: 75533 - DNA, 199 bp, Homo sapiens; identical to SEQ ID NO: 22197
  chr8:1796261-1796460
  hypo

SEQ ID NO: 75534 - DNA, 163 bp, Homo sapiens; identical to SEQ ID NO: 22198
  chr8:1797379-1797542
  hypo

SEQ ID NO: 75535 - DNA, 523 bp, Homo sapiens
  chr8:1797601-1798124
  hypo
gaggagggcgtggggcggccacatggacacagacagcaaatgctgaggggggcgtggggcagccacgtggacacagggcaaatgctgaggagggcgtggggcggccacgtgggcatggacagcaaatgctgaggagggcgtggggccagctgcgtggacacagacggcaaatgctgaggagggcgtggggcagtcgtgtggacacagacggcaaatgctgaggagggcgtggggtggccacgtgggcatggatggcaaatgctgaggagggcatggggtggccacgtggtcacagacagcaaatgctgaggagggcgtggggcggccacgtggacatagagggcaaatgctgaggagggcgtgggccggctgcgtggacacagggcaaatgctgaggagggcttgggcggccacgtggacacagacagcaaatgctgaggagggcgtggggcgaccatgtggacacagagggcaaatgctgaggagggcgtgggccggctgcgtggacacagagggcaaatgc

SEQ ID NO: 75536 - DNA, 43 bp, Homo sapiens
  chr8:1798700-1798743
  hypo
gggcgtggggcagctgcgtggacacagacggcaaatgctgagg

SEQ ID NO: 75537 - DNA, 202 bp, Homo sapiens
  chr8:1801272-1801474
  hypo
tggatgcctgtgggtcggcacgggctgcactgccgtctgtgtttcctcctccgtgtcatggccttcatgggtgactctcagaacctgccgtcctgagtgggcaggaggggcacagagcctctccctaggtgcagccctgcccaggccgcccttccctgcttccctgccagctgcctacccagagcgccgggcccttcccgcc

SEQ ID NO: 75538 - DNA, 76 bp, Homo sapiens
  chr8:1814164-1814240
  hypo
ttgcaaaggatgacaccgcagtccctgtgtgtgtgggactctggtggcccatgtgaccacccgctgggggcagagc

SEQ ID NO: 75539 - DNA, 55 bp, Homo sapiens
  chr8:1826000-1826055
  hypo
tgaggctggcgagtcccgtgttactgatagagatggtgaacggatgcccgccata

SEQ ID NO: 75540 - DNA, 176 bp, Homo sapiens
  chr8:1830206-1830382
  hypo
aggccagggggacatggcttccgagtctgacatccgcagcgtgctgcaccccgaccctccctcaggtgtgtcccgtgcgtgtctgcagcatttgccagggtcttgcattcagccccgtggctggagctgggtccgtgtaaccatgcgtgtgaggcggccctgtcaacagctggcca

SEQ ID NO: 75541 - DNA, 301 bp, Homo sapiens; identical to SEQ ID NO: 22201
  chr8:1830727-1831028
  hypo

SEQ ID NO: 75542 - DNA, 31 bp, Homo sapiens
  chr8:1842463-1842494
  hypo
catgatcgcaccactgcgctgcaccctggac

SEQ ID NO: 75543 - DNA, 47 bp, Homo sapiens
  chr8:1850869-1850916
  hypo
cttgtgctgtgcattcggtgggttcggatgaacgtttagtgacatgg

SEQ ID NO: 75544 - DNA, 728 bp, Homo sapiens
  chr8:1877721-1878449
  hypo
ctccgcccctgcgctcgtcacccttgcccaaggcccgggtgccttgcttcttccccaaaaggtgtttgttgaatatacagacatctttcagaagtcagtctgcccgtctcctcccaccctcccacttctctcggcctgcctgtttctccccctcggatgggggcaccgggccatgcagagcctccttcagcatgtcctgcgctgaccagctgagcagcctgcccgcccggcggggcctcctgtacctgggccagccctctttgccccggtgctgtgccctcggtcccgtgccctcggtccctgctgttctcttggccacagggctaaggactccattgtgttctgctgggtgccttagacgaggccctccctggcccatcccgcctggtccccgcagccgctgggggtgggcagctgctgtgtgtctgttctctctccagcccctgccgcgttggtggcagctgtgctttgcaggctcttcctgtggatctggccgccgctgcttgtgggagctctgggtacggggctttccttccagcttccttggtgctggctgaggctgctctcctggcccctcactcagctctgagcgcaggggtgccgagccccagctggatcccagccagtctcggtgctgccatcctggagtggaacacgcagggcttccctcaccgaaagttgccctgcaccaccctccccacggccgggagcgacgccttggcgggtcc

SEQ ID NO: 75545 - DNA, 110 bp, Homo sapiens
  chr8:1879661-1879771
  hypo
gatctgctgaacgtgtctcttcgcatctttctcaccaagagctgtccggcgtaccgtgtgggagcgtgcgaggcagcctgcgcagaagcgcatagcctgccacttcgttc

SEQ ID NO: 75546 - DNA, 30 bp, Homo sapiens
  chr8:1899112-1899142
  hypo
ttcagtcacgcagccgcagccttgcccggc

SEQ ID NO: 75547 - DNA, 200 bp, Homo sapiens
  chr8:1902077-1902277
  hypo
tgatttcctcccaggccgacctgacggtggcttccgtgcactcagattttggcaggtccacccacaaggattaaggaattctagttttgccattcatttcctaatttatgtttttattatgatatatgggattgtacatgttgaggaccccaaatccaaaaacaaaatgcgaaatgctccaattttttttttttcttttt

SEQ ID NO: 75548 - DNA, 30 bp, Homo sapiens
  chr8:1925465-1925495
  hypo
taaatgaaaaaccacggtgccgatgttagc

SEQ ID NO: 75549 - DNA, 34 bp, Homo sapiens; identical to SEQ ID NO: 22203
  chr8:1926962-1926996
  hypo

SEQ ID NO: 75550 - DNA, 284 bp, Homo sapiens
  chr8:1942392-1942676
  hypo
ggtgggggacagctggtggagcgaggccgggcctgccccaggatcccagtgctgccccatctcctgctgcgtcaatgctcagaactgcgcagagcaccctgacttgcttggattctgtctacaggatgcaggggcaaccggcgacccgcctgaacattccagaggctttgctcagccccgtgcatggctgtgacaggcgtcagctcagacagggccgggagtctgaatgactcaagaggtgtcatggcacggtggctgatggcgtgggcagtggagccagttgc

SEQ ID NO: 75551 - DNA, 33 bp, Homo sapiens
  chr8:2536388-2536421
  hypo
gtgagccaccgcgccccccctggttttctgttg

SEQ ID NO: 75552 - DNA, 31 bp, Homo sapiens
  chr8:3881023-3881054
  hypo
tctaattacaggcatacgcttggctctgtgc

SEQ ID NO: 75553 - DNA, 43 bp, Homo sapiens
  chr8:4123573-4123616
  hypo
tgatactgatcacctgcccaccgcacatagactcaccaggcat

SEQ ID NO: 75554 - DNA, 28 bp, Homo sapiens
  chr8:5888100-5888128
  hypo
acagagcgagactccatctcaaaaaaaa

SEQ ID NO: 75555 - DNA, 30 bp, Homo sapiens; identical to SEQ ID NO: 22204
  chr8:5908962-5908992
  hypo

SEQ ID NO: 75556 - DNA, 30 bp, Homo sapiens
  chr8:6081550-6081580
  hypo
ttctgacagcttgtgcggctggataatgag

SEQ ID NO: 75557 - DNA, 43 bp, Homo sapiens
  chr8:6302321-6302364
  hypo
cacatggctcccattcacctccgaaggaaaaatgcaagagaaa

SEQ ID NO: 75558 - DNA, 377 bp, Homo sapiens
  chr8:6313798-6314175
  hypo
cctgctctacaatggcgttgcgcactgtgactccactgcagcctgcgggacctgctcagcgcgctgcctcccaggggtggggcccttcctagaacgctcgcaacactgtggctgagtttgtgttttgcgtcccagtttctcagtcttcttcctactgctacatggccgcttgacctagttcatttggaaagaaataaagaaccagtttcctttgcatctactaccgttcccgtgcctctcctgctgatgcgtcgcatggcaccacagctctgttctgtgccctcccgctttactgaccctttaccctctgccagtgtctgcccagggaagccgtggtacctctcatctctattggtactctacgttgtaccatgtct

SEQ ID NO: 75559 - DNA, 31 bp, Homo sapiens
  chr8:6323427-6323458
  hypo
actcaattttatctatcgatccatccatcca

SEQ ID NO: 75560 - DNA, 71 bp, Homo sapiens
  chr8:6345658-6345729
  hypo
ggctcctgcaggctgcggcagcgtggcctctggccgctgggagcatgggaagcaggcgctgcggtctaggt

SEQ ID NO: 75561 - DNA, 39 bp, Homo sapiens; identical to SEQ ID NO: 22205
  chr8:6361544-6361583
  hypo

SEQ ID NO: 75562 - DNA, 170 bp, Homo sapiens
  chr8:6400934-6401104
  hypo
atggatgcaaacacacatttccgtgctctgcagcaacttgagactcctgtgagcaaaacgcactgacgggcaatgtgcgtgggtcgtggggagcatccagctcccatctgcggaataaacccgcccaaaccatagggaaaagcgctgtcgtataaggccaggggattttc

SEQ ID NO: 75563 - DNA, 342 bp, Homo sapiens
  chr8:6414546-6414888
  hypo
cctaggaggggtgggcggggtcatatggtgttcactcacttacgctaatgaactgagaaataacgcacttctgcccaaattcatgttcattcacactcctctcagcagttttctgcagtcttcccagccccacggaaaattctgcttttgtcagaggaggggatatgcgtgctttcccgtgtttgctttaccgctgggcaatccatacaaggctactaaactgcagagggtactggtgttagcatgccccgtgtttataagggacttaaaaaaatatacaggcttgcatccaccatacctaccatacttgtgtactagagatattctcggggcaaaatgagg

SEQ ID NO: 75564 - DNA, 263 bp, Homo sapiens
  chr8:6434437-6434700
  hypo
cagataaaagcaatggcgcctcctttgaaatctgagagacgcagggccctgcccattctgcggaattccttctccctgctgcctgctgtgaggaggccccctttgccacggaacctgaaattcctgccactggaattacgctctggacaagcggcaagatactcctttcagtcccagccactgggttcctgctgcacaggaggccagggtgctgtgaacctgctctcagccccgggcaaagggaatctcgttaatccaggtgg

SEQ ID NO: 75565 - DNA, 103 bp, Homo sapiens
  chr8:6456167-6456270
  hypo
gaagcaaaacctctcgtgtgagccggcgggcggcttcacgacaggcgtgagaaggccatggccctgtgtgggtgaggaagcgcagtgcggctcccccctgcgt

SEQ ID NO: 75566 - DNA, 160 bp, Homo sapiens; identical to SEQ ID NO: 22208
  chr8:6465691-6465851
  hypo

SEQ ID NO: 75567 - DNA, 30 bp, Homo sapiens
  chr8:6466802-6466832
  hypo
acccagagcatgagcgtgtgcccactatcg

SEQ ID NO: 75568 - DNA, 30 bp, Homo sapiens
  chr8:6470114-6470144
  hypo
ggcaccgctggttgcgggcctgctccggct

SEQ ID NO: 75569 - DNA, 30 bp, Homo sapiens
  chr8:6473580-6473610
  hypo
ttaggaaggtttcgcgtattccgtacttta

SEQ ID NO: 75570 - DNA, 30 bp, Homo sapiens
  chr8:6478536-6478566
  hypo
aacagcctggagcgcgctggattgaatgac

SEQ ID NO: 75571 - DNA, 30 bp, Homo sapiens
  chr8:6479831-6479861
  hypo
aggctggaaccccacgccgtgctaacacac

SEQ ID NO: 75572 - DNA, 81 bp, Homo sapiens
  chr8:6590043-6590124
  hypo
aaaagtaaatgctctttctcccgatttgattgtggcagcatggaggaatctatgtaaagcgcagtgccaaatttaacgaga

SEQ ID NO: 75573 - DNA, 31 bp, Homo sapiens; identical to SEQ ID NO: 22209
  chr8:6594590-6594621
  hypo

SEQ ID NO: 75574 - DNA, 24 bp, Homo sapiens
  chr8:6619645-6619669
  hypo
tccgtattaaaaaaaaaaaaaaaa

SEQ ID NO: 75575 - DNA, 348 bp, Homo sapiens
  chr8:6630597-6630945
  hypo
aggagcagcgcctgcgttcatccacgctgggtgaaaggtaagaattcagggttacatgcgtgaaggggaaagcaagcgggaagcccttagcattcaagcccctgagctctggtgttgtccacccctgggggctgcctggtggcaggacggcacttcacgaggggagatggaccccagtgggaaccacactcaatccctctacgcccaggccgctgtcagacactggagtcctccgcacagtcctgcagccggaagcacacgctgccagtatcccctccctcccactcccagcctacagacaagcgcatctctgctgcattcatcgccgcacacgccctaaaaatgtcc

SEQ ID NO: 75576 - DNA, 30 bp, Homo sapiens; identical to SEQ ID NO: 22212
  chr8:6633001-6633031
  hypo

SEQ ID NO: 75577 - DNA, 30 bp, Homo sapiens
  chr8:6634817-6634847
  hypo
cagaacgatcaccagcgattccgcaggcac

SEQ ID NO: 75578 - DNA, 230 bp, Homo sapiens; identical to SEQ ID NO: 22213
  chr8:6636291-6636521
  hypo

SEQ ID NO: 75579 - DNA, 20 bp, Homo sapiens
  chr8:6636747-6636767
  hypo
gctacgaggctgaggcggga

SEQ ID NO: 75580 - DNA, 103 bp, Homo sapiens
  chr8:6637650-6637753
  hypo
agcagcaacaactacagacaccgcacgcatgtgcgtcctgctcacgggaacgggtccgtggttttgtcctgtacaggttctcgggaggacagtgtcactgccc

SEQ ID NO: 75581 - DNA, 94 bp, Homo sapiens; identical to SEQ ID NO: 22215
  chr8:6707718-6707812
  hypo

SEQ ID NO: 75582 - DNA, 30 bp, Homo sapiens; identical to SEQ ID NO: 22216
  chr8:6756715-6756745
  hypo

SEQ ID NO: 75583 - DNA, 78 bp, Homo sapiens
  chr8:8102809-8102887
  hypo
atgtgtgatgacctcttgatacggaaggcagaaagaaattatttgggcggatagtgatggtaaaagagtcctcgacaa

SEQ ID NO: 75584 - DNA, 37 bp, Homo sapiens
  chr8:8122016-8122053
  hypo
gtgagccactgcgcccggcccctctctcctaatttca

SEQ ID NO: 75585 - DNA, 548 bp, Homo sapiens
  chr8:8176210-8176758
  hypo
tttggggtgccgcccggcttctgcttggccttcaaaaagttgctgatgatgagccggggcagctgcttctcccggggcccttccggggaggcggggccggctgcggggctgagagtgccaccagcaggcggggcggcagaggagcagggaggcgcggcggcggcgggggcgggagccggggcgggggcgggcccggggccggcctggagggtgcagtgcaccagcagcaggttctccaggcacaggtcccggtggatgatcccgtgctccttcaggtgctccagcccgttgcagagttgcagaagcaggaagcacacgcgccgctcgtacgcctcgggctccgcctggtggctggccgccgagtcccgcacgaagtcggaggcggtctgatgtggcacctctcgggtgatgaccaccacgcagtcctgctcctgggcaggggggtgtgtgggcagggcaggcacagggtccttgggcgcgtcgggggagctgagcatgctggacggcaccgaggcgacgaagtggccgcagtcctgctggatgttaaa

SEQ ID NO: 75586 - DNA, 30 bp, Homo sapiens; identical to SEQ ID NO: 45069
  chr8:8217417-8217447
  hypo

SEQ ID NO: 75587 - DNA, 30 bp, Homo sapiens
  chr8:8239128-8239158
  hypo
caccagctggtggtcgctccgcaggcagaa

SEQ ID NO: 75588 - DNA, 31 bp, Homo sapiens; identical to SEQ ID NO: 45070
  chr8:8313040-8313071
  hypo

SEQ ID NO: 75589 - DNA, 31 bp, Homo sapiens; identical to SEQ ID NO: 22218
  chr8:8436500-8436531
  hypo

SEQ ID NO: 75590 - DNA, 31 bp, Homo sapiens
  chr8:8437500-8437531
  hypo
ccattatccatcttggcgagtaccacaaagg

SEQ ID NO: 75591 - DNA, 158 bp, Homo sapiens
  chr8:8456540-8456698
  hypo
gccaaatatactactacgactacgaccgttactactgctaataataataataacgactgctaatattcatatagaactacgccagatatttaacatatattatttcactcttataaaaggggaaagattggctgggcgtggtggctcatgtctgcagt

SEQ ID NO: 75592 - DNA, 283 bp, Homo sapiens
  chr8:8560672-8560955
  hypo
ggcctacaccaactcggtggacgtcctcgacggggaggggtgggagtcccaggacgctccctcgtgcagcacccacccctgcgacagctcgctgccctgcgactccgacctctagacgcttgtagagcctggggggcgccgggtggcaaaggactcacccccgcacaggcccgcctggcttcgagttggaacccggacacttgcccctcactggtgtggatggaaatctgcctttcgtgggaccaaacaggactccttggacgattagttcaggttgggtttg

SEQ ID NO: 75593 - DNA, 26 bp, Homo sapiens
  chr8:8624330-8624356
  hypo
gagggagactccgtctcaaaaaaaaa

SEQ ID NO: 75594 - DNA, 40 bp, Homo sapiens; identical to SEQ ID NO: 22220
  chr8:8634036-8634076
  hypo

SEQ ID NO: 75595 - DNA, 40 bp, Homo sapiens; identical to SEQ ID NO: 22221
  chr8:8634315-8634355
  hypo

SEQ ID NO: 75596 - DNA, 160 bp, Homo sapiens
  chr8:8639464-8639624
  hypo
gcgggatgcagccgtagggccagccacacctctcccacgtgggacgcacctcttgtgacacttcttttggaaattctagttgcctcctgctttcctctgttctgttggcaaaagtggctttgaattctgcacaccccacggttctacctgccttgtcagg

SEQ ID NO: 75597 - DNA, 216 bp, Homo sapiens; identical to SEQ ID NO: 45071
  chr8:8639884-8640100
  hypo

SEQ ID NO: 75598 - DNA, 156 bp, Homo sapiens
  chr8:8642144-8642300
  hypo
acaaaagaagtaaaagagtagcgagtaccagcaactcactcttcttgtctgaggctggcgagaagcagtcagttttatacattttcgatcaacccacggaggaggcaaatgtaaacagagttttttacactctccgaaaaacatgttactactgta

SEQ ID NO: 75599 - DNA, 201 bp, Homo sapiens
  chr8:8643102-8643303
  hypo
tagttatggaacagcaatgaacgtcagtcgatccctctttcacatttaacagaactgaaatctgagtgctctaaatactgccacctgtactgtaactatggcttatatgtgcacggaaaacaaaatccctgagaagccattcgactttttttttttttttttcttttcttcaagtagcgcgctccttggaggatcacagtt

SEQ ID NO: 75600 - DNA, 21 bp, Homo sapiens
  chr8:8644604-8644625
  hypo
ttttgagacagagtctcgctc

SEQ ID NO: 75601 - DNA, 196 bp, Homo sapiens
  chr8:8651863-8652059
  hypo
tgccagctatcctaaccgatccccccaaatctcccgcttccaatccactgtcaaccacccatgaatgggaccttccccggagcctggcccggcctccacatgagtttgtttttgtccatgtgttcatggatgtaaactgtgggtgcttaaggcggtgaaggtgggggaacactgggcagctcgagcacaggcttca

SEQ ID NO: 75602 - DNA, 30 bp, Homo sapiens
  chr8:8652332-8652362
  hypo
ctggcgccatgtaccgccgcttacccatga

SEQ ID NO: 75603 - DNA, 25 bp, Homo sapiens
  chr8:8667576-8667601
  hypo
aataatgatcagaagccaggccggg

SEQ ID NO: 75604 - DNA, 77 bp, Homo sapiens
  chr8:8669104-8669181
  hypo
cctttgggtaactaacgtccacctgacgcatactagctgatgctgcgtctcctctgcagggacgtaagctccacaag

SEQ ID NO: 75605 - DNA, 130 bp, Homo sapiens; identical to SEQ ID NO: 22225
  chr8:8673404-8673534
  hypo

SEQ ID NO: 75606 - DNA, 140 bp, Homo sapiens; identical to SEQ ID NO: 22226
  chr8:8680436-8680576
  hypo

SEQ ID NO: 75607 - DNA, 30 bp, Homo sapiens; identical to SEQ ID NO: 22227
  chr8:8680889-8680919
  hypo

SEQ ID NO: 75608 - DNA, 201 bp, Homo sapiens; identical to SEQ ID NO: 22228
  chr8:8681181-8681382
  hypo

SEQ ID NO: 75609 - DNA, 31 bp, Homo sapiens; identical to SEQ ID NO: 22229
  chr8:8682667-8682698
  hypo

SEQ ID NO: 75610 - DNA, 31 bp, Homo sapiens; identical to SEQ ID NO: 22230
  chr8:8687219-8687250
  hypo

SEQ ID NO: 75611 - DNA, 30 bp, Homo sapiens
  chr8:8689136-8689166
  hypo
tttttttgagacagtctcactcggtcgccc

SEQ ID NO: 75612 - DNA, 30 bp, Homo sapiens; identical to SEQ ID NO: 22231
  chr8:8689405-8689435
  hypo

SEQ ID NO: 75613 - DNA, 160 bp, Homo sapiens; identical to SEQ ID NO: 22232
  chr8:8690236-8690396
  hypo

SEQ ID NO: 75614 - DNA, 175 bp, Homo sapiens; identical to SEQ ID NO: 22233
  chr8:8692862-8693037
  hypo

SEQ ID NO: 75615 - DNA, 20 bp, Homo sapiens
  chr8:8696336-8696356
  hypo
atccacgtaccttcaagctt

SEQ ID NO: 75616 - DNA, 31 bp, Homo sapiens
  chr8:8698201-8698232
  hypo
tccattagttagatgccgttggttcttagaa

SEQ ID NO: 75617 - DNA, 106 bp, Homo sapiens; identical to SEQ ID NO: 22234
  chr8:8698609-8698715
  hypo

SEQ ID NO: 75618 - DNA, 106 bp, Homo sapiens; identical to SEQ ID NO: 22235
  chr8:8709658-8709764
  hypo

SEQ ID NO: 75619 - DNA, 121 bp, Homo sapiens
  chr8:8712565-8712686
  hypo
tggtcctccctcagtatatatggggggtttggttctagggcccccacccccagcataccaaaattattttttatttcttgttgagagaggtctcgccatgtcgcccaggctggtctcgaac

SEQ ID NO: 75620 - DNA, 79 bp, Homo sapiens
  chr8:8712745-8712824
  hypo
agccaccacactcagccgacatcctgtattttatctggcaatcttaacattgtattaggacaagcggaaaacagatgaa

SEQ ID NO: 75621 - DNA, 30 bp, Homo sapiens; identical to SEQ ID NO: 22238
  chr8:8725340-8725370
  hypo

SEQ ID NO: 75622 - DNA, 526 bp, Homo sapiens
  chr8:8731214-8731740
  hypo
aaataaaaacaaccacgcagcgcgggaagatttttgtttagaaaacagatgggacagaaaggcagatgcaatgttttgagtcaatgagatacagttcgttcttaattatatttcattgatttcttacatggacagaacatcattcttgctgccactgttttattttgatcagcggtatatctatctgtaaacatgtacaatttgtaattattgctatgtctaaacactgcatcacgtgtaatggctgaattaagctgtgaaatgcgtaattatgctgaaaacaatggtgttccaatacacatcaccaaagccaatttaaaaaaattaccttgtttcaaatcacaaagcgaagccttcataaccctcgaggctttttttaggtcccaccactttgatttagagatttgtctttttctaattgcatctcaagagtgttccgagcacagagagggattattaaccctgaaggaaataaaactgagtatttcttacacctctggaaggtggagaacgtacttagtttaac

SEQ ID NO: 75623 - DNA, 28 bp, Homo sapiens
  chr8:8744351-8744379
  hypo
gtggccaagcctagtggctcacgcttat

SEQ ID NO: 75624 - DNA, 1088 bp, Homo sapiens
  chr8:8748205-8749293
  hypo
tactgatggagctgggtggcccggagcagttcctggctgggggtggaccgcgccatgggcggggagctttccccctccgccttgccctctccactggtccctaggagcagcttatgcagcagcaaagagggatccctctggaagaagacattgaggatgtcgatgaggcgggtgaggttgtggaagacgtgctccttgagagccggactgtcctcaaagtagagtagcttgccgctctcatgcaggtaggagagggcactctgcagtcggtcctcggtcagacccgcctgcaggcccaagcgcgccgagtcccaccagcttagccacagtcgctgggcctgaggtggctggaaatgcagttcctccagcacctgccaggatcgaggcagtactctgtgtaagttggggaagatctctcggtgctcagcaactgacagcaacttgtcccgaaggcgtcgtaagtggcgcgggtccctgcagctaacaggcaacacgggggagaggatctgcagccggtggttgagcaggtattgaaaatgggccttgcgccgtcgaaggttcttgtccgaaacgccatagtaggctgcgtgggggctggcagagcgcagctcgaagtcccgggccagtgcctcgtccaccaccttggccaagcggctcagtccctccgcgtcgtgcttctcctgcagggcgatctggcggtgaatgtccagacatttctcctccagctcacgctctccgcacaggtctgcgtgggtgcccacgatgcacaccaccgcgtggggcactctcgccccgacccgatgcaagaaggagcccacggtggtaggaaagtggcgaggctcataggtggccaagttgaccaccagcacgtatagggcccctggggacaggaagaagggctggatcacctcataactttcatccccagctaagtcatacacgatgaaccgcaggccccgggaggcatcggccgtccagctggtcacctcgatgcccttgctcacagggggaggtgacggtgggtagcacttctccttgtcccctcctcctgggcatccctccactctctcctcggtgaggcagtggcg

SEQ ID NO: 75625 - DNA, 376 bp, Homo sapiens; identical to SEQ ID NO: 45072
  chr8:8750283-8750659
  hypo

SEQ ID NO: 75626 - DNA, 31 bp, Homo sapiens
  chr8:8768214-8768245
  hypo
acatatctattcacatcggtctctctgacat

SEQ ID NO: 75627 - DNA, 158 bp, Homo sapiens
  chr8:8780058-8780216
  hypo
ccgcacccagccgggtgtttctttacagcaatcagaaaatagactaatacagggacaggtgcctgacatggaaggaacatccatcttggactacatggagtgaaaagcaagggctgaatacgatggaacaagaagacggaagacgcctgtcttctcag

SEQ ID NO: 75628 - DNA, 30 bp, Homo sapiens
  chr8:8799027-8799057
  hypo
aaattagaattcttcgatgagtgagtgata

SEQ ID NO: 75629 - DNA, 31 bp, Homo sapiens
  chr8:8806386-8806417
  hypo
gaaggctcccgtgtcacgtaaaacttatact

SEQ ID NO: 75630 - DNA, 31 bp, Homo sapiens; identical to SEQ ID NO: 6091
  chr8:8820809-8820840
  hypo

SEQ ID NO: 75631 - DNA, 118 bp, Homo sapiens; identical to SEQ ID NO: 45074
  chr8:8821040-8821158
  hypo

SEQ ID NO: 75632 - DNA, 31 bp, Homo sapiens
  chr8:8842048-8842079
  hypo
gtgtgtcttccatctccgttaatgagaggtc

SEQ ID NO: 75633 - DNA, 33 bp, Homo sapiens; identical to SEQ ID NO: 22242
  chr8:8850262-8850295
  hypo

SEQ ID NO: 75634 - DNA, 31 bp, Homo sapiens; identical to SEQ ID NO: 22243
  chr8:8851528-8851559
  hypo

SEQ ID NO: 75635 - DNA, 117 bp, Homo sapiens
  chr8:8898497-8898614
  hypo
gcatacaaggtatagcgtaatgagaccgttttcagtgcagacagctgagcccccaggcacttgctccgctgagtgtttcagcgattacgctgcacttctgctcgcctgcctaaaacg

SEQ ID NO: 75636 - DNA, 30 bp, Homo sapiens
  chr8:8910800-8910830
  hypo
ataggcaagagccaccgcgcccagccagtg

SEQ ID NO: 75637 - DNA, 37 bp, Homo sapiens; identical to SEQ ID NO: 22245
  chr8:8922914-8922951
  hypo

SEQ ID NO: 75638 - DNA, 31 bp, Homo sapiens
  chr8:8926654-8926685
  hypo
agggttgtggggttaacggtttgaacatctt

SEQ ID NO: 75639 - DNA, 28 bp, Homo sapiens
  chr8:9487193-9487221
  hypo
ttgcttgtttgttttttgagacgaagtc

SEQ ID NO: 75640 - DNA, 30 bp, Homo sapiens; identical to SEQ ID NO: 22246
  chr8:9525662-9525692
  hypo

SEQ ID NO: 75641 - DNA, 30 bp, Homo sapiens; identical to SEQ ID NO: 22247
  chr8:9537307-9537337
  hypo

SEQ ID NO: 75642 - DNA, 875 bp, Homo sapiens; identical to SEQ ID NO: 45077
  chr8:9760513-9761388
  hypo

SEQ ID NO: 75643 - DNA, 14 bp, Homo sapiens
  chr8:9762675-9762689
  hypo
gttccgcacgccgg

SEQ ID NO: 75644 - DNA, 546 bp, Homo sapiens; identical to SEQ ID NO: 45080
  chr8:9762751-9763297
  hypo

SEQ ID NO: 75645 - DNA, 243 bp, Homo sapiens; identical to SEQ ID NO: 6094
  chr8:9763518-9763761
  hypo

SEQ ID NO: 75646 - DNA, 262 bp, Homo sapiens; identical to SEQ ID NO: 6095
  chr8:9763787-9764049
  hypo

SEQ ID NO: 75647 - DNA, 551 bp, Homo sapiens; identical to SEQ ID NO: 45083
  chr8:9764195-9764746
  hypo

SEQ ID NO: 75648 - DNA, 186 bp, Homo sapiens; identical to SEQ ID NO: 45085
  chr8:10058671-10058857
  hypo

SEQ ID NO: 75649 - DNA, 513 bp, Homo sapiens; identical to SEQ ID NO: 22251
  chr8:10261661-10262174
  hypo

SEQ ID NO: 75650 - DNA, 142 bp, Homo sapiens
  chr8:10283195-10283337
  hypo
gcccgtctcagcaggcggtgtcagccgcggagtgggtaggtcctctgaggacgatcacacctgtgggcaagagcacacccgggctctgggccaagtaagcctgtgaatcccactggcgttgtgaacccggagcccttgggat

SEQ ID NO: 75651 - DNA, 233 bp, Homo sapiens
  chr8:10466916-10467149
  hypo
acgtcctgctgcagctcggccgccatctggtccagcagatcattgtcctgcaggccccagcgtgctcggagctcagccaccgcactggcaaggtgggccaggaaggccttctccgtcttcttcagtaacacggacacccagatggggtcgcagtccagagccgcgctgcaggccaccgaagagctcctctctgcagccccctgggtgggttgggcctgcgtgtgctcttggcc

SEQ ID NO: 75652 - DNA, 30 bp, Homo sapiens; identical to SEQ ID NO: 6097
  chr8:10587290-10587320
  hypo

SEQ ID NO: 75653 - DNA, 114 bp, Homo sapiens; identical to SEQ ID NO: 45087
  chr8:10587893-10588007
  hypo

SEQ ID NO: 75654 - DNA, 27 bp, Homo sapiens
  chr8:10652911-10652938
  hypo
tctctctcccccacaccaagacggagt

SEQ ID NO: 75655 - DNA, 203 bp, Homo sapiens; identical to SEQ ID NO: 22254
  chr8:10683499-10683702
  hypo

SEQ ID NO: 75656 - DNA, 137 bp, Homo sapiens
  chr8:10694852-10694989
  hypo
gggagggctctggaagcttgacgcctggcttagcctggactttgccccgtgcatcttttccttttgccggctttgctctacatccttttgctgtaataaatcttagcagtgagtgcgactatatgctgagtcctgtg

SEQ ID NO: 75657 - DNA, 31 bp, Homo sapiens; identical to SEQ ID NO: 22255
  chr8:10695375-10695406
  hypo

SEQ ID NO: 75658 - DNA, 43 bp, Homo sapiens
  chr8:10798363-10798406
  hypo
ctgattctttccaccagatatcgatcagaagggcagccccttc

SEQ ID NO: 75659 - DNA, 1160 bp, Homo sapiens; identical to SEQ ID NO: 45091
  chr8:10873135-10874295
  hypo

SEQ ID NO: 75660 - DNA, 36 bp, Homo sapiens; identical to SEQ ID NO: 45094
  chr8:11058130-11058166
  hypo

SEQ ID NO: 75661 - DNA, 622 bp, Homo sapiens; identical to SEQ ID NO: 45095
  chr8:11058198-11058820
  hypo

SEQ ID NO: 75662 - DNA, 135 bp, Homo sapiens; identical to SEQ ID NO: 45096
  chr8:11059039-11059174
  hypo

SEQ ID NO: 75663 - DNA, 88 bp, Homo sapiens
  chr8:11163742-11163830
  hypo
gaggtgcaaggaggacgagaagctgataaatgctaccctcagggctggaaagcgtggctacatcattgacacccgatccctgaacgtg

SEQ ID NO: 75664 - DNA, 137 bp, Homo sapiens
  chr8:11182857-11182994
  hypo
cctgagaagacactcgttaaacattgcatcggagagctgcctttgataaatgtgctgttaaacacttgaatgaagagaatggtggcagaatgagtgagcaagcagattgccccagaggggccggtaataatcacgtg

SEQ ID NO: 75665 - DNA, 895 bp, Homo sapiens; identical to SEQ ID NO: 6102
  chr8:11204526-11205421
  hypo

SEQ ID NO: 75666 - DNA, 264 bp, Homo sapiens; identical to SEQ ID NO: 45099
  chr8:11205445-11205709
  hypo

SEQ ID NO: 75667 - DNA, 30 bp, Homo sapiens
  chr8:11302015-11302045
  hypo
ctcatccaggtgcccgagggcatttccggg

SEQ ID NO: 75668 - DNA, 61 bp, Homo sapiens
  chr8:11366264-11366325
  hypo
catctctccttctgacccaaacgcaactgtgatgggggccggtcctgccctttggggccat

SEQ ID NO: 75669 - DNA, 30 bp, Homo sapiens; identical to SEQ ID NO: 22260
  chr8:11474041-11474071
  hypo

SEQ ID NO: 75670 - DNA, 253 bp, Homo sapiens; identical to SEQ ID NO: 45106
  chr8:11550352-11550605
  hypo

SEQ ID NO: 75671 - DNA, 67 bp, Homo sapiens; identical to SEQ ID NO: 22261
  chr8:11612346-11612413
  hypo

SEQ ID NO: 75672 - DNA, 31 bp, Homo sapiens
  chr8:11637202-11637233
  hypo
cagaaggaaggggctgcggacccaaagcagg

SEQ ID NO: 75673 - DNA, 30 bp, Homo sapiens
  chr8:11644629-11644659
  hypo
caggcaccaagaggcggtcgtggagcaggg

SEQ ID NO: 75674 - DNA, 30 bp, Homo sapiens
  chr8:11646795-11646825
  hypo
aacagtgtgggcaccggggcaaggagggaa

SEQ ID NO: 75675 - DNA, 141 bp, Homo sapiens
  chr8:11647193-11647334
  hypo
aaatgtaagtggagaaaggaacgtccaaggagaagcgggctgtcgctatggtgaatcatgcagagatgaaggcgggacgatggagcagtggccccttgggcttggcaggtgatcaaattcgaggtcatgatgaccttcagg

SEQ ID NO: 75676 - DNA, 42 bp, Homo sapiens
  chr8:11657163-11657205
  hypo
tagcacttgtaggctgggagccgtggctcacgcctgtaatcc

SEQ ID NO: 75677 - DNA, 30 bp, Homo sapiens
  chr8:11701704-11701734
  hypo
gaagtcccaagagtcgcaagaacatgcagt

SEQ ID NO: 75678 - DNA, 31 bp, Homo sapiens
  chr8:11704539-11704570
  hypo
ccatcagccatcagcacgcacctgacttgta

SEQ ID NO: 75679 - DNA, 246 bp, Homo sapiens
  chr8:11705916-11706162
  hypo
ataccagaccaggctacgagtgcccttccgggtagaacactgattctcaactgagcagacgctaaacttccctaaggtacttaaaaacaccaccagttctctgaaatgagaatcgccagtgattcccatttaactagttaggggagaagcccatgcatttttttaagccctcaggcatttcggatctgcagccgccagtgaacaccgctactgcggaaccaaggcgaggctgcaggcagctggagc

SEQ ID NO: 75680 - DNA, 226 bp, Homo sapiens
  chr8:11706507-11706733
  hypo
agggtctctcagcactaaacccgctgtggaagcacagcctgactcacccgtccccacacatgctgccacagcatgtgagcaggtcctccgccgacacctccacgctgacgtgcgcattggtgtggatgcagatccggtcagagatggcttccacagccccgaaggcctgcaggaacgagccccaccgggtgaggctgccatgtccgggctgggccctctgcagcag

SEQ ID NO: 75681 - DNA, 161 bp, Homo sapiens
  chr8:11708329-11708490
  hypo
cccactttctctccagcgcttccccgccagccagcagggccttacccagcaggagccacaggagccctggtctctgatctctttgatggtgggacactgtggccattgttcccgtgcatcgaagcttgcaggcagcttcaggtcctcggtaaacataactc

SEQ ID NO: 75682 - DNA, 152 bp, Homo sapiens
  chr8:11711012-11711164
  hypo
acacctctctgttatgtgggtcgagggctcacacacacaggggcaccgtctcgggcatcagtggggacccccatgctcgtcctggcccaggcggagaactcttaaggagctgaggtgtctatgggatccccgcccccctgcccgaagcacgc

SEQ ID NO: 75683 - DNA, 162 bp, Homo sapiens; identical to SEQ ID NO: 6115
  chr8:11726003-11726165
  hypo

SEQ ID NO: 75684 - DNA, 30 bp, Homo sapiens; identical to SEQ ID NO: 22265
  chr8:11728543-11728573
  hypo

SEQ ID NO: 75685 - DNA, 226 bp, Homo sapiens
  chr8:12623674-12623900
  hypo
tgggtgtcagcctgggaggcccggtccagtgcgcccccacatctgcccgctctcgatgggatgcgcacagtctcgatcctggcaccagtatcgacctcagctggcaccaaaggcctgaacagagggtaatcggtgtccccattccagcccaagccccgccttcctgggtgttctggagcaaaatgggggcctgcgcaggagccccgggttccagggagacctggct

SEQ ID NO: 75686 - DNA, 43 bp, Homo sapiens
  chr8:12869587-12869630
  hypo
cttggaccagctaacgtgccttggttgcgccagtgtactgagc

SEQ ID NO: 75687 - DNA, 212 bp, Homo sapiens
  chr8:12950149-12950361
  hypo
gttgagatggaagagggaaggcgctaagcacacggccaggttggttggggtcatctggttttcttttacggctgctgtgacatcgctcaggaaataaagcagggtctgcagaacctcccggttctcgtcaggcagcagcatgatggcagccttgatggcctgcaggcgctggtccttgggcacatctgcacgacaccagcactttctccatc

SEQ ID NO: 75688 - DNA, 30 bp, Homo sapiens; identical to SEQ ID NO: 22268
  chr8:12952489-12952519
  hypo

SEQ ID NO: 75689 - DNA, 347 bp, Homo sapiens
  chr8:12957815-12958162
  hypo
ttgagcttcaggctctccatccgtttcagcagactgcgcgtcttggacttggcagttttttcgtggcctttcatgctgaagctgaagctggacagttccttgggagagggcaggctgccgaaagagtcgtcattgcctgccaagttgctggaggagcaaacgctgatgacggagttagtccggggggtggcagcatcctcgctggggggcgcgtggctggggaggctgccagtgctgctgaggctgcggacggaagacacctcctggcgctcgctgaggtccatcagcgtgcctccggggctggggccgtccttcgggtgggagtcgtctggggacccagggaccag

SEQ ID NO: 75690 - DNA, 34 bp, Homo sapiens
  chr8:13189948-13189982
  hypo
tttttttttaagatggggtctcgctgttttgccc

SEQ ID NO: 75691 - DNA, 30 bp, Homo sapiens; identical to SEQ ID NO: 6119
  chr8:13624575-13624605
  hypo

SEQ ID NO: 75692 - DNA, 1202 bp, Homo sapiens; identical to SEQ ID NO: 45128
  chr8:16884157-16885359
  hypo

SEQ ID NO: 75693 - DNA, 175 bp, Homo sapiens; identical to SEQ ID NO: 45131
  chr8:17434526-17434701
  hypo

SEQ ID NO: 75694 - DNA, 31 bp, Homo sapiens; identical to SEQ ID NO: 22272
  chr8:17453694-17453725
  hypo

SEQ ID NO: 75695 - DNA, 31 bp, Homo sapiens
  chr8:17489660-17489691
  hypo
acctccctcctcctcccgatcctttctactt

SEQ ID NO: 75696 - DNA, 35 bp, Homo sapiens
  chr8:17574338-17574373
  hypo
aggcgtgagccaccgcacctagcctgtttgtttcc

SEQ ID NO: 75697 - DNA, 28 bp, Homo sapiens
  chr8:17648491-17648519
  hypo
tgggggcggggagaagttttatcccatt

SEQ ID NO: 75698 - DNA, 30 bp, Homo sapiens
  chr8:17651536-17651566
  hypo
tgaggaaaaccaaacacaggccgggcacag

SEQ ID NO: 75699 - DNA, 30 bp, Homo sapiens
  chr8:17769550-17769580
  hypo
tatttggcgctatagcgagaactgtaagcc

SEQ ID NO: 75700 - DNA, 100 bp, Homo sapiens
  chr8:17910134-17910234
  hypo
gtcacagagcccggccattttcttaacgtgtttttataacctattttctatttgaaattgttatacacaattcttggccgagactttatgatctcctcaa

SEQ ID NO: 75701 - DNA, 30 bp, Homo sapiens; identical to SEQ ID NO: 45137
  chr8:18272865-18272895
  hypo

SEQ ID NO: 75702 - DNA, 37 bp, Homo sapiens
  chr8:18381896-18381933
  hypo
tgcacatgctctgtttcgtgtacgtgccaagtctcaa

SEQ ID NO: 75703 - DNA, 38 bp, Homo sapiens
  chr8:18474404-18474442
  hypo
ttacaggcgtgagccaccgcgcccggccatcttcctct

SEQ ID NO: 75704 - DNA, 43 bp, Homo sapiens
  chr8:18541411-18541454
  hypo
tggcactctggacactattcacgccaatcattttcgaaggtca

SEQ ID NO: 75705 - DNA, 30 bp, Homo sapiens; identical to SEQ ID NO: 45138
  chr8:18671751-18671781
  hypo

SEQ ID NO: 75706 - DNA, 23 bp, Homo sapiens
  chr8:18699953-18699976
  hypo
atggctttggccgggcgcggtgg

SEQ ID NO: 75707 - DNA, 31 bp, Homo sapiens
  chr8:18797737-18797768
  hypo
tgtgaaccactgctctcgaccaatggtcttc

SEQ ID NO: 75708 - DNA, 29 bp, Homo sapiens
  chr8:18867070-18867099
  hypo
ccaggaaaatatcactcgaaataagcgtt

SEQ ID NO: 75709 - DNA, 981 bp, Homo sapiens; identical to SEQ ID NO: 45139
  chr8:18870316-18871297
  hypo

SEQ ID NO: 75710 - DNA, 30 bp, Homo sapiens; identical to SEQ ID NO: 22276
  chr8:19034822-19034852
  hypo

SEQ ID NO: 75711 - DNA, 78 bp, Homo sapiens; identical to SEQ ID NO: 22277
  chr8:19068612-19068690
  hypo

SEQ ID NO: 75712 - DNA, 246 bp, Homo sapiens
  chr8:19094993-19095239
  hypo
gcggctcgtccttccccggcccggctgctgaggtggcggtgactgtggggcagccgggccgtgcacgtctggagaccgcccgggcgctggccgcggctggaccccgggagccgaaccgcgggagggcgctgtgcggagccggtggtggcctgctcgacggaggtggccgccgtcaccctactggtcctgtgatacgtgcccaaggactgcccgggagccagacctgccagcgggtgcaggacacca

SEQ ID NO: 75713 - DNA, 36 bp, Homo sapiens
  chr8:19192505-19192541
  hypo
tcctccagggcaggcacggtggctcatgcctgtaat

SEQ ID NO: 75714 - DNA, 292 bp, Homo sapiens; identical to SEQ ID NO: 22279
  chr8:19690582-19690874
  hypo

SEQ ID NO: 75715 - DNA, 30 bp, Homo sapiens; identical to SEQ ID NO: 22280
  chr8:19706753-19706783
  hypo

SEQ ID NO: 75716 - DNA, 786 bp, Homo sapiens; identical to SEQ ID NO: 6133
  chr8:19796822-19797608
  hypo

SEQ ID NO: 75717 - DNA, 412 bp, Homo sapiens; identical to SEQ ID NO: 6134
  chr8:19797677-19798089
  hypo

SEQ ID NO: 75718 - DNA, 30 bp, Homo sapiens; identical to SEQ ID NO: 22283
  chr8:20083596-20083626
  hypo

SEQ ID NO: 75719 - DNA, 21 bp, Homo sapiens
  chr8:20084212-20084233
  hypo
ccaccgcgcccggcctgttct

SEQ ID NO: 75720 - DNA, 30 bp, Homo sapiens
  chr8:20090210-20090240
  hypo
ggtcacaatccagccgggcgtggtggctca

SEQ ID NO: 75721 - DNA, 198 bp, Homo sapiens
  chr8:20107411-20107609
  hypo
tctccttctcctccttccacacgagccgctcatgctggaagcccgaggacatctggtcatggccttgccgctcctcccgcagctcggcccgcagccgctccagctcccgctgcagggcagggacgtcctcggggaaggtgggcggccccatgtcgcgggccagggcggcctgggcccgcagctcctgcagctcctgct

SEQ ID NO: 75722 - DNA, 198 bp, Homo sapiens; identical to SEQ ID NO: 22285
  chr8:20110439-20110637
  hypo

SEQ ID NO: 75723 - DNA, 635 bp, Homo sapiens; identical to SEQ ID NO: 45149
  chr8:20160990-20161625
  hypo

SEQ ID NO: 75724 - DNA, 159 bp, Homo sapiens
  chr8:20793600-20793759
  hypo
ttcaaattccatgtgtcgcaaactattatatcaccttgccttctgtcctcacctccctttctgctttgtgtgtagcacaattgcattttgaattaagttgttttttgtagtcctttctgtttgcctgtatcaaatgttaccggaaataaaatgctcaag

SEQ ID NO: 75725 - DNA, 196 bp, Homo sapiens
  chr8:21590920-21591116
  hypo
cattcttccccagcatcggcttagaatgaaaggtagaaacccatagtcccaccacggaggtgtcatcctgcaccccaagcctgatgatctgcccattccattctttgaggagagagagggcgaagggagagaaagccccagcccttcccgcattttaaacacctggcaggttatcccaggccgaataggacccgtg

SEQ ID NO: 75726 - DNA, 117 bp, Homo sapiens
  chr8:21608178-21608295
  hypo
gcaggatggtttgccggcggcgctcagcgcacgcctggtcttggcaggagcagaagagcatgcggtaggtgtactcgctgggcacccggtcgaagaactggcgcagggccttgtggc

SEQ ID NO: 75727 - DNA, 87 bp, Homo sapiens
  chr8:21624002-21624089
  hypo
tccctctgagcctaagctccccgagttagcgcggaagcctccagtcgcaggacgccccaaacacacgaaccaagtgcagtccacaca

SEQ ID NO: 75728 - DNA, 30 bp, Homo sapiens
  chr8:21764124-21764154
  hypo
tcctgagtctcaggccgggcacggtggctc

SEQ ID NO: 75729 - DNA, 200 bp, Homo sapiens
  chr8:21769797-21769997
  hypo
gccaggaggtacaggcgctccttggtctccaggaagaaggcactggtgtcccgggggctgctggcctctccgccggcctcggccacccgcaggcagtcactgaggcggatgaccttccgggcagcctcacaccgacgaggcttctccgggccctcctgcagctccagccgggccaaggcgcagtccgaccctccatacag

SEQ ID NO: 75730 - DNA, 30 bp, Homo sapiens
  chr8:21770270-21770300
  hypo
ggcagaaagcaacgccgggatgagcccaaa

SEQ ID NO: 75731 - DNA, 30 bp, Homo sapiens
  chr8:21802730-21802760
  hypo
cggccgggcgggggctgccccccaaggaat

SEQ ID NO: 75732 - DNA, 83 bp, Homo sapiens; identical to SEQ ID NO: 45153
  chr8:21868698-21868781
  hypo

SEQ ID NO: 75733 - DNA, 22 bp, Homo sapiens
  chr8:21868840-21868862
  hypo
cccgtctcgatttttcaaaaat

SEQ ID NO: 75734 - DNA, 125 bp, Homo sapiens; identical to SEQ ID NO: 45154
  chr8:21906318-21906443
  hypo

SEQ ID NO: 75735 - DNA, 30 bp, Homo sapiens; identical to SEQ ID NO: 45155
  chr8:21907630-21907660
  hypo

SEQ ID NO: 75736 - DNA, 31 bp, Homo sapiens; identical to SEQ ID NO: 22288
  chr8:21910413-21910444
  hypo

SEQ ID NO: 75737 - DNA, 30 bp, Homo sapiens
  chr8:21926934-21926964
  hypo
ggcggacagccggtcgcctggaatcatctc

SEQ ID NO: 75738 - DNA, 31 bp, Homo sapiens; identical to SEQ ID NO: 22289
  chr8:21931502-21931533
  hypo

SEQ ID NO: 75739 - DNA, 31 bp, Homo sapiens
  chr8:21932330-21932361
  hypo
cttcctcagagcttggcggctggagaggaga

SEQ ID NO: 75740 - DNA, 30 bp, Homo sapiens
  chr8:21939335-21939365
  hypo
gcaggggtgggaagcggccaggcagaaaga

SEQ ID NO: 75741 - DNA, 31 bp, Homo sapiens; identical to SEQ ID NO: 22290
  chr8:21940765-21940796
  hypo

SEQ ID NO: 75742 - DNA, 30 bp, Homo sapiens
  chr8:21948545-21948575
  hypo
atataggctatgtccgggcggtgtggttgg

SEQ ID NO: 75743 - DNA, 98 bp, Homo sapiens
  chr8:21959271-21959369
  hypo
acctttggacccccatgagcccgagcgacctttcttcgagggccacttcctccgagtgctgtttgaccgcatgtcccggattctggatcaggtagcta

SEQ ID NO: 75744 - DNA, 30 bp, Homo sapiens; identical to SEQ ID NO: 22291
  chr8:21960441-21960471
  hypo

SEQ ID NO: 75745 - DNA, 895 bp, Homo sapiens
  chr8:21961296-21962191
  hypo
aggggacagataagggaaggacgccccctgactccaggcccctgagcctggcgggaagtggctgcggcccaggcagccagtcctggtggtgttctccctgcatgccctccgtggctgggctgccaccccacccggcccgaatctgtcttgacctgcaggaatacacgggcggcgccaggcattacctcacagcgggactacacagttgctggctttgctcctgggcaaggaggagcaggccagagcctcttttgcttccttttcttgcccatgccgcttctagaagccaggcacaggttgccaagaggtgacacgaaacaggaggaaactcagtgacctctgcctctcccacattcctccccgcgggggaggacctcgccgctctgaagagcaccgtgcacatgtgggtgcacaaacgtgggtgttggtgtggacggggcgcagatctccgtggatgaactgcgtctggactcttagattcataaaatattcgagggtttgggagtcacagaccctcccctctcctcagtgcactttggcatttgcacggtgtcttccccggacagcacagcaataaatggtgtgattgcgtggacaccgtggctctgttcttggccaagtttccccaccttctgcccaggactccactgctaattcgggcccatcttcctccccaaggaagacaaattctttttctagcgctgcagcagggaggtggggtgggcggtaaacagacaggctctggcagtgcagatctgctgatcctcagcgcctgccaggagccagactcttggcggagcagtgccacttctgctgggctgacctgcagcggagagtctgcccaccccggagacaccatgagggaatggaccacgtgggagcatctgtgtgcaag

SEQ ID NO: 75746 - DNA, 31 bp, Homo sapiens; identical to SEQ ID NO: 22294
  chr8:21969268-21969299
  hypo

SEQ ID NO: 75747 - DNA, 30 bp, Homo sapiens; identical to SEQ ID NO: 22295
  chr8:21970258-21970288
  hypo

SEQ ID NO: 75748 - DNA, 30 bp, Homo sapiens; identical to SEQ ID NO: 45157
  chr8:21976724-21976754
  hypo

SEQ ID NO: 75749 - DNA, 44 bp, Homo sapiens
  chr8:21977901-21977945
  hypo
ctgggctggggaggtccgagggggctcagcgcctgcacctggcc

SEQ ID NO: 75750 - DNA, 226 bp, Homo sapiens
  chr8:21978252-21978478
  hypo
gaagaggtggaagccacgccgagggcaaggctggggctcctgcagccacagcaaagcccctgggggaggcagccggggccgcactggagagaggggcaggcccaggcccttgcgcagacccgggccagctcgaagccccggccccagggctttctcctggatcttccgttccaccacctgtgcgataatgctgtccaggatgttggtgatgcggtcatcctgcaga

SEQ ID NO: 75751 - DNA, 31 bp, Homo sapiens
  chr8:21979170-21979201
  hypo
gttgtggagttgggggcgttttctgtgttga

SEQ ID NO: 75752 - DNA, 71 bp, Homo sapiens
  chr8:21981255-21981326
  hypo
gagtccatggtggcaacggctgcagcagcgtggaatgcctgggctgtcctctgtcacggctggcccttggc

SEQ ID NO: 75753 - DNA, 96 bp, Homo sapiens
  chr8:22005941-22006037
  hypo
gcacctccgagaagcgggtaccctcccagcgcaggatcttggagtcgccaatgtagcggctgaggcacaggtagctgtcgcggccggcacgaaagt

SEQ ID NO: 75754 - DNA, 82 bp, Homo sapiens
  chr8:22006312-22006394
  hypo
cggaaggcttctaggtcgttaggcttgcgcacgcgctgcgggtcaatgtcttgcagcctggtgaagcgcgtggtgttgggat

SEQ ID NO: 75755 - DNA, 30 bp, Homo sapiens
  chr8:22034375-22034405
  hypo
ctcccctgccgccccgcccccggcagcctg

SEQ ID NO: 75756 - DNA, 30 bp, Homo sapiens; identical to SEQ ID NO: 22298
  chr8:22034756-22034786
  hypo

SEQ ID NO: 75757 - DNA, 41 bp, Homo sapiens
  chr8:22052965-22053006
  hypo
ccaccacagaggtggacgagtgctctcggcccaaccgcggg

SEQ ID NO: 75758 - DNA, 30 bp, Homo sapiens; identical to SEQ ID NO: 22300
  chr8:22064870-22064900
  hypo

SEQ ID NO: 75759 - DNA, 31 bp, Homo sapiens
  chr8:22071496-22071527
  hypo
ccccggccaccgtgggcgctcccaacccacc

SEQ ID NO: 75760 - DNA, 41 bp, Homo sapiens
  chr8:22073145-22073186
  hypo
tttcctttcctctgctcgctcccagacgactccactcctgt

SEQ ID NO: 75761 - DNA, 406 bp, Homo sapiens
  chr8:22078960-22079366
  hypo
ccagggtgcccagggacaggtcgacgggctcagtgtagatgatctccaggatgaggtcctgggcgtggcggaagaccagctccccatcctccacgctgcaggtcaggaacttgttgcaagcaatgtccaggaggggcaggcggtcgcggcagaagcggtcccccagggagcctttgggcgccagcaccaggatggcgtagtggtaggccgtgtacatgcagtagaagtccgcaaagtagaggttggtgctgggattgaagaggcgctgagctgggatctggaagcgccagcggccgtagggggagtcctgcgggggctggcccgtgttgaactccgtgttgcagctgaagaagaccccgtggagcataccgctggtgggggagccgtggctgccactgttgtcctt

SEQ ID NO: 75762 - DNA, 30 bp, Homo sapiens
  chr8:22084447-22084477
  hypo
cactgtactccgtgcgggggctcaggaacc

SEQ ID NO: 75763 - DNA, 31 bp, Homo sapiens
  chr8:22088363-22088394
  hypo
acacgtccacgcacaccgcctcacaagccat

SEQ ID NO: 75764 - DNA, 30 bp, Homo sapiens; identical to SEQ ID NO: 22302
  chr8:22108208-22108238
  hypo

SEQ ID NO: 75765 - DNA, 30 bp, Homo sapiens
  chr8:22112328-22112358
  hypo
cttggattgtggttcggccgcacaaggccc

SEQ ID NO: 75766 - DNA, 45 bp, Homo sapiens
  chr8:22132539-22132584
  hypo
tggggcaagtcaatttcaacacgcgagtcttaggctaaatctgtt

SEQ ID NO: 75767 - DNA, 188 bp, Homo sapiens
  chr8:22133208-22133396
  hypo
tttggggaaaggtgcttttctcggggtggaaaggggatgggactcgccttcgggggccttgcttctggttaggcccgagtcgcgaggcctcagcgcggagcacgcacccagggatgcgagggaggcaggcccagcccgtcctgggttcgctccccattgaacctttcggacagccaagtatctgctac

SEQ ID NO: 75768 - DNA, 40 bp, Homo sapiens
  chr8:22231504-22231544
  hypo
aagtgatccaccggtcttggcctcccgaagtgctgggact

SEQ ID NO: 75769 - DNA, 30 bp, Homo sapiens
  chr8:22294247-22294277
  hypo
ggaaagcaccaatgcgatgggtgaaggttt

SEQ ID NO: 75770 - DNA, 30 bp, Homo sapiens
  chr8:22389802-22389832
  hypo
gtcttttcaattcttcggtaaggatgtctg

SEQ ID NO: 75771 - DNA, 31 bp, Homo sapiens; identical to SEQ ID NO: 22303
  chr8:22396803-22396834
  hypo

SEQ ID NO: 75772 - DNA, 107 bp, Homo sapiens; identical to SEQ ID NO: 45165
  chr8:22408651-22408758
  hypo

SEQ ID NO: 75773 - DNA, 31 bp, Homo sapiens; identical to SEQ ID NO: 22304
  chr8:22432576-22432607
  hypo

SEQ ID NO: 75774 - DNA, 30 bp, Homo sapiens; identical to SEQ ID NO: 6145
  chr8:22437178-22437208
  hypo

SEQ ID NO: 75775 - DNA, 30 bp, Homo sapiens
  chr8:22445584-22445614
  hypo
gtccttcaggtgaccgcacagccccgggca

SEQ ID NO: 75776 - DNA, 31 bp, Homo sapiens; identical to SEQ ID NO: 22306
  chr8:22471905-22471936
  hypo

SEQ ID NO: 75777 - DNA, 30 bp, Homo sapiens
  chr8:22476968-22476998
  hypo
gcaggcaccggcttcgtctttccatcgctt

SEQ ID NO: 75778 - DNA, 76 bp, Homo sapiens
  chr8:22477222-22477298
  hypo
gagggcagcggtggcgcccggcaaagttggagcccttgcggtaccagaaagcagcgagagcgagacctgggagcca

SEQ ID NO: 75779 - DNA, 45 bp, Homo sapiens
  chr8:22480159-22480204
  hypo
ccatctgctccaacctggacacgcgggagcctggcaccctgtggc

SEQ ID NO: 75780 - DNA, 146 bp, Homo sapiens; identical to SEQ ID NO: 22307
  chr8:22485266-22485412
  hypo

SEQ ID NO: 75781 - DNA, 230 bp, Homo sapiens
  chr8:22494910-22495140
  hypo
acctcccctcctacgcggccctccactcagggccacctgcccctgctgggctcagggtgggtcaggaacaatcgtgcacctgtgctttgtgattgggatgcatcaaacacagacactgtgactactgactcaggtcaggctctctccattcccgaccgggtatcaactctcttgagagccagcaacactgaaaccaaatgggtgagtcctgaacccggggctgcacttgt

SEQ ID NO: 75782 - DNA, 70 bp, Homo sapiens
  chr8:22499361-22499431
  hypo
aggttatggaggaaggtgtggcggcttcttcctacgctacgatgctcccgccactttatgggacctgggg

SEQ ID NO: 75783 - DNA, 30 bp, Homo sapiens; identical to SEQ ID NO: 22308
  chr8:22564467-22564497
  hypo

SEQ ID NO: 75784 - DNA, 55 bp, Homo sapiens
  chr8:22773286-22773341
  hypo
tgctgtgggtgttgggagccccgtgtccttcctcggctaatcattttgtgactgc

SEQ ID NO: 75785 - DNA, 30 bp, Homo sapiens; identical to SEQ ID NO: 22309
  chr8:22786345-22786375
  hypo

SEQ ID NO: 75786 - DNA, 31 bp, Homo sapiens; identical to SEQ ID NO: 22310
  chr8:22854457-22854488
  hypo

SEQ ID NO: 75787 - DNA, 31 bp, Homo sapiens; identical to SEQ ID NO: 6150
  chr8:22857229-22857260
  hypo

SEQ ID NO: 75788 - DNA, 30 bp, Homo sapiens
  chr8:22864844-22864874
  hypo
cgtgcttccaccagcgacgggatcttacgg

SEQ ID NO: 75789 - DNA, 31 bp, Homo sapiens; identical to SEQ ID NO: 22312
  chr8:22871287-22871318
  hypo

SEQ ID NO: 75790 - DNA, 459 bp, Homo sapiens; identical to SEQ ID NO: 22313
  chr8:22874764-22875223
  hypo

SEQ ID NO: 75791 - DNA, 140 bp, Homo sapiens; identical to SEQ ID NO: 45178
  chr8:22925641-22925781
  hypo

SEQ ID NO: 75792 - DNA, 54 bp, Homo sapiens
  chr8:22984119-22984173
  hypo
ttttatattctttaaacgaggctgtacaaaacataagctcgtattcctggccct

SEQ ID NO: 75793 - DNA, 198 bp, Homo sapiens; identical to SEQ ID NO: 6152
  chr8:23020932-23021130
  hypo

SEQ ID NO: 75794 - DNA, 512 bp, Homo sapiens; identical to SEQ ID NO: 6153
  chr8:23021192-23021704
  hypo

SEQ ID NO: 75795 - DNA, 19 bp, Homo sapiens
  chr8:23073628-23073647
  hypo
ccagtttattacttttatt

SEQ ID NO: 75796 - DNA, 30 bp, Homo sapiens; identical to SEQ ID NO: 22317
  chr8:23118788-23118818
  hypo

SEQ ID NO: 75797 - DNA, 31 bp, Homo sapiens
  chr8:23177355-23177386
  hypo
gcatggggggtgaatgcggggtctgaggccg

SEQ ID NO: 75798 - DNA, 30 bp, Homo sapiens; identical to SEQ ID NO: 45186
  chr8:23197238-23197268
  hypo

SEQ ID NO: 75799 - DNA, 30 bp, Homo sapiens; identical to SEQ ID NO: 45187
  chr8:23218852-23218882
  hypo

SEQ ID NO: 75800 - DNA, 30 bp, Homo sapiens
  chr8:23290450-23290480
  hypo
cggggcattctgggcgggaaggccctcctc

SEQ ID NO: 75801 - DNA, 30 bp, Homo sapiens; identical to SEQ ID NO: 22318
  chr8:23313423-23313453
  hypo

SEQ ID NO: 75802 - DNA, 30 bp, Homo sapiens
  chr8:23341013-23341043
  hypo
aggtagacagtgaacgctgtctctggtctg

SEQ ID NO: 75803 - DNA, 96 bp, Homo sapiens
  chr8:23380692-23380788
  hypo
gccacatttctgttgttttaagtcacctagtttgtgtcattttgttagagcactcccaggacacaaatattttacgctttctgagctttaggtgca

SEQ ID NO: 75804 - DNA, 130 bp, Homo sapiens; identical to SEQ ID NO: 6156
  chr8:23386070-23386200
  hypo

SEQ ID NO: 75805 - DNA, 282 bp, Homo sapiens
  chr8:23399593-23399875
  hypo
agtcagcaccacataacgatgtttcggtcaactatggactccatatgtgatgagacagtgatcccatagattatagtggagctgaaaaattcctattacctaggggcatcacaacgcattgcatttcgcccgtgtttgggatgatgctggtgtaaacctactatgctgccagtcatgtaaaagtatagcacacacaattagtaggtaatgcttgcaaataataatgaaagactctgctactggtttatgtatttactatgctatactttttgtcattacttt

SEQ ID NO: 75806 - DNA, 351 bp, Homo sapiens
  chr8:23409902-23410253
  hypo
ctgaaaaatagaataggatttcgaccttgtggtaggtggaaaccggggttgtctttgtgctctcaggcatgtggctggcgtggggtagaagctctctatataatggttgagtgactggatgagcttcaaagctggtccctctggcttttcctgctaccccaggccacgtgcccagaaggaacgctgtcttacctgggaggtctttattgactgtttgacgcccttcccatcctatcccaaccccttccccatggcacctagtttccccaaccagaacgtacgttacttatgggcagagacggtctttgagcattgggtgggtggttgaacgcagtttctttgagattctgt

SEQ ID NO: 75807 - DNA, 359 bp, Homo sapiens
  chr8:23423718-23424077
  hypo
cttgcgaggcgtcaacgtcatgatcatgggtgcagggccggcccatgccatgtattttgcctgctatgaaaacatgaaaaggactttaaatgacgttttccaccaccaaggaaacagccacctagccaacggtattttgaaagcgtttgtctggagttagaaagttctcttcttcaacacgtccctccccagggtgttcctccctgtgacccagccgcctcgacttcggcccgcttgctcacgaataaagaactcagagttgtgtgtgcaatgcacacccagacacacgcacgcacacacacgcgcgcgcacacacatgcttttttctgttcccctccgctttctgaagcctggggaga

SEQ ID NO: 75808 - DNA, 32 bp, Homo sapiens; identical to SEQ ID NO: 22323
  chr8:23424341-23424373
  hypo

SEQ ID NO: 75809 - DNA, 126 bp, Homo sapiens; identical to SEQ ID NO: 22324
  chr8:23429102-23429228
  hypo

SEQ ID NO: 75810 - DNA, 1003 bp, Homo sapiens; identical to SEQ ID NO: 6159
  chr8:23559665-23560668
  hypo

SEQ ID NO: 75811 - DNA, 49 bp, Homo sapiens; identical to SEQ ID NO: 6163
  chr8:23567533-23567582
  hypo

SEQ ID NO: 75812 - DNA, 105 bp, Homo sapiens; identical to SEQ ID NO: 45202
  chr8:23567657-23567762
  hypo

SEQ ID NO: 75813 - DNA, 30 bp, Homo sapiens
  chr8:23809235-23809265
  hypo
tccataacttcaggcgttcaccttgctcat

SEQ ID NO: 75814 - DNA, 217 bp, Homo sapiens; identical to SEQ ID NO: 22328
  chr8:25105392-25105609
  hypo

SEQ ID NO: 75815 - DNA, 203 bp, Homo sapiens
  chr8:25107886-25108089
  hypo
taaggactgaagcgagcgttcttgcctttcttcatctttggcactggcttgcccacagtcatttttgtgtctttgcttcttttactgtggaatgtatttggcagcgaggtagctgtttattactgtgaacgttcctttccaccccagatccatggcagaaagtgcactgacttctggagatgcccggccgtgaggtcatttat

SEQ ID NO: 75816 - DNA, 29 bp, Homo sapiens
  chr8:25138961-25138990
  hypo
aaaaaaaaagtgaacggggatgaagaatt

SEQ ID NO: 75817 - DNA, 31 bp, Homo sapiens
  chr8:25159882-25159913
  hypo
gtgtgccagattgtccgcgtgggccatatgg

SEQ ID NO: 75818 - DNA, 180 bp, Homo sapiens
  chr8:25174515-25174695
  hypo
gttgcaggagatgttcggaatgacatttatgtcaccctgatccacggtgagtttgacaaagggaagaagaagacgccaaagaatgtggaggtgacgatgtctgtgcacgatgaggagggcaagctcttggaggtgcgcggcatggcccagaaatcctgctaccatcgcatccgtctttac

SEQ ID NO: 75819 - DNA, 31 bp, Homo sapiens
  chr8:25206371-25206402
  hypo
ttatgtaccactcacccgcacccccacaata

SEQ ID NO: 75820 - DNA, 31 bp, Homo sapiens
  chr8:25212178-25212209
  hypo
acagacacagacagtcgcgaagagagatgtg

SEQ ID NO: 75821 - DNA, 31 bp, Homo sapiens
  chr8:25246525-25246556
  hypo
tggctacctcagtacccggaactccagttgc

SEQ ID NO: 75822 - DNA, 85 bp, Homo sapiens
  chr8:25249435-25249520
  hypo
gcagttcagatactcccggccgttccggaaaggagaaaaggatccagacaatgaatttgctgtgagttcaccccttttgtccttt

SEQ ID NO: 75823 - DNA, 31 bp, Homo sapiens
  chr8:25252861-25252892
  hypo
gtttcctaataggccacggactgatactggc

SEQ ID NO: 75824 - DNA, 170 bp, Homo sapiens
  chr8:25265512-25265682
  hypo
cacttttggagcgcagggcctcgtcaggtgccagagttgaagatctgtcccttagagaggagaacagcgagaaccggatcagcaagtttaagagaaaagactggagtctgagcaagtcccaggtcattgcagagaaagcaccagaacccgatttgatggtaaaaaacaga

SEQ ID NO: 75825 - DNA, 30 bp, Homo sapiens; identical to SEQ ID NO: 22329
  chr8:25266268-25266298
  hypo

SEQ ID NO: 75826 - DNA, 34 bp, Homo sapiens; identical to SEQ ID NO: 22330
  chr8:25338916-25338950
  hypo

SEQ ID NO: 75827 - DNA, 148 bp, Homo sapiens
  chr8:25376164-25376312
  hypo
tgacgaacctttcatcgctaaatgcccatctagtgactggcagcttgccggtgtccagcgcctggctaacagattgaagggccggggggcgagttggctgtctcctttggcaggatcgttgaattggtagggccgatttccttcgtgg

SEQ ID NO: 75828 - DNA, 171 bp, Homo sapiens; identical to SEQ ID NO: 22331
  chr8:25397039-25397210
  hypo

SEQ ID NO: 75829 - DNA, 158 bp, Homo sapiens; identical to SEQ ID NO: 6180
  chr8:25901684-25901842
  hypo

SEQ ID NO: 75830 - DNA, 825 bp, Homo sapiens; identical to SEQ ID NO: 45226
  chr8:25904803-25905628
  hypo

SEQ ID NO: 75831 - DNA, 53 bp, Homo sapiens; identical to SEQ ID NO: 22333
  chr8:26053987-26054040
  hypo

SEQ ID NO: 75832 - DNA, 120 bp, Homo sapiens
  chr8:26148090-26148210
  hypo
tttagctggagagacgccgggtcacttcttgggccataccctctcatcacaaactcaggtttctcttagaaatcactcttagtgtccgcagtgcctaggactcccgccttggatcctggg

SEQ ID NO: 75833 - DNA, 175 bp, Homo sapiens; identical to SEQ ID NO: 45233
  chr8:26148853-26149028
  hypo

SEQ ID NO: 75834 - DNA, 40 bp, Homo sapiens; identical to SEQ ID NO: 22334
  chr8:26230452-26230492
  hypo

SEQ ID NO: 75835 - DNA, 41 bp, Homo sapiens; identical to SEQ ID NO: 22335
  chr8:26230731-26230772
  hypo

SEQ ID NO: 75836 - DNA, 31 bp, Homo sapiens; identical to SEQ ID NO: 22336
  chr8:26242168-26242199
  hypo

SEQ ID NO: 75837 - DNA, 30 bp, Homo sapiens
  chr8:26267175-26267205
  hypo
gtgtctataccttgccgtctctctttcagt

SEQ ID NO: 75838 - DNA, 136 bp, Homo sapiens; identical to SEQ ID NO: 22337
  chr8:26267633-26267769
  hypo

SEQ ID NO: 75839 - DNA, 30 bp, Homo sapiens
  chr8:26303382-26303412
  hypo
actgttctggcctccggggccatgacattg

SEQ ID NO: 75840 - DNA, 1121 bp, Homo sapiens; identical to SEQ ID NO: 45242
  chr8:26371675-26372796
  hypo

SEQ ID NO: 75841 - DNA, 65 bp, Homo sapiens; identical to SEQ ID NO: 45243
  chr8:26435019-26435084
  hypo

SEQ ID NO: 75842 - DNA, 30 bp, Homo sapiens; identical to SEQ ID NO: 45245
  chr8:26436289-26436319
  hypo

SEQ ID NO: 75843 - DNA, 30 bp, Homo sapiens; identical to SEQ ID NO: 6192
  chr8:26436703-26436733
  hypo

SEQ ID NO: 75844 - DNA, 31 bp, Homo sapiens
  chr8:26509696-26509727
  hypo
gggcagtgggtgctgccgggtggattgagtc

SEQ ID NO: 75845 - DNA, 31 bp, Homo sapiens
  chr8:26513962-26513993
  hypo
ttttaccatttttctgcgtgctctcactctc

SEQ ID NO: 75846 - DNA, 149 bp, Homo sapiens
  chr8:26515707-26515856
  hypo
gagatgttcgggaggcggctgcttgacttgggcctccaaccagacttcccctccacaagcattcacggagccctcggcttcagtttggtgaatataccaattcaagagttttcactccatgtcacaggctgctacgtccaggccacggg

SEQ ID NO: 75847 - DNA, 30 bp, Homo sapiens
  chr8:27145420-27145450
  hypo
gcgcacacgtaccacgcccaccctccagct

SEQ ID NO: 75848 - DNA, 30 bp, Homo sapiens
  chr8:27146745-27146775
  hypo
atcgataagcatgccgggctggactggctc

SEQ ID NO: 75849 - DNA, 79 bp, Homo sapiens; identical to SEQ ID NO: 45250
  chr8:27168527-27168606
  hypo

SEQ ID NO: 75850 - DNA, 30 bp, Homo sapiens
  chr8:27271176-27271206
  hypo
gtaaaccatgatgatcggttgtttgtgtct

SEQ ID NO: 75851 - DNA, 55 bp, Homo sapiens
  chr8:27279917-27279972
  hypo
ctctgctgggagggcgctgtgctgagctctgggcaggcccgacctttccccatgt

SEQ ID NO: 75852 - DNA, 30 bp, Homo sapiens
  chr8:27288285-27288315
  hypo
ctggggatcattttcgagcagtgggcagtc

SEQ ID NO: 75853 - DNA, 251 bp, Homo sapiens; identical to SEQ ID NO: 45252
  chr8:27327201-27327452
  hypo

SEQ ID NO: 75854 - DNA, 227 bp, Homo sapiens
  chr8:27337091-27337318
  hypo
ttctaagtcagtaaatagcatcggaaaaattggagtaaggacagagctgccagccagcccacggttctctccttgccctcctcccctgtgagacccctccccccaccaccctagaggaccaccggtcacttgcgcggccacccggtgtggctgcttctctgtcaccccgtcagcctccttgcaggtgaccttgcctttgattttccggtgaagcctccttttctcta

SEQ ID NO: 75855 - DNA, 30 bp, Homo sapiens; identical to SEQ ID NO: 22342
  chr8:27473407-27473437
  hypo

SEQ ID NO: 75856 - DNA, 30 bp, Homo sapiens
  chr8:27504505-27504535
  hypo
acacactattgccccggaaagcaaacctac

SEQ ID NO: 75857 - DNA, 30 bp, Homo sapiens; identical to SEQ ID NO: 22343
  chr8:27516495-27516525
  hypo

SEQ ID NO: 75858 - DNA, 130 bp, Homo sapiens; identical to SEQ ID NO: 22344
  chr8:27516811-27516941
  hypo

SEQ ID NO: 75859 - DNA, 31 bp, Homo sapiens
  chr8:27525306-27525337
  hypo
tccgccagccgtgacacgggcagcgagggag

SEQ ID NO: 75860 - DNA, 30 bp, Homo sapiens
  chr8:27634475-27634505
  hypo
ttctcttagaaaatcgtccctggaaaatga

SEQ ID NO: 75861 - DNA, 17 bp, Homo sapiens
  chr8:27684304-27684321
  hypo
tccgtctcaaaaaaaaa

SEQ ID NO: 75862 - DNA, 31 bp, Homo sapiens; identical to SEQ ID NO: 22346
  chr8:27778322-27778353
  hypo

SEQ ID NO: 75863 - DNA, 30 bp, Homo sapiens
  chr8:27779136-27779166
  hypo
gaggcgcaggtcctcggtgaccgcgttgag

SEQ ID NO: 75864 - DNA, 409 bp, Homo sapiens
  chr8:27779439-27779848
  hypo
cagctggtagagctccagctgcgccgtgtcgctctgctggcccgtgcggtcccgcagcagggccaccgcctgctcggtctgcaccgcctgcgcctgcagcccccacagcgcgccctccagccgctgcactgcgcccgccagcgccagcaacgagtctgactggttctgcagcgcgtcctgcaccttccacacctgctccgtcaggtccgcttgcagcggagcctgcagcagccgcagctgcaagtcccggaagctctcattcagccggttcacattgcgagtcagggccttcaggtcgtcaggggagctgcgcggcctggacactgcggaggaggaagaggggagacttgagcaccgctggggaggaaggccccgggtgacaagaggcgaacccagtcagagcctggca

SEQ ID NO: 75865 - DNA, 30 bp, Homo sapiens; identical to SEQ ID NO: 22348
  chr8:27845262-27845292
  hypo

SEQ ID NO: 75866 - DNA, 28 bp, Homo sapiens
  chr8:27914783-27914811
  hypo
atgctattgataaatacggtgccgtatt

SEQ ID NO: 75867 - DNA, 235 bp, Homo sapiens
  chr8:27931038-27931273
  hypo
caaaacacaaaggatatgatacgccactgttttctgcaactgggggttatatccctgtcatcgtcctatagggaagcctcccttattggctccaggggcgcaataccagccttctgagggagggaagccacccgcactgactccaatgtgagtcacccttccaggagccgctccaaggcacctacatctctccttctacggaaagccgcctaacgtcattccaggggtcttgtaa

SEQ ID NO: 75868 - DNA, 30 bp, Homo sapiens
  chr8:27976918-27976948
  hypo
tctcgcgtgtgcttgcgctgtcttttttga

SEQ ID NO: 75869 - DNA, 162 bp, Homo sapiens; identical to SEQ ID NO: 22350
  chr8:28206996-28207158
  hypo

SEQ ID NO: 75870 - DNA, 145 bp, Homo sapiens; identical to SEQ ID NO: 22351
  chr8:28207470-28207615
  hypo

SEQ ID NO: 75871 - DNA, 162 bp, Homo sapiens
  chr8:28208945-28209107
  hypo
tgtaatcaagctggcccgtgatgagtcagctatgagcctgagcctccagcgagccccgccccatacctggtatgcatgatctgcctgaatgtgccagaaggacccaggagctgacttgctgagagcccctgagggcagggaggactccgggccaggatgttc

SEQ ID NO: 75872 - DNA, 31 bp, Homo sapiens; identical to SEQ ID NO: 22352
  chr8:28210633-28210664
  hypo

SEQ ID NO: 75873 - DNA, 134 bp, Homo sapiens
  chr8:28237867-28238001
  hypo
atttgcactcctaattctagacgactgaaccttgatttgtctgcaaaaccagcaattcctctcacttctgcgccactaacaaatctgatgagcgcgccttctctgtcttcaccgccaacactgggaaaatgttg

SEQ ID NO: 75874 - DNA, 65 bp, Homo sapiens; identical to SEQ ID NO: 6201
  chr8:28242820-28242885
  hypo

SEQ ID NO: 75875 - DNA, 56 bp, Homo sapiens; identical to SEQ ID NO: 6203
  chr8:28258794-28258850
  hypo

SEQ ID NO: 75876 - DNA, 44 bp, Homo sapiens
  chr8:28265544-28265588
  hypo
tgggattacaggcatgagccaccgccccctgcctattttattct

SEQ ID NO: 75877 - DNA, 30 bp, Homo sapiens
  chr8:28573488-28573518
  hypo
agtgaaacagagatcgttttgtggaatagc

SEQ ID NO: 75878 - DNA, 209 bp, Homo sapiens
  chr8:28610786-28610995
  hypo
ggcgccacagaccccgggtctccttggctgtctgtgggccgcccctggccaccttgtcctggctcgcagggtgcaggagcgcctcgttctctgggtggccggcttgctgctccggtttgggctgtcttaccataacaccgtcccagggctctgcaggccactgtgagcgctggctccctgggcagtgctcctccgtgtggactgtgcct

SEQ ID NO: 75879 - DNA, 28 bp, Homo sapiens
  chr8:28746007-28746035
  hypo
agcgagctgagaacgcgccactgcactt

SEQ ID NO: 75880 - DNA, 334 bp, Homo sapiens; identical to SEQ ID NO: 6205
  chr8:28748908-28749242
  hypo

SEQ ID NO: 75881 - DNA, 30 bp, Homo sapiens
  chr8:28906971-28907001
  hypo
cccatgcctaaacacgtaccgacgcagggc

SEQ ID NO: 75882 - DNA, 30 bp, Homo sapiens
  chr8:28921933-28921963
  hypo
agaacccactttgccggtgctaaaacacaa

SEQ ID NO: 75883 - DNA, 30 bp, Homo sapiens
  chr8:28928257-28928287
  hypo
cccgccgatggaaccgtcattcttacctgc

SEQ ID NO: 75884 - DNA, 30 bp, Homo sapiens
  chr8:28929674-28929704
  hypo
ggggctggggggcccgtcctgtgcctccgg

SEQ ID NO: 75885 - DNA, 306 bp, Homo sapiens; identical to SEQ ID NO: 22358
  chr8:28938417-28938723
  hypo

SEQ ID NO: 75886 - DNA, 214 bp, Homo sapiens
  chr8:28950155-28950369
  hypo
gtttagccccaacccagaggccgcacctccacctccagctttggcgcaacacagagcaccgctttattagaaaaacgttcacagctgttttctcggtgctttttacctggtgtgcgaggggagacggccgcttgcccctcttctcatcgcggacgggaaagagagacttgaggagctttggcatttgcggcacgaaggatttgacaggattcaa

SEQ ID NO: 75887 - DNA, 126 bp, Homo sapiens
  chr8:29053239-29053365
  hypo
ggaatgcacccccagctgtctcgggagtggggaggatgagtcggttttgaccgcagtttggaactaccagtctagagccaatctatggaggcggcttgaggccgcgcaggtttctgttggctggga

SEQ ID NO: 75888 - DNA, 28 bp, Homo sapiens
  chr8:29118150-29118178
  hypo
gagacagagtttcactcttgtcgcccag

SEQ ID NO: 75889 - DNA, 28 bp, Homo sapiens
  chr8:29118417-29118445
  hypo
agccaccgtgcctggcctgttttagtct

SEQ ID NO: 75890 - DNA, 809 bp, Homo sapiens; identical to SEQ ID NO: 45271
  chr8:29205973-29206782
  hypo

SEQ ID NO: 75891 - DNA, 1264 bp, Homo sapiens; identical to SEQ ID NO: 6210
  chr8:29206997-29208261
  hypo

SEQ ID NO: 75892 - DNA, 150 bp, Homo sapiens
  chr8:29212821-29212971
  hypo
tttagtcacgtgctaacgtcccaagcattttgataaaacgtcttcaaaatttcagaaacaaattttggaaagaaacacttctccaaacgggataaaaatgaactcggaggctgggcatggatggtggctcatgcctgtaatcccccagca

SEQ ID NO: 75893 - DNA, 30 bp, Homo sapiens; identical to SEQ ID NO: 45276
  chr8:29509600-29509630
  hypo

SEQ ID NO: 75894 - DNA, 28 bp, Homo sapiens
  chr8:29596407-29596435
  hypo
atttttaggctgggcacggtagttcatg

SEQ ID NO: 75895 - DNA, 30 bp, Homo sapiens
  chr8:29923541-29923571
  hypo
accgaatagctgcccgagcctccatgaagg

SEQ ID NO: 75896 - DNA, 10 bp, Homo sapiens
  chr8:29926951-29926961
  hypo
ggccaatcag

SEQ ID NO: 75897 - DNA, 30 bp, Homo sapiens
  chr8:29927233-29927263
  hypo
aggatactcagagtacggtggaggagaata

SEQ ID NO: 75898 - DNA, 30 bp, Homo sapiens
  chr8:29930904-29930934
  hypo
atcaatgaaacctgccgaaatgcttccttt

SEQ ID NO: 75899 - DNA, 30 bp, Homo sapiens
  chr8:29931540-29931570
  hypo
agagcttttacatcccgcagcaacattctg

SEQ ID NO: 75900 - DNA, 211 bp, Homo sapiens
  chr8:29949203-29949414
  hypo
aaacgtgcacaaacacgcaaacacatgcaggcacacacaaacacgcccacaacacagacacgcacgcacacaaacacacatgcacgcacaaacgcatacacagacacgcacacaaacgcacgcacagacaaacgcacacacacaacacccaaacacgcacaaggacgcacacacacgcacacacaaatacccatgcacacgcaaacacgta

SEQ ID NO: 75901 - DNA, 42 bp, Homo sapiens; identical to SEQ ID NO: 22364
  chr8:29951801-29951843
  hypo

SEQ ID NO: 75902 - DNA, 100 bp, Homo sapiens; identical to SEQ ID NO: 22365
  chr8:29958254-29958354
  hypo

SEQ ID NO: 75903 - DNA, 31 bp, Homo sapiens; identical to SEQ ID NO: 22366
  chr8:29962164-29962195
  hypo

SEQ ID NO: 75904 - DNA, 31 bp, Homo sapiens
  chr8:30092821-30092852
  hypo
caggcacagtggctcacgcttgtaatcccag

SEQ ID NO: 75905 - DNA, 31 bp, Homo sapiens
  chr8:30161182-30161213
  hypo
attataggcatgccaccgggccctgcctcag

SEQ ID NO: 75906 - DNA, 31 bp, Homo sapiens
  chr8:30162575-30162606
  hypo
tttagaaacctggcagcgactgatctatttc

SEQ ID NO: 75907 - DNA, 2259 bp, Homo sapiens; identical to SEQ ID NO: 45278
  chr8:30241416-30243675
  hypo

SEQ ID NO: 75908 - DNA, 30 bp, Homo sapiens; identical to SEQ ID NO: 22369
  chr8:30408960-30408990
  hypo

SEQ ID NO: 75909 - DNA, 30 bp, Homo sapiens; identical to SEQ ID NO: 22370
  chr8:30437723-30437753
  hypo

SEQ ID NO: 75910 - DNA, 279 bp, Homo sapiens
  chr8:30561957-30562236
  hypo
caatgcttgtgctttcgtaaaatgggaagaataccacaaaagtacatgacactgaagttctacgctggagacggtgagaactcagactcttacttttggatttgctcttactggaatcctctgtacccaggccttcacttaggggctgctggcacgctttcgccagccatgatacatgcaggggcatgcaaatgtggtcaacttacaagaataatggaaccatgtaagcatgattacaaagtggaatgctttaacatattggaacgtgcttgattctga

SEQ ID NO: 75911 - DNA, 32 bp, Homo sapiens
  chr8:30599240-30599272
  hypo
acaggcgtgagtcaccgcgcccggccacaatg

SEQ ID NO: 75912 - DNA, 31 bp, Homo sapiens
  chr8:30632837-30632868
  hypo
cgaagtaacaaaagaacgaaacaagggaaga

SEQ ID NO: 75913 - DNA, 23 bp, Homo sapiens
  chr8:30661333-30661356
  hypo
aatttttttttttttttgagacg

SEQ ID NO: 75914 - DNA, 39 bp, Homo sapiens
  chr8:30889694-30889733
  hypo
tggtttgtctaatccgtaggaagcgaccccgctgatttt

SEQ ID NO: 75915 - DNA, 30 bp, Homo sapiens; identical to SEQ ID NO: 45289
  chr8:32349021-32349051
  hypo

SEQ ID NO: 75916 - DNA, 31 bp, Homo sapiens
  chr8:32621345-32621376
  hypo
cggaaatgtctccacccgtgtccagcatgac

SEQ ID NO: 75917 - DNA, 19 bp, Homo sapiens
  chr8:33332815-33332834
  hypo
tcggcagggcacggtcgct

SEQ ID NO: 75918 - DNA, 675 bp, Homo sapiens; identical to SEQ ID NO: 45296
  chr8:33371776-33372451
  hypo

SEQ ID NO: 75919 - DNA, 31 bp, Homo sapiens; identical to SEQ ID NO: 22373
  chr8:33417651-33417682
  hypo

SEQ ID NO: 75920 - DNA, 30 bp, Homo sapiens; identical to SEQ ID NO: 45299
  chr8:34704372-34704402
  hypo

SEQ ID NO: 75921 - DNA, 143 bp, Homo sapiens
  chr8:36179409-36179552
  hypo
tagtgaattgcccattttgagcgagttgtgtgcggaagaaactgagggtcagaggcggagaggttactccatagtcacccacttctctgtggcctgcgcgcactgggcacctgggacatcacggtggggctggtgatagagcc

SEQ ID NO: 75922 - DNA, 30 bp, Homo sapiens; identical to SEQ ID NO: 45301
  chr8:36858467-36858497
  hypo

SEQ ID NO: 75923 - DNA, 30 bp, Homo sapiens; identical to SEQ ID NO: 45302
  chr8:37552642-37552672
  hypo

SEQ ID NO: 75924 - DNA, 967 bp, Homo sapiens; identical to SEQ ID NO: 45303
  chr8:37553217-37554184
  hypo

SEQ ID NO: 75925 - DNA, 30 bp, Homo sapiens
  chr8:37636084-37636114
  hypo
gattcttccctagccggtagatacgtgaag

SEQ ID NO: 75926 - DNA, 30 bp, Homo sapiens; identical to SEQ ID NO: 22375
  chr8:37652942-37652972
  hypo

SEQ ID NO: 75927 - DNA, 515 bp, Homo sapiens; identical to SEQ ID NO: 45308
  chr8:37655475-37655990
  hypo

SEQ ID NO: 75928 - DNA, 155 bp, Homo sapiens; identical to SEQ ID NO: 45309
  chr8:37656049-37656204
  hypo

SEQ ID NO: 75929 - DNA, 34 bp, Homo sapiens
  chr8:37673306-37673340
  hypo
tctaagtcacctgctccgtcggtacaatccaggg

SEQ ID NO: 75930 - DNA, 267 bp, Homo sapiens
  chr8:37688848-37689115
  hypo
cctgcagctagtgttgtaggacggtgctgagggagggcaacgtggctgggcccaagggtgactcacgagccagctccacctgccacccgcagtgagctgacgctgtctcacatcggcgtgtgggcctcaggcgagtgggagtgcaccgtgtccatggcccaaggcaacgccagcaagaaggtggagatcgtggtgctggagacctctgcctcctactgccccgccgagcgtgttgccaacaaccgcggggacttcaggtttggccca

SEQ ID NO: 75931 - DNA, 444 bp, Homo sapiens
  chr8:37702265-37702709
  hypo
tccttgcccctgtccccaccccggtggctccttctctcgggtctccacttctgctgtcccatcccgaaaggcagagcggaccagtgactggcggtgctggagaaggtcaccgatgtgcttcaccacagaccgtttgtcaagtctcagaactcgtaaccaggccagctgctcagccatccgcagcagcacagccagcagctcctgcaggcgggaggacgccgggtagggcaggtccacatttgccaatttacaaaatcgggcaagggaacatgaaagccgatctgcaggctgcagcgactgccaagccaggaaagtcgcagcagtgatgacgggcaagggatgcctcccggtcaccagccacgtctcatttgccagctccaccaactgcattgttcgagacagcatcttctctttgtcttccacgtatttggctggcacagaagg

SEQ ID NO: 75932 - DNA, 30 bp, Homo sapiens
  chr8:37708575-37708605
  hypo
atcgtgggtgggatccggcagtccaagccc

SEQ ID NO: 75933 - DNA, 30 bp, Homo sapiens
  chr8:37719474-37719504
  hypo
ggaaaccagagcaccgagcaaaggcacagg

SEQ ID NO: 75934 - DNA, 43 bp, Homo sapiens
  chr8:37721473-37721516
  hypo
tttctttccagggcagcaggtcgaggtccagcccagactgtct

SEQ ID NO: 75935 - DNA, 24 bp, Homo sapiens
  chr8:37815901-37815925
  hypo
ctgggactacgggtgtgtgccacc

SEQ ID NO: 75936 - DNA, 31 bp, Homo sapiens
  chr8:37914602-37914633
  hypo
caggatcatctatgaccggaaattcctgatg

SEQ ID NO: 75937 - DNA, 183 bp, Homo sapiens
  chr8:37946121-37946304
  hypo
agcagtcttttgataacgacccaattgtttgagtcacaaccgagtgttcagcacctgtgtctaccataaagtctgtttttcagccccctactaccattgagaccatgggctcctcagggcctaatgagatggagcccggtctgtctcagtcttcaaggtagccgttggcgcctgccagcccaa

SEQ ID NO: 75938 - DNA, 89 bp, Homo sapiens
  chr8:37961843-37961932
  hypo
gactctgtctcaaacaaacaacaacaagaaaacacaaaattctgcgaccatatgttaaaactgctacaatactacgtatttgggaggag

SEQ ID NO: 75939 - DNA, 30 bp, Homo sapiens
  chr8:38010753-38010783
  hypo
tgcctagaggtacccggccccttcctcaaa

SEQ ID NO: 75940 - DNA, 23 bp, Homo sapiens
  chr8:38020308-38020331
  hypo
aaagctccctcctcacgcctgag

SEQ ID NO: 75941 - DNA, 31 bp, Homo sapiens
  chr8:38042304-38042335
  hypo
aagtatagaatgctgtgcttgcggccgggcg

SEQ ID NO: 75942 - DNA, 275 bp, Homo sapiens
  chr8:38146028-38146303
  hypo
gaggccccagcctctccgctccgttttgatgatctctgcatcagggtatagtctctttgtaaagcactggttctgacaacgatctccagctgggcacacctgcgggtggcattcatactgcaacattctgttcaggcactccgattccaagccacaagggttttcatcagctggcttgcagttacagcggggaatctctgacaggtcagcaacctggatctgcacctttcctattactttgttagcctagaaaacaaaatcgcaagcgagagaga

SEQ ID NO: 75943 - DNA, 241 bp, Homo sapiens
  chr8:38223277-38223518
  hypo
aaaactaatgaaaccaaaaccaggaatcagtcatatagagaggctggaaaaagacaaggaaaaagatgatcatcaggtacttttatttcctttgacgttcactctgtttcagaggcttctgagttatggctatagtaaaaagatttaaattacggtttactcaagtattccatgtagtataaagtttaaatcttaaatgttatgtaaacataactgatccaaaatatactgaaatggaact

SEQ ID NO: 75944 - DNA, 29 bp, Homo sapiens
  chr8:38230021-38230050
  hypo
tttttttttgagacacagtttcgctcttt

SEQ ID NO: 75945 - DNA, 30 bp, Homo sapiens
  chr8:38246681-38246711
  hypo
tcttagggcatattcgtgtcccattagggt

SEQ ID NO: 75946 - DNA, 35 bp, Homo sapiens
  chr8:38279096-38279131
  hypo
acgggtgggaggcctccgtgcgcctgcaaaactag

SEQ ID NO: 75947 - DNA, 30 bp, Homo sapiens
  chr8:38279585-38279615
  hypo
caacaaggaacaaacgaaaaccaccaggca

SEQ ID NO: 75948 - DNA, 1505 bp, Homo sapiens; identical to SEQ ID NO: 45327
  chr8:38324811-38326316
  hypo

SEQ ID NO: 75949 - DNA, 18 bp, Homo sapiens
  chr8:38487422-38487440
  hypo
atttaaaaaaattggccg

SEQ ID NO: 75950 - DNA, 30 bp, Homo sapiens; identical to SEQ ID NO: 22384
  chr8:38643831-38643861
  hypo

SEQ ID NO: 75951 - DNA, 31 bp, Homo sapiens; identical to SEQ ID NO: 22385
  chr8:38644147-38644178
  hypo

SEQ ID NO: 75952 - DNA, 30 bp, Homo sapiens; identical to SEQ ID NO: 22386
  chr8:38697061-38697091
  hypo

SEQ ID NO: 75953 - DNA, 289 bp, Homo sapiens
  chr8:38786179-38786468
  hypo
tggtgtctgtcaacaagaaatcgacatccaagtaatagaataaaaacattaagcccacgcagcagaggatgatatagaatcgacttctcctgaagggaaagattaaatacacactttgaactggagaatggggagagtagctatcagcgtgtcgtgtgtccccgcgttagcatcagcaagtggacctacagggcagaggggaggagaggtgtttggccctagagcagcaggtagagccacggcccaggtcacctggtgcctgggattcgcttggctcccctgctttggt

SEQ ID NO: 75954 - DNA, 30 bp, Homo sapiens
  chr8:38851140-38851170
  hypo
tgaagtgtgttccacgtcgctgtaggcctg

SEQ ID NO: 75955 - DNA, 34 bp, Homo sapiens; identical to SEQ ID NO: 22388
  chr8:38857789-38857823
  hypo

SEQ ID NO: 75956 - DNA, 105 bp, Homo sapiens
  chr8:38859452-38859557
  hypo
ctgggattacaggcatgagccaccacgcccagcccaaaggtagttattaatatacggtatgtatttatctggaattgacctggcgaatactagaatgattaaaaa

SEQ ID NO: 75957 - DNA, 395 bp, Homo sapiens
  chr8:39380182-39380577
  hypo
cccccttcccagcctggcctgcgcttctaggccttgccaaaggcgaaagcggaaaggcggcctcctctcctgcagggctctttacttacgtgggcccgcggaggtcagccggcccaggcctgagaggatcagcaagagagacagcattgcgtagccggcggcccagccacagggatggccgttgtccttggaacggctgcagctcgaggccagggtggtggaggccgagcggagcggaagggccgtggggtccgcggggcgcggcggggacccagctccgtggatcccgaggcgggtggatcctacagccccgcgcgcccacccacagtgggctgcaccggaggaggcacgtgggagcctgcatttctgggtacgtgggctcttttttctaaaga

SEQ ID NO: 75958 - DNA, 31 bp, Homo sapiens; identical to SEQ ID NO: 22389
  chr8:40157533-40157564
  hypo

SEQ ID NO: 75959 - DNA, 31 bp, Homo sapiens
  chr8:41141360-41141391
  hypo
tgtgagccaccacgcccggccaaactcctcc

SEQ ID NO: 75960 - DNA, 413 bp, Homo sapiens; identical to SEQ ID NO: 6247
  chr8:41166266-41166679
  hypo

SEQ ID NO: 75961 - DNA, 243 bp, Homo sapiens; identical to SEQ ID NO: 6248
  chr8:41166745-41166988
  hypo

SEQ ID NO: 75962 - DNA, 268 bp, Homo sapiens; identical to SEQ ID NO: 45334
  chr8:41167025-41167293
  hypo

SEQ ID NO: 75963 - DNA, 30 bp, Homo sapiens; identical to SEQ ID NO: 45336
  chr8:41179541-41179571
  hypo

SEQ ID NO: 75964 - DNA, 27 bp, Homo sapiens
  chr8:41290491-41290518
  hypo
tgctccgcccaccaacgtgggtaggca

SEQ ID NO: 75965 - DNA, 87 bp, Homo sapiens; identical to SEQ ID NO: 22394
  chr8:41290577-41290664
  hypo

SEQ ID NO: 75966 - DNA, 30 bp, Homo sapiens
  chr8:41293608-41293638
  hypo
gaatagtaatacacgcgtttcccccactcc

SEQ ID NO: 75967 - DNA, 64 bp, Homo sapiens; identical to SEQ ID NO: 22395
  chr8:41325382-41325446
  hypo

SEQ ID NO: 75968 - DNA, 17 bp, Homo sapiens
  chr8:41437078-41437095
  hypo
gggcgtggtgactcacg

SEQ ID NO: 75969 - DNA, 30 bp, Homo sapiens
  chr8:41478654-41478684
  hypo
ggctttcgccgagccgcagcgggatccctg

SEQ ID NO: 75970 - DNA, 30 bp, Homo sapiens
  chr8:41482379-41482409
  hypo
atatgcattctggccggccagctgcattga

SEQ ID NO: 75971 - DNA, 30 bp, Homo sapiens; identical to SEQ ID NO: 22396
  chr8:41507690-41507720
  hypo

SEQ ID NO: 75972 - DNA, 30 bp, Homo sapiens
  chr8:41507922-41507952
  hypo
gagtactggcacaccggggccttcatctcc

SEQ ID NO: 75973 - DNA, 30 bp, Homo sapiens
  chr8:41518036-41518066
  hypo
atggagatcagagccggccgctgaagcccc

SEQ ID NO: 75974 - DNA, 155 bp, Homo sapiens
  chr8:41553940-41554095
  hypo
tcggccagtgggggcggcgtgctgagcttctggggcttgaccaggcggcaggtgatgcgggtgggcgctgcgcacgtccgtggcgggatcaccactcgcaggccgttgtggcgacttcctctcatggaaccaccccgggcgtcaaccatgaagct

SEQ ID NO: 75975 - DNA, 29 bp, Homo sapiens
  chr8:41581593-41581622
  hypo
ccgcgcccggcctaagacattttaaaacc

SEQ ID NO: 75976 - DNA, 30 bp, Homo sapiens
  chr8:41581830-41581860
  hypo
gccagcaaggagcccgaccagacagcaggg

SEQ ID NO: 75977 - DNA, 89 bp, Homo sapiens
  chr8:41582823-41582912
  hypo
acagcagatcagcagtgcctccgaacaccggagagcgtgcccaggtgcacgcaggcgtgcaaggtcccggaccccctttctccacaccc

SEQ ID NO: 75978 - DNA, 118 bp, Homo sapiens
  chr8:41590702-41590820
  hypo
ctactgaaatggagtgaaatacgttactgtggatgcctggcgtcgccccatgccaaacgcctcctcatgaaacagaatgctgttccagatcgttagcgaggagaggaaatcagtttgg

SEQ ID NO: 75979 - DNA, 35 bp, Homo sapiens
  chr8:41602334-41602369
  hypo
gagcctccgcgcccgatgggagcatgatttctatg

SEQ ID NO: 75980 - DNA, 182 bp, Homo sapiens; identical to SEQ ID NO: 22398
  chr8:41643316-41643498
  hypo

SEQ ID NO: 75981 - DNA, 188 bp, Homo sapiens
  chr8:41668173-41668361
  hypo
ccagagcaacgtgccgccgaagcgtaatagcccgatgggttcatcttgcccgctgcccagaaagccaaaagcgcggagaacaggcactgccccaaagtaagggcctcatgaccacagggccgggagagccaggagaacaggagaaacttcccacacctgtctccccgggaattcggaggccagggtgt

SEQ ID NO: 75982 - DNA, 30 bp, Homo sapiens; identical to SEQ ID NO: 22400
  chr8:41684885-41684915
  hypo

SEQ ID NO: 75983 - DNA, 30 bp, Homo sapiens; identical to SEQ ID NO: 22401
  chr8:41707501-41707531
  hypo

SEQ ID NO: 75984 - DNA, 24 bp, Homo sapiens
  chr8:41711287-41711311
  hypo
taatttttagaaacagggtctcgt

SEQ ID NO: 75985 - DNA, 24 bp, Homo sapiens
  chr8:41711430-41711454
  hypo
accgcacttgaccccctgggttaa

SEQ ID NO: 75986 - DNA, 360 bp, Homo sapiens; identical to SEQ ID NO: 45344
  chr8:41753392-41753752
  hypo

SEQ ID NO: 75987 - DNA, 1438 bp, Homo sapiens; identical to SEQ ID NO: 6254
  chr8:41753770-41755208
  hypo

SEQ ID NO: 75988 - DNA, 30 bp, Homo sapiens; identical to SEQ ID NO: 22404
  chr8:41828965-41828995
  hypo

SEQ ID NO: 75989 - DNA, 159 bp, Homo sapiens
  chr8:41910397-41910556
  hypo
tgtccatacttagggcgttggaaccacgagcaggcggttcttcatggcctgcctgtccactactggctgtatggacgtttctttgtcttgcctttcatctactttaaactctttgatgcagagactgagtcatacttttttttttttttttgagacagt

SEQ ID NO: 75990 - DNA, 28 bp, Homo sapiens
  chr8:42004492-42004520
  hypo
ttgggattacaggcgtgagccactgtgc

SEQ ID NO: 75991 - DNA, 30 bp, Homo sapiens
  chr8:42011693-42011723
  hypo
tcccatagtggctatcgtattaagctgcgc

SEQ ID NO: 75992 - DNA, 30 bp, Homo sapiens
  chr8:42033457-42033487
  hypo
tgaagaagaagaggcgggatctcatttgct

SEQ ID NO: 75993 - DNA, 35 bp, Homo sapiens; identical to SEQ ID NO: 6255
  chr8:42040328-42040363
  hypo

SEQ ID NO: 75994 - DNA, 90 bp, Homo sapiens
  chr8:42082695-42082785
  hypo
taagagttgggcgtatagttccggttaattttttatgctaacgatgtaactttttgtctttgctaacttttattattactttgttatttt

SEQ ID NO: 75995 - DNA, 30 bp, Homo sapiens
  chr8:42083084-42083114
  hypo
accgcacccggcctactttgttattttcat

SEQ ID NO: 75996 - DNA, 86 bp, Homo sapiens; identical to SEQ ID NO: 22406
  chr8:42134200-42134286
  hypo

SEQ ID NO: 75997 - DNA, 30 bp, Homo sapiens
  chr8:42136063-42136093
  hypo
ttaatagcccgctccggcctgattcctgag

SEQ ID NO: 75998 - DNA, 95 bp, Homo sapiens
  chr8:42144626-42144721
  hypo
ccttgtggcagctggagtgcccgaggccagagccgctttccctgctgcccgtgccacagcctcagggcctgcccgtctccagtgtccccactcat

SEQ ID NO: 75999 - DNA, 42 bp, Homo sapiens
  chr8:42145610-42145652
  hypo
tgaggtgggagaggctgggtgcggtggctcacgtctgtaatc

SEQ ID NO: 76000 - DNA, 174 bp, Homo sapiens; identical to SEQ ID NO: 22407
  chr8:42147386-42147560
  hypo

SEQ ID NO: 76001 - DNA, 86 bp, Homo sapiens
  chr8:42148194-42148280
  hypo
gagatgggacagcaccacacacgggggcagggagcatagcagagagggagcaggattcatgatcagagagccgggccagggctgca

SEQ ID NO: 76002 - DNA, 44 bp, Homo sapiens; identical to SEQ ID NO: 22409
  chr8:42255792-42255836
  hypo

SEQ ID NO: 76003 - DNA, 43 bp, Homo sapiens; identical to SEQ ID NO: 22410
  chr8:42256015-42256058
  hypo

SEQ ID NO: 76004 - DNA, 30 bp, Homo sapiens
  chr8:42268712-42268742
  hypo
tggtcggatactagcgccaccggccttgcc

SEQ ID NO: 76005 - DNA, 30 bp, Homo sapiens
  chr8:42271398-42271428
  hypo
attcctcacactcccgggaaagggtccctt

SEQ ID NO: 76006 - DNA, 31 bp, Homo sapiens; identical to SEQ ID NO: 22411
  chr8:42287377-42287408
  hypo

SEQ ID NO: 76007 - DNA, 30 bp, Homo sapiens
  chr8:42292909-42292939
  hypo
ggacagaaaccgagcgagtggggagcacca

SEQ ID NO: 76008 - DNA, 298 bp, Homo sapiens
  chr8:42293858-42294156
  hypo
ctgcatccagggcctccgtcatccctaacagacagcagctccactcttgcctttgccaaggccacggctccgatcttggcagctgcctctttccttcttctctcacatccgcatccaggccgtcgtccaaagccagtgcccctgtcaaacgtgccctgtgtggcccctgtcaaatgtgccctgtgtggcccctgctcacagctccacggctcccctctcgaggcgaggccttccttcctgtgtccatcggccacgtgctctgcatccacgacctgcagaccggcgacctcctagcttg

SEQ ID NO: 76009 - DNA, 30 bp, Homo sapiens
  chr8:42306730-42306760
  hypo
cagcctcagtggctcgtgttcactcagcca

SEQ ID NO: 76010 - DNA, 384 bp, Homo sapiens
  chr8:42333235-42333619
  hypo
atccttctggctgcagtgtggcgaccacattggatacaaggcaagcagaaacatggaggatgagtcaggagcccgctgcatggcttaggcatgagatgaggcatccgggaccaggctgtggacggtggtgggtgggagggaatacgatgatttaagagaactgcagcggcaaaatccaacaggaccagatggtggattaaacatgggggtggagagaggatacatggtttatggaaccgaagtgaaaaataaccgagtgggtttttcttctcttttgcattgtttttagttttgctttttggggctaggatggggtctgaccacaggtgcgcttttgattgggtgaagtagccgggtttactgtgtcttttttttttttttttt

SEQ ID NO: 76011 - DNA, 23 bp, Homo sapiens
  chr8:42333918-42333941
  hypo
ccggtttactgtgtctcaatgga

SEQ ID NO: 76012 - DNA, 35 bp, Homo sapiens
  chr8:42350486-42350521
  hypo
ccacgcccagccttggttttcgattaagtttaagg

SEQ ID NO: 76013 - DNA, 41 bp, Homo sapiens
  chr8:42399255-42399296
  hypo
tcaatatgtcaaataccggccgggcgcggtggctcacgctt

SEQ ID NO: 76014 - DNA, 52 bp, Homo sapiens; identical to SEQ ID NO: 22415
  chr8:42749967-42750019
  hypo

SEQ ID NO: 76015 - DNA, 39 bp, Homo sapiens
  chr8:42917135-42917174
  hypo
acaagcgtgagctaccgcgcctggtctgtttataatgtt

SEQ ID NO: 76016 - DNA, 280 bp, Homo sapiens; identical to SEQ ID NO: 45354
  chr8:42996734-42997014
  hypo

SEQ ID NO: 76017 - DNA, 30 bp, Homo sapiens
  chr8:43059504-43059534
  hypo
tcattggcgttgtccgggggagaaacaaac

SEQ ID NO: 76018 - DNA, 234 bp, Homo sapiens
  chr8:43059741-43059975
  hypo
ggctcccagaccagcgcgaggagctgcgcccaggcctagcaggcggtttggccgcggctgcagcttagcgtctaggccacgccaggcaggctcccggagccgtccactgccccaccaggaacgttccgggctcttctgctgcgcgcggaagcaagtgaaatccagcctcaaagactctgatggaagaacacctgtgaataccgcgccctctaggcgtccgccacaccccacggc

SEQ ID NO: 76019 - DNA, 30 bp, Homo sapiens
  chr8:43060263-43060293
  hypo
agacttttgacctccgtgcccgcccctccg

SEQ ID NO: 76020 - DNA, 30 bp, Homo sapiens
  chr8:43061714-43061744
  hypo
ttgaccaaacattccgtttgtttcgagcat

SEQ ID NO: 76021 - DNA, 31 bp, Homo sapiens
  chr8:48092297-48092328
  hypo
gctcagaggctggcggcgggaggcctgtggc

SEQ ID NO: 76022 - DNA, 298 bp, Homo sapiens
  chr8:48172268-48172566
  hypo
aagacagcaaggcccggcggaggtggcaatggcagacctggtttctcggcggagtcccagtgggaggcccggtgtccaaaatcctcaactagattgggcatgccgtttatcttgttccaactgttgacagtaatggcactagcaataatgtccttcccaggcaaagatggtttttcttccgtgttttcagccactgcagagtggacatctactatgaaccaagtatctgcggctttaggtaccagattcaaacacagaatggtggcagaacagggactaggacggagagaaaacctga

SEQ ID NO: 76023 - DNA, 151 bp, Homo sapiens
  chr8:48292966-48293117
  hypo
aggacctcggaggaccgtgttgctgggcggggcctgctgtttgctgtggagccccctggccctggtcactgccgccttctccaccctccactcctgcttggtgaactttgacccggcaggtgcctttcttgagcctcgtgattcccctccc

SEQ ID NO: 76024 - DNA, 204 bp, Homo sapiens; identical to SEQ ID NO: 22418
  chr8:48348566-48348770
  hypo

SEQ ID NO: 76025 - DNA, 240 bp, Homo sapiens; identical to SEQ ID NO: 22419
  chr8:48396518-48396758
  hypo

SEQ ID NO: 76026 - DNA, 231 bp, Homo sapiens
  chr8:48585772-48586003
  hypo
ctggggggaatcccatcatgtcgctggctgtccatcatggctgtgttgctgcaagctgggacaccaggttttatcctgctgggatatgcgtgtctaaacgtgtactgtcgcagagaatgcctcttattgttgttcttatcgtaatgttatcctgcagcttttctcagtatcgagcatccacacaaagcaaatatttctttcatgggaaacggtaaaaatgggaaaaggaca

SEQ ID NO: 76027 - DNA, 41 bp, Homo sapiens
  chr8:48593634-48593675
  hypo
aagagagagagagagaatgcgaatcttgagaccaggactgc

SEQ ID NO: 76028 - DNA, 1724 bp, Homo sapiens; identical to SEQ ID NO: 45358
  chr8:48649724-48651448
  hypo

SEQ ID NO: 76029 - DNA, 121 bp, Homo sapiens
  chr8:48683806-48683927
  hypo
acagtgaatctcaaaaaaaaaaagttactggtcattagttaataaacggtgctttaaaaattctcgtcagtgaaataatttttatgtacttatttttttgagacagagtctcgctttgtcg

SEQ ID NO: 76030 - DNA, 26 bp, Homo sapiens
  chr8:48684166-48684192
  hypo
accacgcccagccaataatttatatt

SEQ ID NO: 76031 - DNA, 117 bp, Homo sapiens
  chr8:48694943-48695060
  hypo
ggtcatgggcacaacgctataggtcctcagctgcagggccctctggctgcaggcggagtcttgggccaggatcccattcatgacctggaagagctgctccacgcgctggtcctgccg

SEQ ID NO: 76032 - DNA, 181 bp, Homo sapiens; identical to SEQ ID NO: 22425
  chr8:48711777-48711958
  hypo

SEQ ID NO: 76033 - DNA, 69 bp, Homo sapiens; identical to SEQ ID NO: 22426
  chr8:48744145-48744214
  hypo

SEQ ID NO: 76034 - DNA, 115 bp, Homo sapiens
  chr8:48744502-48744617
  hypo
aggcccagttactccccgccgcccagacacttggctctgctggttcattttcacctcgggtttcctcaaagacaaaacctacaggtgccgcagaggcagcgaccgggagcaggag

SEQ ID NO: 76035 - DNA, 180 bp, Homo sapiens
  chr8:48793717-48793897
  hypo
atacaggtcagataacacacccggcctgcttggccttccttgcctgctgacgggtgggttgaccgcacaggtgaaacaaacacacccacacaggatggttatcgagactggctaataagtacgggggattactgtgctagtctccctacatttgaacacgtttgaaattttccataataa

SEQ ID NO: 76036 - DNA, 195 bp, Homo sapiens
  chr8:48801153-48801348
  hypo
gctcctgtccacttgcgcgtcagggccatacaagttgacggcacaaagctcctcaatgctggccatgtgacaaaacagtaaattaggtgagctctgatctcgttaaattatcaagatacactgaaaaaaatgtttgcactgttatgaagcaaacagaggcaacatctaacaggatccacacgcactaagctagca

SEQ ID NO: 76037 - DNA, 30 bp, Homo sapiens; identical to SEQ ID NO: 22428
  chr8:48854953-48854983
  hypo

SEQ ID NO: 76038 - DNA, 30 bp, Homo sapiens
  chr8:48889505-48889535
  hypo
tttcatttttttcacgttataaataaaaat

SEQ ID NO: 76039 - DNA, 170 bp, Homo sapiens; identical to SEQ ID NO: 22429
  chr8:49055452-49055622
  hypo

SEQ ID NO: 76040 - DNA, 702 bp, Homo sapiens
  chr8:49172621-49173323
  hypo
gggtggaggggcctttttatgcgttggaaacgcttttttagtgaaactaaactgaagtacttacggagtagctgagctgggcggactgcgcaggagcccaggcaccaattggcgtgaactctccagttctggacccacatccagaggtgtgtgaagccaccccccagagcccagccaacggtaaataggactgtgacctgggaatcagaccgttcccgagcgccccctgtgtgtggtgttccttgggtggtggggaccgctgtgttcagcccgtccttggaagaggcgaggggtgctgccgtgggaggtagagagaagggcaggggtgtggtgctctttttttccattcctacttcagctaaaccattgccacttttatccgttttgtgccgcgagctcttacctactcttgttggttggcggctttcgggcagggaaacgggcaaacgtggacgcgcgcagctaaggcaggcgcggtgggcagggggctgggccgggcagggactgtgccgcccccgcttctgggtgggagcggcctgtctcctctccgagggtctgagagcacccgcacccaccttccttccccagggcattccggcctaggggaagggcgtctggaatgggagcgggcgctccaccgcctgcaggcatacggtaggcctggcccagtactgggcgtccgagctgcacccaaggggcagc

SEQ ID NO: 76041 - DNA, 43 bp, Homo sapiens
  chr8:49187832-49187875
  hypo
gacagggaggagcctttcccacggagcagactggccagccagg

SEQ ID NO: 76042 - DNA, 249 bp, Homo sapiens; identical to SEQ ID NO: 22430
  chr8:49241525-49241774
  hypo

SEQ ID NO: 76043 - DNA, 356 bp, Homo sapiens; identical to SEQ ID NO: 22431
  chr8:49334893-49335249
  hypo

SEQ ID NO: 76044 - DNA, 237 bp, Homo sapiens
  chr8:49339717-49339954
  hypo
tggctcctctgtgtttgcacacgtgcctctgtgcgggtggcacctgccctatttgtgctcttcgttgtttgctactgggatcagtggcttacgacgaacagcccatggccctggggcctcctgcactgccgtctcctgggagaaaggccgctctcacagccagccatgtgcacatcatcccattggtacccacagatggcactggccccttccttcaaacccgggccaagctccaaa

SEQ ID NO: 76045 - DNA, 602 bp, Homo sapiens
  chr8:49382241-49382843
  hypo
gtttatctcagctgaaatgtacgggaaaagtagacgtcaatcaggtggaaaagggcagagagagcaccgtccaggcagaagggagagcgtgagcaaggggcccgtgggactgagtgctgcgtgtcgccgcagaggggcatgaggacagtgctgggcacggcggctgtgggcagtgtgggccgacagaatccccaggccaggtcaggtgtcccggccatccatggagaacaaggagtcattacagaggctcggtggcacacggtgaaaatgaggttcttctgggaaattttaggctgcaggatgtgagtggcccacagcagggaaggtctggcaggcagcgagagcttccggactggaccccaagaaggaggtcaggctgggaacacagactcggaggttcccatccacagatggtaccgaggctactgtgtcgggtcagatcttccaggagaccggaggagggacgtggctgcgggaagcaagcccagagccgccagcccgggaccagcgggaggccagggagcaaggccacagcagaggcagccaggaccccaaatatcagaggctcaaatgaagttgacgttagctgttttatctgttaa

SEQ ID NO: 76046 - DNA, 450 bp, Homo sapiens
  chr8:49390182-49390632
  hypo
aagcccagcatcccacaaggacggacactcactacagcccggtgcctgcggagtattccgaacgcgagatccaaggaaaccacgaaggctcctctgcgggctcccttgcccctctgcggttcagtcgggagacgctcaggcgctgacaacagcctccaggtgccgttccctgcgcatggccccatctttgcgggcagtgtccagtgggcttgtgctcacacctgcgctgggggctccacactagacggccctggactactgaaatagtggacagaagggtctcccgagaatgtccagggtgggcaggcagtgctggggagccagcgggaagggaagggagcctgaggcggagaaacgcccacgcgggagctgctagtgcagccgcaagagcaaggcctgggctgcagtaggggggctgggcagtggcccgcagtgtgcagcaggccctgg

SEQ ID NO: 76047 - DNA, 30 bp, Homo sapiens
  chr8:49426517-49426547
  hypo
ctgcctgtgacccccgtgtccccaccatga

SEQ ID NO: 76048 - DNA, 529 bp, Homo sapiens; identical to SEQ ID NO: 45366
  chr8:49468662-49469191
  hypo

SEQ ID NO: 76049 - DNA, 52 bp, Homo sapiens; identical to SEQ ID NO: 22436
  chr8:49496532-49496584
  hypo

SEQ ID NO: 76050 - DNA, 45 bp, Homo sapiens
  chr8:49520278-49520323
  hypo
atttgtgtatttatttttttgcggcagagtctcgctctgtcaccc

SEQ ID NO: 76051 - DNA, 31 bp, Homo sapiens
  chr8:49527632-49527663
  hypo
cgggctgcggagcaaacgctgctgccacacg

SEQ ID NO: 76052 - DNA, 97 bp, Homo sapiens
  chr8:49546881-49546978
  hypo
ggcctgcatccgcatttttcacaggctcagtgcccgaatgagctgcagtgtagtctggctggctccccaacctgtcgcacaggccttgctcaccact

SEQ ID NO: 76053 - DNA, 30 bp, Homo sapiens; identical to SEQ ID NO: 22437
  chr8:49561741-49561771
  hypo

SEQ ID NO: 76054 - DNA, 220 bp, Homo sapiens; identical to SEQ ID NO: 22438
  chr8:49571909-49572129
  hypo

SEQ ID NO: 76055 - DNA, 40 bp, Homo sapiens
  chr8:49572363-49572403
  hypo
atttttgcaggatgacggatttgaacgagcgtgttgcctc

SEQ ID NO: 76056 - DNA, 81 bp, Homo sapiens
  chr8:49588259-49588340
  hypo
ccttgttctccagatggtacacggatggctgtgactctacagaaactgtctggaccttgcgggaagtggaggctggaggca

SEQ ID NO: 76057 - DNA, 261 bp, Homo sapiens
  chr8:49608989-49609250
  hypo
ttgtctccccagcttctccaccgcaccatgtgtctgggtctgtgattaccggaggcgactcgcaacaggcccagactcgcctgtgtgcatagcactaagggtaatgacaactcctctgtgtgtgcaggtgcctgttggagacgcagagctctgcagcagcaggtgagctgatgctgcaacctgctaaacgccgctcctgcggagcgccagggcccagagtgcacatggctctcaggctccgtgaaaagcttgcagtgagct

SEQ ID NO: 76058 - DNA, 304 bp, Homo sapiens; identical to SEQ ID NO: 22441
  chr8:49747337-49747641
  hypo

SEQ ID NO: 76059 - DNA, 36 bp, Homo sapiens; identical to SEQ ID NO: 22442
  chr8:49797124-49797160
  hypo

SEQ ID NO: 76060 - DNA, 161 bp, Homo sapiens
  chr8:49803110-49803271
  hypo
tccttatctgtaaaaatatgacgtaaataacggtgcccagctcggagggctgacatgaagattaagtgggctaatacttgtaactcgcttagaagggtgccaggcacgtagcattttatacagcgactttgagtaaaaacgatcttggtgatgtgtgccag

SEQ ID NO: 76061 - DNA, 463 bp, Homo sapiens
  chr8:49808458-49808921
  hypo
cattaaatatgaacgaagcactatatgagactataaatggaattaatttttgtgaaaacaagaaaaggagtccccgaattaattactgctgtaagattgagcttgagaatttgtcttacaaaatcttttaataatgtattattctactcacaaaacagatattggttttgtgcctagtatgttccctgaggtgtacagggaacctcaaggagctcccagactatgggagtgacccctgcggagctgacaagccaatgctggagaagtgcacgggcaggctcaggcgcagccactcaatgggcctgtctgtgtcgggggcaggggcacagagaggggcaggtgagtcgaagctgattgggtgaagaaaagacagtgaaaagacggtgagaccaaaggcacagagcgggtttcccgccccagctaccacgctggtctgcagagcggtaagtctaaactggggaga

SEQ ID NO: 76062 - DNA, 105 bp, Homo sapiens
  chr8:49809396-49809501
  hypo
gggattacaggcgtgagccactgagccctgactctggatggctttttgattcggggagaccactctgagggctctgctctgggcgatctccattcaggcagaact

SEQ ID NO: 76063 - DNA, 30 bp, Homo sapiens
  chr8:49820746-49820776
  hypo
aaaacaccaagctccgctccactgtgcagg

SEQ ID NO: 76064 - DNA, 471 bp, Homo sapiens
  chr8:49890417-49890888
  hypo
gctcgccttgaccacggtttccctggcgaccccaggggcacttgggacggttctcactgcccgcgcagggccgggccaggaggtggccgcgcggccggggaggggctcggtgctccagaaggcaccgcgctctccttgggtgggaaggcactgggccagcggggctggggcgggcagcccccaggcaaggccgccagcacttcgccagcactgcgacctggccctgcacctagccttgcacccagcccccggcaactcctgggcggcctgcgtcagctgcatcgcgcagccctcgcggatgggacgcccagggctcgaacccgaggcggggtgggccgctgctgcctacccttcttgaactggaagcccgccgtaccacccgggcgtcgcaggtggcgtggaaggccaggctgcgctggctctgggagtggcggcgaggacgggactggaagggccgggcctctggggcct

SEQ ID NO: 76065 - DNA, 38 bp, Homo sapiens
  chr8:50014662-50014700
  hypo
gaatcaggcacttccaagagccgacccatcagtctgca

SEQ ID NO: 76066 - DNA, 34 bp, Homo sapiens; identical to SEQ ID NO: 22444
  chr8:50015644-50015678
  hypo

SEQ ID NO: 76067 - DNA, 32 bp, Homo sapiens
  chr8:50053018-50053050
  hypo
aaaaacaaaatttgggccagtcgcggtggctc

SEQ ID NO: 76068 - DNA, 41 bp, Homo sapiens; identical to SEQ ID NO: 22445
  chr8:50071090-50071131
  hypo

SEQ ID NO: 76069 - DNA, 43 bp, Homo sapiens
  chr8:50115375-50115418
  hypo
atggctgggtccacttaaatgcggctgaaatgaacacacagta

SEQ ID NO: 76070 - DNA, 20 bp, Homo sapiens
  chr8:50313611-50313631
  hypo
aataccaataacagacaagt

SEQ ID NO: 76071 - DNA, 320 bp, Homo sapiens
  chr8:50313930-50314250
  hypo
tctcaaaaaaaaaaaaaaaaaaaaaaaaccaacagaatgggacatcacaggagcagacgccaagacagttatggtaaccgcaggcaggcagcaggagtgagcaaaccaaagcgagagcggactccggtgctggaggacagagcctcggaatccagctcaccagagcactatggaggaacaggaagtaacgcaccgccccccactccccggcaaagcttgtctgcatagtgagaccaccacagtcgctcacacacgaagaggtatggaaagctttgctgcttacataatgaggaccctggggagagcgggacacgcccctc

SEQ ID NO: 76072 - DNA, 16 bp, Homo sapiens
  chr8:50377740-50377756
  hypo
aaaataaaacaaacaa

SEQ ID NO: 76073 - DNA, 39 bp, Homo sapiens
  chr8:50377958-50377997
  hypo
cagtaggaggaaagccagggccgctgagcggccagactc

SEQ ID NO: 76074 - DNA, 31 bp, Homo sapiens
  chr8:50482181-50482212
  hypo
tttttttttttttttttgagacgagtcttgc

SEQ ID NO: 76075 - DNA, 121 bp, Homo sapiens
  chr8:50568928-50569049
  hypo
gaaaaataggacagaatagcaagtgaaaggggtccgtccgatggtgctcaccatttggcgatagtcgattgtcccttcatggttgccaaaatgtgtccagaattcgtgagttcttggactc

SEQ ID NO: 76076 - DNA, 83 bp, Homo sapiens
  chr8:50740530-50740613
  hypo
acaggcgtgagccactgtgcccggccgcagatatttttcttgaatgagtacattgtttttccgcccagagaaaatgtagtaat

SEQ ID NO: 76077 - DNA, 43 bp, Homo sapiens
  chr8:50892052-50892095
  hypo
cccaacctttgcacttccccccgatcctcctcaccccttccct

SEQ ID NO: 76078 - DNA, 33 bp, Homo sapiens
  chr8:50945963-50945996
  hypo
gtgagccactgcgcccagccaatttattattct

SEQ ID NO: 76079 - DNA, 28 bp, Homo sapiens
  chr8:51010216-51010244
  hypo
aaaaaacaaaaaacgaaactaaggagag

SEQ ID NO: 76080 - DNA, 121 bp, Homo sapiens
  chr8:52184040-52184161
  hypo
gcagggctcgggacctgcagcccatcatacccgagcctcccgcgacgctgtcggctcctgcgcagcccgagcctgccagatgagtgccgccccctgctccacagcacctggtcccatcgac

SEQ ID NO: 76081 - DNA, 52 bp, Homo sapiens
  chr8:52191720-52191772
  hypo
tgtttgcacattgtggatggccgctttctccgacagacacagctgcctccct

SEQ ID NO: 76082 - DNA, 28 bp, Homo sapiens
  chr8:52289561-52289589
  hypo
ccaccgcgcccagccttgtttctcttta

SEQ ID NO: 76083 - DNA, 42 bp, Homo sapiens
  chr8:53459773-53459815
  hypo
caggccgggcatggtggctcacgcccataattccaacacttt

SEQ ID NO: 76084 - DNA, 30 bp, Homo sapiens
  chr8:53475977-53476007
  hypo
cgaaactccgtctctaaataaataaataaa

SEQ ID NO: 76085 - DNA, 33 bp, Homo sapiens
  chr8:53487089-53487122
  hypo
cagagggagaccgaagaaagaaagaaagagggg

SEQ ID NO: 76086 - DNA, 35 bp, Homo sapiens; identical to SEQ ID NO: 22448
  chr8:53657304-53657339
  hypo

SEQ ID NO: 76087 - DNA, 31 bp, Homo sapiens
  chr8:53757576-53757607
  hypo
acagtgccaggccccacggccttccagttag

SEQ ID NO: 76088 - DNA, 65 bp, Homo sapiens; identical to SEQ ID NO: 45378
  chr8:53853448-53853513
  hypo

SEQ ID NO: 76089 - DNA, 937 bp, Homo sapiens; identical to SEQ ID NO: 45379
  chr8:53853579-53854516
  hypo

SEQ ID NO: 76090 - DNA, 209 bp, Homo sapiens; identical to SEQ ID NO: 22450
  chr8:54154467-54154676
  hypo

SEQ ID NO: 76091 - DNA, 432 bp, Homo sapiens; identical to SEQ ID NO: 6279
  chr8:54163694-54164126
  hypo

SEQ ID NO: 76092 - DNA, 31 bp, Homo sapiens
  chr8:54416852-54416883
  hypo
acacacttggaggtgcgcgtgtgtgcatgcc

SEQ ID NO: 76093 - DNA, 30 bp, Homo sapiens; identical to SEQ ID NO: 22452
  chr8:54507324-54507354
  hypo

SEQ ID NO: 76094 - DNA, 122 bp, Homo sapiens
  chr8:54640631-54640753
  hypo
tccttgcctttgaacttgccacgcagcaggcagggtgacgtcaaacacaagccttctcacggtagccgcctgttcagtcctctaattgcttccattattccgggaaaatgtcctcactcctt

SEQ ID NO: 76095 - DNA, 258 bp, Homo sapiens
  chr8:54645358-54645616
  hypo
gtcccagcctacccccgctttacagaggccagcagccccccaggaaccaggttcaggagctaacatgctccaggtctcacctcaaaggggaggatcagagccgcgagaggccagggaaggaagtcaagatagtcaagcaggcagtctcaaatctggccgtgctcgagctatgcaaatgcccctgacggagcagtgatatactggggtagacaaggacgggcatatggtagaaaggtgtgcctttgtgtatcaaccctt

SEQ ID NO: 76096 - DNA, 68 bp, Homo sapiens
  chr8:54645735-54645803
  hypo
gccagctgctcatgtactgaggacagctggttcacccgcctggacttgaaggacgctttctttagcat

SEQ ID NO: 76097 - DNA, 33 bp, Homo sapiens; identical to SEQ ID NO: 22454
  chr8:54647892-54647925
  hypo

SEQ ID NO: 76098 - DNA, 160 bp, Homo sapiens
  chr8:54658317-54658477
  hypo
agaccacgtaaaggacgcttgtttctagcgtaagagacaacatgggatggcagaacgctgccttgttcccccacagctggggatgtgtccattagcgactccaattattcaccactctacacatgtccatggataactacaaaagcgcctctagtattga

SEQ ID NO: 76099 - DNA, 16 bp, Homo sapiens
  chr8:54665413-54665429
  hypo
tttcttatgactcaat

SEQ ID NO: 76100 - DNA, 192 bp, Homo sapiens; identical to SEQ ID NO: 22455
  chr8:54750267-54750459
  hypo

SEQ ID NO: 76101 - DNA, 2079 bp, Homo sapiens; identical to SEQ ID NO: 6284
  chr8:54792701-54794780
  hypo

SEQ ID NO: 76102 - DNA, 21 bp, Homo sapiens
  chr8:54869912-54869933
  hypo
ccacagcgctgggattacagg

SEQ ID NO: 76103 - DNA, 18 bp, Homo sapiens
  chr8:54870411-54870429
  hypo
taaaaaacaacaaggccg

SEQ ID NO: 76104 - DNA, 103 bp, Homo sapiens
  chr8:54925424-54925527
  hypo
ttgagattacatgaaccatgatcgtgccacggcagtctagcctgtgtggacagagtgagactccatttctaaaataaaaattaaaaaacgacgacgacaaaaa

SEQ ID NO: 76105 - DNA, 31 bp, Homo sapiens
  chr8:54935857-54935888
  hypo
gacaagagcgaaactccgtctcaaaaaaaat

SEQ ID NO: 76106 - DNA, 86 bp, Homo sapiens
  chr8:54945253-54945339
  hypo
ctttgatgtgtagatttatgtcgttcatcaaagtcagggattttttttcaaaagtctgggtctcggccgggcatggtggctcacgc

SEQ ID NO: 76107 - DNA, 39 bp, Homo sapiens; identical to SEQ ID NO: 22458
  chr8:54956721-54956760
  hypo

SEQ ID NO: 76108 - DNA, 28 bp, Homo sapiens
  chr8:55022711-55022739
  hypo
attttttttgaataggtcaggcgcggtg

SEQ ID NO: 76109 - DNA, 28 bp, Homo sapiens
  chr8:55064964-55064992
  hypo
catgcccggccttaaatatttcaaaagt

SEQ ID NO: 76110 - DNA, 166 bp, Homo sapiens
  chr8:55212683-55212849
  hypo
ttcactctgccaggtctgcctcgaccttccccgaactccaggagcccacccaggggtacgccggaataaagctccggtgcagtaacctccatctcgaggctgcttcgtggggagcctgacctgtggcagtgactgcgagccacgcggagagttactcactgtaatc

SEQ ID NO: 76111 - DNA, 697 bp, Homo sapiens; identical to SEQ ID NO: 45393
  chr8:55366951-55367648
  hypo

SEQ ID NO: 76112 - DNA, 203 bp, Homo sapiens; identical to SEQ ID NO: 6292
  chr8:55371172-55371375
  hypo

SEQ ID NO: 76113 - DNA, 285 bp, Homo sapiens; identical to SEQ ID NO: 6293
  chr8:55371439-55371724
  hypo

SEQ ID NO: 76114 - DNA, 74 bp, Homo sapiens; identical to SEQ ID NO: 6294
  chr8:55371993-55372067
  hypo

SEQ ID NO: 76115 - DNA, 168 bp, Homo sapiens; identical to SEQ ID NO: 6295
  chr8:55372416-55372584
  hypo

SEQ ID NO: 76116 - DNA, 62 bp, Homo sapiens; identical to SEQ ID NO: 45404
  chr8:55383182-55383244
  hypo

SEQ ID NO: 76117 - DNA, 87 bp, Homo sapiens
  chr8:55826293-55826380
  hypo
ccatcactaaacgaccttccgcctggggatgggtaaaacaacccttatgcgggttcaacacctgcacatgagcgtcactgccctcac

SEQ ID NO: 76118 - DNA, 30 bp, Homo sapiens
  chr8:55828520-55828550
  hypo
gttcaagggtgctgccggaaaaagacgaaa

SEQ ID NO: 76119 - DNA, 257 bp, Homo sapiens; identical to SEQ ID NO: 6299
  chr8:56013635-56013892
  hypo

SEQ ID NO: 76120 - DNA, 173 bp, Homo sapiens; identical to SEQ ID NO: 6300
  chr8:56014011-56014184
  hypo

SEQ ID NO: 76121 - DNA, 367 bp, Homo sapiens; identical to SEQ ID NO: 6301
  chr8:56014376-56014743
  hypo

SEQ ID NO: 76122 - DNA, 18 bp, Homo sapiens
  chr8:56015034-56015052
  hypo
ggtgtggaggcatcatgg

SEQ ID NO: 76123 - DNA, 476 bp, Homo sapiens; identical to SEQ ID NO: 6303
  chr8:56015185-56015661
  hypo

SEQ ID NO: 76124 - DNA, 57 bp, Homo sapiens; identical to SEQ ID NO: 6304
  chr8:56015749-56015806
  hypo

SEQ ID NO: 76125 - DNA, 229 bp, Homo sapiens
  chr8:56361772-56362001
  hypo
actctggttctagaaacaattcgcctgcagccagctggctggactatttacaggcccattgcgggctgtactttggccacctcccggcacggtgctcagctgtgacgccgaaataagttagggctggccgggcggtgcggggcagggactagggctgtacacacaagtgctgggggctcggggcctcactactgccgagggccgggccggggctgtaaacatggccagg

SEQ ID NO: 76126 - DNA, 252 bp, Homo sapiens; identical to SEQ ID NO: 22471
  chr8:56362504-56362756
  hypo

SEQ ID NO: 76127 - DNA, 502 bp, Homo sapiens
  chr8:56364011-56364513
  hypo
cttctcctgctccaggctactcgagtctgcctggaactggcctggagaaggtgcgttctgggccttaaagagtccgactacacctatgccgtacaggcccccagaatgcagcagtactgccttggaccgccggatgcgccagcagacaacggtgaagcggttctggcggtagcagtaggacacgcgctgcagggcgttgtcctggacactctggggcacgatcagcagccccgggtacctgcggtagatggcatgcatgcggttgaccagagaaatgcggaaggattcagacttggcccggctcaggcggctgctcagggggcccaggccaaggcactgatagtcgcggcagcaagccctttccaccaggaggctgctcatggtcatgccgtccgagggcttcaaggctgaggacggggtcagtgtgctgggctccagctcttccgacactgagatctcctcctcctggtcctcagagggcggctggctccagtgctcctag

SEQ ID NO: 76128 - DNA, 161 bp, Homo sapiens
  chr8:56364907-56365068
  hypo
cagggggtctgtgagcatccccgtgaagatgacccggtacgtagtgaggaagagggcgccctcagctgggagcagtgctggccaccccgcactgcccgccctcgcaccctcctcacgcccatccggtggcaggtagatgcgcaggccatccagcacacact

SEQ ID NO: 76129 - DNA, 388 bp, Homo sapiens
  chr8:56366963-56367351
  hypo
ccaggaggctcctgcaggcatcggtgagctgctggtagctccgggacaggaagagaacctcgtgctccatgagggtggcacagaccaaagacagtacgttggtgatgcccagctggcggaagagcaggccacgctgcagctgctgatgggcagggagtcggccagtggagtctggatgacctgccggtcaccagcccccaaataaatcgtcctctactagcccccagccaggggcacggtgcacgtcagcaggttcccaattacgttccctgggaacacattcaggccctccacgtggacggcatagatgaggccgaggctgttcctgaacacctccgcatggtcaagtcgcgacacaggtaccagcgtctttggggcaaacatctgg

SEQ ID NO: 76130 - DNA, 30 bp, Homo sapiens
  chr8:56367708-56367738
  hypo
cgctgggcgggctccgcggctcggggactc

SEQ ID NO: 76131 - DNA, 30 bp, Homo sapiens; identical to SEQ ID NO: 22473
  chr8:56436574-56436604
  hypo

SEQ ID NO: 76132 - DNA, 98 bp, Homo sapiens
  chr8:56602041-56602139
  hypo
ggacaaacttctccaagagcccgcccttcccggactccatccggctgcgcggggcagagttctgcattgcagaggccgggctgtggggacccaggcca

SEQ ID NO: 76133 - DNA, 38 bp, Homo sapiens; identical to SEQ ID NO: 22474
  chr8:56613553-56613591
  hypo

SEQ ID NO: 76134 - DNA, 22 bp, Homo sapiens
  chr8:56733089-56733111
  hypo
cgtctcaaaaaacaaaacaaaa

SEQ ID NO: 76135 - DNA, 31 bp, Homo sapiens; identical to SEQ ID NO: 45412
  chr8:56791958-56791989
  hypo

SEQ ID NO: 76136 - DNA, 978 bp, Homo sapiens; identical to SEQ ID NO: 6306
  chr8:56792219-56793197
  hypo

SEQ ID NO: 76137 - DNA, 31 bp, Homo sapiens; identical to SEQ ID NO: 22476
  chr8:56860458-56860489
  hypo

SEQ ID NO: 76138 - DNA, 38 bp, Homo sapiens
  chr8:56979944-56979982
  hypo
aaaaagaagaaaaatcatggccgggcgcggtggctcac

SEQ ID NO: 76139 - DNA, 24 bp, Homo sapiens
  chr8:56983271-56983295
  hypo
agcgagactgtttccatttaaatt

SEQ ID NO: 76140 - DNA, 399 bp, Homo sapiens
  chr8:57079619-57080018
  hypo
tcaggtgatcctttcgcccaaatctctgtgcacaatactgacagaggaagtcctttcttccagtgtgcaccaccatgtgtctccggacatcctttcgggtgtagaaccggcgatcacaatgttcgcactggtgctttttttctttaaccccaccagacgacttgcctgcatgagatttaaggtgctccagaagcactcccgtgctttcaaaagtttgcaaacataccttacaggtgaggtcaccacttgttgcggcatgcaaggccaagtgacgtttaaatccaagcttggtattgtagttcttgccacattcttcgcacttaaacgtctctttgttagggtcgtgtgtatggaggtgattcttcagatgatctttccggtgaaacattttctcacaat

SEQ ID NO: 76141 - DNA, 14 bp, Homo sapiens
  chr8:57360611-57360625
  hypo
ccgcggggctccgg

SEQ ID NO: 76142 - DNA, 33 bp, Homo sapiens; identical to SEQ ID NO: 6314
  chr8:57360769-57360802
  hypo

SEQ ID NO: 76143 - DNA, 30 bp, Homo sapiens; identical to SEQ ID NO: 22480
  chr8:57390746-57390776
  hypo

SEQ ID NO: 76144 - DNA, 21 bp, Homo sapiens
  chr8:58044268-58044289
  hypo
tttttttttgagacagagtct

SEQ ID NO: 76145 - DNA, 81 bp, Homo sapiens; identical to SEQ ID NO: 22482
  chr8:58044528-58044609
  hypo

SEQ ID NO: 76146 - DNA, 125 bp, Homo sapiens
  chr8:58106023-58106148
  hypo
catctgcggcaggcacgtggtgccgcgagaacttggctcagggacggtttttccgccatgcgcagattctcgcctctcgcgggggcgccagggggcagctggttgaggtgcgcatgcgcactggc

SEQ ID NO: 76147 - DNA, 30 bp, Homo sapiens
  chr8:58117085-58117115
  hypo
cagtgggcccatgagcggaggcagatgcgt

SEQ ID NO: 76148 - DNA, 251 bp, Homo sapiens
  chr8:58117446-58117697
  hypo
tggcagcgcaggcgccgtgtgctcactggagttgttcgcatggtcgcttgaggcgttcctcctgtaagcagacgaatgtgcccgaggtaaaggtcgtaaagcagtgaacctcccaccagtttgcctctcagggtgcgtacgagagcccactcacctgacactcgaggtctgccggagaggcttccgacgttcctgatagctgtggggggtggcggggctgcctttccctggcgccgcgtgcgaccagtgat

SEQ ID NO: 76149 - DNA, 223 bp, Homo sapiens
  chr8:58122847-58123070
  hypo
ttcgggtggggctgtcgactggcaccacggcctgtcagaccgtgggcggggggcgttgcaggcacagtgcggttcctagtcttaggcatgctcacttgaggcgttcttcccctacctgtcgactgatctcagaggaaggagactgagctgctcagccctgccggtgtggctggcagggtgtcccgcattagcccatgtgcccgaggtggagtacaggactgga

SEQ ID NO: 76150 - DNA, 90 bp, Homo sapiens
  chr8:58130491-58130581
  hypo
ggagtagattgcctgttttcccgaaggaacggcaagttccaaaggtcagaggctcatgtgaactctgtcgggttcaggagcagctcagtg

SEQ ID NO: 76151 - DNA, 30 bp, Homo sapiens
  chr8:58173586-58173616
  hypo
cccccaactttgggcgcgggtcgagcagga

SEQ ID NO: 76152 - DNA, 298 bp, Homo sapiens
  chr8:58191333-58191631
  hypo
taccagggcttctaattcaggcggttggcaggacagctgcaagaagggaacccgcagctgcaggaagagaacctggcggccacacagttcccagcgcccacgacccggggctcagggcgcgggagaaagaggagctgaccgtagggtgggagggaggtgcactcggcgaccctcaggctttctgggaccaggcctcccagcctccgcctgggctcagctgcagctgccacctgcacatggcgcgcggcagcacagatggcaatccaataccctgcccgcaccaccagccctggacccc

SEQ ID NO: 76153 - DNA, 206 bp, Homo sapiens
  chr8:58982796-58983002
  hypo
actgtgttcttgcaacggtggaggtgctcggctggtaacgttaaagaaggaataaggcgcccgacagaaggcgtttgtctttgttgtggagcatcagcgttaaggacagccggctgctgtgggaggtcagtgaaggaggctcagttcatggtaattacttaagtctgtctctcacgaaaaacacggccatgcgtgaaatgaagtat

SEQ ID NO: 76154 - DNA, 88 bp, Homo sapiens; identical to SEQ ID NO: 22485
  chr8:58991410-58991498
  hypo

SEQ ID NO: 76155 - DNA, 290 bp, Homo sapiens; identical to SEQ ID NO: 22486
  chr8:59059044-59059334
  hypo

SEQ ID NO: 76156 - DNA, 30 bp, Homo sapiens
  chr8:59063214-59063244
  hypo
tgactctcagatctcggtcaccaagcccag

SEQ ID NO: 76157 - DNA, 18 bp, Homo sapiens
  chr8:59408078-59408096
  hypo
gcccggcctggtcagggc

SEQ ID NO: 76158 - DNA, 155 bp, Homo sapiens
  chr8:59686609-59686764
  hypo
ggattacagacgtgagccactgcgcctggccaatatgcaactttcaatcaattccgtaccccactttcaatcaattcctacagagatgaactcatacagagcggggtggtttctaactgaagaatcagactttgcagagacgttgacgcagggtc

SEQ ID NO: 76159 - DNA, 2619 bp, Homo sapiens; identical to SEQ ID NO: 45431
  chr8:60030067-60032686
  hypo

SEQ ID NO: 76160 - DNA, 237 bp, Homo sapiens; identical to SEQ ID NO: 22488
  chr8:60506002-60506239
  hypo

SEQ ID NO: 76161 - DNA, 30 bp, Homo sapiens; identical to SEQ ID NO: 6321
  chr8:60699763-60699793
  hypo

SEQ ID NO: 76162 - DNA, 43 bp, Homo sapiens
  chr8:60733750-60733793
  hypo
tggggccttgctgtgacctcacgttgtgtggtttggagaaaac

SEQ ID NO: 76163 - DNA, 32 bp, Homo sapiens; identical to SEQ ID NO: 22490
  chr8:61034761-61034793
  hypo

SEQ ID NO: 76164 - DNA, 30 bp, Homo sapiens
  chr8:61131386-61131416
  hypo
cccacggcccctgctcgtgttgcagtccct

SEQ ID NO: 76165 - DNA, 156 bp, Homo sapiens
  chr8:61156139-61156295
  hypo
cagtttagtgaaactgctcaccgtctacggccataccaccctgaacgcgcccgatctcgtctgaaacttctcaccatgttccccactaaatcacgttttcgcctgggagaccagatcacctgctctgcagcagccggtagccttgcctgtctttct

SEQ ID NO: 76166 - DNA, 17 bp, Homo sapiens
  chr8:61168437-61168454
  hypo
tgcaaggtgcttccaac

SEQ ID NO: 76167 - DNA, 966 bp, Homo sapiens; identical to SEQ ID NO: 6322
  chr8:61193291-61194257
  hypo

SEQ ID NO: 76168 - DNA, 21 bp, Homo sapiens
  chr8:61297073-61297094
  hypo
gcccaacctctttcttctttt

SEQ ID NO: 76169 - DNA, 33 bp, Homo sapiens
  chr8:61557773-61557806
  hypo
tgatggagctccgtgaggtgcatactccttctc

SEQ ID NO: 76170 - DNA, 199 bp, Homo sapiens
  chr8:61590483-61590682
  hypo
attctagtcccgacacgtttaataatgggcatacatcctatttctttgtttcataatcattgagctctctgccttctctctcttttttggtatggtaacaaattcgacaaaatcaatgccatctagttaaactttttgattaagtagtggatccggtgtcctatccacgaagaggtgggaaaagcgatgtggagaagca

SEQ ID NO: 76171 - DNA, 97 bp, Homo sapiens
  chr8:61779844-61779941
  hypo
aatgggtagaaaaacacaatgcggtagtgtcagcaagggacacaaaggcactctggtgtcctgcagaccagcgctcgatgccagaaaccagtgtgtg

SEQ ID NO: 76172 - DNA, 789 bp, Homo sapiens; identical to SEQ ID NO: 45435
  chr8:61822238-61823027
  hypo

SEQ ID NO: 76173 - DNA, 31 bp, Homo sapiens
  chr8:62034028-62034059
  hypo
tgcgtgtatctgtttgcgtgtattggaatat

SEQ ID NO: 76174 - DNA, 31 bp, Homo sapiens; identical to SEQ ID NO: 6325
  chr8:62626392-62626423
  hypo

SEQ ID NO: 76175 - DNA, 51 bp, Homo sapiens; identical to SEQ ID NO: 45439
  chr8:62626672-62626723
  hypo

SEQ ID NO: 76176 - DNA, 215 bp, Homo sapiens; identical to SEQ ID NO: 45440
  chr8:62627198-62627413
  hypo

SEQ ID NO: 76177 - DNA, 30 bp, Homo sapiens
  chr8:62745085-62745115
  hypo
agagagtcgtgcgccgtcactggtttctca

SEQ ID NO: 76178 - DNA, 420 bp, Homo sapiens; identical to SEQ ID NO: 45446
  chr8:65281382-65281802
  hypo

SEQ ID NO: 76179 - DNA, 179 bp, Homo sapiens; identical to SEQ ID NO: 6333
  chr8:65281825-65282004
  hypo

SEQ ID NO: 76180 - DNA, 125 bp, Homo sapiens
  chr8:65483618-65483743
  hypo
tctggtatactttcgcggtgggatttcggctgctggaggcaccttctctctgcgctctggtttgccttccctgaccctggccatcggcgtggttcccccgccagcagtgccgggaggtcggctca

SEQ ID NO: 76181 - DNA, 1239 bp, Homo sapiens; identical to SEQ ID NO: 6340
  chr8:65492339-65493578
  hypo

SEQ ID NO: 76182 - DNA, 148 bp, Homo sapiens; identical to SEQ ID NO: 6341
  chr8:65493806-65493954
  hypo

SEQ ID NO: 76183 - DNA, 523 bp, Homo sapiens; identical to SEQ ID NO: 6342
  chr8:65494076-65494599
  hypo

SEQ ID NO: 76184 - DNA, 18 bp, Homo sapiens
  chr8:65541478-65541496
  hypo
ccctcaacatttaaagcc

SEQ ID NO: 76185 - DNA, 39 bp, Homo sapiens; identical to SEQ ID NO: 22503
  chr8:65757969-65758008
  hypo

SEQ ID NO: 76186 - DNA, 39 bp, Homo sapiens; identical to SEQ ID NO: 22504
  chr8:65758247-65758286
  hypo

SEQ ID NO: 76187 - DNA, 37 bp, Homo sapiens
  chr8:66157670-66157707
  hypo
gtaacggtcactattcggtggtctgctgccagtctga

SEQ ID NO: 76188 - DNA, 241 bp, Homo sapiens; identical to SEQ ID NO: 22505
  chr8:66548503-66548744
  hypo

SEQ ID NO: 76189 - DNA, 26 bp, Homo sapiens
  chr8:66560526-66560552
  hypo
caggcgtgagtcaccatgcctggccc

SEQ ID NO: 76190 - DNA, 30 bp, Homo sapiens
  chr8:66635172-66635202
  hypo
cgaggcacaaagagcgaaagaacagcgtat

SEQ ID NO: 76191 - DNA, 45 bp, Homo sapiens
  chr8:66877769-66877814
  hypo
catatcaaaggaaagcgcagagtgatccactgcgcaatgttccac

SEQ ID NO: 76192 - DNA, 1500 bp, Homo sapiens; identical to SEQ ID NO: 45471
  chr8:67024928-67026428
  hypo

SEQ ID NO: 76193 - DNA, 104 bp, Homo sapiens
  chr8:67299563-67299667
  hypo
cttccttgtgcagggagcaatcgtgtcccatggaacaatcttaatcttgcagtgtcaccaggcacttacgtgagatgcatggagaggctgttaacacacttcct

SEQ ID NO: 76194 - DNA, 30 bp, Homo sapiens; identical to SEQ ID NO: 22508
  chr8:67371073-67371103
  hypo

SEQ ID NO: 76195 - DNA, 43 bp, Homo sapiens
  chr8:67384647-67384690
  hypo
gaggcagtctccaggaccaagcgcactttgaatggacagaaat

SEQ ID NO: 76196 - DNA, 450 bp, Homo sapiens; identical to SEQ ID NO: 45476
  chr8:67417574-67418024
  hypo

SEQ ID NO: 76197 - DNA, 30 bp, Homo sapiens; identical to SEQ ID NO: 22510
  chr8:67624596-67624626
  hypo

SEQ ID NO: 76198 - DNA, 30 bp, Homo sapiens
  chr8:67634401-67634431
  hypo
tataggaagctctgcgccgagacaatagct

SEQ ID NO: 76199 - DNA, 15 bp, Homo sapiens
  chr8:67873406-67873421
  hypo
cagccacctgtgaac

SEQ ID NO: 76200 - DNA, 252 bp, Homo sapiens; identical to SEQ ID NO: 6352
  chr8:67873798-67874050
  hypo

SEQ ID NO: 76201 - DNA, 508 bp, Homo sapiens; identical to SEQ ID NO: 6353
  chr8:67874164-67874672
  hypo

SEQ ID NO: 76202 - DNA, 858 bp, Homo sapiens; identical to SEQ ID NO: 45486
  chr8:67874755-67875613
  hypo

SEQ ID NO: 76203 - DNA, 30 bp, Homo sapiens
  chr8:67898702-67898732
  hypo
cctgttgtccctatcgccacggcagctgcc

SEQ ID NO: 76204 - DNA, 438 bp, Homo sapiens; identical to SEQ ID NO: 45487
  chr8:67940670-67941108
  hypo

SEQ ID NO: 76205 - DNA, 22 bp, Homo sapiens
  chr8:67956847-67956869
  hypo
tttggagacagagtttcgctct

SEQ ID NO: 76206 - DNA, 26 bp, Homo sapiens
  chr8:68065111-68065137
  hypo
ttgcctatacaaaactacatgcgaga

SEQ ID NO: 76207 - DNA, 371 bp, Homo sapiens
  chr8:68115287-68115658
  hypo
aacattaaatgtgaggcgtgtgcagcttacctgctttccacagggcagtcctctgttcgttgttggaattaaacgcttttgcaaatctatgtgactctaataagcagtccagtagcttaaaaagttgttgtgatgttaaaaagcggtacattccttggtcttgagtatcaacgcgaacatcaaagtccaccgcatctctctttggaaaacaaaccaccccagcatatacacacagtcacaataattttacttgatttacaactcaatgctccccaaagaccagttttacaagaaagccacagatactcagcttgatctaacctaacagaaagtaagggaaggtccaccttccagtacgcatcctcgtcccc

SEQ ID NO: 76208 - DNA, 44 bp, Homo sapiens
  chr8:68236302-68236346
  hypo
tgggattacaggcgtgagccaccgcagccagccacaacctactt

SEQ ID NO: 76209 - DNA, 24 bp, Homo sapiens
  chr8:68858252-68858276
  hypo
tttttttgaggagtcttgctccgt

SEQ ID NO: 76210 - DNA, 473 bp, Homo sapiens; identical to SEQ ID NO: 6355
  chr8:68863997-68864470
  hypo

SEQ ID NO: 76211 - DNA, 361 bp, Homo sapiens; identical to SEQ ID NO: 6356
  chr8:68864545-68864906
  hypo

SEQ ID NO: 76212 - DNA, 306 bp, Homo sapiens; identical to SEQ ID NO: 45493
  chr8:68864942-68865248
  hypo

SEQ ID NO: 76213 - DNA, 17 bp, Homo sapiens
  chr8:68993521-68993538
  hypo
gacttgacaggaggtgg

SEQ ID NO: 76214 - DNA, 31 bp, Homo sapiens
  chr8:69197908-69197939
  hypo
cactgcgcccggccttaaatattttcttcta

SEQ ID NO: 76215 - DNA, 278 bp, Homo sapiens; identical to SEQ ID NO: 45494
  chr8:69242788-69243066
  hypo

SEQ ID NO: 76216 - DNA, 618 bp, Homo sapiens; identical to SEQ ID NO: 6359
  chr8:69243284-69243902
  hypo

SEQ ID NO: 76217 - DNA, 30 bp, Homo sapiens; identical to SEQ ID NO: 22521
  chr8:70041812-70041842
  hypo

SEQ ID NO: 76218 - DNA, 132 bp, Homo sapiens
  chr8:70246376-70246508
  hypo
ctgttcctgcctccgcgccaggtcctggggtgagcacacatggctgcccgtcccgccgtgtctctcctccgcactgggtcccggggtgcgtgtgcaggtgtgtctgtccctcctccgcgccacgtcctcact

SEQ ID NO: 76219 - DNA, 30 bp, Homo sapiens; identical to SEQ ID NO: 45498
  chr8:70744328-70744358
  hypo

SEQ ID NO: 76220 - DNA, 909 bp, Homo sapiens; identical to SEQ ID NO: 45499
  chr8:70744865-70745774
  hypo

SEQ ID NO: 76221 - DNA, 88 bp, Homo sapiens
  chr8:71017205-71017293
  hypo
aggcgtgagccaccgcgcccagatgatttggcttcttaatcacgcatccagaggtgctggctggctcctgagccgggagacatctgtg

SEQ ID NO: 76222 - DNA, 31 bp, Homo sapiens
  chr8:71059337-71059368
  hypo
aaatctttcgcgcgcgcgcgcgcgcgtgtgt

SEQ ID NO: 76223 - DNA, 19 bp, Homo sapiens
  chr8:71115131-71115150
  hypo
aaaatagttgcaagggctg

SEQ ID NO: 76224 - DNA, 167 bp, Homo sapiens
  chr8:71185495-71185662
  hypo
ggagctgccatcttgcatccccgtgtgtgtgcacctaatctcagctggttcccccgagaccccctgagcaccaaccctagtcccccgcgcagccccttatccgctgcgacaagatgaaagaaacaatcatgaaccaggaaaaactcgccaaactgcaggcaaaagtg

SEQ ID NO: 76225 - DNA, 30 bp, Homo sapiens
  chr8:71205174-71205204
  hypo
cagtagtccgttctgcgtattaagtgcaga

SEQ ID NO: 76226 - DNA, 22 bp, Homo sapiens
  chr8:71226105-71226127
  hypo
acttcaaaaacaactgctggcc

SEQ ID NO: 76227 - DNA, 30 bp, Homo sapiens; identical to SEQ ID NO: 22523
  chr8:71308114-71308144
  hypo

SEQ ID NO: 76228 - DNA, 270 bp, Homo sapiens; identical to SEQ ID NO: 22524
  chr8:71447611-71447881
  hypo

SEQ ID NO: 76229 - DNA, 241 bp, Homo sapiens; identical to SEQ ID NO: 22525
  chr8:71447940-71448181
  hypo

SEQ ID NO: 76230 - DNA, 142 bp, Homo sapiens
  chr8:71522526-71522668
  hypo
cacctgagcatgggtggatttcggtatccgcgggggccctggaaccagtcccctgtgaagactgagggacgactgtacatgccatgacatgctctcttcccatgctctcccctgcctttgcgtgtactgctgtctctgtctg

SEQ ID NO: 76231 - DNA, 261 bp, Homo sapiens; identical to SEQ ID NO: 45523
  chr8:72755553-72755814
  hypo

SEQ ID NO: 76232 - DNA, 364 bp, Homo sapiens; identical to SEQ ID NO: 6378
  chr8:72756655-72757019
  hypo

SEQ ID NO: 76233 - DNA, 1271 bp, Homo sapiens; identical to SEQ ID NO: 45530
  chr8:73448683-73449954
  hypo

SEQ ID NO: 76234 - DNA, 176 bp, Homo sapiens; identical to SEQ ID NO: 6385
  chr8:73450026-73450202
  hypo

SEQ ID NO: 76235 - DNA, 30 bp, Homo sapiens
  chr8:73922269-73922299
  hypo
acaggtatgagccaccgcgcctggcctagt

SEQ ID NO: 76236 - DNA, 27 bp, Homo sapiens
  chr8:73966733-73966760
  hypo
gcgttgagtcaccgcgcctggccagag

SEQ ID NO: 76237 - DNA, 187 bp, Homo sapiens
  chr8:73979603-73979790
  hypo
ggacaagaacactggtctactcgccgaacttttttccaagttccttgacaccgaggattaccaattgcttgccaatggagagtctgatttctgaaacgatatttcgaaagtgttagttacactaaaagcataccgaagaaaggtctaatttacagaattaaaactcggagttaaaaaaaactgatca

SEQ ID NO: 76238 - DNA, 43 bp, Homo sapiens; identical to SEQ ID NO: 22530
  chr8:73999612-73999655
  hypo

SEQ ID NO: 76239 - DNA, 236 bp, Homo sapiens
  chr8:74004013-74004249
  hypo
tcaactgtgttctttcagcatcgggcctggccacgggttgaagccctcttcaaacagcacagaggcaggagggtgctccccgccactgggtatccggttgcccagggaatggcatagccccagaaaatgctgaggctcccacatgtcgggatccttcagctcgaaccctaatatctgtgtggctttggggatgatgtgattaacaggagcagggcgacttccacttccatggctgg

SEQ ID NO: 76240 - DNA, 455 bp, Homo sapiens
  chr8:74197776-74198231
  hypo
tggcaagtcccctgagcctcccgctccttggccagggctcgtcctgagacgggccagccaccagcactcactgtgcccgcagctgcaccgaggggagggatttctttgcgatcctggccgttgcggcccaggtaggaggctccggcagcaggggtggctggggcagcgggcacagcgggcagtgtgggagccagcggcagcccggtgcccacctcagccccccgcccagtccagccttgtcgcagggctggccacggcgtcggggcgggacaggtgatgcaggtggccgcgagctcccacattcaccactcctggggtgagcatgccccgcagccagcagccctgcgacgctgggcccggcccggccggcgtctcccgaggctgcagcgctgcctgccgtacgcacaccagttgctaggcgcccggggcctcgcgcctcagttccatagggcaag

SEQ ID NO: 76241 - DNA, 30 bp, Homo sapiens
  chr8:74331435-74331465
  hypo
attgctctttggaaccgagcgttgcagcgg

SEQ ID NO: 76242 - DNA, 494 bp, Homo sapiens
  chr8:74360977-74361471
  hypo
cagagttggtggacagagcaacgacaatccagctggagcgatggttcagggtatgtgttcacccagccctttcgggacgtcgcgtgcctgcactgtgggaacgcaagtggacagccggtccctgccgtgggcgctaggggccagtgctcagcgcgggaatattcccaccgccacgtgcgcgcggacagcgggtactctgaggaggggcctgcagcccggctggggctgggaagacttcctggacgaggggcagcccgggttttcctcaaggatgagctggagtcggcccccggcgcaggagcaaggtgccgggagagggccgagctgggtgagaggcctgggccagccaacagcggccttcgagcagggaccgcgcagctccgtgtccccgcagtgggagggcggcgggcaggggccgggcgagttaggccgcaagcatctgctggggccgtcgcagcaccatcccacagaccgccactgaatcaacagcagcc

SEQ ID NO: 76243 - DNA, 30 bp, Homo sapiens; identical to SEQ ID NO: 22534
  chr8:74363454-74363484
  hypo

SEQ ID NO: 76244 - DNA, 379 bp, Homo sapiens
  chr8:74371817-74372196
  hypo
taaggtgatcccctccgcgaagacctcaaccagcagccctaccatgtgcagagctcccactgaaatcaaaacccaacctcaagctcacgcagctccgcctccacatatcgtcacatcccacacatgctgctgtcatcacacccacgctgttgtcacaacacccaacgggctgttactaagggccctggtatgctgctgaatatatgcattcaataggaattttcaaaacatatttcaggaatacttgtccttggttccgcatcatctgctcaatgcagccactgtctctggaaggagcaactcctatcgggcacggctcctttgactcttggggcctcctgcgtccccagccccagccgtgaatacacaatggagatca

SEQ ID NO: 76245 - DNA, 30 bp, Homo sapiens; identical to SEQ ID NO: 22536
  chr8:74385877-74385907
  hypo

SEQ ID NO: 76246 - DNA, 26 bp, Homo sapiens
  chr8:74568302-74568328
  hypo
tcaccgtgccaggccacataattttt

SEQ ID NO: 76247 - DNA, 60 bp, Homo sapiens
  chr8:74673151-74673211
  hypo
ataaagcagaggtcagcgaatcaaatctggtctgctgcctgttttcgtaaataaagggct

SEQ ID NO: 76248 - DNA, 132 bp, Homo sapiens
  chr8:74674333-74674465
  hypo
caggcagagagccggcggcaaaggtaaaaggccgacgacaacggacttggtccaggtgaacccacctgacaggcgcacgaaaacttcccttgccctccccggctactcgttgtccaccgaaattcattctcc

SEQ ID NO: 76249 - DNA, 31 bp, Homo sapiens; identical to SEQ ID NO: 22538
  chr8:74759372-74759403
  hypo

SEQ ID NO: 76250 - DNA, 40 bp, Homo sapiens
  chr8:74759827-74759867
  hypo
tcatcaacggtaaaacgggtatattgcggccgggtgctgt

SEQ ID NO: 76251 - DNA, 30 bp, Homo sapiens
  chr8:75227207-75227237
  hypo
gcttccttatcccacggaccagaatattat

SEQ ID NO: 76252 - DNA, 356 bp, Homo sapiens
  chr8:75227592-75227948
  hypo
cctccggaagaggccgcccttcttcttgcccgctagctcagcgtctgcgtggaagttgagcacgaaaccgccgcgggtgccggccgggctgtcggcggcggctgcggcgtcgtggagcacgctgccattgctctgctcgctgcgcagcgaggccagcgaggtacgcagcggtgagcggatcaccgtggccatgccgtagggcacgctctggcgcacgccgtagccatgccgcatgcctccggcccactggccctggtaggtaccttggagagaccgcaagaaagcaccgtgagtcgggggcagagctgcaccgtcacctgcaccatccagcgcacactggcgcaggcctgcccaag

SEQ ID NO: 76253 - DNA, 142 bp, Homo sapiens; identical to SEQ ID NO: 22540
  chr8:75737614-75737756
  hypo

SEQ ID NO: 76254 - DNA, 958 bp, Homo sapiens; identical to SEQ ID NO: 45542
  chr8:75896507-75897465
  hypo

SEQ ID NO: 76255 - DNA, 30 bp, Homo sapiens; identical to SEQ ID NO: 45543
  chr8:76230285-76230315
  hypo

SEQ ID NO: 76256 - DNA, 30 bp, Homo sapiens; identical to SEQ ID NO: 6395
  chr8:76386311-76386341
  hypo

SEQ ID NO: 76257 - DNA, 30 bp, Homo sapiens; identical to SEQ ID NO: 45549
  chr8:76417921-76417951
  hypo

SEQ ID NO: 76258 - DNA, 721 bp, Homo sapiens; identical to SEQ ID NO: 45552
  chr8:77589893-77590614
  hypo

SEQ ID NO: 76259 - DNA, 43 bp, Homo sapiens
  chr8:80272278-80272321
  hypo
agctctttcagctttgccatccgcagatggcctgagtgttaat

SEQ ID NO: 76260 - DNA, 201 bp, Homo sapiens; identical to SEQ ID NO: 45560
  chr8:80523883-80524084
  hypo

SEQ ID NO: 76261 - DNA, 30 bp, Homo sapiens; identical to SEQ ID NO: 45561
  chr8:80524452-80524482
  hypo

SEQ ID NO: 76262 - DNA, 911 bp, Homo sapiens; identical to SEQ ID NO: 45562
  chr8:80524868-80525779
  hypo

SEQ ID NO: 76263 - DNA, 31 bp, Homo sapiens; identical to SEQ ID NO: 22545
  chr8:80673151-80673182
  hypo

SEQ ID NO: 76264 - DNA, 539 bp, Homo sapiens; identical to SEQ ID NO: 45567
  chr8:80803548-80804087
  hypo

SEQ ID NO: 76265 - DNA, 38 bp, Homo sapiens; identical to SEQ ID NO: 22547
  chr8:80998634-80998672
  hypo

SEQ ID NO: 76266 - DNA, 29 bp, Homo sapiens
  chr8:81048459-81048488
  hypo
gacatttaagaaaacaatggccgggcgcg

SEQ ID NO: 76267 - DNA, 45 bp, Homo sapiens
  chr8:81113804-81113849
  hypo
gccattacggccgggcgcggtggctcaagcctgtaatcccaccac

SEQ ID NO: 76268 - DNA, 30 bp, Homo sapiens
  chr8:81178018-81178048
  hypo
atccgctttcttgtcgtagagcggtgagat

SEQ ID NO: 76269 - DNA, 354 bp, Homo sapiens; identical to SEQ ID NO: 22548
  chr8:81213156-81213510
  hypo

SEQ ID NO: 76270 - DNA, 37 bp, Homo sapiens
  chr8:81338704-81338741
  hypo
gttagaagtcagaagtttggccgggcgcggtggctca

SEQ ID NO: 76271 - DNA, 1143 bp, Homo sapiens; identical to SEQ ID NO: 45570
  chr8:81397817-81398960
  hypo

SEQ ID NO: 76272 - DNA, 347 bp, Homo sapiens; identical to SEQ ID NO: 45572
  chr8:81490276-81490623
  hypo

SEQ ID NO: 76273 - DNA, 31 bp, Homo sapiens; identical to SEQ ID NO: 22551
  chr8:81549087-81549118
  hypo

SEQ ID NO: 76274 - DNA, 31 bp, Homo sapiens
  chr8:81615050-81615081
  hypo
gtgaaagtcgctggatcggaaatggcgaggc

SEQ ID NO: 76275 - DNA, 101 bp, Homo sapiens; identical to SEQ ID NO: 45574
  chr8:81785240-81785341
  hypo

SEQ ID NO: 76276 - DNA, 1287 bp, Homo sapiens; identical to SEQ ID NO: 45575
  chr8:81785543-81786830
  hypo

SEQ ID NO: 76277 - DNA, 32 bp, Homo sapiens
  chr8:81964065-81964097
  hypo
taaagactataaactattggccgggcgcggtg

SEQ ID NO: 76278 - DNA, 1226 bp, Homo sapiens; identical to SEQ ID NO: 45576
  chr8:82192585-82193811
  hypo

SEQ ID NO: 76279 - DNA, 30 bp, Homo sapiens; identical to SEQ ID NO: 45580
  chr8:82653628-82653658
  hypo

SEQ ID NO: 76280 - DNA, 35 bp, Homo sapiens; identical to SEQ ID NO: 22556
  chr8:82680448-82680483
  hypo

SEQ ID NO: 76281 - DNA, 164 bp, Homo sapiens
  chr8:82902991-82903155
  hypo
ccagttccagcttcctagccgctttacgtattcaagcctcagcaatggcagacgctcctccctcagccaggcttgcagcctcaccgttggatctcagactagcagtgagcaaggctcactgggcgtgcgacccacgggcatgcgccccactgagccaggcatgg

SEQ ID NO: 76282 - DNA, 41 bp, Homo sapiens; identical to SEQ ID NO: 22557
  chr8:83135625-83135666
  hypo

SEQ ID NO: 76283 - DNA, 41 bp, Homo sapiens; identical to SEQ ID NO: 22558
  chr8:83135905-83135946
  hypo

SEQ ID NO: 76284 - DNA, 57 bp, Homo sapiens; identical to SEQ ID NO: 6430
  chr8:86132758-86132815
  hypo

SEQ ID NO: 76285 - DNA, 121 bp, Homo sapiens
  chr8:86544662-86544783
  hypo
agtgaaactacttccaaaaaaaaaaaaaaaaaacaacaaaaaaaactcccacgggcacctccatgttaattagcaatagaagttagaaaaattcacaagaatttatggccgggtgcggtga

SEQ ID NO: 76286 - DNA, 24 bp, Homo sapiens
  chr8:86545022-86545046
  hypo
agcctagggcgatagagcgagact

SEQ ID NO: 76287 - DNA, 30 bp, Homo sapiens
  chr8:86840995-86841025
  hypo
cttcttcttgattacgttggtactttattc

SEQ ID NO: 76288 - DNA, 24 bp, Homo sapiens
  chr8:87402877-87402901
  hypo
gtccagcctcggctcagcatcaga

SEQ ID NO: 76289 - DNA, 162 bp, Homo sapiens
  chr8:87425718-87425880
  hypo
aggaatgggaggagttacctgcgccgttgacgtcaaagaatactttcgaaagctatgacacgtcagtggattctgaaagaagaggaggagttagcaaatagtggaggcacgagtggtgaaaatttcattttcagtagagccgactgcacattcagattccta

SEQ ID NO: 76290 - DNA, 90 bp, Homo sapiens; identical to SEQ ID NO: 6433
  chr8:87527031-87527121
  hypo

SEQ ID NO: 76291 - DNA, 376 bp, Homo sapiens
  chr8:88885820-88886196
  hypo
ccttccgattagggacgtagagggttttgtgcgggtatacccggagctcaggggtcgtcaggcctcgcatggtgatgatgccgtacttggagcctccagcttcgacttggttcactgtgaagagctggtcagtgttggtattcgccagtatgcggttaaatcggtcgcttgccaaagaggagggatcccagctatgaatctggacctttttcctctgcatgcagcttacacgcagctcgcgagctatacggcaatagttggcgaatctgaggaaacctagctggttctttcgtagcatggaaggtgcattgagtcccactctgactgtctttttctgcttgtctgcttcctcgagcagtcgcggtcttttgctctc

SEQ ID NO: 76292 - DNA, 30 bp, Homo sapiens; identical to SEQ ID NO: 6439
  chr8:89928884-89928914
  hypo

SEQ ID NO: 76293 - DNA, 96 bp, Homo sapiens; identical to SEQ ID NO: 22563
  chr8:90768481-90768577
  hypo

SEQ ID NO: 76294 - DNA, 22 bp, Homo sapiens
  chr8:90889922-90889944
  hypo
aggtgcggtggctcacgcctgt

SEQ ID NO: 76295 - DNA, 30 bp, Homo sapiens
  chr8:90912934-90912964
  hypo
aggtgtatatatttaaaaatacggaacgct

SEQ ID NO: 76296 - DNA, 150 bp, Homo sapiens
  chr8:90913503-90913653
  hypo
cctcaggtgatccgtccgcctcggccttccaaaaggaatttaggtactttaaaatgctgttatgtatgttaacggaaaagtaactacatgcttcattttcagaaccaacattcaaatgaaatgaacgtgtcaaatcgacaaaagctcaaa

SEQ ID NO: 76297 - DNA, 44 bp, Homo sapiens
  chr8:91374998-91375042
  hypo
atgattttttttttttttagacggagtctcgctctcacccaggc

SEQ ID NO: 76298 - DNA, 560 bp, Homo sapiens; identical to SEQ ID NO: 45608
  chr8:91657127-91657687
  hypo

SEQ ID NO: 76299 - DNA, 604 bp, Homo sapiens; identical to SEQ ID NO: 45609
  chr8:91996904-91997508
  hypo

SEQ ID NO: 76300 - DNA, 486 bp, Homo sapiens; identical to SEQ ID NO: 6442
  chr8:91997527-91998013
  hypo

SEQ ID NO: 76301 - DNA, 20 bp, Homo sapiens
  chr8:92002998-92003018
  hypo
cccagcagcactttgggagg

SEQ ID NO: 76302 - DNA, 19 bp, Homo sapiens
  chr8:92003077-92003096
  hypo
agccacttgtctacaaata

SEQ ID NO: 76303 - DNA, 31 bp, Homo sapiens
  chr8:92083522-92083553
  hypo
tgaaataaatgtttgtcgttgcctacaccat

SEQ ID NO: 76304 - DNA, 113 bp, Homo sapiens
  chr8:92120801-92120914
  hypo
cagagaaggtgattgtgaaaacgtgcaactgagttaagatctaaagcaagcttgtctaacccgtggcccgcgggccacatgcggcccaggacggctttgaatgtggcccaact

SEQ ID NO: 76305 - DNA, 33 bp, Homo sapiens; identical to SEQ ID NO: 22567
  chr8:92433535-92433568
  hypo

SEQ ID NO: 76306 - DNA, 43 bp, Homo sapiens
  chr8:94129179-94129222
  hypo
cctgggccccacccaggacaccggaatctctgagtgtcaggct

SEQ ID NO: 76307 - DNA, 130 bp, Homo sapiens
  chr8:94658931-94659061
  hypo
aagatacacacacaagagagacgttaacgactgcgccacctgcaggaaagtcttcagtgattatttatcccggcggaggcacacgagcattcaccttgtaaagaaacgcgttgagagtaggcagtgtgac

SEQ ID NO: 76308 - DNA, 121 bp, Homo sapiens
  chr8:94684091-94684212
  hypo
tatcagaacgatatatcaccaatatcacagtgtgtaaacactgtgcttaattacaaatatcagagcgatatatcaacagtgtgaaaacactgtgcataattaaaaatatcagagcgatatg

SEQ ID NO: 76309 - DNA, 121 bp, Homo sapiens; identical to SEQ ID NO: 22569
  chr8:94684331-94684452
  hypo

SEQ ID NO: 76310 - DNA, 158 bp, Homo sapiens; identical to SEQ ID NO: 22570
  chr8:94685461-94685619
  hypo

SEQ ID NO: 76311 - DNA, 160 bp, Homo sapiens
  chr8:94706935-94707095
  hypo
tgttaaattcagcacctagtacgtggcaagttctccgcaagtaatgctgaatacttaaataaagctaatgcaactctccgcctccactaggccccccttaaaacatgctaaataaattggagttcattcaacgttacacgaaataatattgtgctgtttt

SEQ ID NO: 76312 - DNA, 353 bp, Homo sapiens; identical to SEQ ID NO: 45620
  chr8:94713054-94713407
  hypo

SEQ ID NO: 76313 - DNA, 23 bp, Homo sapiens
  chr8:94735510-94735533
  hypo
acggtgcccggcccaagtcattg

SEQ ID NO: 76314 - DNA, 31 bp, Homo sapiens; identical to SEQ ID NO: 22572
  chr8:94747733-94747764
  hypo

SEQ ID NO: 76315 - DNA, 210 bp, Homo sapiens; identical to SEQ ID NO: 6451
  chr8:94929136-94929346
  hypo

SEQ ID NO: 76316 - DNA, 10 bp, Homo sapiens
  chr8:94929748-94929758
  hypo
gccgggcagg

SEQ ID NO: 76317 - DNA, 4 bp, Homo sapiens
  chr8:94929775-94929779
  hypo
cggg

SEQ ID NO: 76318 - DNA, 45 bp, Homo sapiens
  chr8:94941364-94941409
  hypo
tccctgcttttctaaaatatacccggttcactgactttctgcctg

SEQ ID NO: 76319 - DNA, 30 bp, Homo sapiens
  chr8:95238920-95238950
  hypo
tatcttgagaccctcggagaagtccatacc

SEQ ID NO: 76320 - DNA, 30 bp, Homo sapiens
  chr8:95290452-95290482
  hypo
atgagtgagcgagtgcgagatccggtcagc

SEQ ID NO: 76321 - DNA, 42 bp, Homo sapiens
  chr8:95488065-95488107
  hypo
agagtaatttgaggctgagagcggtggcttgtgcctgtaatc

SEQ ID NO: 76322 - DNA, 78 bp, Homo sapiens; identical to SEQ ID NO: 22576
  chr8:95556566-95556644
  hypo

SEQ ID NO: 76323 - DNA, 17 bp, Homo sapiens
  chr8:95556883-95556900
  hypo
ctgtctcaaaaaaaaaa

SEQ ID NO: 76324 - DNA, 29 bp, Homo sapiens
  chr8:95582100-95582129
  hypo
gagactccgtctcaaaaaaaaataaataa

SEQ ID NO: 76325 - DNA, 38 bp, Homo sapiens
  chr8:95650754-95650792
  hypo
ttacaggcgtgagccaccgcgcccggcccagaaagatt

SEQ ID NO: 76326 - DNA, 901 bp, Homo sapiens; identical to SEQ ID NO: 45630
  chr8:95653852-95654753
  hypo

SEQ ID NO: 76327 - DNA, 100 bp, Homo sapiens
  chr8:95816349-95816449
  hypo
caaataataaaagtatacttccgttttcatttatagccactgttagtaatgaggaaagacagcagaaaagaaagctcagtcaaaaaattaaatgcgggcc

SEQ ID NO: 76328 - DNA, 98 bp, Homo sapiens
  chr8:95848305-95848403
  hypo
gggtagcggcaacagcgacagtaaaatctagtttccggggacagcacttgcaggagtgtagctgctgctttcagggtctggtccgggtggctatgggt

SEQ ID NO: 76329 - DNA, 158 bp, Homo sapiens; identical to SEQ ID NO: 22579
  chr8:95865516-95865674
  hypo

SEQ ID NO: 76330 - DNA, 121 bp, Homo sapiens
  chr8:95942701-95942822
  hypo
aactattagtaattgtactgacgcgggcagggctgatgaacaacccagccattgtgcttgacttgccgagggtggcaatccctggtaagattttggcgacgaaggctatttctgttaagag

SEQ ID NO: 76331 - DNA, 31 bp, Homo sapiens; identical to SEQ ID NO: 22581
  chr8:96038394-96038425
  hypo

SEQ ID NO: 76332 - DNA, 31 bp, Homo sapiens; identical to SEQ ID NO: 22582
  chr8:96038664-96038695
  hypo

SEQ ID NO: 76333 - DNA, 30 bp, Homo sapiens
  chr8:96076778-96076808
  hypo
gtgtgtgtgtgtgcgcgcgtgcgtgtgcat

SEQ ID NO: 76334 - DNA, 41 bp, Homo sapiens; identical to SEQ ID NO: 22583
  chr8:96099107-96099148
  hypo

SEQ ID NO: 76335 - DNA, 30 bp, Homo sapiens; identical to SEQ ID NO: 22584
  chr8:96125685-96125715
  hypo

SEQ ID NO: 76336 - DNA, 186 bp, Homo sapiens
  chr8:96145225-96145411
  hypo
tgttctccctacttcgcccccatccctagtctaccctaagcaacttcgttacctctctacgaacccatcagagcgcttagctatcagatcaattagggcacatttaaccttatatactatgcaataattacagtttctaggtatgtgaagtaggctgatggggttttgtgtcgtcaaagttttggg

SEQ ID NO: 76337 - DNA, 1025 bp, Homo sapiens; identical to SEQ ID NO: 45635
  chr8:96145957-96146982
  hypo

SEQ ID NO: 76338 - DNA, 30 bp, Homo sapiens; identical to SEQ ID NO: 22587
  chr8:96214064-96214094
  hypo

SEQ ID NO: 76339 - DNA, 39 bp, Homo sapiens
  chr8:96229504-96229543
  hypo
gctcatatgagcctgtcgcccaggctggagtgcaatggc

SEQ ID NO: 76340 - DNA, 31 bp, Homo sapiens; identical to SEQ ID NO: 22588
  chr8:96232002-96232033
  hypo

SEQ ID NO: 76341 - DNA, 46 bp, Homo sapiens; identical to SEQ ID NO: 22589
  chr8:96465481-96465527
  hypo

SEQ ID NO: 76342 - DNA, 121 bp, Homo sapiens
  chr8:97128825-97128946
  hypo
agggacaaccaccattttacattctgtgtctaagaatttgactactctagatacctcataaaagtcgaattgtcgatgttgagccaagatggccgaataggaacagctccggtctacagct

SEQ ID NO: 76343 - DNA, 721 bp, Homo sapiens; identical to SEQ ID NO: 45653
  chr8:97172018-97172739
  hypo

SEQ ID NO: 76344 - DNA, 1042 bp, Homo sapiens; identical to SEQ ID NO: 45654
  chr8:97172821-97173863
  hypo

SEQ ID NO: 76345 - DNA, 259 bp, Homo sapiens
  chr8:97333716-97333975
  hypo
taaccctctttccctcgtaatttatcggttgaagaaagcagcccttttgtcctatagattttcccacagtctggattttactgattttatcgtatcttgtaatttaacatatttctttgtcctctgtattttctgtaagtcggtaattggatctagaggcttaatcacatttgggtctagtttttttcttttcttttctcttttttggcaagactaacctttgtatttttaacgtgtcttttatcgcctttaacgggat

SEQ ID NO: 76346 - DNA, 265 bp, Homo sapiens
  chr8:97339834-97340099
  hypo
tcccctggcctggtaagagagcgcacacggagcttgagattaatgcagaagcaaagatcccgggtgctggttaataagcttttccaggagcgtggttgtctgctcggccgtcattaatttgaatgctcattaccataatgtagaagccaagctggggtcctgcgccctccttgccgccagccccgtggtcctggacagcctggctctcatcccacgtagtttcttctcgcccccccgccctttctttaaacgaagtgtgcaattg

SEQ ID NO: 76347 - DNA, 138 bp, Homo sapiens; identical to SEQ ID NO: 45662
  chr8:97657818-97657956
  hypo

SEQ ID NO: 76348 - DNA, 199 bp, Homo sapiens
  chr8:98289304-98289503
  hypo
aaatgcttgcccccagaagcccgggatattttggatgaggtggttcctgcgctccaagtgctgcagtcgcaactgcccaaacttcctggagagccgaaggtaggccctgtccgcctgggcgttcatgttctccagcttcagctgcacgttctccagcgtatccatgctgccttccgtcgctgggggccccgaccctgca

SEQ ID NO: 76349 - DNA, 77 bp, Homo sapiens; identical to SEQ ID NO: 22593
  chr8:98307767-98307844
  hypo

SEQ ID NO: 76350 - DNA, 23 bp, Homo sapiens
  chr8:98616566-98616589
  hypo
tcccgctcccgctcccgctcccg

SEQ ID NO: 76351 - DNA, 30 bp, Homo sapiens
  chr8:98636694-98636724
  hypo
cgaggcgatgccagcgccccgggtgcaggg

SEQ ID NO: 76352 - DNA, 30 bp, Homo sapiens
  chr8:98738218-98738248
  hypo
cttgtttttatgtggcgccaagaacgaacc

SEQ ID NO: 76353 - DNA, 37 bp, Homo sapiens; identical to SEQ ID NO: 22595
  chr8:98798631-98798668
  hypo

SEQ ID NO: 76354 - DNA, 36 bp, Homo sapiens; identical to SEQ ID NO: 22596
  chr8:98798907-98798943
  hypo

SEQ ID NO: 76355 - DNA, 948 bp, Homo sapiens; identical to SEQ ID NO: 45669
  chr8:98880994-98881942
  hypo

SEQ ID NO: 76356 - DNA, 30 bp, Homo sapiens
  chr8:98907483-98907513
  hypo
tcctctgtgaaggacggaaagcagatgcca

SEQ ID NO: 76357 - DNA, 30 bp, Homo sapiens
  chr8:99204865-99204895
  hypo
agaagccacctatgcgacctgtggccaaac

SEQ ID NO: 76358 - DNA, 30 bp, Homo sapiens
  chr8:99368933-99368963
  hypo
acctcacaaaaatgcgcggcaaattgcatt

SEQ ID NO: 76359 - DNA, 66 bp, Homo sapiens
  chr8:99376414-99376480
  hypo
ggagggtcgtcttggcgttaggatccggcagatgctgggtctcacatacagcgcctctcactccca

SEQ ID NO: 76360 - DNA, 30 bp, Homo sapiens
  chr8:99411606-99411636
  hypo
cctgctgatccataacgtatttcaagaaag

SEQ ID NO: 76361 - DNA, 871 bp, Homo sapiens; identical to SEQ ID NO: 45677
  chr8:99438927-99439798
  hypo

SEQ ID NO: 76362 - DNA, 31 bp, Homo sapiens
  chr8:99440634-99440665
  hypo
gcaccacgtcttccttcgatgagatccttgc

SEQ ID NO: 76363 - DNA, 102 bp, Homo sapiens
  chr8:99626611-99626713
  hypo
gcacttgaaaactaaagaacacgctttcaaataatctatgtgtcaaagaagatgtctcgatcgggggaggagccaagatggccgaataggaacagctccggt

SEQ ID NO: 76364 - DNA, 721 bp, Homo sapiens; identical to SEQ ID NO: 6490
  chr8:99953841-99954562
  hypo

SEQ ID NO: 76365 - DNA, 249 bp, Homo sapiens; identical to SEQ ID NO: 6491
  chr8:99954686-99954935
  hypo

SEQ ID NO: 76366 - DNA, 1314 bp, Homo sapiens; identical to SEQ ID NO: 45687
  chr8:99956452-99957766
  hypo

SEQ ID NO: 76367 - DNA, 37 bp, Homo sapiens
  chr8:100026625-100026662
  hypo
gtgagccaccgcgcccggcctgcataatttttaaaaa

SEQ ID NO: 76368 - DNA, 27 bp, Homo sapiens
  chr8:100074704-100074731
  hypo
attttttttgaggcagagtttcgcttt

SEQ ID NO: 76369 - DNA, 28 bp, Homo sapiens
  chr8:100118364-100118392
  hypo
aaaacacatagctggccgggtgtggtgg

SEQ ID NO: 76370 - DNA, 197 bp, Homo sapiens
  chr8:100245121-100245318
  hypo
ggcctctgcagagtccctggccgcctccgcagacttctcattcctcagatggtctttggtttgcttccgatctggctggctgtgtttggtctcattttgtcaggtgttggaagggctccattcatctgttgttttgctgatgcctgtgggaggcctcacttgctgcgctgtgaggcgactccctgagggtatttcta

SEQ ID NO: 76371 - DNA, 30 bp, Homo sapiens; identical to SEQ ID NO: 22604
  chr8:100286615-100286645
  hypo

SEQ ID NO: 76372 - DNA, 30 bp, Homo sapiens
  chr8:100336193-100336223
  hypo
gcaaaggactcccagcgtggaatgttaatg

SEQ ID NO: 76373 - DNA, 175 bp, Homo sapiens; identical to SEQ ID NO: 22605
  chr8:100353991-100354166
  hypo

SEQ ID NO: 76374 - DNA, 30 bp, Homo sapiens
  chr8:100708606-100708636
  hypo
atccatgccaagatcgtggtgctcatgctg

SEQ ID NO: 76375 - DNA, 30 bp, Homo sapiens; identical to SEQ ID NO: 22606
  chr8:100716056-100716086
  hypo

SEQ ID NO: 76376 - DNA, 467 bp, Homo sapiens
  chr8:100796508-100796975
  hypo
atccatgttggctttcgtatcctttttctttcagaacaaatgccctgaggtagaggagttggtcttcagccattttgtgatctgtaatgacacacaggagacactgcggtttggccaggtggatactgatgaaaatattctgctggcgagtctccacagtcaccagtacagctggcgctctcacaaatccccacaggtatttgagaaacacccttacaaacagccattgttaaggttggggattcatttcttctgcacttgtgtgcctgtccagttatttccctttttaagtctccgaaggaaccacacagcgtagctacatctgacggaaacccaagagtgtttagagatgggagcacacgcttctcttggaatggagcattttcctgtttagcactggtgcttggggcgggggcagcagggtgtggtgatgaagaggctgactcgagagccaggtttggatccta

SEQ ID NO: 76377 - DNA, 57 bp, Homo sapiens; identical to SEQ ID NO: 22608
  chr8:100851149-100851206
  hypo

SEQ ID NO: 76378 - DNA, 115 bp, Homo sapiens
  chr8:100881199-100881314
  hypo
aaggcagacagctgggaagtgcgtggcgcatggcagtacctgcacttggatggggcgtgccggggcctctccccgtgcagccgcatgcacacacgagtaatgggtgcctgtgaaa

SEQ ID NO: 76379 - DNA, 231 bp, Homo sapiens; identical to SEQ ID NO: 22609
  chr8:100882015-100882246
  hypo

SEQ ID NO: 76380 - DNA, 80 bp, Homo sapiens; identical to SEQ ID NO: 22610
  chr8:100900795-100900875
  hypo

SEQ ID NO: 76381 - DNA, 43 bp, Homo sapiens
  chr8:100904088-100904131
  hypo
aaacacatactttatgaccttcggcacaaagtaaaaaacatac

SEQ ID NO: 76382 - DNA, 24 bp, Homo sapiens
  chr8:101156865-101156889
  hypo
aaaaaaagcagcggccgggcgcgg

SEQ ID NO: 76383 - DNA, 40 bp, Homo sapiens
  chr8:101297998-101298038
  hypo
tacaggaatgagccaccacgcccagttgtagatttttttt

SEQ ID NO: 76384 - DNA, 30 bp, Homo sapiens; identical to SEQ ID NO: 22611
  chr8:101299821-101299851
  hypo

SEQ ID NO: 76385 - DNA, 30 bp, Homo sapiens; identical to SEQ ID NO: 22612
  chr8:101300172-101300202
  hypo

SEQ ID NO: 76386 - DNA, 22 bp, Homo sapiens
  chr8:101308604-101308626
  hypo
ttacaggcgtaagccaccacga

SEQ ID NO: 76387 - DNA, 30 bp, Homo sapiens
  chr8:101325723-101325753
  hypo
gggaggggagtatgacgtgggccaggggac

SEQ ID NO: 76388 - DNA, 30 bp, Homo sapiens; identical to SEQ ID NO: 45699
  chr8:101499210-101499240
  hypo

SEQ ID NO: 76389 - DNA, 23 bp, Homo sapiens
  chr8:101591222-101591245
  hypo
tacaggcacgagacactgtgccc

SEQ ID NO: 76390 - DNA, 39 bp, Homo sapiens; identical to SEQ ID NO: 22614
  chr8:101726913-101726952
  hypo

SEQ ID NO: 76391 - DNA, 40 bp, Homo sapiens; identical to SEQ ID NO: 22615
  chr8:101735882-101735922
  hypo

SEQ ID NO: 76392 - DNA, 110 bp, Homo sapiens; identical to SEQ ID NO: 22616
  chr8:101744185-101744295
  hypo

SEQ ID NO: 76393 - DNA, 151 bp, Homo sapiens
  chr8:101872196-101872347
  hypo
tccttattctaactacaaccacgctccagggcctccctggctttccgtcctacctcgcacccgtttcacgaggcagttgggcggatggatccccatcctaggctgtgtcctcctctccccttctccggccgtgtggtgggaaagccttgaa

SEQ ID NO: 76394 - DNA, 34 bp, Homo sapiens
  chr8:101891230-101891264
  hypo
ctatcctcccacgcattcacgagccattcacagc

SEQ ID NO: 76395 - DNA, 24 bp, Homo sapiens
  chr8:101955919-101955943
  hypo
aagacactgtccaggccgggcgcg

SEQ ID NO: 76396 - DNA, 193 bp, Homo sapiens
  chr8:102039359-102039552
  hypo
cctgcagccaatgcctcggtcagccagtgcacctgtactgtctctcctcttgggatagggtccctctccatcaggtacaatatatgggaaatcgaggggtggcctttgtcccagctgtcttagtcaccgcattcttcaggtcactaaccgccccattggagagggttcacgcagctcacgtgtaaacggaccc

SEQ ID NO: 76397 - DNA, 43 bp, Homo sapiens
  chr8:102145124-102145167
  hypo
tgccagtagtggaaactaatacgaatctttaaaagtttcataa

SEQ ID NO: 76398 - DNA, 202 bp, Homo sapiens
  chr8:102190369-102190571
  hypo
ctccaattgctctgtgtcatacgttttcttacgaataacagggcttatagtttcacttgagtaatttttccaccctcttaaactgcagtttaaggtcttgatgaggttaccaaatctctgacaagcatatattctttccagtcttcacagggcacgcttcggcccttgctaggagtccatcgttctgccataacatttgctc

SEQ ID NO: 76399 - DNA, 37 bp, Homo sapiens
  chr8:102197223-102197260
  hypo
gttaaccatgaagcacgtattactttttttttttttt

SEQ ID NO: 76400 - DNA, 26 bp, Homo sapiens
  chr8:102197995-102198021
  hypo
ggaggctaaggcgggcggatcacgag

SEQ ID NO: 76401 - DNA, 17 bp, Homo sapiens
  chr8:102214378-102214395
  hypo
aaaattgtggccaggcg

SEQ ID NO: 76402 - DNA, 31 bp, Homo sapiens; identical to SEQ ID NO: 6510
  chr8:102217068-102217099
  hypo

SEQ ID NO: 76403 - DNA, 306 bp, Homo sapiens
  chr8:102450920-102451226
  hypo
ctgcaggcctgcttagcgcccttctcaacaactgctgtcatcagggagagcgagcagagtgcgtgcactccgggcggcgaagccccagcagaggcctgcctggctgtgctctgggtgccactcattcatgagggctgcgctgcgctgcgggcaccacgattcccacggaggggctgtaggtacttaaggggccctcagacgtcaggacaaacggacacttctctttgtgaagttgtccaagcacaagaggccacaatgtggttactactttttttttttttttttttttttgagatgaagtcttgt

SEQ ID NO: 76404 - DNA, 30 bp, Homo sapiens
  chr8:102452133-102452163
  hypo
ttagcataaaagaatacaaagcgtgattag

SEQ ID NO: 76405 - DNA, 429 bp, Homo sapiens; identical to SEQ ID NO: 45712
  chr8:102505556-102505985
  hypo

SEQ ID NO: 76406 - DNA, 52 bp, Homo sapiens; identical to SEQ ID NO: 6514
  chr8:102506365-102506417
  hypo

SEQ ID NO: 76407 - DNA, 30 bp, Homo sapiens; identical to SEQ ID NO: 22623
  chr8:102570873-102570903
  hypo

SEQ ID NO: 76408 - DNA, 30 bp, Homo sapiens; identical to SEQ ID NO: 6515
  chr8:102636867-102636897
  hypo

SEQ ID NO: 76409 - DNA, 95 bp, Homo sapiens
  chr8:102690213-102690308
  hypo
acatttttttctctgtttcttcggccacctcaaaaaccagaaaatttcagtaaagtgttcagcacacttccggcgaagacaagcgagggaagaga

SEQ ID NO: 76410 - DNA, 30 bp, Homo sapiens
  chr8:102714946-102714976
  hypo
agcaagaggctgctccgcagaagtggcctc

SEQ ID NO: 76411 - DNA, 118 bp, Homo sapiens
  chr8:103315023-103315141
  hypo
ggacttcctactgcccggcgtggataataagactcctgtgctttcatctgttcaaccggcagccctgagtttgaactggttaagagcactgcagtgaaatcttcggcaaattcctcaa

SEQ ID NO: 76412 - DNA, 82 bp, Homo sapiens
  chr8:103463269-103463351
  hypo
ctaggtttttgaacatatacacgaaattattgttaaccagccatgcgtggtggtgcgtgccatagttccagctactcgggaa

SEQ ID NO: 76413 - DNA, 26 bp, Homo sapiens
  chr8:103504821-103504847
  hypo
tttttttttttttttttgagacggag

SEQ ID NO: 76414 - DNA, 111 bp, Homo sapiens; identical to SEQ ID NO: 22626
  chr8:103572795-103572906
  hypo

SEQ ID NO: 76415 - DNA, 39 bp, Homo sapiens
  chr8:103588276-103588315
  hypo
cgaacatatcgcaaacccgtggggtacccatagctgggg

SEQ ID NO: 76416 - DNA, 34 bp, Homo sapiens
  chr8:103629515-103629549
  hypo
aaacccctctctcttccgggtgcggtggctcacg

SEQ ID NO: 76417 - DNA, 34 bp, Homo sapiens; identical to SEQ ID NO: 22628
  chr8:103629848-103629882
  hypo

SEQ ID NO: 76418 - DNA, 30 bp, Homo sapiens
  chr8:103638285-103638315
  hypo
agcaaaggaggggtccggttcgttagagct

SEQ ID NO: 76419 - DNA, 30 bp, Homo sapiens
  chr8:103646415-103646445
  hypo
cctctgtgaatacacggaaaaagtcctctg

SEQ ID NO: 76420 - DNA, 157 bp, Homo sapiens
  chr8:103728516-103728673
  hypo
ttctctactcaactgtcactccgtgaggctcatctctgcagcaccggtgtctagcacatcatgaacactctggaaccagcaccagttctacttcctcagccgggcagctctcctgttggtcaggtcccagacgcccgtagcactgggcaggttcagc

SEQ ID NO: 76421 - DNA, 43 bp, Homo sapiens
  chr8:103729028-103729071
  hypo
gaagggtggggttcagaggcacgatgagggaggccagattgca

SEQ ID NO: 76422 - DNA, 69 bp, Homo sapiens
  chr8:103768912-103768981
  hypo
gagaacatgctccctgacccccgccttgtcccgacaccttggcaaggcgagttctgtcctgctggaaga

SEQ ID NO: 76423 - DNA, 102 bp, Homo sapiens
  chr8:103769320-103769422
  hypo
ggcacagttgacctgtaatgccgctcacggtgcagctgaggggcaagacaaatgtgcagggacagtggccagtggtgcaccgcccagccacagcctctggga

SEQ ID NO: 76424 - DNA, 38 bp, Homo sapiens
  chr8:103833089-103833127
  hypo
taaaaatgatgtctgtcgggcgcggtggctcacgcctg

SEQ ID NO: 76425 - DNA, 34 bp, Homo sapiens; identical to SEQ ID NO: 22629
  chr8:103878118-103878152
  hypo

SEQ ID NO: 76426 - DNA, 31 bp, Homo sapiens; identical to SEQ ID NO: 22630
  chr8:103916555-103916586
  hypo

SEQ ID NO: 76427 - DNA, 46 bp, Homo sapiens; identical to SEQ ID NO: 22631
  chr8:103932059-103932105
  hypo

SEQ ID NO: 76428 - DNA, 143 bp, Homo sapiens; identical to SEQ ID NO: 22632
  chr8:103943075-103943218
  hypo

SEQ ID NO: 76429 - DNA, 37 bp, Homo sapiens
  chr8:103984300-103984337
  hypo
gtgagccactacgcccggctatattgtcacaaattac

SEQ ID NO: 76430 - DNA, 121 bp, Homo sapiens; identical to SEQ ID NO: 22633
  chr8:104055448-104055569
  hypo

SEQ ID NO: 76431 - DNA, 200 bp, Homo sapiens
  chr8:104086526-104086726
  hypo
tatgtgtgtgcatgtgcgtgtgcatatataatcactgactcagttgctgagcatgcgctatgaaccaggcgtgttaggcgctggggatttaatgcaagcagtcagatgggcacagtgcctacctaccttgatggggcgtgcagcctggtgatctggtggcaatcttactggacaaaacacaaacccggcagccctaagtt

SEQ ID NO: 76432 - DNA, 22 bp, Homo sapiens
  chr8:104408573-104408595
  hypo
tttttttttgtttgtttgaaac

SEQ ID NO: 76433 - DNA, 149 bp, Homo sapiens
  chr8:104431398-104431547
  hypo
accacgcccggccctaagcgtgattattaaccaagacaatgtgtttagcagcgtatcaggacagttaaaacatagattctggagccatactgccttggtttgaatcctggctccaccgtgtcgtattcgagttacttaacctctttatg

SEQ ID NO: 76434 - DNA, 2943 bp, Homo sapiens; identical to SEQ ID NO: 45730
  chr8:104510990-104513933
  hypo

SEQ ID NO: 76435 - DNA, 26 bp, Homo sapiens
  chr8:105061356-105061382
  hypo
aaaaaaaaaaaaaaggccgggcggtg

SEQ ID NO: 76436 - DNA, 25 bp, Homo sapiens
  chr8:105061681-105061706
  hypo
acccgaagccatgcttttgttaaag

SEQ ID NO: 76437 - DNA, 80 bp, Homo sapiens
  chr8:105645132-105645212
  hypo
gggtggtcatccactgggctccgcagagcaggtgtggcgcctactggggaggctcaggccgcgcaggagcccatggggtg

SEQ ID NO: 76438 - DNA, 58 bp, Homo sapiens; identical to SEQ ID NO: 6525
  chr8:106331015-106331073
  hypo

SEQ ID NO: 76439 - DNA, 173 bp, Homo sapiens; identical to SEQ ID NO: 6526
  chr8:106331083-106331256
  hypo

SEQ ID NO: 76440 - DNA, 91 bp, Homo sapiens; identical to SEQ ID NO: 22638
  chr8:106453047-106453138
  hypo

SEQ ID NO: 76441 - DNA, 39 bp, Homo sapiens
  chr8:106485009-106485048
  hypo
acaggcgtgagccaccgcgcctggcctcactccttgtgt

SEQ ID NO: 76442 - DNA, 30 bp, Homo sapiens; identical to SEQ ID NO: 6529
  chr8:106490682-106490712
  hypo

SEQ ID NO: 76443 - DNA, 24 bp, Homo sapiens
  chr8:106987623-106987647
  hypo
aaaatattagaacaggccaggcgc

SEQ ID NO: 76444 - DNA, 30 bp, Homo sapiens
  chr8:107228188-107228218
  hypo
tatttccgaagagacgcgccctcgcccagg

SEQ ID NO: 76445 - DNA, 1732 bp, Homo sapiens; identical to SEQ ID NO: 6531
  chr8:107669365-107671097
  hypo

SEQ ID NO: 76446 - DNA, 43 bp, Homo sapiens; identical to SEQ ID NO: 22642
  chr8:108454320-108454363
  hypo

SEQ ID NO: 76447 - DNA, 156 bp, Homo sapiens
  chr8:108581067-108581223
  hypo
ggatgatattactcccaatatcgcagggggttatttcccctgcaatattattcgtaatatccgggagggaggaaatgatatttctcccgatatcgctggttgtgtaaatcccccccgtgatattgtgttaacatccaaagcgggagaagatgatgt

SEQ ID NO: 76448 - DNA, 30 bp, Homo sapiens
  chr8:109144215-109144245
  hypo
agctcgggagctcacgcgcagcttcggtgg

SEQ ID NO: 76449 - DNA, 45 bp, Homo sapiens
  chr8:109255555-109255600
  hypo
aagatgaaggtttaaggatgtcgccaggcgcagtggctcacgcct

SEQ ID NO: 76450 - DNA, 27 bp, Homo sapiens
  chr8:109500402-109500429
  hypo
tttttttttttgagacagtctcgttct

SEQ ID NO: 76451 - DNA, 402 bp, Homo sapiens; identical to SEQ ID NO: 6536
  chr8:109799337-109799739
  hypo

SEQ ID NO: 76452 - DNA, 78 bp, Homo sapiens; identical to SEQ ID NO: 6537
  chr8:109799888-109799966
  hypo

SEQ ID NO: 76453 - DNA, 71 bp, Homo sapiens
  chr8:109800323-109800394
  hypo
ggtaagagattgtccgatgtaccaacacatcccctgtatttagcacagtggtattcgttgaatgtatgaat

SEQ ID NO: 76454 - DNA, 95 bp, Homo sapiens
  chr8:110274930-110275025
  hypo
taattcattcatttgcataaacggatctgcttgggaacctgggcaggaactgttgctataaaacctgaatgtggccgggtgtggtagctcacgcc

SEQ ID NO: 76455 - DNA, 26 bp, Homo sapiens
  chr8:110406105-110406131
  hypo
tcttaaaatcaactgtagggccgggc

SEQ ID NO: 76456 - DNA, 162 bp, Homo sapiens
  chr8:110643644-110643806
  hypo
ttctgagctattttggagcttcgagtgctcccataaaagtcactctggcgaagccctgggcagtaaaggaggatgcagggccaggtgaggtaagctccatttctgcagaagactccgtgctctctctctggaacacgggccgagtacttggtttctaccaag

SEQ ID NO: 76457 - DNA, 272 bp, Homo sapiens; identical to SEQ ID NO: 45753
  chr8:110703873-110704145
  hypo

SEQ ID NO: 76458 - DNA, 43 bp, Homo sapiens; identical to SEQ ID NO: 22648
  chr8:110767245-110767288
  hypo

SEQ ID NO: 76459 - DNA, 80 bp, Homo sapiens; identical to SEQ ID NO: 22649
  chr8:114691129-114691209
  hypo

SEQ ID NO: 76460 - DNA, 35 bp, Homo sapiens; identical to SEQ ID NO: 22650
  chr8:114888154-114888189
  hypo

SEQ ID NO: 76461 - DNA, 32 bp, Homo sapiens
  chr8:115222083-115222115
  hypo
tgagccaccgcgccaggccaaatatagaggtc

SEQ ID NO: 76462 - DNA, 21 bp, Homo sapiens
  chr8:115599048-115599069
  hypo
agccaccgctcttggccaaca

SEQ ID NO: 76463 - DNA, 29 bp, Homo sapiens
  chr8:116052349-116052378
  hypo
ccgtgcccggcccatttcaggagtcttaa

SEQ ID NO: 76464 - DNA, 35 bp, Homo sapiens; identical to SEQ ID NO: 22651
  chr8:116345685-116345720
  hypo

SEQ ID NO: 76465 - DNA, 30 bp, Homo sapiens; identical to SEQ ID NO: 45772
  chr8:117209532-117209562
  hypo

SEQ ID NO: 76466 - DNA, 61 bp, Homo sapiens; identical to SEQ ID NO: 22652
  chr8:117336910-117336971
  hypo

SEQ ID NO: 76467 - DNA, 22 bp, Homo sapiens
  chr8:117421306-117421328
  hypo
cttccactctcaaaagcgtctt

SEQ ID NO: 76468 - DNA, 43 bp, Homo sapiens
  chr8:117572510-117572553
  hypo
ggaatctccaaaccacccagccgccccatcggctctcagggac

SEQ ID NO: 76469 - DNA, 30 bp, Homo sapiens; identical to SEQ ID NO: 45773
  chr8:117624077-117624107
  hypo

SEQ ID NO: 76470 - DNA, 30 bp, Homo sapiens; identical to SEQ ID NO: 45774
  chr8:117630667-117630697
  hypo

SEQ ID NO: 76471 - DNA, 30 bp, Homo sapiens
  chr8:117631321-117631351
  hypo
gaatgtaagcgggcgcgtcgtccatctcac

SEQ ID NO: 76472 - DNA, 30 bp, Homo sapiens; identical to SEQ ID NO: 45775
  chr8:117647772-117647802
  hypo

SEQ ID NO: 76473 - DNA, 30 bp, Homo sapiens; identical to SEQ ID NO: 22654
  chr8:117667108-117667138
  hypo

SEQ ID NO: 76474 - DNA, 105 bp, Homo sapiens
  chr8:117824013-117824118
  hypo
aaacattgtgcactcacgttttgccaggctctgtgacaggtgttgggatacagaaacaaaagagactgtctttgactcgtaagagctcacattcctgactgggcg

SEQ ID NO: 76475 - DNA, 21 bp, Homo sapiens
  chr8:117854530-117854551
  hypo
aggagtctagctctgtcaccc

SEQ ID NO: 76476 - DNA, 1759 bp, Homo sapiens; identical to SEQ ID NO: 6554
  chr8:117858171-117859930
  hypo

SEQ ID NO: 76477 - DNA, 85 bp, Homo sapiens; identical to SEQ ID NO: 6555
  chr8:117861183-117861268
  hypo

SEQ ID NO: 76478 - DNA, 162 bp, Homo sapiens; identical to SEQ ID NO: 6556
  chr8:117862855-117863017
  hypo

SEQ ID NO: 76479 - DNA, 150 bp, Homo sapiens; identical to SEQ ID NO: 6557
  chr8:117864185-117864335
  hypo

SEQ ID NO: 76480 - DNA, 175 bp, Homo sapiens; identical to SEQ ID NO: 6558
  chr8:117864772-117864947
  hypo

SEQ ID NO: 76481 - DNA, 225 bp, Homo sapiens; identical to SEQ ID NO: 6559
  chr8:117866482-117866707
  hypo

SEQ ID NO: 76482 - DNA, 124 bp, Homo sapiens; identical to SEQ ID NO: 6560
  chr8:117868403-117868527
  hypo

SEQ ID NO: 76483 - DNA, 134 bp, Homo sapiens; identical to SEQ ID NO: 6561
  chr8:117868876-117869010
  hypo

SEQ ID NO: 76484 - DNA, 222 bp, Homo sapiens; identical to SEQ ID NO: 6562
  chr8:117869490-117869712
  hypo

SEQ ID NO: 76485 - DNA, 108 bp, Homo sapiens; identical to SEQ ID NO: 6563
  chr8:117870589-117870697
  hypo

SEQ ID NO: 76486 - DNA, 113 bp, Homo sapiens; identical to SEQ ID NO: 6564
  chr8:117874066-117874179
  hypo

SEQ ID NO: 76487 - DNA, 131 bp, Homo sapiens; identical to SEQ ID NO: 6565
  chr8:117875367-117875498
  hypo

SEQ ID NO: 76488 - DNA, 177 bp, Homo sapiens; identical to SEQ ID NO: 6566
  chr8:117878823-117879000
  hypo

SEQ ID NO: 76489 - DNA, 114 bp, Homo sapiens; identical to SEQ ID NO: 6567
  chr8:117886848-117886962
  hypo

SEQ ID NO: 76490 - DNA, 39 bp, Homo sapiens; identical to SEQ ID NO: 6568
  chr8:117887066-117887105
  hypo

SEQ ID NO: 76491 - DNA, 30 bp, Homo sapiens
  chr8:117952020-117952050
  hypo
agctgcagggtagccggagccacctcattc

SEQ ID NO: 76492 - DNA, 29 bp, Homo sapiens
  chr8:118438455-118438484
  hypo
gccaaggctggactgtactgccgtgatct

SEQ ID NO: 76493 - DNA, 251 bp, Homo sapiens
  chr8:118531586-118531837
  hypo
aacttttgcttcaagacgctcatcacaatagtgttctgtttgtccccatgacaaacatgctgcagggcttttgcctggtttgttcagtacgctatcttcactcctagcacccagcacataataggtgctcagccaatatttgtcgaatggtaattaccgaagacctgcgaattactatgtttaaaatctctaccagggttcctatgacatatttagtaactatttcctggaaagtccgtacaatggagcat

SEQ ID NO: 76494 - DNA, 45 bp, Homo sapiens; identical to SEQ ID NO: 22671
  chr8:118532122-118532167
  hypo

SEQ ID NO: 76495 - DNA, 30 bp, Homo sapiens
  chr8:118537295-118537325
  hypo
tgcacgtatacctgtcggatacgtttttag

SEQ ID NO: 76496 - DNA, 121 bp, Homo sapiens
  chr8:119057046-119057167
  hypo
ggactacaggcgccccaccgcatgcttttgtaaacaaagttttattggaacatagctcatttgtttacatattgtctacagctgctatcctcttacaagcgttgactagctgtgacagaga

SEQ ID NO: 76497 - DNA, 93 bp, Homo sapiens
  chr8:119057226-119057319
  hypo
cctctagtcgatactatataagcaaagataagacgtaagtctcagcaaccttctaaaaggctcaaccatatcgtacacaaagtacagtgcttt

SEQ ID NO: 76498 - DNA, 31 bp, Homo sapiens; identical to SEQ ID NO: 22673
  chr8:119096829-119096860
  hypo

SEQ ID NO: 76499 - DNA, 208 bp, Homo sapiens; identical to SEQ ID NO: 6570
  chr8:119123497-119123705
  hypo

SEQ ID NO: 76500 - DNA, 22 bp, Homo sapiens
  chr8:120844122-120844144
  hypo
tggtgcggtggctcacgcctgt

SEQ ID NO: 76501 - DNA, 209 bp, Homo sapiens; identical to SEQ ID NO: 22676
  chr8:120846158-120846367
  hypo

SEQ ID NO: 76502 - DNA, 30 bp, Homo sapiens; identical to SEQ ID NO: 22677
  chr8:120846572-120846602
  hypo

SEQ ID NO: 76503 - DNA, 191 bp, Homo sapiens
  chr8:121292125-121292316
  hypo
ttttgtacaatttaaagtaatcggaaatctgttctctgtctgccacaggctatagcatttttgcaattggtgtggccgatgcagattactcggagttggttagcattggcagtaagcccagcgcacgccatgtcttctttgtggatgactttgacgcctttaagaaaatcgaagatgagttaattactttt

SEQ ID NO: 76504 - DNA, 25 bp, Homo sapiens
  chr8:121464786-121464811
  hypo
atagccaggcacagtggctcacgcc

SEQ ID NO: 76505 - DNA, 30 bp, Homo sapiens; identical to SEQ ID NO: 6576
  chr8:121706824-121706854
  hypo

SEQ ID NO: 76506 - DNA, 132 bp, Homo sapiens; identical to SEQ ID NO: 45809
  chr8:121823345-121823477
  hypo

SEQ ID NO: 76507 - DNA, 31 bp, Homo sapiens; identical to SEQ ID NO: 6578
  chr8:121824597-121824628
  hypo

SEQ ID NO: 76508 - DNA, 185 bp, Homo sapiens
  chr8:121982485-121982670
  hypo
attgacctcaagtgacttttccggatcctcagtaccggtgccaggtcacctacactaccttacgttccagcccctggggccttttggcctgttctctattaaacaaacatgtcacaccaccgtatttttcttctccggtttcccaaagatatactttgtcccacggtatacctatcaaagtgtct

SEQ ID NO: 76509 - DNA, 25 bp, Homo sapiens
  chr8:122126444-122126469
  hypo
cctcggcctcccaaagtggtgtttt

SEQ ID NO: 76510 - DNA, 39 bp, Homo sapiens
  chr8:122245399-122245438
  hypo
gattgggaggcagaggcgagttgattacctgaggtcagg

SEQ ID NO: 76511 - DNA, 24 bp, Homo sapiens
  chr8:122347035-122347059
  hypo
ttcggccatcttccttacccacca

SEQ ID NO: 76512 - DNA, 31 bp, Homo sapiens
  chr8:122621652-122621683
  hypo
caccatgcccggccttcaaatttactatcta

SEQ ID NO: 76513 - DNA, 260 bp, Homo sapiens
  chr8:122731384-122731644
  hypo
cccactcagcctggcaggctgcgctcggctcacgctactggcctggatcccatgcgtgccaagggcgagccaggtgtgaagcaacgagaagtatgtgagcgactgagtgtggggtcggcccactgcacagtcagtgctggctccaggtgccagcccaggcaccaagtctctgtgatgctgcagctagaccacgtatactgccagcagcttccccgactgtcaccaggaaatggagtggcgcctggaaacttggagatgcc

SEQ ID NO: 76514 - DNA, 29 bp, Homo sapiens
  chr8:123078703-123078732
  hypo
tttttcttttttttttgagaccgagtctt

SEQ ID NO: 76515 - DNA, 24 bp, Homo sapiens
  chr8:123114667-123114691
  hypo
agaccacacagcaagaagagccgt

SEQ ID NO: 76516 - DNA, 23 bp, Homo sapiens
  chr8:123114990-123115013
  hypo
ccgaagggccatcttcttgctcc

SEQ ID NO: 76517 - DNA, 29 bp, Homo sapiens
  chr8:123316158-123316187
  hypo
gagccaccgtgcctggcctgttatgatct

SEQ ID NO: 76518 - DNA, 77 bp, Homo sapiens
  chr8:123508180-123508257
  hypo
aaataaaaataaaaaataaaaataaaagcaaacctgagacttgacggacaaaggccgtaatttctgtttgcacctgc

SEQ ID NO: 76519 - DNA, 170 bp, Homo sapiens
  chr8:123695433-123695603
  hypo
tgcagcatgttccctggatcacgggagactccatcgattgatgtctggctcaccctgagaaatttaaagggcgagagatggcggcaggccagttgcgccgaaggtggagtgagacgaggtgatcgcgttgagggagacttgcttttcccgagtctgtcagggcaaagcat

SEQ ID NO: 76520 - DNA, 262 bp, Homo sapiens; identical to SEQ ID NO: 22683
  chr8:123830691-123830953
  hypo

SEQ ID NO: 76521 - DNA, 30 bp, Homo sapiens; identical to SEQ ID NO: 22684
  chr8:123838887-123838917
  hypo

SEQ ID NO: 76522 - DNA, 90 bp, Homo sapiens
  chr8:123874124-123874214
  hypo
aggttagcttgtctcctggggcgcctcctcccgccggatggttagttctaaagggcagtggacaaaagcgctcaacttactggaatcaaa

SEQ ID NO: 76523 - DNA, 102 bp, Homo sapiens; identical to SEQ ID NO: 22685
  chr8:123874761-123874863
  hypo

SEQ ID NO: 76524 - DNA, 43 bp, Homo sapiens
  chr8:123875761-123875804
  hypo
tgagcaacacgggaccggtgagtaccgtcgcgtttggcagtgt

SEQ ID NO: 76525 - DNA, 30 bp, Homo sapiens
  chr8:123964016-123964046
  hypo
cctgaacgagttcacggagcatgtcgacat

SEQ ID NO: 76526 - DNA, 353 bp, Homo sapiens
  chr8:123966039-123966392
  hypo
ccctcagaggccacctcagaccggtcagagggcagcagccgggacggccagggtagcgacgagaacgaggagtcgagcgttgtggattacgtggaggtgacggtcggggaggaggatgcgatctcagatagatcagatagctggagtcaggctgcggcagaaggtgtgtcggaactggctgaatcagactccgactgcgtccctgcagaggctggccaggcctagacaggtaattccacctgctcacccaggcagcaggggagaacgcagcttgctttcttttcgttgccagggttaatatagattgtagggtacagagatgttgacacagatggtggcgtctttttcttgta

SEQ ID NO: 76527 - DNA, 94 bp, Homo sapiens
  chr8:124001482-124001576
  hypo
cagccttggttttctcgagtgtaaaatgggaagataatgcctacatcatagagttttgaattggataacaagtcccgtggctgggcgcagtggc

SEQ ID NO: 76528 - DNA, 439 bp, Homo sapiens
  chr8:124014018-124014457
  hypo
ggcgcacaaacacaggcaaacatgcatgcacacacacacatgcacacacaggcgcacaggcgcacacaggcacacacacgcatgcacacacaggcatacaggcgtacaaaaacacacgcatgcacacacacgcatgcacgcacacatatacatacacacatgtgcacccagcacagcaagcttccctcccaactccccaccacctgctatcaagaaagccattgtcaaatactcgaaatgctaaaagactgcgtttttatttttcaagggcccattcctaatcacaagaggccacttagtctgagtggggcccagtaatgttgattaatgattatgtatttctcatgagagttgggaactcaacttgtctctcgcctcagcaccctcccagggtgcaccattaatcaggatcggccacgggtggagttagagcagtgac

SEQ ID NO: 76529 - DNA, 30 bp, Homo sapiens
  chr8:124038147-124038177
  hypo
cagaataatcaacaacggcctcccgtgtaa

SEQ ID NO: 76530 - DNA, 177 bp, Homo sapiens
  chr8:124163978-124164155
  hypo
ataaatgctgtatcaccgctaacatcagaaaactcagcttttctaaattttaaatttcgttttcaagtttctttaaatagaagagcagtagaatgggacaccacgggacagaatcttattaagaaagtgagaaatcttcgccagagactcactgcccgggctcgtcacagatgtcaa

SEQ ID NO: 76531 - DNA, 307 bp, Homo sapiens
  chr8:124178877-124179184
  hypo
agcctcggaagctcccgctgaccatgacatcgaagccagggtgcccacgtgcccttgcgggctcacctcccagcccatctcttcccactcctcccccaccccataccccacggaatccccattccctccaccccacccacccggctgatgactgtcctgctgctctcctctgtggccacagagaggcctcctgagctggctccctgctgctcaccctcccagccctgtactccccagaccttagcctcatcaccgtgcggtgccatgatttctcagttactgccgttcccaccggatcacaagcacc

SEQ ID NO: 76532 - DNA, 338 bp, Homo sapiens
  chr8:124186902-124187240
  hypo
ctattcacctaagtgctcattcggtgccttcgacgtgccagccccaaactgggataggcacttggagttccaagaagctaagtcatgcctgaccccacccccaccccaaattgctcacagcctaaaggaggagattcccgcttaaaccagcagttacagacaaacgcaatccaggctctgtcatggggcccttaaggaatttacttaacctccctgtgcctcagtttcctcatctagaaaaacattaccgggctgcgccaggatgcagagtatatgcaacaggactatccgtccctgctgctgccctttctacccgccctgcccgttgtcttgtagat

SEQ ID NO: 76533 - DNA, 31 bp, Homo sapiens; identical to SEQ ID NO: 22689
  chr8:124195677-124195708
  hypo

SEQ ID NO: 76534 - DNA, 30 bp, Homo sapiens
  chr8:124238540-124238570
  hypo
ccctgcggtcccgcacgctgcaggggaatg

SEQ ID NO: 76535 - DNA, 30 bp, Homo sapiens
  chr8:124238920-124238950
  hypo
cagataaaggaaagccgcgaggaaatgttc

SEQ ID NO: 76536 - DNA, 142 bp, Homo sapiens
  chr8:124247664-124247806
  hypo
agctagtaacaaaaggcgagggtcctcaggtagagaagaaattttaaaaaacaaaacaaaacacagcttaccaggaaatgagaatgccgtgcagacacgcaaggtccgctgagatcatgtgtgaagccgacagaaaggggcg

SEQ ID NO: 76537 - DNA, 33 bp, Homo sapiens
  chr8:124248728-124248761
  hypo
ttttttaaagaaaaagaaggccgggtgcagtgg

SEQ ID NO: 76538 - DNA, 30 bp, Homo sapiens
  chr8:124249362-124249392
  hypo
gcaagtgctgtgcccgcctgcaccaccccg

SEQ ID NO: 76539 - DNA, 83 bp, Homo sapiens; identical to SEQ ID NO: 22690
  chr8:124254705-124254788
  hypo

SEQ ID NO: 76540 - DNA, 80 bp, Homo sapiens; identical to SEQ ID NO: 22691
  chr8:124255228-124255308
  hypo

SEQ ID NO: 76541 - DNA, 30 bp, Homo sapiens; identical to SEQ ID NO: 22692
  chr8:124255872-124255902
  hypo

SEQ ID NO: 76542 - DNA, 39 bp, Homo sapiens; identical to SEQ ID NO: 22693
  chr8:124288873-124288912
  hypo

SEQ ID NO: 76543 - DNA, 30 bp, Homo sapiens; identical to SEQ ID NO: 22694
  chr8:124373840-124373870
  hypo

SEQ ID NO: 76544 - DNA, 42 bp, Homo sapiens
  chr8:124374922-124374964
  hypo
tgggattaaggtgtgagtcatcacgcccggccaaaaatatca

SEQ ID NO: 76545 - DNA, 28 bp, Homo sapiens
  chr8:124405860-124405888
  hypo
aatccaggaaagatggtcaggcgcggtg

SEQ ID NO: 76546 - DNA, 43 bp, Homo sapiens; identical to SEQ ID NO: 22695
  chr8:124412834-124412877
  hypo

SEQ ID NO: 76547 - DNA, 30 bp, Homo sapiens
  chr8:124431766-124431796
  hypo
gtttgggactgtgtcgtcagcagagcattt

SEQ ID NO: 76548 - DNA, 61 bp, Homo sapiens
  chr8:124453585-124453646
  hypo
caaggtaggatggggcgccgtctacacactatccgaatttacacatcggtttggcagtaaa

SEQ ID NO: 76549 - DNA, 30 bp, Homo sapiens
  chr8:124453850-124453880
  hypo
aaacttgataaagtgcgtacttgctaagat

SEQ ID NO: 76550 - DNA, 36 bp, Homo sapiens
  chr8:124455527-124455563
  hypo
gggattacaggcatgagccaccgcacccggccaaat

SEQ ID NO: 76551 - DNA, 30 bp, Homo sapiens
  chr8:124456088-124456118
  hypo
aggtgtgagccactgcgcctggcctgcggt

SEQ ID NO: 76552 - DNA, 72 bp, Homo sapiens; identical to SEQ ID NO: 22696
  chr8:124532973-124533045
  hypo

SEQ ID NO: 76553 - DNA, 31 bp, Homo sapiens; identical to SEQ ID NO: 22697
  chr8:124553866-124553897
  hypo

SEQ ID NO: 76554 - DNA, 30 bp, Homo sapiens; identical to SEQ ID NO: 22698
  chr8:124630593-124630623
  hypo

SEQ ID NO: 76555 - DNA, 328 bp, Homo sapiens
  chr8:124730011-124730339
  hypo
gaggcgactttctgacggggcgtgtctcagcaggtttggagtgcagatgcacaagtccacaccttacgtaaccacgccacgtgaggcgcattaagtaaccactcagatgcgctcgtgcttggcttggagccactgttgtctgtaaaaggtacaattacgctgctaacgctgtacctctggcttggggctcacgcccagactcgcacccaggctcgcttgcgcccagagaaagagtaaagccatgttgaaactccctgcgattcctcgagtgtttttccagctgcccgccaccccaccgacttttttcggatctcacttagaaactaac

SEQ ID NO: 76556 - DNA, 30 bp, Homo sapiens; identical to SEQ ID NO: 45824
  chr8:124757645-124757675
  hypo

SEQ ID NO: 76557 - DNA, 42 bp, Homo sapiens; identical to SEQ ID NO: 22699
  chr8:124804119-124804161
  hypo

SEQ ID NO: 76558 - DNA, 367 bp, Homo sapiens
  chr8:124965499-124965866
  hypo
catcagcccacccaagagggccgcgctggttgtaaatccttcgggcattcctggaagtttatttggcttactcttcagcaggcctgagctgcgcctagaccactgcttctcaacactgggtctgccgtagagtaattaaagatctctgaaggtggttcgagatatcagtatttttataaacttccttaggcgactccaatgggcagcagggtccagagctcttggcttcagaagggcaggggtgcctgtctctacaaggtggggcatctcgtcctcttccccagcccatgacagcgtcttcagccatgccccaatgcatcaggcgctggcttccctacaggagaactcagaacgctgaggctaccca

SEQ ID NO: 76559 - DNA, 30 bp, Homo sapiens; identical to SEQ ID NO: 22700
  chr8:125266643-125266673
  hypo

SEQ ID NO: 76560 - DNA, 30 bp, Homo sapiens
  chr8:125313558-125313588
  hypo
tggctcaacagggtcggggtgggcgccggt

SEQ ID NO: 76561 - DNA, 31 bp, Homo sapiens; identical to SEQ ID NO: 22701
  chr8:125364993-125365024
  hypo

SEQ ID NO: 76562 - DNA, 38 bp, Homo sapiens; identical to SEQ ID NO: 22702
  chr8:125411826-125411864
  hypo

SEQ ID NO: 76563 - DNA, 91 bp, Homo sapiens
  chr8:125452301-125452392
  hypo
ttgccaaacacactcacgcacctgactatcctgtcagtaagggattgttttttggtgtttgtttgttttttgtttttgttcgtttgttttg

SEQ ID NO: 76564 - DNA, 90 bp, Homo sapiens
  chr8:125498207-125498297
  hypo
tggtgcctacaacacgtcagcttttggaattgagctgcttcctcgaaaaggtccctcgctgtggatggcacttatcgttctacagctaac

SEQ ID NO: 76565 - DNA, 70 bp, Homo sapiens; identical to SEQ ID NO: 22704
  chr8:125498531-125498601
  hypo

SEQ ID NO: 76566 - DNA, 88 bp, Homo sapiens
  chr8:125553021-125553109
  hypo
tactgtgttgttgtatgtactcgggcagcctcatttagtgctgtcaccacctgcgctcatttgtctctagagctgtagttcgaattgc

SEQ ID NO: 76567 - DNA, 93 bp, Homo sapiens; identical to SEQ ID NO: 22706
  chr8:125574050-125574143
  hypo

SEQ ID NO: 76568 - DNA, 30 bp, Homo sapiens
  chr8:125574596-125574626
  hypo
ggatggtatcggaagcgctattcaaccata

SEQ ID NO: 76569 - DNA, 72 bp, Homo sapiens
  chr8:125575143-125575215
  hypo
ttggagctgcggtagcggtaatgtgagctgggggaatgcgagtgggagccgctggaccgggagtcactgctg

SEQ ID NO: 76570 - DNA, 169 bp, Homo sapiens; identical to SEQ ID NO: 22707
  chr8:125580647-125580816
  hypo

SEQ ID NO: 76571 - DNA, 30 bp, Homo sapiens; identical to SEQ ID NO: 22708
  chr8:125590217-125590247
  hypo

SEQ ID NO: 76572 - DNA, 30 bp, Homo sapiens; identical to SEQ ID NO: 45829
  chr8:125602743-125602773
  hypo

SEQ ID NO: 76573 - DNA, 17 bp, Homo sapiens
  chr8:125618690-125618707
  hypo
aaagtaggtatcattat

SEQ ID NO: 76574 - DNA, 120 bp, Homo sapiens; identical to SEQ ID NO: 22709
  chr8:125673726-125673846
  hypo

SEQ ID NO: 76575 - DNA, 102 bp, Homo sapiens; identical to SEQ ID NO: 22710
  chr8:125680349-125680451
  hypo

SEQ ID NO: 76576 - DNA, 31 bp, Homo sapiens; identical to SEQ ID NO: 22711
  chr8:125680996-125681027
  hypo

SEQ ID NO: 76577 - DNA, 107 bp, Homo sapiens
  chr8:125682589-125682696
  hypo
gcaaaggagattacactcaggcgggcggcaccccacacagcctggcggcaccccacacagcctggcggcaccccacacagcctggcggcaccccacacagcctggca

SEQ ID NO: 76578 - DNA, 150 bp, Homo sapiens
  chr8:125792767-125792917
  hypo
gagaaggaggtgaagcggcagagggagagcttgatcttgtgagatttattcattcggcaaatatttattcatcctttaccatatgcccaggactatgccaggtgctgaggttgagtgggtattttttttttttttcctggagagcaagtc

SEQ ID NO: 76579 - DNA, 39 bp, Homo sapiens
  chr8:125992004-125992043
  hypo
gcgtgagccactgcgcccggcccttattaattgtttaag

SEQ ID NO: 76580 - DNA, 79 bp, Homo sapiens
  chr8:126007979-126008058
  hypo
aagtgttgtcaggaagccaaaacgagctaatatatgaaaagtatttagaatgctacccgtactatatgtgtgagctctt

SEQ ID NO: 76581 - DNA, 30 bp, Homo sapiens
  chr8:126020645-126020675
  hypo
taaaaaaaaattatcgtagtaaaaaacatg

SEQ ID NO: 76582 - DNA, 81 bp, Homo sapiens
  chr8:126042806-126042887
  hypo
agaaacccatcactgcaaagccgagatcacgccactgcactccaacctgggcgacagagcgactctttctcataaaaaaaa

SEQ ID NO: 76583 - DNA, 377 bp, Homo sapiens
  chr8:126044383-126044760
  hypo
cccatctctattagggcgataagaggaatttggtaatgtgaggtttaagttaggttttgtgacaagaagtcccacgtagtcctggttggtcttctgtaccttgtacactgctccaccgtggagcagataaactggccaatcagcgccaggaactgctcggtgtaccgggaatggaactgcttcagcagagtgagcagtcccaggacaagtggtggccaatcaaccgggtcggtcggttttcggcagaccattcctgcaagggaacaagttgcaacaccatatgaagtacttgccttcagcaacattcattaaataccaacgctgtgaaggtcaaaatgtttggggcccatattctcgctggcagatgatattttgga

SEQ ID NO: 76584 - DNA, 229 bp, Homo sapiens
  chr8:126061267-126061496
  hypo
tacactcttgctccacgttgtaatttatgatacgagatacttcttcctgccaaatcttcagaccataaatgttgacatagtcctgtatgtattcaaaagaacgatggaatccatccatggtcgctcccaactctttcagcttgggcatcaattcacttggctgtggaaaaggggaaacataaagctcttacactggagtagattgtcaactattcgttctaatatctaa

SEQ ID NO: 76585 - DNA, 30 bp, Homo sapiens
  chr8:126135825-126135855
  hypo
gtgtacatgcgcacacgcacacaaacacac

SEQ ID NO: 76586 - DNA, 30 bp, Homo sapiens
  chr8:126156729-126156759
  hypo
tgctggaactggcgccggataagctcatga

SEQ ID NO: 76587 - DNA, 65 bp, Homo sapiens; identical to SEQ ID NO: 22714
  chr8:126238722-126238787
  hypo

SEQ ID NO: 76588 - DNA, 22 bp, Homo sapiens
  chr8:126278292-126278314
  hypo
agctaaccctgtgtgagcttgc

SEQ ID NO: 76589 - DNA, 17 bp, Homo sapiens
  chr8:126285115-126285132
  hypo
tacgtgtgtgtatatat

SEQ ID NO: 76590 - DNA, 18 bp, Homo sapiens
  chr8:126371204-126371222
  hypo
aacagttgaaatgtcaga

SEQ ID NO: 76591 - DNA, 172 bp, Homo sapiens
  chr8:126374236-126374408
  hypo
gggaccccaagacccggttccctttgctcagcagtcacctttgtgtttgccctgtgctgcagcgaaatgctctgcccgggtagtgcctggaggtggggacccagccgctcctgcgaggcctgaagggctgactcctgcacagcgatgatgcggcagctgaagatcgggtatt

SEQ ID NO: 76592 - DNA, 30 bp, Homo sapiens
  chr8:126562036-126562066
  hypo
gtgttctttcattgtcggttggctcatcac

SEQ ID NO: 76593 - DNA, 5 bp, Homo sapiens
  chr8:126628173-126628178
  hypo
gaacc

SEQ ID NO: 76594 - DNA, 105 bp, Homo sapiens
  chr8:127464657-127464762
  hypo
acacaatcacatcaaattaagcgtcagatgaaaagagctcgcaggaatcttaactccaaagacccatttcttttttttgtttgtttgagactcgagtctcgctct

SEQ ID NO: 76595 - DNA, 45 bp, Homo sapiens; identical to SEQ ID NO: 22717
  chr8:127465001-127465046
  hypo

SEQ ID NO: 76596 - DNA, 24 bp, Homo sapiens
  chr8:127560444-127560468
  hypo
tgagatggagtctcactctgtcgc

SEQ ID NO: 76597 - DNA, 31 bp, Homo sapiens; identical to SEQ ID NO: 6587
  chr8:127570026-127570057
  hypo

SEQ ID NO: 76598 - DNA, 773 bp, Homo sapiens; identical to SEQ ID NO: 45835
  chr8:127570150-127570923
  hypo

SEQ ID NO: 76599 - DNA, 23 bp, Homo sapiens
  chr8:127582716-127582739
  hypo
gcgcctggccaagaagtgatttt

SEQ ID NO: 76600 - DNA, 30 bp, Homo sapiens; identical to SEQ ID NO: 45836
  chr8:127707255-127707285
  hypo

SEQ ID NO: 76601 - DNA, 30 bp, Homo sapiens
  chr8:127767873-127767903
  hypo
gtgagcgtaaggtcccgaggttggactgtg

SEQ ID NO: 76602 - DNA, 38 bp, Homo sapiens
  chr8:127887549-127887587
  hypo
gcagaagatatagaactgggccgggggcggtggctcac

SEQ ID NO: 76603 - DNA, 55 bp, Homo sapiens
  chr8:128235795-128235850
  hypo
aaagcatgcacagaacgtggaacttggcctcctgaaaaggcgtgtcttcagctta

SEQ ID NO: 76604 - DNA, 19 bp, Homo sapiens
  chr8:128323798-128323817
  hypo
aataaaaagtaagaaaaat

SEQ ID NO: 76605 - DNA, 30 bp, Homo sapiens; identical to SEQ ID NO: 45837
  chr8:128355602-128355632
  hypo

SEQ ID NO: 76606 - DNA, 30 bp, Homo sapiens; identical to SEQ ID NO: 45838
  chr8:128407427-128407457
  hypo

SEQ ID NO: 76607 - DNA, 30 bp, Homo sapiens; identical to SEQ ID NO: 45839
  chr8:128413289-128413319
  hypo

SEQ ID NO: 76608 - DNA, 30 bp, Homo sapiens; identical to SEQ ID NO: 45840
  chr8:128424776-128424806
  hypo

SEQ ID NO: 76609 - DNA, 30 bp, Homo sapiens; identical to SEQ ID NO: 45841
  chr8:128718052-128718082
  hypo

SEQ ID NO: 76610 - DNA, 30 bp, Homo sapiens; identical to SEQ ID NO: 45842
  chr8:128719868-128719898
  hypo

SEQ ID NO: 76611 - DNA, 104 bp, Homo sapiens
  chr8:128745536-128745640
  hypo
ataataagccaaggccaggagcgatgactcgcacttgtattcccagcagtttcagaggcaaaggccgaaggatcgctttaaccgaggagtttgagaccagcctg

SEQ ID NO: 76612 - DNA, 30 bp, Homo sapiens; identical to SEQ ID NO: 22721
  chr8:128810693-128810723
  hypo

SEQ ID NO: 76613 - DNA, 277 bp, Homo sapiens
  chr8:128831867-128832144
  hypo
aatgcggaagagcctcgggataagtcggctaatgacaccctcaggctacccagccctcgggagctcacagcagagcagttggggatgccttgcaaggttacctgtgccagagttcctggggtacatattaaataggtaggacccaatactactttgcattttcctggaatcctagactcttaacattggaaaggatttctttgccaagtaattcgccctcatcattaacctctaagaaatgcagaggtggaattagaaggtgcgtgtctctttcttt

SEQ ID NO: 76614 - DNA, 94 bp, Homo sapiens
  chr8:128836044-128836138
  hypo
ttgtcaatggccttcactgcccgtcgaagcagtcggctttgatcacatgtcctttgtgttcagctctctctttgccctcagctttctaatcgcc

SEQ ID NO: 76615 - DNA, 88 bp, Homo sapiens
  chr8:128861839-128861927
  hypo
gaaaagagaaagactgcgtgcatgtgcatgggtgcacagcctgtacatatgtgtgtgtgtgcccctgcgtgcacgtgcatgggtgcac

SEQ ID NO: 76616 - DNA, 396 bp, Homo sapiens
  chr8:128867871-128868267
  hypo
gagactggagagcacctttcccggtgaactcccgtcatgtcaggcctcagcagactgagcgggaacccccaccagcgaggttgctcaggacagcgtttctcttgggcctgtgtttggaacaagtatcctttgaactaatcactaacctgtgaaaatggatagacctcgtgtgaaaatgaaaatgtctggcttcccttctgaggagcggaggcatgaaaggtgtggccggtaggggtgggggccccacacctgtgcagccgccctggccagagcccacaagcagcgtcccctggtcatgccccactcccttctccataatctcgcccctccctgaccaggccacctgacgttgccatttatattcaagttcattccgttgttattcttttagaaaag

SEQ ID NO: 76617 - DNA, 860 bp, Homo sapiens
  chr8:128871889-128872749
  hypo
tggcttctgtctaaacggagcaggctcagggccatgctgaacttggagaaatctgtgcaggagtcagatttgggctttagagtcacctggggttgaatctcgggcctgctatttattgaacctgtcctagcctcaatcgccttatctgtaccatggggatgataccatctaggtcgaaggtagttgcaggagattctcatgcacggaggcccttggccgtcatttgtttctttgtctctacaagcagagaggctgagtcatacagatcctgaggggagatcactttctcttccctcctttcgtgtgtcatctccacctgggtgtggtgagccccaggaataatgctgtgacatcaagccccgtgaacacctcctttcacacggaccccgtgactggctgcggctgccagcggtgatgagaactgatgacactccagggctaccaggaacggtgtgtgtgcctctgggcagggccacttcctagaaccatggggctgctctgtgaagagaaccggctcccagtgagctccaggagacgaggagcaggtcctggtggcggaggtgctggcgcaggaggccggctcctggcagaatcggcttccagctctgggcactggggtgcggtgtgggaccagcaacaggctgctcctctgccaggaaccgccagaaccaaagtcttctcgaaggcatcttcagaaggcaagcacagggctgagcactccggagaggagcctttgggggaaaactttttctcggagcttcggagctcagggagtactatgggggagattcactaggttgatgctttgctgataggcagccctgtagagaagacaaggcagctgggcatggtggctcagg

SEQ ID NO: 76618 - DNA, 653 bp, Homo sapiens; identical to SEQ ID NO: 22724
  chr8:128888833-128889486
  hypo

SEQ ID NO: 76619 - DNA, 457 bp, Homo sapiens; identical to SEQ ID NO: 22725
  chr8:128893132-128893589
  hypo

SEQ ID NO: 76620 - DNA, 42 bp, Homo sapiens; identical to SEQ ID NO: 22726
  chr8:128896286-128896328
  hypo

SEQ ID NO: 76621 - DNA, 30 bp, Homo sapiens; identical to SEQ ID NO: 22727
  chr8:128922506-128922536
  hypo

SEQ ID NO: 76622 - DNA, 397 bp, Homo sapiens
  chr8:128931027-128931424
  hypo
gcaaatgcacaagccttgagtcgctgcattcttttctaaccacccaagagataagttgaacccccactcgtagcaacctggccacttgtctgtttagtcagccctggaatacctccactgacggggcactcactaccactgaaagatggtgtgcagaattctaatgttcttcctctcgcggggtcgtgggggctttcttccagttctctgggttctgatcgttggggctgtcctgacacccttcttcagatgaccgctgtcaggttggtgaaggcagtgcgcgttgggccttccctccctagagatgtgattgcacgtcgggtaccaggagcctggccagccctcagcttctgctaaccagggagcagtgaagcccggtttacttttgttggcttgt

SEQ ID NO: 76623 - DNA, 149 bp, Homo sapiens; identical to SEQ ID NO: 22729
  chr8:128957471-128957620
  hypo

SEQ ID NO: 76624 - DNA, 76 bp, Homo sapiens; identical to SEQ ID NO: 22730
  chr8:128958208-128958284
  hypo

SEQ ID NO: 76625 - DNA, 30 bp, Homo sapiens; identical to SEQ ID NO: 22731
  chr8:128961226-128961256
  hypo

SEQ ID NO: 76626 - DNA, 30 bp, Homo sapiens; identical to SEQ ID NO: 22732
  chr8:128962708-128962738
  hypo

SEQ ID NO: 76627 - DNA, 245 bp, Homo sapiens
  chr8:129069802-129070047
  hypo
ccctggcactggctgacgtgggaggtacagaatgaggtgtccgtccctccaaggcacggtgacctagaatcccactgctcactgcctgtctctgttcagcctttcagttcataaacatgctttcctccctgcattttgacatccatcatcgtttaaattccaggtcgtcatccttgtagaacgaggttcggatctcggcattaaatctcccccacggtgtgtgcggggccttgccatttgcagaa

SEQ ID NO: 76628 - DNA, 31 bp, Homo sapiens; identical to SEQ ID NO: 22734
  chr8:129076175-129076206
  hypo

SEQ ID NO: 76629 - DNA, 91 bp, Homo sapiens
  chr8:129131613-129131704
  hypo
ttgggaggccaaggcaggctgattctggtacaagctccttttctcatcgcagacctgcagtttgagtagcgttgcttaagttacactgtat

SEQ ID NO: 76630 - DNA, 30 bp, Homo sapiens; identical to SEQ ID NO: 45847
  chr8:129194625-129194655
  hypo

SEQ ID NO: 76631 - DNA, 43 bp, Homo sapiens
  chr8:129533965-129534008
  hypo
gaggctgccaacagccatgtgcgtgagcttcaaaacaaattct

SEQ ID NO: 76632 - DNA, 30 bp, Homo sapiens; identical to SEQ ID NO: 45848
  chr8:129541915-129541945
  hypo

SEQ ID NO: 76633 - DNA, 30 bp, Homo sapiens; identical to SEQ ID NO: 45849
  chr8:129543933-129543963
  hypo

SEQ ID NO: 76634 - DNA, 35 bp, Homo sapiens
  chr8:129893540-129893575
  hypo
ggaataattgcataagatattcgcttgaaaatatt

SEQ ID NO: 76635 - DNA, 86 bp, Homo sapiens
  chr8:129909747-129909833
  hypo
ggccatcttggctcctcctctctacttctattttttaaaagccttttataggactttaaacacacgtgggaaagttatgaattctc

SEQ ID NO: 76636 - DNA, 35 bp, Homo sapiens
  chr8:129996834-129996869
  hypo
gagccacggtgcccggccccattgtgtgttttttt

SEQ ID NO: 76637 - DNA, 30 bp, Homo sapiens
  chr8:130254530-130254560
  hypo
ttttagggccagtacgtggaaaatgcggaa

SEQ ID NO: 76638 - DNA, 30 bp, Homo sapiens; identical to SEQ ID NO: 6589
  chr8:130647087-130647117
  hypo

SEQ ID NO: 76639 - DNA, 30 bp, Homo sapiens
  chr8:130877061-130877091
  hypo
tggtgaagattccacgtacacatttttgag

SEQ ID NO: 76640 - DNA, 30 bp, Homo sapiens
  chr8:130895624-130895654
  hypo
acaactgttgtccagcgcaaaaattcgctc

SEQ ID NO: 76641 - DNA, 188 bp, Homo sapiens; identical to SEQ ID NO: 22736
  chr8:131064015-131064203
  hypo

SEQ ID NO: 76642 - DNA, 320 bp, Homo sapiens
  chr8:131070004-131070324
  hypo
tgtttttctagcatgtaatagtgtgtgacatagaaaagacaccaaatgcaatggctgttgggtgagtgatgcagctgacagggtccttgtgctcaagagccctcttttactgcactgtctgtaggctccaatgtggtgcctgcccaggcatgctgtatgaatgtacggatgaagtggatggatattcgtacgtacccaccactcctggtcctcttcccctgtgacgataatcacttctccctcgatgaatgtgagctcgtcatcgttgtctgcctggcagtcataaatggtcttcactcgcctcactttatttttcccct

SEQ ID NO: 76643 - DNA, 30 bp, Homo sapiens
  chr8:131080122-131080152
  hypo
gtttatattaatagcgacataaaaatcagt

SEQ ID NO: 76644 - DNA, 31 bp, Homo sapiens; identical to SEQ ID NO: 6590
  chr8:131081757-131081788
  hypo

SEQ ID NO: 76645 - DNA, 40 bp, Homo sapiens
  chr8:131082546-131082586
  hypo
tgctgggattacaggcgtgagccaccgtgcccggccgact

SEQ ID NO: 76646 - DNA, 339 bp, Homo sapiens; identical to SEQ ID NO: 22738
  chr8:131085737-131086076
  hypo

SEQ ID NO: 76647 - DNA, 99 bp, Homo sapiens
  chr8:131124330-131124429
  hypo
agcccatacctttcccggcgttcctaggaggcagagggggagcctccgtggttggtgatgtgggcgagtctgtgcttgtggaaacgaagatctggttgg

SEQ ID NO: 76648 - DNA, 30 bp, Homo sapiens; identical to SEQ ID NO: 22739
  chr8:131300212-131300242
  hypo

SEQ ID NO: 76649 - DNA, 30 bp, Homo sapiens
  chr8:131367139-131367169
  hypo
taccatttttgagacgtagcctcactctgt

SEQ ID NO: 76650 - DNA, 31 bp, Homo sapiens; identical to SEQ ID NO: 22740
  chr8:131412441-131412472
  hypo

SEQ ID NO: 76651 - DNA, 1222 bp, Homo sapiens; identical to SEQ ID NO: 45854
  chr8:131455077-131456299
  hypo

SEQ ID NO: 76652 - DNA, 309 bp, Homo sapiens; identical to SEQ ID NO: 6592
  chr8:132051990-132052299
  hypo

SEQ ID NO: 76653 - DNA, 117 bp, Homo sapiens; identical to SEQ ID NO: 6593
  chr8:132052398-132052515
  hypo

SEQ ID NO: 76654 - DNA, 1994 bp, Homo sapiens; identical to SEQ ID NO: 6594
  chr8:132052589-132054583
  hypo

SEQ ID NO: 76655 - DNA, 30 bp, Homo sapiens
  chr8:132966089-132966119
  hypo
attcaaggtgtggttcgcaaaacagtcaac

SEQ ID NO: 76656 - DNA, 31 bp, Homo sapiens
  chr8:133182608-133182639
  hypo
cataaaatctccatgtcgccaccaggtcaat

SEQ ID NO: 76657 - DNA, 10 bp, Homo sapiens
  chr8:133492100-133492110
  hypo
aaatgtgcac

SEQ ID NO: 76658 - DNA, 503 bp, Homo sapiens; identical to SEQ ID NO: 6598
  chr8:133492127-133492630
  hypo

SEQ ID NO: 76659 - DNA, 1039 bp, Homo sapiens; identical to SEQ ID NO: 45863
  chr8:133492712-133493751
  hypo

SEQ ID NO: 76660 - DNA, 95 bp, Homo sapiens; identical to SEQ ID NO: 22748
  chr8:133686739-133686834
  hypo

SEQ ID NO: 76661 - DNA, 30 bp, Homo sapiens; identical to SEQ ID NO: 22749
  chr8:134003881-134003911
  hypo

SEQ ID NO: 76662 - DNA, 30 bp, Homo sapiens
  chr8:134012870-134012900
  hypo
aaggagacaacacacggagcacatcacatt

SEQ ID NO: 76663 - DNA, 30 bp, Homo sapiens; identical to SEQ ID NO: 22750
  chr8:134218264-134218294
  hypo

SEQ ID NO: 76664 - DNA, 370 bp, Homo sapiens
  chr8:134224535-134224905
  hypo
cctgccgctgcaccacgccagccctttccggatgctcagaggggaaaaaaataataataggtcagcgggccgaaaccggtattaagtaggagtcctctgactcagagaggccttaagaactctcggtgagtgaaggaactggccctgcaggtcgtcacagaagagccatgggatccgagccccgcgcagccacatgactcacagccagcttccacctgctcagggcctcggctttctccctgtaaagtgaggccacctcccttacctcggggctgcagcgacaatcactcaagaaaggaaaggagcagggtctgaggtggaatttgggccccaccgctgaccagcggaaggattcgggcaattggtttaa

SEQ ID NO: 76665 - DNA, 31 bp, Homo sapiens; identical to SEQ ID NO: 22752
  chr8:134232708-134232739
  hypo

SEQ ID NO: 76666 - DNA, 30 bp, Homo sapiens; identical to SEQ ID NO: 6601
  chr8:134232949-134232979
  hypo

SEQ ID NO: 76667 - DNA, 30 bp, Homo sapiens; identical to SEQ ID NO: 22754
  chr8:134251103-134251133
  hypo

SEQ ID NO: 76668 - DNA, 143 bp, Homo sapiens; identical to SEQ ID NO: 22755
  chr8:134254199-134254342
  hypo

SEQ ID NO: 76669 - DNA, 30 bp, Homo sapiens
  chr8:134260992-134261022
  hypo
ctcaatctccaggtcgcgccggctgcagga

SEQ ID NO: 76670 - DNA, 125 bp, Homo sapiens; identical to SEQ ID NO: 22756
  chr8:134278413-134278538
  hypo

SEQ ID NO: 76671 - DNA, 31 bp, Homo sapiens; identical to SEQ ID NO: 22757
  chr8:134289833-134289864
  hypo

SEQ ID NO: 76672 - DNA, 678 bp, Homo sapiens; identical to SEQ ID NO: 45867
  chr8:134308717-134309395
  hypo

SEQ ID NO: 76673 - DNA, 31 bp, Homo sapiens; identical to SEQ ID NO: 22759
  chr8:134330746-134330777
  hypo

SEQ ID NO: 76674 - DNA, 206 bp, Homo sapiens; identical to SEQ ID NO: 22760
  chr8:134335638-134335844
  hypo

SEQ ID NO: 76675 - DNA, 30 bp, Homo sapiens; identical to SEQ ID NO: 22761
  chr8:134467150-134467180
  hypo

SEQ ID NO: 76676 - DNA, 138 bp, Homo sapiens
  chr8:134470039-134470177
  hypo
gtccccaagttcctccctccccgtgtgcagagggggctcccccgagcctgggagcacaggccccatgcctccgtcacactccaccaggaaaaagtcacgcctcctcaaagcagcagcgaccttttcagggatattttc

SEQ ID NO: 76677 - DNA, 30 bp, Homo sapiens
  chr8:134470403-134470433
  hypo
acccccaatatcccacgtccgaggactcct

SEQ ID NO: 76678 - DNA, 30 bp, Homo sapiens
  chr8:134474242-134474272
  hypo
gggatgggaagacacggcccttagtgagtt

SEQ ID NO: 76679 - DNA, 163 bp, Homo sapiens; identical to SEQ ID NO: 22763
  chr8:134478324-134478487
  hypo

SEQ ID NO: 76680 - DNA, 44 bp, Homo sapiens
  chr8:134482028-134482072
  hypo
ggcagaaatgacctccgggctctgtgatgcgactttctctagtg

SEQ ID NO: 76681 - DNA, 32 bp, Homo sapiens; identical to SEQ ID NO: 22765
  chr8:134482374-134482406
  hypo

SEQ ID NO: 76682 - DNA, 31 bp, Homo sapiens; identical to SEQ ID NO: 22766
  chr8:134507967-134507998
  hypo

SEQ ID NO: 76683 - DNA, 30 bp, Homo sapiens; identical to SEQ ID NO: 22767
  chr8:134519981-134520011
  hypo

SEQ ID NO: 76684 - DNA, 30 bp, Homo sapiens
  chr8:134566574-134566604
  hypo
gacatgaatgagccacgtttacactgcagc

SEQ ID NO: 76685 - DNA, 31 bp, Homo sapiens; identical to SEQ ID NO: 6604
  chr8:134581318-134581349
  hypo

SEQ ID NO: 76686 - DNA, 1226 bp, Homo sapiens; identical to SEQ ID NO: 45870
  chr8:134582425-134583651
  hypo

SEQ ID NO: 76687 - DNA, 44 bp, Homo sapiens
  chr8:134602078-134602122
  hypo
attactttaccagattttcaccgggcgcacgcatgcctgtaatc

SEQ ID NO: 76688 - DNA, 161 bp, Homo sapiens
  chr8:134686599-134686760
  hypo
ttttgacacaaacaatagtcccggcttttgcttttccaagaggcatcagcacaatcggagcagacactggtgactcattttgatcatcgcctttaagcaattcactctgtgagcctggacttgacaggcctcactgtgccgtgaaatctaatactattttt

SEQ ID NO: 76689 - DNA, 27 bp, Homo sapiens
  chr8:134687439-134687466
  hypo
agaatgaaagccaaggctgggcgcggt

SEQ ID NO: 76690 - DNA, 40 bp, Homo sapiens
  chr8:135003998-135004038
  hypo
agacttccaaatacagccaggcgcagtggctcacgcctgt

SEQ ID NO: 76691 - DNA, 32 bp, Homo sapiens
  chr8:135301260-135301292
  hypo
ggccagatcccgcaatagagtattatctccat

SEQ ID NO: 76692 - DNA, 162 bp, Homo sapiens
  chr8:135348404-135348566
  hypo
ggttccaatcactgtggtcaccgctaaacaataaaacatcctccggtcactttgtcataggaatggtcctggtttttaacaatttaaacgcacccagtgtcataatcaaaaccatgtcttgtcctatgtcacgcttcccccgacactgcaaaccccaggcct

SEQ ID NO: 76693 - DNA, 30 bp, Homo sapiens; identical to SEQ ID NO: 22769
  chr8:135547977-135548007
  hypo

SEQ ID NO: 76694 - DNA, 179 bp, Homo sapiens
  chr8:135563399-135563578
  hypo
cttcacttgaaaatgagaaagcgtggactaacgcgcagagagtagttttcactacagagacatggatcaaaatcccaactctagctcatagaaattgtgttactcctgagcacattactaaaatagactgtgggcctcagtgtcctaatccgtaaaacggggatgttaattacctacct

SEQ ID NO: 76695 - DNA, 31 bp, Homo sapiens; identical to SEQ ID NO: 22770
  chr8:135595330-135595361
  hypo

SEQ ID NO: 76696 - DNA, 25 bp, Homo sapiens
  chr8:135670281-135670306
  hypo
gtaaaaaataaatatgcggccgggc

SEQ ID NO: 76697 - DNA, 31 bp, Homo sapiens; identical to SEQ ID NO: 6606
  chr8:135703767-135703798
  hypo

SEQ ID NO: 76698 - DNA, 30 bp, Homo sapiens
  chr8:135705855-135705885
  hypo
caataaaacggggcgcggggggtgggagaa

SEQ ID NO: 76699 - DNA, 86 bp, Homo sapiens
  chr8:135805713-135805799
  hypo
acaggtttcctgagacggttttgggaagaaactgttccacctcaactcatcgggcattaattagattcttgtaaggagcacgaaac

SEQ ID NO: 76700 - DNA, 117 bp, Homo sapiens; identical to SEQ ID NO: 22772
  chr8:135871436-135871553
  hypo

SEQ ID NO: 76701 - DNA, 30 bp, Homo sapiens
  chr8:136398438-136398468
  hypo
gtgcgtccggaactgcggtgtcctatagaa

SEQ ID NO: 76702 - DNA, 84 bp, Homo sapiens
  chr8:136440094-136440178
  hypo
tccctgccacccacactgccacgtctctgcccgattccttcatgaagggcgacaatgcctcccggacacacaccccatatttcc

SEQ ID NO: 76703 - DNA, 30 bp, Homo sapiens; identical to SEQ ID NO: 6608
  chr8:136469758-136469788
  hypo

SEQ ID NO: 76704 - DNA, 30 bp, Homo sapiens
  chr8:138159414-138159444
  hypo
ccccactccccacaccggtacccagcttac

SEQ ID NO: 76705 - DNA, 30 bp, Homo sapiens; identical to SEQ ID NO: 45880
  chr8:138741514-138741544
  hypo

SEQ ID NO: 76706 - DNA, 28 bp, Homo sapiens
  chr8:138909174-138909202
  hypo
tttttttttttttttttgagacggagtc

SEQ ID NO: 76707 - DNA, 28 bp, Homo sapiens
  chr8:138909381-138909409
  hypo
tcttgacgtatatatgattatccccagt

SEQ ID NO: 76708 - DNA, 154 bp, Homo sapiens
  chr8:138910219-138910373
  hypo
cgcccggcaacatgcacctttaaatgaatatttcgttttattaatttatttcaataagttgagttccatctcccaactttatttgaacagaattaaccaaactggttaaaacttaagagagttaacaaagcacgaatgattttcttccgcactg

SEQ ID NO: 76709 - DNA, 43 bp, Homo sapiens
  chr8:139096092-139096135
  hypo
ggagaaagtgggataatacatcggcagtagttaaagcccactt

SEQ ID NO: 76710 - DNA, 30 bp, Homo sapiens; identical to SEQ ID NO: 6609
  chr8:139301362-139301392
  hypo

SEQ ID NO: 76711 - DNA, 18 bp, Homo sapiens
  chr8:139356827-139356845
  hypo
tttttttttgttaaggag

SEQ ID NO: 76712 - DNA, 142 bp, Homo sapiens; identical to SEQ ID NO: 22778
  chr8:139889989-139890131
  hypo

SEQ ID NO: 76713 - DNA, 30 bp, Homo sapiens
  chr8:139890431-139890461
  hypo
gtcggggcccacctcgaaggtgtccaccag

SEQ ID NO: 76714 - DNA, 30 bp, Homo sapiens
  chr8:140617146-140617176
  hypo
tggccagcatctcccgttaatctctgggac

SEQ ID NO: 76715 - DNA, 683 bp, Homo sapiens
  chr8:140630601-140631284
  hypo
atgtgcttggtgagatctcctcgatcttgtaagagatggagtggaagtagtggggggcaagcttggcgctgaaggagttctgcggtgccaccgagcggccgccatagtcctgcgagcggtagcaggtgcaggagcacacagactgcaggtccgggacgtccgccttgtacctgggccggctgggccgcggctcctcagggatgtgaatgaccatgctgttgcggtttccggcgagggatgccctctcttcagcatcccgccgctcatcctcactgttcatggtcaagaacctgaggacgaccaggttgaggaaggccccgatgaccgtcagccccaccaggatatacataaagctaaaggccacgtagagcggcttcttctgcagggcacccttggtctgcagggccacgtagtccccgaacccaatggtagtcaacgtgatgaagcagtagtagtaggcgtggaagaagctccactcctcacactgggagaaggcggccgccccgatgcacagcgtccccatgcaggagaagaagcccacagtcaccatgttctccatagacacgtcagtgttgcgcatgccacagcacttcttaatgcgcttcagcaggtagcgcacgaaggtgttcatgcgctcgcccaggctctggaacatgaccagtgtcagcgggatgcccagcacg

SEQ ID NO: 76716 - DNA, 530 bp, Homo sapiens; identical to SEQ ID NO: 6610
  chr8:140714564-140715094
  hypo

SEQ ID NO: 76717 - DNA, 368 bp, Homo sapiens; identical to SEQ ID NO: 6611
  chr8:140715219-140715587
  hypo

SEQ ID NO: 76718 - DNA, 322 bp, Homo sapiens; identical to SEQ ID NO: 6612
  chr8:140715699-140716021
  hypo

SEQ ID NO: 76719 - DNA, 423 bp, Homo sapiens; identical to SEQ ID NO: 45886
  chr8:140716339-140716762
  hypo

SEQ ID NO: 76720 - DNA, 30 bp, Homo sapiens
  chr8:140744185-140744215
  hypo
agaggctcccagaccgccttgcacaccacc

SEQ ID NO: 76721 - DNA, 30 bp, Homo sapiens; identical to SEQ ID NO: 22784
  chr8:140746563-140746593
  hypo

SEQ ID NO: 76722 - DNA, 74 bp, Homo sapiens
  chr8:140755512-140755586
  hypo
tcaaactcccagcgacgcctccccgacctggccccacaactctactctccaaccttttgcgctggcgagaaaca

SEQ ID NO: 76723 - DNA, 285 bp, Homo sapiens
  chr8:140756689-140756974
  hypo
acagaggctgggtgacagagacggaagaaggacttgctccgtctccgtgtcccagagcactgctctcctaggagccgaggcaggcccagctctgcacactccagctggctacactcccgctgaccccatggacacagaacacaggctctttccccccatcagcgactgtcagggcacgcacttcatgaagctggagcttcgctctcaatccaccaaatggcatgcgtttttaacagttactgagggagctaattagttcataaaccaggacgcctcttccctggc

SEQ ID NO: 76724 - DNA, 31 bp, Homo sapiens; identical to SEQ ID NO: 22785
  chr8:140758283-140758314
  hypo

SEQ ID NO: 76725 - DNA, 30 bp, Homo sapiens
  chr8:140770099-140770129
  hypo
gaatccctgaacccacggcaaggacgcttt

SEQ ID NO: 76726 - DNA, 241 bp, Homo sapiens
  chr8:140770345-140770586
  hypo
cttccacttggaagggaatcccgtgacagcggggaggccaagcgctcgggcctgggaagccagtgtcacccctcagggccgggatggctggaggtgcccatcgctggacttgctggctggggctggagcaaatgccaggcttatgtggggtggggacatgtgcctgtggaggagaccgccctgtgtggaatgggactcacactgagcatgcccacgtcgcgtgctttacatttcttacttg

SEQ ID NO: 76727 - DNA, 30 bp, Homo sapiens
  chr8:140786378-140786408
  hypo
aggaggaggccccacgaagctcccacgcct

SEQ ID NO: 76728 - DNA, 123 bp, Homo sapiens
  chr8:140802162-140802285
  hypo
acccacagccttctcgggctcccgtcccggtgcgtccctcccgacccaggggaaggacatttggtgtggatcatccttctcagtaatggggttatttggggcctggccgggctggggaacatg

SEQ ID NO: 76729 - DNA, 133 bp, Homo sapiens
  chr8:140802499-140802632
  hypo
aagtgctctgctgccgctgacgcagagagctcagctccactaatcacattcagaagttccgagcccaccacctagagtttcagaaactgtgcgctgagaatgaaagagaccggggagcgctttgttcttcagc

SEQ ID NO: 76730 - DNA, 121 bp, Homo sapiens
  chr8:140809391-140809512
  hypo
tcccttatcagatatatggtttgcaaatattttaatccatccggtgtgttgtcttttcactttcttggtggtgttcttagaaacacacatgtttttaattttgatgaagtccaatttattt

SEQ ID NO: 76731 - DNA, 501 bp, Homo sapiens
  chr8:140815074-140815575
  hypo
tgtcacgtgtgcatccgtatctgaaggtgcgtgtgtgtgtgctgttgtatgagtgctctgtgtgcatgttgtgtatgtcggtgtgtgttgtgtgcctccatgtgtgaatgtgtatgtgaagatgtgtgctgttgtgtgagtgcattgtgtgcgtgttatgtatgtcagtgtatgttgtgtgtgcatccgtagatgaacgtgtgtgtatgtgaaggtgtctgtgtgccgtcgtgtgactgtgctgcgtgcttgttgtgtatgtcattgtgtgtgcatccatgcgtgaatgtgtatgtgaaggtgtgtctgtgtgccgtcgtgtgagtgtgctgtgtgcgcgttgtgtatgtcattgtgtgtgcatccatgtgtgaatgtgtatgtgaaggtgtatgtctgtgtgctgttgagtgtgtgtgtgtcacaggctctcatcaggctcacagcctctcaggaaggcaacgtccgttggaaactctagagcggcgagtcctgcagcct

SEQ ID NO: 76732 - DNA, 31 bp, Homo sapiens
  chr8:140818839-140818870
  hypo
tgggtccggcagtagccgagcctcctgaacc

SEQ ID NO: 76733 - DNA, 163 bp, Homo sapiens
  chr8:140834001-140834164
  hypo
agccaccactgcgcacgggacccgtgagcttgttaaggcttctgagtagagaccaacagattcgtgtgccataatagcctggtaaataggaatcaaaaaggtagcagctggagttctccccatggagctcgacggagagaaaatgaatcgtagtgccatgctc

SEQ ID NO: 76734 - DNA, 133 bp, Homo sapiens; identical to SEQ ID NO: 22787
  chr8:140834748-140834881
  hypo

SEQ ID NO: 76735 - DNA, 213 bp, Homo sapiens
  chr8:140844032-140844245
  hypo
atggaggcccagggggatggacgtgctcggagtgtctcggcctgcagtagggagagcggaaggctgcccaggcctctgcctccgtgctctttccacagtgcttccgcccactccgtcacgttgccttgagtagccccattgtcctggctacgtttcagagtgcctattactcaattatcccttctcctctccgtgaagtgtccattaaccttg

SEQ ID NO: 76736 - DNA, 141 bp, Homo sapiens; identical to SEQ ID NO: 22788
  chr8:140847595-140847736
  hypo

SEQ ID NO: 76737 - DNA, 30 bp, Homo sapiens
  chr8:140855462-140855492
  hypo
agagaccactggcctcgttttatgcacaga

SEQ ID NO: 76738 - DNA, 250 bp, Homo sapiens
  chr8:140859777-140860027
  hypo
gcctggggatgggcacgagcacctgtcccctggcggcgtggcctgcagatgggcacgagcacctgcctcccaggcgacccagcctgcggatgggcacgagcacctgccttcccgatggcctggcctggggatgggcatgagcacctgccttcccgacggcccggcctgtggatgggcatgagcacctgcccccctggtggcccagcctgcagatgggcacgagcacctgcctctccggcggcccagcctg

SEQ ID NO: 76739 - DNA, 165 bp, Homo sapiens
  chr8:140871033-140871198
  hypo
acaagtagccactgcgaccgggactgtgaatccggggggggcacagtctgcacaccctccccacccgctctaaacctgtccctttaaacacgcctcgcataagtcccatctctcagtcttggctcctcctacggtctccatctagaagccgtctcctctgcttct

SEQ ID NO: 76740 - DNA, 30 bp, Homo sapiens
  chr8:140871422-140871452
  hypo
caccgagctgcctgcgtctgatgccacgtg

SEQ ID NO: 76741 - DNA, 30 bp, Homo sapiens
  chr8:140927212-140927242
  hypo
aagtgactcggaaccgtggctgatgctctg

SEQ ID NO: 76742 - DNA, 220 bp, Homo sapiens
  chr8:140932072-140932292
  hypo
gggcccaaggcagcacggtctccatgctccctggttttacccttcatgacccgctcagactccaggcgcggcatggcactgcccggacccttccgcctagtgctggaaccatttcaacactcttccagatttgttctgtctgtaacggtgggtttttgggttttctccaatgttcctcactgaaaattctgaagatgtttgtattaagattaaaatatct

SEQ ID NO: 76743 - DNA, 465 bp, Homo sapiens
  chr8:140937218-140937683
  hypo
gcagacggcctgcagcggccaccagcttcgtgttctccagcacgaggggccaccccactacaactcacgcctcccactgcctacaggggaaagctcccgaaaagcacacaaaaacagctccctgaggaatccgggagtaaaacaaaagcagcagaatgtggaggagtcgacacatggaatgagctcgcccacggggtggcggcgcctcccacttttccctcgacctttcctccacagtgtggaaaaaaatgccctgttacagagcatcaggcaacagcactggaggccgaaactctaacagaaatatcgcctttctgcccaggaaaaggggtggagtctttgtaggctgcagagttgcatatggaggtgggggaatcttagaggcgagagagctagagaagtggaccctttcattctgcatagaaacctgcagaaatctcggattgatccctgagcaaaacagac

SEQ ID NO: 76744 - DNA, 30 bp, Homo sapiens
  chr8:140941216-140941246
  hypo
ttgcttacgggagacgtgtgcgtgggcgcg

SEQ ID NO: 76745 - DNA, 49 bp, Homo sapiens
  chr8:140962579-140962628
  hypo
ttacttggcaaaccgcggagctcaggctttttatcgcttgcctacgaaa

SEQ ID NO: 76746 - DNA, 233 bp, Homo sapiens; identical to SEQ ID NO: 22791
  chr8:140963129-140963362
  hypo

SEQ ID NO: 76747 - DNA, 70 bp, Homo sapiens
  chr8:140968326-140968396
  hypo
acgcggagacctgacgagagtgtggctgtgcctagaaccagctccgatgctcctcgttcgaaacacccac

SEQ ID NO: 76748 - DNA, 30 bp, Homo sapiens
  chr8:140990886-140990916
  hypo
gccctgcccaggcacgcgaagccagctcgg

SEQ ID NO: 76749 - DNA, 30 bp, Homo sapiens
  chr8:140998935-140998965
  hypo
ctggcactcgccggcgtgcaggatgagtgc

SEQ ID NO: 76750 - DNA, 30 bp, Homo sapiens
  chr8:141033993-141034023
  hypo
actctagaacaagacggctgtgcggcagga

SEQ ID NO: 76751 - DNA, 30 bp, Homo sapiens
  chr8:141054171-141054201
  hypo
tcaaaccttggtagtcgccctgaagacgtg

SEQ ID NO: 76752 - DNA, 114 bp, Homo sapiens
  chr8:141054768-141054882
  hypo
ccttcggcactgatacgcagggctttcagaagattacagcttctcgcctcggggagaataagtccctattataaatggaaaccttatagtcccgcagatgctctttatttttcc

SEQ ID NO: 76753 - DNA, 7 bp, Homo sapiens
  chr8:141057812-141057819
  hypo
cagcccc

SEQ ID NO: 76754 - DNA, 31 bp, Homo sapiens; identical to SEQ ID NO: 22792
  chr8:141071377-141071408
  hypo

SEQ ID NO: 76755 - DNA, 30 bp, Homo sapiens
  chr8:141072126-141072156
  hypo
ctcaaacacaatacacgcacagccaggggc

SEQ ID NO: 76756 - DNA, 30 bp, Homo sapiens
  chr8:141072365-141072395
  hypo
gagatctctgatgctcggtattccatccta

SEQ ID NO: 76757 - DNA, 195 bp, Homo sapiens
  chr8:141106959-141107154
  hypo
aggactaggacagggacgtggactggacgtgagacattcctatgctgagaagtcaagaagaatgtgtcctcgcagctcctcctgcagcacctcacagtgcacaaccggctgggccagcccatccagcatagagatgtgaaaacctgtccaggtcgctggtgtatagccagaacaatggcacggggcagggcaaag

SEQ ID NO: 76758 - DNA, 507 bp, Homo sapiens
  chr8:141107523-141108030
  hypo
cagagtaaggactcccgcctgagtcctggctgcgcagcctgtgttgccagtcgcagggtaatacactcgcctgcatcgtgggtgccccgccaccgccctgccacagtctacaaggcaagaacgcccgtctgggtccgtagtgtgcagccgcagctgtgctgctgtccacaccataaaaactcctggccacagacgtgccacagtcggcaggataagaatgcccagctggatcttggggtgcacagccccagctgtgccgctgtccacagggtaagaacgcctgtctgggtgggtccttggtgcacaaccacaggcgcgctgcagtcggcagagtgaggagcctgcctgggtcctccatacgcagtcgcagctgtgccgctgctcccagggtcatgacgcctacccaggtccttagtgcgtggctacagacgtgccgcagtcctaccgggaaagatgccagctcatgtcctcaatgagcagctgcagaattgccgccgtctgaaggat

SEQ ID NO: 76759 - DNA, 428 bp, Homo sapiens; identical to SEQ ID NO: 22794
  chr8:141147339-141147767
  hypo

SEQ ID NO: 76760 - DNA, 149 bp, Homo sapiens
  chr8:141159210-141159359
  hypo
ccaggtggcaggacaagcatccgcgtgcccctgcaggcatccgagatgtcaccctctgatctcgttccattgctctggtctacctgcagacaaggactaatgagtcccaacagcagcatggtcagcacgggcctagaagacaagccact

SEQ ID NO: 76761 - DNA, 133 bp, Homo sapiens; identical to SEQ ID NO: 22796
  chr8:141159883-141160016
  hypo

SEQ ID NO: 76762 - DNA, 147 bp, Homo sapiens
  chr8:141202562-141202709
  hypo
ctcctggcacagtgcctggggcgtgttttctagcagtaaaaacaggcagcatggtgcaggggaggagcaagctgcccgcccacagccctcgcaccagctgtgcagtcagggcagccccattatgcagagcctcgcttcaatacctgc

SEQ ID NO: 76763 - DNA, 161 bp, Homo sapiens
  chr8:141213694-141213855
  hypo
caggaagtaagatgtgaaaatcggtgcttgcgggaaggttgagctaacagacaagcacaaggtaaattccgcagaagagacagaagagaccagctggaagagatcaaacgaattctgctggaagtgagaaggactcagccgaggcagtggctctgtgtggc

SEQ ID NO: 76764 - DNA, 222 bp, Homo sapiens
  chr8:141219189-141219411
  hypo
acataggccctgaaggggccccgtggacacactctgcctcttccgtggcatctctgtggtgaggcctctgcagacgatccgcctaaaacaacgagcaggagtcactcccgtgtctttccttgtttgtccacgtggtatttgtttgctgcttgtctcttctgctggatgtcagctcaggaacgtcgccttgttcactgttacgcccccagcattcagaactgg

SEQ ID NO: 76765 - DNA, 120 bp, Homo sapiens
  chr8:141231523-141231643
  hypo
cacgtggcagatgccgtctgccataccaactcaccttcacgtggctgtagtcgcctgctttgttgctctcgggtgggttcacaggtttgccctccactcggggccgaacgacctgccgaa

SEQ ID NO: 76766 - DNA, 214 bp, Homo sapiens; identical to SEQ ID NO: 22798
  chr8:141249552-141249766
  hypo

SEQ ID NO: 76767 - DNA, 286 bp, Homo sapiens
  chr8:141265016-141265302
  hypo
tcacaggagctcaggggaagacggagagcttgaccaaaatccccatgaaagaaaaaagatacgtggtgtgctaactccagaacacgaggacaaactgagctgcaaaataagcagacatattcctggccggaggtgtgctcgaccatggcacggtcctgcagaactggccaagctccctctggagcacgtctgacagacggcgtttatgtctccatgtttccttaaagaaggatactaacacagagagacagatccaggggacagcgtccttgaaaagtgtttagaa

SEQ ID NO: 76768 - DNA, 31 bp, Homo sapiens; identical to SEQ ID NO: 22799
  chr8:141268121-141268152
  hypo

SEQ ID NO: 76769 - DNA, 31 bp, Homo sapiens; identical to SEQ ID NO: 22800
  chr8:141268438-141268469
  hypo

SEQ ID NO: 76770 - DNA, 30 bp, Homo sapiens
  chr8:141273310-141273340
  hypo
aagagcagagaggacgatccctctgctgcc

SEQ ID NO: 76771 - DNA, 30 bp, Homo sapiens
  chr8:141294157-141294187
  hypo
ggctttgggtctcacgcccacggctgaagc

SEQ ID NO: 76772 - DNA, 30 bp, Homo sapiens
  chr8:141297735-141297765
  hypo
gggaccccgacgagcgtcactgggtacaga

SEQ ID NO: 76773 - DNA, 30 bp, Homo sapiens
  chr8:141310524-141310554
  hypo
caggtggcagagcacggtgggaaagccagg

SEQ ID NO: 76774 - DNA, 37 bp, Homo sapiens; identical to SEQ ID NO: 22801
  chr8:141343756-141343793
  hypo

SEQ ID NO: 76775 - DNA, 134 bp, Homo sapiens
  chr8:141347705-141347839
  hypo
ctccggctctgccatgcagcacgtgggtgcgggtaccggatccacctgccctgaacctgctgcctcccccaccaaaatgggctgcctaggtgtcagatgggcacgtgatcagcggtgctgtgagagtggctgtg

SEQ ID NO: 76776 - DNA, 30 bp, Homo sapiens; identical to SEQ ID NO: 22802
  chr8:141362604-141362634
  hypo

SEQ ID NO: 76777 - DNA, 199 bp, Homo sapiens
  chr8:141455582-141455781
  hypo
gagcacctgggttgtgaactccgagactcggctgccaggagagcaggggaggagggagcccgggccaggctgtccccatggatcctgggagccagtggcggcagaaaaggcccacaacccagggttaaaccagccaccactggatccctgccctgcattttccaagctggacagctacgacttcctgtacttaatacat

SEQ ID NO: 76778 - DNA, 30 bp, Homo sapiens; identical to SEQ ID NO: 22803
  chr8:141458496-141458526
  hypo

SEQ ID NO: 76779 - DNA, 296 bp, Homo sapiens
  chr8:141458750-141459046
  hypo
caggggcaggccactccctgccgacctggcaggtggccgccaagctgtgcacaccatacagcaacaccttatcagggatgactcccacagtgcctgctggctggacagcagtgtgcgctattcacgaggcacaggaggcgcagcagaaggcaacaaggtgaggtagaaaggccccgggcctcagagacagacctggtgcttatatcagctctgctgcttggtggctgcccgggtctctaaaccttgctgcctcagccccacatcagccagcacagcaaccccgtgtagatcacagg

SEQ ID NO: 76780 - DNA, 30 bp, Homo sapiens
  chr8:141461085-141461115
  hypo
gcgcggctgctccacgatctccccctgcag

SEQ ID NO: 76781 - DNA, 22 bp, Homo sapiens
  chr8:141476177-141476199
  hypo
cgccaccctgttatttctgtga

SEQ ID NO: 76782 - DNA, 30 bp, Homo sapiens
  chr8:141480466-141480496
  hypo
gtcctgacctggtgcggtggcccatgcctg

SEQ ID NO: 76783 - DNA, 35 bp, Homo sapiens
  chr8:141523824-141523859
  hypo
cctgagccacagctcccggccgcttctttctttta

SEQ ID NO: 76784 - DNA, 119 bp, Homo sapiens
  chr8:141534527-141534646
  hypo
caatgagaccgagtgcgtcccccgcggctccagactgcatggcatcacagtttacaagtcaggggctgaggagcggaaagaaagcttccaaggctggaggtccacgcctgccttgtgga

SEQ ID NO: 76785 - DNA, 30 bp, Homo sapiens
  chr8:141535333-141535363
  hypo
ccagcgcagcattccggagatgcgcgtgca

SEQ ID NO: 76786 - DNA, 31 bp, Homo sapiens; identical to SEQ ID NO: 22805
  chr8:141535612-141535643
  hypo

SEQ ID NO: 76787 - DNA, 30 bp, Homo sapiens
  chr8:141541574-141541604
  hypo
acggcacctgcggacgcctctgcatggcca

SEQ ID NO: 76788 - DNA, 440 bp, Homo sapiens
  chr8:141543948-141544388
  hypo
ttgtagaagtgagagtgtgaacgtgagtaccattttacacacctcctgcggttggagatcctttgaaatgaaagcagcaccagctgctgactgcaggcctctctgccacctctgcctgcctgcccgcctcactgcctgctccacctgccagcctcgcaggcccttctgacaacaacctgtccagcacagtccctgccacctgctctgtgtctagccctgtgccgaggcccctggtgctggtgggcagcggaacgttcgtccctgatgctccaccgcacatgctccggcacccctttcctggcgtgtgactggtggctgtcacaggggcccaggggagtgagggcatctgtctccatgggactgctaaggacacagcagcagtggcagccttgggccataaatagctcaccagagaagcatcccccgttagaaagattttg

SEQ ID NO: 76789 - DNA, 30 bp, Homo sapiens
  chr8:141550864-141550894
  hypo
caggcgtccccagacgcaatgagctccccg

SEQ ID NO: 76790 - DNA, 30 bp, Homo sapiens
  chr8:141554296-141554326
  hypo
agcgctgacactcacggcggcaatggaggg

SEQ ID NO: 76791 - DNA, 30 bp, Homo sapiens
  chr8:141557156-141557186
  hypo
ctaaagtcccagcacgacgcagcatccatg

SEQ ID NO: 76792 - DNA, 30 bp, Homo sapiens
  chr8:141559352-141559382
  hypo
atgccggcgtctctcgagatctttctgagc

SEQ ID NO: 76793 - DNA, 88 bp, Homo sapiens
  chr8:141559668-141559756
  hypo
agcagcctttaaaccgcgctcacgctgcctcgcggctgtggcggccccagggcagtgatgcgatgctgtccccgtaaagctgctgagc

SEQ ID NO: 76794 - DNA, 408 bp, Homo sapiens
  chr8:141565894-141566302
  hypo
gaacacagtctacaccgcgggcgatagctcagaacctgagaggggtcgcagggcagagacatgccccgcagccacacgttccccgccgccccacacgtaccctgcccccgtagaggatggagggcggctgcagcacccgcccagtcacgtctgtcatctcatctttgaccatgattccaaattcacggacgtatggatctgtgttgaaacttgcacttcgcatctggcaaagggaaacaagaaaacgcacggagtgggtggaggcctcccatctctctagcagctgcgtccgttccaagcatcagaggtttctgtgccagggcaaccggactggattccacagggcagccctgcccgggactgacactcaccaatttgctaatctcttcttgccgatcgggcgccgac

SEQ ID NO: 76795 - DNA, 30 bp, Homo sapiens; identical to SEQ ID NO: 22808
  chr8:141566717-141566747
  hypo

SEQ ID NO: 76796 - DNA, 30 bp, Homo sapiens
  chr8:141567764-141567794
  hypo
gtgacggcaggagacgcctgggtgcagtat

SEQ ID NO: 76797 - DNA, 98 bp, Homo sapiens; identical to SEQ ID NO: 22809
  chr8:141568165-141568263
  hypo

SEQ ID NO: 76798 - DNA, 30 bp, Homo sapiens
  chr8:141570830-141570860
  hypo
gggatggtgaaagacgtttaaagacaccgc

SEQ ID NO: 76799 - DNA, 30 bp, Homo sapiens
  chr8:141571081-141571111
  hypo
gacccagcatctgccggctcctttagccgt

SEQ ID NO: 76800 - DNA, 30 bp, Homo sapiens
  chr8:141572276-141572306
  hypo
tgcagagggctgcgcggaacacgaaggcac

SEQ ID NO: 76801 - DNA, 692 bp, Homo sapiens
  chr8:141587951-141588643
  hypo
cactccgctcactgacggtcctgcaggcccctggaggcggggtcaggtccagctcatcctgcacacccagcacggcgtgcggcttgggctgggcggatctctcaagagaaggaggctgttcggtcatgccagtgaggcagtgccctgaggggctacaatgcacacccgtggagtcggctggcagacaatcctggccaccactcaggcctccgccgcccagagagagcatccctggccaccggctcgcagcccccatgcctcggggcccagtgccgagggtgaggaggggccgatcttgtgtaaagcagagaaactggacctcgtggctgtggcagcaggatggcaccttgctgcctaattctaacacggggggtcccttccctcctcaaacacacatgaccacgtatttggcagttaattttctttctttgtaaaactgtgataaaatacagataacataaaattgaccatttcaactaagtgttcagttcagcggcattgagtgtgtccatgctgttgtgcgaccatcaccaccctctgtccacaaatgattttcacttccccaaagtgaaactgtacctgtgaggcactaacttcccagccagcccacggagccacctggggaccctgctcgcggagtccctgaatctggtccttcgtttcgagccggcgcaggcactggaaagtgagca

SEQ ID NO: 76802 - DNA, 162 bp, Homo sapiens; identical to SEQ ID NO: 22811
  chr8:141589814-141589976
  hypo

SEQ ID NO: 76803 - DNA, 208 bp, Homo sapiens
  chr8:141594754-141594962
  hypo
aaatacacacaacggcgcaggtgggtctcataaattctgctgagtaaaagcagtcgggattgagggtgtgtcactatacagacctggaaactaatctatgtgacacacatcagaatgccgtgactttaggggctgggggtaaccggaagagggtatgaggcaactttctagggtgatcagtatatacatttgtcgaaattcttccagt

SEQ ID NO: 76804 - DNA, 30 bp, Homo sapiens
  chr8:141595330-141595360
  hypo
ggaggtcccaaagtcgggtctaggtggagg

SEQ ID NO: 76805 - DNA, 443 bp, Homo sapiens; identical to SEQ ID NO: 22813
  chr8:141596787-141597230
  hypo

SEQ ID NO: 76806 - DNA, 473 bp, Homo sapiens; identical to SEQ ID NO: 22814
  chr8:141599858-141600331
  hypo

SEQ ID NO: 76807 - DNA, 219 bp, Homo sapiens
  chr8:141603916-141604135
  hypo
gggattcacacacagcactcacggctaccagagcacacaagccttgccaccaagccacgctgccttgaatcgataacaactatgcttaaatcaaacaaaaggagctggaggaaccaaatgcgtgacaatccatcctcaccaggttcactcagttccatctgcgagcacaggaatacctgcccaccagtgaggtctgccggtgccaagccctgcactaag

SEQ ID NO: 76808 - DNA, 30 bp, Homo sapiens; identical to SEQ ID NO: 22815
  chr8:141613365-141613395
  hypo

SEQ ID NO: 76809 - DNA, 50 bp, Homo sapiens
  chr8:141633673-141633723
  hypo
cagggctggtgggagcggagggtgccgtcttgctgcgtgccccctgatgt

SEQ ID NO: 76810 - DNA, 134 bp, Homo sapiens
  chr8:141634056-141634190
  hypo
ggaaccaagatgatcccggggcaaggaggtcacagtgggtgatggagacaggacaggagagcccaccatagggcgagatgcacggggagccaggaaggtgcagggcgagcgcgatggaccgtcccctcctgggt

SEQ ID NO: 76811 - DNA, 196 bp, Homo sapiens
  chr8:141634458-141634654
  hypo
agggcacagagccggcgtgcgtggcagtgaccacctcaccctggacagggatggacagtggcagaacaaacccaaacttggagagcctgcatccaaacacccctccagctccggccaccaatctgcaagaaagacactcggaacagagggcacgccgggctacacccaggagatgcagctgcgggagacggcagca

SEQ ID NO: 76812 - DNA, 153 bp, Homo sapiens
  chr8:141636159-141636312
  hypo
agccatgggcagcacgtggccttctagttccaccggcttcagctgggttcatggcccgggggggcacagctggcgccctttcggcgtcgctcctgtctacgagcgggcaaggaaggtccccaagagctgtcggggtccggcgcacctgggtct

SEQ ID NO: 76813 - DNA, 82 bp, Homo sapiens; identical to SEQ ID NO: 6616
  chr8:141644413-141644495
  hypo

SEQ ID NO: 76814 - DNA, 220 bp, Homo sapiens
  chr8:141704909-141705129
  hypo
taaggaccataaagcacgtgtgctcataaccagagacctagctgccaccatcaccacttgacagtgtcacgagagcttctacaaccgacacacactaccttccaactgacagagggtcagggtggccctcacactacaccgcaccaggcgttattcccagtgcaccaagctttccatgcggctgtctaaaaatctgcatctccagcgcagaccacctcct

SEQ ID NO: 76815 - DNA, 27 bp, Homo sapiens
  chr8:141721472-141721499
  hypo
tggggttacaggcgtgagccaccatgc

SEQ ID NO: 76816 - DNA, 43 bp, Homo sapiens; identical to SEQ ID NO: 22819
  chr8:141738004-141738047
  hypo

SEQ ID NO: 76817 - DNA, 92 bp, Homo sapiens
  chr8:141741357-141741449
  hypo
taaatgatttttcactcaaaaaatatttggtgcgctcttataacctgacagtcataaagcacaaaaatgctagagtacgcattataagaaaa

SEQ ID NO: 76818 - DNA, 177 bp, Homo sapiens
  chr8:141745320-141745497
  hypo
cccaggccctctctcccgccaactcctacctgagctgagctttaagttcagtaaacctgggccgcctgctggggtcataggcccagcatttcgtcataaggctgtagagggtaggaggacaatttggaggcattggtaatctttccccattttcaattcgaccgattacatcattgt

SEQ ID NO: 76819 - DNA, 31 bp, Homo sapiens
  chr8:141761240-141761271
  hypo
ctgaggtctcttcttgcgtgaagttttcttt

SEQ ID NO: 76820 - DNA, 679 bp, Homo sapiens; identical to SEQ ID NO: 45892
  chr8:142010383-142011062
  hypo

SEQ ID NO: 76821 - DNA, 1210 bp, Homo sapiens; identical to SEQ ID NO: 45893
  chr8:142011091-142012301
  hypo

SEQ ID NO: 76822 - DNA, 31 bp, Homo sapiens
  chr8:142030712-142030743
  hypo
atccgcactttactcacgtggaaccagggtt

SEQ ID NO: 76823 - DNA, 31 bp, Homo sapiens
  chr8:142078609-142078640
  hypo
agaacacagggaggttcggcaatttgtccga

SEQ ID NO: 76824 - DNA, 1655 bp, Homo sapiens; identical to SEQ ID NO: 45894
  chr8:142138199-142139854
  hypo

SEQ ID NO: 76825 - DNA, 211 bp, Homo sapiens; identical to SEQ ID NO: 22825
  chr8:142157056-142157267
  hypo

SEQ ID NO: 76826 - DNA, 31 bp, Homo sapiens; identical to SEQ ID NO: 22826
  chr8:142161895-142161926
  hypo

SEQ ID NO: 76827 - DNA, 54 bp, Homo sapiens
  chr8:142178199-142178253
  hypo
tgtctccatgctgagcgaggccatgtgctttctggcccccgataactctctgct

SEQ ID NO: 76828 - DNA, 30 bp, Homo sapiens; identical to SEQ ID NO: 22828
  chr8:142178456-142178486
  hypo

SEQ ID NO: 76829 - DNA, 235 bp, Homo sapiens
  chr8:142186980-142187215
  hypo
cagagtaagtttgtcggacaccatcttgacagaagcattgaagatgtggtctgtgtgacccagcgagaggcctcacggtgctacggaagagcatgatgagaaaacgcagggcggtctgggcaggtgtgggtgccccactgcccgctccagactggcgacatcccagagagtggggcctcccgggggcggacggtgctggtgctgtccacacccgcaggccggagttgggtgtttt

SEQ ID NO: 76830 - DNA, 30 bp, Homo sapiens
  chr8:142188203-142188233
  hypo
gctgatggacgccgtcgtgggcacactgca

SEQ ID NO: 76831 - DNA, 77 bp, Homo sapiens
  chr8:142188437-142188514
  hypo
gtcgcacaccttatccggcatctttccttccttcactgcacagtgcaccttggagccccttgcgcatccaattgagg

SEQ ID NO: 76832 - DNA, 104 bp, Homo sapiens
  chr8:142190006-142190110
  hypo
acgcaggaggtcgaggcgcccgcaggggctggcaggagggaccgcagaacaggctggtcccaggggcctccgggcagcaatgaggagccgtgtcagagcaggct

SEQ ID NO: 76833 - DNA, 30 bp, Homo sapiens
  chr8:142200489-142200519
  hypo
gactgcacggcggccgcctgtggtgctgta

SEQ ID NO: 76834 - DNA, 515 bp, Homo sapiens
  chr8:142202625-142203140
  hypo
aggagcagctgtgggcggcctgtgcaggacgcagcgaggtttacatctggagcctgaaggacctggcccagcccccgcagagggtgcccctcgaggactgctctgagatcaactgcatgatccgggtgaagaagcaggtagggtggagggcccgccatccccagcatccccggcaggtctcgcttgccctggccgcatccccatgctcccgagagccagccgcacgccctcgtgccctcctgccttcgcctctcagggttcccctcctaacaggcacgtgcagggttggtgccaacgggcccacaggtcaccatgtgctggtttcatggtgtggtccaagcactccacagcgcattcccccaaactggatggcttcaaatgacagaacttaattttctcacagttctcgacgctggaggtccaaaaccaaggtgtcggcagagccgcttccctcgggggctcggggggagcgtgcactccaggcccttctctcccccacccgctcatgtggccgc

SEQ ID NO: 76835 - DNA, 242 bp, Homo sapiens; identical to SEQ ID NO: 22831
  chr8:142203889-142204131
  hypo

SEQ ID NO: 76836 - DNA, 31 bp, Homo sapiens; identical to SEQ ID NO: 22832
  chr8:142204676-142204707
  hypo

SEQ ID NO: 76837 - DNA, 31 bp, Homo sapiens; identical to SEQ ID NO: 22833
  chr8:142205350-142205381
  hypo

SEQ ID NO: 76838 - DNA, 319 bp, Homo sapiens
  chr8:142221149-142221468
  hypo
aaggcatggagttccgacaggttccagcacgcatgtccccttcgcaagcgggggaggccctcgcacatccacacacccgaggtagccttgcggcgggacttgggaggcagggcccgctgggagctctgctctcaggaatccccagcaaatggtttagagacgaatcaaagtgcagtgaaagtcaacgtttccttccccctgacgttgggagcggtctggaggggcaacctggcctcctaggagagtccttcagacgggacgagcggggtcacatggctgggcgcagacacactcacacgcgcacgcaggagctcgtctg

SEQ ID NO: 76839 - DNA, 30 bp, Homo sapiens; identical to SEQ ID NO: 22835
  chr8:142222299-142222329
  hypo

SEQ ID NO: 76840 - DNA, 87 bp, Homo sapiens
  chr8:142226698-142226785
  hypo
caggcaggccagcccgattcacactcggctcagagacccctgacccaattacccctggttcctggtgagcctcgctgcaggacggaa

SEQ ID NO: 76841 - DNA, 30 bp, Homo sapiens
  chr8:142227280-142227310
  hypo
gagggggcctgttccggaaatgagacgggg

SEQ ID NO: 76842 - DNA, 76 bp, Homo sapiens
  chr8:142227521-142227597
  hypo
ggttctgtgtgtctcccggtccccagtctgggctggtctggacttgcagaagtgacgctcccgcagcctctgccgt

SEQ ID NO: 76843 - DNA, 31 bp, Homo sapiens; identical to SEQ ID NO: 22837
  chr8:142228045-142228076
  hypo

SEQ ID NO: 76844 - DNA, 512 bp, Homo sapiens; identical to SEQ ID NO: 22838
  chr8:142228299-142228811
  hypo

SEQ ID NO: 76845 - DNA, 30 bp, Homo sapiens
  chr8:142230376-142230406
  hypo
ggcgcagggggtctcgctgggcctgctcta

SEQ ID NO: 76846 - DNA, 30 bp, Homo sapiens; identical to SEQ ID NO: 22839
  chr8:142230989-142231019
  hypo

SEQ ID NO: 76847 - DNA, 970 bp, Homo sapiens
  chr8:142235169-142236139
  hypo
ttctgtccttgggtgtagttacgcacacccatctgaccagtgcgacacgcgacatcatcgtgggtcagcctccactgctgccgtcctccagcaacggtcgccttttcttttttaaaaaaaacatgtctaataacattgagttgtatcctagacactgtgaatgatgtgtcatagactacactgctatattcctctgagagtgttcatggttttatttaacacgagggtttgaaattcccgccccatctcctaactccacccgaactctgcctgtgggttcttcaagaaaggcagagtggagttaactatccaagtttcagccaccctgtgttgcgtcaacgaaggccaacagtcgggttaaaagcggtgccaagagagaaacccaggcattccctcttccagccatcaccttcctacttggtttctgccccaagcgctggctgggtgtcaggagggtggggaggacctgcaggtgcgacccagcccacctaatctagaggaggcgctgcgtgcacaggcctgtcccgcctttgtgctgccaaccctgggagccgggaagacgctgggtccggagcagccctggaccaggcagccgtccccagcccagaagggaggcttctcaccccgggagacaagaaggcacagggcactggggggaaccgctaggcccgggccaggccctcggctcccagtcctcctgtggaggctgcttctccacccttgtcccacaggcccctccagagcctggtgggacccggccccaggcctccctgggcacctccacccgccagcctcctcccctttgccctcagctctgactcctatagtccccacagctgccccagcctccgtgcggccccggccctggtctctcctgtgttgccagcccccagccctaggtcaggcctccccacgcctctctctgactcccactaactcacccctacatctggccggcctgccttgggac

SEQ ID NO: 76848 - DNA, 229 bp, Homo sapiens
  chr8:142236374-142236603
  hypo
gacacagagcccaccgtggcaccaccgcccgtgcctcccacccacgatgctcagtgcggcgagcagcacacgggcctcctgctggggtgctctcaatgctggtgcgcaaggtgccctgccccacgtgctttccctggaaggggcggcacgccttggcaccaagcatctacacccaacgacagctgtcgctgctgaacctctcggtgggcctggcgccaccccaggtgct

SEQ ID NO: 76849 - DNA, 514 bp, Homo sapiens
  chr8:142240287-142240801
  hypo
aggcctctgtttctgcatcaccgactcaaataagacccactgtggctgtcagggctgggccctggaggtctttaaagttaaaggtgctgtcagagcaccccatctcaacaagggagggccgctcctgaagtccccgcccttccatcagaaagcctctcaggacagaaggcagagagggaagcggccgcaaagacccatgggtgccgagggttcccagcacggccaacagggccctgcacactcacaggacagtccttgtattggagacaaacagctgtgccggagaggggtcctgagacagcagctccggtggccacgtgaaggtctgaagccccaagcgtgcccagctccaggatggggtaagcagcgggggaggtagggccctggtggctggggggccgccaggagcagcgcccaggccagtgctgcctctgccgcccggccttgctgcccgagcgcacgctgtgtctggggacagtccggccgctgccccggcacctatacctgacactat

SEQ ID NO: 76850 - DNA, 215 bp, Homo sapiens
  chr8:142241186-142241401
  hypo
tagtgtgggagaagccacattcggtcacgtttctagggcttaaggtcaccccggaagagaaaggacctggcaggtcccaggatgggtgcggagggtgggatgaagggcacagtgtgggaaggagcgccggagacagggcagggacagccaggccgggaaggccttggctctgggctgagagtgtggcccctcgcgccagaggcagcagggacccc

SEQ ID NO: 76851 - DNA, 31 bp, Homo sapiens; identical to SEQ ID NO: 22843
  chr8:142242138-142242169
  hypo

SEQ ID NO: 76852 - DNA, 146 bp, Homo sapiens
  chr8:142243839-142243985
  hypo
ttatgacacttctgcccaagacggcaggcccctgggaaacggctatggagcgtggcacccgttttgctgtgcttttcccgttttgctggtgcagggccttggctaggcaggtccagcaggtctgcggctggacctgactctgggct

SEQ ID NO: 76853 - DNA, 70 bp, Homo sapiens
  chr8:142247721-142247791
  hypo
aaccctcaccccaaagccacacggtgtccctcaccgccgccctccatgccttccccgaagtggcgctcca

SEQ ID NO: 76854 - DNA, 137 bp, Homo sapiens
  chr8:142248408-142248545
  hypo
gtgatcaaatatacacaacatcgaattgacctttttaatccctgtgagcgcacagctcaggggcggtgagcgcacttagactgccgtgcaaccatcaccactcaccccagagcgacgccatcttcccagactgaaac

SEQ ID NO: 76855 - DNA, 192 bp, Homo sapiens
  chr8:142252916-142253108
  hypo
atcctgggtttatacaaacaccgcgggaagctgaatgtggacctgaatgtgtatcccaggccacgcaatgtggtaggaggctatagaatctctcacaagaggcgacgggattttcaaacctaagccagcccgtgtgcagcggggagccggcagggcgaggacccatctaccgggtggtgacagagagctcca

SEQ ID NO: 76856 - DNA, 31 bp, Homo sapiens; identical to SEQ ID NO: 22845
  chr8:142253705-142253736
  hypo

SEQ ID NO: 76857 - DNA, 31 bp, Homo sapiens; identical to SEQ ID NO: 22846
  chr8:142254341-142254372
  hypo

SEQ ID NO: 76858 - DNA, 143 bp, Homo sapiens; identical to SEQ ID NO: 22847
  chr8:142262364-142262507
  hypo

SEQ ID NO: 76859 - DNA, 601 bp, Homo sapiens; identical to SEQ ID NO: 22848
  chr8:142262686-142263287
  hypo

SEQ ID NO: 76860 - DNA, 142 bp, Homo sapiens; identical to SEQ ID NO: 22849
  chr8:142263346-142263488
  hypo

SEQ ID NO: 76861 - DNA, 324 bp, Homo sapiens; identical to SEQ ID NO: 22850
  chr8:142264101-142264425
  hypo

SEQ ID NO: 76862 - DNA, 163 bp, Homo sapiens
  chr8:142277349-142277512
  hypo
cagctctgggaagccggcagaccacctgctgccgtgtcccgtggggcctgcgtggctacacagtgcaatagtccaggctcctgcactggagtggagacgctgagggatggaggcaggctcaccagcgagcgtacggctgtgcacatgcgtgcctgcagagttc

SEQ ID NO: 76863 - DNA, 321 bp, Homo sapiens
  chr8:142277816-142278137
  hypo
aaagatactccacactcgaggtcctcaaggggttgtagctgtggtgccaccacacacctatgagaatggccaaagcttagggcacggacaacaccaaaagcaggtgaggatgtggggcagcaggaacgctcgttcacggttggcagaaatgtaaaatgcagcaaccacttcgaaagacggtttgcccattttcacaaaaccagacatactttcaaccatgccacccagcaaccaagttccttggtatttaccaaacagagctgagaacttatgtccacacaaaaacctgtgctcagatgtgagagccgctttattcgtcat

SEQ ID NO: 76864 - DNA, 30 bp, Homo sapiens
  chr8:142278910-142278940
  hypo
gtcctatcgtggaggcgcccatctccgggt

SEQ ID NO: 76865 - DNA, 268 bp, Homo sapiens
  chr8:142279181-142279449
  hypo
tgcagccactcctgagtcatacgctgtatagggagcgccacgagctccacctcacccgacagctccaggctgcgctgtcaccctggcggggcagctactacgtccccgctttcaccctcaagagtgtcccagttagaacaccccagcacttcagagatgaatgatctaaagcttaattgtgccttaagtcttctgataaccgtctttgtgcattttgtgccacaagtcagggcacttcagaaaccgaaaaggacgcacagcagaccac

SEQ ID NO: 76866 - DNA, 156 bp, Homo sapiens; identical to SEQ ID NO: 22853
  chr8:142280195-142280351
  hypo

SEQ ID NO: 76867 - DNA, 30 bp, Homo sapiens
  chr8:142283490-142283520
  hypo
ttcaggaaaatcaagcgccagtatcaacct

SEQ ID NO: 76868 - DNA, 118 bp, Homo sapiens
  chr8:142283953-142284071
  hypo
aggacacacgatgtccgtgtgtttgaagggaagtatgacggatatttcagcaatgttaatgtcaaagcttgtctttaaaaaacgtaaagtttgggccaggcgtggtggctcacgcctg

SEQ ID NO: 76869 - DNA, 337 bp, Homo sapiens
  chr8:142290790-142291127
  hypo
catgggggtttttgttcgtgtaatgcgacagcgtgcagctccacacacacaggaagcaagctgtcaggacagagcctgactcgcacaggtaactggaatcctccccaacaggtgggtgtgcagagagcaggtccctgtccgggcacctcccgaaggactgtcttagcacgaccttgcttctcccaggggagggaaaggaaaagggcctcgtgaggtctccgcaagaccgggctgtgcgtcctacaccaggctgccttctcctgcacattttcctactcaaagacaacggagtccaggcatcctctcagcatcgcacgagttcccctggtgcagaaaa

SEQ ID NO: 76870 - DNA, 194 bp, Homo sapiens
  chr8:142292546-142292740
  hypo
cttctgagcctctgtctccatcgctgccctccctccaggccgccgctcagggcacgccgcctccatcgctgccctctctccaggccaccactcagggcgcgctgcgctcagctcacaccaccccgtgcacagctcgtggatgcggtcctcccttttccatgaactctgcactcgcctcccctttgcacttcaca

SEQ ID NO: 76871 - DNA, 112 bp, Homo sapiens; identical to SEQ ID NO: 22856
  chr8:142295925-142296037
  hypo

SEQ ID NO: 76872 - DNA, 185 bp, Homo sapiens
  chr8:142296403-142296588
  hypo
gcctccaccctcaccaccctgcgtgagacatgggatctgtgccctcaggaaactcagtccgagaggtggcctcacatgcgcggttgttacaagcagagccaggtaagcgcagaagcctgccaatgtatcttcctggtccctttcggggcaccctttacccacacgccctacttaaaccacttgaa

SEQ ID NO: 76873 - DNA, 50 bp, Homo sapiens; identical to SEQ ID NO: 45896
  chr8:142297707-142297757
  hypo

SEQ ID NO: 76874 - DNA, 30 bp, Homo sapiens; identical to SEQ ID NO: 22857
  chr8:142302375-142302405
  hypo

SEQ ID NO: 76875 - DNA, 32 bp, Homo sapiens; identical to SEQ ID NO: 22858
  chr8:142304054-142304086
  hypo

SEQ ID NO: 76876 - DNA, 145 bp, Homo sapiens; identical to SEQ ID NO: 22859
  chr8:142305924-142306069
  hypo

SEQ ID NO: 76877 - DNA, 84 bp, Homo sapiens
  chr8:142310044-142310128
  hypo
gctggcctgtcttcctggtcccgttcttcactgtttaaaccgcaggattcctagaacacgaccgtggaactgctcttctcctca

SEQ ID NO: 76878 - DNA, 223 bp, Homo sapiens
  chr8:142312688-142312911
  hypo
ccaaagagctaggattacaggcatgagccaccgcggcaggcgtaaagttattttacagaacacataagcaaaaatgttttcaggcctttgcttgacagcaatgtaactctaaaacattcctaattcattcatcactgacagtgaaaaagctgcctctacgatactcaggcagtccccctcgcctcgtgtctaacatgctcttaatatgcgatttcatctccag

SEQ ID NO: 76879 - DNA, 891 bp, Homo sapiens; identical to SEQ ID NO: 45897
  chr8:142317706-142318597
  hypo

SEQ ID NO: 76880 - DNA, 264 bp, Homo sapiens
  chr8:142349884-142350148
  hypo
tgagctgcaggctggccgccccccaccccgctgcacccccatattccactcacagaccttcttcctgctgaacacagctgggccctgacgcctctgtgccttggccacaaggcaccttctgctcactcagctgtccctccagtccccgtagggctgcagacccaggcccacccagtcacaggcctggcagcgagggggaacaaaagggtcaaggggccgcccagggctgggaagggccttgctccacctcgctctcctccattc

SEQ ID NO: 76881 - DNA, 185 bp, Homo sapiens
  chr8:142359674-142359859
  hypo
tacacatgaatgcctgcgtacatgtagacacacagacacgcaggcatgcataacatgtgcctacacacagatccacacacactcacttaattctcgcaaccttgccttaaggcagagggtgtccgcaatctccccttgacagaggaggaaactgaggcttaggaaagacacgtaacttgctgagg

SEQ ID NO: 76882 - DNA, 926 bp, Homo sapiens
  chr8:142367229-142368155
  hypo
gccacggccacttggcgggcgtggaagggcgtgaagcagacgagaaagatgatgagcaccgtgagcaggagctgcatggcccgcacgcggcgctggcgaccctggtggagcagacccggccgcgacagtgcacacatgatgcggccggtaaacacgctgatgaccagcaggggcagcaggaactccaggacagtcagcgcaaagacacggcagcagggccggctgcctgtcacgcccagcaccgacagggtgacggcaccggcggccagccacacgaaggcgcacacggccctggcacaggcaggctggcggcagcggcgggagccttcgggccgcacgatggccaggtagcggtccacgcagatgcaggtgaggaagaggatggagcagtgcatgttgaggaagtaaccgaggacgtgcgggaaggcacagcgcaggcagcccctggcgccgtagtacacagcgaagcgcgtgggcagggacagccctaccagtagatcggtcaccaccaggttgatggtgtagatgactgagggtgtcttggcccgggtgcggcagcagaagacgtacagcgccagcccgttgagcaccagccctgccaggaagatggctccgtgcaccgccatcagcgccagccacaggcctgggaaggtgccatgcagctcctcgtccagccgggcaaacaggtggaacaggggcacctccagcccgctggcattggtccgcactgttgtcactgcggtggcattggggactgccccggccgagggccccgctggagacacagagggcatgacggcagccagcacaccccaggcctggaagcaaggagaccaggtcaccccaggcgccagcctggccttaagccctgccctgaggcccagaactcagctggcccgtctgcccctgcacgcccagcatccccc

SEQ ID NO: 76883 - DNA, 189 bp, Homo sapiens; identical to SEQ ID NO: 22864
  chr8:142374614-142374803
  hypo

SEQ ID NO: 76884 - DNA, 205 bp, Homo sapiens
  chr8:142383100-142383305
  hypo
caaggaccccacagcccgggaaccccaggggagagagtgtgaggtctaagatccctcctgggcccaggcgcctgcccggggtggcccaggccagccaccacaaactggccaggctgggctgagctgcaactccctctagagttggcccagtccacccaggtcaagaacaggccacgtccccagcagggctcgggacctgctttct

SEQ ID NO: 76885 - DNA, 30 bp, Homo sapiens
  chr8:142400678-142400708
  hypo
cccagatttgaacccgggtctgcaaggtta

SEQ ID NO: 76886 - DNA, 234 bp, Homo sapiens; identical to SEQ ID NO: 45898
  chr8:142425566-142425800
  hypo

SEQ ID NO: 76887 - DNA, 39 bp, Homo sapiens
  chr8:142437113-142437152
  hypo
ttctgtgaggcccccggcagctgcgtggctgtgcactgc

SEQ ID NO: 76888 - DNA, 30 bp, Homo sapiens; identical to SEQ ID NO: 22867
  chr8:142439265-142439295
  hypo

SEQ ID NO: 76889 - DNA, 81 bp, Homo sapiens
  chr8:142440391-142440472
  hypo
ccgctgtaaggacccggtggcggggacagggtgagcacacagtccaggtccccgctgtaaggacccggtggcggggacagg

SEQ ID NO: 76890 - DNA, 30 bp, Homo sapiens
  chr8:142452363-142452393
  hypo
tcgcttgtgagtgacggagaaacccgcggc

SEQ ID NO: 76891 - DNA, 42 bp, Homo sapiens; identical to SEQ ID NO: 45899
  chr8:142528360-142528402
  hypo

SEQ ID NO: 76892 - DNA, 152 bp, Homo sapiens; identical to SEQ ID NO: 45900
  chr8:142528454-142528606
  hypo

SEQ ID NO: 76893 - DNA, 111 bp, Homo sapiens; identical to SEQ ID NO: 45901
  chr8:142528670-142528781
  hypo

SEQ ID NO: 76894 - DNA, 173 bp, Homo sapiens; identical to SEQ ID NO: 22868
  chr8:142537301-142537474
  hypo

SEQ ID NO: 76895 - DNA, 39 bp, Homo sapiens; identical to SEQ ID NO: 22869
  chr8:142541545-142541584
  hypo

SEQ ID NO: 76896 - DNA, 149 bp, Homo sapiens
  chr8:142544217-142544366
  hypo
ggtgtctcttgctgttttccccgatggtgcaaaagcaatgaccagtattgctgcggatctgcaagcaccgatctccgcagtggtcccaatgctgcttgaaggcgggcgtgggttctgccgtgccacacgcttgcaaaactcccaagccc

SEQ ID NO: 76897 - DNA, 207 bp, Homo sapiens
  chr8:142590893-142591100
  hypo
ctgcctgggggagccaccagccgggagcgcccctcggctgacaacactgtgatgggactgagatggggcggaacctcgagagtcaggagtcagggtccccagggcagagctgttgcgactaacagcgaaaagaccgaaggaccctccacccaaagccccgcggaggagccagagacacagagccgcggtggggctgggagcctcagg

SEQ ID NO: 76898 - DNA, 194 bp, Homo sapiens
  chr8:142630428-142630622
  hypo
ggggccttcaggtgccgagggtggtgggcgccccggagcgctggtggggattgggcaaagacgtcaacaccagggctgtggaaggaggcgaggggccttcaggtgccgagggtggtgcgcacccagggatgctggtggggattgggcaaagacgtcaactccagggctgtggaaggaggcgagggccttcaggt

SEQ ID NO: 76899 - DNA, 67 bp, Homo sapiens
  chr8:142744450-142744517
  hypo
ttaagctgtggatctgtgttccgagagtgacagctcaagctgccacggggcctcatgggtatctgga

SEQ ID NO: 76900 - DNA, 185 bp, Homo sapiens
  chr8:142863057-142863242
  hypo
catgagcaaacattaggggagcgctgctgtgtaccggccatgagctgagcctggcacggcatggtgaggaagccggcatggctcctgccctggcagggtggaagtccagcggggacagtggtaaagcaggtgagcgaggatgtggttgtgcagttgctcatggcgatagcagcatcaaaagagat

SEQ ID NO: 76901 - DNA, 191 bp, Homo sapiens; identical to SEQ ID NO: 22870
  chr8:142881148-142881339
  hypo

SEQ ID NO: 76902 - DNA, 208 bp, Homo sapiens
  chr8:142898502-142898710
  hypo
tatcaatatttatcaattcttcggcggctcagaatgcgtgctggggattcaatcaatttagcggcaatctgagcgcggcattgcattttgagcaacttcaatatgtctgccggtgtttgggggcttgcttccattaccaattcatgaagcgtctgctggaattagtaaatccctttcatttacttacgtaggagaaaatgtttaatag

SEQ ID NO: 76903 - DNA, 30 bp, Homo sapiens; identical to SEQ ID NO: 22871
  chr8:142984452-142984482
  hypo

SEQ ID NO: 76904 - DNA, 327 bp, Homo sapiens; identical to SEQ ID NO: 22872
  chr8:143054763-143055090
  hypo

SEQ ID NO: 76905 - DNA, 248 bp, Homo sapiens
  chr8:143088472-143088720
  hypo
ctgaatgagaaaggccgctgcccaccgcagcgtgtacgccgttttctacatttacggagagactcaggtgtgtgcacactgtgtgtccagaagggctgagggctacagagcagcctggaagaagcacatcgaaatgagcagagcccacacccatcctcccggggaccatggactgccaccacctccctgcggacagccctgggatgcagaccccagccaccaggccggctgcacggaccgcagggtgc

SEQ ID NO: 76906 - DNA, 330 bp, Homo sapiens
  chr8:143089003-143089333
  hypo
taaagtcccctcgagcgcctcagggtcggcttcccaggccttcgcagcccgtgtgaagctagagcgtctgggtgccctggaccgccacccatgccatcctcagtgaaggagctgggctcagacaggatgcccaagagaagaatgacctgaaatgacatctccgctgatgcccagctcagtgtgcagaggctattgtctccccgtccacccacccctgaggaagccagcctgtagctatcccctcaggcccttccctgacctgctgggctctgctgttagcccctgagcagccaccactcgcacctggacacaccgcgcccactgcacaga

SEQ ID NO: 76907 - DNA, 126 bp, Homo sapiens
  chr8:143090351-143090477
  hypo
gttcactccacgagcgtccagggagccgcgctctgtgccagcctcgaggggcatccgggtgctgcctcccgatgtttgcatctctcagaattcacaagtggaaatgccaacgcgagtgatgggatg

SEQ ID NO: 76908 - DNA, 411 bp, Homo sapiens; identical to SEQ ID NO: 22876
  chr8:143152591-143153002
  hypo

SEQ ID NO: 76909 - DNA, 30 bp, Homo sapiens
  chr8:143162511-143162541
  hypo
ccacgttgtgcacgcgtgcatgtgtgtgtg

SEQ ID NO: 76910 - DNA, 406 bp, Homo sapiens; identical to SEQ ID NO: 22877
  chr8:143171101-143171507
  hypo

SEQ ID NO: 76911 - DNA, 30 bp, Homo sapiens
  chr8:143181313-143181343
  hypo
tgcaggacctcgggccggtcaccttactgc

SEQ ID NO: 76912 - DNA, 30 bp, Homo sapiens
  chr8:143181646-143181676
  hypo
acgtagcaggactgccgtacgtcagtgctg

SEQ ID NO: 76913 - DNA, 266 bp, Homo sapiens
  chr8:143204857-143205123
  hypo
aggcctccccacacatcagttcgtgcagagcgcatggtccagggatgctggttagcccccataaccccgccggcctcacccccaggggctcccagggtccccggtccccagctgctggagagggaccggggtcgtgctgcctcccttgcagctgcgttgacagaggacccggccggcactctgtaaatgttggtggacgatgacaccggctccctcagcctgctgatttttctgtgtccagcgccggggcctggatgggagctgtc

SEQ ID NO: 76914 - DNA, 283 bp, Homo sapiens; identical to SEQ ID NO: 22878
  chr8:143234554-143234837
  hypo

SEQ ID NO: 76915 - DNA, 30 bp, Homo sapiens
  chr8:143250090-143250120
  hypo
ccgaccccgcgccgacgtgcatgaaccggg

SEQ ID NO: 76916 - DNA, 30 bp, Homo sapiens
  chr8:143250362-143250392
  hypo
atctaccactctgtacgcagaaaaaggctt

SEQ ID NO: 76917 - DNA, 214 bp, Homo sapiens
  chr8:143269915-143270129
  hypo
ggcacactcctatatggcacacgcctgcacatgggacacacctgcacagcacgtgcctgcacagcacatgcctatatggcacacacctgcacagcacacgcctatatgccacacgcctgcacatggcacacacctgtacacggcacactcctatatgccacacgcctgcacatgggacacacctgcacagcacgtgcctatatggcacatacct

SEQ ID NO: 76918 - DNA, 30 bp, Homo sapiens; identical to SEQ ID NO: 22880
  chr8:143333257-143333287
  hypo

SEQ ID NO: 76919 - DNA, 31 bp, Homo sapiens
  chr8:143353856-143353887
  hypo
ccatccatccaccacccgtctacagcttcct

SEQ ID NO: 76920 - DNA, 30 bp, Homo sapiens
  chr8:143356098-143356128
  hypo
gaggccgggccggccgggcactgtggccct

SEQ ID NO: 76921 - DNA, 30 bp, Homo sapiens
  chr8:143360275-143360305
  hypo
cccaaactcctcaacgtgaccaatgaatgg

SEQ ID NO: 76922 - DNA, 31 bp, Homo sapiens
  chr8:143360666-143360697
  hypo
caggcctccggccacacgacaccaggcggga

SEQ ID NO: 76923 - DNA, 30 bp, Homo sapiens
  chr8:143363090-143363120
  hypo
aaggcgggtgggggcgctggggagtcggtg

SEQ ID NO: 76924 - DNA, 31 bp, Homo sapiens
  chr8:143367814-143367845
  hypo
gtgatgcagaggcaggcggtccctctgcagg

SEQ ID NO: 76925 - DNA, 245 bp, Homo sapiens
  chr8:143369008-143369253
  hypo
gggctgccctccaggtcgtggaacccaggaccccggccagatctcagggacagtggaacccaggaccccagccagatctcagggacagtgggccgccctccaggtcgtgaaacccaggaccccggccagatctcagggacagtgggccaccctccaggatgtggaacccaggaccccagccagatctcagggacagtgggccgccctccaggtcgtggaacccaggacctcggccagatctcagg

SEQ ID NO: 76926 - DNA, 30 bp, Homo sapiens
  chr8:143373133-143373163
  hypo
tgaaagggagccagcggctcaggcgtcagg

SEQ ID NO: 76927 - DNA, 169 bp, Homo sapiens
  chr8:143379123-143379292
  hypo
gacctgctgcagaccgtggggagggcttcctaaaggctaatgacaatttgcgttttgtttttcccgttttcagagaccaaagggagggagtgatgcagtgaggtgtacagacgccttccaagaacgactcccaccccgccgccctccgtcccgcgcctgctgttgctgg

SEQ ID NO: 76928 - DNA, 1133 bp, Homo sapiens
  chr8:143386209-143387342
  hypo
cacgcccctggagagcggcatgacggttgagcacagcctcctcctgccagcggtgacaggccctacaacagccccactgactggggtcccgtggcctgggtaaagtcaaagcccccaggtaaacataacaaacttttgaggtaagaggtccccggggcagcccggctggtgtgcccgaggacggagatgtaggagcctgccctcggccctgacagcaaacagccacaggcgagggggctggaggaaatgtgctccctcccacgatgaaatcctccagggcagctaatgcgggcgagtgagatggccaggtggagaaggcaccacaggacgttctgtgcgatgttccctggacttgggggtttcagtgacagctccccaggagctgtgggcagagggtgccaggcacccatggagacctgcctcggatctgtgccttgggattgatgccacctcctgcatgtggagaaggggaagctcaggaggataggggagggcgcaggggtgggaggggggtgcaaacggggttccgtgtggacgcccaggaaagcggccaggctggggtgcgggctgtgtggacacccaggaaggcagtcacactgggatgcgagccgtgtggacacccaggaaggcggcagggctggggtgcgggccagaggagaccccgcaggtgctcggtctccctcacctccacagcgggaggatcgggggcctggtgccgctctccccagcagtgcaggacaaaagccaggggaggaagagatggcttagacgcccgggtccctccgcggcctcctcctgaaaggctcacaaagcgctcctttattctccccacaaaggcccaatttgggtcttgagctccgaggctgggattagggatttgctggcaaggtgctggggcaagcgcagaggggacggccctgtgatagttttccagctcaagaggcagacagacaaaggcggctttctcctccccacagggctcagggcctgggtccctgttccgacacgtagggaagagacatgctctaacgtgagtgctggagacagggcacacacggtttcccgtgggaagagactccgctctgccaggcattcagaaagcagggacccgaggccggcgctcagggctctcc

SEQ ID NO: 76929 - DNA, 30 bp, Homo sapiens
  chr8:143396984-143397014
  hypo
ggtggggctggacacgcacggagccggggt

SEQ ID NO: 76930 - DNA, 163 bp, Homo sapiens
  chr8:143397306-143397469
  hypo
gtgcacccaccaagccgcgtgaaggagccattcgcttcacgaggaaactgcctgcacggaccacccaactctgctctcaccccacagaaacgcctctcagaatcgcaaccctccaccatgtggggccttgctcagcacctcacgtaagcgcagcgcctcccgt

SEQ ID NO: 76931 - DNA, 30 bp, Homo sapiens; identical to SEQ ID NO: 22883
  chr8:143398748-143398778
  hypo

SEQ ID NO: 76932 - DNA, 31 bp, Homo sapiens
  chr8:143400345-143400376
  hypo
gacacccagcaagagacgggggagacgggca

SEQ ID NO: 76933 - DNA, 30 bp, Homo sapiens
  chr8:143402269-143402299
  hypo
gaacgaaggcagcccgtttcctgtaggcag

SEQ ID NO: 76934 - DNA, 271 bp, Homo sapiens
  chr8:143405648-143405919
  hypo
aaaggccaggcaggcggctacagggtccaggaaacctgacccaagcatccctctcccagcactcctgtgcgaggtctgcacagctgccagctcggcggctcctgtactaccagccaggtggtgccgttgctgccagcagtcaggtgactgaggagtctgcgaggcctgcctggggggtgtgtcacctgaggcccatttgccctagcgccctgccctagtctgccggggccagaaccgacctgagtacggaggctctcgcatttgcttgtca

SEQ ID NO: 76935 - DNA, 30 bp, Homo sapiens
  chr8:143406188-143406218
  hypo
actcgagtggttaatcggcgctcccgcccc

SEQ ID NO: 76936 - DNA, 96 bp, Homo sapiens
  chr8:143410615-143410711
  hypo
acctaagagctaaggccggcccaggggagagccaaggtgccgggatactcggtcctcagaccaggacagtctcctactccacgctggggtcccctc

SEQ ID NO: 76937 - DNA, 30 bp, Homo sapiens
  chr8:143412990-143413020
  hypo
acccgggactgcaccgcaggatggcctgag

SEQ ID NO: 76938 - DNA, 277 bp, Homo sapiens; identical to SEQ ID NO: 22885
  chr8:143413442-143413719
  hypo

SEQ ID NO: 76939 - DNA, 43 bp, Homo sapiens
  chr8:143414783-143414826
  hypo
taaaatttttaaataaaagaacgtggtttgaggtctacaaaca

SEQ ID NO: 76940 - DNA, 36 bp, Homo sapiens; identical to SEQ ID NO: 22886
  chr8:143415310-143415346
  hypo

SEQ ID NO: 76941 - DNA, 102 bp, Homo sapiens; identical to SEQ ID NO: 22887
  chr8:143424740-143424842
  hypo

SEQ ID NO: 76942 - DNA, 31 bp, Homo sapiens
  chr8:143425489-143425520
  hypo
gacggctcgtaggtcccgccacttgtgcttc

SEQ ID NO: 76943 - DNA, 30 bp, Homo sapiens
  chr8:143427446-143427476
  hypo
aactttaggtgttccggacttttctctgaa

SEQ ID NO: 76944 - DNA, 42 bp, Homo sapiens; identical to SEQ ID NO: 45904
  chr8:143429132-143429174
  hypo

SEQ ID NO: 76945 - DNA, 30 bp, Homo sapiens; identical to SEQ ID NO: 22889
  chr8:143442749-143442779
  hypo

SEQ ID NO: 76946 - DNA, 804 bp, Homo sapiens; identical to SEQ ID NO: 22890
  chr8:143463111-143463915
  hypo

SEQ ID NO: 76947 - DNA, 181 bp, Homo sapiens; identical to SEQ ID NO: 22891
  chr8:143505867-143506048
  hypo

SEQ ID NO: 76948 - DNA, 30 bp, Homo sapiens
  chr8:143506693-143506723
  hypo
gccaagtcaacacgtcggaaagaagcaaag

SEQ ID NO: 76949 - DNA, 30 bp, Homo sapiens
  chr8:143507454-143507484
  hypo
gtccacgcacacacacgtgtgcacttgcat

SEQ ID NO: 76950 - DNA, 461 bp, Homo sapiens; identical to SEQ ID NO: 22892
  chr8:143509145-143509606
  hypo

SEQ ID NO: 76951 - DNA, 22 bp, Homo sapiens
  chr8:143509628-143509650
  hypo
cggccaccctctgggtcctcct

SEQ ID NO: 76952 - DNA, 169 bp, Homo sapiens; identical to SEQ ID NO: 45907
  chr8:143531567-143531736
  hypo

SEQ ID NO: 76953 - DNA, 526 bp, Homo sapiens; identical to SEQ ID NO: 6629
  chr8:143531983-143532509
  hypo

SEQ ID NO: 76954 - DNA, 1099 bp, Homo sapiens; identical to SEQ ID NO: 6630
  chr8:143532541-143533640
  hypo

SEQ ID NO: 76955 - DNA, 1049 bp, Homo sapiens; identical to SEQ ID NO: 45910
  chr8:143533708-143534757
  hypo

SEQ ID NO: 76956 - DNA, 30 bp, Homo sapiens; identical to SEQ ID NO: 45911
  chr8:143556218-143556248
  hypo

SEQ ID NO: 76957 - DNA, 291 bp, Homo sapiens; identical to SEQ ID NO: 45912
  chr8:143556727-143557018
  hypo

SEQ ID NO: 76958 - DNA, 244 bp, Homo sapiens; identical to SEQ ID NO: 22899
  chr8:143557843-143558087
  hypo

SEQ ID NO: 76959 - DNA, 323 bp, Homo sapiens
  chr8:143558402-143558725
  hypo
tgcggggtctggccccggtctgactgcagccccatgggcggcaggcctgtgacgctgtagtggggcctgcaggtgacccagcagccgaggagtggtccccgtggagcgtgtgctccagcacctgcggcgagggctggcagacccgcacgcgcttctgcgtgtcctcctcctacagcacgcagtgcagcggacccctgcgcgagcagcggctgtgcaacaactctgccgtgtgcccaggtgggtgggaccttgggctggggcagcggacagccagggcagcggggggccagggcagcgggggcggtggccgcagtgggcagcag

SEQ ID NO: 76960 - DNA, 80 bp, Homo sapiens
  chr8:143570945-143571025
  hypo
ggaaacaggctcagagaggtgcggtgacttgcccggggtcacacagcaagtgaggtgccgaaaccccatctgtgcctgac

SEQ ID NO: 76961 - DNA, 174 bp, Homo sapiens; identical to SEQ ID NO: 22901
  chr8:143582424-143582598
  hypo

SEQ ID NO: 76962 - DNA, 37 bp, Homo sapiens
  chr8:143595704-143595741
  hypo
gtgtcggcgcagatgcgggctgcgcagatgccggctc

SEQ ID NO: 76963 - DNA, 61 bp, Homo sapiens
  chr8:143609494-143609555
  hypo
catgggcacacacacgtgggcatacacatgccacgaggacctgcacgaggtccctgcccag

SEQ ID NO: 76964 - DNA, 30 bp, Homo sapiens; identical to SEQ ID NO: 22902
  chr8:143614782-143614812
  hypo

SEQ ID NO: 76965 - DNA, 179 bp, Homo sapiens; identical to SEQ ID NO: 22903
  chr8:143623480-143623659
  hypo

SEQ ID NO: 76966 - DNA, 313 bp, Homo sapiens
  chr8:143660375-143660688
  hypo
ctggaaatagggatgacgtcagagagagcctcaaaccgtcagcgttggccaccgccttgcactgcgcccatgcttggagccccgagccccaggccaggccctgcccgcccgctcagccctgctcgccatgctcccgcccttgctgctggggcggccggcagggagcccacctgaggcgcagagggaggccattgccgggcgctgccaccatgaggagtcccgagtcctggggagacaggtcctgtgcagggaacagagggacgtgtcactcacgcctgccggggccagagctcgactccgagggacccccagt

SEQ ID NO: 76967 - DNA, 221 bp, Homo sapiens
  chr8:143662854-143663075
  hypo
cgtgggtgaccgccccgtctgcccgtccgtgagtgaccgccccgtctgcccgtccgtgggtgaccgccccgtctgcccgtccgtgggtgaccgccccgtctgcccatccaccccaaaacagaaattgcttgctaggctcctagacgtcatccgaccaaggagaagggaccaggcggcaggcaggggagcgcctcgaccgcgttactctcccttgatggcag

SEQ ID NO: 76968 - DNA, 161 bp, Homo sapiens
  chr8:143699027-143699188
  hypo
gagtcagctctctccccgcagccccagactgtctcagccctggctgacccactccggcagggcctttctgggttgccaggagcgttcacagggcagctgctgacctggggcatcctgctgctcccccaggctggccctgctgatctcgggtgccggcagtt

SEQ ID NO: 76969 - DNA, 30 bp, Homo sapiens; identical to SEQ ID NO: 45920
  chr8:143761915-143761945
  hypo

SEQ ID NO: 76970 - DNA, 17 bp, Homo sapiens
  chr8:143819453-143819470
  hypo
cacgtgcacgcaggcaa

SEQ ID NO: 76971 - DNA, 30 bp, Homo sapiens
  chr8:143823719-143823749
  hypo
tccccaccagcctgcggcccactcaccaca

SEQ ID NO: 76972 - DNA, 31 bp, Homo sapiens; identical to SEQ ID NO: 22907
  chr8:143843555-143843586
  hypo

SEQ ID NO: 76973 - DNA, 31 bp, Homo sapiens; identical to SEQ ID NO: 22908
  chr8:143846050-143846081
  hypo

SEQ ID NO: 76974 - DNA, 31 bp, Homo sapiens
  chr8:143856622-143856653
  hypo
ccagggccagggtggccggggtggcaaggcc

SEQ ID NO: 76975 - DNA, 30 bp, Homo sapiens
  chr8:143887633-143887663
  hypo
cctggtaatttagccggaagatgcgctggg

SEQ ID NO: 76976 - DNA, 31 bp, Homo sapiens
  chr8:143909261-143909292
  hypo
tggagacgacggagagggagagggagaagga

SEQ ID NO: 76977 - DNA, 30 bp, Homo sapiens
  chr8:143916258-143916288
  hypo
acactgcggggctccgaggggcacaggtca

SEQ ID NO: 76978 - DNA, 30 bp, Homo sapiens
  chr8:143983238-143983268
  hypo
aagagatgtcgttatcgtcccaaaacagac

SEQ ID NO: 76979 - DNA, 30 bp, Homo sapiens
  chr8:143994811-143994841
  hypo
tgcacgtcggggttccgagccagctcaaag

SEQ ID NO: 76980 - DNA, 44 bp, Homo sapiens
  chr8:144057228-144057272
  hypo
tcatgtcaaaatgcatgaagccggactggcacagtggcttacgc

SEQ ID NO: 76981 - DNA, 43 bp, Homo sapiens
  chr8:144057391-144057434
  hypo
cagagcgagccagcagggctgcgcccactgtctctgaaagatg

SEQ ID NO: 76982 - DNA, 30 bp, Homo sapiens
  chr8:144070676-144070706
  hypo
tcttcggaggctccacgagaggagaccagc

SEQ ID NO: 76983 - DNA, 426 bp, Homo sapiens; identical to SEQ ID NO: 22909
  chr8:144070962-144071388
  hypo

SEQ ID NO: 76984 - DNA, 138 bp, Homo sapiens
  chr8:144090395-144090533
  hypo
ttaatctcctcctgccgggattccagaggcccgtaatgacagtgggctcctccttgccagttcaactcacccattctccctgagtcttggggaccagtaacgagtcccagtgcgcagtggccccgtgcagggttccca

SEQ ID NO: 76985 - DNA, 212 bp, Homo sapiens
  chr8:144093515-144093727
  hypo
tttccatcccagctgtcgcaaaatacaaggaaacagacacaggtcacctcgctcagcagccaacattgaccgcacaaggctcagacttgccccctgtggtccctggtgtctttgatgcactcaaggtggggagggatgacctctcactgggaattcaatgggtggtatttgggccagatggacgagcggacggacacccccagtcaggcctg

SEQ ID NO: 76986 - DNA, 142 bp, Homo sapiens
  chr8:144163831-144163973
  hypo
ttttctgcagaatggagtgtacgcgtcctgctcagcaaacgctgtgctcccagatgtcccaacgacaacatgaagttcgaatggtcgccggcccccatggtgcaaggcgtgatcaccaggcgctgctgttcctgggctctct

SEQ ID NO: 76987 - DNA, 363 bp, Homo sapiens; identical to SEQ ID NO: 22911
  chr8:144178362-144178725
  hypo

SEQ ID NO: 76988 - DNA, 264 bp, Homo sapiens
  chr8:144187579-144187843
  hypo
aaccaccatggcacacatgtacctatgtaaccaaccagcgaaccaccatggcacacacgtacctaagtaaccaaccagcgaaccaccatggcacacgcgtacctatgtaaccaaccagcaaaccaccatggcacacgcgtacctatgtaacaaaccagcaaaccaccacggcacgcatgtacctaggtaaccaaccagcaaaccaccatggcacgcatgtacctatgtaaccaaccagcaaacgaccatggcacatgtgtacct

SEQ ID NO: 76989 - DNA, 194 bp, Homo sapiens
  chr8:144190245-144190439
  hypo
acacaaggaacaacagatgaacgggaactctcagaggcattcccggaactgaggttaatcagaagccaacacgacaaactagcgtccaagatggagcggcttcggcctccatgatccgcccgcgccgccccactaatccagctctgaccgtctcacctgccctcctcttccgcgatggtccctgagccttaggg

SEQ ID NO: 76990 - DNA, 77 bp, Homo sapiens
  chr8:144203022-144203099
  hypo
ttttcttactgtttgactgggggtggcgattacagtgtggtcatgtgataaacgtggcatttcggaggaatctgggc

SEQ ID NO: 76991 - DNA, 972 bp, Homo sapiens; identical to SEQ ID NO: 22912
  chr8:144203467-144204439
  hypo

SEQ ID NO: 76992 - DNA, 139 bp, Homo sapiens; identical to SEQ ID NO: 22913
  chr8:144208603-144208742
  hypo

SEQ ID NO: 76993 - DNA, 156 bp, Homo sapiens
  chr8:144222939-144223095
  hypo
ctgcgccccgcctccattttgcatccgacaacgttcacgcgaccaaagaaatgaactcgagccccaccttctgcagccacagggacctcgaatgctgcggagcttcccacggacacttcgcttctcccagtggccgcctgtccacttgggttccaa

SEQ ID NO: 76994 - DNA, 30 bp, Homo sapiens; identical to SEQ ID NO: 45925
  chr8:144241392-144241422
  hypo

SEQ ID NO: 76995 - DNA, 269 bp, Homo sapiens; identical to SEQ ID NO: 45926
  chr8:144242014-144242283
  hypo

SEQ ID NO: 76996 - DNA, 47 bp, Homo sapiens
  chr8:144292670-144292717
  hypo
tagggcagcaggaaagcggggcaccagggaagcggggcgacagggag

SEQ ID NO: 76997 - DNA, 491 bp, Homo sapiens
  chr8:144293619-144294110
  hypo
tgggggtggggccacgcgcggaggggcagggaagggcggggcggggcggggcgggacggggctgggggggacaggcatcaggtatgaagagtttggggctggcggggcgtgtccggctgtggcgtgggcaccactatgggagaccctggcttggcaagtgaccttgcagccttggctggggaagggctagatgctgggtgggtgccggtagagtggaaagaatgacaggttcaggtgaattaaggaaggatggttgactcggtggctgggacattagagacaggtattcccagcctcaggcgctgtcctaagcccagcaggtactgacccttgatggtcacctcaccctatgagggagctgaggcctggggaacccaaggggctagtccagaacccacagccgggggaaggaggaaccgggtcttaaacccaggtagctcactccagaaccaactcaacctctgttacaggtggccggccagaaaatgccc

SEQ ID NO: 76998 - DNA, 127 bp, Homo sapiens
  chr8:144326797-144326924
  hypo
atggacagctacccacgcagccttggcctaaggctggcaggggcgaggccggggctggcacagaggagctcgaacaggtggagtcttaaaaagcaggaaagggtctgtcaggcggaggcggagcggg

SEQ ID NO: 76999 - DNA, 139 bp, Homo sapiens
  chr8:144330279-144330418
  hypo
gcccggccagtccactctgcttttaagaaatattttatttctcagggtgggcagcgtgtagagaagtgagtcattccagtctctgccggttagcacctgccagcctaagttgagtcgacagagccgttatggagaatgt

SEQ ID NO: 77000 - DNA, 31 bp, Homo sapiens
  chr8:144331530-144331561
  hypo
gtggagaaggagactacggcaggaaccaggg

SEQ ID NO: 77001 - DNA, 30 bp, Homo sapiens
  chr8:144331979-144332009
  hypo
ccccttagccctcacgcttccaaggaacag

SEQ ID NO: 77002 - DNA, 31 bp, Homo sapiens
  chr8:144333711-144333742
  hypo
ttttcagctgtttagacgtgaaacactaatc

SEQ ID NO: 77003 - DNA, 63 bp, Homo sapiens
  chr8:144334637-144334700
  hypo
gggggggttctgctctcgggaccacacacactggaggggcctccccagcgcaggtgagcaggt

SEQ ID NO: 77004 - DNA, 30 bp, Homo sapiens
  chr8:144335014-144335044
  hypo
ctggatgccgccggcggaccacggccagtg

SEQ ID NO: 77005 - DNA, 43 bp, Homo sapiens
  chr8:144335406-144335449
  hypo
cactgaggctcttggccgcagagcgtggcgtctgcagttcatg

SEQ ID NO: 77006 - DNA, 358 bp, Homo sapiens
  chr8:144343634-144343992
  hypo
ggatggggtgaactccgggatggggccggcagggagcctcacgcttacagagcctggtgttggcactctcctggcttcctccgcaaacctagccacgtggtcagggagcccgggcctagcagacggcccccaccttgacagaatccccagggtcgtgcgtggcggtgggggcgacttcacagccgagaccgggcctaacgctgctgtctcgcagtcacccctgcaggccgctcagggcagggctctggcctgacgggggttcctggacacgcctctgagccggcagcccctacccgcacccgtgcaccttccacgcccgtctccagcagcccctgcccccacccgcacccctgcacct

SEQ ID NO: 77007 - DNA, 619 bp, Homo sapiens
  chr8:144344205-144344824
  hypo
cctcacggctgtctccggcagcccctgcccgcgcccgcacctctgcacctcccacgcccctctccggcagcccctgcccacacccgcacccctgcacctcccacgcccgtcttgccctggggcccaggtgcaggtctgtgaggagggcagccccgtgctcccgtggccaccgctcagccaaatggattcagcgagggtttttagtgtttgtgcctgtgtccccgtgtgcctgtttcctggtgaggctggatgcctggcatgtctgaacactcacattccccaggcatgcatgtgcagccgccgccgccacccatgtactgtggcgctgacccctcctgtaacagctgtggtcttggcctctcgtgttggtggcagatgtcccatttcccagttactttctgttgtccaaaagtttaactgtcctgccagccaaagctgctgagcattactctgatagaccatcagtccttggtaagtgtcctgtgcatctgggataagcatccgtttgttttcagctgcgctttctgtgacttgctctgcgtgagtcctcggtccacgtgggccgttgcgctggttcccagcctgcccgacacactcactgcgacgcctcccttgccta

SEQ ID NO: 77008 - DNA, 106 bp, Homo sapiens
  chr8:144347175-144347281
  hypo
aatgcagctgcagcctgtcatcgagtcaattgcattgtcgtccgccgctctcctgatgtagttctgtgtttgtccattttgcactgctataaaggaatacctgaga

SEQ ID NO: 77009 - DNA, 106 bp, Homo sapiens
  chr8:144347700-144347806
  hypo
tgcactccagcctgggcaacaagagcggcaactccatctcaaaagtaaataaagaacaaaaggggtttgcttggctcacagttcagatcagcgttcagagggtgct

SEQ ID NO: 77010 - DNA, 267 bp, Homo sapiens
  chr8:144351689-144351956
  hypo
ggtactcacccagcccgctgtgcgccctccaccctgcatcccctgccctcacgtcccctgccctgtctcctcctgacctgccacgctggctgacttgagaggcgcctccagacacctgtatgcagctccttcagcagctggggttcccacaccctcaggccaggggctcggcgcgggttgggttggggcagcggtggttgaggctggggccaagcctgagctctcgctccctagggacagctccccgcattgtttctttcctgagtt

SEQ ID NO: 77011 - DNA, 783 bp, Homo sapiens
  chr8:144359867-144360650
  hypo
gactcatccagaaccccgggcctggcccccagatgtgcctgtggcgggcctctgaggtcactgtcctggtgaagacgaaggctaccgtccccgctttctggcagtgtctgcgagggcctgcgcagcgcgcatctgatgtcatcagcccccagcaagcccgttttccagaagagaacccggaggctccgaggtgacgtgtggcttgctcgagatcacacgatcagtgacggcaccagatgaatccctgagctccctgaccagccatccacccaggcccctgctgagacagcgggacctcgtttccaactcagaagcccccggaacgcggctgcccggcttgggagcctgcggcacagggccctgtgcagccccttggggaagacggccccaggctctgccagcccccgccaccctctccagaccatgctctgggggccctatggccaccagcgctctggacgccccactctgccaggtgagaacgagtttaggggtgcgggctggaggtcagtgtgtctgtccgaagtcagctgggaggcaggcgcctacttgaggcgtccttgctggtgtgcggtgggcctggggttcagactgtctgcctgaaaggtaagggtgaggacgcctgcattctccttgttcagtaacacgcgtgggcagccaggccgaggtgctggctctactaggggattcatctggtgccgtcactgatcgtgtgacctcgagcaagccacgagtcacctcggagcctccgggttcttctctggaaaacgggcttgctggggg

SEQ ID NO: 77012 - DNA, 187 bp, Homo sapiens
  chr8:144361757-144361944
  hypo
cacttatccttcctcacggagcctgtttctgcctctgacaatggtggttagcgcagcccgctccgcaccgcacatggcggctgcaaggacggcatgggtggggttctttgcacagtgccaggtacatagcaaatccccacaaaaagagctcctggaagggctctgtcaacagcgtgagtggacagtc

SEQ ID NO: 77013 - DNA, 30 bp, Homo sapiens; identical to SEQ ID NO: 22923
  chr8:144364998-144365028
  hypo

SEQ ID NO: 77014 - DNA, 16 bp, Homo sapiens
  chr8:144372241-144372257
  hypo
gctggagtgcagtgcc

SEQ ID NO: 77015 - DNA, 30 bp, Homo sapiens; identical to SEQ ID NO: 22924
  chr8:144378382-144378412
  hypo

SEQ ID NO: 77016 - DNA, 565 bp, Homo sapiens
  chr8:144380306-144380871
  hypo
tgcggttgcaggattcgcccatcctggtctgggtgtggcttgtgaccacctcctgcagttctctgcccaggtaaggactaattgggaagaattctgggtcctgagctggctgccgcttccaagacagtcgctttgagggctcttggcaccgattttgttaaaatgcatgagcttagggttgtgcagcctgtaggggcaggggtggtctcagaatggatttggtggccccaccgttaattaagctcctgacccctgggccggtggtgaggtgggaagatgagcctgtgtctcccatgctgagccaagatcctcaggtaccagtagcggtcaaagcacctgctccctgaaggaagcttacctggcttagcctcattcctgctcgtaagtcaggcattcagcttgcaaagatccccaagcacacaaggagagtcagctgactgagggccaacagaaacagcaggcagccgctgtcagccacaaagaaacgcagatcctgaaactgtcatcatacaggtgagaggatagttatgtgtgaggtgttcaaagaagtcgcgcagtcagtgat

SEQ ID NO: 77017 - DNA, 173 bp, Homo sapiens
  chr8:144383377-144383550
  hypo
caaagatggaaggaacgacctacatccaggcatgacgtgaaacatcagacagtccaggacatagagacgatctgaaagcgcagatcacacacacaggctgaggaataaatcccttcccaagggcagactggaagttagaaaatgacagaacaatgcttcgaaaattacaagtg

SEQ ID NO: 77018 - DNA, 31 bp, Homo sapiens
  chr8:144386879-144386910
  hypo
acggtgcttctgtggccgcaggcgtgaggac

SEQ ID NO: 77019 - DNA, 30 bp, Homo sapiens
  chr8:144387631-144387661
  hypo
gggtgtcgggaaggcgtcagggctcccggt

SEQ ID NO: 77020 - DNA, 55 bp, Homo sapiens
  chr8:144398062-144398117
  hypo
caccctacgtgcccaccgcagctggctcccaggcctgtgccgaggctctggggag

SEQ ID NO: 77021 - DNA, 31 bp, Homo sapiens
  chr8:144399475-144399506
  hypo
gaagctgagacagggccgtggacagaggccc

SEQ ID NO: 77022 - DNA, 203 bp, Homo sapiens
  chr8:144400198-144400401
  hypo
cgaagaggtcgtcccgggggtccttgttctccataaagagctgtaagttcttgtacacctgaaggagaaagaaggaatttcagaggacagaaaaaacccgaatccagtgaggacctgaagggcgtctacgcagagcctgggagcccacgggaggcttccctgaggaaggtggcccgagcagcatcaccgtcacctgtcggcat

SEQ ID NO: 77023 - DNA, 252 bp, Homo sapiens
  chr8:144413788-144414040
  hypo
aagtgggaaaggcaacgtgcctctcccaggctctagggcctctccccagatgggtcccttcagagccggtctagaatcttcgggaacctctccatgggaccatttcatttgctaaataaaggacctggctgcttatgagagagccctgcctccgaggagctgggtggaagggggtccagcagtgcagccagtggagaggcaccacagcagggcgcaggaccgccgcccacagaggatcgggcagggtggaag

SEQ ID NO: 77024 - DNA, 242 bp, Homo sapiens
  chr8:144414247-144414489
  hypo
ggggggacacagccagcgtggcggctacagcccatcctaactctccaggccagtcatcatctatccattgaggcaagcccaagcctgccctgaaccagcactgcgctgggtcctgcggatgcagatcaccaaaacccatacgaagggctcaactgaacctagattctgagatgggcctgggagaagaggagcgagatggggcgtggctggcaggcagtgggcaggctcggtcagcagggctg

SEQ ID NO: 77025 - DNA, 31 bp, Homo sapiens; identical to SEQ ID NO: 22928
  chr8:144446233-144446264
  hypo

SEQ ID NO: 77026 - DNA, 30 bp, Homo sapiens; identical to SEQ ID NO: 22929
  chr8:144446722-144446752
  hypo

SEQ ID NO: 77027 - DNA, 140 bp, Homo sapiens
  chr8:144452480-144452620
  hypo
tcagggtactggggaggggcccgtgggaggtggcagtggggcggaggcaggccctgtgtcacacgcgcaccactcaggctgtcctgccatctggaaagtcttccccgatgcctgctgccgggctagagtgaggcctgttc

SEQ ID NO: 77028 - DNA, 30 bp, Homo sapiens; identical to SEQ ID NO: 22930
  chr8:144454256-144454286
  hypo

SEQ ID NO: 77029 - DNA, 232 bp, Homo sapiens; identical to SEQ ID NO: 22931
  chr8:144457688-144457920
  hypo

SEQ ID NO: 77030 - DNA, 30 bp, Homo sapiens; identical to SEQ ID NO: 22932
  chr8:144459827-144459857
  hypo

SEQ ID NO: 77031 - DNA, 30 bp, Homo sapiens; identical to SEQ ID NO: 22933
  chr8:144460930-144460960
  hypo

SEQ ID NO: 77032 - DNA, 370 bp, Homo sapiens
  chr8:144461168-144461538
  hypo
cacgcagattggggcgcgccaggaccgctcctgcaccgagggtgcccgccgcgctatggaggccttccagagggccgctggtgagggcggcccgggccgcggtggggcacggcgcggtgccagggtgttgcagagccccttttgcagggcaggagctggggagtggttaggacatcagtccctcaggtagggggagtgagcacatcaggtccatatgtgtcccaggagcatccctagctggccgccctgagtgctgcatggggcagagatgggcaggtacagggccctgcctgtgtgagcacccctccctccgcaggggccttcagcctcctgagggagaacttctcccatgcgccgagcccagacatga

SEQ ID NO: 77033 - DNA, 379 bp, Homo sapiens; identical to SEQ ID NO: 22935
  chr8:144462487-144462866
  hypo

SEQ ID NO: 77034 - DNA, 30 bp, Homo sapiens
  chr8:144463884-144463914
  hypo
cgcggtaagggccccgccggccccctgagg

SEQ ID NO: 77035 - DNA, 478 bp, Homo sapiens
  chr8:144471547-144472025
  hypo
gatagctgggctgcacgcccgggcataactcagtgtttacctggtggggggtattggcggcccccgcggctccagctccccccacacccccttcggcccctagaccgtgcgccagacatgcattaaggcaggagtgacttatcgagctgtcagggggagcgttttaagacagaattataggggagaggaaaaagatttttaccaaattaatgaaaaatcaatgtggcctcaaaaatccattagccttcataatgcgctggttccaggctgagccgcataatccgatgccggctgttaaactcgtggcggtgcccccgcccaccattcatcaccgcacggtgcttactcctgagagtgacacctgcccggtgcccagagcccctgggggcccctgccctggctccctgaccacacacagaggctgcagggagccctggggtgaagcatgtagacggggcagtggcgtggatgggataga

SEQ ID NO: 77036 - DNA, 447 bp, Homo sapiens; identical to SEQ ID NO: 45933
  chr8:144510952-144511399
  hypo

SEQ ID NO: 77037 - DNA, 1083 bp, Homo sapiens; identical to SEQ ID NO: 45934
  chr8:144511448-144512531
  hypo

SEQ ID NO: 77038 - DNA, 30 bp, Homo sapiens; identical to SEQ ID NO: 22938
  chr8:144519817-144519847
  hypo

SEQ ID NO: 77039 - DNA, 233 bp, Homo sapiens; identical to SEQ ID NO: 22939
  chr8:144521389-144521622
  hypo

SEQ ID NO: 77040 - DNA, 161 bp, Homo sapiens
  chr8:144521830-144521991
  hypo
ggccaccgctacactcgcaccttggctggccctgccccagggctggcaggtgcacccctggcgcccgtgggactcacccaggccccacctggagattctgacgtggtggtctgagggggcatttaaagctcccctgtgcccgagcccggccatgctgccta

SEQ ID NO: 77041 - DNA, 136 bp, Homo sapiens
  chr8:144545693-144545829
  hypo
tcaaggacgccggccgcggatcagaatttgacagcagacagacacagctggctattaagactaaggggagaaggtggagttttctagtctcagagtctccccccagcaagacgtatcagccggggagatccctttg

SEQ ID NO: 77042 - DNA, 100 bp, Homo sapiens
  chr8:144546272-144546372
  hypo
caggcccgggctgccgcctgtccccgctggatctggccggctcagcgctttcccatatataattacaagctgctatccatcatgcgggcgccgcggcgcg

SEQ ID NO: 77043 - DNA, 92 bp, Homo sapiens
  chr8:144550586-144550678
  hypo
gtaggggcagcgctcgccacggttgcacctgccgaagcggttgtagtacatgcagtactccttcctcttctccctgcgctgccgcgcctgcc

SEQ ID NO: 77044 - DNA, 30 bp, Homo sapiens
  chr8:144552437-144552467
  hypo
agctgagtggccagcgagcccggctggggc

SEQ ID NO: 77045 - DNA, 30 bp, Homo sapiens
  chr8:144557191-144557221
  hypo
agaaaatcaggggccgctcagccacgcgag

SEQ ID NO: 77046 - DNA, 30 bp, Homo sapiens
  chr8:144557504-144557534
  hypo
caatgcccaccacacgctagccggtcggtg

SEQ ID NO: 77047 - DNA, 31 bp, Homo sapiens; identical to SEQ ID NO: 22943
  chr8:144559266-144559297
  hypo

SEQ ID NO: 77048 - DNA, 30 bp, Homo sapiens
  chr8:144567466-144567496
  hypo
tgaggccgagaacccggtccagtgtttcta

SEQ ID NO: 77049 - DNA, 30 bp, Homo sapiens
  chr8:144568417-144568447
  hypo
gtgagaaacgtgggcgcctacggctgcctg

SEQ ID NO: 77050 - DNA, 30 bp, Homo sapiens
  chr8:144571193-144571223
  hypo
caagccagtggcagcgctgacccccaggac

SEQ ID NO: 77051 - DNA, 31 bp, Homo sapiens; identical to SEQ ID NO: 22944
  chr8:144574934-144574965
  hypo

SEQ ID NO: 77052 - DNA, 29 bp, Homo sapiens
  chr8:144577034-144577063
  hypo
ccaccagtggccttacgttagcccgagca

SEQ ID NO: 77053 - DNA, 148 bp, Homo sapiens
  chr8:144577122-144577270
  hypo
acacgtgagaatgcagattagaaaggcggtaacaccacgtctgaggggaacagaaagggtcgcggcacgctggaaagcagtttggtgatgtcacatcaagtcagcagatgtcttacgtcccagcgatcccacgcgcgacagtcatgga

SEQ ID NO: 77054 - DNA, 30 bp, Homo sapiens; identical to SEQ ID NO: 22945
  chr8:144583895-144583925
  hypo

SEQ ID NO: 77055 - DNA, 30 bp, Homo sapiens; identical to SEQ ID NO: 22946
  chr8:144588450-144588480
  hypo

SEQ ID NO: 77056 - DNA, 34 bp, Homo sapiens
  chr8:144589671-144589705
  hypo
gtgtgcatgtgtgtccgtccgtcttcacgtgtat

SEQ ID NO: 77057 - DNA, 398 bp, Homo sapiens
  chr8:144589918-144590316
  hypo
gatagtgagagccgccgggcccgccaggagggcagagacagggggaagggcggggcgctgagaggcgaggccggcgtcttcttgacaatgcggtagcgggtcttgatcaccttgctggtgggtgcagtccgcacggcatgcaggctggacgctgtagagaaaacccagggcacagacatgggtcagggaaggccggcaagggtagggtcagagaggccacccacagtgccagctctgcccaccgcctccgccggagcttgaagaccctccatcgccccgtggataaaaccctcaacccatgtggcacacacatccccagggcgcctggcagccgacgcttcaggagctagccagtgcagcctctgagaggcgggcaccagccccgcacaccctccagc

SEQ ID NO: 77058 - DNA, 31 bp, Homo sapiens; identical to SEQ ID NO: 22949
  chr8:144601156-144601187
  hypo

SEQ ID NO: 77059 - DNA, 30 bp, Homo sapiens
  chr8:144605455-144605485
  hypo
caaagacagacgcacgatgaaaccaagctc

SEQ ID NO: 77060 - DNA, 266 bp, Homo sapiens
  chr8:144610875-144611141
  hypo
ctctgccaggccctcacccctcggttgcccgctaagcatggtgactgccccaccttcccgcccatggcctgcccatggggcctcctgagggagcgaggccctcccttctgcccaggtccagtcctctgggagggggggcgcctcaccctcaccaggagctgccgcagcctgaggctcacgtgcacgcagggcggccagggtgctccccacagcaccttcttaacaggcaggacggacaataagccggcaattcctgcaatacaaaa

SEQ ID NO: 77061 - DNA, 84 bp, Homo sapiens
  chr8:144617125-144617209
  hypo
gcggcagcccccacacggctcttgggtctgcccaggcccagctccttccagagccgtctgaagcctccctagatgacggtacgc

SEQ ID NO: 77062 - DNA, 30 bp, Homo sapiens
  chr8:144621155-144621185
  hypo
aactttgatgaccacgttctgaccctgact

SEQ ID NO: 77063 - DNA, 172 bp, Homo sapiens; identical to SEQ ID NO: 45940
  chr8:144636714-144636886
  hypo

SEQ ID NO: 77064 - DNA, 30 bp, Homo sapiens; identical to SEQ ID NO: 6647
  chr8:144640740-144640770
  hypo

SEQ ID NO: 77065 - DNA, 286 bp, Homo sapiens
  chr8:144656840-144657126
  hypo
atgcaaatcttcctgctacctcgagctcagattcccgactccagcccagccgcagcccgggaggcgcagcccgtgggctgggtgaacaaacgacacaaacaacacaggacaagctgtggggaaaagtgagtgattcgtgttgtttccagtcagccccgctccgagtctcagggggactgccccgcacacagactgttcaccagggcctgcagcctctcggacagcaccacctgcagggagcagaggacaggagcggtgggcagggtgagggcgggggcgcacaggg

SEQ ID NO: 77066 - DNA, 287 bp, Homo sapiens
  chr8:144658239-144658526
  hypo
caccccacctcctgggccagtcgggccagcgcctcctcgtcaatgttgttgctgactacgatgaggactgactccagccagggcacctggaacctgccgcgtgggtggagaaagggtgggggccacccctcgggtcttcctgattcaccctggtgtccccctgctccccgccccgcctcagtcaaggacacctgtgctcaccttctgcttgggagctcctagggagccccaccacttacttccctgccacggcctgcagtatcaccgctgaaacttcagcagagtac

SEQ ID NO: 77067 - DNA, 228 bp, Homo sapiens
  chr8:144661844-144662072
  hypo
gggagggagacaggccaggtacgagcaggaaatgaccaggacggagccagagggccggtctcagtctttaatcgtggcagggcctcacgcacgcgcgcacgtacacacactcaggcttcagatcttgttgaaagctgcgatatcgacactctgcacctgaggagaggcggagggtgacggtcagggctgttcccctacagcccactcggagccaggagcctcctctga

SEQ ID NO: 77068 - DNA, 31 bp, Homo sapiens
  chr8:144668827-144668858
  hypo
tccgctttgtgtgccccggccactcctgtcg

SEQ ID NO: 77069 - DNA, 260 bp, Homo sapiens
  chr8:144675967-144676227
  hypo
cagccagcacagccccccacacgtccgagcccacctcctcatttccccgcttcccgcattcccaagcatgggaggacctgccggacgcagcgcaccatctctcctaacagagaccaagtctgagcttcaaagcttgcgcagacgacaggcacgtgcaagcctctcctctccagcaggagagcccggagcaggacacagcgactctttcaactgcgtcccgacaaacggtcagccccttcgctcctgcagtttatccaagc

SEQ ID NO: 77070 - DNA, 89 bp, Homo sapiens; identical to SEQ ID NO: 22953
  chr8:144676811-144676900
  hypo

SEQ ID NO: 77071 - DNA, 76 bp, Homo sapiens
  chr8:144681775-144681851
  hypo
tggggggcggagaggacgaggaggaggccaccgactatggagggacctcagtgccgactgccggggaggccgtgcg

SEQ ID NO: 77072 - DNA, 30 bp, Homo sapiens
  chr8:144682385-144682415
  hypo
gtgctatgtggccccggagccacagcacaa

SEQ ID NO: 77073 - DNA, 54 bp, Homo sapiens; identical to SEQ ID NO: 6650
  chr8:144691795-144691849
  hypo

SEQ ID NO: 77074 - DNA, 30 bp, Homo sapiens
  chr8:144696341-144696371
  hypo
atatgaactgcctccgcggattccctgtac

SEQ ID NO: 77075 - DNA, 30 bp, Homo sapiens
  chr8:144696636-144696666
  hypo
gcgtctcctgccctcgtcctgggcccgcga

SEQ ID NO: 77076 - DNA, 199 bp, Homo sapiens
  chr8:145155547-145155746
  hypo
taggataagcagggccttccacgcacccagcgctgttcctggccccggccccggccccggcccccactgaacctcaaggatcacttatacatgctcacctcagggtttgtttgctgcttccttggtcacatggttcatgccatgaccttcaaatttcactccagtgtcacctcaatgaggccttccctgccaccacttt

SEQ ID NO: 77077 - DNA, 40 bp, Homo sapiens; identical to SEQ ID NO: 22955
  chr8:145158417-145158457
  hypo

SEQ ID NO: 77078 - DNA, 232 bp, Homo sapiens
  chr8:145161407-145161639
  hypo
tttgtggggcacttggcgcctcacaccacctgtcaccctatactccccagctataacccagacttggactcagatcccttcggggaggatggtagcctctggtccttcaactacttcttctacaacaagcggctcaagcgaatcgtcttctttagctgccgttccatcaggtgggcaccccccgcctcctcccccacctccctgttgggccgatacaacttccccagctgtg

SEQ ID NO: 77079 - DNA, 61 bp, Homo sapiens
  chr8:145163870-145163931
  hypo
ggccaggcatgtaggggcacacggccctcacacacaaggcgatgttaagtccattgggatt

SEQ ID NO: 77080 - DNA, 30 bp, Homo sapiens
  chr8:145168435-145168465
  hypo
tccccgactcagctcgcctcccagagaaag

SEQ ID NO: 77081 - DNA, 30 bp, Homo sapiens
  chr8:145169807-145169837
  hypo
gcttcaggttgggccggcaggggccggggg

SEQ ID NO: 77082 - DNA, 84 bp, Homo sapiens
  chr8:145214940-145215024
  hypo
ggattacaggcgtgagccaccgcgcccggcccacgcctggtaatttttgattggatgccaggcgttgcttttgcttggtgttgc

SEQ ID NO: 77083 - DNA, 118 bp, Homo sapiens; identical to SEQ ID NO: 22957
  chr8:145223204-145223322
  hypo

SEQ ID NO: 77084 - DNA, 101 bp, Homo sapiens; identical to SEQ ID NO: 22958
  chr8:145223918-145224019
  hypo

SEQ ID NO: 77085 - DNA, 293 bp, Homo sapiens
  chr8:145226070-145226363
  hypo
gcttctgatgccagtcgcaagccccaggtgtggcctgtgcttctgaccgacctgccatgaatcagggttttcacgaccccctcctcaggcttgatgaattgcagcagtggctcacagaatgcagggacagagtggcctgcgtttacccatttatgacacaggctgtgacgaagggtgcgggtgcccagcaggtggaggagacgcttgggcaggaatggggaggggcgcggagctcccgggccctcctgggaaccacctccaggcacctgcgtgggttccgctaccggaagctc

SEQ ID NO: 77086 - DNA, 30 bp, Homo sapiens; identical to SEQ ID NO: 22959
  chr8:145232213-145232243
  hypo

SEQ ID NO: 77087 - DNA, 30 bp, Homo sapiens; identical to SEQ ID NO: 22960
  chr8:145234253-145234283
  hypo

SEQ ID NO: 77088 - DNA, 30 bp, Homo sapiens
  chr8:145234936-145234966
  hypo
gaggaggctgtgcccgccaccttccctgac

SEQ ID NO: 77089 - DNA, 237 bp, Homo sapiens
  chr8:145235188-145235425
  hypo
accctgccacactgcgccgtgctgcacaccctcgccagcctctcggtggccaacggtaggtgacgcgcggcctgccccaggaggagcacggggcgctggaagccttggcggaggcctttgacggtgtcctctctcacagcgttcggcgtagtccccttcctgccatccgtcctgagctccctgctgcccgtgctgggcgtggccaagcaggacacggtgcgcgtggccttctgctcc

SEQ ID NO: 77090 - DNA, 30 bp, Homo sapiens; identical to SEQ ID NO: 22962
  chr8:145236061-145236091
  hypo

SEQ ID NO: 77091 - DNA, 30 bp, Homo sapiens
  chr8:145239301-145239331
  hypo
tcacaaagcacacacgtcagcacacaaaaa

SEQ ID NO: 77092 - DNA, 30 bp, Homo sapiens
  chr8:145255089-145255119
  hypo
caagatctaagtcccggcatgctcgggtgg

SEQ ID NO: 77093 - DNA, 30 bp, Homo sapiens; identical to SEQ ID NO: 22963
  chr8:145661366-145661396
  hypo

SEQ ID NO: 77094 - DNA, 30 bp, Homo sapiens
  chr8:145661871-145661901
  hypo
ccgaaatcagggcccggggactctcagcgt

SEQ ID NO: 77095 - DNA, 30 bp, Homo sapiens
  chr8:145662256-145662286
  hypo
tgggtcgtccactgcggccccgtggtccag

SEQ ID NO: 77096 - DNA, 30 bp, Homo sapiens
  chr8:145667749-145667779
  hypo
caggttgtagcgggcgcggaataggtcctc

SEQ ID NO: 77097 - DNA, 30 bp, Homo sapiens
  chr8:145668576-145668606
  hypo
agcaaagcatccctcgactggcagtggtca

SEQ ID NO: 77098 - DNA, 30 bp, Homo sapiens
  chr8:145678748-145678778
  hypo
cgacaattggggcacgtggcctgctcctcc

SEQ ID NO: 77099 - DNA, 68 bp, Homo sapiens
  chr8:145679620-145679688
  hypo
aacataagcctcgagcgtccacttggtgccactgagagacacatggcaagctgcggtcccagcccgtg

SEQ ID NO: 77100 - DNA, 65 bp, Homo sapiens
  chr8:145680954-145681019
  hypo
aggtatgccactccacgtggccagctctaaacacctcctggtgagactgccgggggccttggacg

SEQ ID NO: 77101 - DNA, 30 bp, Homo sapiens
  chr8:145684582-145684612
  hypo
ggccacactgccctcgggccgcagagcagg

SEQ ID NO: 77102 - DNA, 30 bp, Homo sapiens
  chr8:145695747-145695777
  hypo
gtcctctggacagccgtcctggacagggtc

SEQ ID NO: 77103 - DNA, 238 bp, Homo sapiens; identical to SEQ ID NO: 45952
  chr8:145697348-145697586
  hypo

SEQ ID NO: 77104 - DNA, 124 bp, Homo sapiens; identical to SEQ ID NO: 6654
  chr8:145697858-145697982
  hypo

SEQ ID NO: 77105 - DNA, 31 bp, Homo sapiens
  chr8:145706678-145706709
  hypo
cccaggcaatagtgatcgctttctattactg

SEQ ID NO: 77106 - DNA, 31 bp, Homo sapiens
  chr8:145709415-145709446
  hypo
cttactgtgtcacctgcgccctaggttggtt

SEQ ID NO: 77107 - DNA, 31 bp, Homo sapiens
  chr8:145715362-145715393
  hypo
atctgcctggctccctcggtccttcacaaag

SEQ ID NO: 77108 - DNA, 39 bp, Homo sapiens
  chr8:145719388-145719427
  hypo
tgagaaacaagacaggcgttccgtcgggagtgtggctgc

SEQ ID NO: 77109 - DNA, 130 bp, Homo sapiens
  chr8:145721881-145722011
  hypo
cactgcggccggcccgcctgtgcccttggtgccctggctgcctagagagcctcacccctgggccctggggccaggactccaggactctgactacctgccctcccccagcctcagcggctgcacctcctcg

SEQ ID NO: 77110 - DNA, 30 bp, Homo sapiens; identical to SEQ ID NO: 22968
  chr8:145723477-145723507
  hypo

SEQ ID NO: 77111 - DNA, 31 bp, Homo sapiens
  chr8:145728371-145728402
  hypo
ctcccttgccagggggcgggcaggggctggc

SEQ ID NO: 77112 - DNA, 30 bp, Homo sapiens; identical to SEQ ID NO: 6656
  chr8:145733644-145733674
  hypo

SEQ ID NO: 77113 - DNA, 212 bp, Homo sapiens
  chr8:145736699-145736911
  hypo
cattttggagcctcctcgttcccacaccctgtggcaggttttgcccaggtcctcagtcactgccctagcctctgacaaccccagctctacccgacatcccccaatgcagtgcagtcagcgggccacctgcaggagctcttccgtggccaggcccaccagggcatggaagctcaggtgcaggtattttctccagaagcgtcggtcctgcccgt

SEQ ID NO: 77114 - DNA, 30 bp, Homo sapiens
  chr8:145737563-145737593
  hypo
gggcctggcgctcccgggcctgcacacggc

SEQ ID NO: 77115 - DNA, 819 bp, Homo sapiens
  chr8:145737999-145738818
  hypo
ctccaactgggcagggcgtgcttacctgtgggccagggcctggagctgggcagggcccccagggcagttcagacggcaatgggtataggtggtcgccagcagctccagccagtggtgtgggtgcagctccaggtagcacagcaaagtctcgatggctgggggcagagcagggctcagcggacgcggggacagcccctccacacccctgtggcttaccccaggttcctcaccctcctccggcatgtccaaagcctgtacggtaagctgtattgggagtgcccgctcatggcccatgcagacccttctgggtcctggggctgcttggtggctaagctgctcagcctcttgaggggggtacttgggcacaggcctctccccacccacggccccttcctgctccgagggcggcctggtgcaggtgcaggtgcaggctgggaacacgcgctgtaccagcctcttcacagccaggaagtccgtgctgtcggcgtgcacatgtctgcgcagctctcgcaggtcttcgccctgcagggcaactttcatgagggtggggtggaccactgggggctcgagcactggcagtgtggggggggggggtgccaacctggggctgcaggaagaggtggcagtgggcaggctgcccgtcacgcccggcccggcccacggcctgcacgtagctctcgaagcttgggggcagccccagatgcagcacagcccgcacatctggccggtccagccccatcccaaaggccaccgtggccaccaccacccggcaactggccctgcatgaaggctcgctgtacccgccgccgttcccggctg

SEQ ID NO: 77116 - DNA, 137 bp, Homo sapiens
  chr8:145739823-145739960
  hypo
accttctgcaggacagattcccgttgcttcctggtcatgcccgagtgtatgcaggccgccttgagacacggtggcaggccagacacctgcaaatgcaggagcgacagccgtcatacgccagcccagccctggccctt

SEQ ID NO: 77117 - DNA, 241 bp, Homo sapiens
  chr8:145740330-145740571
  hypo
tgagtgacagcaggggagagacgaccaacgtgaggcaggggctgcgccggctgtagagcagcgctgggagctggtagcacagggacttgccggcacctgtaggcagcaccagcagcgtggagatgcctggatggggcgggagtcagcagcagggttctgcagcctggcctcagcccagcctcagccctggcagccacgctcaccagacaggatccgcatgactgcacgctcctgcccaggg

SEQ ID NO: 77118 - DNA, 30 bp, Homo sapiens
  chr8:145741976-145742006
  hypo
gcagatgctggagccggcctggccttggct

SEQ ID NO: 77119 - DNA, 30 bp, Homo sapiens
  chr8:145745869-145745899
  hypo
tgcggctctgctgccgggacctgcgagctg

SEQ ID NO: 77120 - DNA, 31 bp, Homo sapiens; identical to SEQ ID NO: 22973
  chr8:145746134-145746165
  hypo

SEQ ID NO: 77121 - DNA, 30 bp, Homo sapiens
  chr8:145746818-145746848
  hypo
cggacatctacgggcgactggctgcggact

SEQ ID NO: 77122 - DNA, 31 bp, Homo sapiens
  chr8:145751952-145751983
  hypo
atccgctgggcaggggcggggtgtcacacgc

SEQ ID NO: 77123 - DNA, 278 bp, Homo sapiens
  chr8:145753289-145753567
  hypo
tcctgagcgcaggacgcccactccttggtgcgctgggcccgtcggcagagtcggggagcccatcaggggctgcccggaagggagaaagaaggggctggagagggaggcacagcattacctttgaagcaggtgatgaaattcttcattttggaatcatccaggaaaagctgcagatagagggccaggccgtgataagtcccagcgtgcaggtgggggcggggaagctcaggaggtcctgaagctcgggaggtcctgaaccggcccgagcccacttttcc

SEQ ID NO: 77124 - DNA, 179 bp, Homo sapiens
  chr8:145758486-145758665
  hypo
ggcgcccggggttgccgtggcacctgaagatgccctctgtctggtcaccgttgagcgccagcacctcctcagagagccgtgtctgcacccagggcagctggcgctcggggtagcgctctctctgcatgcccatgacctcctgcagtgcgctgccgaacatggacgggctgaacacggcg

SEQ ID NO: 77125 - DNA, 58 bp, Homo sapiens; identical to SEQ ID NO: 22976
  chr8:145763000-145763058
  hypo

SEQ ID NO: 77126 - DNA, 403 bp, Homo sapiens
  chr8:145770757-145771160
  hypo
tccaggcggaagttctcggtggtctgccggcacagctggatgtagagctcgtcccgcaggccctgcacgctccagcccttggtggccacctccagggccacgtgcagtgggtcggccttggcccgccggtcacccatgtacatctggatcagcttgaagagctcgcaggcctccttcttcacgtgccggtcgcttgtcacgatcatgggcttcttgatggactcgctgctccaggccagcatgttggcgatggacaccttccgccggaagaggccctgcgtgtgcttgttgaagtgcttggaggcccagttctcgatgtccgtctccgaggagggcttgcgcagcgtgaaagtggggaagacgcagctggagctgggaacgccgctgcggctctgccggctgc

SEQ ID NO: 77127 - DNA, 567 bp, Homo sapiens
  chr8:145772640-145773207
  hypo
gccagcgcctcgtcctcgctgaaggcccgcaccaccggcccgggcatgggcagtggcagggcgccgtcgctctcgtagccagagccgtcctgctgggagtcccagctgctcctctgcttcatgtggaagtgggcctgctgcgcctcccaggccagccgagcctgcgccaggaagggctcggccgcgccccgcgccccttcggcctcaccttccgctcgcttcacgggggcgaggctggtcccgcacgggggctgttcctcggccaggggctgctccacaagcaggtccccggggccctcagtgggggtggcgctggtggcttggcacaaagagggctttctgctcttccgcttgcgcgtgcccggggagtagcctgtggaggacagggtgtcctgctggctggaccaggacatggcatcctcctgggcctgtggcagcggcgtgggcggctggctgtgccgcagctcaggtccctccatggtgctgtagtctccggacttgacgcccaggcgctggtccctcagcaggcaggggctgggctgcaaggagtacgaaccaccgccgggg

SEQ ID NO: 77128 - DNA, 30 bp, Homo sapiens
  chr8:145773912-145773942
  hypo
gctgcttctgggcacgccccaccccctcgg

SEQ ID NO: 77129 - DNA, 31 bp, Homo sapiens
  chr8:145777265-145777296
  hypo
tcatagcccctcttcccgagcccagctcgtt

SEQ ID NO: 77130 - DNA, 36 bp, Homo sapiens
  chr8:145779198-145779234
  hypo
gggctgggccgcccaacgcagcggcaaggcctcttc

SEQ ID NO: 77131 - DNA, 31 bp, Homo sapiens
  chr8:145780239-145780270
  hypo
aatcgtctgtgcagaacgccagagccccctc

SEQ ID NO: 77132 - DNA, 122 bp, Homo sapiens
  chr8:145780879-145781001
  hypo
agcctggctcactgaggaagccgccctccatcacaaacggccacgcctgagagatgggttctacctgtagtgaagaagctggccgtccgcactgtaatcccggtaaatctcatagtccttct

SEQ ID NO: 77133 - DNA, 30 bp, Homo sapiens
  chr8:145785517-145785547
  hypo
atcaacaaatggcaaacttgccgggcacag

SEQ ID NO: 77134 - DNA, 30 bp, Homo sapiens
  chr8:145805562-145805592
  hypo
aggctgtgctccttcggagccactgtgact

SEQ ID NO: 77135 - DNA, 30 bp, Homo sapiens
  chr8:145807540-145807570
  hypo
ggcagaagggccagcggacaccaggcccag

SEQ ID NO: 77136 - DNA, 171 bp, Homo sapiens
  chr8:145811090-145811261
  hypo
ggcctcccgaggatgtcgctggttgtggcagtcggctgtacacaccatgctcttaaatctcaaccctcatgggcccctgcagggcccataatttaaatgagaaagagaatccaaggatcacacaaataaaaatggcaactgttgaaaggggctggacgggtgccctgcctt

SEQ ID NO: 77137 - DNA, 459 bp, Homo sapiens
  chr8:145813605-145814064
  hypo
caagacagagcagggccgccccgagggctcctgagcacgcatcctgcgtgagggaaccaggcaggggcctgcaggctgtgcgctgcattgaggctcatggaggcacaaaaccaacggtgatgccagaggctgactgcccggtggggcacatcatgagcctgcacctcctcgaacacttctctgcacacacgtatgttagctaacatgttttcagaggaagagaaatgtgcctcaccctatggggaggtggccctaagcctccctcagcagccaggaagagcagccgtatgcagcagggacagaactgtggggaccgcggagagcggcagactgggtgcgggaggcggggctctcgccaagccatctggagaaactcggcccagggcccgaaggggaaggtaagacccagtagggctggggacccagctggccacctgaagcccacggcctgtctccgtc

SEQ ID NO: 77138 - DNA, 282 bp, Homo sapiens
  chr8:145814543-145814825
  hypo
ggacacagaggctctgcgctgcctgtgccatttccacgtaaatctaagattgttctaaaataaaaagtttgcttaaaaaaagtaagtagtctccatattttaaaatgttaattttatactctataaattatataagtagcacagtcggcctcatttcggagccagcagctgctcctccatgcaggcgtgtcccggcagggcctaccctggggcagggagtcatggcccagaggggctcaggggacaggagcgcccagagcagggcagcgggaagcccctcct

SEQ ID NO: 77139 - DNA, 176 bp, Homo sapiens
  chr8:145815416-145815592
  hypo
gccaacaagggtctctcgcctgtcatcctgcagaacacaaggccagcttggtgggctcaccagggacaccacatggcacgtgggacagaggccagagaagccttcccgacagggcctgacagaagatgccatcgacactgcggttggggcagggccatctccggaagatgccattg

SEQ ID NO: 77140 - DNA, 291 bp, Homo sapiens
  chr8:145823325-145823616
  hypo
aaatggaagaaaaggccggaggagattcccagaggtggaaacctgagggctaagaacacacggagatgctcaaacccaccaggtaggaagccacgcagacccacccgccagcagggaaggagagtccggccagagtaggagctccgtggtggggaaggagcagcccggggaagtccagagggcgcccggcatggcctcgaaggctggacacctgcggggccctttccgcattgcgtgtaaaggggaaattcggaacccagccgtgggcctttccgcgttgagtgtaaaggg

SEQ ID NO: 77141 - DNA, 97 bp, Homo sapiens
  chr8:145826422-145826519
  hypo
tgtgtgcacatggaggcgtgcgtgcgagctcgtgtacctgtgtgcatgtgcgtggaggtgtgtgtgacctcatgtacctgtgtgtgcatggaggcgt

SEQ ID NO: 77142 - DNA, 37 bp, Homo sapiens
  chr8:145826578-145826615
  hypo
tgtgtgcatgtgcgtggaggtgcgtgtgcaagctcat

SEQ ID NO: 77143 - DNA, 31 bp, Homo sapiens
  chr8:145827337-145827368
  hypo
tacctgtgttcatgtgcgtggaggtgcgtgt

SEQ ID NO: 77144 - DNA, 307 bp, Homo sapiens
  chr8:145828363-145828670
  hypo
tacctgtgtgcatgtgcgtggaggtgtgtgtgcgagctcatgtatctgtgtgcgtgcgtggaggcgtgtgtgtgagctcgtgtacctgtgtgcgtgcgtggaggtgtgtgcgcgagctcatgtatctgtgtgcgtggaggcgtgtgtgtgctggtgtacctgtgtgcatgtgcgtggaggtgtgtgtgcgagctcatgtacctgtgtgtgtgcgtggaggcgtgtgtgtgctcatgtacctgtgtgtgtgcctggaggcgtgcgtgtgtgctcgtgtacctgtgtgcatgtgcgtggaggtgtgtgt

SEQ ID NO: 77145 - DNA, 31 bp, Homo sapiens
  chr8:145829405-145829436
  hypo
atgaagaacgaacaaacgaatgaacaaggag

SEQ ID NO: 77146 - DNA, 31 bp, Homo sapiens
  chr8:145830861-145830892
  hypo
agcagttccacccactcgtgaggcccgggca

SEQ ID NO: 77147 - DNA, 262 bp, Homo sapiens
  chr8:145831270-145831532
  hypo
tggccagccccacacgcagcagggaggctgtgcccaccagccaggatcccccccatgccagtctgagacaccagccccactccacgatgggccggggcaggcacaagccaagcatggggggaccgtgggaccgtaggactggaggactgggaggagggcgaacaggaggacacaggacctgctccgccctcactctcagccccacatctgagactcagtgtccccagctgtccacacaggcgacactcgccggcagtcactg

SEQ ID NO: 77148 - DNA, 79 bp, Homo sapiens
  chr8:145843551-145843630
  hypo
cctttcaagaacccctcgcctgcctgcatggcaaagcccacccgagcccagtgccccttgtccccgccctctcccagac

SEQ ID NO: 77149 - DNA, 65 bp, Homo sapiens
  chr8:145844222-145844287
  hypo
tggcgtgagcaggaccgcgggcgcacagccaccgtggcgggcacagttgcgcactggtgacagcg

SEQ ID NO: 77150 - DNA, 473 bp, Homo sapiens
  chr8:145844495-145844968
  hypo
ccccacctcacattgccggaaagttccagtcatgagtgggcaacaggcgcttgcttccaacgtcccacgccgaatctggaacagaggatgctctgtgccagctccagacagggtctgctgggaaagcaagcgcggaaacagcatctgcctgggctggcgacgcccgccatagaccagggtgccagaggcccctcgctccgagaagcgcgggtccccatccccgctccagggccggcacgcagcatgcatgtgggcctgtgtgtcccagagggagagtgtgtgcccatgtgcgtgtgcgcccgtgtgcgtgagcccgtgtgtccctgagacagcaggtatgctcgtgtgcgcgtgagctcgtgtgtccctgagagaccgtttgtgtgagcctctgtgtccctgagaaagcgtgtgtgcctgtgtgcacgtgagcctgtgtccgagacagcgtgagtacccgtgtgtgtgtgaga

SEQ ID NO: 77151 - DNA, 667 bp, Homo sapiens
  chr8:145845208-145845875
  hypo
gagagtgtgtgtgcccatgtgcgagcttgtgtgtccgagagagcgtgagcccgtgtgagtgagcctgtacatccctgagagagcgtgtgtgcccgtgtgcgtgtgagcctgtgtccctgagagcatgtgtgcctgtgtgcgtgtgagcctgtgcatctgagagcgtgtgtgcccatgtgtgagcctgtgcgtccctgacagtgtgtgccggtgtttgtgtgcctgtgcgtccctgagagcgtgtctgtgtgtgcccgagtgtgcgttgagcctgtgtgtccctgagcatgtgtgcccgtgtgcgtgtgagcctgtgtgtccctgagagcgtgtgcccatgtgagcttgtgtgtccctgagagagcgtgtgtgcccgtgtgtgagcctgtgtccctgagaaagtgtgtgtgcccgtgtctgttagcctgtgtgtccaagggagcgtgtgtgcccgtgtctgttagcctgtgtgtccaagggagcgtgtgtgcccgtgtctgttagcctgtgtgtccaagggagcgtgtgtgcccgtgtctgttagcctgtgtgtccaagggagcgtgtgtgcccgtgtctgttagcctgtgtgtccaagggagcgtgtgtgcccgtgtctgttagcctgtgtgtccaagggagcgtgtgtgcccgtgtctgttagcct

SEQ ID NO: 77152 - DNA, 168 bp, Homo sapiens
  chr8:145849041-145849209
  hypo
ttgcaggtgtgcagaacgccgacccaagaaacggaaaacacagattcaccatccagggagtgtctctgaaactgaccacagagcagggcatgaagcaacgtctgggcaaatgtcagaggccgcagcacccaggcaggcctctgtcaaatgcaccgcccagaatcagga

SEQ ID NO: 77153 - DNA, 43 bp, Homo sapiens
  chr8:145849871-145849914
  hypo
ggctgcctctaacccgcacatctgcaccgacacggctgcacga

SEQ ID NO: 77154 - DNA, 153 bp, Homo sapiens
  chr8:145852007-145852160
  hypo
ctgcactgcagcaggcccagcaaaagccctgccaacaccaccagcatctcttcctgagtcctgacctccccacgtacaaggtggacccccacggcccgtctccaagaccaaggtctgccctcctaccggggacacgcccgcggctctgctggg

SEQ ID NO: 77155 - DNA, 31 bp, Homo sapiens
  chr8:145852645-145852676
  hypo
aagggggtccactggccgggcgcggtggctc

SEQ ID NO: 77156 - DNA, 70 bp, Homo sapiens
  chr8:145854281-145854351
  hypo
caccgaaatccagcttcgcattgccgcaccccatcacttttgcgcccgggaggacgcgtgcgattcttgt

SEQ ID NO: 77157 - DNA, 114 bp, Homo sapiens
  chr8:145854688-145854802
  hypo
gacccgcaggctctagcgggccgaaggcagagcacggccgtgagacctccagggctccaagagcagacccgcaggctccagcggggctgaggcggagcacggctgtgagacctc

SEQ ID NO: 77158 - DNA, 30 bp, Homo sapiens; identical to SEQ ID NO: 45964
  chr8:145910739-145910769
  hypo

SEQ ID NO: 77159 - DNA, 132 bp, Homo sapiens; identical to SEQ ID NO: 6661
  chr8:145911309-145911441
  hypo

SEQ ID NO: 77160 - DNA, 30 bp, Homo sapiens
  chr8:145955001-145955031
  hypo
tgagctaccgcacccggcctaagattcctt

SEQ ID NO: 77161 - DNA, 100 bp, Homo sapiens
  chr8:145978672-145978772
  hypo
aaaaaaaaaaaagactactactgactaaacttggcaaatgaaggagagaatggagtgaagaataaaaaggacatggtagggtaccgatatctattgtcaa

SEQ ID NO: 77162 - DNA, 189 bp, Homo sapiens
  chr8:145979451-145979640
  hypo
agatcagactgatacccggggacaaggggcaggaccctcttctttgggatccaaagagccaaagcagcctcccaagctcctcagaggcccccactgcgaaccaggccaagtgcagagagcctcacccagagaggccacgttcccatagttctccagcatcacatcccggtagagcgcccgctgctgggg

SEQ ID NO: 77163 - DNA, 17 bp, Homo sapiens
  chr8:146009536-146009553
  hypo
tacgtctccagaaaaaa

SEQ ID NO: 77164 - DNA, 30 bp, Homo sapiens; identical to SEQ ID NO: 22988
  chr8:146019250-146019280
  hypo

SEQ ID NO: 77165 - DNA, 254 bp, Homo sapiens
  chr8:146033023-146033277
  hypo
cttccggcagagcacgcagctggctgcccaccaccgcgtccacacccgcgagcggccctacgcatgcggcgagtgcggcaaggccttcagccgcagctcccggctgctgcagcaccagaagttccacaccggggagaagcccttcgcgtgcacagagtgcggcaaggcgttctgccgcaggttcaccctcaacgagcacggccgcatccacagcggggagcggccctaccggtgcctgcggtgtgggcagcgct

SEQ ID NO: 77166 - DNA, 30 bp, Homo sapiens
  chr8:146036431-146036461
  hypo
aggggcgttgccggccgtggaggtctctgg

SEQ ID NO: 77167 - DNA, 30 bp, Homo sapiens
  chr8:146037120-146037150
  hypo
gagacacggacagtacgctcagccaggtgc

SEQ ID NO: 77168 - DNA, 204 bp, Homo sapiens
  chr8:146046146-146046350
  hypo
catggtctgaaaccctcgtatgaaggaggagcttctcacagcctgctgctgccccagccacaagaaacacaggagcacaggtagggcccacggagtccttgaggcctgctacgaggggccagtaactacgtttacgccagcagccataagcacagggacacaggcagataccaccagcccgggaaggacgggtgcggtggctca

SEQ ID NO: 77169 - DNA, 185 bp, Homo sapiens; identical to SEQ ID NO: 45967
  chr8:146052021-146052206
  hypo

SEQ ID NO: 77170 - DNA, 20 bp, Homo sapiens
  chr8:146056880-146056900
  hypo
tcttagggccgggcgcggtg

SEQ ID NO: 77171 - DNA, 37 bp, Homo sapiens; identical to SEQ ID NO: 6662
  chr8:146078070-146078107
  hypo

SEQ ID NO: 77172 - DNA, 85 bp, Homo sapiens; identical to SEQ ID NO: 22992
  chr8:146105088-146105173
  hypo

SEQ ID NO: 77173 - DNA, 218 bp, Homo sapiens
  chr8:146176521-146176739
  hypo
ccagaatcggaacagacggtagtttgataaaaacctaaggatacgttttttggaagaactgaatcattcaatcagtaagtgattagatagataaatggaagaattcagattccttcagtagataacatgttttcgtgagattgtgcatggatcgtttctaatacggaaatgaattgtacacttggacataaagaatacaaataaggctgggtgcggtg

SEQ ID NO: 77174 - DNA, 83 bp, Homo sapiens; identical to SEQ ID NO: 6663
  chr9:113549-113632
  hypo

SEQ ID NO: 77175 - DNA, 401 bp, Homo sapiens; identical to SEQ ID NO: 45974
  chr9:113897-114298
  hypo

SEQ ID NO: 77176 - DNA, 83 bp, Homo sapiens; identical to SEQ ID NO: 22996
  chr9:173862-173945
  hypo

SEQ ID NO: 77177 - DNA, 23 bp, Homo sapiens
  chr9:174124-174147
  hypo
caacacagcgagactccatctca

SEQ ID NO: 77178 - DNA, 30 bp, Homo sapiens; identical to SEQ ID NO: 45976
  chr9:214597-214627
  hypo

SEQ ID NO: 77179 - DNA, 29 bp, Homo sapiens
  chr9:252237-252266
  hypo
gctgggattacaagcgtgagccaccgtgc

SEQ ID NO: 77180 - DNA, 19 bp, Homo sapiens
  chr9:265216-265235
  hypo
ccaccgtgcccggcctaaa

SEQ ID NO: 77181 - DNA, 22 bp, Homo sapiens
  chr9:280965-280987
  hypo
aaaaggggttgggcacggtggc

SEQ ID NO: 77182 - DNA, 1827 bp, Homo sapiens; identical to SEQ ID NO: 45979
  chr9:503915-505742
  hypo

SEQ ID NO: 77183 - DNA, 138 bp, Homo sapiens; identical to SEQ ID NO: 45980
  chr9:706972-707110
  hypo

SEQ ID NO: 77184 - DNA, 239 bp, Homo sapiens; identical to SEQ ID NO: 45981
  chr9:707165-707404
  hypo

SEQ ID NO: 77185 - DNA, 79 bp, Homo sapiens
  chr9:738241-738320
  hypo
gtctataaatagaagaactaacgaccacttggtgttttggcagaggttctgtctgaacaccctccagcacgagtggttc

SEQ ID NO: 77186 - DNA, 31 bp, Homo sapiens
  chr9:792361-792392
  hypo
aaggaaggcatggagccgccagggtgaacaa

SEQ ID NO: 77187 - DNA, 17 bp, Homo sapiens
  chr9:799202-799219
  hypo
ggcgtgagccaccgcgc

SEQ ID NO: 77188 - DNA, 582 bp, Homo sapiens; identical to SEQ ID NO: 6671
  chr9:841449-842031
  hypo

SEQ ID NO: 77189 - DNA, 30 bp, Homo sapiens; identical to SEQ ID NO: 6672
  chr9:842207-842237
  hypo

SEQ ID NO: 77190 - DNA, 137 bp, Homo sapiens; identical to SEQ ID NO: 6673
  chr9:842610-842747
  hypo

SEQ ID NO: 77191 - DNA, 74 bp, Homo sapiens; identical to SEQ ID NO: 46001
  chr9:1042426-1042500
  hypo

SEQ ID NO: 77192 - DNA, 369 bp, Homo sapiens; identical to SEQ ID NO: 46002
  chr9:1042615-1042984
  hypo

SEQ ID NO: 77193 - DNA, 30 bp, Homo sapiens; identical to SEQ ID NO: 6687
  chr9:1710358-1710388
  hypo

SEQ ID NO: 77194 - DNA, 30 bp, Homo sapiens; identical to SEQ ID NO: 6688
  chr9:1749159-1749189
  hypo

SEQ ID NO: 77195 - DNA, 457 bp, Homo sapiens
  chr9:2047358-2047815
  hypo
gccgcagccggccccggggcagccctcgcccgtcctccagctgcagcagaagcagagccgcatcagccccatccagaaaccgcaaggcctggaccccgtggaaattctgcaagagcgggaatacaggtaacgcaccccgccagcaaggggccccctgcggtgtgctagcacctgccgcccaagccgaggggggtgaggcgcctgcctccttggttggccaaactgtgattttcacccgtgcggtcggaaaactttcatccactcctggggccttcccggtgctgaggggaggcaccggggttttgaagatcaaaagccgacggggacttcctgtggacccgagagagtgatcatctcacactgcgactgtggaatacactgtccgtgtttgtgcttgtgcggttcggtgatgacggaggggctgggacgctgagtgtgttgcgctggcctgattttc

SEQ ID NO: 77196 - DNA, 125 bp, Homo sapiens
  chr9:2115833-2115958
  hypo
caagaccgagctcaccgcatcgggcagcagaacgaggtccgggtactgaggctctgtaccgtgaacagcgtggaggaaaagatcctcgcggccgcaaaatacaagctgaacgtggatcagaaagt

SEQ ID NO: 77197 - DNA, 232 bp, Homo sapiens
  chr9:2170355-2170587
  hypo
ggagccgggcggggacgagaacccaggtcttctgactctagtgttctttctactctaccgcaggtgtaacgtggagaaggtgcccagtaattctcagttggaaatagaaggaaacaggtcaggatctgtcttgtattcccctatctctaaatacaggtatccctcgttacgtgaaacagattgaatcatataatcggcctttggaagcaaatttcttcggtcacctcctgat

SEQ ID NO: 77198 - DNA, 99 bp, Homo sapiens
  chr9:2170836-2170935
  hypo
tcttggtttagaagcttaatgcgaagcacctgtagtgacttgatctcctgcgagacatgaagaagcgtgcatgttcacgctgtgtctgcattccagagt

SEQ ID NO: 77199 - DNA, 241 bp, Homo sapiens
  chr9:2178009-2178250
  hypo
ggtaatgaggaaaaaaaaaaacggttcccagatgaagcataacaaattaaatctcagtagtgtgtgtatataagccatgcatacaaggagttcaaactaccacttgcacagtggtatgtggctcttttccatctcgtactctatggtctcatggccacgtcgcggtgtctgttcacttccatgaagaggagaggttcttgtccaccaacacctgtgaaccgtaagaccagtgagtgccttt

SEQ ID NO: 77200 - DNA, 94 bp, Homo sapiens
  chr9:2272285-2272379
  hypo
agcaagaaacaaacacttgagaactaagttacactgctggaggaacgatgaacgtctccttactgccaattacgttaaccttcccaatgacttg

SEQ ID NO: 77201 - DNA, 313 bp, Homo sapiens
  chr9:2717323-2717636
  hypo
gcgcttcctaagagcgaggttgaccgacatttttattagcaataatctctgccttcttctgattacctagagatttaagaccacataatcatcctctacctcacagggtcaagggagtgggggaggaaatgggctaagaggttctaaatccctcctaacacttgcttcttccaaatcagcaagattagagcagtcaacagctgactgcgttcagaccctgcaggctgggctggcctgcccaggacctgagaaggggcagctccggtggcaatgtctgagcccctagctgtgctggtccgggctggcctctcta

SEQ ID NO: 77202 - DNA, 30 bp, Homo sapiens
  chr9:2717931-2717961
  hypo
gaccagtggaaggacgacctggcagaagag

SEQ ID NO: 77203 - DNA, 30 bp, Homo sapiens
  chr9:2718441-2718471
  hypo
gacatgcgcttctacggcccgcagcggcgc

SEQ ID NO: 77204 - DNA, 134 bp, Homo sapiens
  chr9:2718723-2718857
  hypo
cgcttcgcgcgcagcgccctcaacctggtggacctggtggccatcctgccgctctaccttcagctgctgctcgagtgcttcacgggcgagggccaccaacgcggccagacggtgggcagcgtgggtaaggtggg

SEQ ID NO: 77205 - DNA, 30 bp, Homo sapiens; identical to SEQ ID NO: 23011
  chr9:2726655-2726685
  hypo

SEQ ID NO: 77206 - DNA, 197 bp, Homo sapiens
  chr9:2876419-2876616
  hypo
cgggcatggtgctgccgtgggcgctcgggccttgggcgtctggctctgtctctgactccagacctcaaacagggaccgccttctctgtgctttctccgtgtctcctgtgcgccctggcctctgcgtcacagcccgcggctgggccgaatccttccagagtcccacaatgctattataacagccgggaatcatttgaa

SEQ ID NO: 77207 - DNA, 30 bp, Homo sapiens
  chr9:2933214-2933244
  hypo
cctgcacctaggagcgcccccggaacctgc

SEQ ID NO: 77208 - DNA, 228 bp, Homo sapiens; identical to SEQ ID NO: 23012
  chr9:2933764-2933992
  hypo

SEQ ID NO: 77209 - DNA, 32 bp, Homo sapiens
  chr9:3469784-3469816
  hypo
gcagtgagctgagatcgcgccactgcactcca

SEQ ID NO: 77210 - DNA, 1171 bp, Homo sapiens; identical to SEQ ID NO: 46018
  chr9:4299024-4300195
  hypo

SEQ ID NO: 77211 - DNA, 41 bp, Homo sapiens
  chr9:4622942-4622983
  hypo
acattcctctctggtccgagtatctacatttttgaaaaaag

SEQ ID NO: 77212 - DNA, 30 bp, Homo sapiens
  chr9:4711601-4711631
  hypo
taacgacttgtaagacggcttgtttcattt

SEQ ID NO: 77213 - DNA, 79 bp, Homo sapiens
  chr9:4714887-4714966
  hypo
gtctcgctgagttctacgtgtgggagctgagaatgaaaagactgaattcggccgggtgtggtggctcaagtctgtaatc

SEQ ID NO: 77214 - DNA, 31 bp, Homo sapiens
  chr9:4771251-4771282
  hypo
tgctatcttctttggccgggtgcagtggctc

SEQ ID NO: 77215 - DNA, 161 bp, Homo sapiens
  chr9:4804633-4804794
  hypo
ccgccggtgttgcccggtccaacgccccgatgcccctggcctgcatggctagtcaaagcggccggtggccggtgcgctggtggggaggacgatcggctgacgccagcgaggacacggtggcggccactgactcctgccggagcagcgaattggaagggatg

SEQ ID NO: 77216 - DNA, 209 bp, Homo sapiens
  chr9:4864400-4864609
  hypo
taagaggccatttgagtggaacgctttatcagtgtttggcatctaacaaaggccgagccacgtcactcctttactccagcaaatgaaagctgtccggttgtcagggtttgcccgggtgtggggctgccctccttcctggtcgcatttggcccgtacctgtcaggtaccctgagcacgggcctgggatcggcacctgttttaaaacatcc

SEQ ID NO: 77217 - DNA, 44 bp, Homo sapiens; identical to SEQ ID NO: 23015
  chr9:4987436-4987480
  hypo

SEQ ID NO: 77218 - DNA, 100 bp, Homo sapiens; identical to SEQ ID NO: 6694
  chr9:5022027-5022127
  hypo

SEQ ID NO: 77219 - DNA, 30 bp, Homo sapiens
  chr9:5040720-5040750
  hypo
ggtgggcccctgagcgggcgtccgggaccg

SEQ ID NO: 77220 - DNA, 30 bp, Homo sapiens
  chr9:5041298-5041328
  hypo
caagaagcacatcccgtgcagccagcacaa

SEQ ID NO: 77221 - DNA, 249 bp, Homo sapiens; identical to SEQ ID NO: 6695
  chr9:5054639-5054888
  hypo

SEQ ID NO: 77222 - DNA, 30 bp, Homo sapiens; identical to SEQ ID NO: 6696
  chr9:5064973-5065003
  hypo

SEQ ID NO: 77223 - DNA, 129 bp, Homo sapiens; identical to SEQ ID NO: 6697
  chr9:5069923-5070052
  hypo

SEQ ID NO: 77224 - DNA, 30 bp, Homo sapiens; identical to SEQ ID NO: 6698
  chr9:5072525-5072555
  hypo

SEQ ID NO: 77225 - DNA, 63 bp, Homo sapiens; identical to SEQ ID NO: 6699
  chr9:5073736-5073799
  hypo

SEQ ID NO: 77226 - DNA, 30 bp, Homo sapiens; identical to SEQ ID NO: 6700
  chr9:5078415-5078445
  hypo

SEQ ID NO: 77227 - DNA, 153 bp, Homo sapiens; identical to SEQ ID NO: 6701
  chr9:5080227-5080380
  hypo

SEQ ID NO: 77228 - DNA, 100 bp, Homo sapiens; identical to SEQ ID NO: 6702
  chr9:5081711-5081811
  hypo

SEQ ID NO: 77229 - DNA, 30 bp, Homo sapiens; identical to SEQ ID NO: 6703
  chr9:5090773-5090803
  hypo

SEQ ID NO: 77230 - DNA, 30 bp, Homo sapiens; identical to SEQ ID NO: 23026
  chr9:5111405-5111435
  hypo

SEQ ID NO: 77231 - DNA, 30 bp, Homo sapiens
  chr9:5113987-5114017
  hypo
gaggatgggcaggtcgtggatgtgaactgg

SEQ ID NO: 77232 - DNA, 5 bp, Homo sapiens
  chr9:5118123-5118128
  hypo
gcact

SEQ ID NO: 77233 - DNA, 30 bp, Homo sapiens; identical to SEQ ID NO: 6704
  chr9:5123003-5123033
  hypo

SEQ ID NO: 77234 - DNA, 42 bp, Homo sapiens
  chr9:5418575-5418617
  hypo
atggtcaccacagtgacggacttctgccggttcctgggcagc

SEQ ID NO: 77235 - DNA, 27 bp, Homo sapiens
  chr9:6077576-6077603
  hypo
ttaagactttcgggccgggtgtggtgg

SEQ ID NO: 77236 - DNA, 403 bp, Homo sapiens; identical to SEQ ID NO: 46033
  chr9:6412570-6412973
  hypo

SEQ ID NO: 77237 - DNA, 20 bp, Homo sapiens
  chr9:6423646-6423666
  hypo
ttttaaagaaaagtctcggc

SEQ ID NO: 77238 - DNA, 29 bp, Homo sapiens
  chr9:6462993-6463022
  hypo
tgagtgggccaggtgccgtggctcacgcc

SEQ ID NO: 77239 - DNA, 29 bp, Homo sapiens
  chr9:6463261-6463290
  hypo
caagagtgaaacttcgtctcaataaaaaa

SEQ ID NO: 77240 - DNA, 30 bp, Homo sapiens
  chr9:6549254-6549284
  hypo
gagaaacaaagcaggcgcagcctccactct

SEQ ID NO: 77241 - DNA, 30 bp, Homo sapiens; identical to SEQ ID NO: 6707
  chr9:6587038-6587068
  hypo

SEQ ID NO: 77242 - DNA, 81 bp, Homo sapiens
  chr9:6756347-6756428
  hypo
taaggatggttgggatcctgacgttacatgcacacatttggaaaattcccagttgagtatacgttagccaagttcagaatt

SEQ ID NO: 77243 - DNA, 25 bp, Homo sapiens
  chr9:6863517-6863542
  hypo
tgggcaccatggctcacggctgtaa

SEQ ID NO: 77244 - DNA, 54 bp, Homo sapiens; identical to SEQ ID NO: 23033
  chr9:6868490-6868544
  hypo

SEQ ID NO: 77245 - DNA, 38 bp, Homo sapiens; identical to SEQ ID NO: 23034
  chr9:6868603-6868641
  hypo

SEQ ID NO: 77246 - DNA, 143 bp, Homo sapiens
  chr9:6883914-6884057
  hypo
tgcagtaaaaaaaaccccatgcgtgtaatgacacacacaccagttaaactgggtggaaattttaaatctcggttttctgctaattatcttgaaatggaaaaaacttgcccattacacaacgcgcaccatgtctaggagattaa

SEQ ID NO: 77247 - DNA, 101 bp, Homo sapiens; identical to SEQ ID NO: 23035
  chr9:7028537-7028638
  hypo

SEQ ID NO: 77248 - DNA, 241 bp, Homo sapiens; identical to SEQ ID NO: 23036
  chr9:7028697-7028938
  hypo

SEQ ID NO: 77249 - DNA, 30 bp, Homo sapiens
  chr9:7032585-7032615
  hypo
ggctaaggaattcttcgtctatctcagaag

SEQ ID NO: 77250 - DNA, 96 bp, Homo sapiens
  chr9:7032960-7033056
  hypo
cccagaactggataacgtcttgaattcaatttcccaactgacaacagcattggcatttttctttttcgaagagctctgaagcggctttgtagatca

SEQ ID NO: 77251 - DNA, 30 bp, Homo sapiens; identical to SEQ ID NO: 6710
  chr9:7076080-7076110
  hypo

SEQ ID NO: 77252 - DNA, 31 bp, Homo sapiens; identical to SEQ ID NO: 23038
  chr9:7128644-7128675
  hypo

SEQ ID NO: 77253 - DNA, 134 bp, Homo sapiens
  chr9:7164554-7164688
  hypo
gtgtctttagaagggccgtgctaaacaggacacacccacccagctccacccgccgtgctgcaggtgctcctgttttcccttctctgctttattggcaagtcctaccggcttcaatcgcacgccatttgtcccct

SEQ ID NO: 77254 - DNA, 233 bp, Homo sapiens; identical to SEQ ID NO: 23040
  chr9:7172201-7172434
  hypo

SEQ ID NO: 77255 - DNA, 45 bp, Homo sapiens
  chr9:7392964-7393009
  hypo
gggattacaggtgtgagccaccacgcctggccagaaatcttggtt

SEQ ID NO: 77256 - DNA, 139 bp, Homo sapiens; identical to SEQ ID NO: 23041
  chr9:7785324-7785463
  hypo

SEQ ID NO: 77257 - DNA, 31 bp, Homo sapiens; identical to SEQ ID NO: 23042
  chr9:10964598-10964629
  hypo

SEQ ID NO: 77258 - DNA, 24 bp, Homo sapiens
  chr9:12725577-12725601
  hypo
caccgcgcccggcctccatcattt

SEQ ID NO: 77259 - DNA, 202 bp, Homo sapiens; identical to SEQ ID NO: 46048
  chr9:12776031-12776233
  hypo

SEQ ID NO: 77260 - DNA, 74 bp, Homo sapiens; identical to SEQ ID NO: 6717
  chr9:12776574-12776648
  hypo

SEQ ID NO: 77261 - DNA, 31 bp, Homo sapiens; identical to SEQ ID NO: 23044
  chr9:12910323-12910354
  hypo

SEQ ID NO: 77262 - DNA, 472 bp, Homo sapiens; identical to SEQ ID NO: 6719
  chr9:13279298-13279770
  hypo

SEQ ID NO: 77263 - DNA, 190 bp, Homo sapiens
  chr9:13323278-13323468
  hypo
ctggctgctgcccaaggagctcggcgagaccgcccatctgtccggtcctgctctccaccagctccttcgtcggactcagtctggatcttctcaacgcccagctcctggctccgagtcagggctctctggatgcacggtaacaccctcctcttctgggtaccctccctccgtctcatgttattatgagaga

SEQ ID NO: 77264 - DNA, 193 bp, Homo sapiens
  chr9:13753040-13753233
  hypo
ctccaactctgggacacgatgccagggcttccagcctcagacagttcacaaccacatctgtccatccgtgtctctccagcccaacctccctgggccgtgattttctagctactttcaccgagcacctggttgtaaagtgggtttttgtgccttgtgattttggactttttaaagcattcggtcttaagccagg

SEQ ID NO: 77265 - DNA, 22 bp, Homo sapiens
  chr9:14053523-14053545
  hypo
ctcggggcggggtgggaagtgt

SEQ ID NO: 77266 - DNA, 212 bp, Homo sapiens
  chr9:14232122-14232334
  hypo
gtagcgagggaaggagcgacaccatggctaggtaagaatgaaatgggttcatggatgttaggaagaaaaaaacgtatgccatggtgggcaagtcaatagtgtttgtgccttttctgcatggctgctttttctcatacaagagccacttctggacaataatgagaccccgtaaagcatctgcttagggattacgaccccgtcacactgggaat

SEQ ID NO: 77267 - DNA, 1596 bp, Homo sapiens; identical to SEQ ID NO: 46054
  chr9:14312997-14314593
  hypo

SEQ ID NO: 77268 - DNA, 1009 bp, Homo sapiens; identical to SEQ ID NO: 46055
  chr9:14314801-14315810
  hypo

SEQ ID NO: 77269 - DNA, 45 bp, Homo sapiens; identical to SEQ ID NO: 23048
  chr9:14316249-14316294
  hypo

SEQ ID NO: 77270 - DNA, 846 bp, Homo sapiens; identical to SEQ ID NO: 6723
  chr9:14322292-14323138
  hypo

SEQ ID NO: 77271 - DNA, 97 bp, Homo sapiens
  chr9:14355599-14355696
  hypo
tgtgtgtcctttgcagtcacacgggatcccatacttagaagtgccccacgttggcttaaataccctgcttgcctggccggctgcagtggctcacgcc

SEQ ID NO: 77272 - DNA, 31 bp, Homo sapiens; identical to SEQ ID NO: 23050
  chr9:14428822-14428853
  hypo

SEQ ID NO: 77273 - DNA, 43 bp, Homo sapiens
  chr9:14462633-14462676
  hypo
gtaagagaaacacaggactatcgaattcttatctctgggtttt

SEQ ID NO: 77274 - DNA, 207 bp, Homo sapiens; identical to SEQ ID NO: 23051
  chr9:14607838-14608045
  hypo

SEQ ID NO: 77275 - DNA, 181 bp, Homo sapiens
  chr9:14796911-14797092
  hypo
aagtttacaattgaataatatcgctcagaattttagaaaatgatgatttcgatgtgaggcgggagggggtgttgacccatatggaacacagtagagaactggtggacaaaaaagtaccaagataatgaaagaagtgggttgatttatttccctccgccacgcttagttacaagtttcagca

SEQ ID NO: 77276 - DNA, 133 bp, Homo sapiens
  chr9:14974058-14974191
  hypo
ctgtggatattacaaacatatcgcagggctgtgtacacccactgcggtatggggagtaacatcatcccccggatattacaaacaatatcgcaggggtgtgtatattccttgcgatataaagagtaacatcatc

SEQ ID NO: 77277 - DNA, 35 bp, Homo sapiens
  chr9:14979216-14979251
  hypo
atacacatacaagaggctaaccgttttcttttttc

SEQ ID NO: 77278 - DNA, 22 bp, Homo sapiens
  chr9:15200707-15200729
  hypo
agatgctctggctgggcgtggt

SEQ ID NO: 77279 - DNA, 297 bp, Homo sapiens; identical to SEQ ID NO: 46064
  chr9:15306648-15306945
  hypo

SEQ ID NO: 77280 - DNA, 134 bp, Homo sapiens; identical to SEQ ID NO: 46065
  chr9:15306998-15307132
  hypo

SEQ ID NO: 77281 - DNA, 30 bp, Homo sapiens; identical to SEQ ID NO: 46066
  chr9:15307361-15307391
  hypo

SEQ ID NO: 77282 - DNA, 31 bp, Homo sapiens
  chr9:15343233-15343264
  hypo
tttttttttttttttgcgaaggactttagct

SEQ ID NO: 77283 - DNA, 64 bp, Homo sapiens; identical to SEQ ID NO: 23054
  chr9:15527747-15527811
  hypo

SEQ ID NO: 77284 - DNA, 37 bp, Homo sapiens; identical to SEQ ID NO: 23055
  chr9:15533121-15533158
  hypo

SEQ ID NO: 77285 - DNA, 93 bp, Homo sapiens
  chr9:15618918-15619011
  hypo
tgggagctgcagactgccgctgtttctatttggccatcgtggcccctccccgccctgtccagtggtctttacgttactgctattgtaattgtt

SEQ ID NO: 77286 - DNA, 31 bp, Homo sapiens
  chr9:15701646-15701677
  hypo
ggctcactgcaacctccgcctctccggagta

SEQ ID NO: 77287 - DNA, 29 bp, Homo sapiens
  chr9:15810502-15810531
  hypo
tggggctcgggcatggcgggctgcaggtc

SEQ ID NO: 77288 - DNA, 28 bp, Homo sapiens
  chr9:15810710-15810738
  hypo
gcccacgcccacccggaactcgcgctgc

SEQ ID NO: 77289 - DNA, 207 bp, Homo sapiens; identical to SEQ ID NO: 23056
  chr9:16268703-16268910
  hypo

SEQ ID NO: 77290 - DNA, 34 bp, Homo sapiens; identical to SEQ ID NO: 23057
  chr9:16828976-16829010
  hypo

SEQ ID NO: 77291 - DNA, 857 bp, Homo sapiens; identical to SEQ ID NO: 46075
  chr9:16870343-16871200
  hypo

SEQ ID NO: 77292 - DNA, 411 bp, Homo sapiens; identical to SEQ ID NO: 46076
  chr9:16871417-16871828
  hypo

SEQ ID NO: 77293 - DNA, 37 bp, Homo sapiens; identical to SEQ ID NO: 23059
  chr9:16886661-16886698
  hypo

SEQ ID NO: 77294 - DNA, 30 bp, Homo sapiens; identical to SEQ ID NO: 46077
  chr9:16915005-16915035
  hypo

SEQ ID NO: 77295 - DNA, 43 bp, Homo sapiens
  chr9:17018076-17018119
  hypo
actgttcagtccagctcatagcgtgtggctgccagctcaccaa

SEQ ID NO: 77296 - DNA, 30 bp, Homo sapiens; identical to SEQ ID NO: 46078
  chr9:17135690-17135720
  hypo

SEQ ID NO: 77297 - DNA, 84 bp, Homo sapiens; identical to SEQ ID NO: 6732
  chr9:17578710-17578794
  hypo

SEQ ID NO: 77298 - DNA, 30 bp, Homo sapiens; identical to SEQ ID NO: 46080
  chr9:17579719-17579749
  hypo

SEQ ID NO: 77299 - DNA, 31 bp, Homo sapiens
  chr9:18527897-18527928
  hypo
tggagtcttgctctgtcgcccaggctggaat

SEQ ID NO: 77300 - DNA, 1126 bp, Homo sapiens
  chr9:18776737-18777863
  hypo
ccacctctttctctgtcccttcgggttcgctctccttccagggcccgggcggccatccacgaagcacagcccgcacatcgcggccgccaggaaggtctacatacagactcgcaggcagaggaagctgcacttcgtggtggggggcttcgcctacctgctccccaagacggcggtggtgctgcgctgcccggcgcgcagggtccgcaagcccctcatcacctgggagaaggacggccagcacctcatcagctcgacgcacgtcacggtggcccccttcggctatctcaagatccaccgcctcaagccctcggatgcaggcgtctacacctgctcagcgggcccggcccgggagcactttgtgattaagctcatcggaggcaaccgcaagctcgtggcccggcccttgagcccgagaagtgaggaagaggtgcttgcggggaggaagggcggcccgaaggaggccctgcagacccacaaacaccagaacgggatcttctccaacggcagcaaggcggagaagcggggcctggccgccaacccggggagccgctacgacgacctcgtctcccggctgctggagcagggcggctggcccggagagctgctggcctcgtgggaggcgcaggactctgcggaaaggaacacgacctcggaggaggacccgggtgcagagcaagtgctcctgcacctgcccttcaccatggtgaccgagcagcggcgcctggacgacatcctggggaacctctcccagcagcccgaggagctgcgcgacctctacagcaagcacctggtggcccagctggcccaggagatcttccgcagccacctggagcaccaggacacgctcctgaagccctcggagcgcaggacttccccagtgactctctcgcctcataaacacgtgtctggcttcagcagctccctgcggacctcctccaccggggacgccgggggaggctctcgaaggccacaccgcaagcccaccatcctgcgcaagatctcagcggcccagcagctctcagcctcggaggtggtcacccacctggggcagacggtggccctggccagcgggacactgagtgttcttctgcactgtgaggccatcggccacccaaggcctaccatc

SEQ ID NO: 77301 - DNA, 12 bp, Homo sapiens
  chr9:19111078-19111090
  hypo
ggagtctcgctc

SEQ ID NO: 77302 - DNA, 20 bp, Homo sapiens
  chr9:19111329-19111349
  hypo
gccaccgcacctgggcaatt

SEQ ID NO: 77303 - DNA, 20 bp, Homo sapiens
  chr9:19220868-19220888
  hypo
agtgactcaaattttttgct

SEQ ID NO: 77304 - DNA, 22 bp, Homo sapiens
  chr9:19223394-19223416
  hypo
ccagctatgggccgggcgcagt

SEQ ID NO: 77305 - DNA, 31 bp, Homo sapiens
  chr9:19289482-19289513
  hypo
ataaaaataatggcaacgactaacgtataaa

SEQ ID NO: 77306 - DNA, 31 bp, Homo sapiens; identical to SEQ ID NO: 23064
  chr9:19376712-19376743
  hypo

SEQ ID NO: 77307 - DNA, 18 bp, Homo sapiens
  chr9:19396542-19396560
  hypo
gcccgatgagaaagatta

SEQ ID NO: 77308 - DNA, 45 bp, Homo sapiens; identical to SEQ ID NO: 23066
  chr9:19431390-19431435
  hypo

SEQ ID NO: 77309 - DNA, 21 bp, Homo sapiens
  chr9:20514950-20514971
  hypo
ttttttttttttgagacggag

SEQ ID NO: 77310 - DNA, 963 bp, Homo sapiens; identical to SEQ ID NO: 46088
  chr9:20620403-20621366
  hypo

SEQ ID NO: 77311 - DNA, 746 bp, Homo sapiens; identical to SEQ ID NO: 46089
  chr9:20621626-20622372
  hypo

SEQ ID NO: 77312 - DNA, 387 bp, Homo sapiens; identical to SEQ ID NO: 46090
  chr9:21031411-21031798
  hypo

SEQ ID NO: 77313 - DNA, 31 bp, Homo sapiens; identical to SEQ ID NO: 46094
  chr9:21802621-21802652
  hypo

SEQ ID NO: 77314 - DNA, 30 bp, Homo sapiens; identical to SEQ ID NO: 6746
  chr9:21971105-21971135
  hypo

SEQ ID NO: 77315 - DNA, 30 bp, Homo sapiens; identical to SEQ ID NO: 46106
  chr9:22062118-22062148
  hypo

SEQ ID NO: 77316 - DNA, 1031 bp, Homo sapiens; identical to SEQ ID NO: 46107
  chr9:22446678-22447709
  hypo

SEQ ID NO: 77317 - DNA, 24 bp, Homo sapiens
  chr9:26848497-26848521
  hypo
agcgagactccatctcaaaaaaag

SEQ ID NO: 77318 - DNA, 24 bp, Homo sapiens
  chr9:26936834-26936858
  hypo
aggatttaaaaggctgatgcccgg

SEQ ID NO: 77319 - DNA, 24 bp, Homo sapiens
  chr9:26958047-26958071
  hypo
gtcgctttgtttgctttttaacaa

SEQ ID NO: 77320 - DNA, 226 bp, Homo sapiens; identical to SEQ ID NO: 23073
  chr9:27212708-27212934
  hypo

SEQ ID NO: 77321 - DNA, 168 bp, Homo sapiens; identical to SEQ ID NO: 23074
  chr9:27340152-27340320
  hypo

SEQ ID NO: 77322 - DNA, 567 bp, Homo sapiens; identical to SEQ ID NO: 46116
  chr9:27528536-27529103
  hypo

SEQ ID NO: 77323 - DNA, 764 bp, Homo sapiens; identical to SEQ ID NO: 6754
  chr9:27529157-27529921
  hypo

SEQ ID NO: 77324 - DNA, 19 bp, Homo sapiens
  chr9:27562908-27562927
  hypo
ccctaaagctcacttttat

SEQ ID NO: 77325 - DNA, 81 bp, Homo sapiens
  chr9:27610811-27610892
  hypo
ttcagtctggaacccgaatccgcacgtggcaaacggagcggaccattgtggagccggctgcggggcgagctgcggacacgg

SEQ ID NO: 77326 - DNA, 1369 bp, Homo sapiens; identical to SEQ ID NO: 46120
  chr9:29213120-29214489
  hypo

SEQ ID NO: 77327 - DNA, 28 bp, Homo sapiens
  chr9:29450348-29450376
  hypo
agtttcctaagatataaaatacggatta

SEQ ID NO: 77328 - DNA, 45 bp, Homo sapiens; identical to SEQ ID NO: 23080
  chr9:32481579-32481624
  hypo

SEQ ID NO: 77329 - DNA, 43 bp, Homo sapiens
  chr9:32516783-32516826
  hypo
ttgggtaccagacagtgggatcggcttctctcaatttggaaaa

SEQ ID NO: 77330 - DNA, 31 bp, Homo sapiens; identical to SEQ ID NO: 23081
  chr9:32547785-32547816
  hypo

SEQ ID NO: 77331 - DNA, 30 bp, Homo sapiens
  chr9:32567030-32567060
  hypo
tgcgcagcatctcccggcagctcctgcccg

SEQ ID NO: 77332 - DNA, 31 bp, Homo sapiens; identical to SEQ ID NO: 23082
  chr9:32956634-32956665
  hypo

SEQ ID NO: 77333 - DNA, 44 bp, Homo sapiens; identical to SEQ ID NO: 23083
  chr9:32999673-32999717
  hypo

SEQ ID NO: 77334 - DNA, 103 bp, Homo sapiens
  chr9:32999956-33000059
  hypo
aaaatataaaaataaaaataaaaggtaacaaagagtaggtgtctgggagcttaatggacagtcgaagaaaaacaatatagaacagtggcgaagatcaaggtct

SEQ ID NO: 77335 - DNA, 3 bp, Homo sapiens
  chr9:33000374-33000377
  hypo
aac

SEQ ID NO: 77336 - DNA, 174 bp, Homo sapiens
  chr9:33019797-33019971
  hypo
cttcagctttccagcggacggccaggatcctgccgctcactgtgagatccttcccaaccaccctttggtggggttcggcatctggagccagggacccatgggcaatttccacctctaagggggtcgggaaaggcacgctgagggtgaatatgtgcggccgcattcctggccctt

SEQ ID NO: 77337 - DNA, 33 bp, Homo sapiens
  chr9:33023516-33023549
  hypo
ggcctgacttacgtgatttttgtattacaaagc

SEQ ID NO: 77338 - DNA, 90 bp, Homo sapiens; identical to SEQ ID NO: 23085
  chr9:33077215-33077305
  hypo

SEQ ID NO: 77339 - DNA, 30 bp, Homo sapiens; identical to SEQ ID NO: 23086
  chr9:33077904-33077934
  hypo

SEQ ID NO: 77340 - DNA, 30 bp, Homo sapiens; identical to SEQ ID NO: 23087
  chr9:33078201-33078231
  hypo

SEQ ID NO: 77341 - DNA, 16 bp, Homo sapiens
  chr9:33078603-33078619
  hypo
tcgaaccactgcactc

SEQ ID NO: 77342 - DNA, 210 bp, Homo sapiens; identical to SEQ ID NO: 23088
  chr9:33136434-33136644
  hypo

SEQ ID NO: 77343 - DNA, 79 bp, Homo sapiens
  chr9:33299615-33299694
  hypo
tttgaagatgcagtgagccacgatcatgccactgcactcgagcctaaactttggtgacgcctgtaactttcacagaaag

SEQ ID NO: 77344 - DNA, 31 bp, Homo sapiens
  chr9:33409492-33409523
  hypo
agctccctccatgtaacgtgtcagaatttcc

SEQ ID NO: 77345 - DNA, 121 bp, Homo sapiens
  chr9:33411412-33411533
  hypo
tcgcaggccaagccccactttggggctcacctctcctgcatcaccctcactcattctccattttacagccatttttttcccctttttgagacggagtctcgctctgttgcccaggctggag

SEQ ID NO: 77346 - DNA, 26 bp, Homo sapiens
  chr9:33425059-33425085
  hypo
cgcccggccttccctcagtttcttga

SEQ ID NO: 77347 - DNA, 32 bp, Homo sapiens
  chr9:33438854-33438886
  hypo
gagccaccgtgcccggccgggagaagacacct

SEQ ID NO: 77348 - DNA, 696 bp, Homo sapiens
  chr9:33442276-33442972
  hypo
gctgggtgggggctgtactcacgtgaagactgcagagccccagcccgcaagggctgtaaaaaggcgggggccaaagtcccgggcagggttgacggcatagccggagttgaagcccatggaggtgccaatgaccaggaccaccaggcccacggtgaaggcctccaggcctcgggggacggggttgttgtaggggtcaacaatggccagcacacacacgataagggaggctgtgcctatgaactggggagtggggagaacagggtgagctgcagctccctccctttctctgacccctccttccatcccccgtcttccctctagctcttaaactcttgtcagcgcccgcccatgctcttctcctgaaagcaatggtgctagaatgtctgcgtgacaagaacccgctggagagccgcatgttttgtaagtacttgccaccatgttctgatgcgggttaccccacagattggagaaaccctgctacagtcgaggagtcctgtcccccaaccagcccatgagctaccaaggcaactcggtcccctccctgcgttcccctcacacgtccccagcccatacctggtcaaagaagccattgatcatatccaagtgtccagaggggtaggtagcaaagatgccggctgtgccattggggcccgaaacaaaaagctggttgtcggcgaagtgccagattgcatctgg

SEQ ID NO: 77349 - DNA, 154 bp, Homo sapiens
  chr9:33464212-33464366
  hypo
ctactcccccaggtcctcctacggtgcccccaacggctgctcatcacaggtatttttcaacactcccccccaccaagtggcaaaggtgacgaaagggacatcgcatttgcctcaactgggtggggcattaatcgcccaacctcagcccagaggc

SEQ ID NO: 77350 - DNA, 31 bp, Homo sapiens
  chr9:33466348-33466379
  hypo
gggcagcagtgaggaccgctcccgcagagtc

SEQ ID NO: 77351 - DNA, 33 bp, Homo sapiens; identical to SEQ ID NO: 23091
  chr9:33834157-33834190
  hypo

SEQ ID NO: 77352 - DNA, 30 bp, Homo sapiens; identical to SEQ ID NO: 23092
  chr9:34017624-34017654
  hypo

SEQ ID NO: 77353 - DNA, 20 bp, Homo sapiens
  chr9:34035212-34035232
  hypo
tcatacggctaggcgcggtg

SEQ ID NO: 77354 - DNA, 39 bp, Homo sapiens
  chr9:34046347-34046386
  hypo
ttagaagtaaaggcttcatgccgggcggggtggctcacg

SEQ ID NO: 77355 - DNA, 40 bp, Homo sapiens; identical to SEQ ID NO: 23093
  chr9:34050560-34050600
  hypo

SEQ ID NO: 77356 - DNA, 34 bp, Homo sapiens
  chr9:34062509-34062543
  hypo
caaaagagtaataacatgggccgggcgcggtggc

SEQ ID NO: 77357 - DNA, 31 bp, Homo sapiens
  chr9:34062782-34062813
  hypo
gcctaggcaacaagagcgaaactgggtctca

SEQ ID NO: 77358 - DNA, 1 bp, Homo sapiens
  chr9:34063202-34063203
  hypo
a

SEQ ID NO: 77359 - DNA, 30 bp, Homo sapiens
  chr9:34134601-34134631
  hypo
ggtgaggccttaggcgctggcgaagagctg

SEQ ID NO: 77360 - DNA, 44 bp, Homo sapiens
  chr9:34148341-34148385
  hypo
agaaaaaaaggcaggccgggcgtggtggctcacacctgtaatcc

SEQ ID NO: 77361 - DNA, 18 bp, Homo sapiens
  chr9:34162680-34162698
  hypo
tgccttggccttacctct

SEQ ID NO: 77362 - DNA, 167 bp, Homo sapiens; identical to SEQ ID NO: 23095
  chr9:34224347-34224514
  hypo

SEQ ID NO: 77363 - DNA, 41 bp, Homo sapiens
  chr9:34230331-34230372
  hypo
gattacaggcgtgagctgccgcacctggccaaatatagtta

SEQ ID NO: 77364 - DNA, 36 bp, Homo sapiens; identical to SEQ ID NO: 23096
  chr9:34276111-34276147
  hypo

SEQ ID NO: 77365 - DNA, 82 bp, Homo sapiens
  chr9:34316316-34316398
  hypo
aatagagcgagactctattaaaaaaaaaaaaaagttccattatgtctactgttttgcccaaggcaacgaagtgattaaaaga

SEQ ID NO: 77366 - DNA, 707 bp, Homo sapiens
  chr9:34318261-34318968
  hypo
taggctatagaagagtagaatcgtgtcgcggctcgagagcgagactcccgtcttggagccagcccagcccaacccagcccaacccagcttgacctagccctgacaggtccatcgtggtgcacgcaaaccacctcccagccacgcgctccctcctgctcctcagcgccttctgcctcctggcggtggccttggcgaccgaggtgaagaaacctgcagccacagcagctcctggcaccgcagagaagctgagccccaaggcagccacgctggccgaacacagcgccggcctggccttcagcctgtaccaggccatggccaaggaccaggcggtggagaacatcctggtgtcgcccgtggtggtggcctcgtcgttggggctcgtgtcgctgggcggcaaggcgaccacggcgtcggaggccaaggcagtgctgagtgccaagcagctgagcgacgaggaggtgcacgccggcgtgggcgagccgctgcgttcactcagcaactccaccgcgcgcaacgtgacctggaagctgtgcagtcgcctgtagggacccagctcagtgagtttcgctgatgacttcgtgcgcagcagcaagcagcactacaactgcgagcactccaagatcaatttccatgacaagcgcagtgcgctgcagtccatccacgagtgggccgtgcagaccaccgacggcaagctgcccaaggtcacc

SEQ ID NO: 77367 - DNA, 835 bp, Homo sapiens
  chr9:34372074-34372909
  hypo
gacgtctgagcccacgcacactcggtagctcagctctggcgctgcggcgcggccggcgggtggcttgtagggcgtgtcgtggtagcgcgcctgaagccgcagcgagcgctccgtgctgttccagcccaggtggaagggcactgagtcattgactttgatggcggccgcgcgcgaagatagccagtagcgctcgaggatgcccccaaacgcggcgtcggaggagtagacatcgctggtgacgaacggctggggctcctgctggccatccaggcggatgggccagtgttgcgtcctcatctcggcgccaccataccagtgggccgccgcgtcgcccaagaacatggcgtgctccacggcccggcccggcgctgcctcctcccagcgcacgcggtagcacatgaccgtgtccttgggccgcacagtctggatgaagaagtgcagcggcagcccgtcggccgtgagcgagcagcccagcagggcgccatcgcggctgcaggagtcaaggtccagcgcgccggagcggaaggccaggcggaagacctgctctcccttctgattgcggatggagaagccgccagctttcaggtccagcagctccgcgcgaagtcgctccgccttgcgtagggagacgctgtagtagcaccaggccaccaccgcggccagcacaagcagcagccccagaaccgcggagcccagcagcggcttcaggtctttggaaggcttgggcttggcaggtgagaagttgtcgggcaggaaggtgtacatagctgcggctgcgatggcctcggggttctgacgctatgcgtagcagccaggccggcggcggcgggggtag

SEQ ID NO: 77368 - DNA, 30 bp, Homo sapiens
  chr9:34401059-34401089
  hypo
ggatctcatctaaccggtagccgtccttca

SEQ ID NO: 77369 - DNA, 31 bp, Homo sapiens; identical to SEQ ID NO: 23100
  chr9:34583938-34583969
  hypo

SEQ ID NO: 77370 - DNA, 380 bp, Homo sapiens; identical to SEQ ID NO: 46140
  chr9:34591282-34591662
  hypo

SEQ ID NO: 77371 - DNA, 42 bp, Homo sapiens; identical to SEQ ID NO: 6765
  chr9:34646960-34647002
  hypo

SEQ ID NO: 77372 - DNA, 171 bp, Homo sapiens; identical to SEQ ID NO: 23102
  chr9:34971470-34971641
  hypo

SEQ ID NO: 77373 - DNA, 34 bp, Homo sapiens; identical to SEQ ID NO: 6768
  chr9:35072283-35072317
  hypo

SEQ ID NO: 77374 - DNA, 848 bp, Homo sapiens; identical to SEQ ID NO: 46149
  chr9:35161831-35162679
  hypo

SEQ ID NO: 77375 - DNA, 22 bp, Homo sapiens
  chr9:35177011-35177033
  hypo
cctgacctcaggtgatccaccc

SEQ ID NO: 77376 - DNA, 30 bp, Homo sapiens
  chr9:35560072-35560102
  hypo
cataccgtgtgtcccggcctctttgaagag

SEQ ID NO: 77377 - DNA, 30 bp, Homo sapiens; identical to SEQ ID NO: 23105
  chr9:35563519-35563549
  hypo

SEQ ID NO: 77378 - DNA, 74 bp, Homo sapiens; identical to SEQ ID NO: 23106
  chr9:35608229-35608303
  hypo

SEQ ID NO: 77379 - DNA, 105 bp, Homo sapiens; identical to SEQ ID NO: 23107
  chr9:35609215-35609320
  hypo

SEQ ID NO: 77380 - DNA, 30 bp, Homo sapiens
  chr9:35609838-35609868
  hypo
ccggctcttctccccgtgtaggggagcccc

SEQ ID NO: 77381 - DNA, 30 bp, Homo sapiens
  chr9:35666808-35666838
  hypo
cagctgctaaactccgctcccacagccaaa

SEQ ID NO: 77382 - DNA, 27 bp, Homo sapiens
  chr9:35670794-35670821
  hypo
tttttttttttgaaacagtctcgcttt

SEQ ID NO: 77383 - DNA, 457 bp, Homo sapiens; identical to SEQ ID NO: 46157
  chr9:35675837-35676294
  hypo

SEQ ID NO: 77384 - DNA, 31 bp, Homo sapiens; identical to SEQ ID NO: 23108
  chr9:35694371-35694402
  hypo

SEQ ID NO: 77385 - DNA, 31 bp, Homo sapiens; identical to SEQ ID NO: 6775
  chr9:35700411-35700442
  hypo

SEQ ID NO: 77386 - DNA, 30 bp, Homo sapiens; identical to SEQ ID NO: 23110
  chr9:35711673-35711703
  hypo

SEQ ID NO: 77387 - DNA, 352 bp, Homo sapiens
  chr9:35711910-35712262
  hypo
aagtcagggtcaaaggacaaccgagagggaggaaggagaggcctggcattctttgactcctacgttcccccaccccctaccgtcctcctaccgagtcactcaggagtcgcttgctggcatctccaactgccctcagggcattatccacatcgcgctggccaggtaggcagctgacacagcggttcagagcctgggtcactgctttagccacctggggtgagaaaggagacagggttgcccaagtgaaaagaatttgagagatcgcctccattcacgcgacatgggagatgactagctctactgcctctgaaagtgaaaaaagaaagggggcgttgtaggtgaacaggctgag

SEQ ID NO: 77388 - DNA, 30 bp, Homo sapiens; identical to SEQ ID NO: 23112
  chr9:35713223-35713253
  hypo

SEQ ID NO: 77389 - DNA, 30 bp, Homo sapiens; identical to SEQ ID NO: 23113
  chr9:35792942-35792972
  hypo

SEQ ID NO: 77390 - DNA, 30 bp, Homo sapiens; identical to SEQ ID NO: 23114
  chr9:35810229-35810259
  hypo

SEQ ID NO: 77391 - DNA, 77 bp, Homo sapiens; identical to SEQ ID NO: 6778
  chr9:35814745-35814822
  hypo

SEQ ID NO: 77392 - DNA, 309 bp, Homo sapiens
  chr9:35869774-35870083
  hypo
aggcagcagcaggatggagcccgccagcaggaagtcttcgctgaccgacgtgttgccgcatgccagcttcagcactgccaggatcttgcaggtgaagtgactgaccacgtggtggccacagaagggcagcctcatggagatgaccatctcagtcaccgacttgaggaggcagaggacccaggcagctcccatcagcagcacgcagagccggtggctcatgagcacgtggtacctgagtggctggcagatggccaggtagcggtcataggccgtgatggccagtagcaggcactccgtggagcccgtgga

SEQ ID NO: 77393 - DNA, 30 bp, Homo sapiens; identical to SEQ ID NO: 23116
  chr9:36035973-36036003
  hypo

SEQ ID NO: 77394 - DNA, 140 bp, Homo sapiens; identical to SEQ ID NO: 46165
  chr9:36257375-36257515
  hypo

SEQ ID NO: 77395 - DNA, 722 bp, Homo sapiens; identical to SEQ ID NO: 6783
  chr9:36257923-36258645
  hypo

SEQ ID NO: 77396 - DNA, 31 bp, Homo sapiens
  chr9:36274720-36274751
  hypo
ttttttttttttctcttgagacggagtctcg

SEQ ID NO: 77397 - DNA, 77 bp, Homo sapiens
  chr9:36303860-36303937
  hypo
ttcttcttgcctcccttagctggtccataatccttcatttcccgatcatagcacacttcatccgcctttgccatttc

SEQ ID NO: 77398 - DNA, 46 bp, Homo sapiens
  chr9:36318334-36318380
  hypo
tcactgaagagcaaatatatacgttgttggatgaggaagaaaaagt

SEQ ID NO: 77399 - DNA, 82 bp, Homo sapiens
  chr9:36320467-36320549
  hypo
agtttatctgcatcttgatatggggccacgagaataagcagctcgtccctcggtgtggtccgggagcactggcactaagcac

SEQ ID NO: 77400 - DNA, 121 bp, Homo sapiens
  chr9:36478390-36478511
  hypo
actccgtctcaaaaaaaaaaaaaaaaaaaagagagcgtttattaagcatacatccccagataaactgattttttttctggtagcaatagggagaaatcacttcgcaaaaatgtaagtattt

SEQ ID NO: 77401 - DNA, 30 bp, Homo sapiens; identical to SEQ ID NO: 23119
  chr9:36483383-36483413
  hypo

SEQ ID NO: 77402 - DNA, 18 bp, Homo sapiens
  chr9:36492511-36492529
  hypo
tgtaagaaaatactgaag

SEQ ID NO: 77403 - DNA, 31 bp, Homo sapiens; identical to SEQ ID NO: 23120
  chr9:36880260-36880291
  hypo

SEQ ID NO: 77404 - DNA, 1072 bp, Homo sapiens; identical to SEQ ID NO: 46172
  chr9:37025279-37026351
  hypo

SEQ ID NO: 77405 - DNA, 838 bp, Homo sapiens; identical to SEQ ID NO: 6789
  chr9:37026433-37027271
  hypo

SEQ ID NO: 77406 - DNA, 772 bp, Homo sapiens; identical to SEQ ID NO: 6790
  chr9:37027324-37028096
  hypo

SEQ ID NO: 77407 - DNA, 434 bp, Homo sapiens; identical to SEQ ID NO: 6794
  chr9:37035489-37035923
  hypo

SEQ ID NO: 77408 - DNA, 736 bp, Homo sapiens; identical to SEQ ID NO: 6795
  chr9:37036401-37037137
  hypo

SEQ ID NO: 77409 - DNA, 121 bp, Homo sapiens; identical to SEQ ID NO: 23126
  chr9:37118378-37118499
  hypo

SEQ ID NO: 77410 - DNA, 82 bp, Homo sapiens; identical to SEQ ID NO: 23127
  chr9:37118798-37118880
  hypo

SEQ ID NO: 77411 - DNA, 37 bp, Homo sapiens; identical to SEQ ID NO: 23128
  chr9:37119168-37119205
  hypo

SEQ ID NO: 77412 - DNA, 156 bp, Homo sapiens
  chr9:37119444-37119600
  hypo
gaaactccgtctcaggaaaaaaaaaaaaaaaaaaaaaaaaaaaaccataaagaaagaaaaaaattcactcgtagctgctacaagaagtgtaatggctcatgcctgtgatcccagtgctttgggagacagaggtgggaggatcgatacctttaagcc

SEQ ID NO: 77413 - DNA, 38 bp, Homo sapiens
  chr9:37122904-37122942
  hypo
acctgggggacagaacgagactccgtctcaagggggaa

SEQ ID NO: 77414 - DNA, 28 bp, Homo sapiens
  chr9:37216375-37216403
  hypo
catatgtttatcttggccatacgcggtg

SEQ ID NO: 77415 - DNA, 24 bp, Homo sapiens
  chr9:37227010-37227034
  hypo
gcgagactccgtctcaaaaaaaaa

SEQ ID NO: 77416 - DNA, 23 bp, Homo sapiens
  chr9:37289155-37289178
  hypo
tttttttctgaggtggagtctcg

SEQ ID NO: 77417 - DNA, 30 bp, Homo sapiens
  chr9:37340190-37340220
  hypo
cattaggagtaaatccgtggcgtggtaggc

SEQ ID NO: 77418 - DNA, 31 bp, Homo sapiens
  chr9:37377485-37377516
  hypo
aatggagccttgaggccgggtgcggtggctc

SEQ ID NO: 77419 - DNA, 43 bp, Homo sapiens
  chr9:37380692-37380735
  hypo
gaaaagaaaacttaatcattacgtcaccctaacaaatccccta

SEQ ID NO: 77420 - DNA, 491 bp, Homo sapiens
  chr9:37414523-37415014
  hypo
tctgggctggccaaggggtcccgactgggctctctgctaccctctgtggccagctgctcatgtctcttgtacgagagcatcagcttccagcagtcagacaaaagcccaggcagggccggggtgaaagccacactgcgccttgcctgctgcgcgtcatcggaaaatgttcgccccatctgggcttcagtttccatatctgtataatgggcttccagcatgtgccctgccccacccctcaccaagcacagaccagaggcagggccccctcagagaggagacagtcagtcagatgatctctattcaaacccagttctgctccttaccagctgtgtgaccgtgggcaagtccctccactgacctgagcctcagtttcttcgtctgtaacttggggttcctaaaatcaacttcactggcctttgtggggattaaacaaactcttgtgtgtggagtgcctggcacggatcactcactctcagcgcaagttcccttcc

SEQ ID NO: 77421 - DNA, 30 bp, Homo sapiens; identical to SEQ ID NO: 23133
  chr9:37428904-37428934
  hypo

SEQ ID NO: 77422 - DNA, 100 bp, Homo sapiens; identical to SEQ ID NO: 23134
  chr9:37432302-37432402
  hypo

SEQ ID NO: 77423 - DNA, 44 bp, Homo sapiens
  chr9:37467933-37467977
  hypo
aaaaaaaaaaaaaaaaaaagagcgggtctccttaatttttattt

SEQ ID NO: 77424 - DNA, 30 bp, Homo sapiens
  chr9:37647493-37647523
  hypo
cgagactccgtttcaaaaaaaaaaaaaaaa

SEQ ID NO: 77425 - DNA, 99 bp, Homo sapiens
  chr9:37778483-37778582
  hypo
ccagactcttgtctcgaggggaaaaaaaaaaaaaattatgtaacaaggaattagcctcaaaaccacatggctttggacgtgctaattcaacttttgtac

SEQ ID NO: 77426 - DNA, 83 bp, Homo sapiens; identical to SEQ ID NO: 23137
  chr9:37871178-37871261
  hypo

SEQ ID NO: 77427 - DNA, 30 bp, Homo sapiens; identical to SEQ ID NO: 23138
  chr9:37914846-37914876
  hypo

SEQ ID NO: 77428 - DNA, 31 bp, Homo sapiens
  chr9:37918142-37918173
  hypo
ggccagggatgacagtcgtcaaacttctagt

SEQ ID NO: 77429 - DNA, 31 bp, Homo sapiens
  chr9:37919798-37919829
  hypo
cagggcaggtctggtccgctcacagggtcct

SEQ ID NO: 77430 - DNA, 433 bp, Homo sapiens
  chr9:37935348-37935781
  hypo
aggttgtgttcggcctcggtggggcatacgcctttagtgccaggaggaaatgacgggcacacggcttgctctctggcagactgggaagtggtggggagttgttgaagggatggagggctgggatgtagagcactgctatggccacaggtgagcccctcatctctctgagcccgtctccttcagcgtaaagtgagttgctgtggggagtcagagagagctgactagggcttcagagtgtacaaaatcgtggtcctggaccacgattgcatttatgcctcacaacgatcctgagatgtaggaactattactctccccattgtacagatgcagaaatggaggccatacagctagtaagacgcagaatcgagatctgaaccagggagggattctggctccaggtggtctaccttcttagccacgatactctatgctt

SEQ ID NO: 77431 - DNA, 53 bp, Homo sapiens
  chr9:37948328-37948381
  hypo
gatgaggcatgctaggaacttcgtaccaccccggctcacagcagatgtgaaag

SEQ ID NO: 77432 - DNA, 89 bp, Homo sapiens
  chr9:37948877-37948966
  hypo
atgggtacccactgcccgcctgctgctgccgggtcctggggagagcacagtgaacaaaacccagtctcttttcacgggaagcttatgct

SEQ ID NO: 77433 - DNA, 31 bp, Homo sapiens
  chr9:37955882-37955913
  hypo
tgcttctccagggggacggcaggatccaccc

SEQ ID NO: 77434 - DNA, 31 bp, Homo sapiens; identical to SEQ ID NO: 23141
  chr9:37973846-37973877
  hypo

SEQ ID NO: 77435 - DNA, 302 bp, Homo sapiens
  chr9:37974529-37974831
  hypo
tggagtttgtcctgagcgcaggtggggaccaaggtgagtgctgagcgcagctcagcagctgcctcctgagcagggtcagggctccttacctgccagggctgggatggtgacccggttccactcccaaggctggtcgtactcatcggcgggcctgtcgtcatcctggggcagcttgctctcccgcagtcgggggctgactgtgctctccgagtctgagtcaacactttggccttcaggttcgtaaggggtgtcatataactggatacctttatgctgggaccggacactttcctgcctctgaa

SEQ ID NO: 77436 - DNA, 35 bp, Homo sapiens
  chr9:37985464-37985499
  hypo
ccagtgactgcctttgcgtgcggaggcctctaagc

SEQ ID NO: 77437 - DNA, 31 bp, Homo sapiens; identical to SEQ ID NO: 23143
  chr9:37985848-37985879
  hypo

SEQ ID NO: 77438 - DNA, 46 bp, Homo sapiens; identical to SEQ ID NO: 46184
  chr9:37998719-37998765
  hypo

SEQ ID NO: 77439 - DNA, 86 bp, Homo sapiens
  chr9:38005201-38005287
  hypo
ttgaggcttgggcttgggagacggcccctctttcggtgctttaaggtggccaggtacaattacacgcctataccctgaaagggaga

SEQ ID NO: 77440 - DNA, 185 bp, Homo sapiens
  chr9:38012922-38013107
  hypo
cccaccatctccccttcgaaaagcttcacgtcagctctgcaagcctcctggagcatctacgcactgatggctcatcctacccatatgcagccctgccatcaatcactggggtgacgccacaaagaattacacacaaataattttgagtcaaagggagcttcagcaaggatcgttacaaacagaaa

SEQ ID NO: 77441 - DNA, 97 bp, Homo sapiens
  chr9:38022308-38022405
  hypo
aaggcagcaggtgcacagatgcgacgcgtcgactgcatcgtaattcaacactcattattcacctggctaaaaatgcggtttggtgtgtgacacaggc

SEQ ID NO: 77442 - DNA, 22 bp, Homo sapiens
  chr9:38033454-38033476
  hypo
aagatcacttgagcccgcgagt

SEQ ID NO: 77443 - DNA, 81 bp, Homo sapiens
  chr9:38033535-38033616
  hypo
ttaatccaatgccctagttgaccaatcatttcggaagggcttggagagggtccacctgagtggtctcgttacactccccct

SEQ ID NO: 77444 - DNA, 208 bp, Homo sapiens
  chr9:38042760-38042968
  hypo
cgacctggcccagcctcgaagtcgaattcctgttaattctcactatccccaccaaatgtccgccccaggccaggccaggctctgggctttcccagactccctgcagtcacagagactcctcagacccatgactacccagctaagtctctggccatgctctaggagctgctcaaactcccccggtctgccagaccgcccacaaccccac

SEQ ID NO: 77445 - DNA, 1325 bp, Homo sapiens; identical to SEQ ID NO: 46185
  chr9:38067582-38068907
  hypo

SEQ ID NO: 77446 - DNA, 93 bp, Homo sapiens
  chr9:38075104-38075197
  hypo
tacatagtgaaataatttttacggtcaaattaagcaagttaacctatcatctcacatagtgacctttttgtgtgtgtggtaatgagaggtgac

SEQ ID NO: 77447 - DNA, 94 bp, Homo sapiens
  chr9:38131871-38131965
  hypo
aatggagcacttgtctcgcgccaggccctgttcttagttctccatacgtgtcatcttgtttgatgctcccaatagctcttcagagggagcctcg

SEQ ID NO: 77448 - DNA, 30 bp, Homo sapiens
  chr9:38284366-38284396
  hypo
tcagcacatcagcacgagtgcgcaggttgg

SEQ ID NO: 77449 - DNA, 179 bp, Homo sapiens
  chr9:38290208-38290387
  hypo
acccaagccagaggcccgcaagtagtccaagccttctcctctctttcacaccccatatccaatcatcccaggtcctgagtaccacacttcctgcctccgataattctgtccctgccaattaattacttagttcaggcttcatcctcttatcgggacctccatagcggccttcttattgg

SEQ ID NO: 77450 - DNA, 31 bp, Homo sapiens
  chr9:38425342-38425373
  hypo
catcctttggttaatacgaataatgctttga

SEQ ID NO: 77451 - DNA, 30 bp, Homo sapiens
  chr9:38638884-38638914
  hypo
gtgagccaccacacccggccagtcagatct

SEQ ID NO: 77452 - DNA, 37 bp, Homo sapiens
  chr9:38695224-38695261
  hypo
acccaatgctgctaggcatggcggctcacgcatgtaa

SEQ ID NO: 77453 - DNA, 37 bp, Homo sapiens
  chr9:38695500-38695537
  hypo
gacagagcaagactccgtctcaaaaacaacaacaaca

SEQ ID NO: 77454 - DNA, 31 bp, Homo sapiens
  chr9:38727292-38727323
  hypo
gcaagactccgtctcaaaataaataaataaa

SEQ ID NO: 77455 - DNA, 34 bp, Homo sapiens
  chr9:39020900-39020934
  hypo
caccgcggtcggcgtaaaatggggtttctaacca

SEQ ID NO: 77456 - DNA, 45 bp, Homo sapiens
  chr9:43617174-43617219
  hypo
gagtgatgtcacccacgtttctttctttttcttcttttttttttg

SEQ ID NO: 77457 - DNA, 59 bp, Homo sapiens; identical to SEQ ID NO: 46192
  chr9:66494098-66494157
  hypo

SEQ ID NO: 77458 - DNA, 30 bp, Homo sapiens; identical to SEQ ID NO: 6803
  chr9:68433449-68433479
  hypo

SEQ ID NO: 77459 - DNA, 30 bp, Homo sapiens
  chr9:71223868-71223898
  hypo
gcaagggcttggctccgagggggctgggag

SEQ ID NO: 77460 - DNA, 43 bp, Homo sapiens; identical to SEQ ID NO: 23147
  chr9:71454999-71455042
  hypo

SEQ ID NO: 77461 - DNA, 14 bp, Homo sapiens
  chr9:71575832-71575846
  hypo
aagcgtgtcaccgg

SEQ ID NO: 77462 - DNA, 11 bp, Homo sapiens
  chr9:71576122-71576133
  hypo
actccgtctca

SEQ ID NO: 77463 - DNA, 30 bp, Homo sapiens
  chr9:71605851-71605881
  hypo
acaggcatgagccaccgcgcctgggctaaa

SEQ ID NO: 77464 - DNA, 30 bp, Homo sapiens
  chr9:71606467-71606497
  hypo
tccctttgactcagccgtgctccctgatgt

SEQ ID NO: 77465 - DNA, 29 bp, Homo sapiens
  chr9:71608064-71608093
  hypo
cagactccgtctccaaaaaaaaaaaagtc

SEQ ID NO: 77466 - DNA, 83 bp, Homo sapiens
  chr9:71615752-71615835
  hypo
aaaggaaaatgccgccgaggaaagtgctgagatggaaaaggcttgatgggagcacaactttttttttttttttctttttttga

SEQ ID NO: 77467 - DNA, 36 bp, Homo sapiens
  chr9:71620575-71620611
  hypo
tgagccaccacacccggactttacagacaattttta

SEQ ID NO: 77468 - DNA, 30 bp, Homo sapiens
  chr9:71628891-71628921
  hypo
ggcggtgttttgagcggggtttccccatct

SEQ ID NO: 77469 - DNA, 18 bp, Homo sapiens
  chr9:71629491-71629509
  hypo
tttaaaactcatagaact

SEQ ID NO: 77470 - DNA, 36 bp, Homo sapiens
  chr9:71655283-71655319
  hypo
tatgtaaatatttatacgctgccgggcgcggtggct

SEQ ID NO: 77471 - DNA, 158 bp, Homo sapiens
  chr9:71669728-71669886
  hypo
agatgttaatcctcttgatggcaattgactaataccagaaaatgtcacgaagcgtgcattttggattcaatcatggaattgttgaggacaatcagccatcagactaaagcgatagaaatagtattggaaattgcagcgggagcactgaatggagaagg

SEQ ID NO: 77472 - DNA, 114 bp, Homo sapiens
  chr9:71734810-71734924
  hypo
tggcccaaccagttctgccatcgcagataggaacagaagacatatgaaaacctaacttcgacccccgcctgattccatctccaacctgaccaatcagcactccccacttctcaa

SEQ ID NO: 77473 - DNA, 43 bp, Homo sapiens; identical to SEQ ID NO: 46200
  chr9:71736562-71736605
  hypo

SEQ ID NO: 77474 - DNA, 104 bp, Homo sapiens
  chr9:71760274-71760378
  hypo
cattagttcttgaaggattagcggcctcaaagatttatgtgcggattaattggagtgtacattagatcgccgtgtttaaaaccgcagtcattcctgcaaatcat

SEQ ID NO: 77475 - DNA, 711 bp, Homo sapiens; identical to SEQ ID NO: 46202
  chr9:71788549-71789260
  hypo

SEQ ID NO: 77476 - DNA, 28 bp, Homo sapiens
  chr9:71800817-71800845
  hypo
tttggagacggagtctcggttgcgcctg

SEQ ID NO: 77477 - DNA, 36 bp, Homo sapiens
  chr9:71800964-71801000
  hypo
tgagccgccgcgcccggccaatgtagtggttttaag

SEQ ID NO: 77478 - DNA, 31 bp, Homo sapiens
  chr9:71836312-71836343
  hypo
cgcagccgcgagcacccgcactcacggagcc

SEQ ID NO: 77479 - DNA, 30 bp, Homo sapiens
  chr9:71863144-71863174
  hypo
ggcgaggcaggccacgggcaggaacaggag

SEQ ID NO: 77480 - DNA, 31 bp, Homo sapiens; identical to SEQ ID NO: 46204
  chr9:71881715-71881746
  hypo

SEQ ID NO: 77481 - DNA, 31 bp, Homo sapiens; identical to SEQ ID NO: 23151
  chr9:71884367-71884398
  hypo

SEQ ID NO: 77482 - DNA, 31 bp, Homo sapiens
  chr9:72271625-72271656
  hypo
actattcaagttacatcgcaatttaaaaaca

SEQ ID NO: 77483 - DNA, 29 bp, Homo sapiens
  chr9:72289028-72289057
  hypo
gagatcgcgctactgcactccagccttgg

SEQ ID NO: 77484 - DNA, 30 bp, Homo sapiens
  chr9:72333374-72333404
  hypo
ggagtctggaactggcgtccgcttcaggcg

SEQ ID NO: 77485 - DNA, 31 bp, Homo sapiens; identical to SEQ ID NO: 6811
  chr9:72374873-72374904
  hypo

SEQ ID NO: 77486 - DNA, 112 bp, Homo sapiens
  chr9:72832132-72832244
  hypo
ttagtgggtacaagatctacccgggacaggggaggcactacgccaggaccgacgggaaggttttcgagtttcttaatgcgaaatgcgagtcggcattcctttccaagaggaa

SEQ ID NO: 77487 - DNA, 179 bp, Homo sapiens; identical to SEQ ID NO: 46210
  chr9:72874087-72874266
  hypo

SEQ ID NO: 77488 - DNA, 1696 bp, Homo sapiens; identical to SEQ ID NO: 46212
  chr9:73027342-73029038
  hypo

SEQ ID NO: 77489 - DNA, 31 bp, Homo sapiens; identical to SEQ ID NO: 46214
  chr9:73035699-73035730
  hypo

SEQ ID NO: 77490 - DNA, 61 bp, Homo sapiens
  chr9:73152152-73152213
  hypo
tttgttggactcggcccgctccagacctgtcaggcgctccagggccgtggccatgcgcccg

SEQ ID NO: 77491 - DNA, 31 bp, Homo sapiens
  chr9:73220268-73220299
  hypo
aaagggtgaagtatgtcggagttaaataaga

SEQ ID NO: 77492 - DNA, 266 bp, Homo sapiens; identical to SEQ ID NO: 6813
  chr9:74061492-74061758
  hypo

SEQ ID NO: 77493 - DNA, 330 bp, Homo sapiens; identical to SEQ ID NO: 6814
  chr9:74061787-74062117
  hypo

SEQ ID NO: 77494 - DNA, 17 bp, Homo sapiens
  chr9:74249330-74249347
  hypo
ggcgtgagcccctccat

SEQ ID NO: 77495 - DNA, 39 bp, Homo sapiens
  chr9:74418834-74418873
  hypo
gagttggtcagtcaaccgggagtatgacttgaggatgct

SEQ ID NO: 77496 - DNA, 29 bp, Homo sapiens
  chr9:74507122-74507151
  hypo
ttcaggttttcaaagttgttccggctact

SEQ ID NO: 77497 - DNA, 31 bp, Homo sapiens; identical to SEQ ID NO: 23156
  chr9:74622982-74623013
  hypo

SEQ ID NO: 77498 - DNA, 198 bp, Homo sapiens; identical to SEQ ID NO: 46218
  chr9:74639981-74640179
  hypo

SEQ ID NO: 77499 - DNA, 155 bp, Homo sapiens
  chr9:74794875-74795030
  hypo
cattctgaattactggcggggggggttaggactgtaacatattaaattggggtgggaggggaggttcaactcataccaggtcttcaaggcagatttcaagtttttttaaaaatggccatccgggcgcggtggctcacacctgtaatcccagcact

SEQ ID NO: 77500 - DNA, 214 bp, Homo sapiens; identical to SEQ ID NO: 23157
  chr9:74853848-74854062
  hypo

SEQ ID NO: 77501 - DNA, 23 bp, Homo sapiens
  chr9:74909194-74909217
  hypo
aaaagttatgagcaagtggggcg

SEQ ID NO: 77502 - DNA, 163 bp, Homo sapiens
  chr9:75005075-75005238
  hypo
aagttgccctgaagaacgctggagaaactttggactcagagctggagcctcagtcgaagatgtccaatagctaaatagcaggagttctaaaaagacaaaacactcatgatagagacgaaggaattgtcaaagaaagagtatttccatagctacagggagatct

SEQ ID NO: 77503 - DNA, 25 bp, Homo sapiens
  chr9:75042116-75042141
  hypo
ttttttttttttgagacgacggagt

SEQ ID NO: 77504 - DNA, 98 bp, Homo sapiens
  chr9:75049395-75049493
  hypo
aggagaaatccatagacgctcaagtggcttccaggcatattacatggtttccattttttgaaatattaagatatatttttctaattttttttttcgag

SEQ ID NO: 77505 - DNA, 207 bp, Homo sapiens
  chr9:75083051-75083258
  hypo
agcatatccatagtgccggagaacctaggccagcttatctcagctacacactgtgtccagaactctcctgggaattatttaggtaattgtggcgagaccagactactgactcattgacccctctcttacgatgggttggttcctccttcggaagcatatccttggggcccttccctgtccactgatctcagtcgagaccatttaaaa

SEQ ID NO: 77506 - DNA, 27 bp, Homo sapiens
  chr9:75095638-75095665
  hypo
gagggagggctgcgagggctgccagca

SEQ ID NO: 77507 - DNA, 21 bp, Homo sapiens
  chr9:75118600-75118621
  hypo
agactccgtctcaaaaaaaaa

SEQ ID NO: 77508 - DNA, 31 bp, Homo sapiens; identical to SEQ ID NO: 23160
  chr9:75130857-75130888
  hypo

SEQ ID NO: 77509 - DNA, 101 bp, Homo sapiens
  chr9:75136041-75136142
  hypo
gtctcctcagaaggcccgcagtagcaccagcagcaccaaaggacttgttggaaacaccagttttctaggccgggcacagtggctcatgcctgtaatcccag

SEQ ID NO: 77510 - DNA, 31 bp, Homo sapiens; identical to SEQ ID NO: 23161
  chr9:75160821-75160852
  hypo

SEQ ID NO: 77511 - DNA, 27 bp, Homo sapiens
  chr9:75255822-75255849
  hypo
aggtgtgagccacggtgcctggccttt

SEQ ID NO: 77512 - DNA, 31 bp, Homo sapiens
  chr9:75256673-75256704
  hypo
ccactgtgttcactatcggaaataaaaatat

SEQ ID NO: 77513 - DNA, 30 bp, Homo sapiens
  chr9:75271101-75271131
  hypo
aagccatcactgctgcgcggcttcctgacc

SEQ ID NO: 77514 - DNA, 168 bp, Homo sapiens
  chr9:75429002-75429170
  hypo
aaacaggcatttaaaacgttgagttttctccacgttcagtagtttggtgggccacctcatgataccattctaaggaggcgaaggcttaagatttgatttttaaacagagacagagaaaggctgttccaaggcaacagatgggtacgggccaaccgagtaagcattttt

SEQ ID NO: 77515 - DNA, 27 bp, Homo sapiens
  chr9:75533857-75533884
  hypo
aaatggcttttttttttgagacgaagt

SEQ ID NO: 77516 - DNA, 27 bp, Homo sapiens
  chr9:75533943-75533970
  hypo
cctcccgggttcaagtgattctctggc

SEQ ID NO: 77517 - DNA, 156 bp, Homo sapiens
  chr9:75545773-75545929
  hypo
tccagcttggataatactcaccgccagcagcagacgatctctttcgattaaatcagccaacttgtataatagtcgccccctctcggaagcatccatagtacgccacggggatccaatctgaaaagcctgtcttgcggccttcactgccttgtcaac

SEQ ID NO: 77518 - DNA, 125 bp, Homo sapiens
  chr9:75580430-75580555
  hypo
acacaagcacacctatactcacgcaggctgggaccacgtaggcatgcctgttcacctaacctaacatgcacagatttgagacgtgagaagaaaccagagcgcccggagaaagcccacaaggacat

SEQ ID NO: 77519 - DNA, 26 bp, Homo sapiens
  chr9:75581592-75581618
  hypo
cctgagctaagcgcccggccattgac

SEQ ID NO: 77520 - DNA, 77 bp, Homo sapiens; identical to SEQ ID NO: 23162
  chr9:75715151-75715228
  hypo

SEQ ID NO: 77521 - DNA, 16 bp, Homo sapiens
  chr9:75715287-75715303
  hypo
taggtgtggatgcagg

SEQ ID NO: 77522 - DNA, 275 bp, Homo sapiens; identical to SEQ ID NO: 23164
  chr9:76089531-76089806
  hypo

SEQ ID NO: 77523 - DNA, 30 bp, Homo sapiens; identical to SEQ ID NO: 46221
  chr9:76736854-76736884
  hypo

SEQ ID NO: 77524 - DNA, 35 bp, Homo sapiens
  chr9:76744463-76744498
  hypo
ataaaaaggaacaaactaggccgggcgcggtggct

SEQ ID NO: 77525 - DNA, 649 bp, Homo sapiens; identical to SEQ ID NO: 46223
  chr9:77112691-77113340
  hypo

SEQ ID NO: 77526 - DNA, 150 bp, Homo sapiens; identical to SEQ ID NO: 6820
  chr9:77113558-77113708
  hypo

SEQ ID NO: 77527 - DNA, 481 bp, Homo sapiens; identical to SEQ ID NO: 6821
  chr9:77113805-77114286
  hypo

SEQ ID NO: 77528 - DNA, 58 bp, Homo sapiens
  chr9:77257379-77257437
  hypo
gaggtgcagaagcaccagcagcggctgcaggaacagcggcagcagcagagtggggagg

SEQ ID NO: 77529 - DNA, 33 bp, Homo sapiens
  chr9:77401359-77401392
  hypo
aactcaatactgcaggctgggcgcggtggctca

SEQ ID NO: 77530 - DNA, 18 bp, Homo sapiens
  chr9:77644235-77644253
  hypo
attctggggccgggcgcg

SEQ ID NO: 77531 - DNA, 31 bp, Homo sapiens; identical to SEQ ID NO: 23168
  chr9:77648110-77648141
  hypo

SEQ ID NO: 77532 - DNA, 32 bp, Homo sapiens
  chr9:78017958-78017990
  hypo
tctttttcttttttttgggggcgcgggggacg

SEQ ID NO: 77533 - DNA, 42 bp, Homo sapiens
  chr9:78550278-78550320
  hypo
ggccgatattcacatgtatacgtatgtaaggtatgcatatat

SEQ ID NO: 77534 - DNA, 167 bp, Homo sapiens
  chr9:78557001-78557168
  hypo
aagggccaggcaggagctcaccgggcatgcgccaaagcgtagcgcactcgttgcctgcccggagcagctgctaccaactgaggccggctgtcctcaggctgcggagctggctcggtgttgccaatttaaaaggacatgcaagtctcgacttttacatatcattttcc

SEQ ID NO: 77535 - DNA, 156 bp, Homo sapiens
  chr9:78682859-78683015
  hypo
tctgcctgcaggcatgggactcgctgtgctggagaagtggcagccgctgcaaacaattcgcactgcacagtcggaattgctttcaacgccaagatcggaggtatgggaaaccaactcacgtggatgtagaaatgcgccagttagctctttggctga

SEQ ID NO: 77536 - DNA, 136 bp, Homo sapiens; identical to SEQ ID NO: 23169
  chr9:78686690-78686826
  hypo

SEQ ID NO: 77537 - DNA, 42 bp, Homo sapiens; identical to SEQ ID NO: 23170
  chr9:78775007-78775049
  hypo

SEQ ID NO: 77538 - DNA, 40 bp, Homo sapiens; identical to SEQ ID NO: 23171
  chr9:78866883-78866923
  hypo

SEQ ID NO: 77539 - DNA, 24 bp, Homo sapiens
  chr9:78983257-78983281
  hypo
tgggcacagtggttcacgcctgta

SEQ ID NO: 77540 - DNA, 67 bp, Homo sapiens
  chr9:78989901-78989968
  hypo
gttcttggcccttttaggagacgcgcccacattctgaccctgggccgcactagtgttgtcactctac

SEQ ID NO: 77541 - DNA, 41 bp, Homo sapiens
  chr9:79012635-79012676
  hypo
gatcattttccaccaccgctcaatagcgttcaatggctcct

SEQ ID NO: 77542 - DNA, 41 bp, Homo sapiens
  chr9:79073373-79073414
  hypo
aggcgtgagccaccgcgcccggccagaattttttttaaaca

SEQ ID NO: 77543 - DNA, 181 bp, Homo sapiens
  chr9:79197273-79197454
  hypo
actcaaaagaaaatatcctgagatggctgcagtgaagggtgtgatggagaaagtgtccaggaatgaggctagagggaagcccaggacaccacaccaaagaggtagaatgattttctaaagaaacaaaggcatcgccgaaaggctcagggtgacatctctctgaagagagagccccttcaat

SEQ ID NO: 77544 - DNA, 79 bp, Homo sapiens
  chr9:79230961-79231040
  hypo
gcatgagccagcatgcccggcccctcagtgtttttttgaaatgagcaaatagctcttcgctttattaccctacttgcaa

SEQ ID NO: 77545 - DNA, 30 bp, Homo sapiens
  chr9:79375717-79375747
  hypo
cagactcgggccgggcgcggtgacctgtaa

SEQ ID NO: 77546 - DNA, 37 bp, Homo sapiens; identical to SEQ ID NO: 23172
  chr9:79448381-79448418
  hypo

SEQ ID NO: 77547 - DNA, 728 bp, Homo sapiens; identical to SEQ ID NO: 46237
  chr9:79520836-79521564
  hypo

SEQ ID NO: 77548 - DNA, 1868 bp, Homo sapiens; identical to SEQ ID NO: 46242
  chr9:79630544-79632412
  hypo

SEQ ID NO: 77549 - DNA, 2511 bp, Homo sapiens; identical to SEQ ID NO: 46243
  chr9:79632937-79635448
  hypo

SEQ ID NO: 77550 - DNA, 31 bp, Homo sapiens
  chr9:79651146-79651177
  hypo
gtaagaaggcaaaactcgaaattgactgtat

SEQ ID NO: 77551 - DNA, 30 bp, Homo sapiens
  chr9:79893264-79893294
  hypo
aggcgtgagccaccgcgcctggccacactt

SEQ ID NO: 77552 - DNA, 31 bp, Homo sapiens; identical to SEQ ID NO: 23176
  chr9:80015335-80015366
  hypo

SEQ ID NO: 77553 - DNA, 113 bp, Homo sapiens
  chr9:80064884-80064997
  hypo
aaagagaacatgaggaattggcggtagttcatggtaccggacagactggaagctggacctgggccgaaggacatttggaattctgggattccgtgggcttatgcatcctcagg

SEQ ID NO: 77554 - DNA, 209 bp, Homo sapiens
  chr9:80076051-80076260
  hypo
ctctcaccaggcccccgcggagggctgcagggggtggcatccgcgctgtgagtgctgcaaaacttggctgtccaaagtgagctcctcagaccagccacagcacaccagcatgggagcaagagagtttgctaacaatgcagaatctcggctcccaccccagataatgactctgaagctgcgccttagcaagatcccgggtagttcatttg

SEQ ID NO: 77555 - DNA, 31 bp, Homo sapiens
  chr9:80113570-80113601
  hypo
atggctcttgagagaacgccatccaatcagt

SEQ ID NO: 77556 - DNA, 91 bp, Homo sapiens; identical to SEQ ID NO: 23177
  chr9:80116553-80116644
  hypo

SEQ ID NO: 77557 - DNA, 206 bp, Homo sapiens
  chr9:80137039-80137245
  hypo
atatgctatttttattataaacaaagcctacgctttcaacctgttattaatacaatctgcatctctgattgtcttatccatcagaaggaaattacgctttctatgtagcaacagtaggagaaggcaggcaagaaggcgccattgatgagaccttgagagaatgcgctgcagcttcttcctctgcccccatccgcatctcagagctg

SEQ ID NO: 77558 - DNA, 31 bp, Homo sapiens
  chr9:80141356-80141387
  hypo
caagataaggtcataccggattagggtcgac

SEQ ID NO: 77559 - DNA, 30 bp, Homo sapiens
  chr9:80144062-80144092
  hypo
ttggtaaaccagcttcgtgaacccctttct

SEQ ID NO: 77560 - DNA, 17 bp, Homo sapiens
  chr9:80193189-80193206
  hypo
caaacaaaacaaaaaca

SEQ ID NO: 77561 - DNA, 22 bp, Homo sapiens
  chr9:80215543-80215565
  hypo
cagattagggccggacgcagtg

SEQ ID NO: 77562 - DNA, 31 bp, Homo sapiens; identical to SEQ ID NO: 23181
  chr9:80272559-80272590
  hypo

SEQ ID NO: 77563 - DNA, 31 bp, Homo sapiens; identical to SEQ ID NO: 23182
  chr9:80272888-80272919
  hypo

SEQ ID NO: 77564 - DNA, 38 bp, Homo sapiens; identical to SEQ ID NO: 23183
  chr9:80304149-80304187
  hypo

SEQ ID NO: 77565 - DNA, 35 bp, Homo sapiens; identical to SEQ ID NO: 23184
  chr9:80315385-80315420
  hypo

SEQ ID NO: 77566 - DNA, 42 bp, Homo sapiens; identical to SEQ ID NO: 23185
  chr9:80343171-80343213
  hypo

SEQ ID NO: 77567 - DNA, 43 bp, Homo sapiens; identical to SEQ ID NO: 23186
  chr9:80390583-80390626
  hypo

SEQ ID NO: 77568 - DNA, 21 bp, Homo sapiens
  chr9:80401003-80401024
  hypo
agttaacaagccaggcgcggt

SEQ ID NO: 77569 - DNA, 31 bp, Homo sapiens; identical to SEQ ID NO: 23187
  chr9:80475685-80475716
  hypo

SEQ ID NO: 77570 - DNA, 31 bp, Homo sapiens
  chr9:80488591-80488622
  hypo
cttctgggccaggcaacgaggggaagcaaga

SEQ ID NO: 77571 - DNA, 38 bp, Homo sapiens
  chr9:80501725-80501763
  hypo
ccaaaaaaataaaatacgcagccgggcacggtggctca

SEQ ID NO: 77572 - DNA, 22 bp, Homo sapiens
  chr9:80505318-80505340
  hypo
atatgagaattagaaacgtgtc

SEQ ID NO: 77573 - DNA, 90 bp, Homo sapiens; identical to SEQ ID NO: 23188
  chr9:80533773-80533863
  hypo

SEQ ID NO: 77574 - DNA, 30 bp, Homo sapiens; identical to SEQ ID NO: 23189
  chr9:80534762-80534792
  hypo

SEQ ID NO: 77575 - DNA, 28 bp, Homo sapiens
  chr9:80544457-80544485
  hypo
tgcaacaggctgggtgcggtggctcatg

SEQ ID NO: 77576 - DNA, 88 bp, Homo sapiens
  chr9:80544724-80544812
  hypo
gacaaagcaagaccctgtcacacacacaaaaatttttttttaaaacctgcaacaatactttattgttatttttcgcttaacatactat

SEQ ID NO: 77577 - DNA, 159 bp, Homo sapiens
  chr9:80546075-80546234
  hypo
atgcttgtaggacagcggtccctgtcctacaagcatctcaatgacattcattctgttccctctttttctcttccttacacaaccagcaggtccgcatttccatccctaagcattagacttttgctcactgccaatttatttaaagaactctcactgggt

SEQ ID NO: 77578 - DNA, 28 bp, Homo sapiens
  chr9:80555579-80555607
  hypo
tgtattttaaaatttgcaagtcggctgc

SEQ ID NO: 77579 - DNA, 31 bp, Homo sapiens
  chr9:80563223-80563254
  hypo
tccaaatcttgctcctcgcaggaacctcact

SEQ ID NO: 77580 - DNA, 89 bp, Homo sapiens
  chr9:80570362-80570451
  hypo
gtttactccttagtgaaatcatgaaagaaaataggaaagttatataactgcatttaagcactttttgtacataacgctatactttgtgt

SEQ ID NO: 77581 - DNA, 21 bp, Homo sapiens
  chr9:80582605-80582626
  hypo
ttcaggtctgctgggcgcggt

SEQ ID NO: 77582 - DNA, 80 bp, Homo sapiens
  chr9:80591581-80591661
  hypo
aggcgtgagccaacacgcccggcccaggcttgttttttaattctagacaatagttttaagcttttcgattagttggcaac

SEQ ID NO: 77583 - DNA, 30 bp, Homo sapiens; identical to SEQ ID NO: 23194
  chr9:80607204-80607234
  hypo

SEQ ID NO: 77584 - DNA, 31 bp, Homo sapiens
  chr9:80642698-80642729
  hypo
ttgcctgtttcaatagcgataattcaatcaa

SEQ ID NO: 77585 - DNA, 2103 bp, Homo sapiens; identical to SEQ ID NO: 46250
  chr9:80645541-80647644
  hypo

SEQ ID NO: 77586 - DNA, 337 bp, Homo sapiens
  chr9:80833877-80834214
  hypo
ctgattgcttcatctgctatgcgtctgtggggatccgcaaagatatgggatccagttagtctctggtgagtcgttaccttggccggatggggacatgttgcctgctgcacccccctcttcgcgctctctcatttcatttcctgcagtgtgccagcaggatggcccacaagccatctactactcggacaagtacttcgacgagcactacaagtaccggcatgttatgttacccagagaactttccaaacaagcacctgaaactcatctgatgtctgaagaggagtggaggagacttatgtccaatggcgtctaggccgggttcattacatgattcatg

SEQ ID NO: 77587 - DNA, 366 bp, Homo sapiens; identical to SEQ ID NO: 23197
  chr9:81892876-81893242
  hypo

SEQ ID NO: 77588 - DNA, 77 bp, Homo sapiens
  chr9:81897887-81897964
  hypo
ctcatgaatagaatcagtgcccgtataaaagagaccccaggctgggcgcggtggcaggcgactgtaatcccagcagt

SEQ ID NO: 77589 - DNA, 38 bp, Homo sapiens
  chr9:82082369-82082407
  hypo
gtctaatagtgacttgagggccgggcgtagtggctcac

SEQ ID NO: 77590 - DNA, 21 bp, Homo sapiens
  chr9:82115477-82115498
  hypo
ggccatcttggctcctcctaa

SEQ ID NO: 77591 - DNA, 1121 bp, Homo sapiens; identical to SEQ ID NO: 46253
  chr9:82185178-82186299
  hypo

SEQ ID NO: 77592 - DNA, 30 bp, Homo sapiens; identical to SEQ ID NO: 46254
  chr9:82188544-82188574
  hypo

SEQ ID NO: 77593 - DNA, 30 bp, Homo sapiens; identical to SEQ ID NO: 6844
  chr9:82839233-82839263
  hypo

SEQ ID NO: 77594 - DNA, 121 bp, Homo sapiens
  chr9:84130017-84130138
  hypo
cgcgcccggccccttttaactcttaaaatcacaggaacacttcctcagtttagaaaattttaactcaacatttgcagtgatttaatcatacaaggcctgccgggcacggtggctcacgcct

SEQ ID NO: 77595 - DNA, 31 bp, Homo sapiens
  chr9:84205670-84205701
  hypo
ccagctgctaaagaagcgaacccctccttag

SEQ ID NO: 77596 - DNA, 187 bp, Homo sapiens
  chr9:84220197-84220384
  hypo
cagtgagatgagtgcagtcatcgagagtgagcgacagcaacctgaggacttagggctgttgactcttgtaacaacaaaaaatggacttggatttggtatcttttccctcctattcatttgtattgtatgttacaaatgtacctatctttgacttacggggcggggcggggaactggtctgtcaccat

SEQ ID NO: 77597 - DNA, 35 bp, Homo sapiens
  chr9:84281395-84281430
  hypo
aaatatgcctgtgtagccaggcgcggtggctcaca

SEQ ID NO: 77598 - DNA, 31 bp, Homo sapiens
  chr9:84291856-84291887
  hypo
aacttacaaatttggccgggcatggtggctc

SEQ ID NO: 77599 - DNA, 152 bp, Homo sapiens
  chr9:84294997-84295149
  hypo
aggtgctgggttctgcgggtgtatgctgggatggctcccaccatgcgagggaacaaacagacttttgtctagtctaaccctcattatacagagaggggaactgaagccagggaacgtgttcatgacttgcccagtcccgaatggaaatcccc

SEQ ID NO: 77600 - DNA, 944 bp, Homo sapiens; identical to SEQ ID NO: 46256
  chr9:84302221-84303165
  hypo

SEQ ID NO: 77601 - DNA, 672 bp, Homo sapiens; identical to SEQ ID NO: 46257
  chr9:84303267-84303939
  hypo

SEQ ID NO: 77602 - DNA, 221 bp, Homo sapiens
  chr9:84441562-84441783
  hypo
agaggctgtgttgcgcggtggaattcattttcttgtttacttcctccagaaacaagagcatcatcagcacgctcagtgcatcggatcagaccgcggagttgttgacagaagcttggcgaggcctgccagctttccgcatgaaacgctggctttcttctcatacaccccctaccgtttgtgtctctgccaattgtagcacatcagagcggccattgagataa

SEQ ID NO: 77603 - DNA, 31 bp, Homo sapiens
  chr9:84456245-84456276
  hypo
atcagcatcatctgggcgcttgatggaaatg

SEQ ID NO: 77604 - DNA, 31 bp, Homo sapiens; identical to SEQ ID NO: 23202
  chr9:84460617-84460648
  hypo

SEQ ID NO: 77605 - DNA, 170 bp, Homo sapiens; identical to SEQ ID NO: 23203
  chr9:84530342-84530512
  hypo

SEQ ID NO: 77606 - DNA, 31 bp, Homo sapiens
  chr9:84640507-84640538
  hypo
ttctttttttgaccatcgcctagtctggagt

SEQ ID NO: 77607 - DNA, 31 bp, Homo sapiens
  chr9:85076174-85076205
  hypo
tcctttaaattatgcacgaaacaaacaaaaa

SEQ ID NO: 77608 - DNA, 31 bp, Homo sapiens
  chr9:85485585-85485616
  hypo
agtctgatgaaggggtcgagaaaaatgttgc

SEQ ID NO: 77609 - DNA, 100 bp, Homo sapiens
  chr9:85673369-85673469
  hypo
tacaggcgtgagccaccgcgcccggccgtatttatgtctttctttgcctctgtctctcctctcccttttctatcttgtcaagcaccgtttcatgtaaatt

SEQ ID NO: 77610 - DNA, 31 bp, Homo sapiens
  chr9:85683069-85683100
  hypo
agccgccatacctggtcgctgtttcatatta

SEQ ID NO: 77611 - DNA, 31 bp, Homo sapiens; identical to SEQ ID NO: 6848
  chr9:85834937-85834968
  hypo

SEQ ID NO: 77612 - DNA, 150 bp, Homo sapiens
  chr9:85843822-85843972
  hypo
gctgggagctgtagaccggagctgttcctattcggccatcttcatttcctcgctatttctaacgcatctgcagtgcttgtccccgctgaagtcttgaactcaaagtcattcaggatgattggaatccacgtcttccaaatttatgttaat

SEQ ID NO: 77613 - DNA, 31 bp, Homo sapiens
  chr9:85927653-85927684
  hypo
accactccccctccgccgccctgcgccccgc

SEQ ID NO: 77614 - DNA, 31 bp, Homo sapiens; identical to SEQ ID NO: 23206
  chr9:85944983-85945014
  hypo

SEQ ID NO: 77615 - DNA, 31 bp, Homo sapiens
  chr9:85948467-85948498
  hypo
ccaagtctggctgcaacgcctctcatgactc

SEQ ID NO: 77616 - DNA, 31 bp, Homo sapiens
  chr9:86036211-86036242
  hypo
accagactaaggcaatcgtgtatacagggtg

SEQ ID NO: 77617 - DNA, 68 bp, Homo sapiens; identical to SEQ ID NO: 46261
  chr9:86152303-86152371
  hypo

SEQ ID NO: 77618 - DNA, 1390 bp, Homo sapiens; identical to SEQ ID NO: 46262
  chr9:86152381-86153771
  hypo

SEQ ID NO: 77619 - DNA, 340 bp, Homo sapiens; identical to SEQ ID NO: 46263
  chr9:86238305-86238645
  hypo

SEQ ID NO: 77620 - DNA, 31 bp, Homo sapiens
  chr9:86518262-86518293
  hypo
atcaggactcccttctcgattgatctgggta

SEQ ID NO: 77621 - DNA, 25 bp, Homo sapiens
  chr9:86537485-86537510
  hypo
gcccggccctatcaggactttttag

SEQ ID NO: 77622 - DNA, 30 bp, Homo sapiens
  chr9:86590176-86590206
  hypo
ataaaattagtggatcgtttgggtgggcaa

SEQ ID NO: 77623 - DNA, 165 bp, Homo sapiens
  chr9:86590421-86590586
  hypo
tgcattggtcattggcgttcgtggatgttggcattgggcatgggcattcaatcagaagttgtcaagtatggtacccgtttggcaacgagcacatttttgggcatagccaaccagggttttcacatgggcgttcaggggcggatgggccaacgtcatggtgggcaa

SEQ ID NO: 77624 - DNA, 34 bp, Homo sapiens; identical to SEQ ID NO: 23208
  chr9:86600600-86600634
  hypo

SEQ ID NO: 77625 - DNA, 31 bp, Homo sapiens; identical to SEQ ID NO: 23209
  chr9:86691067-86691098
  hypo

SEQ ID NO: 77626 - DNA, 25 bp, Homo sapiens
  chr9:86964436-86964461
  hypo
ccaccacgtccggcttacttgtttt

SEQ ID NO: 77627 - DNA, 121 bp, Homo sapiens
  chr9:87904206-87904327
  hypo
gctcgggacctgcagcccgccatgcctgagcctctcctccacccacccgtgggctcctgcatggccttagcctccgtgacaagcaccacccctgctccatggcacctggtcccaacgacct

SEQ ID NO: 77628 - DNA, 29 bp, Homo sapiens
  chr9:88232863-88232892
  hypo
taaatttctagctgggcgcactggctcac

SEQ ID NO: 77629 - DNA, 17 bp, Homo sapiens
  chr9:88307210-88307227
  hypo
gacggagtcttgctgtc

SEQ ID NO: 77630 - DNA, 168 bp, Homo sapiens; identical to SEQ ID NO: 46275
  chr9:88355779-88355947
  hypo

SEQ ID NO: 77631 - DNA, 21 bp, Homo sapiens
  chr9:88490995-88491016
  hypo
ttttgagacagagtctcgctc

SEQ ID NO: 77632 - DNA, 30 bp, Homo sapiens
  chr9:88513774-88513804
  hypo
cgtcagggtggaagcgggtgtgagagggtc

SEQ ID NO: 77633 - DNA, 186 bp, Homo sapiens
  chr9:88651535-88651721
  hypo
caagaccccgagaaacgccacagtctactctggtcacgccctggtcatgtggcgtaaatcagaagacaagaggttgagtcaaggtctcccagaaagtactgtcaatacagaataaaactgggcagtgattctgctgagaggaagcatttacggaataataaaatacctaggcggaagatcaacaac

SEQ ID NO: 77634 - DNA, 27 bp, Homo sapiens
  chr9:88656737-88656764
  hypo
aaaacttgaactggggccaggcgcagt

SEQ ID NO: 77635 - DNA, 26 bp, Homo sapiens
  chr9:88657063-88657089
  hypo
cactcggttgaattgctattgcattg

SEQ ID NO: 77636 - DNA, 117 bp, Homo sapiens
  chr9:88661263-88661380
  hypo
tctcagagtcccgcacggagcagaaggtgcatgctctatcggaggttacatctcagcttaatccccgcctcccaggtgccgtgcaccctgcactgtggcacgcgctctgaggtgtac

SEQ ID NO: 77637 - DNA, 42 bp, Homo sapiens
  chr9:88672700-88672742
  hypo
aaacactggagactggcggctctgtcccgagagggccagggt

SEQ ID NO: 77638 - DNA, 22 bp, Homo sapiens
  chr9:88680656-88680678
  hypo
ttaaatatgttcatgtcgggct

SEQ ID NO: 77639 - DNA, 450 bp, Homo sapiens
  chr9:88694096-88694546
  hypo
aacaaaacacctggaggtccacgctccgggagctcgcaatccagtagttgaagcccaagacgatgatgcaggccaccagggcggccagcacgaggggcggcgacttcatgctgcgacgcccgtttcccaagcccatcatctcaaaatcagcgctgagaatctgccaagtaaaagcaaataaataaacatcaatactagttttatcatctccgaagcagaccgtatcatccttacaaccaagaggaaaggagtcttgccaagaagcgtgggctggtagcttctccttgacgtgcaaagctgtcaagggagaagagtatgtgaacggcacgcacagagcccatggtgctgtgaacccagggcagtgtggccagttcccaggacaggctcggaggagcaggcaccgccccgaaacctgccacagattagctcgagacctggggcaagacatga

SEQ ID NO: 77640 - DNA, 43 bp, Homo sapiens
  chr9:88712486-88712529
  hypo
gcggctggacctcagggaccacgctgccttcaagctccctccc

SEQ ID NO: 77641 - DNA, 22 bp, Homo sapiens
  chr9:88921884-88921906
  hypo
aaaaagaatacattaataggcc

SEQ ID NO: 77642 - DNA, 34 bp, Homo sapiens; identical to SEQ ID NO: 23216
  chr9:89301325-89301359
  hypo

SEQ ID NO: 77643 - DNA, 145 bp, Homo sapiens; identical to SEQ ID NO: 6861
  chr9:89560563-89560708
  hypo

SEQ ID NO: 77644 - DNA, 1767 bp, Homo sapiens; identical to SEQ ID NO: 46282
  chr9:89560739-89562506
  hypo

SEQ ID NO: 77645 - DNA, 31 bp, Homo sapiens
  chr9:89699519-89699550
  hypo
ccctgctgaagctgtgcgatgatgatctgcc

SEQ ID NO: 77646 - DNA, 406 bp, Homo sapiens; identical to SEQ ID NO: 23219
  chr9:89699971-89700377
  hypo

SEQ ID NO: 77647 - DNA, 1254 bp, Homo sapiens; identical to SEQ ID NO: 6863
  chr9:90112493-90113747
  hypo

SEQ ID NO: 77648 - DNA, 30 bp, Homo sapiens
  chr9:90140235-90140265
  hypo
actggagccacccgcgaaaattcggccagg

SEQ ID NO: 77649 - DNA, 28 bp, Homo sapiens
  chr9:90172559-90172587
  hypo
aatacctaatccttggcagggcgcggta

SEQ ID NO: 77650 - DNA, 30 bp, Homo sapiens
  chr9:90274439-90274469
  hypo
atgccagcagctgacgctgctgattcccgc

SEQ ID NO: 77651 - DNA, 30 bp, Homo sapiens; identical to SEQ ID NO: 6865
  chr9:90282276-90282306
  hypo

SEQ ID NO: 77652 - DNA, 150 bp, Homo sapiens; identical to SEQ ID NO: 23222
  chr9:90346010-90346160
  hypo

SEQ ID NO: 77653 - DNA, 31 bp, Homo sapiens
  chr9:90439261-90439292
  hypo
ttggaaaccttcgtagcggggctggtggccc

SEQ ID NO: 77654 - DNA, 30 bp, Homo sapiens
  chr9:90440451-90440481
  hypo
cttcaggtgcagtccggggcccctagaggg

SEQ ID NO: 77655 - DNA, 210 bp, Homo sapiens
  chr9:90457940-90458150
  hypo
taggagtcagcccgccggaaggtcccgcccagccttaagaagtcaattagctgctttcgggcggccttaggcgacgggagactcctggactcggcacctgcccactgtgcctgtccacctgtggctactgcagctgagaccccagtgggctgagattggacaggggccaccagggacccagcaagtccttcagctcggtgagtgagggat

SEQ ID NO: 77656 - DNA, 138 bp, Homo sapiens
  chr9:90472236-90472374
  hypo
aggctcttctcacttcgcagaccttgcgggggcagggcagaggcgctcctcacttcccagacggtgggattgggcagaggcgctcctcaattcccagatggcgggattgccgggcagaggtgttcctcacttcccaga

SEQ ID NO: 77657 - DNA, 290 bp, Homo sapiens
  chr9:90472433-90472723
  hypo
aggcgcttctcatttaccagacagttgggttccgggcagaggcgctcctcacttcccagacagtgggcctgcccgacagaggtgctcctgacctcccagatgcggtggctgctgagctggggcctccttacttcccagacgctgcagtggccaggcagaggtgctcttcacttcccagactgtgaggcggccaggtagaggcgctcctcacttcccaggcggtgcctagccaggcagaggcactcctcacttctcaggcggtgggatggggggtgcggggggagtgctgg

SEQ ID NO: 77658 - DNA, 462 bp, Homo sapiens
  chr9:90474095-90474557
  hypo
cagccagctgggaaggcctcacggacaagacgagcaggttgctgatggtatggcggggacctgtggtggaaccaggaacaaaatacgcttagaagagcacgttgccaatcgcgtggccggaacctgcggcggaaccaggaacaaaatacgcttagaagagtaagtcgccgatggcatagccggcacctgcggcggaaccggggacgaaatacgcttagaagagaatgtcgccgatggtgtggccgggacctgctgcggaagcagggacaacatatgcttagacgagaacattgccggtggtgttgctgggtcatgcggtggaagcagtaacaacatacgcttagaagagcaggttgccgatggcgtggttgagacctgcggcggaaccaggaacaaaatatgcttagtgagttgcccatttcgagcgagttgtgcacagacgaaaccaagggtcagaagtgg

SEQ ID NO: 77659 - DNA, 35 bp, Homo sapiens; identical to SEQ ID NO: 23223
  chr9:90482723-90482758
  hypo

SEQ ID NO: 77660 - DNA, 35 bp, Homo sapiens; identical to SEQ ID NO: 23224
  chr9:90482817-90482852
  hypo

SEQ ID NO: 77661 - DNA, 206 bp, Homo sapiens
  chr9:90483185-90483391
  hypo
tcctgcccatctccctcgctgttcccattgccccttgttgtggaatttctcagacctaagactcgccttccagggaagccttctcctgcctctatattaagccaactggagaccatgcccagggcttggctgtggagcctgtgggaaccccccgaatccagggcaagggtccgcatgccccctgggccctgcgtgtaaaatggagc

SEQ ID NO: 77662 - DNA, 37 bp, Homo sapiens
  chr9:90485106-90485143
  hypo
gcacattctctttttttgaggcgtctggccgtgtcac

SEQ ID NO: 77663 - DNA, 31 bp, Homo sapiens
  chr9:90492074-90492105
  hypo
tcagtcagaggtctctcgatgtgagtctctg

SEQ ID NO: 77664 - DNA, 204 bp, Homo sapiens
  chr9:90499878-90500082
  hypo
agaccccctgggggacgtgtgtaaaccagtgcctgctaaggcccaccagccgcatgggaaatgcatgcaagatccgtctcctgccagcttgtccccaccagctcccccagctcctctggcctccaccctgtcaccaggcccgatgaccttctcagagccttttggaccacactcaaccctgagtgcctccgggccaccagagcc

SEQ ID NO: 77665 - DNA, 170 bp, Homo sapiens
  chr9:90500552-90500722
  hypo
aacgggccgaccacccgcacatgacatcactggggaaggagtgggacatcacgaccctaaatcccttctggaacgtgtcaacccagccacagcagctgccccgtcctcagcaagtctctgatgccacaaccgtggggaaccacttacagcagaaacgcagccagcttttc

SEQ ID NO: 77666 - DNA, 38 bp, Homo sapiens
  chr9:90583823-90583861
  hypo
cagaaacctgcactcccggacacgcgctctcctgagag

SEQ ID NO: 77667 - DNA, 22 bp, Homo sapiens
  chr9:90620673-90620695
  hypo
ttcctcaaaagacatttcagcc

SEQ ID NO: 77668 - DNA, 23 bp, Homo sapiens
  chr9:90755738-90755761
  hypo
aaaaaaaaggatcagccgggcgc

SEQ ID NO: 77669 - DNA, 31 bp, Homo sapiens
  chr9:90849822-90849853
  hypo
cctccaggcagcagaacggaggacaggtcta

SEQ ID NO: 77670 - DNA, 30 bp, Homo sapiens
  chr9:91001585-91001615
  hypo
aaacccagggatctcgccaatgagatgaaa

SEQ ID NO: 77671 - DNA, 31 bp, Homo sapiens
  chr9:91114317-91114348
  hypo
aatggggcttatgagacggcagaactgaatt

SEQ ID NO: 77672 - DNA, 292 bp, Homo sapiens
  chr9:91119033-91119325
  hypo
cacccattctcttgttcggaaagtcaccaccccagctgacaaagtcattgcagtgggagactcgaaagctggaccctgtgagcaacagggcagctgaagaacccacactctgtgcaagcaaagcactagcgagatagcgcagccacggggatgccaggacaggccctgggccctgctcctggtgtgtggtgtgtgtgtgtttgggtggtgtgtggtgtgtgctgtgtgtttacgctatgtatagtatatgtggtgtgagtccagtgtgtgcagtgtgcgaggggtgtgtgtg

SEQ ID NO: 77673 - DNA, 103 bp, Homo sapiens
  chr9:91138736-91138839
  hypo
atccctaatgacctttcgtgtggcatggaggcatcttagccatggtaccctccaccccaggggctggcctttaagaattcatcaaacctctctctctttctct

SEQ ID NO: 77674 - DNA, 48 bp, Homo sapiens
  chr9:91140237-91140285
  hypo
accacacacacacttacgtacagatgcatgctacgttaaagactgaat

SEQ ID NO: 77675 - DNA, 95 bp, Homo sapiens
  chr9:91187464-91187559
  hypo
cgtgcccctaccaggcgacatgctcagcagcagaagctcctgccgaccccggcaaaacacagggcgatcggcctgtgctgcgacccaggtgttgg

SEQ ID NO: 77676 - DNA, 31 bp, Homo sapiens
  chr9:91366824-91366855
  hypo
gggcccagggtgggcacgggcacagggctgg

SEQ ID NO: 77677 - DNA, 87 bp, Homo sapiens; identical to SEQ ID NO: 23227
  chr9:91614961-91615048
  hypo

SEQ ID NO: 77678 - DNA, 110 bp, Homo sapiens
  chr9:91616950-91617060
  hypo
aggctcagtggttcatcgtgttggctgtgctcaactccgccatgaacccggtcatctacacgctggccagcaaggagatgcggcgggccttcttccgtctggtctgcaac

SEQ ID NO: 77679 - DNA, 34 bp, Homo sapiens
  chr9:91617284-91617318
  hypo
tcttatttattgcatgcgtcgcttccacaggggc

SEQ ID NO: 77680 - DNA, 102 bp, Homo sapiens
  chr9:91663812-91663914
  hypo
gtgaggggggtgtcaggtcaccgacagtatgaagctacaggcagggccccttgtcactgctctgctttagaaatgatatgccggccgggcacggtgatttac

SEQ ID NO: 77681 - DNA, 31 bp, Homo sapiens
  chr9:91781635-91781666
  hypo
tgggaaggaaaggatgcgcaagggaagagag

SEQ ID NO: 77682 - DNA, 30 bp, Homo sapiens
  chr9:91993521-91993551
  hypo
cactgcacgagactcggatactgaacagga

SEQ ID NO: 77683 - DNA, 236 bp, Homo sapiens; identical to SEQ ID NO: 23230
  chr9:91996050-91996286
  hypo

SEQ ID NO: 77684 - DNA, 135 bp, Homo sapiens; identical to SEQ ID NO: 23231
  chr9:91997067-91997202
  hypo

SEQ ID NO: 77685 - DNA, 250 bp, Homo sapiens
  chr9:91997530-91997780
  hypo
ggccatgtgtgagccacgtttgtgggaaggattgaggatgacatcccagatcacagttcgggcatcgcgcggcttgtggaggtggcggaaacattctctggcagcaaagccaagctgggtaacttccaagggacagctggtcctgttgggtcccgcggggggcacctgcgaggtggcgtgaacaccatgcagtgcagagcagggtgccctgggtggccaagtggggcccgcctgactcctcaccccaaag

SEQ ID NO: 77686 - DNA, 30 bp, Homo sapiens; identical to SEQ ID NO: 23233
  chr9:92005548-92005578
  hypo

SEQ ID NO: 77687 - DNA, 248 bp, Homo sapiens
  chr9:92049176-92049424
  hypo
ggagggaggggtctcggtctaggagccagccaggaccctagaaacctctagaagggaagacagaacaatggcgttgggcgccttctcaatctccactgagacctttgtcaaaacggtatgcaggccctcaaatctattgcttctttgggttttcactttctttcatgaagcttcatgtatgtaaaaatgttagtctgtcttttctcctgttactgtctttcgtcagtttaattcgcaggccctagaaa

SEQ ID NO: 77688 - DNA, 322 bp, Homo sapiens
  chr9:92053269-92053591
  hypo
ggagcacctcccatggcagctcgtgatggctgcatcacagaatgcaacaagaaggtgagcaggacgacattcaccgcgggagcctggtgactgcaactcctgctcacgacagagctggggtcatgcaattagataaaatattaatccagtacatcacgggctgaaagctatgccagtcaaacccacattatgaagcactttattctgtcgttcctgagacaaacaacatttctagtgttagggatatttgaggcaaaaaatcgaagtattctttatgttctttgactagaatcaaatacaatgtatgttttttcttttcttt

SEQ ID NO: 77689 - DNA, 21 bp, Homo sapiens
  chr9:92054190-92054211
  hypo
ggcacaatgtatgtattttaa

SEQ ID NO: 77690 - DNA, 146 bp, Homo sapiens
  chr9:92056120-92056266
  hypo
aaaccaaactcccagaccttacgaataccaacccttggcctccgcttccacacacgcgcaggactcggccgggcggcactgttcctcccagcagcgggcaatttccacagcttcgcgtggtggacgggccatcagggaggactctt

SEQ ID NO: 77691 - DNA, 124 bp, Homo sapiens
  chr9:92075499-92075623
  hypo
actcacatgtttaaccgaggttccaccggttcagacccactgctcatgagacggctcaagaatatgtcagagataccccagcctcacatgcacagctggtcctggaggccgcagagcaaggaaa

SEQ ID NO: 77692 - DNA, 17 bp, Homo sapiens
  chr9:92124802-92124819
  hypo
cccgccaccactcccag

SEQ ID NO: 77693 - DNA, 82 bp, Homo sapiens; identical to SEQ ID NO: 23237
  chr9:92140640-92140722
  hypo

SEQ ID NO: 77694 - DNA, 31 bp, Homo sapiens; identical to SEQ ID NO: 23238
  chr9:92178352-92178383
  hypo

SEQ ID NO: 77695 - DNA, 21 bp, Homo sapiens
  chr9:92185464-92185485
  hypo
tagattttggccggtcgcggt

SEQ ID NO: 77696 - DNA, 135 bp, Homo sapiens; identical to SEQ ID NO: 23239
  chr9:92227879-92228014
  hypo

SEQ ID NO: 77697 - DNA, 130 bp, Homo sapiens
  chr9:92237958-92238088
  hypo
gcccaggctcagcatcgcccaagggcagctgacctagcctttgcaatggcactggcattagccggggaggtccgcaccaggacacactccctggctggggtgggatgttctgaaccgtgcagatggggat

SEQ ID NO: 77698 - DNA, 213 bp, Homo sapiens
  chr9:92249013-92249226
  hypo
gcacagaagggtcccacgcagagtctcagagggagtgtggccccgcagacccctgggtttctgactccaggcctccaggaccatgagacaatctgtttctgttgtttgagctgccccgtgtgtgatactttgttatggcagccctagcataccacacacaccccatggtatgacacgtccttgtgctctcctgggccacggttatacccgctg

SEQ ID NO: 77699 - DNA, 31 bp, Homo sapiens; identical to SEQ ID NO: 23241
  chr9:92720565-92720596
  hypo

SEQ ID NO: 77700 - DNA, 201 bp, Homo sapiens
  chr9:92725473-92725674
  hypo
tgtccacaccaagggccgatgatcatgtggcgctcattttcagcggtgagcacaggggtggcagtgccagggtccccaggcccagccacagggtaagtgctcgtttccaggcaccctccctttcctccctggtcactccctctgcctgggagcccctttccctggactgctggtaatcctactcttcgccctgaagccccc

SEQ ID NO: 77701 - DNA, 30 bp, Homo sapiens
  chr9:92765773-92765803
  hypo
gaagcccagattctccggcaaggtctttgg

SEQ ID NO: 77702 - DNA, 31 bp, Homo sapiens; identical to SEQ ID NO: 6876
  chr9:92859700-92859731
  hypo

SEQ ID NO: 77703 - DNA, 36 bp, Homo sapiens
  chr9:92897071-92897107
  hypo
acaggcgtgagccaccgcgcccggccaccggggctc

SEQ ID NO: 77704 - DNA, 31 bp, Homo sapiens
  chr9:92929514-92929545
  hypo
gaaatacccacaggtgcggaggggctggccc

SEQ ID NO: 77705 - DNA, 240 bp, Homo sapiens
  chr9:93156038-93156278
  hypo
aaaatacagatactcatacatcgctaggtgaggaccaccctctctccctttaggtcctgacttggccttaaacttcccagcatagcctaagaaagtcactaccgaacacgaatcagactgggcgcaggtgacctaacctttccgtgtgagtattaaggtgtgctttcgctcctgggtagaaacacttcctggtgtcacatggagttcaatggagctgacgcaactttcttcctgctgcca

SEQ ID NO: 77706 - DNA, 43 bp, Homo sapiens
  chr9:93462786-93462829
  hypo
agctttcttgcagcttggtggcgcttggattgaagagtagcaa

SEQ ID NO: 77707 - DNA, 30 bp, Homo sapiens; identical to SEQ ID NO: 23243
  chr9:93658211-93658241
  hypo

SEQ ID NO: 77708 - DNA, 43 bp, Homo sapiens
  chr9:93734261-93734304
  hypo
gatacagcaagcagctgtcctcgcctttggctgtgctgcagtc

SEQ ID NO: 77709 - DNA, 30 bp, Homo sapiens; identical to SEQ ID NO: 23244
  chr9:93798705-93798735
  hypo

SEQ ID NO: 77710 - DNA, 31 bp, Homo sapiens; identical to SEQ ID NO: 23245
  chr9:93837381-93837412
  hypo

SEQ ID NO: 77711 - DNA, 1194 bp, Homo sapiens; identical to SEQ ID NO: 46306
  chr9:93955382-93956576
  hypo

SEQ ID NO: 77712 - DNA, 24 bp, Homo sapiens
  chr9:94116470-94116494
  hypo
aaaacctttcggagaaatctgaaa

SEQ ID NO: 77713 - DNA, 224 bp, Homo sapiens; identical to SEQ ID NO: 23248
  chr9:94124706-94124930
  hypo

SEQ ID NO: 77714 - DNA, 516 bp, Homo sapiens; identical to SEQ ID NO: 46307
  chr9:94183473-94183989
  hypo

SEQ ID NO: 77715 - DNA, 40 bp, Homo sapiens; identical to SEQ ID NO: 23250
  chr9:94186235-94186275
  hypo

SEQ ID NO: 77716 - DNA, 31 bp, Homo sapiens; identical to SEQ ID NO: 23251
  chr9:94447741-94447772
  hypo

SEQ ID NO: 77717 - DNA, 190 bp, Homo sapiens
  chr9:94486930-94487120
  hypo
gtccttgtgaaccacgtggtggctggataggtactccatccccgccgcgatctgtgccacaaggtgcacgaagtcggggggctccagggcggacttcaccgtgcggtcatcatcggtgctgcccacgtccgagtgcggcgagcgcatgaccaggaattcgtggaggtcgccgtgcgaacagtagctgaag

SEQ ID NO: 77718 - DNA, 30 bp, Homo sapiens
  chr9:94495731-94495761
  hypo
gagactcgcgttagcgggggacccaccttg

SEQ ID NO: 77719 - DNA, 30 bp, Homo sapiens
  chr9:94531888-94531918
  hypo
tcccttcctctcccacgcccgcctcctgcc

SEQ ID NO: 77720 - DNA, 30 bp, Homo sapiens
  chr9:94532130-94532160
  hypo
gggcagagaccacgccgcctcatactggga

SEQ ID NO: 77721 - DNA, 880 bp, Homo sapiens; identical to SEQ ID NO: 46310
  chr9:94711199-94712079
  hypo

SEQ ID NO: 77722 - DNA, 300 bp, Homo sapiens; identical to SEQ ID NO: 46311
  chr9:94712294-94712594
  hypo

SEQ ID NO: 77723 - DNA, 40 bp, Homo sapiens; identical to SEQ ID NO: 23254
  chr9:94834641-94834681
  hypo

SEQ ID NO: 77724 - DNA, 211 bp, Homo sapiens
  chr9:94904616-94904827
  hypo
ggagaaccatttttagcgtctgagttggggtgagatggcccgtgaaggggaccctattgggggcagctgtcctgtccgtctggctcacaggagcttcccctcagagctggagggctgggggctctcgctgcttaccacatgggcaggaggagggtgagagagcacattccaggccacctacccgcacccccagccccgctctggggaaagg

SEQ ID NO: 77725 - DNA, 101 bp, Homo sapiens; identical to SEQ ID NO: 23255
  chr9:95003569-95003670
  hypo

SEQ ID NO: 77726 - DNA, 39 bp, Homo sapiens; identical to SEQ ID NO: 23256
  chr9:95010671-95010710
  hypo

SEQ ID NO: 77727 - DNA, 105 bp, Homo sapiens; identical to SEQ ID NO: 23257
  chr9:95039645-95039750
  hypo

SEQ ID NO: 77728 - DNA, 30 bp, Homo sapiens
  chr9:95188894-95188924
  hypo
caacagttcaggcaccgctgtatgtgggga

SEQ ID NO: 77729 - DNA, 30 bp, Homo sapiens; identical to SEQ ID NO: 23258
  chr9:95374071-95374101
  hypo

SEQ ID NO: 77730 - DNA, 30 bp, Homo sapiens; identical to SEQ ID NO: 23259
  chr9:95374322-95374352
  hypo

SEQ ID NO: 77731 - DNA, 227 bp, Homo sapiens
  chr9:95376168-95376395
  hypo
aagatctgtgaacgcgtgttgtctcaaaccagtcagggccgtcatgactacgcagcagcagcagtttccaagacgggccagaaacgcatccacagcagtggcacccgcggctcaggggctcctcacagcccgggctggtgggagccaagaccagacagagtgggggtctccatctgttttctcttctccctcaaatacaggctgttttcatcgtgtctagtccagcc

SEQ ID NO: 77732 - DNA, 97 bp, Homo sapiens
  chr9:95380370-95380467
  hypo
gttactggaacttcacaggtgcggccactgcgcacaccttcctggaagcaggcccagccccacacgccatgttctcggaggagaagccttctctgag

SEQ ID NO: 77733 - DNA, 31 bp, Homo sapiens
  chr9:95408939-95408970
  hypo
ctacaataaaaagctagaggccgggcacggt

SEQ ID NO: 77734 - DNA, 30 bp, Homo sapiens
  chr9:95409149-95409179
  hypo
tgcagaacgagactccgtctcaaaaaaaat

SEQ ID NO: 77735 - DNA, 280 bp, Homo sapiens
  chr9:95416104-95416384
  hypo
gacagagcgagaatttgtctcaaaaacaaaaacaacaaaaaaagaaaattcgtaaattagatcatctcaagaagtccaagtactggctccactccaaagaaagcaaaagcacaaaaggcacgcatgccgactctggatgcctcgcgtgtgagaaccatcgcccaaaaccacacaaggccgtcactctgccttggcccccaccccacagcacatatggctgggagacacagcagctacgcaggtctcaggtccacatacagggcaacgaccctccacaccg

SEQ ID NO: 77736 - DNA, 46 bp, Homo sapiens
  chr9:95416853-95416899
  hypo
ggcgagtgtggaccacgccaccatccaatcacgtgaggacgcacca

SEQ ID NO: 77737 - DNA, 66 bp, Homo sapiens
  chr9:95417139-95417205
  hypo
agaactgtcagcatgcgaggttccaacggagctgaggctggcgccagagagcgtccaacctcacca

SEQ ID NO: 77738 - DNA, 233 bp, Homo sapiens
  chr9:95417481-95417714
  hypo
gctttgcctaactcaccgacacatctgttcttccctcacgtggccctgtgtggccctgcagatgcagcgaccctgaggggtgcatcgtcagcctggaatgggctctgcacctactttcccactgcgccagagcccagcggcgtcctactgggacacgctcacctgcagggcaagcaagctctgcttcactttgtcggtatcttaaggcagaggaaatgcgctcacaggcggcc

SEQ ID NO: 77739 - DNA, 30 bp, Homo sapiens
  chr9:95421904-95421934
  hypo
ggaagcgcccctgccgaggccacagggcaa

SEQ ID NO: 77740 - DNA, 548 bp, Homo sapiens
  chr9:95477297-95477845
  hypo
gccccatggcgcctcggctagactcctaccctctgtgcattagtcacgttaagattgacctagcaccgccgtcccgctgctgctgggttagttgaggtgaagcagatgttagctgcagcgtgcggcgccccacagcccctaatcacagtaaatgctgtgcttctcgctgcagaacacctggttggccagcccggtgccctcggccctgtcgctggcacaggcacaggtgtgacttacgctcggtgtggctggcttggtcttcggggcggctttggcacggccacgccgggtctgctcatggtccagctcgagcagctccagccgctgggtcagcgccagcttctgctggatggccatgcgcagcagcgagttcagcgtcttcttctcgtcctcagcagccgccagctgccgctgcatctcatccagctgtgtaatgtactcgtcacacctgtgggtaccaaaaacatgactgaggggcgggcagagccgagcagaggagggcagggcagggcagggctaagctgcacggccctctgacagccctatac

SEQ ID NO: 77741 - DNA, 30 bp, Homo sapiens
  chr9:95478096-95478126
  hypo
aggaggcgctctccccgcttaaaggcctcg

SEQ ID NO: 77742 - DNA, 31 bp, Homo sapiens; identical to SEQ ID NO: 23263
  chr9:95482914-95482945
  hypo

SEQ ID NO: 77743 - DNA, 209 bp, Homo sapiens
  chr9:95484976-95485185
  hypo
gatgttctcctcctccagttccgagtagtcctgcagcagacgagcttcccggaatttgtactccttgatgtcatcccgcaggcggccacgctggatctccacattctggttgatctgttgggggagagggaaaggcaggtatgagcagcctccacagggcacgagaggggctcagtgcagccaggcacgccatggccagccatacagcc

SEQ ID NO: 77744 - DNA, 340 bp, Homo sapiens
  chr9:95492112-95492452
  hypo
agaggggtgaggaacaaggggcgcgggggctgcacgtggcaaagaagtgcagggccttggggctcagggaggagaccttatgggtgagatcaaccagaaaggggtgctcacctagcccaggacgcccacctgcccacgcacctgagagtcgacagctgtgtcatgtccatgccccaaaatccaggccagccagcctcccatcgtgtacaccccaggcgagtggcccagcctccaagcaggtgccatccctctccttccctcccactgcccactacccccacatagctggcgtggcaggacagggcttccatgggtagagggcagacgggccgcagtgtgt

SEQ ID NO: 77745 - DNA, 28 bp, Homo sapiens
  chr9:95520189-95520217
  hypo
aaaaaatgagtaaaggctgggcgcggtg

SEQ ID NO: 77746 - DNA, 29 bp, Homo sapiens
  chr9:95534117-95534146
  hypo
taagccactgtgcccggttgacccacacc

SEQ ID NO: 77747 - DNA, 677 bp, Homo sapiens; identical to SEQ ID NO: 46316
  chr9:95570104-95570781
  hypo

SEQ ID NO: 77748 - DNA, 788 bp, Homo sapiens; identical to SEQ ID NO: 6884
  chr9:95570893-95571681
  hypo

SEQ ID NO: 77749 - DNA, 86 bp, Homo sapiens
  chr9:95676049-95676135
  hypo
tactctaggctgcactgtggccgaggactctcaaggcctgttcaagaaacacagggaaggccgggcgcggtggctcacaactgtaa

SEQ ID NO: 77750 - DNA, 204 bp, Homo sapiens
  chr9:95687861-95688065
  hypo
gagtttggtgtaaatacgtggagggtattcttggcggggaacccaaagtgagcagcgaggcttggaggtgggaatgggaacagggatgggaatagctgaagccagatactggtaaatgctgtttaagtcatactgtaggttgttcgtggatagtatattcagggaaacagaaaggtgtgtccttgtgcccgaggttaaagggaa

SEQ ID NO: 77751 - DNA, 20 bp, Homo sapiens
  chr9:95698338-95698358
  hypo
ctggccgcagtattcttatt

SEQ ID NO: 77752 - DNA, 31 bp, Homo sapiens
  chr9:95707428-95707459
  hypo
gaacaaaccagaaatgcggacccacaggagg

SEQ ID NO: 77753 - DNA, 30 bp, Homo sapiens; identical to SEQ ID NO: 23268
  chr9:95764727-95764757
  hypo

SEQ ID NO: 77754 - DNA, 31 bp, Homo sapiens
  chr9:95771842-95771873
  hypo
cctgggcaggaggacccgattggggagcaca

SEQ ID NO: 77755 - DNA, 92 bp, Homo sapiens
  chr9:95826253-95826345
  hypo
tttgacggcgcatcccggacttcttgtaggtcagtgttacctcgctggctggtcccctttctttggttgtgggtggtgacttcacctttttt

SEQ ID NO: 77756 - DNA, 30 bp, Homo sapiens
  chr9:95844039-95844069
  hypo
tgcacttagcaacacgttccaggtcaccat

SEQ ID NO: 77757 - DNA, 31 bp, Homo sapiens
  chr9:95913666-95913697
  hypo
ccactctcccagtggccgttggacatgagtg

SEQ ID NO: 77758 - DNA, 35 bp, Homo sapiens
  chr9:95952713-95952748
  hypo
aggccaccatgggactcgagcgtacctgtgctgct

SEQ ID NO: 77759 - DNA, 31 bp, Homo sapiens; identical to SEQ ID NO: 23269
  chr9:95965599-95965630
  hypo

SEQ ID NO: 77760 - DNA, 30 bp, Homo sapiens
  chr9:96009781-96009811
  hypo
gggctgatccccagcgatgctgacaacatg

SEQ ID NO: 77761 - DNA, 30 bp, Homo sapiens; identical to SEQ ID NO: 23270
  chr9:96051943-96051973
  hypo

SEQ ID NO: 77762 - DNA, 412 bp, Homo sapiens
  chr9:96069017-96069429
  hypo
cctaaccctgtggtcttgtgtcgtttctttttcccttgcagggtctgccctgaagcgtctctgcctaggcaaagaacacagcagtagtaattatccgggttttttcccctttgtcctctctcatcgcatgggctttctcgtggctagcgcacatcagggttcccgcggccgggcgggcgtgggcctgccctgtgcctgccccgcgcctgctccatgcctctcggccgggcactgcttcgcttctgcctggcgggatcgctgtcctcggctcccccgtgtgtctcgtggcgcctagagtttgtgcggtctcgccagttcacatctaacgggcttatccttccccggaacacccgcaaattgccgatcattaattggctccttttccaaaaccgtaggaatgagtatttccttg

SEQ ID NO: 77763 - DNA, 35 bp, Homo sapiens
  chr9:96070698-96070733
  hypo
aagaagggtaccttcacggacgacctgcacaagct

SEQ ID NO: 77764 - DNA, 31 bp, Homo sapiens; identical to SEQ ID NO: 23272
  chr9:96081613-96081644
  hypo

SEQ ID NO: 77765 - DNA, 42 bp, Homo sapiens
  chr9:96218213-96218255
  hypo
attacgggcgtgagccactgcgcctggccaggagaaatcttt

SEQ ID NO: 77766 - DNA, 38 bp, Homo sapiens
  chr9:96230168-96230206
  hypo
tcttttttttttgagacggagtttcgctcttgtcgccc

SEQ ID NO: 77767 - DNA, 37 bp, Homo sapiens
  chr9:96230445-96230482
  hypo
gtgagccactgcgcccggctaccacctttgttttatg

SEQ ID NO: 77768 - DNA, 179 bp, Homo sapiens; identical to SEQ ID NO: 23274
  chr9:96256150-96256329
  hypo

SEQ ID NO: 77769 - DNA, 30 bp, Homo sapiens
  chr9:96269905-96269935
  hypo
aaagagtggctcagcgaggccaggggagat

SEQ ID NO: 77770 - DNA, 411 bp, Homo sapiens
  chr9:96275709-96276120
  hypo
gacttgtggacttatcggtcagttaggaatgtgttgtgtgcacgtgtgtctatgtgcgtgttgcatgcaagtgtgaggtgtctgtgactacacacatgccagtctcattattcccagcttctcatactgcagttgtttttgtttggtacaaaggtggaagctctgccaaggttttttcttgatgcgagccaggatcgaagggctatggtgtttaaagcttgcgagctgaaggcccttggaaggcaggaacctcagataaattgtagtctgtaagattcctggtcgttctctggggggagtcaacaatgatctgtgcttcactcccagcgtctgttgaccatgcttggctctcaggaggccggaccaaggacagcgtttgcactcctggtctcaccacgcccagtgttggct

SEQ ID NO: 77771 - DNA, 188 bp, Homo sapiens; identical to SEQ ID NO: 23276
  chr9:96294480-96294668
  hypo

SEQ ID NO: 77772 - DNA, 30 bp, Homo sapiens; identical to SEQ ID NO: 23277
  chr9:96295075-96295105
  hypo

SEQ ID NO: 77773 - DNA, 247 bp, Homo sapiens
  chr9:96308694-96308941
  hypo
gggctagggtcacatcgtttcagcttcgtgtttaagtttgtgctcagactcttaatgccgtcccatctggtgtatttactctgcccctcctgtggctggtgcctcgtggcctgctgtgtgtgagcactgagatgcacggacagggaagaggccatgcatgcagctggtcctggtggcattgtctcccagcccactcttttgtttgctcctctcgatgcctggggcctggcagcggagtgctggccct

SEQ ID NO: 77774 - DNA, 179 bp, Homo sapiens; identical to SEQ ID NO: 23278
  chr9:96357851-96358030
  hypo

SEQ ID NO: 77775 - DNA, 184 bp, Homo sapiens
  chr9:96435973-96436157
  hypo
aggccaaggggagctcgctggctgcccatggtgcccggaagaatgggggtggcagtggcaagagtgcaggcaaacgactgctgaagagggctgccaagaacagtgtcgacctggacgactacgaggaagagcaggaccacctggatgcctgcttcaaggactcagactacggtgagtgtcactc

SEQ ID NO: 77776 - DNA, 328 bp, Homo sapiens; identical to SEQ ID NO: 23279
  chr9:96573409-96573737
  hypo

SEQ ID NO: 77777 - DNA, 320 bp, Homo sapiens
  chr9:96673539-96673859
  hypo
tggagatgcctgcccaggcctcggggcataccctccactccaaggagcagacgtcccactgagagcagtgcaccccaatatggtcacgggggacaggttgccagttatcgccagcagcacctggccctgggcagaccccgtgatgggaaacaagtctcaggagctgggacgttgatgtgtcccacacgtgccggatgacagtgatttacacgggcctcctaatcccccgccgggtaccctgactcacacggcctggcacccctgcccgcgcccacaggtggacgggcactcaccgagacggctgcaccactgttattttt

SEQ ID NO: 77778 - DNA, 37 bp, Homo sapiens
  chr9:96687052-96687089
  hypo
ctggagaagggtcacacggggccgcttacctcatggt

SEQ ID NO: 77779 - DNA, 31 bp, Homo sapiens
  chr9:96688196-96688227
  hypo
ctccatgacaccccagcgctgggcaagtgtc

SEQ ID NO: 77780 - DNA, 523 bp, Homo sapiens; identical to SEQ ID NO: 6902
  chr9:96716904-96717427
  hypo

SEQ ID NO: 77781 - DNA, 357 bp, Homo sapiens; identical to SEQ ID NO: 46339
  chr9:96717449-96717806
  hypo

SEQ ID NO: 77782 - DNA, 69 bp, Homo sapiens; identical to SEQ ID NO: 6905
  chr9:96717840-96717909
  hypo

SEQ ID NO: 77783 - DNA, 44 bp, Homo sapiens; identical to SEQ ID NO: 6909
  chr9:96722503-96722547
  hypo

SEQ ID NO: 77784 - DNA, 297 bp, Homo sapiens; identical to SEQ ID NO: 6910
  chr9:96722862-96723159
  hypo

SEQ ID NO: 77785 - DNA, 17 bp, Homo sapiens
  chr9:96881831-96881848
  hypo
atcttggctcctcccct

SEQ ID NO: 77786 - DNA, 38 bp, Homo sapiens; identical to SEQ ID NO: 23286
  chr9:96945350-96945388
  hypo

SEQ ID NO: 77787 - DNA, 121 bp, Homo sapiens; identical to SEQ ID NO: 23287
  chr9:96945447-96945568
  hypo

SEQ ID NO: 77788 - DNA, 37 bp, Homo sapiens
  chr9:97010559-97010596
  hypo
ttttgagatggattacaggcacgcgccaccacgccca

SEQ ID NO: 77789 - DNA, 227 bp, Homo sapiens
  chr9:97062672-97062899
  hypo
ccatacaccagaggaagcactcgggggagaagccgtatgtgtgcagggaatgtgggcgacacttcaggtatacatcctctctcactaatcacaagaggattcactccggggagaggccctttgtatgtcaggagtgtgggcgaggctttcgccagaagatagccctccttctacaccagaggacgcacttggaggagaagcccttcgtgtgtcctgagtgtgggaga

SEQ ID NO: 77790 - DNA, 31 bp, Homo sapiens
  chr9:97087289-97087320
  hypo
ggattggctggactcacgggacagtgacagg

SEQ ID NO: 77791 - DNA, 31 bp, Homo sapiens
  chr9:97088741-97088772
  hypo
cactggataggccgggcgtgctggttcatgc

SEQ ID NO: 77792 - DNA, 42 bp, Homo sapiens
  chr9:97107979-97108021
  hypo
attacagccgtgagccgccatgccagccggcctttttaacta

SEQ ID NO: 77793 - DNA, 104 bp, Homo sapiens
  chr9:97161999-97162103
  hypo
gttacagaaatgccaggtggtcgatctaggtcttgtttctcgccacacagaaagccaatcactgaggtgagtattgccggggaaaaagcctttttttttttttt

SEQ ID NO: 77794 - DNA, 109 bp, Homo sapiens
  chr9:97203263-97203372
  hypo
taggtggtattttgcgatgatttctgtgtctggagtcttctcggtcacgttttctgttatatttgcctatgtagctgatgtcactcaggagcacgagcgaagtacagct

SEQ ID NO: 77795 - DNA, 30 bp, Homo sapiens
  chr9:97221771-97221801
  hypo
tgctggatgggagacgctagcggcatcctt

SEQ ID NO: 77796 - DNA, 31 bp, Homo sapiens
  chr9:97317330-97317361
  hypo
catgcagtctaggaaccggcatgcgcataac

SEQ ID NO: 77797 - DNA, 135 bp, Homo sapiens
  chr9:97317564-97317699
  hypo
cggtggacattgcagcgcggctggaggggtaggaagaagaagatagttttgggatagatagaggtgggtaaagagtgtggttagtgccaaagggaaaaaaggatagcgaggaggagaaggcgttgcaaaaagacg

SEQ ID NO: 77798 - DNA, 31 bp, Homo sapiens
  chr9:97367816-97367847
  hypo
catggagcccacataccgggccccataagga

SEQ ID NO: 77799 - DNA, 38 bp, Homo sapiens
  chr9:97469745-97469783
  hypo
tctttttttttttttttgagacgttgtctcgctctgtc

SEQ ID NO: 77800 - DNA, 213 bp, Homo sapiens
  chr9:97474709-97474922
  hypo
tctggaggtgacctcccggggcctaggggaatatgggtggagccaggtgttaggatggagtgcttaagggcttgtgcagaagctgcatttccacaataggtgcactgctctttttgtctgggataagaatgtatgctcattcggggtggctgacaacgattatagggctgctaagcttcctccgagctatttccataacgctgctttgtatct

SEQ ID NO: 77801 - DNA, 17 bp, Homo sapiens
  chr9:97500869-97500886
  hypo
ttttgagatggagtctc

SEQ ID NO: 77802 - DNA, 43 bp, Homo sapiens
  chr9:97563054-97563097
  hypo
agtcacatggaatacccctgccgcttccagaatgcttctgcca

SEQ ID NO: 77803 - DNA, 38 bp, Homo sapiens; identical to SEQ ID NO: 23289
  chr9:97591477-97591515
  hypo

SEQ ID NO: 77804 - DNA, 31 bp, Homo sapiens
  chr9:97674943-97674974
  hypo
taaagagtaggaatctcggctatgggctccc

SEQ ID NO: 77805 - DNA, 199 bp, Homo sapiens
  chr9:97679313-97679512
  hypo
ttttgatgaccataaccggcagaacctgcccccaccccacccccaggctaaggcagagcagctgaggcaggtgaggccaactcctgagagtcagacagcagtgctgccctgttccgtatgcagggctgaggtctccacaacgttctctcgggatgtgttgccctggggtcagaagggatgtatccgctgctctgctggt

SEQ ID NO: 77806 - DNA, 338 bp, Homo sapiens
  chr9:97719170-97719508
  hypo
gaagaatcacatgagcgtaacaagaccggatggctgttcctctatgttctttttatttttgtactgggtgtggggaaaatcctccctaagcatatatttggaaaagcaattcgaaaactggttcagaagtcttacatgcttggttgactgattagtacaaattcctactgcttgaagccacttctcaccaagagactgcagtgttaaataagtgcattgtatttaccatgacttcggaggttttgattttcacttcccatggaactcttactgctctcttaaccaaactgttcagttcttcgtttgcttctctcttttttgttgtttttttgttgttg

SEQ ID NO: 77807 - DNA, 173 bp, Homo sapiens; identical to SEQ ID NO: 23292
  chr9:97727388-97727561
  hypo

SEQ ID NO: 77808 - DNA, 355 bp, Homo sapiens; identical to SEQ ID NO: 6914
  chr9:97767418-97767773
  hypo

SEQ ID NO: 77809 - DNA, 142 bp, Homo sapiens
  chr9:97808125-97808267
  hypo
agtagatttcaggcagcatcacgctgccggcccctgcggaatggagagtggtgttcggggatttgctttggaaatgccttgggaaggcgccgccacctccactttgaacaacggtaggaacgcagggtaggtgctcaggtgg

SEQ ID NO: 77810 - DNA, 31 bp, Homo sapiens; identical to SEQ ID NO: 23294
  chr9:97844496-97844527
  hypo

SEQ ID NO: 77811 - DNA, 54 bp, Homo sapiens
  chr9:97847399-97847453
  hypo
ttgctagcataacaggcgtgaaggcggcagtgtcgccggcgtccttccgcggaa

SEQ ID NO: 77812 - DNA, 387 bp, Homo sapiens; identical to SEQ ID NO: 23295
  chr9:97848085-97848472
  hypo

SEQ ID NO: 77813 - DNA, 224 bp, Homo sapiens; identical to SEQ ID NO: 23296
  chr9:97855922-97856146
  hypo

SEQ ID NO: 77814 - DNA, 30 bp, Homo sapiens
  chr9:97863723-97863753
  hypo
gacggtctggccgggcgggcaccaggagta

SEQ ID NO: 77815 - DNA, 79 bp, Homo sapiens
  chr9:97863958-97864037
  hypo
cgccgggcacccacacggcctgcgtgccttctagacttgagttcgcagctctttaaggagctctcgggccagtttttct

SEQ ID NO: 77816 - DNA, 30 bp, Homo sapiens
  chr9:97864346-97864376
  hypo
cctaacgagcctcctcgcattgagctcagc

SEQ ID NO: 77817 - DNA, 62 bp, Homo sapiens
  chr9:97864637-97864699
  hypo
aacacctgattcttgcgggagagcaggagacacagcctcaaggcattcgtacttgttggtgc

SEQ ID NO: 77818 - DNA, 309 bp, Homo sapiens
  chr9:97864981-97865290
  hypo
tttactgcctcaggtccgacagcccaggacacccttcagaactgggccttccacctcctgaccaccactaaagggagcctcttgtcgcatgcgcactgtgtgaatggcagcgtggggacgcagagctaagagtaaacgacgtggtgtggaccatgacgttcgctctcctcggccccccctggcagcacacagggcctgcagccggcctgcaacgagcccgccagggtcagtgcagccagcacgggggctccggctgtagcccaggcacgtgccagtgtgtccctgggcgtctgtattgctatcacttgg

SEQ ID NO: 77819 - DNA, 371 bp, Homo sapiens
  chr9:97867212-97867583
  hypo
tgagagcatgcatttgtctctcgcgtctggcttatttcgctcagtgtaaagccctctaggttgggccgcattgttgcaggtgtgcattttataagagtacacaatagattctcgaaagcattctcgctgtgctggggccgggcccaaagaggtggcacctggcatgtggcagccagtcgtctttagccctgggccaccctcatgactcggattcgtcttagctgagacaccagcacctgggaggcacagcctgggcccactccacaggactgtcctaccaggatggagacaatctcctggccctggttcttggcaggtgggtcatgttacggggactttctgtacatggacattcacgtttcagtcaggcc

SEQ ID NO: 77820 - DNA, 169 bp, Homo sapiens
  chr9:97868959-97869128
  hypo
aatagcattgtggttgctttgcgagcccattctcatcgtggccttacttctttccatgaggaggaggagagcagcacactgcgatggaaagaaatgtacgtagggggacaggagacctggcttctaccgcaggctttggcagcaagccgtgggcccaggagatggcatc

SEQ ID NO: 77821 - DNA, 78 bp, Homo sapiens
  chr9:97887432-97887510
  hypo
tttccagggccccatcggtttccaggagtgcacacctgaacaatgcaaagtcagatcagaacacgtttaacaagtaat

SEQ ID NO: 77822 - DNA, 30 bp, Homo sapiens
  chr9:97887819-97887849
  hypo
agggtaaaatggcctcgtccatccacccag

SEQ ID NO: 77823 - DNA, 31 bp, Homo sapiens; identical to SEQ ID NO: 23299
  chr9:97901310-97901341
  hypo

SEQ ID NO: 77824 - DNA, 207 bp, Homo sapiens
  chr9:97913296-97913503
  hypo
tcaacagctataggtggctggcggctacagtaccgaacagtgcacatttacaggatgtgcctgggactgcagaaagcgccactggacactcgagcttcaagtgccctcttacccgtgctttacttctcttcctggtacctttcaccacctgacctacacagtattcccttatagtactcatggttcgcttcctcctctgagggcaga

SEQ ID NO: 77825 - DNA, 31 bp, Homo sapiens; identical to SEQ ID NO: 23301
  chr9:97983531-97983562
  hypo

SEQ ID NO: 77826 - DNA, 30 bp, Homo sapiens; identical to SEQ ID NO: 23302
  chr9:98054862-98054892
  hypo

SEQ ID NO: 77827 - DNA, 82 bp, Homo sapiens
  chr9:98145031-98145113
  hypo
ggaaaataaactgctggaagacgagttcgaggtcaaatacaaggagggccacctttaaatttttttttcctctgggacggag

SEQ ID NO: 77828 - DNA, 30 bp, Homo sapiens
  chr9:98173084-98173114
  hypo
atatttcccttctccgcagtgatgaaagtg

SEQ ID NO: 77829 - DNA, 59 bp, Homo sapiens; identical to SEQ ID NO: 46354
  chr9:98189306-98189365
  hypo

SEQ ID NO: 77830 - DNA, 32 bp, Homo sapiens
  chr9:98196381-98196413
  hypo
ccaccgcgcccggcctatgggctccagatttt

SEQ ID NO: 77831 - DNA, 30 bp, Homo sapiens
  chr9:98239842-98239872
  hypo
cgttaaaggaaattccgatcaatgagcaca

SEQ ID NO: 77832 - DNA, 403 bp, Homo sapiens
  chr9:98240099-98240502
  hypo
aacaaaactttacatcaagggcgtcacataaaatgacaggagtcaaaggtaggcaaacggcaaatgggaaaaatgctttacacgaccacttttaaaccactgtgaagccacgctctctctgtcctggatgcacatcgatgttaagagcagttaagaagcaggagcagtcatggaaaagtaaagactaaaacaaccaaaccaaactccagcccccaggagcatggcatcgagcgttaccatgagtaagtagccgctggccacgcggatgacactgacgtcagagaaggatttcaggatgtcgtccagggtcgtggtggtgaaggaaagcaccttttgagtggagttctgtgcgacactctgatgaaccacctgtggtcacaacagaatgcgaaatgcccaaatg

SEQ ID NO: 77833 - DNA, 47 bp, Homo sapiens; identical to SEQ ID NO: 6916
  chr9:98268139-98268186
  hypo

SEQ ID NO: 77834 - DNA, 1082 bp, Homo sapiens; identical to SEQ ID NO: 46357
  chr9:98272637-98273719
  hypo

SEQ ID NO: 77835 - DNA, 30 bp, Homo sapiens; identical to SEQ ID NO: 46358
  chr9:98278368-98278398
  hypo

SEQ ID NO: 77836 - DNA, 413 bp, Homo sapiens; identical to SEQ ID NO: 46359
  chr9:98278669-98279082
  hypo

SEQ ID NO: 77837 - DNA, 31 bp, Homo sapiens; identical to SEQ ID NO: 23305
  chr9:98356425-98356456
  hypo

SEQ ID NO: 77838 - DNA, 31 bp, Homo sapiens
  chr9:98369372-98369403
  hypo
tttatatatattatctcgcttaattcttgca

SEQ ID NO: 77839 - DNA, 46 bp, Homo sapiens; identical to SEQ ID NO: 23306
  chr9:98459834-98459880
  hypo

SEQ ID NO: 77840 - DNA, 208 bp, Homo sapiens
  chr9:98490543-98490751
  hypo
caagatgtggaactggtaagccgaaagcttttgaaaggcactcatgaggtttgcctgggaaaactgcaccactgtgcgtcagcagcggcagcctgcgacaggactctattaagataggcacagcacaggtgcttaaaactgtgattggcggtcagattgcctgagtttgagtcaaccctggaatatcgtttaatctctctgtctctga

SEQ ID NO: 77841 - DNA, 30 bp, Homo sapiens
  chr9:98622610-98622640
  hypo
tggtgtcatgtttatcgtatctaagacttc

SEQ ID NO: 77842 - DNA, 60 bp, Homo sapiens
  chr9:98842604-98842664
  hypo
gagctctgtatctgcattttccgacatcccagaaagtacggtagttcctgttctaatcat

SEQ ID NO: 77843 - DNA, 232 bp, Homo sapiens
  chr9:98842926-98843158
  hypo
tcttaaggagaatgtccagggcgcctcactgatcgtaaggaaatcaggagcagaagtggatctgctggcccttctgtgcctagtcaggccacgggacaggtctccctggaatggtagcatgaccaaaaggccagtcaggctctgggctcagaccacgtgggttcgaatccaagtgctgccactgcctagcaaggtgatccggaaagctaccgaaacaccctggactttcatt

SEQ ID NO: 77844 - DNA, 81 bp, Homo sapiens
  chr9:99102563-99102644
  hypo
gtctcatatattttggcatctcgtcatacaatacttttaaaaactagtcaaacttggctgggcgcagtggctcacgtctgt

SEQ ID NO: 77845 - DNA, 30 bp, Homo sapiens; identical to SEQ ID NO: 23307
  chr9:99107784-99107814
  hypo

SEQ ID NO: 77846 - DNA, 330 bp, Homo sapiens
  chr9:99139191-99139521
  hypo
atggggtcaacaatttgaaagtaaaccagccagccagatgtggttttcggctcacaacactcaagagctgctcaagtgctgaaagaagcaagcagaagacaagtgcatgccaaagtgagaagaaaagagtctcacgtgtccctcctagagtggctctcagcggaccaagcagagaaacaatgccaggaggcacagtcacagcagcgagaagggactgaggaggaggcctggggaagccaagtgtggacagcctgcaggggagatctcggagaggtgcagttactcgtgttaccgctgatcatccgaaacgggccactcttgtcataccaa

SEQ ID NO: 77847 - DNA, 31 bp, Homo sapiens; identical to SEQ ID NO: 46363
  chr9:99145683-99145714
  hypo

SEQ ID NO: 77848 - DNA, 31 bp, Homo sapiens
  chr9:99199880-99199911
  hypo
cctgatgttacatcaccggtgaccttgggca

SEQ ID NO: 77849 - DNA, 189 bp, Homo sapiens
  chr9:99258625-99258814
  hypo
ggacagccaaccatcgctggaaaagggaggagatggacagcgctgtacttaccaccaccaccaccaccacagggcctgtctcagggcttgagtttgtgtggacggcaaggactagcttcctgggccgctaactctcaaccgcaaggcaaacttgggttggggcccagaacggccgtcagccgttaccct

SEQ ID NO: 77850 - DNA, 377 bp, Homo sapiens
  chr9:99259300-99259677
  hypo
gcctgaaaagacgtcgtttaacacagagaaacacacccagggccaggagaaaccattgtcctccccgagtcccacaacgcacaaagcacacggtggccctcccacgcggagtcgtctacccctttagaaacagacttggcccattagagcctccgcggccaggccggggcctccttacctggggatttaggtgtggacccagcacgcgtcgtccagaagcgtgtcaaagccatgcagacttgctgccaaagagtcaggcggggttagaggcggggaggcaggggcggggaggcagaggcgggaggccccccactcccacacaggccagggacccccgaggcgctggggaggaatccggaaggctttgctcaggggga

SEQ ID NO: 77851 - DNA, 197 bp, Homo sapiens
  chr9:99267707-99267904
  hypo
aacagcataagctaacaaacacgcaccagcggaagggctgcgtgaagacatgagtgaatgcgagcaaatgaggtggctgcaggctctcactcggggcatgatgaaatttccaagactgttctaagagagctcttcagagaggtcatgtgagaacactgaaaacaggccgattcaacggagccaattattcactggat

SEQ ID NO: 77852 - DNA, 241 bp, Homo sapiens; identical to SEQ ID NO: 46369
  chr9:99416949-99417190
  hypo

SEQ ID NO: 77853 - DNA, 410 bp, Homo sapiens; identical to SEQ ID NO: 46370
  chr9:99417396-99417806
  hypo

SEQ ID NO: 77854 - DNA, 80 bp, Homo sapiens
  chr9:99446886-99446966
  hypo
cagatagaagaggcagggcctcgtaaccgtaagcagcttgactttttttttttttgagacggactcttggtctgtcgccc

SEQ ID NO: 77855 - DNA, 212 bp, Homo sapiens
  chr9:99450308-99450520
  hypo
aaaaagagtgatgtgatgtgtattttagagagataagtgcagtggattaaaatggattagaaaaggcaggaaaaaacgataggctgttaacttcgttttggctctaaacttctcgtaaagaagtggagcaagcaagatggggaatggaaggcaagaagtatgaaatctgaggcggacctttgcaaaggatcgtttcagtatgacttcacagg

SEQ ID NO: 77856 - DNA, 46 bp, Homo sapiens
  chr9:99641470-99641516
  hypo
gaaacaatgggatacttaggccgggcgcagtggctcacgcctataa

SEQ ID NO: 77857 - DNA, 30 bp, Homo sapiens
  chr9:99818323-99818353
  hypo
cactgccgatggctccgggataggttcggt

SEQ ID NO: 77858 - DNA, 30 bp, Homo sapiens; identical to SEQ ID NO: 23312
  chr9:99883667-99883697
  hypo

SEQ ID NO: 77859 - DNA, 337 bp, Homo sapiens; identical to SEQ ID NO: 46375
  chr9:99983395-99983732
  hypo

SEQ ID NO: 77860 - DNA, 221 bp, Homo sapiens; identical to SEQ ID NO: 6928
  chr9:99983767-99983988
  hypo

SEQ ID NO: 77861 - DNA, 16 bp, Homo sapiens
  chr9:99984041-99984057
  hypo
cgcctggccgtgactc

SEQ ID NO: 77862 - DNA, 45 bp, Homo sapiens; identical to SEQ ID NO: 6930
  chr9:99984107-99984152
  hypo

SEQ ID NO: 77863 - DNA, 30 bp, Homo sapiens
  chr9:100267686-100267716
  hypo
ggtgaccccagggccgtttctagcgatgat

SEQ ID NO: 77864 - DNA, 20 bp, Homo sapiens
  chr9:100284857-100284877
  hypo
ttttgagactggatctcact

SEQ ID NO: 77865 - DNA, 181 bp, Homo sapiens
  chr9:100297535-100297716
  hypo
gcttctctgctggtcccggcaagactcacaagggctggaacgagggtgatgcccacagaaggagacatttcggaacactgcagcctcagaccctaatgcctcccctagcaggccatgccgccctcatctgctgggcctctgctgcactgtgctttctctctccctgcgatgcccctgcact

SEQ ID NO: 77866 - DNA, 43 bp, Homo sapiens
  chr9:100299677-100299720
  hypo
tctaggcaggatggcttctcacgtagccctatctatagcaatg

SEQ ID NO: 77867 - DNA, 77 bp, Homo sapiens
  chr9:100308891-100308968
  hypo
cctgattatttttttacgcaaacctaaacagttttgagagtaaaagaagaaactgttaataacgacatcaggacttt

SEQ ID NO: 77868 - DNA, 84 bp, Homo sapiens; identical to SEQ ID NO: 23317
  chr9:100349303-100349387
  hypo

SEQ ID NO: 77869 - DNA, 2 bp, Homo sapiens
  chr9:100397737-100397739
  hypo
gc

SEQ ID NO: 77870 - DNA, 304 bp, Homo sapiens; identical to SEQ ID NO: 6933
  chr9:100565761-100566065
  hypo

SEQ ID NO: 77871 - DNA, 101 bp, Homo sapiens; identical to SEQ ID NO: 46385
  chr9:100610033-100610134
  hypo

SEQ ID NO: 77872 - DNA, 616 bp, Homo sapiens; identical to SEQ ID NO: 46386
  chr9:100610200-100610816
  hypo

SEQ ID NO: 77873 - DNA, 1594 bp, Homo sapiens; identical to SEQ ID NO: 46390
  chr9:100614441-100616035
  hypo

SEQ ID NO: 77874 - DNA, 198 bp, Homo sapiens; identical to SEQ ID NO: 6942
  chr9:100616270-100616468
  hypo

SEQ ID NO: 77875 - DNA, 139 bp, Homo sapiens
  chr9:100690586-100690725
  hypo
cgtgagccaccgcgcccggccgatcaagtgtattttttaacctagcagacagacaaggatttttaaaatgtcataatgtacagtgctgacaagggtgtggggaaaaggcacctgtctcgtgtgaattgctaccacattt

SEQ ID NO: 77876 - DNA, 24 bp, Homo sapiens
  chr9:100818303-100818327
  hypo
gagccaccgcgcccgcccaggtga

SEQ ID NO: 77877 - DNA, 33 bp, Homo sapiens
  chr9:100835844-100835877
  hypo
gtgagccaccgcgcctggcctgggcttcttttt

SEQ ID NO: 77878 - DNA, 257 bp, Homo sapiens
  chr9:100843156-100843413
  hypo
agcgatatctgtggccgcagtggctctgggggccaaggtgttggaacgtcacataactttggacaagacctggaaggggagtgaccactcggcctcgctggagcctggagaactggccgagctggtgcggtcagtgcgtcttgtggagcgtgccctgggctccccaaccaagcagctgctgccctgtgagatggcctgcaatgagaaggtgtgtcctgccggactctactcggttctgctgccgtgtgtggaaaaag

SEQ ID NO: 77879 - DNA, 179 bp, Homo sapiens
  chr9:100849663-100849842
  hypo
taaggggaccagccacgctgatctaggtagattaggcgagactgggcagctgcggcgtacctggaggctgtcacgccggtcctggcccctagggcagccgggggatgctgatggccccctcccagagccgcagggccgggtagagcggctcctggaacgtggcgcggaaggtatgcagg

SEQ ID NO: 77880 - DNA, 129 bp, Homo sapiens
  chr9:100890702-100890831
  hypo
aagaacagaggtggaccgagacccaggactcctgacgcccactgatgtcacactggctgtgagaaaggccgctctgtggctgccccatgaacgtgggctccaggctctggtgcccgacagccctgggtc

SEQ ID NO: 77881 - DNA, 30 bp, Homo sapiens
  chr9:100894486-100894516
  hypo
gccggttgttccatcgggatgtgcctgtgg

SEQ ID NO: 77882 - DNA, 190 bp, Homo sapiens
  chr9:100924990-100925180
  hypo
gtgggtgtgcatgcacgtgtgcatccctttggatgtttaactgaggctgtgtatatacacatgcatgagcgcatgcgtgtatccgtgcatgcatgactttaatgactcagtaattcagagaacaggagttcattttccctacaagcaggcacttgcccacaagtgagtactgtagcgggcccttcgccta

SEQ ID NO: 77883 - DNA, 30 bp, Homo sapiens
  chr9:100925442-100925472
  hypo
ctctgggttttgcatcgcactgagtttatt

SEQ ID NO: 77884 - DNA, 183 bp, Homo sapiens
  chr9:100933033-100933216
  hypo
aattctgacaccaattcgctccgtcaccttgggcaaatctcgtcccctctcccgctttctgagtttctatccatataatagtaacagccctgccctgcccacctgttaggacggtctgtggagggtgctgcagcttgcacacaccagacacacacaggaccacaagggcgacagagctgtcca

SEQ ID NO: 77885 - DNA, 89 bp, Homo sapiens
  chr9:100936045-100936134
  hypo
ctctaagtcttgataccacatcgtcaggttgctgtgagatgagcaaggagcttaagagcgtgtagcctttggtctgggtgtggtggctc

SEQ ID NO: 77886 - DNA, 95 bp, Homo sapiens
  chr9:100981135-100981230
  hypo
ttctgacccctgtgctgctctaccggggcttgcacagtggattccggcagtatgggtggagagaagaggaagccgcctggctgggggcaggcagg

SEQ ID NO: 77887 - DNA, 30 bp, Homo sapiens
  chr9:100983353-100983383
  hypo
gggcctccacccgccggcccagctccgcga

SEQ ID NO: 77888 - DNA, 121 bp, Homo sapiens
  chr9:101009638-101009759
  hypo
acaaacaaaaaaaaaaacaagaaggatactctctaccttgtctccttcagagttaatgtatacaaaaatgtttaaaaagccgtaaagctgggctgggcacgatggctcacgcctgtaatcc

SEQ ID NO: 77889 - DNA, 175 bp, Homo sapiens
  chr9:101014051-101014226
  hypo
tagcccattgggtacctagctcgaggtgcaggacgggcccattcccagccagggcggcatcaggggtggcaggaggtgccggcgggctgttgtggaattcccagcgcttcatctgcagctgctgcagccagtacagcatcgcttgcttggtggcggcctgagaagcacaaggatt

SEQ ID NO: 77890 - DNA, 22 bp, Homo sapiens
  chr9:101019660-101019682
  hypo
acaaaatatttcttttcttttc

SEQ ID NO: 77891 - DNA, 119 bp, Homo sapiens
  chr9:101052971-101053090
  hypo
atggatgggaggtaggcgtggtggaggatggggagctggagggacagccgacgctggatgctgaagagaaggagagggaggagtgttagtgaagggtagctgggcgcttaccagaaagt

SEQ ID NO: 77892 - DNA, 31 bp, Homo sapiens
  chr9:101065558-101065589
  hypo
ctgtaggccctccaggcgggatgtgctggct

SEQ ID NO: 77893 - DNA, 345 bp, Homo sapiens
  chr9:101216241-101216586
  hypo
gcccagaggcatgggactgaccgtgaccccgaagaagttggtctcgttcatggcattgaggatgatcctgcccagcgtgtggtccgtgtagttgaagtcctggatccgctggtgccggctgctggcatgcagtgtctccatggccctctgcagtgtcttggcgatgacccagatgccatcgtaggcgtacccgtggaacttgctgggccccacgcctgaccgcttgttgttgtactctctctcatactgctgtggagtctggaaaaacaggggattgggggaatcccaagttatactcggcagggacatcaggtgcctgatgccgagaagagctgctattcttca

SEQ ID NO: 77894 - DNA, 157 bp, Homo sapiens; identical to SEQ ID NO: 23328
  chr9:101280571-101280728
  hypo

SEQ ID NO: 77895 - DNA, 99 bp, Homo sapiens
  chr9:101445881-101445980
  hypo
aagaaactaatcatggagatgcgcatctattttgtttccgggctgaatgcggcacccttgtttagaagagaaaaaaaaaaccaacaactagaaacaacc

SEQ ID NO: 77896 - DNA, 1097 bp, Homo sapiens; identical to SEQ ID NO: 46399
  chr9:101469270-101470367
  hypo

SEQ ID NO: 77897 - DNA, 154 bp, Homo sapiens; identical to SEQ ID NO: 23330
  chr9:101553961-101554115
  hypo

SEQ ID NO: 77898 - DNA, 509 bp, Homo sapiens; identical to SEQ ID NO: 46405
  chr9:101569828-101570337
  hypo

SEQ ID NO: 77899 - DNA, 249 bp, Homo sapiens; identical to SEQ ID NO: 6954
  chr9:101705946-101706195
  hypo

SEQ ID NO: 77900 - DNA, 637 bp, Homo sapiens; identical to SEQ ID NO: 46407
  chr9:101706314-101706951
  hypo

SEQ ID NO: 77901 - DNA, 30 bp, Homo sapiens
  chr9:101748067-101748097
  hypo
ttcgccatcactgacgccttccagaaggtc

SEQ ID NO: 77902 - DNA, 88 bp, Homo sapiens
  chr9:101813106-101813194
  hypo
gggtcatagccttcaaaatgacgcagtttggccgcgtatttgcccagacatctggctaagtctaaacgttgaggcatccaagtctgca

SEQ ID NO: 77903 - DNA, 165 bp, Homo sapiens
  chr9:101904929-101905094
  hypo
tctgtccacggcgagcggtcttgcccatcttcacatggagattgttggtacccaaggtaattctataagcagttctattatttaagctttaaattttcatgaataatgtctatgaaaatagaaggtggaggctgggcctggtggctcatgcctataatcccagca

SEQ ID NO: 77904 - DNA, 163 bp, Homo sapiens
  chr9:102068814-102068977
  hypo
cagggccgtggttgtgaggaagatcgagacccatgatggcaagctggagtccgagtcctctgacgtcctgtccaagtgaacagctgcggcagccccaccccgcctgcccctcctggctgacccagagcgggggagggaggccgctgtgagggaagcacaggga

SEQ ID NO: 77905 - DNA, 31 bp, Homo sapiens; identical to SEQ ID NO: 23333
  chr9:102591226-102591257
  hypo

SEQ ID NO: 77906 - DNA, 30 bp, Homo sapiens
  chr9:102761248-102761278
  hypo
tctggatctcaggtcggcggcaaagaactg

SEQ ID NO: 77907 - DNA, 145 bp, Homo sapiens; identical to SEQ ID NO: 23334
  chr9:103174496-103174641
  hypo

SEQ ID NO: 77908 - DNA, 85 bp, Homo sapiens
  chr9:103174700-103174785
  hypo
aaacaaacaaaagcccgggggaaacaaatcaaatgtccccgtataaatgataaacaaaatgtggtatatacggaaccttattcag

SEQ ID NO: 77909 - DNA, 30 bp, Homo sapiens; identical to SEQ ID NO: 6958
  chr9:103190004-103190034
  hypo

SEQ ID NO: 77910 - DNA, 193 bp, Homo sapiens
  chr9:103493406-103493599
  hypo
caattttgtctgttaaaatatcgtatatttctggccaataccacatctgacccgcgagcacagaaccccgcccttgccgctctgccgcccagtccacacccgccgccagctcaccatggatgatgatatcgccccacttgtcattgacaacggctcaggcatgtgcaaggccggctttgcaggtgataatgtc

SEQ ID NO: 77911 - DNA, 181 bp, Homo sapiens
  chr9:104238255-104238436
  hypo
cttggccctcaacagcgagtacagtgccatgtccttgccaaagcccttgtggcagtacacttgggacaggtaggtgagggtccggcgggccgcaggtgccgggaagagcatggctggggtgcaacactgagaggcaggaaccacactgtacagggaaggactcagccgccgcagttccagg

SEQ ID NO: 77912 - DNA, 85 bp, Homo sapiens
  chr9:104238667-104238752
  hypo
tgtggctcagagaagcgagcccgcagaaggtgctccaagactgggaagatctgctcttctggtacagcatcgtcttctaccatca

SEQ ID NO: 77913 - DNA, 304 bp, Homo sapiens; identical to SEQ ID NO: 46413
  chr9:104248345-104248649
  hypo

SEQ ID NO: 77914 - DNA, 872 bp, Homo sapiens; identical to SEQ ID NO: 6961
  chr9:104248697-104249569
  hypo

SEQ ID NO: 77915 - DNA, 317 bp, Homo sapiens
  chr9:104305541-104305858
  hypo
ctgtctaacctgccacggcagtactgtctaaccgtgccagggcggcactgtctaacccttccagggcggcactgtctaacccttccagggcggcactgtctaaccctgccagggcggcactgtctaacctgccagagcggcactgtctaacctgccagagcggcactgtctaactctgccagggcggcactgtctaacctgccaaggcagcactgtctaaccctgccagggtggcactgtctaaccctgccactgcagtactgtccaaccctgccagagcggaactgtctaacctgccagggcggcactgtctaacc

SEQ ID NO: 77916 - DNA, 188 bp, Homo sapiens
  chr9:104365591-104365779
  hypo
atatgtattttttctgcgtgcatggttctataatcagggaaggagagaacatttgtcaagccaggtgttcgccataaacgatctcattaaatatatttcacactttcagtcaggccctattattattcccgggtttggaggaagatctgaagttttggaagttgcacagcttgcgtagacacacagtg

SEQ ID NO: 77917 - DNA, 30 bp, Homo sapiens
  chr9:104473573-104473603
  hypo
gtagtgcatacagcccggattcactgaccg

SEQ ID NO: 77918 - DNA, 30 bp, Homo sapiens; identical to SEQ ID NO: 6963
  chr9:105037092-105037122
  hypo

SEQ ID NO: 77919 - DNA, 30 bp, Homo sapiens
  chr9:106761984-106762014
  hypo
gtctctttaggccacggagctgcgtagatc

SEQ ID NO: 77920 - DNA, 30 bp, Homo sapiens
  chr9:106881380-106881410
  hypo
acttaatgttgctctcggccacgaaaacat

SEQ ID NO: 77921 - DNA, 30 bp, Homo sapiens
  chr9:106881736-106881766
  hypo
gcttattctgcttgccgtgctgtatcagaa

SEQ ID NO: 77922 - DNA, 17 bp, Homo sapiens
  chr9:107064994-107065011
  hypo
ggcgtgacccactgcgc

SEQ ID NO: 77923 - DNA, 40 bp, Homo sapiens; identical to SEQ ID NO: 23340
  chr9:107144257-107144297
  hypo

SEQ ID NO: 77924 - DNA, 36 bp, Homo sapiens
  chr9:107260231-107260267
  hypo
ttcaagccacatttggccaggcgcagtggctcacgc

SEQ ID NO: 77925 - DNA, 35 bp, Homo sapiens
  chr9:107260506-107260541
  hypo
cagggtgagactccgtctcaaaaaaaaaattaaaa

SEQ ID NO: 77926 - DNA, 267 bp, Homo sapiens; identical to SEQ ID NO: 23341
  chr9:107396337-107396604
  hypo

SEQ ID NO: 77927 - DNA, 30 bp, Homo sapiens
  chr9:107525099-107525129
  hypo
aaatgataagcccccgggggagtggcttct

SEQ ID NO: 77928 - DNA, 50 bp, Homo sapiens
  chr9:107554119-107554169
  hypo
aaatccacttttacctcttaacgagcatcgttgcttgattgggtagagat

SEQ ID NO: 77929 - DNA, 31 bp, Homo sapiens; identical to SEQ ID NO: 23342
  chr9:107729488-107729519
  hypo

SEQ ID NO: 77930 - DNA, 31 bp, Homo sapiens; identical to SEQ ID NO: 23343
  chr9:108200731-108200762
  hypo

SEQ ID NO: 77931 - DNA, 66 bp, Homo sapiens
  chr9:108257888-108257954
  hypo
ctgtagaccggagctgttcctattcggccatcttggctccagctcgggttgtttcttttcttattg

SEQ ID NO: 77932 - DNA, 30 bp, Homo sapiens; identical to SEQ ID NO: 23344
  chr9:108282462-108282492
  hypo

SEQ ID NO: 77933 - DNA, 572 bp, Homo sapiens; identical to SEQ ID NO: 46423
  chr9:108418382-108418954
  hypo

SEQ ID NO: 77934 - DNA, 31 bp, Homo sapiens
  chr9:109606635-109606666
  hypo
aaatgcttgctcaaatcggcttaatcaaacc

SEQ ID NO: 77935 - DNA, 31 bp, Homo sapiens; identical to SEQ ID NO: 23345
  chr9:109686799-109686830
  hypo

SEQ ID NO: 77936 - DNA, 223 bp, Homo sapiens; identical to SEQ ID NO: 23346
  chr9:109689778-109690001
  hypo

SEQ ID NO: 77937 - DNA, 292 bp, Homo sapiens; identical to SEQ ID NO: 23347
  chr9:109690710-109691002
  hypo

SEQ ID NO: 77938 - DNA, 45 bp, Homo sapiens
  chr9:109693209-109693254
  hypo
aaggtccaggattctcggtctaggaggcttcgggtcgtccttcta

SEQ ID NO: 77939 - DNA, 23 bp, Homo sapiens
  chr9:109835379-109835402
  hypo
attacaggcgtgagccaccgcgc

SEQ ID NO: 77940 - DNA, 38 bp, Homo sapiens; identical to SEQ ID NO: 23348
  chr9:109865316-109865354
  hypo

SEQ ID NO: 77941 - DNA, 42 bp, Homo sapiens
  chr9:109894934-109894976
  hypo
tggatgctctgtagggcgggggtccctgacccccaggccacg

SEQ ID NO: 77942 - DNA, 41 bp, Homo sapiens
  chr9:109895275-109895316
  hypo
ctgtagggcatcaaatatgtcatttccgtgattgcaagaca

SEQ ID NO: 77943 - DNA, 21 bp, Homo sapiens
  chr9:110012769-110012790
  hypo
agccaccgtgcctggccccca

SEQ ID NO: 77944 - DNA, 30 bp, Homo sapiens
  chr9:110093452-110093482
  hypo
aagcatttacatcacgtactcataacctat

SEQ ID NO: 77945 - DNA, 266 bp, Homo sapiens; identical to SEQ ID NO: 23351
  chr9:110096155-110096421
  hypo

SEQ ID NO: 77946 - DNA, 30 bp, Homo sapiens
  chr9:110121113-110121143
  hypo
cgtagccggtgcctgcgcacaagtgcccaa

SEQ ID NO: 77947 - DNA, 115 bp, Homo sapiens
  chr9:110126148-110126263
  hypo
taaatcagtgggagaggtgagcgcttgctctagtgaggcatttatgattggctgcctttcattgagccacacggcgagctcattcggtgagcagaaagcccggcagagcaggcct

SEQ ID NO: 77948 - DNA, 35 bp, Homo sapiens; identical to SEQ ID NO: 23352
  chr9:110160587-110160622
  hypo

SEQ ID NO: 77949 - DNA, 31 bp, Homo sapiens
  chr9:110177580-110177611
  hypo
gagtggggtaattatgcgctctgttttttag

SEQ ID NO: 77950 - DNA, 31 bp, Homo sapiens
  chr9:110288498-110288529
  hypo
agacacacacagctgcctgtacggttcagat

SEQ ID NO: 77951 - DNA, 30 bp, Homo sapiens
  chr9:110288708-110288738
  hypo
agtagagacggagtttcaccatgttggcca

SEQ ID NO: 77952 - DNA, 30 bp, Homo sapiens; identical to SEQ ID NO: 46434
  chr9:110306099-110306129
  hypo

SEQ ID NO: 77953 - DNA, 20 bp, Homo sapiens
  chr9:110312666-110312686
  hypo
ttttgagatggaggctcgct

SEQ ID NO: 77954 - DNA, 31 bp, Homo sapiens; identical to SEQ ID NO: 23353
  chr9:110328591-110328622
  hypo

SEQ ID NO: 77955 - DNA, 140 bp, Homo sapiens
  chr9:110335014-110335154
  hypo
aataaaaagacaatgtcggccatagacatcatgcaccgtctaatggcaatttagtcaatgactgaccgcgtgcacgatggtggtcccatcaaattatcattgtatttttactacaccttttcttttcttttcttttgaga

SEQ ID NO: 77956 - DNA, 21 bp, Homo sapiens
  chr9:110353020-110353041
  hypo
ttgggggacagagtttcgctc

SEQ ID NO: 77957 - DNA, 356 bp, Homo sapiens
  chr9:110390659-110391015
  hypo
tgtacaaatacagatgagggacggcttcccggggtggtcctttgattccagtaagagttatcacggataaagggagggtgcgtatcaggcaaagaatgcatggagtgtttggaggcgcggtgtgcagagcttgcaggaggcagtgtgcggtgagttgtggggactcctacgttgtctgatccctccttttctgctggatcctccccatcaacgtttacccgcactcaggtctctcatcttacagcaaaccctcactccacctcacatcttactccagctcctgactcatcaatttccctcccagccaaatttttcaaataaatgttctgtgctatgcgcatcgtctccatttccct

SEQ ID NO: 77958 - DNA, 77 bp, Homo sapiens; identical to SEQ ID NO: 23356
  chr9:110478887-110478964
  hypo

SEQ ID NO: 77959 - DNA, 184 bp, Homo sapiens
  chr9:110531374-110531558
  hypo
gacttgcctggggttacggaggtcataacttagaaaacaggggagcgggggactagaatccagagcctctcctcttacttgtcacgctagaggctggggccaaagtggggcccctttctcattctcaatccccctcccataccctcggtgtctctttcatctcacagtgcgacaggcagcaaag

SEQ ID NO: 77960 - DNA, 31 bp, Homo sapiens
  chr9:110558849-110558880
  hypo
tagtccattttcacaccgctgataaagacct

SEQ ID NO: 77961 - DNA, 215 bp, Homo sapiens
  chr9:110779879-110780094
  hypo
agagctcaagcctcaacattacggctgcctcagtgacttgaaagaaaaccgggcagggcttcttcaaggacataagctagcagctcacaatggggcctgatgggacatgttgcatcgaaactagaagttggcattgagatccagcctcactgtggcactacaaagctgccgccacgtcagctggatgacactgaaatggacgagaacaaaaggct

SEQ ID NO: 77962 - DNA, 30 bp, Homo sapiens; identical to SEQ ID NO: 23358
  chr9:110813284-110813314
  hypo

SEQ ID NO: 77963 - DNA, 186 bp, Homo sapiens; identical to SEQ ID NO: 23359
  chr9:110842927-110843113
  hypo

SEQ ID NO: 77964 - DNA, 45 bp, Homo sapiens
  chr9:110861944-110861989
  hypo
tgaaaaaccattcaatggggccgggtgcggtggctcatgcctgta

SEQ ID NO: 77965 - DNA, 30 bp, Homo sapiens; identical to SEQ ID NO: 46436
  chr9:110888462-110888492
  hypo

SEQ ID NO: 77966 - DNA, 20 bp, Homo sapiens
  chr9:110976599-110976619
  hypo
acaagtcggccagatgcggg

SEQ ID NO: 77967 - DNA, 30 bp, Homo sapiens; identical to SEQ ID NO: 23360
  chr9:111033910-111033940
  hypo

SEQ ID NO: 77968 - DNA, 31 bp, Homo sapiens; identical to SEQ ID NO: 23361
  chr9:111212068-111212099
  hypo

SEQ ID NO: 77969 - DNA, 33 bp, Homo sapiens
  chr9:111446305-111446338
  hypo
tgggcaaggtggctcacgcctgtaatcccagca

SEQ ID NO: 77970 - DNA, 30 bp, Homo sapiens
  chr9:111617046-111617076
  hypo
ggccaggatggaaccgccggtccacacgga

SEQ ID NO: 77971 - DNA, 50 bp, Homo sapiens
  chr9:111617455-111617505
  hypo
atgatgtgcaggtggtcgtccgtgaatgcgtggcccgcctcattgagcag

SEQ ID NO: 77972 - DNA, 67 bp, Homo sapiens
  chr9:111617923-111617990
  hypo
gtccacttgcgggtgtcgccagcgtcggccgcctcggggcagcgtttgcccacggtggaggagatga

SEQ ID NO: 77973 - DNA, 30 bp, Homo sapiens
  chr9:111625747-111625777
  hypo
tcccaatgacaccccgcaggtaaacgtgct

SEQ ID NO: 77974 - DNA, 193 bp, Homo sapiens; identical to SEQ ID NO: 23362
  chr9:111835845-111836038
  hypo

SEQ ID NO: 77975 - DNA, 34 bp, Homo sapiens
  chr9:111876330-111876364
  hypo
gggcaacaagagcgtaaatccatccccaaaacaa

SEQ ID NO: 77976 - DNA, 29 bp, Homo sapiens
  chr9:111894539-111894568
  hypo
ccaccgcgcccggccgatacaacttttta

SEQ ID NO: 77977 - DNA, 30 bp, Homo sapiens; identical to SEQ ID NO: 23363
  chr9:111930182-111930212
  hypo

SEQ ID NO: 77978 - DNA, 30 bp, Homo sapiens
  chr9:111936760-111936790
  hypo
gagcacacaaagcccgaagaaagaagacgg

SEQ ID NO: 77979 - DNA, 188 bp, Homo sapiens
  chr9:111951146-111951334
  hypo
agccccaaagagaaagcgtaaagaacacagaaagcacaggtattcatggtctgtgttacctggggagggaagctagcacggtagacttggagtagcgtgcaggactccgcattctagggtgaacatcactaatgcatcaatgtaccctcccccaactcccctcgctcagtcaacgccaatgcccccaa

SEQ ID NO: 77980 - DNA, 59 bp, Homo sapiens
  chr9:111952370-111952429
  hypo
acgctcggctaggttacgctggttctgatagtgtcttggtggaacgttgctgaatgaag

SEQ ID NO: 77981 - DNA, 31 bp, Homo sapiens
  chr9:112029751-112029782
  hypo
ccttgtaaactcctcacgaaggttgtttggt

SEQ ID NO: 77982 - DNA, 268 bp, Homo sapiens
  chr9:112040327-112040595
  hypo
gagacaccaaaggcctcgagggatgcgaaggacagtcatgaggtcagagggtaggacactggtcggcccaacctcaaaggaagcggaattggactcagaggtggaaagaggaaaagttgttctgcccttctcccgggtccggtggacggagtgagagtctctggctgagaaatgagaaggaacccgggagggttcgaggaggacagtttgaggaggacacagtttgggggtggggtggggtggcataacaggacgtcctgaagatgca

SEQ ID NO: 77983 - DNA, 532 bp, Homo sapiens; identical to SEQ ID NO: 6972
  chr9:112081563-112082095
  hypo

SEQ ID NO: 77984 - DNA, 1133 bp, Homo sapiens; identical to SEQ ID NO: 46440
  chr9:112082369-112083502
  hypo

SEQ ID NO: 77985 - DNA, 79 bp, Homo sapiens
  chr9:112295750-112295829
  hypo
gtcggtaagttgcggcggtaccgacgttgaggtggctgctgaccttgggtctcacctcgttgattttctttatcctctt

SEQ ID NO: 77986 - DNA, 30 bp, Homo sapiens; identical to SEQ ID NO: 23368
  chr9:112664145-112664175
  hypo

SEQ ID NO: 77987 - DNA, 85 bp, Homo sapiens
  chr9:112847320-112847405
  hypo
agatgcaaccatactttaaaaaatatattttccatcgtggttggttgagtctacagtgtgtaaccacagacgcagagggccaatt

SEQ ID NO: 77988 - DNA, 21 bp, Homo sapiens
  chr9:113025658-113025679
  hypo
cctgggcgtgtctaaaaacaa

SEQ ID NO: 77989 - DNA, 20 bp, Homo sapiens
  chr9:113120483-113120503
  hypo
gttgtcttgcttcacaaaac

SEQ ID NO: 77990 - DNA, 18 bp, Homo sapiens
  chr9:113179381-113179399
  hypo
aggaggaggagccaagat

SEQ ID NO: 77991 - DNA, 204 bp, Homo sapiens; identical to SEQ ID NO: 23370
  chr9:113592869-113593073
  hypo

SEQ ID NO: 77992 - DNA, 30 bp, Homo sapiens
  chr9:113733116-113733146
  hypo
tcttcaaagttgcccgaggccgggcacagt

SEQ ID NO: 77993 - DNA, 19 bp, Homo sapiens
  chr9:113785035-113785054
  hypo
aaaaccctgctattgccgg

SEQ ID NO: 77994 - DNA, 46 bp, Homo sapiens
  chr9:113897403-113897449
  hypo
gctgcattttttgttcttaattttcgtaaaagacaactgacaattt

SEQ ID NO: 77995 - DNA, 17 bp, Homo sapiens
  chr9:114247608-114247625
  hypo
caaaaagaaaaaaaaaa

SEQ ID NO: 77996 - DNA, 31 bp, Homo sapiens; identical to SEQ ID NO: 23371
  chr9:114320409-114320440
  hypo

SEQ ID NO: 77997 - DNA, 26 bp, Homo sapiens
  chr9:114326074-114326100
  hypo
cgtgcccagagcgattaagcaatttc

SEQ ID NO: 77998 - DNA, 31 bp, Homo sapiens
  chr9:114352193-114352224
  hypo
cgtgagccactgcccccggcatgaataaata

SEQ ID NO: 77999 - DNA, 221 bp, Homo sapiens
  chr9:114556867-114557088
  hypo
cagacaaaaaaacgtaacatggcagagaaggcgaggtgcacctattttcccttattgtttagcccatacaacttctagttgatgggctgaaatcccaccagcatctctgagaccttcacaccttctattctcaggttaagtggacagtgggtctggggttttgtctctacagagccacatcggccgggcctcacagatgcgttttccagagattcctgagc

SEQ ID NO: 78000 - DNA, 30 bp, Homo sapiens; identical to SEQ ID NO: 23374
  chr9:114619450-114619480
  hypo

SEQ ID NO: 78001 - DNA, 23 bp, Homo sapiens
  chr9:114649574-114649597
  hypo
aagtgctgggattacacgcatga

SEQ ID NO: 78002 - DNA, 17 bp, Homo sapiens
  chr9:114670202-114670219
  hypo
ccagcctaccttatttt

SEQ ID NO: 78003 - DNA, 17 bp, Homo sapiens
  chr9:114683165-114683182
  hypo
ccagttttatgttgtcg

SEQ ID NO: 78004 - DNA, 17 bp, Homo sapiens
  chr9:114686351-114686368
  hypo
gcccatggtgcctggcc

SEQ ID NO: 78005 - DNA, 38 bp, Homo sapiens; identical to SEQ ID NO: 23376
  chr9:114701510-114701548
  hypo

SEQ ID NO: 78006 - DNA, 20 bp, Homo sapiens
  chr9:114747964-114747984
  hypo
ttttctctcggctgggcgag

SEQ ID NO: 78007 - DNA, 21 bp, Homo sapiens
  chr9:114749646-114749667
  hypo
gtagccaggtgtggtggctca

SEQ ID NO: 78008 - DNA, 105 bp, Homo sapiens; identical to SEQ ID NO: 23379
  chr9:114750308-114750413
  hypo

SEQ ID NO: 78009 - DNA, 22 bp, Homo sapiens
  chr9:114765804-114765826
  hypo
ctgtaagcgtgtattctatggt

SEQ ID NO: 78010 - DNA, 33 bp, Homo sapiens
  chr9:114789966-114789999
  hypo
gtgagccaccgcgccccaccctggagcatttta

SEQ ID NO: 78011 - DNA, 31 bp, Homo sapiens
  chr9:114802062-114802093
  hypo
attcttcccaatagagcggatacactctgga

SEQ ID NO: 78012 - DNA, 203 bp, Homo sapiens; identical to SEQ ID NO: 23381
  chr9:114830991-114831194
  hypo

SEQ ID NO: 78013 - DNA, 138 bp, Homo sapiens; identical to SEQ ID NO: 23382
  chr9:114832552-114832690
  hypo

SEQ ID NO: 78014 - DNA, 31 bp, Homo sapiens
  chr9:114889345-114889376
  hypo
tacacccacagcttctcgaaagttggccggg

SEQ ID NO: 78015 - DNA, 21 bp, Homo sapiens
  chr9:114917241-114917262
  hypo
agggcagggccaggtgcggtg

SEQ ID NO: 78016 - DNA, 88 bp, Homo sapiens
  chr9:114931850-114931938
  hypo
tttacgccacaccctacggttcacgtcaggcagtcactcacttaacccctaccggttcttttcacacctgtctcatacctgattcatt

SEQ ID NO: 78017 - DNA, 31 bp, Homo sapiens; identical to SEQ ID NO: 6985
  chr9:114937351-114937382
  hypo

SEQ ID NO: 78018 - DNA, 32 bp, Homo sapiens
  chr9:115067925-115067957
  hypo
tataagagctttcagccgggcacggtggctca

SEQ ID NO: 78019 - DNA, 31 bp, Homo sapiens
  chr9:115087449-115087480
  hypo
aagagggaagggtccccggagaaccttcgac

SEQ ID NO: 78020 - DNA, 30 bp, Homo sapiens
  chr9:115172301-115172331
  hypo
aaaaaaaaaaaaagacgtaggttttagtta

SEQ ID NO: 78021 - DNA, 83 bp, Homo sapiens
  chr9:115445175-115445258
  hypo
tgggattacaggcgtgagccaccgcgcctggctgaatgttgctctctttcctggctgaaaccgtctcatcttgaaagccaagt

SEQ ID NO: 78022 - DNA, 36 bp, Homo sapiens; identical to SEQ ID NO: 23385
  chr9:115478926-115478962
  hypo

SEQ ID NO: 78023 - DNA, 95 bp, Homo sapiens
  chr9:115479261-115479356
  hypo
agaaagaaagatacatttgaaatgtacacagactgaaacaaatgtaaactctgctagtgcctcaagcatttaattaaatacggcattgtttattc

SEQ ID NO: 78024 - DNA, 111 bp, Homo sapiens
  chr9:115550720-115550831
  hypo
gtacagttaagaggaattgggcgaagggtaggaaaagaactattgtttatgaaggggtcgttctaggcaccttcttcctacctaaggaacgcctggattgtggtgtagcac

SEQ ID NO: 78025 - DNA, 210 bp, Homo sapiens
  chr9:115598522-115598732
  hypo
agcattgctgaccagaatgggcgagtcagtcaagcacgtcactggcggctacaagctgaggactcggccgcttgagtttgctgccataggtgactacttagatacatttgcactcaaactgggaaccattgatcgaatagcccagcggatcatcaaagaagaaataggtgagctgtctgttgaggtctcgattatgccctgcagccacat

SEQ ID NO: 78026 - DNA, 31 bp, Homo sapiens; identical to SEQ ID NO: 23386
  chr9:115619370-115619401
  hypo

SEQ ID NO: 78027 - DNA, 274 bp, Homo sapiens
  chr9:115630951-115631225
  hypo
acaaaggtaacccagcaggatcgacaacgaaagggtaggtcagagcagaattgaagctgacccgaaatcggaaactcaaagctgatactgtgtgtgtatgttgtcgttccagtgcctcatggcgtgggagtcgattattccactactgcaggagaaacaagaggccaagtaaagttctttcttgggacggagactcttctacctacacagggcctggcaccctataccggaatgtccctgcagtgccagagacgcagtgctgggaaaacaacca

SEQ ID NO: 78028 - DNA, 145 bp, Homo sapiens
  chr9:115948532-115948677
  hypo
gaaatggggaggctgagagagcggtgctgggtacaaaggccgaacgggctgcagctgggaggtgacggcagatgcctggggataagcgtaggcttgcatacctgcatagggctgagaaactgacgagttaccactggttgataaa

SEQ ID NO: 78029 - DNA, 102 bp, Homo sapiens
  chr9:116043448-116043550
  hypo
attttttattaacctggatccctgtcaaacttcttattctttcgtttcagcatagatgccacctattcaaagaagcctttcgtcacacctaacccctctgtt

SEQ ID NO: 78030 - DNA, 98 bp, Homo sapiens
  chr9:116054116-116054214
  hypo
ggtgatggggaacccctctcacggttgaaaatttattacctttttacgccctgccacgaactgtgtagacattgtttttattaatcttttgtttggcc

SEQ ID NO: 78031 - DNA, 30 bp, Homo sapiens
  chr9:116054754-116054784
  hypo
agtagaccgcagccacgccgatggttatac

SEQ ID NO: 78032 - DNA, 30 bp, Homo sapiens
  chr9:116055512-116055542
  hypo
gggcacggtggctcacgtatgtaatcgctt

SEQ ID NO: 78033 - DNA, 191 bp, Homo sapiens
  chr9:116060034-116060225
  hypo
ggatgggcgtagacacggtggcagaggccgtgtctgggggcggcccagtctggcccccaggctgggggccaaggtccagcgtgtagacttgaggctggcgcaggaagtagcggctcttgggctggtccttgaggcacagctgatggccttccaggatgacatggtggggctccaggcggagcagggcgagc

SEQ ID NO: 78034 - DNA, 30 bp, Homo sapiens
  chr9:116060429-116060459
  hypo
tcagcctcaagctcccggccctgctgctca

SEQ ID NO: 78035 - DNA, 171 bp, Homo sapiens; identical to SEQ ID NO: 23389
  chr9:116061825-116061996
  hypo

SEQ ID NO: 78036 - DNA, 466 bp, Homo sapiens
  chr9:116065579-116066045
  hypo
tttctctgaggggatcaagtgcgctcatccttgcaggcctctgttctgggtccgattgatctcctgccatcccctcggattccactgtcctctgtgcgctgacctgcctcgactcctggcttctgccgagatggatccttccctatgctgagtccctgtaaccaaaatacagatagctcttgcaaaatactgacaaaagcggccactaatacagcagaaaaatagtcgggagacggttgagcgtctgcctgaagagccagggttctcaagcaaggcacacttctaggtcagagttcagccctcactgagaatccaaactccgtttaactaccgatggagacttgagcaaattaattaacttctgccagcctcagtttcctcacctgaaaatggccataataacctacctacttgatctgtagattaaatgaggtaatacgtgtcgagatcgcgtaataacacaggg

SEQ ID NO: 78037 - DNA, 33 bp, Homo sapiens
  chr9:116076149-116076182
  hypo
ctaagaatggatgaaggaggccgggcgcagtgg

SEQ ID NO: 78038 - DNA, 38 bp, Homo sapiens
  chr9:116076764-116076802
  hypo
ttacaggcatgagccaacgcgtccggcagaatggtaaa

SEQ ID NO: 78039 - DNA, 31 bp, Homo sapiens; identical to SEQ ID NO: 23390
  chr9:116091907-116091938
  hypo

SEQ ID NO: 78040 - DNA, 31 bp, Homo sapiens; identical to SEQ ID NO: 23391
  chr9:116104971-116105002
  hypo

SEQ ID NO: 78041 - DNA, 402 bp, Homo sapiens; identical to SEQ ID NO: 46467
  chr9:116111660-116112062
  hypo

SEQ ID NO: 78042 - DNA, 31 bp, Homo sapiens; identical to SEQ ID NO: 23393
  chr9:116118819-116118850
  hypo

SEQ ID NO: 78043 - DNA, 31 bp, Homo sapiens; identical to SEQ ID NO: 23394
  chr9:116128844-116128875
  hypo

SEQ ID NO: 78044 - DNA, 39 bp, Homo sapiens
  chr9:116222777-116222816
  hypo
gtgacagagtgagactccgtctccaaaaaaaaaaaaatt

SEQ ID NO: 78045 - DNA, 54 bp, Homo sapiens; identical to SEQ ID NO: 23395
  chr9:116269882-116269936
  hypo

SEQ ID NO: 78046 - DNA, 43 bp, Homo sapiens
  chr9:116331271-116331314
  hypo
cagtgggcctaagtcatcactcgagatgtgtggatagctgcca

SEQ ID NO: 78047 - DNA, 31 bp, Homo sapiens
  chr9:116332904-116332935
  hypo
ctatgacctcaaaggtaaccccgtcctgact

SEQ ID NO: 78048 - DNA, 30 bp, Homo sapiens
  chr9:116333234-116333264
  hypo
tcgatgagcgtagcctatccttgaattttg

SEQ ID NO: 78049 - DNA, 30 bp, Homo sapiens; identical to SEQ ID NO: 23396
  chr9:116337270-116337300
  hypo

SEQ ID NO: 78050 - DNA, 183 bp, Homo sapiens
  chr9:116344623-116344806
  hypo
ctgaagttttctgccagtgtgcgcgtgtgcccgcaggtgcacacattcccaagcatctgttcagttcccgagtatgggtgaggtctttccctttcattagttctcagcagctatggcttcttgaagacagaacctgggctctaaataaatagttccagctccggcattcctggtccttgactg

SEQ ID NO: 78051 - DNA, 30 bp, Homo sapiens
  chr9:116346484-116346514
  hypo
gcgtgtgcagaactcgctgcggcgccggac

SEQ ID NO: 78052 - DNA, 55 bp, Homo sapiens; identical to SEQ ID NO: 6991
  chr9:116639070-116639125
  hypo

SEQ ID NO: 78053 - DNA, 30 bp, Homo sapiens
  chr9:116663454-116663484
  hypo
ctctcccgctgctgcgagagagcgtttgtt

SEQ ID NO: 78054 - DNA, 82 bp, Homo sapiens
  chr9:116671456-116671538
  hypo
gagggaatggtcctgtcgcctgttgcagttgtatgcagtgatgctaatggaagatcgaggcatgtcccggcctgatacctgc

SEQ ID NO: 78055 - DNA, 138 bp, Homo sapiens; identical to SEQ ID NO: 23400
  chr9:116671887-116672025
  hypo

SEQ ID NO: 78056 - DNA, 151 bp, Homo sapiens
  chr9:116681838-116681989
  hypo
agtggtagccttttcatagtcaggagaggcctggcaggcccctgggccggctgctgctggtgtcctccaacggcggggccagccctctccgtgaggaggtggaactgtccccatgccaccttgattccacggtttggatttgcagagcaga

SEQ ID NO: 78057 - DNA, 129 bp, Homo sapiens
  chr9:116697027-116697156
  hypo
ggattaaattaattccggaactctgtgtgactcgaggcagacgtgtggagtcagggaaggccttgggcgtgaggatgtgcctggccgtggcccgagcatggagaggctggggaccgccagagtatccta

SEQ ID NO: 78058 - DNA, 31 bp, Homo sapiens
  chr9:116698062-116698093
  hypo
ctcaggacctgctcggcgaaagttttgagtg

SEQ ID NO: 78059 - DNA, 164 bp, Homo sapiens
  chr9:116708858-116709022
  hypo
tcggccctgacccagcgtgtaattaccagtgcgaggtagggggcaagctgcgatgttaatcagcatcaccgctgaagagtgagtgtctgtgtgcgtcttttgcctcctctctgagaggggctgtgaaagtacccctcgcaggatgtagacgggagtgtgtgtgt

SEQ ID NO: 78060 - DNA, 31 bp, Homo sapiens; identical to SEQ ID NO: 23402
  chr9:116728290-116728321
  hypo

SEQ ID NO: 78061 - DNA, 31 bp, Homo sapiens; identical to SEQ ID NO: 23403
  chr9:116730184-116730215
  hypo

SEQ ID NO: 78062 - DNA, 217 bp, Homo sapiens
  chr9:116749790-116750007
  hypo
tgaattggagtttcccgtttgtaaagcaggagcggggaagagcctggacaagatcccaagccttcttgcctaggaacgaagggaacagcactggatatcgcgtacatcaaagcacgaaacccttaccgcccaaagcgtagtttgaggcccagcagccctggccccacctgagagagcttgttagaaatgcagaatctctgagtgaggcatggtggca

SEQ ID NO: 78063 - DNA, 36 bp, Homo sapiens
  chr9:116750066-116750102
  hypo
agtttgtttgtgttctgcctgcgcaacatagtgaga

SEQ ID NO: 78064 - DNA, 315 bp, Homo sapiens; identical to SEQ ID NO: 23404
  chr9:116750639-116750954
  hypo

SEQ ID NO: 78065 - DNA, 151 bp, Homo sapiens
  chr9:116760430-116760581
  hypo
gtgtgatcttgtccacgcttctcaaagtgcagccaacttcgccccttccctaaccttccaggcattctccaactttaagggctctttctgatttcttacgtaattcagatggaaaagcgcccgaaggcagcccccacggtggatctgtgcg

SEQ ID NO: 78066 - DNA, 164 bp, Homo sapiens
  chr9:116761524-116761688
  hypo
tgggttttaggctgatcgaggggcaggcggggccctgggttttaggctgagctaggggcaggcggggccctgggttttaggctgagcgaggggcaggtggggccctgggctttaggctgagcgaggcgcaggcggggccctgggttttacgctgcatgaggggc

SEQ ID NO: 78067 - DNA, 280 bp, Homo sapiens
  chr9:116762417-116762697
  hypo
ggtgttaggatgacagcggcccttggagtgacccacagtagtaccagtggcaccggctcctgttcctcagtacctgtggtgtgccagccgactcacatgatgaacctcgttgatacagacctcagtcatgaattgtaggaatcagagtccggttttgcaggtggggaaacagaggctcggacaagtgaaaggttgtgtccgagatcaaaaaaaggatgtgtccgagatcaaacagataagacaaacttgtccagcccacggcccgtgaccgcatgtggac

SEQ ID NO: 78068 - DNA, 218 bp, Homo sapiens
  chr9:116770636-116770854
  hypo
aggggcccctgagaaccgggcaggtaagtccttggtgtctgcttgtcacctcccctgtccccggctgggctcctgagacctgggggaccagggtgctaagggccgtgtgttctcccacagaccccttcgaccaaggtgtcgtggccacggacgaggtgaaggaggagcccccggagccattccagaaaatcgggccaagtatgcgggattccctctgg

SEQ ID NO: 78069 - DNA, 341 bp, Homo sapiens; identical to SEQ ID NO: 23407
  chr9:116790928-116791269
  hypo

SEQ ID NO: 78070 - DNA, 31 bp, Homo sapiens; identical to SEQ ID NO: 23408
  chr9:116797924-116797955
  hypo

SEQ ID NO: 78071 - DNA, 324 bp, Homo sapiens
  chr9:116798286-116798610
  hypo
acccccatctcaagtgcgccgaacagtggctggcacgcagtaagcactcaataaatagctgctcaattgagctaatggtctctctctgcatggcttcctctctccatcattccttcacccagcttctccctcatgggtctagtgacgggggaggcaggcaggctgggcccggagccctgagcacagagacccggtgtgtgtttgggttcccacttgcaaagctgcctgcagcccagcagaaggtgtctgcgtcggttccacccctcacgtggctgccgcatttctccctccagaaccctacacctgcggcgcctgtgggatcca

SEQ ID NO: 78072 - DNA, 676 bp, Homo sapiens
  chr9:116800626-116801302
  hypo
ccaagcatcttgacttgttttcggagtggagccgtgggctgctttgttctggttcagcgcagccagagaatgcctggccggccatccagcgcaaagccaggctgaatcccagccacactgaatcgggattaaaggcttggctccatagagagaaattaagcatcatgagctgcgcagttcacagcgccgacgataaggaggatcagccttgaataacaccaatctcattatggagctgctgaatggcacagggtaattcccgctaataaacttcctttctgtgctgtaggaaaacctggcgtgccttggtgacgttggagaagcatgctttggcagtaataataccaaagatagctacaattttgtgagtgctttctatgcgtcacttgtggcactgagagctttacgcaggttatttcatcagatcttcctgattaggtagttgacgttttcatccccattatgcagatgatgaaaccgaggctcagagaacataatcactggcccaaagttgcacagctcctaaaaaaagtatccaatagcatttgagcttttacgtggcgccaggccttgttctaagacttttacatatattcacttatttaattctcggaacaaccctcagagttaagtgcccataacagttccacttcatagctaacgaaacggaggcaca

SEQ ID NO: 78073 - DNA, 1452 bp, Homo sapiens
  chr9:116810951-116812403
  hypo
ccaacagcatgatccccgaaaaggagcggcagaacatcgcagagcggctgttgagggtcatgtgtgccgacctgggtgcactgagcgtggtcagcgggaaggagttcctgaagttggcccagaccttagtagacagtggtgcccgctatggggccttctcggtcactgaaatcctgggcaacttcaacacgctggcgctgaagcacctgccacgcatgtacaaccaggtgaaggtgaaagtgacctgtgccttgggcagcaatgcctgcctaggcatcggtgtcacctgccactcccagagtgttggccctgactcctgctacatcctcacagcctaccaggccgagggcaaccacatcaagagctatgtgcttggtgtgaagggtgcggacattcgcgacagcggtgaccttgtgcaccactgggtgcagaacgtgctgtcggagttcgtgatgtcggagatcaggacagtgtacgtgacggattgccgggtgagcacgtccgccttctccaaggccggcatgtgccttcgctgctcagcctgtgccttgaactcggtggtgcagagcgtgctgagcaagcggacactgcaggcccgcagcatgcacgaggtcatcgagctgctcaacgtgtgcgaggacctggcgggctccacgggcctggccaaggagaccttcgggtcgctggaggagacgtctccaccaccctgctggaactcggtgacggactcactgttgctggtgcatgagcgctatgagcagatctgcgagttctacagccgggccaagaagatgaacctcatccagagcctcaacaagcacctgctcagcaacctggcggccatcctgacgccggtgaagcaggcagtcatcgagctgagcaacgagagccagcccaccctgcagctggtgctgcccacctacgtcaggctggagaagctgttcacggccaaggccaacgacgcaggcactgtcagcaagctctgccacctcttcctggaggcgctcaaggagaacttcaaggtgcacccggcccacaaggtggccatgatcctggacccgcagcagaagctgcggcctgtgccaccctaccagcacgaggagatcatcggcaaggtctgtgagctcatcaacgaggtgaaggagtcctgggccgaggaggccgacttcgagcccgctgccaagaagccccgctctgctgccgtcgagaaccccgcagctcaggaagatgatcggctaggcaaaaatgaagtgtacgattacctgcaggagcccctcttccaggctacccctgatctcttccagtactggtcgtgcgttacccaaaagcacacaaaactcgccaagctcgccttctggctcctggcggttccggccgtgggcgccagaagcgggtgtgtaaatatgtgtgaacaagcgcttctaatcaaacggaggcggctgctcagtccag

SEQ ID NO: 78074 - DNA, 30 bp, Homo sapiens; identical to SEQ ID NO: 23413
  chr9:116812750-116812780
  hypo

SEQ ID NO: 78075 - DNA, 219 bp, Homo sapiens; identical to SEQ ID NO: 23414
  chr9:116813597-116813816
  hypo

SEQ ID NO: 78076 - DNA, 30 bp, Homo sapiens
  chr9:116822835-116822865
  hypo
ctgagtactaactccgcgtcaggtactggg

SEQ ID NO: 78077 - DNA, 35 bp, Homo sapiens
  chr9:116823828-116823863
  hypo
attcccatgcagggaccggccgagtagcccagctg

SEQ ID NO: 78078 - DNA, 44 bp, Homo sapiens
  chr9:116832917-116832961
  hypo
ggggctgggcctggggcgtggagctggggcgtagccttgggacc

SEQ ID NO: 78079 - DNA, 201 bp, Homo sapiens; identical to SEQ ID NO: 23415
  chr9:116856484-116856685
  hypo

SEQ ID NO: 78080 - DNA, 246 bp, Homo sapiens
  chr9:116857251-116857497
  hypo
tcccccagcatctccacgcctgtccctcagcttgtgcctgcctatactcaccttgggggcctgtggtcgggtggtgacccgctgagctcggcttgcatatcgcagggtgctgagagtctcaggaaggcactgggctgagggggacacgcaggccacctggggagtgcactccccctgagcgctcctctctgagggccccttcctcaagacccaaccttccctgccaggccccgcttaagtaccatg

SEQ ID NO: 78081 - DNA, 31 bp, Homo sapiens
  chr9:116894967-116894998
  hypo
gctgcgtgaccttgagcgagtggctcagctt

SEQ ID NO: 78082 - DNA, 31 bp, Homo sapiens
  chr9:116930483-116930514
  hypo
agtatctaccctgtgacgcaggtcgctcaca

SEQ ID NO: 78083 - DNA, 314 bp, Homo sapiens
  chr9:116971681-116971995
  hypo
gcgggcctcctgccggcgagcgcctgcgcccttccctggcgtgagggtatgtgcctttggactacatcgtggaagccagcaccatgcagtccatgggcatatacacttgcctcaaggcctatgtcatcgaggagccaccggagctgccactgccaccagggaggaagaggaggagccgggatgtgggatggcagtggtgggtgggctgcggcaggttgggccagccacacctcactgcttgaccgctctgaccccctttcttctctttcctagggctacattgggctcccagggctcttcggcctgccagggtc

SEQ ID NO: 78084 - DNA, 176 bp, Homo sapiens; identical to SEQ ID NO: 23418
  chr9:116973313-116973489
  hypo

SEQ ID NO: 78085 - DNA, 31 bp, Homo sapiens; identical to SEQ ID NO: 23419
  chr9:116995057-116995088
  hypo

SEQ ID NO: 78086 - DNA, 31 bp, Homo sapiens
  chr9:117031993-117032024
  hypo
tgtcgagcacttttctcgaggcacaaggagc

SEQ ID NO: 78087 - DNA, 55 bp, Homo sapiens
  chr9:117038005-117038060
  hypo
tgaggacgggccccccggcccccctggcgtcactggtgtccgggtgagtgtgcag

SEQ ID NO: 78088 - DNA, 31 bp, Homo sapiens; identical to SEQ ID NO: 23420
  chr9:117038569-117038600
  hypo

SEQ ID NO: 78089 - DNA, 30 bp, Homo sapiens; identical to SEQ ID NO: 23421
  chr9:117161867-117161897
  hypo

SEQ ID NO: 78090 - DNA, 50 bp, Homo sapiens
  chr9:117179586-117179636
  hypo
gggccagtgtctggggcatctcggtcatcgatagccagccacctgatgtc

SEQ ID NO: 78091 - DNA, 22 bp, Homo sapiens
  chr9:117349223-117349245
  hypo
cgcctggccttcagatcttaaa

SEQ ID NO: 78092 - DNA, 31 bp, Homo sapiens; identical to SEQ ID NO: 23423
  chr9:118222147-118222178
  hypo

SEQ ID NO: 78093 - DNA, 30 bp, Homo sapiens; identical to SEQ ID NO: 46483
  chr9:118916478-118916508
  hypo

SEQ ID NO: 78094 - DNA, 353 bp, Homo sapiens; identical to SEQ ID NO: 6996
  chr9:118916733-118917086
  hypo

SEQ ID NO: 78095 - DNA, 29 bp, Homo sapiens
  chr9:119040228-119040257
  hypo
gagccaccgtgcctgactgaatatgatta

SEQ ID NO: 78096 - DNA, 130 bp, Homo sapiens
  chr9:119976900-119977030
  hypo
catgagtggcttctgtgcttgcgctcttctgggggatgcggcgacgcttctgccaacgtcgctgggcgtacagcgccacggtgaacaccagcagcagcagcagcagcgcgatgaggccaccctggagcag

SEQ ID NO: 78097 - DNA, 1244 bp, Homo sapiens; identical to SEQ ID NO: 46488
  chr9:120176241-120177485
  hypo

SEQ ID NO: 78098 - DNA, 53 bp, Homo sapiens; identical to SEQ ID NO: 46489
  chr9:120177963-120178016
  hypo

SEQ ID NO: 78099 - DNA, 61 bp, Homo sapiens
  chr9:123139934-123139995
  hypo
gtgctcttctcccctctctcccgtttcttacaaggacaccggccatactggaccaagggtc

SEQ ID NO: 78100 - DNA, 59 bp, Homo sapiens
  chr9:123150758-123150817
  hypo
accttgttaggggctcgggcttggatcagagggtagtgggaagccgctaaagtgttttg

SEQ ID NO: 78101 - DNA, 212 bp, Homo sapiens; identical to SEQ ID NO: 23426
  chr9:123151031-123151243
  hypo

SEQ ID NO: 78102 - DNA, 56 bp, Homo sapiens
  chr9:123162809-123162865
  hypo
aaagacacgctcagacgggtcatggctacaggagtgtgggacggatcaagtaagaa

SEQ ID NO: 78103 - DNA, 111 bp, Homo sapiens
  chr9:123163100-123163211
  hypo
cagggtcagcttggccgtgctcacactgctcacaaacttgctcagtggtgctgggtgtggaccctacacgggggatatgaaggctgttacgtgcagtcttgaaaaagattt

SEQ ID NO: 78104 - DNA, 30 bp, Homo sapiens; identical to SEQ ID NO: 23427
  chr9:123175604-123175634
  hypo

SEQ ID NO: 78105 - DNA, 156 bp, Homo sapiens
  chr9:123176126-123176282
  hypo
ggagggagggagagggcgagatggagccattcggtttcccttgcaagctgcagcatgcacggtacttgggaaagatgtccctcccggctggtagctatgatggctagagaagaatgagacctggacaagggtccaaggactcgggtgctgctgcca

SEQ ID NO: 78106 - DNA, 30 bp, Homo sapiens
  chr9:123176586-123176616
  hypo
tcaaccagacaaactcgggcttttctgagt

SEQ ID NO: 78107 - DNA, 422 bp, Homo sapiens
  chr9:123210114-123210536
  hypo
gcagttctatcgagccgtttgtctagctcacagggaatacatttttcttggtgcttaccattcagcaacgttttgtcgggcgttggcctcccctccatcactgcttcagccagaattaacttttggtgaagttgcttattacaagttttaaactccttcagctccccctgcagctccaagatctggctctgcagctgcgtcaccacctcctgggtggcagggagacgatacatatttcctaatgaccgggatggttttattaggattggcaagcgggacttcttagcctcctgaaaacacacatatgcaacaatgaatacactttgaacacacttcctttggttgcacagtcaacattctcatgccagccttataaaacggaattcgaactggctgcccagacttctcgttcccataatggc

SEQ ID NO: 78108 - DNA, 72 bp, Homo sapiens
  chr9:123295276-123295348
  hypo
aggctctgtacctttacgtgctgttctctctgctaggcaaagcgtcctcacccaactcgcaggactccttgt

SEQ ID NO: 78109 - DNA, 19 bp, Homo sapiens
  chr9:123321471-123321490
  hypo
tttaaaacattgaggccgg

SEQ ID NO: 78110 - DNA, 22 bp, Homo sapiens
  chr9:123337368-123337390
  hypo
gcccaggctggagtgcagtggc

SEQ ID NO: 78111 - DNA, 23 bp, Homo sapiens
  chr9:123362247-123362270
  hypo
ccggccaattcagcttaactttt

SEQ ID NO: 78112 - DNA, 125 bp, Homo sapiens
  chr9:123367535-123367660
  hypo
catcttccaacaatcccgaaacatctgcattgggaatgctgtcatggtagctgctgaaactgatattgtcttctttcagctcgatggtccaaaagggggcattgagtttccggttttggtactcg

SEQ ID NO: 78113 - DNA, 31 bp, Homo sapiens
  chr9:123398974-123399005
  hypo
tgctccacacctctgcccagccgcgaccccg

SEQ ID NO: 78114 - DNA, 43 bp, Homo sapiens
  chr9:123447412-123447455
  hypo
ggaggcttcattttttaaatgcgattttggaagcatcaagatg

SEQ ID NO: 78115 - DNA, 22 bp, Homo sapiens
  chr9:123464038-123464060
  hypo
aaggtggggagcagtggctcac

SEQ ID NO: 78116 - DNA, 30 bp, Homo sapiens
  chr9:123595647-123595677
  hypo
tcaaccctgaggttccgggccacgtgaacc

SEQ ID NO: 78117 - DNA, 30 bp, Homo sapiens
  chr9:123636973-123637003
  hypo
caccataggagtcccgagtccctggatcca

SEQ ID NO: 78118 - DNA, 29 bp, Homo sapiens
  chr9:123742869-123742898
  hypo
tttttttctttttttttgagacggagtct

SEQ ID NO: 78119 - DNA, 29 bp, Homo sapiens
  chr9:123743197-123743226
  hypo
ctctcagcgtagttgcaacaggcacacag

SEQ ID NO: 78120 - DNA, 24 bp, Homo sapiens
  chr9:123896061-123896085
  hypo
aacgggattcaattttatatatat

SEQ ID NO: 78121 - DNA, 17 bp, Homo sapiens
  chr9:123926438-123926455
  hypo
gccggaactttcatata

SEQ ID NO: 78122 - DNA, 105 bp, Homo sapiens; identical to SEQ ID NO: 23434
  chr9:123965021-123965126
  hypo

SEQ ID NO: 78123 - DNA, 30 bp, Homo sapiens
  chr9:124076232-124076262
  hypo
ctgcctgcaggtaccgaggacaccgccaag

SEQ ID NO: 78124 - DNA, 65 bp, Homo sapiens
  chr9:124095119-124095184
  hypo
gtactctagtgtggctcgtttccttgtgcccatctgacagtgagagccggcgtcttctctgcctg

SEQ ID NO: 78125 - DNA, 1011 bp, Homo sapiens; identical to SEQ ID NO: 46499
  chr9:124131809-124132820
  hypo

SEQ ID NO: 78126 - DNA, 223 bp, Homo sapiens
  chr9:124339601-124339824
  hypo
tggaagcctgtgctggatggccggatcgccagcaccccaggctcgaagcgttccagccggtgacctacattcccagggcgcctctgtgtgtgcgcacacgggcaggcgtgcgtgagtgcaggagctccacggtgtgtctgccagtgggcctctgtctcggcaggctgtctcctcaggagcccgtgagtgagcacgtgagggcgtggggggcccacactcctgc

SEQ ID NO: 78127 - DNA, 206 bp, Homo sapiens; identical to SEQ ID NO: 23436
  chr9:124422090-124422296
  hypo

SEQ ID NO: 78128 - DNA, 199 bp, Homo sapiens
  chr9:124443386-124443585
  hypo
gtgaggaaacaggttccgagaggtaaagtcacttgctgcccaagctccaactgctactaagtggcggaaccaagattcgaccccaggtctctgtgactccagggcatgaggcacacccatcctcaggctaggaggcggatccattgccccacacccccccagaaccccatcagcatcgcttttccggctatttcccttt

SEQ ID NO: 78129 - DNA, 366 bp, Homo sapiens
  chr9:124479633-124479999
  hypo
ctcattgtactagcagaagcacgtttctacacatgagaggaaacactgcatccttttcggtgcagttttacagaaaactatttaacgcgcttgctgtagctacccctggcatgtggatcctgagaatccgcccctgggcagattcactcgggtcacacacttgtttatcacacggtgtgtaattgaccttagtatgtgtgcatatggacagcataccacgtagcagtgccctgggcattctgacctgcccctcctggcgtgtttactcctctctacccatagttctggctgccgtgcctcaccctgccatgtggcaaccacatgccgggcactgagaggaggcccgggtgagagtctggtcagggt

SEQ ID NO: 78130 - DNA, 29 bp, Homo sapiens
  chr9:124496356-124496385
  hypo
ttactaaagatgttgctgggccgggcgcg

SEQ ID NO: 78131 - DNA, 168 bp, Homo sapiens
  chr9:124499832-124500000
  hypo
tggacttcttagtgacaacttcggcaagatcctgggccgggccggaggggctgctcactggagacctggccatcttcggaagccagatctggctccagagcctcgggggttgcaagtgcccagaaccaggtcagcagagaggcctgcgctcccaccacaaaggtctgt

SEQ ID NO: 78132 - DNA, 85 bp, Homo sapiens
  chr9:124512391-124512476
  hypo
caacccatgaggaaggtgtgtcgttatcctcactacggatggggaaactgagtcctagagagtcgaatgacttaaagtatccaag

SEQ ID NO: 78133 - DNA, 170 bp, Homo sapiens
  chr9:124545861-124546031
  hypo
ggccttttaagttgagcgtgcgcactgcatgggaaatagcggccctggaggatgttagacttgctccctctccaagacagcagcagcctgcacctgccccgtgtgtgtggccggcctcctcctcacccttcccggcccccggccaaggacccaggcgctgcatacagggg

SEQ ID NO: 78134 - DNA, 30 bp, Homo sapiens
  chr9:124547675-124547705
  hypo
cctccctccagctgcgacttttaactatgt

SEQ ID NO: 78135 - DNA, 185 bp, Homo sapiens
  chr9:124548589-124548774
  hypo
aagccagatggagctccgggtctgtcacctagacaggtgcctctggctccagctagggattgggccccagagagaagcctcgggcctgtccctgttcttgcccctgcagccagctggaagcaagtacggcagagccacacaccggagcagggctgcaccgtcaccctcaccggtggcccttgtgt

SEQ ID NO: 78136 - DNA, 180 bp, Homo sapiens
  chr9:124549334-124549514
  hypo
ccccctctcctcaggccgaccaccagcacagctaccccagctctcagcagcggcaggagaggaggcaacctgtttcttcccaaggcagcccctagccagttcctgcatccctgcctcttgctgcctccgtggcctctaaacctccagcctcccccgcccccaccccgctctttcctacag

SEQ ID NO: 78137 - DNA, 63 bp, Homo sapiens
  chr9:124581115-124581178
  hypo
gtgcaggggtcaggtgcgggccttaggatggaaagaagggaagggtgccgataagggctgctt

SEQ ID NO: 78138 - DNA, 182 bp, Homo sapiens; identical to SEQ ID NO: 46504
  chr9:124622035-124622217
  hypo

SEQ ID NO: 78139 - DNA, 27 bp, Homo sapiens
  chr9:124666739-124666766
  hypo
caccacgcccagcccaatacattccta

SEQ ID NO: 78140 - DNA, 167 bp, Homo sapiens
  chr9:124736302-124736469
  hypo
ttcttaagtgggtccatgaggcgcagagtgtctctgatcacagccactttcacttcttcatcaacgaggctggggacattttcaaacacccctggagaaagcttgaacgggtaaggattctgtgtcacagtggagaccgtgattccgtgccaagtggctatccagct

SEQ ID NO: 78141 - DNA, 138 bp, Homo sapiens
  chr9:124751431-124751569
  hypo
ggtcaaggctggaaacgcaggctgggaactggcaatggttacctggaagcacgtggggcccggcctccccgtggggatgtctgactggtagaagactttgagctctggagtcagcgcgatgaccgtcttaatcaccac

SEQ ID NO: 78142 - DNA, 113 bp, Homo sapiens
  chr9:124815996-124816109
  hypo
aggcagtcatggctccgcgtgcaaggactgctctgacagttcacacacttcacagtgcccttccctcctgcccgtgggctacattcctgtctcacctccgccaggttcctagt

SEQ ID NO: 78143 - DNA, 30 bp, Homo sapiens; identical to SEQ ID NO: 23442
  chr9:124893989-124894019
  hypo

SEQ ID NO: 78144 - DNA, 31 bp, Homo sapiens
  chr9:124938381-124938412
  hypo
gcaagactccgtctcaaaaaaaaaaaaaaaa

SEQ ID NO: 78145 - DNA, 31 bp, Homo sapiens
  chr9:124961781-124961812
  hypo
tgtctcctagcaccaccggcaaggcctagac

SEQ ID NO: 78146 - DNA, 30 bp, Homo sapiens; identical to SEQ ID NO: 23443
  chr9:124965034-124965064
  hypo

SEQ ID NO: 78147 - DNA, 66 bp, Homo sapiens
  chr9:124967429-124967495
  hypo
tcaggctcaaagaggtggaagcgagtgagctcgtgggcacacagcgaggaggaggacctggcactg

SEQ ID NO: 78148 - DNA, 368 bp, Homo sapiens; identical to SEQ ID NO: 46507
  chr9:124990417-124990785
  hypo

SEQ ID NO: 78149 - DNA, 255 bp, Homo sapiens; identical to SEQ ID NO: 7007
  chr9:124990828-124991083
  hypo

SEQ ID NO: 78150 - DNA, 31 bp, Homo sapiens; identical to SEQ ID NO: 23446
  chr9:125511988-125512019
  hypo

SEQ ID NO: 78151 - DNA, 30 bp, Homo sapiens
  chr9:125562614-125562644
  hypo
ctctgcttcgcctccgtcactgtgcccaag

SEQ ID NO: 78152 - DNA, 43 bp, Homo sapiens
  chr9:125573935-125573978
  hypo
ttgtttgtttgttttttgagacggagtctcgctctgtcgccca

SEQ ID NO: 78153 - DNA, 43 bp, Homo sapiens
  chr9:125574217-125574260
  hypo
gcatgagccaccgcgcccggccggaattgggatcttaaagccc

SEQ ID NO: 78154 - DNA, 31 bp, Homo sapiens; identical to SEQ ID NO: 7008
  chr9:125587779-125587810
  hypo

SEQ ID NO: 78155 - DNA, 154 bp, Homo sapiens
  chr9:125622563-125622717
  hypo
ccaccttacacagctaattcacgtgatcatcgtaacagatgtcatattcctgtgtgggccacagggaataaaaacgattcccagatattaacgtgattcattagtcaccatttacccattcttttttttttttttttttttgagacagggtgtc

SEQ ID NO: 78156 - DNA, 25 bp, Homo sapiens
  chr9:125623481-125623506
  hypo
aatttcggccgggcacggtggctca

SEQ ID NO: 78157 - DNA, 31 bp, Homo sapiens; identical to SEQ ID NO: 23448
  chr9:125648124-125648155
  hypo

SEQ ID NO: 78158 - DNA, 30 bp, Homo sapiens
  chr9:125699585-125699615
  hypo
actaacagggctgggcgtggggtggctcac

SEQ ID NO: 78159 - DNA, 26 bp, Homo sapiens
  chr9:125704938-125704964
  hypo
actccgtctcaaaaaaaaaaaaaaaa

SEQ ID NO: 78160 - DNA, 29 bp, Homo sapiens
  chr9:125859123-125859152
  hypo
caggcgtgagccaccgcacctggcccagt

SEQ ID NO: 78161 - DNA, 30 bp, Homo sapiens
  chr9:125865745-125865775
  hypo
ccaggcctcttccccgtgtacgtcaacacc

SEQ ID NO: 78162 - DNA, 58 bp, Homo sapiens; identical to SEQ ID NO: 23451
  chr9:125870567-125870625
  hypo

SEQ ID NO: 78163 - DNA, 30 bp, Homo sapiens; identical to SEQ ID NO: 23452
  chr9:125877119-125877149
  hypo

SEQ ID NO: 78164 - DNA, 45 bp, Homo sapiens
  chr9:125927261-125927306
  hypo
aaaagtttgccctggattgaccgggcacggtggctcacacctgta

SEQ ID NO: 78165 - DNA, 102 bp, Homo sapiens; identical to SEQ ID NO: 23453
  chr9:125986775-125986877
  hypo

SEQ ID NO: 78166 - DNA, 16 bp, Homo sapiens
  chr9:126010837-126010853
  hypo
cgcgcccagccgaatt

SEQ ID NO: 78167 - DNA, 214 bp, Homo sapiens
  chr9:126092334-126092548
  hypo
ctttctggatacaatttctcacgagcacccaaacaaggacaacgttccagaaccttgtttctaacaaatgtcggtaaaacaaaaacacccgctacagacccataaaatgtgaagaccaactccagtgataaaatatgttcgtttctatgtatttttatagctttccggataataaaaggaaccgtgttctaatcggatgcgtttgttaaatcag

SEQ ID NO: 78168 - DNA, 196 bp, Homo sapiens; identical to SEQ ID NO: 23454
  chr9:126100874-126101070
  hypo

SEQ ID NO: 78169 - DNA, 30 bp, Homo sapiens
  chr9:126125415-126125445
  hypo
tgccgcaacctggccgatcgctacgagtgc

SEQ ID NO: 78170 - DNA, 30 bp, Homo sapiens
  chr9:126126362-126126392
  hypo
cagggggcctacagcgaagagatggcagct

SEQ ID NO: 78171 - DNA, 30 bp, Homo sapiens
  chr9:126133009-126133039
  hypo
actccgctgcctgccgggatctcctctgcc

SEQ ID NO: 78172 - DNA, 30 bp, Homo sapiens
  chr9:126145196-126145226
  hypo
tttactttttagatcgcaggcacccgcaat

SEQ ID NO: 78173 - DNA, 126 bp, Homo sapiens; identical to SEQ ID NO: 23455
  chr9:126152956-126153082
  hypo

SEQ ID NO: 78174 - DNA, 436 bp, Homo sapiens; identical to SEQ ID NO: 23456
  chr9:126154146-126154582
  hypo

SEQ ID NO: 78175 - DNA, 203 bp, Homo sapiens
  chr9:126158004-126158207
  hypo
ggatgcactggcagcttcatacgcacgtcctaatcacacctggcacacagtaggtgctctttacctgtttgtggttgttaccggacgcccctaccccgcctcccaggtgcttgactgcaagccgcactctgccttcagattcctttgttcattcacccaggaaacatctcagagcagaggtctgggctcggatgtggtccagg

SEQ ID NO: 78176 - DNA, 157 bp, Homo sapiens
  chr9:126162176-126162333
  hypo
ggcctgagctcccactcgggaagaaacgatgctagcccaagagggcctagaaatcaatgggtgctccaccgcgccccctgctgactggtgtctgacccacagcctctcatgcaggatccctcctaccccgatccctgccccacggaagcccctgggc

SEQ ID NO: 78177 - DNA, 30 bp, Homo sapiens
  chr9:126165454-126165484
  hypo
ccagcccaagtgcccggctccctggcctct

SEQ ID NO: 78178 - DNA, 31 bp, Homo sapiens
  chr9:126169182-126169213
  hypo
cttgctacaataaaggcgggttaagaatgtg

SEQ ID NO: 78179 - DNA, 45 bp, Homo sapiens; identical to SEQ ID NO: 23458
  chr9:126169446-126169491
  hypo

SEQ ID NO: 78180 - DNA, 30 bp, Homo sapiens; identical to SEQ ID NO: 23459
  chr9:126182779-126182809
  hypo

SEQ ID NO: 78181 - DNA, 222 bp, Homo sapiens
  chr9:126187644-126187866
  hypo
gccccgctgtcacaccgctgaaggtggagccttgggggactcaggatcctgtctctcacaacctggcgccgcgtgcggggattctaaagcgcgtgcaggcgccgcagaacaagtcactgccttttgctggatttctcttgctctgctgaaccgactgactactcaagggcacaaggagtgagtggacctggcctcgcctcttccccacgtcactgcctttcc

SEQ ID NO: 78182 - DNA, 30 bp, Homo sapiens
  chr9:126217699-126217729
  hypo
ataaaccagcatcctcgcaggcctgcaggc

SEQ ID NO: 78183 - DNA, 30 bp, Homo sapiens
  chr9:126218182-126218212
  hypo
aaccgcagcgaaatgcgtttctactccttt

SEQ ID NO: 78184 - DNA, 30 bp, Homo sapiens
  chr9:126243636-126243666
  hypo
tggaaacaaggaagcgggagcgggaggaag

SEQ ID NO: 78185 - DNA, 168 bp, Homo sapiens; identical to SEQ ID NO: 23460
  chr9:126323415-126323583
  hypo

SEQ ID NO: 78186 - DNA, 30 bp, Homo sapiens
  chr9:126334161-126334191
  hypo
ccaaagtggttgtaccgtattgtactccca

SEQ ID NO: 78187 - DNA, 339 bp, Homo sapiens; identical to SEQ ID NO: 23461
  chr9:126348886-126349225
  hypo

SEQ ID NO: 78188 - DNA, 31 bp, Homo sapiens; identical to SEQ ID NO: 23462
  chr9:126362199-126362230
  hypo

SEQ ID NO: 78189 - DNA, 115 bp, Homo sapiens
  chr9:126368301-126368416
  hypo
agcaccttccgtaaacggctttcctttggccccaggtctgagctacaggttcctgcaagaaaccgcagaaggagtatccctttcacctgaagggtacaatcgaactagataagcc

SEQ ID NO: 78190 - DNA, 30 bp, Homo sapiens
  chr9:126440721-126440751
  hypo
gtaccaagcgcttgccggcctggtcatgtc

SEQ ID NO: 78191 - DNA, 61 bp, Homo sapiens; identical to SEQ ID NO: 23463
  chr9:126442177-126442238
  hypo

SEQ ID NO: 78192 - DNA, 102 bp, Homo sapiens
  chr9:126707415-126707517
  hypo
aatatctttccttcccattgccgagttcatggctgaggtatctataacaaaagacagattaactacagaaaagcacacaaatgtatttaatatgttttatgt

SEQ ID NO: 78193 - DNA, 1672 bp, Homo sapiens; identical to SEQ ID NO: 46516
  chr9:126770432-126772104
  hypo

SEQ ID NO: 78194 - DNA, 682 bp, Homo sapiens; identical to SEQ ID NO: 46526
  chr9:126780284-126780966
  hypo

SEQ ID NO: 78195 - DNA, 30 bp, Homo sapiens; identical to SEQ ID NO: 46527
  chr9:126781414-126781444
  hypo

SEQ ID NO: 78196 - DNA, 246 bp, Homo sapiens
  chr9:126975938-126976184
  hypo
gggaggcagcttgtggatgcccggatatgagccacacgtgtggatgcccaggagtatgaaaagatccctgactgtatggggcatgcacgtatgagcacatttacgtggatatatgtgcattagctaaacacgcatttttgtgtagacctgtgtgcaccgtacacatagcgtgcatggatttgtgcgtgtcagagcacactagtgtggacgtatgtgttcgggcacgtttttctaggctgatctgcc

SEQ ID NO: 78197 - DNA, 31 bp, Homo sapiens; identical to SEQ ID NO: 7018
  chr9:127061459-127061490
  hypo

SEQ ID NO: 78198 - DNA, 292 bp, Homo sapiens
  chr9:127071987-127072279
  hypo
ttatttttatgagtacgtgcgattcttctaagtgctcagaaagccgccctggctgtttatgagggtatgtgattttggctgcattcctagaggtgacggcgtctgagtcacagagtcccactgtgcgccaggtcgtgtcaggcacattccatgtgtcattccacaaacatgctccaagcagttgctctggggtcagagcctcagtgcagaggacgtggaggggactagacaggggcccccttttgaagaggccggtggcgggtcctggggcggggcctggggcagggctcag

SEQ ID NO: 78199 - DNA, 31 bp, Homo sapiens; identical to SEQ ID NO: 23466
  chr9:127106879-127106910
  hypo

SEQ ID NO: 78200 - DNA, 30 bp, Homo sapiens
  chr9:127121863-127121893
  hypo
gcaccacaccaactcgcaagtgaccttcct

SEQ ID NO: 78201 - DNA, 31 bp, Homo sapiens
  chr9:127230036-127230067
  hypo
catttgtgggctgtggcgtgtccttctgcgc

SEQ ID NO: 78202 - DNA, 52 bp, Homo sapiens
  chr9:127230410-127230462
  hypo
tctccctggcctctgccgagggcttcctcatgaccagcgagtgggccaaggc

SEQ ID NO: 78203 - DNA, 37 bp, Homo sapiens
  chr9:127237565-127237602
  hypo
ggcacgagggcagggccgacttcgtgcccatcagcct

SEQ ID NO: 78204 - DNA, 30 bp, Homo sapiens
  chr9:127239211-127239241
  hypo
ctattctgagcgggcgctgccaagagcaca

SEQ ID NO: 78205 - DNA, 31 bp, Homo sapiens
  chr9:127260203-127260234
  hypo
tcccctctgccccttccgtggctctcagagc

SEQ ID NO: 78206 - DNA, 603 bp, Homo sapiens
  chr9:127262375-127262978
  hypo
tccttgaagaccatgcacctgcgtgcccagtccacgatggagatgaaggtctggtcggccattctgcacaggaggccgaaggccgccggctggtcggggcggcttttggtgggctcctgcaggcagcccaagatgcgggcccgcacctggtcctcatccggctccagctgcagcagctgcaggatgagctcaggcacgttgggccctccagagaagggctctgggtagccgtacggcagcccaggctgtggggggctggcataaggctccgggtactcagacttgatggcacggccaggaaaggcagggtagaggtagccagccagtggcccgtgggcaccgggcacggccatgggcagtgctggggccccaaagtcgcccagtggcccagcaggtggaccggcggccaggcccttgggctcaggcccatgcaggctgggaggcagcacgtagtccggtgcgggagggggcggcgggggcacccccatcgggggccctgtctccagcttgaagccattggcccgaatctgtgccttcttctgctgtttcagggcccggtcccgcttgtacatcggcccaaacttgttccggccacccctcata

SEQ ID NO: 78207 - DNA, 250 bp, Homo sapiens
  chr9:127268281-127268531
  hypo
caagcaggaaaataccgcaattttgcattgacagcggcgcaacccaccaaaaggctccatctgggctcccgcccgcctggaggcctcgggcttcggttggagctgggcctggggcctgcaagttgtggccagagaaccccccgcgcagaccgcactcagctggctcacccacagaaggagcagaacccgcagactagctgtgcaagctcgggcaagtcacttctcctctctgaaacgagagcctcagttt

SEQ ID NO: 78208 - DNA, 31 bp, Homo sapiens
  chr9:127270139-127270170
  hypo
ggaggcaaggccatggcgacttgactaggcg

SEQ ID NO: 78209 - DNA, 31 bp, Homo sapiens
  chr9:127282290-127282321
  hypo
tttctctccttccactcgcaaaaaggctacc

SEQ ID NO: 78210 - DNA, 94 bp, Homo sapiens; identical to SEQ ID NO: 23468
  chr9:127308363-127308457
  hypo

SEQ ID NO: 78211 - DNA, 31 bp, Homo sapiens
  chr9:127312606-127312637
  hypo
agtaggttttgcttgtcgcaattattactgt

SEQ ID NO: 78212 - DNA, 223 bp, Homo sapiens
  chr9:127361667-127361890
  hypo
agcctgggcgacaaaagcgatacatggtctcaaaaaaaaaaaaaaaaagttcctcttcatcttcctccagcgttttaaaatttcttgctcaggaagagaaactactggcttaaactgagggtcatggttggactcgtcttcattctcaatggaagtatcgtggtcttcctgagtgtccgtggcagccgccatgagggcgcggcggcggcggccgctcggctga

SEQ ID NO: 78213 - DNA, 135 bp, Homo sapiens; identical to SEQ ID NO: 23469
  chr9:127420614-127420749
  hypo

SEQ ID NO: 78214 - DNA, 40 bp, Homo sapiens
  chr9:127457914-127457954
  hypo
ctgggattataggcatgagtcaccgcgcccggcccgaggg

SEQ ID NO: 78215 - DNA, 22 bp, Homo sapiens
  chr9:127468805-127468827
  hypo
ttttttgagatagtctcgccct

SEQ ID NO: 78216 - DNA, 31 bp, Homo sapiens
  chr9:127481036-127481067
  hypo
accacaatccatttatcgagtcccctattaa

SEQ ID NO: 78217 - DNA, 99 bp, Homo sapiens
  chr9:127481334-127481433
  hypo
aggataaattcctagacgtatgaattgttcaatctaagttttcttttgtggcggggagggtggagacagggtctcactctgttgcccaggctggagtgc

SEQ ID NO: 78218 - DNA, 36 bp, Homo sapiens
  chr9:127482310-127482346
  hypo
ttttgaaactcttgaacgtttttgggtttttttgaa

SEQ ID NO: 78219 - DNA, 32 bp, Homo sapiens; identical to SEQ ID NO: 23471
  chr9:127500845-127500877
  hypo

SEQ ID NO: 78220 - DNA, 24 bp, Homo sapiens
  chr9:127504546-127504570
  hypo
aaaaaataaaagaggccgggcacg

SEQ ID NO: 78221 - DNA, 17 bp, Homo sapiens
  chr9:127507664-127507681
  hypo
tcctggcagggcacagc

SEQ ID NO: 78222 - DNA, 94 bp, Homo sapiens; identical to SEQ ID NO: 7021
  chr9:127534415-127534509
  hypo

SEQ ID NO: 78223 - DNA, 31 bp, Homo sapiens
  chr9:127538142-127538173
  hypo
tttttaacaagttatccgatgatgcggaggc

SEQ ID NO: 78224 - DNA, 68 bp, Homo sapiens
  chr9:127570204-127570272
  hypo
cagcctggtggagttccgcaacctggaaaacttcaagcaaggtcagggacccccggaggtggagaggg

SEQ ID NO: 78225 - DNA, 31 bp, Homo sapiens
  chr9:127571889-127571920
  hypo
taagcagatgggatgacgatagacctccttc

SEQ ID NO: 78226 - DNA, 337 bp, Homo sapiens
  chr9:127572287-127572624
  hypo
cggacattgactttgccgtggacgagagcggcctgtgggtcatctaccccgccgtggacgaccgcgatgaggcccagcccgaggtgatcgtcctgagtcgcttggaccccggcgatctctccgtgcaccgggagaccacgtggaagacacggctgcggcggaactcctacgggaactgcttcctggtgtgcggcatcctgtatgccgtggacacgtacaaccagcaggaaggccaggtcgcctacgctttcgacacgcacacgggcaccgacgcacgcccccagctgccgttcctcaacgagcacgcctacaccacccagatcgactacaaccccaa

SEQ ID NO: 78227 - DNA, 31 bp, Homo sapiens
  chr9:127573454-127573485
  hypo
tattcttcatcagtgccgtcatttgtttctg

SEQ ID NO: 78228 - DNA, 40 bp, Homo sapiens
  chr9:127577753-127577793
  hypo
gatgggagattaagtacgctgttagctgaatgggaattgg

SEQ ID NO: 78229 - DNA, 40 bp, Homo sapiens
  chr9:127577912-127577952
  hypo
caaaaaataaacaaaagtagccaggcgttgtggcatgcaa

SEQ ID NO: 78230 - DNA, 30 bp, Homo sapiens
  chr9:127619001-127619031
  hypo
gctgtccaggcatccggctcctgggacaag

SEQ ID NO: 78231 - DNA, 37 bp, Homo sapiens; identical to SEQ ID NO: 23474
  chr9:127623916-127623953
  hypo

SEQ ID NO: 78232 - DNA, 30 bp, Homo sapiens; identical to SEQ ID NO: 23475
  chr9:127641832-127641862
  hypo

SEQ ID NO: 78233 - DNA, 78 bp, Homo sapiens; identical to SEQ ID NO: 23476
  chr9:127657865-127657943
  hypo

SEQ ID NO: 78234 - DNA, 30 bp, Homo sapiens
  chr9:127661762-127661792
  hypo
gggagaccaaaggacggtcagtcagggtga

SEQ ID NO: 78235 - DNA, 37 bp, Homo sapiens
  chr9:127861824-127861861
  hypo
tgctaggattacagacggcagcttttcatccttcaaa

SEQ ID NO: 78236 - DNA, 34 bp, Homo sapiens; identical to SEQ ID NO: 23477
  chr9:127955074-127955108
  hypo

SEQ ID NO: 78237 - DNA, 30 bp, Homo sapiens
  chr9:127993098-127993128
  hypo
ccactgcgcccggccgacagatggaaacta

SEQ ID NO: 78238 - DNA, 31 bp, Homo sapiens; identical to SEQ ID NO: 7023
  chr9:128024544-128024575
  hypo

SEQ ID NO: 78239 - DNA, 38 bp, Homo sapiens
  chr9:128032922-128032960
  hypo
atataagtgaatggttgaggccgggcgcagtggctcac

SEQ ID NO: 78240 - DNA, 20 bp, Homo sapiens
  chr9:128034593-128034613
  hypo
cccagccaaaaatacattaa

SEQ ID NO: 78241 - DNA, 25 bp, Homo sapiens
  chr9:128071898-128071923
  hypo
ccaccgtgcccgggcacttaatggt

SEQ ID NO: 78242 - DNA, 157 bp, Homo sapiens; identical to SEQ ID NO: 23480
  chr9:128103376-128103533
  hypo

SEQ ID NO: 78243 - DNA, 31 bp, Homo sapiens; identical to SEQ ID NO: 23481
  chr9:128135856-128135887
  hypo

SEQ ID NO: 78244 - DNA, 19 bp, Homo sapiens
  chr9:128136126-128136145
  hypo
gcaacaagagcaaaactcc

SEQ ID NO: 78245 - DNA, 31 bp, Homo sapiens; identical to SEQ ID NO: 7025
  chr9:128138375-128138406
  hypo

SEQ ID NO: 78246 - DNA, 160 bp, Homo sapiens
  chr9:128168026-128168186
  hypo
ttctgaaggaggccctcgcccttgccgggtgcgcactttctaaaacacaaatcaggtgggtcactccttagctccagccccttccatggctccccattgtcctcagaatgaagccagcttccttagcttggcactcagtgtcgctcgaggcccaactgac

SEQ ID NO: 78247 - DNA, 31 bp, Homo sapiens
  chr9:128173739-128173770
  hypo
gtgaactgggttcttccgagccctccagccc

SEQ ID NO: 78248 - DNA, 31 bp, Homo sapiens
  chr9:128178251-128178282
  hypo
ggccccgggcttgggtcggttctaggccttt

SEQ ID NO: 78249 - DNA, 31 bp, Homo sapiens
  chr9:128186652-128186683
  hypo
taccccctgtgatgggcgggattctatctcc

SEQ ID NO: 78250 - DNA, 100 bp, Homo sapiens
  chr9:128190064-128190164
  hypo
gaccgcgctgtcagccggccactgccacggctcccgaaacagcatcgcccataccgagtcccgagctaccccagctctagacatgcgtgcatgcacttcg

SEQ ID NO: 78251 - DNA, 365 bp, Homo sapiens
  chr9:128200111-128200476
  hypo
tggtgtggccagaggcgtggtgtcaggggcatctgatcccttgcctgttcccacccagggagccggacggcacggacacaggtctccctccgctcacccctctccctgaaacgtgagaaacagcagctttccgcctgcttgaaaaaggaggcaggcgctgtaaggagaagaggaatggggaatgtggccccttccaaggcagcgaagcagagaacatgcaggtggaactgccagctgaaacctacacttgctacttaagaaacggaaagaccatgtctggctgggagtgcagcgtgcctgaggaccagccaccgcccctcctcctggcaccccacactgtccacgcagctcctgggctctgaggt

SEQ ID NO: 78252 - DNA, 169 bp, Homo sapiens
  chr9:128274067-128274236
  hypo
taaaaagtcacagctgcgcatgaagccgcataccctccatttcacagcagagaggaacacaaaaggaagattctgggaagcagttactctgcagcgacgggaaaacctgcttgggcattccaatgatgtatttattgcagtaataccatgtcaccgaatggcctaggaa

SEQ ID NO: 78253 - DNA, 30 bp, Homo sapiens
  chr9:128274518-128274548
  hypo
gggaagacacactgtcgcctccattgctct

SEQ ID NO: 78254 - DNA, 88 bp, Homo sapiens
  chr9:128274768-128274856
  hypo
cagctcctcctcctggggactcgtaaacttgtcgtttaatctttatgtttcttttcctctcacgtagtttattggttcgtatgtatac

SEQ ID NO: 78255 - DNA, 30 bp, Homo sapiens
  chr9:128309350-128309380
  hypo
tcgtaaccactgaacgatgtatgggcattt

SEQ ID NO: 78256 - DNA, 30 bp, Homo sapiens; identical to SEQ ID NO: 23485
  chr9:128365540-128365570
  hypo

SEQ ID NO: 78257 - DNA, 94 bp, Homo sapiens; identical to SEQ ID NO: 23486
  chr9:128399988-128400082
  hypo

SEQ ID NO: 78258 - DNA, 160 bp, Homo sapiens; identical to SEQ ID NO: 23487
  chr9:128407605-128407765
  hypo

SEQ ID NO: 78259 - DNA, 225 bp, Homo sapiens; identical to SEQ ID NO: 23488
  chr9:128409705-128409930
  hypo

SEQ ID NO: 78260 - DNA, 82 bp, Homo sapiens
  chr9:128479563-128479645
  hypo
tcttttctccatgatacgttattagtaaccccaattccttttgccttttctcacagggacttttttttttttttttttttga

SEQ ID NO: 78261 - DNA, 29 bp, Homo sapiens
  chr9:128635174-128635203
  hypo
aagcaaaaattgacagaatttcggctggg

SEQ ID NO: 78262 - DNA, 468 bp, Homo sapiens; identical to SEQ ID NO: 46554
  chr9:128651895-128652363
  hypo

SEQ ID NO: 78263 - DNA, 30 bp, Homo sapiens
  chr9:128674627-128674657
  hypo
gggtatgcgtttattcggagaaagctttgt

SEQ ID NO: 78264 - DNA, 240 bp, Homo sapiens
  chr9:128677869-128678109
  hypo
gtttgatcattttctcgaataaacaaaatactcacactatttgtcctctgtttctcgcttcttctctctctgtctctctctctctttccttgaaggtctcagcatcagaggagcccaggaggaggaccctcccgatccccagctaatgagactggacaatatgcttttggcagaaggggtttcaggtcctgagaaaggtgggggatcggcggcagcagctgcagccgcggcagcctctgg

SEQ ID NO: 78265 - DNA, 30 bp, Homo sapiens; identical to SEQ ID NO: 23491
  chr9:128728891-128728921
  hypo

SEQ ID NO: 78266 - DNA, 41 bp, Homo sapiens
  chr9:128752497-128752538
  hypo
cctgcccctcagggttcgtttcctaccgcctggcctaccct

SEQ ID NO: 78267 - DNA, 31 bp, Homo sapiens
  chr9:128757172-128757203
  hypo
ttctccagggacagggcgtccgctccttttc

SEQ ID NO: 78268 - DNA, 275 bp, Homo sapiens; identical to SEQ ID NO: 23492
  chr9:128759706-128759981
  hypo

SEQ ID NO: 78269 - DNA, 60 bp, Homo sapiens
  chr9:128777743-128777803
  hypo
tacattttgccaggcgcaggcggtgataatggatcacgttttggcgaggaggataatgga

SEQ ID NO: 78270 - DNA, 30 bp, Homo sapiens
  chr9:128890956-128890986
  hypo
aaggctcccagcctgcgtaccactgtctca

SEQ ID NO: 78271 - DNA, 31 bp, Homo sapiens; identical to SEQ ID NO: 23493
  chr9:128908570-128908601
  hypo

SEQ ID NO: 78272 - DNA, 112 bp, Homo sapiens
  chr9:128925325-128925437
  hypo
gtgctggggagaccctcgcctcccatggttgttagcatgaactgaggcgatgcatgtgggtgctgagcacgaagcctggtgcatggtcaaccctcagcgaatgcatctagct

SEQ ID NO: 78273 - DNA, 36 bp, Homo sapiens
  chr9:128926860-128926896
  hypo
ggcctgtatgtgtctttcttgcgtaccctgatggct

SEQ ID NO: 78274 - DNA, 220 bp, Homo sapiens
  chr9:128998176-128998396
  hypo
ccccaaaccgggcctcgtcggaaacaagtctttattacgaaattggcgcctagttttcataccacgcaggatggaggcgcaaggtgtgacatgaattaacgccggcacctgcagggtcagcccagccctcgctggcggtacagagacaaacgggttcggctcccgccaccaccctgcgtctggttgacaaggcgccagtcgccttcggattgtgcgggaa

SEQ ID NO: 78275 - DNA, 31 bp, Homo sapiens
  chr9:129219830-129219861
  hypo
acctgtatgttgtgtacgggtagagattggg

SEQ ID NO: 78276 - DNA, 31 bp, Homo sapiens
  chr9:129222036-129222067
  hypo
ccatccttgcctgccccgctcacttggacct

SEQ ID NO: 78277 - DNA, 31 bp, Homo sapiens
  chr9:129224279-129224310
  hypo
atgctcccatcactcacgactagataatttc

SEQ ID NO: 78278 - DNA, 31 bp, Homo sapiens
  chr9:129242473-129242504
  hypo
ctgacttcggggctccgcgtccctgcactca

SEQ ID NO: 78279 - DNA, 31 bp, Homo sapiens
  chr9:129265131-129265162
  hypo
ggcagatgggcggcaccgtggttttacacac

SEQ ID NO: 78280 - DNA, 31 bp, Homo sapiens; identical to SEQ ID NO: 23495
  chr9:129265612-129265643
  hypo

SEQ ID NO: 78281 - DNA, 31 bp, Homo sapiens
  chr9:129266741-129266772
  hypo
tggaggcttgatgctgcggttgggggctgca

SEQ ID NO: 78282 - DNA, 31 bp, Homo sapiens
  chr9:129267624-129267655
  hypo
cgctgcaggcccctgtcgagctggggtccca

SEQ ID NO: 78283 - DNA, 31 bp, Homo sapiens
  chr9:129287199-129287230
  hypo
ggcctctggcctgggacgtgttccctgtgca

SEQ ID NO: 78284 - DNA, 80 bp, Homo sapiens
  chr9:129316509-129316589
  hypo
gaggaagaccttttccgcggggtgccctggaatactatagggctataaaaccagctgggttcattcggcttggcagtgag

SEQ ID NO: 78285 - DNA, 31 bp, Homo sapiens
  chr9:129423386-129423417
  hypo
ctaaccgtagtagacacgcccatacacagga

SEQ ID NO: 78286 - DNA, 422 bp, Homo sapiens; identical to SEQ ID NO: 23496
  chr9:129455240-129455662
  hypo

SEQ ID NO: 78287 - DNA, 31 bp, Homo sapiens
  chr9:129455945-129455976
  hypo
actacggtccagggggcgtggggctggctgt

SEQ ID NO: 78288 - DNA, 30 bp, Homo sapiens
  chr9:129517388-129517418
  hypo
gtggggcgtgggtggcggccaatgcagtgc

SEQ ID NO: 78289 - DNA, 18 bp, Homo sapiens
  chr9:129517699-129517717
  hypo
ttccgaacctcgcaccgc

SEQ ID NO: 78290 - DNA, 38 bp, Homo sapiens
  chr9:129560118-129560156
  hypo
cgtgagccaccgcgcccggcccctgatctgtcagtttt

SEQ ID NO: 78291 - DNA, 98 bp, Homo sapiens
  chr9:129562213-129562311
  hypo
gcatgaatcatgcactcgctcttaaagtgcccacctggaaatgatgcatgttttataatacattagtgaggccgggagcagtggctcatgcctgtaat

SEQ ID NO: 78292 - DNA, 81 bp, Homo sapiens; identical to SEQ ID NO: 23497
  chr9:129627922-129628003
  hypo

SEQ ID NO: 78293 - DNA, 238 bp, Homo sapiens
  chr9:129628398-129628636
  hypo
tctcttttttttttccctccccgagtaacctcattttaccaaaacgatcctcagtcagtacacagtcactcccaaatcagtatcttcgggtctaatatttctctctagctccagccccatatttcccacgaccccgtgaaaaacctgagcccagcttgtcctggctgagctacgtggcctccgagtagacaccatgcctcagtctccaggtgctgccgccagaattctgtttgagttc

SEQ ID NO: 78294 - DNA, 426 bp, Homo sapiens
  chr9:129630575-129631001
  hypo
acttaccaagcctgtcgtcatatggtctcgcatcagaccttaattttcttttcagcgcatccatgcctgcttatttccagagcccccgctttggctttggacttcaggtctgtgggaggagtgtcccaggatggctcgtgcggtcatttccaggcagtgccgctctccctgtggcttgtacccacagtgcctcactgtgtgagtgtcctcctgctctggttgcccagccggccatcactccacagcgtgtgttcatttctcccaaagctgctcgccttcagctgtgctcacctttgcagtgtggcttccatgtctgccgtcctctggtgctttcagacttggcttcgtcactgcttggtcagtcctggagggcccctcacagtttgctgttgctttcagggcgccggtctcaatgctgctttgaat

SEQ ID NO: 78295 - DNA, 30 bp, Homo sapiens
  chr9:129631221-129631251
  hypo
ggagggcatgatacacggtggccgcggggc

SEQ ID NO: 78296 - DNA, 77 bp, Homo sapiens
  chr9:129633596-129633673
  hypo
gaaaaaaataggtcagcgtgtatgtgctgctatggaaagattttttttctttttttttttttttgagatggagtctc

SEQ ID NO: 78297 - DNA, 30 bp, Homo sapiens
  chr9:129642296-129642326
  hypo
gggagcagtgggagcgtttctgaatatgag

SEQ ID NO: 78298 - DNA, 87 bp, Homo sapiens
  chr9:129645226-129645313
  hypo
attacactctaatcccgctgctcccgaggagcggctttgctaaatcgggtatatagtatatgcctttttcctcgtcaaactgcctaa

SEQ ID NO: 78299 - DNA, 30 bp, Homo sapiens
  chr9:129645656-129645686
  hypo
ggagggcacctggcgcgggcacttccagcg

SEQ ID NO: 78300 - DNA, 22 bp, Homo sapiens
  chr9:129679037-129679059
  hypo
cgatggagtgagacttttccat

SEQ ID NO: 78301 - DNA, 30 bp, Homo sapiens
  chr9:129749225-129749255
  hypo
tgtaagaacttagcgcggtgcctgtacaaa

SEQ ID NO: 78302 - DNA, 41 bp, Homo sapiens
  chr9:129834458-129834499
  hypo
taatattccattgtaccgatgcaccacgtttaatttatcca

SEQ ID NO: 78303 - DNA, 30 bp, Homo sapiens
  chr9:130027101-130027131
  hypo
ctgcagtgaggagccggggcactgcaagtc

SEQ ID NO: 78304 - DNA, 219 bp, Homo sapiens; identical to SEQ ID NO: 7041
  chr9:130159224-130159443
  hypo

SEQ ID NO: 78305 - DNA, 37 bp, Homo sapiens
  chr9:130172834-130172871
  hypo
ggattacaggcatgaaccaccgcgcccggcctcttgg

SEQ ID NO: 78306 - DNA, 30 bp, Homo sapiens
  chr9:130207492-130207522
  hypo
agtggagagagtcccggacatgccgactca

SEQ ID NO: 78307 - DNA, 30 bp, Homo sapiens; identical to SEQ ID NO: 23502
  chr9:130230041-130230071
  hypo

SEQ ID NO: 78308 - DNA, 31 bp, Homo sapiens
  chr9:130241845-130241876
  hypo
ttgggccaaggtccctcggatgtggaaaggc

SEQ ID NO: 78309 - DNA, 22 bp, Homo sapiens
  chr9:130247370-130247392
  hypo
gccaccacgcctggcctatttt

SEQ ID NO: 78310 - DNA, 193 bp, Homo sapiens
  chr9:130248340-130248533
  hypo
acttcctgtgtggcaggcactcggctaagcgatgaaccacattcgctgattgattctaggagggactgtattgttattagcccgatttcacaatcgcaactcaggttctgagaaactgtataacgcacccaaggaagcaagccagcaggtggcggagccaggatttgagcccggcagaggggaggggtgtgct

SEQ ID NO: 78311 - DNA, 21 bp, Homo sapiens
  chr9:130262619-130262640
  hypo
acagagcgagactgtctcaaa

SEQ ID NO: 78312 - DNA, 191 bp, Homo sapiens
  chr9:130265600-130265791
  hypo
ggccttcctgggaaggcgtgtggtgcaggcctgtgctcacagtggcaccagcaaccctgggtctccctctctgctgctccccagaaccccggggccctcctgctctccacaactgtccctccttaccccatgtagctcgatccgaagcaggagtgtcaataaacctgtcttcagtgcgcttctggcctgag

SEQ ID NO: 78313 - DNA, 168 bp, Homo sapiens; identical to SEQ ID NO: 23504
  chr9:130266738-130266906
  hypo

SEQ ID NO: 78314 - DNA, 274 bp, Homo sapiens
  chr9:130269316-130269590
  hypo
tggggactctccccagcgggggccccgttgagcagggggccggctggtggggggctctcaggccgcagaccttgggccagcaggcctcggatctcagtgacaccgtccggggacgcaggtggtggtgactcagggctagcctcaaagggcagccccacctcctcatcctggaccacagagaccacctgcttggcgcgccgtcgcttttccgagagggtggctgactccggggtgctggggctggggctgccgcccccgccgctgttgctgtact

SEQ ID NO: 78315 - DNA, 123 bp, Homo sapiens
  chr9:130270527-130270650
  hypo
ggccctgagggtaggacgaggccagtggtctgacccaagcctccgagtcctcatccgcacaagaggaccatggcgcctccttgcagggacagcaatcctggtggtggccggggatgaggctcg

SEQ ID NO: 78316 - DNA, 85 bp, Homo sapiens
  chr9:130271242-130271327
  hypo
cctcgggtctacctcccgcatgtggatctgggctcgctgcttgaacacggacgtgctggacacatcaaatcgctgctgcagcccg

SEQ ID NO: 78317 - DNA, 164 bp, Homo sapiens
  chr9:130272562-130272726
  hypo
gggctggacatggttccgcacgcacacctctgccttggggaggatgaaggctgtgccccgagggagccgggtcagcaggggctccccaaggagcacctcccagccatcccagagcccaggtgctggaggctactgtattactattattatcattattattatat

SEQ ID NO: 78318 - DNA, 72 bp, Homo sapiens
  chr9:130278829-130278901
  hypo
agctatacttgctgaacgtaaatgtactttaaaatgacacatggtaaaaatctgtgacgagtcagagatgaa

SEQ ID NO: 78319 - DNA, 70 bp, Homo sapiens
  chr9:130279230-130279300
  hypo
ttggacagcacctcctcgaagcgcgccttggcctgctcgtacaccatgtggtacacggcgtccgagatct

SEQ ID NO: 78320 - DNA, 31 bp, Homo sapiens
  chr9:130279562-130279593
  hypo
ttcccacaagccaggccgctgcagcccccac

SEQ ID NO: 78321 - DNA, 149 bp, Homo sapiens
  chr9:130279873-130280022
  hypo
ctgcaccccagtgcctcgtccagggtaggtgctcagatgcccagtaagtgatgaataagacagcgagtatctccacgtgcactggccctgcacttgtccaaatctaagcatgtcatctccttccaaaccggcagcgccccagagcccca

SEQ ID NO: 78322 - DNA, 31 bp, Homo sapiens
  chr9:130290388-130290419
  hypo
gcataatgcacaggaccgccatgaccactac

SEQ ID NO: 78323 - DNA, 58 bp, Homo sapiens
  chr9:130296358-130296416
  hypo
taagaagctgcagctcgcgtcccaactgggatttgtgctggcccgctgtgcggctccc

SEQ ID NO: 78324 - DNA, 204 bp, Homo sapiens
  chr9:130297781-130297985
  hypo
gggagtgcagggaccccgctgcctgtcagggtgggagctgaaggtcaaggctgaaggtcaggtccctggaccagcgcagtgctgcccacaggcctagggcctcgggctgaggggacccaggcaagggccaggggtccaggatgcagttccctctaggtttgtcacgttggccccaggtggggctggagtcgctcactatccagg

SEQ ID NO: 78325 - DNA, 31 bp, Homo sapiens
  chr9:130305368-130305399
  hypo
gcccgacaatgacagccgtgtgaccctgcgt

SEQ ID NO: 78326 - DNA, 31 bp, Homo sapiens; identical to SEQ ID NO: 23509
  chr9:130311543-130311574
  hypo

SEQ ID NO: 78327 - DNA, 42 bp, Homo sapiens
  chr9:130326063-130326105
  hypo
attacaagcgtgagtcaccgcgcccagcagagaggtaagttt

SEQ ID NO: 78328 - DNA, 301 bp, Homo sapiens
  chr9:130327522-130327823
  hypo
gagccaccacgcctggcctgtgcacacattacttttgcaattagacaaaatgttcagtggttgcctagatttaggagggactaggaggaaacaggagcgactactaaggagtagaggatttctttccgggctgatgaaaatgctccaacattgatggtggcaatggttgcgcaattctgtgaatatactaaaaaccgctgaagtgtacactttaggtggctgaattgtatggtaggtgaattacgcctcaataaagctattatttttggctgggcgtggtggctcacgcctataatcttgg

SEQ ID NO: 78329 - DNA, 474 bp, Homo sapiens; identical to SEQ ID NO: 46581
  chr9:130330785-130331259
  hypo

SEQ ID NO: 78330 - DNA, 159 bp, Homo sapiens; identical to SEQ ID NO: 46583
  chr9:130374195-130374354
  hypo

SEQ ID NO: 78331 - DNA, 37 bp, Homo sapiens; identical to SEQ ID NO: 46584
  chr9:130374656-130374693
  hypo

SEQ ID NO: 78332 - DNA, 181 bp, Homo sapiens
  chr9:130388084-130388265
  hypo
cctgggtgacagagcgagattctgtctcaaaaaaacaaaccaaccaaccaaaacaaacaaacaaaaaaatatacattctacaactgtagttgtgatcccctttctcattctatcctgtttgtgtattattttcatggaaatacttgctggaaacttacttattttactttcctttaaaaaa

SEQ ID NO: 78333 - DNA, 31 bp, Homo sapiens
  chr9:130415924-130415955
  hypo
gatgcggtaagctgagcgagaatcacagcag

SEQ ID NO: 78334 - DNA, 200 bp, Homo sapiens
  chr9:130438944-130439144
  hypo
caaactgatccagcacgcccagatacccccggaggatagtgagatcatcaccaacatggctcacctcggcgtgcccatcgtcaccgatgtaagaggccagctcagcttccgggggaggtgggaagggagctggcagatctgtctgcttctgctctgactgacatacagcatctctgatacacactcgtacgtcaagagag

SEQ ID NO: 78335 - DNA, 125 bp, Homo sapiens
  chr9:130442567-130442692
  hypo
tggatgtcagctctgcggcagacccactgtacggctgtgtgatctaccagagccctctcgctgctgctccccacagctgcagcgtgggccaggtctgcacagtggtcccacggcccttccccctc

SEQ ID NO: 78336 - DNA, 163 bp, Homo sapiens
  chr9:130444668-130444831
  hypo
tctctctctttctcagcgcccgctatgggcactggcataagaacaaggccccaggcgagtaccgcagtggcccccgcctcatcattttcatccttgggggtgtgagcctgaatgagatgcgctgcgcctacgaggtgacccaggccaacggaaagtgggaggt

SEQ ID NO: 78337 - DNA, 192 bp, Homo sapiens
  chr9:130446344-130446536
  hypo
ttgaggttccatatatcgggaggtgggaacctgggggtatgcagttgcccatgaagattcatggaggggcctcgcgcagacagctgacgtccgctgtgtggcctcccctgctttgtgcatgccagcctccttgctaccatgtgtgttcatgcgcgcttgtgtgtgtgtgtatgcatgcgcacacatgtgtgt

SEQ ID NO: 78338 - DNA, 34 bp, Homo sapiens
  chr9:130448209-130448243
  hypo
gtgagccaccgcgcccagccgactatccaaattt

SEQ ID NO: 78339 - DNA, 202 bp, Homo sapiens
  chr9:130454484-130454686
  hypo
ctcaaagtgctgtacgcgagctcggcgccacctccgcctccctttcagagcctgctccccgccctctctgctcgctgcattgtggtgttctcttctcaaggctttgaaatctccccttgcactgagattagtcgtcagatctctccccgtctccctcccaacttatacgacctgatttccttaggacggaaccgcaggcacc

SEQ ID NO: 78340 - DNA, 31 bp, Homo sapiens; identical to SEQ ID NO: 23515
  chr9:130467717-130467748
  hypo

SEQ ID NO: 78341 - DNA, 30 bp, Homo sapiens
  chr9:130476610-130476640
  hypo
acccctggcccacccgacccagttgcacaa

SEQ ID NO: 78342 - DNA, 30 bp, Homo sapiens
  chr9:130494138-130494168
  hypo
ggccaagatgctctcgagccagtttagagg

SEQ ID NO: 78343 - DNA, 40 bp, Homo sapiens
  chr9:130494891-130494931
  hypo
caggaggatctcctcgcggtcccgccggctgcgccacgcc

SEQ ID NO: 78344 - DNA, 20 bp, Homo sapiens
  chr9:130534828-130534848
  hypo
gcgcccggccagctgacttt

SEQ ID NO: 78345 - DNA, 297 bp, Homo sapiens
  chr9:130550869-130551166
  hypo
atcatggcagagatgtggacccgcagccccatcatgcagggcaacacggagcagcaccaactcgccctcatcagtcagctctgcggctccatcacccctgaggtacggggccccggtccccacggggtgcagagatcgaggtcccccggcagaggaggagtggggagtagaatggaaggagcgctcctctctggaagggaggctggtttggtgacagggcctgtcttggggtggggagtgtgtgggagaaaaaaacacctgacacaggctgtgcgccagtctcggttccatcagctg

SEQ ID NO: 78346 - DNA, 37 bp, Homo sapiens
  chr9:130561819-130561856
  hypo
aaaaagatgggggtctcgctatgtcacccaggctgga

SEQ ID NO: 78347 - DNA, 31 bp, Homo sapiens; identical to SEQ ID NO: 23517
  chr9:130570904-130570935
  hypo

SEQ ID NO: 78348 - DNA, 41 bp, Homo sapiens; identical to SEQ ID NO: 23518
  chr9:130589224-130589265
  hypo

SEQ ID NO: 78349 - DNA, 24 bp, Homo sapiens
  chr9:130622503-130622527
  hypo
ggaaaactccgtttcaaaaaaaaa

SEQ ID NO: 78350 - DNA, 94 bp, Homo sapiens
  chr9:130630678-130630772
  hypo
atggtctcctcattgtcgtccacacgcccgctggtctctccacgtttcaagagccgctgggtcatggtctcagggcctgcgtccacatacagca

SEQ ID NO: 78351 - DNA, 216 bp, Homo sapiens
  chr9:130633161-130633377
  hypo
taggctccccctagcccttgccgacctctccctcctaggcccttgcagtcccgtttatttctcccatacagccttgtgacaccgaggtaaaagtgtatgtgtgtgcacagggccatgtgtgcgagcacgtgtgcattcctgcatatgtgtgctgcgtccgtgacatgcatgtgcaggagtgcagtatccactgccgtgtgtgtgcatgtgtgcaca

SEQ ID NO: 78352 - DNA, 31 bp, Homo sapiens
  chr9:130634873-130634904
  hypo
agctttgcctgtgtgccgtgggctttgctgc

SEQ ID NO: 78353 - DNA, 186 bp, Homo sapiens; identical to SEQ ID NO: 23521
  chr9:130635123-130635309
  hypo

SEQ ID NO: 78354 - DNA, 30 bp, Homo sapiens; identical to SEQ ID NO: 23522
  chr9:130637449-130637479
  hypo

SEQ ID NO: 78355 - DNA, 164 bp, Homo sapiens; identical to SEQ ID NO: 7048
  chr9:130639866-130640030
  hypo

SEQ ID NO: 78356 - DNA, 30 bp, Homo sapiens
  chr9:130648186-130648216
  hypo
tgggagggtccagacggggaggacagaccc

SEQ ID NO: 78357 - DNA, 30 bp, Homo sapiens; identical to SEQ ID NO: 23524
  chr9:130672621-130672651
  hypo

SEQ ID NO: 78358 - DNA, 498 bp, Homo sapiens; identical to SEQ ID NO: 46591
  chr9:130674525-130675023
  hypo

SEQ ID NO: 78359 - DNA, 80 bp, Homo sapiens; identical to SEQ ID NO: 23526
  chr9:130675503-130675583
  hypo

SEQ ID NO: 78360 - DNA, 55 bp, Homo sapiens
  chr9:130676087-130676142
  hypo
gggctagggcaggcacatggacggggtgctcggcggccacacctactgcacactg

SEQ ID NO: 78361 - DNA, 30 bp, Homo sapiens; identical to SEQ ID NO: 23527
  chr9:130710250-130710280
  hypo

SEQ ID NO: 78362 - DNA, 155 bp, Homo sapiens
  chr9:130712702-130712857
  hypo
ttaaggatggagttgtcctggcgagtgttcttcgtgtcatatccctcgagcaggcagcagcgcaccgtggagcccgagcccgcaaactcggccaggttcaagtcagcgaagcccagctaggaggtgagaggagcgtgtgggagggctgagggagt

SEQ ID NO: 78363 - DNA, 30 bp, Homo sapiens
  chr9:130727578-130727608
  hypo
cccaggtgtgacaaccgaaaatgtctccag

SEQ ID NO: 78364 - DNA, 105 bp, Homo sapiens
  chr9:130737467-130737572
  hypo
gcgtggggcccccagcgcggcactgacctggccaaggccttcttcatactaaaagaaccccacctgtgcctccggggccaccatcccagccgtgccatggaaggc

SEQ ID NO: 78365 - DNA, 30 bp, Homo sapiens; identical to SEQ ID NO: 23529
  chr9:130744220-130744250
  hypo

SEQ ID NO: 78366 - DNA, 125 bp, Homo sapiens; identical to SEQ ID NO: 23530
  chr9:130868764-130868889
  hypo

SEQ ID NO: 78367 - DNA, 105 bp, Homo sapiens
  chr9:130878927-130879032
  hypo
cagcttcataaatagacccctcgaatattgactctgtgtatcgtcatccaaaacaccttcccagccctggccttacccgcccacggaggtttactaatgccattt

SEQ ID NO: 78368 - DNA, 30 bp, Homo sapiens
  chr9:130883518-130883548
  hypo
gcccctccatcacacgcagcacgccataca

SEQ ID NO: 78369 - DNA, 143 bp, Homo sapiens
  chr9:130906606-130906749
  hypo
ggtctctgggtgttctcggcatctcctgctgctctgccgctggcactgccctcccttcccctcacccaactctgcactggtccaagttgtcccctccttttgaaggtggacacgctttccctttggagcgagatctggtcctc

SEQ ID NO: 78370 - DNA, 263 bp, Homo sapiens
  chr9:130907015-130907278
  hypo
tctcatttgacccttccggaacctattaccctgccccctgggctgggcacgctcctggactgtcctgggctctcgggagaaccagctttcaggagagccagaccggtcctctcacccagccacctctgatggtgccagcggaggcccagccaaggacctggagagcagggagcacgggagcatgtggggtaacgcaggggtggccgcagtggagatgcccctttcctggggtgctgggggctgcagtccgggcaggaggggtg

SEQ ID NO: 78371 - DNA, 31 bp, Homo sapiens; identical to SEQ ID NO: 23532
  chr9:130910752-130910783
  hypo

SEQ ID NO: 78372 - DNA, 318 bp, Homo sapiens
  chr9:130914349-130914667
  hypo
tagtgggaggggaggccggtcccccatgaggaagggatctgaggcctcatctactcattcaacgatatttatgtggtgtctgccagccactcactggccatcttggtcacagggagaaccaaggagctgacttcggaactaaaggagaacttcatccgcttctccaaatctctgggcctccctgaaaaccacatcgtcttccctgtcccaatcggtaatggccagtctggatgaggggacggggacatggggactgttcaggcaggatgcttccctaccagggatcagggagaggagggactccgtcctcagcttcag

SEQ ID NO: 78373 - DNA, 31 bp, Homo sapiens
  chr9:130915766-130915797
  hypo
cgaggaaggggaggggcgggaggctcccact

SEQ ID NO: 78374 - DNA, 31 bp, Homo sapiens
  chr9:130917060-130917091
  hypo
aggcaggatggccagccgcagtggttcacac

SEQ ID NO: 78375 - DNA, 31 bp, Homo sapiens; identical to SEQ ID NO: 23534
  chr9:130932122-130932153
  hypo

SEQ ID NO: 78376 - DNA, 42 bp, Homo sapiens; identical to SEQ ID NO: 23535
  chr9:131060965-131061007
  hypo

SEQ ID NO: 78377 - DNA, 30 bp, Homo sapiens
  chr9:131091185-131091215
  hypo
ccccacttgtaaccgcgctggcgattgtga

SEQ ID NO: 78378 - DNA, 20 bp, Homo sapiens
  chr9:131125693-131125713
  hypo
gcacccggccctatggagca

SEQ ID NO: 78379 - DNA, 84 bp, Homo sapiens; identical to SEQ ID NO: 46607
  chr9:131132509-131132593
  hypo

SEQ ID NO: 78380 - DNA, 30 bp, Homo sapiens
  chr9:131154332-131154362
  hypo
tctatttccaaagccgaggagattgccggg

SEQ ID NO: 78381 - DNA, 40 bp, Homo sapiens; identical to SEQ ID NO: 7055
  chr9:131183033-131183073
  hypo

SEQ ID NO: 78382 - DNA, 31 bp, Homo sapiens
  chr9:131196570-131196601
  hypo
tgcttgggaccctggccggcccatcccctga

SEQ ID NO: 78383 - DNA, 168 bp, Homo sapiens
  chr9:131217227-131217395
  hypo
cagtatactgtgaaagcgaggcggaaaagcaggttttgtttgcgagtctgactttaggattgcaggtgaaacacttgtgtgaccctggagctgtgtggctaaggtgctgcggggtcactggagaaaggtcaagggactgtggcccagttggcccggaggtggttcagg

SEQ ID NO: 78384 - DNA, 31 bp, Homo sapiens; identical to SEQ ID NO: 23537
  chr9:131394892-131394923
  hypo

SEQ ID NO: 78385 - DNA, 30 bp, Homo sapiens; identical to SEQ ID NO: 23538
  chr9:131395952-131395982
  hypo

SEQ ID NO: 78386 - DNA, 180 bp, Homo sapiens
  chr9:131396612-131396792
  hypo
tggagtacaggtggacatgcccgtcagtcccagcgctcaggaagagattcctagacgggatgcagggggccaggcaagggaatcagtgctggggtctgggtggtgctggcccccaacaccagacccctcctgggctgccaggctcgtgaagagcctcccgggtccctcagcctggagttg

SEQ ID NO: 78387 - DNA, 148 bp, Homo sapiens; identical to SEQ ID NO: 23539
  chr9:131411425-131411573
  hypo

SEQ ID NO: 78388 - DNA, 31 bp, Homo sapiens
  chr9:131477221-131477252
  hypo
ctccctggctccctggcgggtgcgctgactg

SEQ ID NO: 78389 - DNA, 205 bp, Homo sapiens; identical to SEQ ID NO: 23540
  chr9:131483896-131484101
  hypo

SEQ ID NO: 78390 - DNA, 30 bp, Homo sapiens; identical to SEQ ID NO: 23541
  chr9:131492163-131492193
  hypo

SEQ ID NO: 78391 - DNA, 30 bp, Homo sapiens
  chr9:131535835-131535865
  hypo
cttgggccaggcgtcgtggctcaagcctgt

SEQ ID NO: 78392 - DNA, 30 bp, Homo sapiens
  chr9:131571626-131571656
  hypo
atagtgaggaccctcgtcctccagactggc

SEQ ID NO: 78393 - DNA, 37 bp, Homo sapiens
  chr9:131574472-131574509
  hypo
tttgagatagcgtctcgctctgttgcccaggcttgct

SEQ ID NO: 78394 - DNA, 155 bp, Homo sapiens
  chr9:131579961-131580116
  hypo
acctttttaaggcttcgcttgtactgtactgtcaagctgttttttggaatattcgccccaggtttctgttccagccagcagccagcatcagccgtctgcatccttgtcctcaaactgctgttaattaaaatctttgccaatctgggccgggcgcg

SEQ ID NO: 78395 - DNA, 175 bp, Homo sapiens
  chr9:131600338-131600513
  hypo
ggacacaaacacaggacgaccccctgccatcattgtcatgggctcgtagcagtcaaaaaagggttcgatgatgatgacctgatataagggtcaaatcagctggagtcagcatggccctgacctctcagtcccactcagcccaagtcttgcccactcacctcgtctccttcgtcca

SEQ ID NO: 78396 - DNA, 31 bp, Homo sapiens
  chr9:131604667-131604698
  hypo
ctctttcttactcgcacgatatcccatcctc

SEQ ID NO: 78397 - DNA, 96 bp, Homo sapiens
  chr9:131607623-131607719
  hypo
tggctcaccaggggttgtagtcgatcccgtctagccttcgggcctgcagctgtttggccatggcgagctggagacgaacaagtggaaggtcagaga

SEQ ID NO: 78398 - DNA, 156 bp, Homo sapiens
  chr9:131647360-131647516
  hypo
ctctcccagctcctggctccccgaaacccgtgtcgtagtgatcacagctttccctaccctgccactcccatgcacagttctgcacagtgtctggcgcatatggagtagatgctcaccagaggctggttgactgtcggagatgatgggtggatttgg

SEQ ID NO: 78399 - DNA, 181 bp, Homo sapiens
  chr9:131652647-131652828
  hypo
gcaatctaagcctcacgcctagagcaatgttccagtggagtaaaagtggctgtaaaattccatagctttcacgtgccacctggacgccgtcagagtgccactgccaaacctgcgccctctgacgggcagcatgacaaacgcactgaccagcagcgggggcggtgggcgggaatcctggccc

SEQ ID NO: 78400 - DNA, 95 bp, Homo sapiens
  chr9:131653046-131653141
  hypo
ataacctgtctaagaaggcagcgctggtattcataacaggttaagacctgtaaaccgtgtgtggccgtgactccatgtgcaaatatgagccaaca

SEQ ID NO: 78401 - DNA, 30 bp, Homo sapiens
  chr9:131669826-131669856
  hypo
ggtgcttctgcacacgctcatcttcctggc

SEQ ID NO: 78402 - DNA, 80 bp, Homo sapiens; identical to SEQ ID NO: 23545
  chr9:131675095-131675175
  hypo

SEQ ID NO: 78403 - DNA, 225 bp, Homo sapiens; identical to SEQ ID NO: 46613
  chr9:131709400-131709625
  hypo

SEQ ID NO: 78404 - DNA, 113 bp, Homo sapiens; identical to SEQ ID NO: 23547
  chr9:131776673-131776786
  hypo

SEQ ID NO: 78405 - DNA, 27 bp, Homo sapiens
  chr9:131792372-131792399
  hypo
gccaccacgcccggcctaggtttcacc

SEQ ID NO: 78406 - DNA, 31 bp, Homo sapiens
  chr9:131796484-131796515
  hypo
agcttatcatcccatgcgcctcctcccctgt

SEQ ID NO: 78407 - DNA, 283 bp, Homo sapiens
  chr9:131821423-131821706
  hypo
ttatggcagccagagtcacagcggaaggagtttgcagagaagctggagtccctgctgcaccgtgcctaccacctgcaggaggagttcggctccaccttccccgcagacagcatgctgctagacctcggtgagctgggcccagtgcaggtggggtgggcgtggagggtggcagggatggaggtgaggagaagttgcgagaaccgggtcgtggttctctcagtgcgtccaatgaatcagaatccccagggctctccgacctcgcgtgatccagcaccttatggca

SEQ ID NO: 78408 - DNA, 257 bp, Homo sapiens
  chr9:131822133-131822390
  hypo
ctgccagtggagacacagaaccggagtgggtcggccgagccacgcaccctgccctggcttctccccacgtgctctgggtgtggtttctctgttggaggaatctgcctcctctggcctccctacatggcagaaagggctgggggacctttagggtggcccgccgcaggtctgtggcctttgcttatttgctcgacaatcctttcctgagcacccttggaggtccacacccctcagcccttgggcgagcacggagggga

SEQ ID NO: 78409 - DNA, 628 bp, Homo sapiens; identical to SEQ ID NO: 46616
  chr9:131842859-131843487
  hypo

SEQ ID NO: 78410 - DNA, 361 bp, Homo sapiens; identical to SEQ ID NO: 23551
  chr9:131854102-131854463
  hypo

SEQ ID NO: 78411 - DNA, 30 bp, Homo sapiens
  chr9:131857185-131857215
  hypo
cacaggagcacagccgcaacggaggtgaaa

SEQ ID NO: 78412 - DNA, 30 bp, Homo sapiens; identical to SEQ ID NO: 23552
  chr9:131870289-131870319
  hypo

SEQ ID NO: 78413 - DNA, 37 bp, Homo sapiens
  chr9:131897373-131897410
  hypo
tgaaagaattgtcacataggccgggcgcggtggctca

SEQ ID NO: 78414 - DNA, 158 bp, Homo sapiens
  chr9:131919403-131919561
  hypo
agcatggtggggtacccggagctgggcaagggaaagattggctatggccacgtggctccttgttctccccaaggcagtctgtctctgcggacagccatcaggccccaaatccaggcgtcatcctttttattttttgagacaggatcttgctctgtcac

SEQ ID NO: 78415 - DNA, 277 bp, Homo sapiens; identical to SEQ ID NO: 46622
  chr9:131940268-131940545
  hypo

SEQ ID NO: 78416 - DNA, 390 bp, Homo sapiens; identical to SEQ ID NO: 46623
  chr9:131940585-131940975
  hypo

SEQ ID NO: 78417 - DNA, 31 bp, Homo sapiens
  chr9:131978870-131978901
  hypo
aaggaaggggtgcatccgctcctctcccagg

SEQ ID NO: 78418 - DNA, 31 bp, Homo sapiens
  chr9:131987004-131987035
  hypo
cctgatggcctggagacgcaagaggaggctg

SEQ ID NO: 78419 - DNA, 228 bp, Homo sapiens
  chr9:132004479-132004707
  hypo
tacctggtcacaattacggaagacaaggtggggctgggggctggttattttacagatgaggagacccgagaccagagagggaccgtgactgcccaaggtcacatagatctttggcctaacttgacacagcattcattcacagcctgagcaccgctctacggagctcctggacagatctgcgtgtcccctcctgggagtcccatccactggagccgcagagtgggggca

SEQ ID NO: 78420 - DNA, 298 bp, Homo sapiens
  chr9:132071026-132071324
  hypo
cactgtgcctgctcccgcaacgtccctgtagaaatgagcacatctgagtgtcctacccagtgccaggctggcttagcgtggatgcccccggcacacagctctcttccttttctcggcacctccgccgctctctaaatcccctgggaacatcgggaacactctccggtgttgctttacacctgtttttacttgcctcccgctctccagccaaggagtgggctggattcacgatgacgttcacctttgtcacttgaaggcaaaactggtatcaagtttgttgcctcgtgatgaccatgga

SEQ ID NO: 78421 - DNA, 31 bp, Homo sapiens; identical to SEQ ID NO: 23554
  chr9:132089110-132089141
  hypo

SEQ ID NO: 78422 - DNA, 197 bp, Homo sapiens
  chr9:132112538-132112735
  hypo
aggttgctaagccaggcggcccacctttcccccttcccataagacatgaagacgcccctccgtgtggcacagggcagagctggccagagccctgctcagtgtgtctggccacttgacctgggacaagccctccttctgagcctctgctgtatggggcaaccgtagggccctggttcggagcccggtgtggggaggat

SEQ ID NO: 78423 - DNA, 31 bp, Homo sapiens; identical to SEQ ID NO: 23556
  chr9:132142032-132142063
  hypo

SEQ ID NO: 78424 - DNA, 293 bp, Homo sapiens; identical to SEQ ID NO: 46627
  chr9:132145468-132145761
  hypo

SEQ ID NO: 78425 - DNA, 30 bp, Homo sapiens
  chr9:132163008-132163038
  hypo
cgaggccttgccttcggaggggtgaaggtc

SEQ ID NO: 78426 - DNA, 219 bp, Homo sapiens
  chr9:132163278-132163497
  hypo
ctgggctccaaccctgcgggccactcccggcctggccaccccaccgcatctccaagccccatctccctcttggggaccgtgtctctgggttttgtgaggctgaattcttctcagctctcaggtgttaagaccatctcctccaagaggcctccctgagccccggcccccacgatgatcctgctggcattctctctcctcctcaggcggctctgggtttct

SEQ ID NO: 78427 - DNA, 272 bp, Homo sapiens
  chr9:132166917-132167189
  hypo
tcctgggtttgaatctcgccccctttcacaagctgtgcaactttgaggggcgactgaccccctccccctccctaagggggtgatgcggccacctgccctcaggacccagtggggcctccatatagccagtcgggggggtggggacagcccagtgcttccaggtacggctgtagagtcagccctgggttcaagtcctgacactttcagtagaggaagggggcagggctgggggtgagcctcctcgccccgtgtgggcccgggccctcccctgc

SEQ ID NO: 78428 - DNA, 170 bp, Homo sapiens
  chr9:132189583-132189753
  hypo
ggctctgaagcaggggcgtggtgagactggcgggcggcgggggggttagatgacacctctactgctgcatggggaactggagtaggaggaaaggctgggagctgagggagcatctgaacaagacatggtggctggggtcaggctggggggggtggcggtcatggggatct

SEQ ID NO: 78429 - DNA, 31 bp, Homo sapiens
  chr9:132204052-132204083
  hypo
catttgtgagtgttccgcgtgggctacatcc

SEQ ID NO: 78430 - DNA, 48 bp, Homo sapiens; identical to SEQ ID NO: 23559
  chr9:132211771-132211819
  hypo

SEQ ID NO: 78431 - DNA, 35 bp, Homo sapiens; identical to SEQ ID NO: 46630
  chr9:132222863-132222898
  hypo

SEQ ID NO: 78432 - DNA, 530 bp, Homo sapiens
  chr9:132230760-132231290
  hypo
gtgtgcatgtgtgtctcgtgtaggtgtgtgcacagtgtacaactgtgtgcaagtgtgtacagtgtttctgcatgtgtgcagagtgtacctgtgtgtgtgcgtgtggacagtgtgcaccggcgtgacactgtgtcgaatgtgtgtgcacagtgtacctgtgtgtgtgcatgtggacagtgtgcaccggcgtgacactgtgtctagtgtgcaccgtgtacctgtgtgtgtgtgtgtggacagtgtgcaccgtgtacctgtgtgtgtgtgtggacagtgtgcaccggcgtgacactgtgtcgaatgtgtgtgcacagtgtacctgtgtgtgtgcatgtggacagtgtgcaccggcgtgacactgtgtctagtgtgcacagtgtacctgtgtgtgcatgtggacagtgtgcacagtgtacctgtgtgtgtgtgtgtggacagtgtgcaccagcgtgacactgtgtcaaatgtgtgtgcacagtgtacctgtgtgtgtgcatgtggacagtgtgcaccggcgtgacactgtgtct

SEQ ID NO: 78433 - DNA, 357 bp, Homo sapiens; identical to SEQ ID NO: 46632
  chr9:132245128-132245485
  hypo

SEQ ID NO: 78434 - DNA, 57 bp, Homo sapiens; identical to SEQ ID NO: 46633
  chr9:132250697-132250754
  hypo

SEQ ID NO: 78435 - DNA, 645 bp, Homo sapiens; identical to SEQ ID NO: 46634
  chr9:132258285-132258930
  hypo

SEQ ID NO: 78436 - DNA, 37 bp, Homo sapiens
  chr9:132285634-132285671
  hypo
cccacagcatctaatccggagccggcagaggcccctt

SEQ ID NO: 78437 - DNA, 78 bp, Homo sapiens; identical to SEQ ID NO: 7070
  chr9:132331031-132331109
  hypo

SEQ ID NO: 78438 - DNA, 44 bp, Homo sapiens; identical to SEQ ID NO: 46637
  chr9:132331472-132331516
  hypo

SEQ ID NO: 78439 - DNA, 43 bp, Homo sapiens
  chr9:132356354-132356397
  hypo
ggagtgtatagggattaggaacgactgggtgtgtagggatgac

SEQ ID NO: 78440 - DNA, 200 bp, Homo sapiens
  chr9:132370721-132370921
  hypo
tttataagggcaggaatcccacttgtgagggctccaccctcatgacctgatcacccctcaacggccccacctcctcaaaccatcacatcagacctggggttccagcatatgaattttggggggacacgttcagtccataacagagctgaatgagccgcctgcagaatggcaatcggcccgtggggcagctgccatccctg

SEQ ID NO: 78441 - DNA, 31 bp, Homo sapiens
  chr9:132378412-132378443
  hypo
aagaaaggaaatgggccgtacaagcatccag

SEQ ID NO: 78442 - DNA, 31 bp, Homo sapiens
  chr9:132381768-132381799
  hypo
taccctacccttatcccgcccatcactcact

SEQ ID NO: 78443 - DNA, 100 bp, Homo sapiens; identical to SEQ ID NO: 7072
  chr9:132382254-132382354
  hypo

SEQ ID NO: 78444 - DNA, 30 bp, Homo sapiens
  chr9:132396273-132396303
  hypo
aagggccgcacgtgcggtgacagggtccct

SEQ ID NO: 78445 - DNA, 540 bp, Homo sapiens
  chr9:132402738-132403278
  hypo
agccaaggctggggacatgggcgcccacccagcgtcgggccgcgtttaagccacctgcccacccccggggctctcgctgaccttcaaagttgagattggccccatgccgcaagagaacgtcggccgcccgcgtcagccccagctcagccatcttgagcagggcgttgctcacgccttcctggtaaaagggagagtgggctttcctctccagcagctcagtgagaacaaggattcggctctcctcgctggcgacataactgggcctgggacaggagagaggctgagggtaggcacagctgtgggaccgggtgaccgcgcagcctgtgggttggtgggctttagtcctgctatcatcatcagcaagcagggccctggctctgtgggtcacaggggcttgggggaagctctgaagtagagagagggccacgctgcatctcttaatacgggagcagactgggatttgcggagaatgggctgggtctgtctgcgctctcctcccgcgttgcccagagtccggtcgcagacttaggtacaaagcct

SEQ ID NO: 78446 - DNA, 169 bp, Homo sapiens
  chr9:132411515-132411684
  hypo
gcctgggacgggatgccgcaggacccctctttctctactgttcccccatgcccacatggaaggccctgcctggtccccgcctctcccaggtgaggtaagtcagcagcccagagcagggtgggaaggtgctgagcgccccgggggtctcgccctgcgtctggagggaggc

SEQ ID NO: 78447 - DNA, 31 bp, Homo sapiens
  chr9:132482544-132482575
  hypo
caagcgcctctccccccgagtgctcagcaag

SEQ ID NO: 78448 - DNA, 210 bp, Homo sapiens
  chr9:132495390-132495600
  hypo
gagtcccagagcgcccggagcccggcctgggtcagcctccgcatggtgattcctggaggggttgatgtttctcttgtgagctcttgtgagctttcctgtagtttctaaacctgtgacatcgaccattacttgcaagtacatataattaacaagttcagaaacttaaacaagcctttctttaagacagagtctcgctctgtcacccaggct

SEQ ID NO: 78449 - DNA, 30 bp, Homo sapiens
  chr9:132497009-132497039
  hypo
tcagttcggaagatgcgatcaaccatgagg

SEQ ID NO: 78450 - DNA, 323 bp, Homo sapiens; identical to SEQ ID NO: 23566
  chr9:132501745-132502068
  hypo

SEQ ID NO: 78451 - DNA, 31 bp, Homo sapiens; identical to SEQ ID NO: 23567
  chr9:132509499-132509530
  hypo

SEQ ID NO: 78452 - DNA, 30 bp, Homo sapiens; identical to SEQ ID NO: 23568
  chr9:132530230-132530260
  hypo

SEQ ID NO: 78453 - DNA, 30 bp, Homo sapiens; identical to SEQ ID NO: 23569
  chr9:132530947-132530977
  hypo

SEQ ID NO: 78454 - DNA, 22 bp, Homo sapiens
  chr9:132535543-132535565
  hypo
gagccaccgcacccagccacat

SEQ ID NO: 78455 - DNA, 30 bp, Homo sapiens
  chr9:132572685-132572715
  hypo
tcccgcctgtccatcgctctagctgctaat

SEQ ID NO: 78456 - DNA, 31 bp, Homo sapiens
  chr9:132574946-132574977
  hypo
tgcttaccttagtctacggcactgttcctgc

SEQ ID NO: 78457 - DNA, 95 bp, Homo sapiens; identical to SEQ ID NO: 23571
  chr9:132604071-132604166
  hypo

SEQ ID NO: 78458 - DNA, 336 bp, Homo sapiens; identical to SEQ ID NO: 23572
  chr9:132633589-132633925
  hypo

SEQ ID NO: 78459 - DNA, 203 bp, Homo sapiens
  chr9:132636599-132636802
  hypo
ctcaaaggtagtgccgacagaactggtaaacttgatggctcattgcagctcttggggtccagttctcagcagtggagctgggagtgatctgtgtgacttagagcgagcccagtctggcccccacgtggaactcttggatttgttccaatggagtcagcttgcatgatcccatcagctgtcctgggcccgtgggcaaggctgcg

SEQ ID NO: 78460 - DNA, 30 bp, Homo sapiens
  chr9:132637044-132637074
  hypo
gtcccctcccctgccgtccccatccgctag

SEQ ID NO: 78461 - DNA, 54 bp, Homo sapiens; identical to SEQ ID NO: 23574
  chr9:132638504-132638558
  hypo

SEQ ID NO: 78462 - DNA, 30 bp, Homo sapiens
  chr9:132643195-132643225
  hypo
cctggtggtcccgccgcacctctgcatctc

SEQ ID NO: 78463 - DNA, 282 bp, Homo sapiens
  chr9:132643741-132644023
  hypo
caggatcaaagcagacggggcgtgggtggggaaggggctctgggaccagaccccccacactactgcgtctttgtttctatcagtctttgtagaagcaggtggtggtggaaattccagcaggtgggtcccgcagaggccctgaggcctcacttttcggatcttctgtcccagatcctgctccctccctgctgagcctggggttcccctggcattggccccagccttctgaaagccggcgctgcagccagaggccgcacgctgcactgtcgcgacgcagagagg

SEQ ID NO: 78464 - DNA, 31 bp, Homo sapiens
  chr9:132661151-132661182
  hypo
ctttacaagacaggagcgctatagatactag

SEQ ID NO: 78465 - DNA, 31 bp, Homo sapiens
  chr9:132750114-132750145
  hypo
agtttcactttactgtcgtttgtactgttaa

SEQ ID NO: 78466 - DNA, 378 bp, Homo sapiens; identical to SEQ ID NO: 7074
  chr9:132804283-132804661
  hypo

SEQ ID NO: 78467 - DNA, 920 bp, Homo sapiens; identical to SEQ ID NO: 46646
  chr9:132805028-132805948
  hypo

SEQ ID NO: 78468 - DNA, 31 bp, Homo sapiens; identical to SEQ ID NO: 7077
  chr9:132809114-132809145
  hypo

SEQ ID NO: 78469 - DNA, 52 bp, Homo sapiens; identical to SEQ ID NO: 23578
  chr9:132814991-132815043
  hypo

SEQ ID NO: 78470 - DNA, 130 bp, Homo sapiens; identical to SEQ ID NO: 23579
  chr9:132821075-132821205
  hypo

SEQ ID NO: 78471 - DNA, 513 bp, Homo sapiens; identical to SEQ ID NO: 23580
  chr9:132874159-132874672
  hypo

SEQ ID NO: 78472 - DNA, 507 bp, Homo sapiens; identical to SEQ ID NO: 23581
  chr9:132881037-132881544
  hypo

SEQ ID NO: 78473 - DNA, 89 bp, Homo sapiens
  chr9:132881755-132881844
  hypo
cctaagggcgggcatcgttacttctgccttaacaggtgaagaaaccgaggctcagagagggttagctgacttatcggaggccacacagc

SEQ ID NO: 78474 - DNA, 64 bp, Homo sapiens
  chr9:133223967-133224031
  hypo
acgtgtcgggtatggccgggcagtccctgacgctggagtgtgacgcgaacggctttccagtccc

SEQ ID NO: 78475 - DNA, 330 bp, Homo sapiens
  chr9:133230036-133230366
  hypo
gtgtttcacatggagtggggtcggtgaggggcttcagcgggcctgttgggctgagatgagagcaggctagcgtccagctgtggtccccaagccgccccctgcctcttttccagtcccacctaccatcgagggcgccggtggaagaccatacgtggtgaaggctgtggctgggaggcctgtggcgctggagtgcgtggccagaggccacccgtcccccaccctctcctggcaccacgaggggctgcccgtggcagagagcaacgagtcgcggctggagacagacgggagtgtgctgaggctggagagcccgggggaggcatccagtggcct

SEQ ID NO: 78476 - DNA, 31 bp, Homo sapiens; identical to SEQ ID NO: 23584
  chr9:133238734-133238765
  hypo

SEQ ID NO: 78477 - DNA, 31 bp, Homo sapiens
  chr9:133264507-133264538
  hypo
cgtccacagcaggggccggcactgccagcca

SEQ ID NO: 78478 - DNA, 31 bp, Homo sapiens; identical to SEQ ID NO: 23585
  chr9:133266639-133266670
  hypo

SEQ ID NO: 78479 - DNA, 31 bp, Homo sapiens
  chr9:133267499-133267530
  hypo
cctcaggtaggggagacggtggacaggcctt

SEQ ID NO: 78480 - DNA, 31 bp, Homo sapiens
  chr9:133274947-133274978
  hypo
cagcccagtttgaatgcgtggtgagcaatga

SEQ ID NO: 78481 - DNA, 155 bp, Homo sapiens
  chr9:133300386-133300541
  hypo
ggtttgcaggggagctgctcacgatgacccaggtggcccggggtctggatcccgatggcctcctgctcctcgacgtggtggtcaatggcgttgtccccgagagcctggctgacgcagatcttcaagtgcaggtcgggggtcaagccctggggtgt

SEQ ID NO: 78482 - DNA, 31 bp, Homo sapiens; identical to SEQ ID NO: 23586
  chr9:133303021-133303052
  hypo

SEQ ID NO: 78483 - DNA, 31 bp, Homo sapiens
  chr9:133303705-133303736
  hypo
atcatgttcacacagccgtctgccctgatct

SEQ ID NO: 78484 - DNA, 43 bp, Homo sapiens; identical to SEQ ID NO: 23587
  chr9:133304500-133304543
  hypo

SEQ ID NO: 78485 - DNA, 81 bp, Homo sapiens; identical to SEQ ID NO: 23588
  chr9:133305059-133305140
  hypo

SEQ ID NO: 78486 - DNA, 236 bp, Homo sapiens
  chr9:133305756-133305992
  hypo
ggccagaccctccttcgcgacggcaaggcctgcacctcactggagcggaatggacaaaatgtgaccaccgtcagccaccgaggccctctattgccctggctgcggccctgggcctcgatccccggtacctcctaccacgcctgggtctctctccgtccgggtcccatggccctgagcagtgtgggccgggcctggtgccctcctggtttcatcaggcagaacggagtctgcacagg

SEQ ID NO: 78487 - DNA, 252 bp, Homo sapiens
  chr9:133306769-133307021
  hypo
cgtgaggaacctgtgtcagcacgcctgccgcaacactgagggcagctaccagtgcctgtgccccgccggctaccgtctgctccccagcgggaagaactgccagggtgagccgggctcaggccgccgcccaaacacccgtggggctagggcaggcagcgtgggatgggacatgtggcatcttacctactccgttcactccagccccttcacaactatcctgtgaggtggggcggggaggcaggctcagagggg

SEQ ID NO: 78488 - DNA, 136 bp, Homo sapiens; identical to SEQ ID NO: 46648
  chr9:133308610-133308746
  hypo

SEQ ID NO: 78489 - DNA, 432 bp, Homo sapiens; identical to SEQ ID NO: 46649
  chr9:133308769-133309201
  hypo

SEQ ID NO: 78490 - DNA, 112 bp, Homo sapiens
  chr9:133314398-133314510
  hypo
ccttgggtggcagaggcgagaaacggaggcaggaggaagcccactccagggctctgtacacaggctgtatctatgcctttaggtggctgggggcattcgatgaggtcacatc

SEQ ID NO: 78491 - DNA, 31 bp, Homo sapiens
  chr9:133337714-133337745
  hypo
tcagcatgcggacactcgtgtgtgagacact

SEQ ID NO: 78492 - DNA, 44 bp, Homo sapiens
  chr9:133345458-133345502
  hypo
gtcatcaagggtggtgcgggtccccagggcgacaagcctcatct

SEQ ID NO: 78493 - DNA, 31 bp, Homo sapiens
  chr9:133351149-133351180
  hypo
gtgggggggtgggggacggaatcttgctctc

SEQ ID NO: 78494 - DNA, 31 bp, Homo sapiens
  chr9:133352248-133352279
  hypo
ttttttcagaaccaagcgcctccaggtctct

SEQ ID NO: 78495 - DNA, 30 bp, Homo sapiens
  chr9:133357106-133357136
  hypo
atggcagcatggaccggggcggggacgggc

SEQ ID NO: 78496 - DNA, 31 bp, Homo sapiens; identical to SEQ ID NO: 23589
  chr9:133364355-133364386
  hypo

SEQ ID NO: 78497 - DNA, 31 bp, Homo sapiens
  chr9:133364922-133364953
  hypo
gcctggccctcccctccgtatcagcaccttc

SEQ ID NO: 78498 - DNA, 31 bp, Homo sapiens
  chr9:133365220-133365251
  hypo
tgcagctccttgtacacgaggaaactgaggc

SEQ ID NO: 78499 - DNA, 119 bp, Homo sapiens; identical to SEQ ID NO: 23590
  chr9:133366662-133366781
  hypo

SEQ ID NO: 78500 - DNA, 31 bp, Homo sapiens
  chr9:133367502-133367533
  hypo
agtgcttattccagtgcgtgaaataactgcg

SEQ ID NO: 78501 - DNA, 31 bp, Homo sapiens
  chr9:133370322-133370353
  hypo
ggaaagtgcaggtgtccgtcctcaagggcca

SEQ ID NO: 78502 - DNA, 31 bp, Homo sapiens
  chr9:133376591-133376622
  hypo
gggtggggggcagctgcggtggggagctata

SEQ ID NO: 78503 - DNA, 25 bp, Homo sapiens
  chr9:133381108-133381133
  hypo
agcgagactccgtctcaagaaaaca

SEQ ID NO: 78504 - DNA, 155 bp, Homo sapiens
  chr9:133408938-133409093
  hypo
ccaatgcttgtgactacgacttgcagaacagagacctctcttggtctcactcctgcgcccagcctcttgtggcctcactggccctggctgtggtccctcctgcccctcaggggtcccttcccacctcagaaccttccttttttttttttagacgg

SEQ ID NO: 78505 - DNA, 41 bp, Homo sapiens
  chr9:133421533-133421574
  hypo
aagataaagtcttcgccgaggagtggtgccccagcttttca

SEQ ID NO: 78506 - DNA, 81 bp, Homo sapiens
  chr9:133450276-133450357
  hypo
aggccaaaggtggaatcggggagatatacagtcactttcctgtcaacaatggacagcatatttgacggtggttccatgaaa

SEQ ID NO: 78507 - DNA, 173 bp, Homo sapiens
  chr9:133513742-133513915
  hypo
ctggcctgtttgctttccattcgccggttcatccctctgcccctgcccgcggccgcccgagagggaaagaggattcctgcgggcctcgcccgtcatcttgcaccgcgtccacccgccttcgttggtgcacagtctagatgtctagctagttcgttaagctaattttatgttaa

SEQ ID NO: 78508 - DNA, 332 bp, Homo sapiens
  chr9:133527217-133527549
  hypo
ctctagtgtcctccactgtggcgagaagaaggtctggttggacccgatgagaccaatgaaatccccaatgccaacttccgtcagcagatccggaagctgatcaaagatgggctgatcttgcgtcaccgcaagcctgtgacggtccattcccgggctcaatgctggaaaagcaccttggcccgccggaagggcaggcacttgggcataggtaagcggaggggtacagccaatgcctgaatgccagagaaggtcacgtggatgaggagactgaggattctgcgccggctgctcagaatcgaagaagattgatcgccacatgtatcacagcctgt

SEQ ID NO: 78509 - DNA, 469 bp, Homo sapiens; identical to SEQ ID NO: 7084
  chr9:133537658-133538127
  hypo

SEQ ID NO: 78510 - DNA, 30 bp, Homo sapiens; identical to SEQ ID NO: 7085
  chr9:133538377-133538407
  hypo

SEQ ID NO: 78511 - DNA, 34 bp, Homo sapiens
  chr9:133580975-133581009
  hypo
tttgtttttgagacagagtgtcgctgtgtcgcta

SEQ ID NO: 78512 - DNA, 24 bp, Homo sapiens
  chr9:133583878-133583902
  hypo
tttaaagtacagtgcattggccgg

SEQ ID NO: 78513 - DNA, 121 bp, Homo sapiens
  chr9:133585239-133585360
  hypo
gcacccggccatgaattgttagtttaaaaaaatgtgtattaggggttctgatttgactgctcaattttaagctaaactagagaataaagcatgtgcgcggtggctcacacctgtaatgcca

SEQ ID NO: 78514 - DNA, 241 bp, Homo sapiens; identical to SEQ ID NO: 23595
  chr9:133592859-133593100
  hypo

SEQ ID NO: 78515 - DNA, 30 bp, Homo sapiens
  chr9:133605722-133605752
  hypo
ctagcctccggccagacttttaaatgttag

SEQ ID NO: 78516 - DNA, 41 bp, Homo sapiens; identical to SEQ ID NO: 23596
  chr9:133606662-133606703
  hypo

SEQ ID NO: 78517 - DNA, 22 bp, Homo sapiens
  chr9:133609267-133609289
  hypo
cgcctggcctgtaaagcacttt

SEQ ID NO: 78518 - DNA, 175 bp, Homo sapiens; identical to SEQ ID NO: 23597
  chr9:133641497-133641672
  hypo

SEQ ID NO: 78519 - DNA, 30 bp, Homo sapiens; identical to SEQ ID NO: 7088
  chr9:133660745-133660775
  hypo

SEQ ID NO: 78520 - DNA, 1363 bp, Homo sapiens; identical to SEQ ID NO: 46667
  chr9:133710034-133711397
  hypo

SEQ ID NO: 78521 - DNA, 30 bp, Homo sapiens
  chr9:133715223-133715253
  hypo
tatggctcacacagcgttcctagggtctca

SEQ ID NO: 78522 - DNA, 110 bp, Homo sapiens
  chr9:133738140-133738250
  hypo
ttccttcagctctacgtctcctccgagagccgcttcaacaccctggccgagttggttcatcatcattcaacggtggccgacgggctcatcaccacgctccattatccagc

SEQ ID NO: 78523 - DNA, 35 bp, Homo sapiens
  chr9:133755898-133755933
  hypo
agctggggaaacaaggcgtccgtggggctgtgagt

SEQ ID NO: 78524 - DNA, 30 bp, Homo sapiens; identical to SEQ ID NO: 23600
  chr9:133758474-133758504
  hypo

SEQ ID NO: 78525 - DNA, 365 bp, Homo sapiens
  chr9:133759675-133760040
  hypo
ggggtccccaatggagccctccgggagtccgggggctcaggcttccggtctccccacctgtggaagaagtccagcacgctgaccagcagccgcctagccaccggcgaggaggagggcggtggcagctccagcaagcgcttcctgcgctcttgctccgcctcctgcgttccccatggggccaaggacacggagtggaggtcagtcacgctgcctcgggacttgcagtccacgggaagacagtttgactcgtccacatttggagggcacaaaagtgagaagccggctctgcctcggaagagggcaggggagaacaggtctgaccaggtgacccgaggcacagtaacgcctccccccaggctggtgaa

SEQ ID NO: 78526 - DNA, 30 bp, Homo sapiens
  chr9:133760449-133760479
  hypo
gaggcagtcctgggcgcaaagacaaaagcc

SEQ ID NO: 78527 - DNA, 242 bp, Homo sapiens
  chr9:133761106-133761348
  hypo
tgcctgcagcacatgcgggctcgcccatacccgtgacagtggctgacaagggactagtgagtcagcaccttggcccaggagctctgcgccaggcagagctgagggccctgtggagtccagctctactacctacgtttgcaccgcctgccctcccgcaccttcctcctccccgctccgtctctgtcctcgaattttatctgtggagttcctgctccgtggactgcagtcggcatgccaggacc

SEQ ID NO: 78528 - DNA, 30 bp, Homo sapiens
  chr9:133761566-133761596
  hypo
acatgtttcaagaaccgcatttcgggaagg

SEQ ID NO: 78529 - DNA, 303 bp, Homo sapiens; identical to SEQ ID NO: 23602
  chr9:133767698-133768001
  hypo

SEQ ID NO: 78530 - DNA, 55 bp, Homo sapiens; identical to SEQ ID NO: 23603
  chr9:133773837-133773892
  hypo

SEQ ID NO: 78531 - DNA, 549 bp, Homo sapiens; identical to SEQ ID NO: 23604
  chr9:133779433-133779982
  hypo

SEQ ID NO: 78532 - DNA, 30 bp, Homo sapiens; identical to SEQ ID NO: 23605
  chr9:133787179-133787209
  hypo

SEQ ID NO: 78533 - DNA, 563 bp, Homo sapiens
  chr9:133799038-133799601
  hypo
ggtaggaagctgctcggaatgcccgggttcaggtacacagcctcacggtccccggtgcctgccctgccgcccgcccagcctgggacactcaccgtccagccgccgccgtccgtgcgcatgtcacagtacacctggaagccggccgggtagtgggtgggaaagacagagtagacgccatcgtcctgctgtccgcttaggaggacgtccagacagtctcggggccgggagcctgagggaggcaaggctgtcagggtggctgcggccccagcacgttcctgcccagccccctggccaaactgtctgtccatcgataatgcatgtggggtcccatggggttgagagagcactggccttggagtccgaccttggctctgccactccctgctgtggctgggtgagagaatcaccctctctgggacttactctcctcatctggagaatggaccgagagggcttcagcgcaggccacatggaagtagggtcgggccctggagtctcatggctggggaaccctcaccccaacttccccgctccccagagctgggacccgaggcaccggagga

SEQ ID NO: 78534 - DNA, 31 bp, Homo sapiens
  chr9:133800540-133800571
  hypo
agtttctggggctctccgatgtccatgacct

SEQ ID NO: 78535 - DNA, 31 bp, Homo sapiens
  chr9:133802285-133802316
  hypo
caaagtgcctattaacgcggagcccagcaca

SEQ ID NO: 78536 - DNA, 30 bp, Homo sapiens
  chr9:133900517-133900547
  hypo
gcggcagttctcccgcgcccgcaccccagg

SEQ ID NO: 78537 - DNA, 30 bp, Homo sapiens; identical to SEQ ID NO: 23606
  chr9:133911550-133911580
  hypo

SEQ ID NO: 78538 - DNA, 31 bp, Homo sapiens
  chr9:133914586-133914617
  hypo
gtgaccgctgtctgcccgggttccactcgct

SEQ ID NO: 78539 - DNA, 114 bp, Homo sapiens
  chr9:133926311-133926425
  hypo
ggggagcattgcgctcgtgctggtgattgattctggaggccgaatcggagtgcagccggggcatgtggccaccagctcccggggctccccgcttcaggccgcttctgcacaggt

SEQ ID NO: 78540 - DNA, 55 bp, Homo sapiens
  chr9:133951049-133951104
  hypo
gtcagtccttgaagtgcgtaacacagaaaggtggaaaaggcgtacctgtctttgt

SEQ ID NO: 78541 - DNA, 150 bp, Homo sapiens; identical to SEQ ID NO: 23607
  chr9:133967062-133967212
  hypo

SEQ ID NO: 78542 - DNA, 30 bp, Homo sapiens; identical to SEQ ID NO: 23608
  chr9:133979441-133979471
  hypo

SEQ ID NO: 78543 - DNA, 146 bp, Homo sapiens
  chr9:134126662-134126808
  hypo
gatgagtccaatgacagtgattgcggttaacacggatcaaaccttaggcactggctgcccacctcggtcaggctgcaaccaggaaggaggcagcccaccctccaagggacacgtggtccacatgagcagctcggccaggggccttt

SEQ ID NO: 78544 - DNA, 32 bp, Homo sapiens; identical to SEQ ID NO: 23610
  chr9:134132751-134132783
  hypo

SEQ ID NO: 78545 - DNA, 30 bp, Homo sapiens
  chr9:134135919-134135949
  hypo
ctgttacaagtgagcgactgaaactgagaa

SEQ ID NO: 78546 - DNA, 74 bp, Homo sapiens
  chr9:134136198-134136272
  hypo
gtcctggctgtcaccggtgcttgggcgggatcaccaccagcggctgcccgtacttgggccgccacatgaggacc

SEQ ID NO: 78547 - DNA, 623 bp, Homo sapiens; identical to SEQ ID NO: 46672
  chr9:134151923-134152546
  hypo

SEQ ID NO: 78548 - DNA, 30 bp, Homo sapiens; identical to SEQ ID NO: 23612
  chr9:134157081-134157111
  hypo

SEQ ID NO: 78549 - DNA, 30 bp, Homo sapiens; identical to SEQ ID NO: 23613
  chr9:134183530-134183560
  hypo

SEQ ID NO: 78550 - DNA, 30 bp, Homo sapiens
  chr9:134184489-134184519
  hypo
cacacgccacagcccgaggaaagtgctggc

SEQ ID NO: 78551 - DNA, 31 bp, Homo sapiens; identical to SEQ ID NO: 23614
  chr9:134188221-134188252
  hypo

SEQ ID NO: 78552 - DNA, 31 bp, Homo sapiens
  chr9:134190317-134190348
  hypo
attacaggcatgagcccgctccaggctgggg

SEQ ID NO: 78553 - DNA, 31 bp, Homo sapiens
  chr9:134195947-134195978
  hypo
ggaacagggtgaatttcgttaagcaatcatc

SEQ ID NO: 78554 - DNA, 92 bp, Homo sapiens
  chr9:134207873-134207965
  hypo
gatatcagccaggcccagattcgaggcatagctccattacttagtggctttgacttaccgtgtaagactccatttcctcatctgtaaaatga

SEQ ID NO: 78555 - DNA, 31 bp, Homo sapiens; identical to SEQ ID NO: 23615
  chr9:134225985-134226016
  hypo

SEQ ID NO: 78556 - DNA, 33 bp, Homo sapiens
  chr9:134279021-134279054
  hypo
gtgagccactgcgcctggcccatactttaaaaa

SEQ ID NO: 78557 - DNA, 30 bp, Homo sapiens; identical to SEQ ID NO: 23616
  chr9:134305365-134305395
  hypo

SEQ ID NO: 78558 - DNA, 56 bp, Homo sapiens; identical to SEQ ID NO: 46675
  chr9:134307437-134307493
  hypo

SEQ ID NO: 78559 - DNA, 30 bp, Homo sapiens
  chr9:134350446-134350476
  hypo
ggagcagagccccacggcagaaaaggatga

SEQ ID NO: 78560 - DNA, 121 bp, Homo sapiens
  chr9:134377409-134377530
  hypo
ggcgtgagccaccgcccccggccctaggtccgttttaaatgcccttaccctcagccacttcaccgctagatgtatgtgcaagcaggatcgtggcatcgatgtttttcggcaaggaaactag

SEQ ID NO: 78561 - DNA, 131 bp, Homo sapiens
  chr9:134400344-134400475
  hypo
gtgggtgtgggtgggcgtccccaggctcagtccctgaacacacatgccgggcgggagacctgccctgaggctcggcagcccctcagtggggtctgctgctggactccaaatgtgaccgtttgccagaggtc

SEQ ID NO: 78562 - DNA, 54 bp, Homo sapiens; identical to SEQ ID NO: 23618
  chr9:134406194-134406248
  hypo

SEQ ID NO: 78563 - DNA, 39 bp, Homo sapiens; identical to SEQ ID NO: 23619
  chr9:134688852-134688891
  hypo

SEQ ID NO: 78564 - DNA, 30 bp, Homo sapiens
  chr9:134716728-134716758
  hypo
ctgcaaaacaatcccggggcattgcggtga

SEQ ID NO: 78565 - DNA, 371 bp, Homo sapiens
  chr9:134731511-134731882
  hypo
accacctttcatagacctcctcgctccattctgtcagttcctactgggcacccgggggattcaccgtaacccggccagcagacagtgtggggtaatggcgtcccggcctctggtggccacgggaagcattggcaagacggggtaacccggccagcagacagcgtggggtaacggcgtcccggcctctggtggccatgggaagcattgacaagacagaggggtcaagttctggctgagggttctggcttaggccacgttcgatgcggcacactcgggcacggcagggccagtcccttgctgctgaggagccccagagctcggccgtggccagcctggcagccagcccctccgtgtgctgctgtgtgaacccc

SEQ ID NO: 78566 - DNA, 187 bp, Homo sapiens
  chr9:134746466-134746653
  hypo
gtgtgcatcccactgtgtgcccgggattcagtgtgcatcctactgtgagccctggatccaggtgtgcgtcctgctgtacgccccggattcggtgctcaccctaccatacaccccacattcggtatgcagcacccacacgctttttcctactcaggccctctcctgcggtgggggcaaagataacagg

SEQ ID NO: 78567 - DNA, 118 bp, Homo sapiens; identical to SEQ ID NO: 23621
  chr9:134775010-134775128
  hypo

SEQ ID NO: 78568 - DNA, 254 bp, Homo sapiens
  chr9:134818811-134819065
  hypo
tgctgcctcccgagacggtgagcacggctagcgtctgcagcgggctctgcagtgcggcgccccactttgagagcagggctaaggacaggtaggaacagtgtgctcccctcctacacttccaccatatgttacactctgttctgtggcagaatcaaattactttaatttttacctttggaatataggcaaacaagcagtaacacagcagtggtgactagtttacacttgagcagacgcggcgcggaaagacatta

SEQ ID NO: 78569 - DNA, 250 bp, Homo sapiens
  chr9:134836479-134836729
  hypo
ctctgctgatctaaatgggtacgaaaacaaggaggctgagctcttgcttatcaacatttttaaccctccaaagtaagtgagggttttgcccactgggcaacagtcttgacactgaaacccatcacatgcccgtaaaaatggcccgcacgtggcatatgtcgcagcaggcaagaaggcaacacaatggctgcttgtttcagagacagaagcttgaagctgtctgggcggcggctctgggtaatcacatccc

SEQ ID NO: 78570 - DNA, 139 bp, Homo sapiens
  chr9:134902644-134902783
  hypo
tgagaaagaagagaacgcaggagccgtgtccacaaccaggcctcttagagaccagaatgcagcccaccgcagcccaactgctccagcagcttccggccatttgccctactcagcttctgggattcggattcttctgggc

SEQ ID NO: 78571 - DNA, 197 bp, Homo sapiens
  chr9:134903266-134903463
  hypo
agctgtgaacctgtgccaggccgtggagggtgagtgtactgggcacagcacccatgctggctgggacctcatcaactgctggcagtcaccggcctaggtgcccatctctgatctgagcaaccacagccatagtagagtcacagggcacacacacagccggacaacctacgtgctccggccccagctcctccttccac

SEQ ID NO: 78572 - DNA, 98 bp, Homo sapiens
  chr9:134929559-134929657
  hypo
gaggtgtttgggtgagcggggcggatccctcatggcttggtgctgtcctggccatattgacgtctcctttaaaagtgtgcggcaccgccccgctcctc

SEQ ID NO: 78573 - DNA, 31 bp, Homo sapiens
  chr9:135021247-135021278
  hypo
atgggatgtgctgtcacgcccattttagaga

SEQ ID NO: 78574 - DNA, 595 bp, Homo sapiens; identical to SEQ ID NO: 7095
  chr9:135036692-135037287
  hypo

SEQ ID NO: 78575 - DNA, 199 bp, Homo sapiens; identical to SEQ ID NO: 46681
  chr9:135037333-135037532
  hypo

SEQ ID NO: 78576 - DNA, 880 bp, Homo sapiens; identical to SEQ ID NO: 23627
  chr9:135048987-135049867
  hypo

SEQ ID NO: 78577 - DNA, 31 bp, Homo sapiens; identical to SEQ ID NO: 23628
  chr9:135130344-135130375
  hypo

SEQ ID NO: 78578 - DNA, 41 bp, Homo sapiens; identical to SEQ ID NO: 23629
  chr9:135196056-135196097
  hypo

SEQ ID NO: 78579 - DNA, 79 bp, Homo sapiens; identical to SEQ ID NO: 23630
  chr9:135196473-135196552
  hypo

SEQ ID NO: 78580 - DNA, 30 bp, Homo sapiens
  chr9:135251394-135251424
  hypo
ctctccttcactatcgtcttcataataaaa

SEQ ID NO: 78581 - DNA, 30 bp, Homo sapiens; identical to SEQ ID NO: 23631
  chr9:135266721-135266751
  hypo

SEQ ID NO: 78582 - DNA, 345 bp, Homo sapiens; identical to SEQ ID NO: 23632
  chr9:135267103-135267448
  hypo

SEQ ID NO: 78583 - DNA, 247 bp, Homo sapiens; identical to SEQ ID NO: 23633
  chr9:135275313-135275560
  hypo

SEQ ID NO: 78584 - DNA, 13 bp, Homo sapiens
  chr9:135285851-135285864
  hypo
aggtgagcacccc

SEQ ID NO: 78585 - DNA, 1 bp, Homo sapiens
  chr9:135285880-135285881
  hypo
c

SEQ ID NO: 78586 - DNA, 770 bp, Homo sapiens; identical to SEQ ID NO: 7099
  chr9:135286198-135286968
  hypo

SEQ ID NO: 78587 - DNA, 43 bp, Homo sapiens
  chr9:135331705-135331748
  hypo
ccagcctcatgtgccttgtcacgtgcctgtgcctgttcccatt

SEQ ID NO: 78588 - DNA, 210 bp, Homo sapiens
  chr9:135338501-135338711
  hypo
ctgggcgggctgggaacggatggaaggtggccactctcaggtgctgtggatgacgtcgcaagtcagccaatctttgcgaaaggcacttttcagcaccaatgacattttaaaatgtgagtaccctttggcccagaaactccccagttaagatttaagctccagaattatgtgcacatatatacaaacatgttcttgcggtgtggttttaga

SEQ ID NO: 78589 - DNA, 235 bp, Homo sapiens; identical to SEQ ID NO: 23635
  chr9:135384262-135384497
  hypo

SEQ ID NO: 78590 - DNA, 162 bp, Homo sapiens; identical to SEQ ID NO: 46688
  chr9:135395348-135395510
  hypo

SEQ ID NO: 78591 - DNA, 35 bp, Homo sapiens
  chr9:135447835-135447870
  hypo
accgggaagagtgtgccgtgcgccaggggaccctg

SEQ ID NO: 78592 - DNA, 238 bp, Homo sapiens; identical to SEQ ID NO: 7101
  chr9:135462647-135462885
  hypo

SEQ ID NO: 78593 - DNA, 84 bp, Homo sapiens
  chr9:135479249-135479333
  hypo
gtcactgtgaaatcctctaatcgcctcattagcagggtggggaggagggtgcgtttgttccacgaggaagcagaaagctggtaa

SEQ ID NO: 78594 - DNA, 30 bp, Homo sapiens
  chr9:135507046-135507076
  hypo
gcaggtcaacgtacacggacacggctctcg

SEQ ID NO: 78595 - DNA, 695 bp, Homo sapiens
  chr9:135512979-135513674
  hypo
caaaagtcattactgccgtgtgtggaaagccatcagcagggtccaggcccccgttgtccgggtgacagattgggctgcgtaatcagaggaggaaggagagagtgcagaagctgtcagaggcgagagatcttggctggagccgccaaaaaactggcaacatgagttagcgtaactgagtaaacagcaaacaatctccaaatgatctttccattaacgaaacaaaataaaacgaaaaagatacactttacctaaaaagcataccccagagaaaagcacgaaagtctacatttatttgggacacagaactgacattgtgactcttcacagccgtatctcctttgtctcctagcctcctggcacggtggaaattccccaggaggagaggaaattaagaactgcacagacagaacagtatgcttcaagcggaaaaaaatacggagaaggtggaggaaagcagcacaggtgatttaggtgcatcttctgaaaaagaaatgcacgcgccggacagccaaggaggatgccaagggacagttggcgcccagggcgggctgcaggtatctttcctttctgggaaaaaggtgactgcactccatccagggacaatcaaggacagccaccggagaccaacagaaaacctaatgtcagccttaaaatcaggtggcttagaaactccattttccggccattcggtggta

SEQ ID NO: 78596 - DNA, 30 bp, Homo sapiens
  chr9:135521292-135521322
  hypo
tgccgccatgcagccgtaggaattttaatc

SEQ ID NO: 78597 - DNA, 113 bp, Homo sapiens
  chr9:135537994-135538107
  hypo
tggctgggagaaatgaagtttcgttcctccgtttcgctgggggagcctcactggacgcttggtattttcttttcgtagcctttgcttgctgcgttgttcccagaaggaaagat

SEQ ID NO: 78598 - DNA, 30 bp, Homo sapiens
  chr9:135538552-135538582
  hypo
gggcgagggggaatgcgcatctcagcccgt

SEQ ID NO: 78599 - DNA, 147 bp, Homo sapiens
  chr9:135548173-135548320
  hypo
tataaaagggggataatgaagcgttgtttaggttttttggaagattaaacacacataatcacttggcccagttcttggcacgctgtaaatgctcaaggtgaaaatataatgagttgggccgggcgcggtggctcacgcctgtaatcc

SEQ ID NO: 78600 - DNA, 26 bp, Homo sapiens
  chr9:135548559-135548585
  hypo
actccgtctcaaaaaaaaagaaagaa

SEQ ID NO: 78601 - DNA, 79 bp, Homo sapiens
  chr9:135588872-135588951
  hypo
aaagtggatacaactgaaatgcattcagctgatgaatgagtaaacaaaacggcgcattttcatacgatggggtattact

SEQ ID NO: 78602 - DNA, 36 bp, Homo sapiens
  chr9:135600715-135600751
  hypo
tcccacagccaccctgcgaggcggctacggttttta

SEQ ID NO: 78603 - DNA, 23 bp, Homo sapiens
  chr9:135613457-135613480
  hypo
tgagacagagtctcactctgtcg

SEQ ID NO: 78604 - DNA, 403 bp, Homo sapiens
  chr9:135624733-135625136
  hypo
gggttcaggtgctggacgctctggcctgccataaccactgggcactaccgcctccctggatgctcttgtgcgaggcccctcgtaaggtgtgctggctcttcaggtgccccgtgcccggcactctgtgaggatgcacaggatacctctcactgcgtcttcatggcaagcccgggacgtaggtgtaactgtcacccccatcttatggatgaggcagcttgccccgatatcggctggtgagtgacccagaagaactcgcgactcacagctgctggactctaacatccagggtgggagccactgggctgtgttgctgtttcccaaatgcaggaagtctcttaagtgcttcatttactctgttttttttttttcttgagacagatttgttcatcgataatttttattt

SEQ ID NO: 78605 - DNA, 204 bp, Homo sapiens
  chr9:135626042-135626246
  hypo
ttcaaaggactccatccggtgaatcccaccagggcgcgagctcccccatgagagcaacttcagagagaagctcccttaggctccctcccctcccaaatctgcacctaacgtcaggctgcatccagagataccaatggaaattaggtacaaattgtaccctggacttgactttgcaatcggaagaaacctcgatttgtgggggta

SEQ ID NO: 78606 - DNA, 218 bp, Homo sapiens
  chr9:135632552-135632770
  hypo
atttcaatccagaagctgccacggggacctggtgattcccaccgttagcgggagagaagcttccacagctcaccgggatggtcagagggttccggagcaggacaaggctaggatgggctccccccgtcaccctcactgcaccaacgaggccgtgtccaacccgctggcctctggggaaggagggcccgccatctcacggcaggtgaagaagacaagga

SEQ ID NO: 78607 - DNA, 31 bp, Homo sapiens
  chr9:135653270-135653301
  hypo
tttcacccttgtccaccgacactgtggaaac

SEQ ID NO: 78608 - DNA, 31 bp, Homo sapiens; identical to SEQ ID NO: 23643
  chr9:135654706-135654737
  hypo

SEQ ID NO: 78609 - DNA, 31 bp, Homo sapiens
  chr9:135713051-135713082
  hypo
tccacatggagtgctacggctctgtatgcag

SEQ ID NO: 78610 - DNA, 66 bp, Homo sapiens
  chr9:135735332-135735398
  hypo
tccctttcacggtgttcggcgagaggactggggccattttgacattcatttcgatggctctgacca

SEQ ID NO: 78611 - DNA, 31 bp, Homo sapiens
  chr9:135744759-135744790
  hypo
catgtgggcatggtgccgccatcaaccatgc

SEQ ID NO: 78612 - DNA, 142 bp, Homo sapiens; identical to SEQ ID NO: 23645
  chr9:135745916-135746058
  hypo

SEQ ID NO: 78613 - DNA, 31 bp, Homo sapiens; identical to SEQ ID NO: 23646
  chr9:135746338-135746369
  hypo

SEQ ID NO: 78614 - DNA, 197 bp, Homo sapiens
  chr9:135767902-135768099
  hypo
gaacaactctccaagagtatccgcaggaggtgggcggcaccccatctcaccaaggtcctggccgggtcttcgctctgcccaaaccctcctccagcctgtgcaggcctcctcccacctcttagtgctttcagcgagaaaaggtgagtctcattacgcagaacttttgtttgctcttcggttctttccttcttcaagtg

SEQ ID NO: 78615 - DNA, 30 bp, Homo sapiens
  chr9:135776245-135776275
  hypo
agtgaaaaatccgacgacataaaactagca

SEQ ID NO: 78616 - DNA, 23 bp, Homo sapiens
  chr9:135823463-135823486
  hypo
acggagtccttctcaggccatat

SEQ ID NO: 78617 - DNA, 31 bp, Homo sapiens
  chr9:135862918-135862949
  hypo
gtcactggatgcagcccgggctctgtggctt

SEQ ID NO: 78618 - DNA, 30 bp, Homo sapiens; identical to SEQ ID NO: 23648
  chr9:135865248-135865278
  hypo

SEQ ID NO: 78619 - DNA, 61 bp, Homo sapiens
  chr9:135898910-135898971
  hypo
gcccactgcagggaaacggttaaaatgcgctgggcttcgtttttcccggaagccctcatta

SEQ ID NO: 78620 - DNA, 51 bp, Homo sapiens; identical to SEQ ID NO: 7104
  chr9:135906505-135906556
  hypo

SEQ ID NO: 78621 - DNA, 183 bp, Homo sapiens
  chr9:135908049-135908232
  hypo
tagtgagagctgtctccgtaagtctttgtattaaccctcaggcacagggtatgatacaacatcctacgagaataaacacgtttattacaatggcaagggacataaggatcgaggacataagtcctttccacctgccgaacaatcttcccgttagatcagtgaagagatcgtttatcccagaat

SEQ ID NO: 78622 - DNA, 143 bp, Homo sapiens
  chr9:135908535-135908678
  hypo
acatagactcaaatcccgcagctatttgattacaagccttaaattcatcaggtacccctcggggaactccagtggcatctgtataaacacgagggtcaaaggaaccacggggggcatctcttactctacggtgtcttgttttt

SEQ ID NO: 78623 - DNA, 31 bp, Homo sapiens; identical to SEQ ID NO: 23652
  chr9:135927292-135927323
  hypo

SEQ ID NO: 78624 - DNA, 30 bp, Homo sapiens
  chr9:135929732-135929762
  hypo
ccagtgttgtgtgccgacgggccctgtgcc

SEQ ID NO: 78625 - DNA, 30 bp, Homo sapiens; identical to SEQ ID NO: 23653
  chr9:135943292-135943322
  hypo

SEQ ID NO: 78626 - DNA, 238 bp, Homo sapiens
  chr9:135945846-135946084
  hypo
ggagtgccaagacctacgcctacctgttttcccatccctctcggatgcccgtctaccccaaatgggtgggggccgaccatgcagatgacattcagtacgttttcgggaagcccttcgccacccccacgggctaccggccccaagacaggacagtctctaaggccatgatcgcctactggaccaactttgccaaaacagggtaagacgtgggttgagtgcagggcggagggccacagcc

SEQ ID NO: 78627 - DNA, 54 bp, Homo sapiens; identical to SEQ ID NO: 23655
  chr9:135962403-135962457
  hypo

SEQ ID NO: 78628 - DNA, 31 bp, Homo sapiens; identical to SEQ ID NO: 23656
  chr9:135978311-135978342
  hypo

SEQ ID NO: 78629 - DNA, 122 bp, Homo sapiens
  chr9:135979101-135979223
  hypo
ggccctactccagccccgcccggcacactcacatacagatagtccttcatggcagtgtccagcatcaccaggtcggtgaggaacgtgcccaggtagggaacggtgccctggatgatgccctg

SEQ ID NO: 78630 - DNA, 22 bp, Homo sapiens
  chr9:136000829-136000851
  hypo
aagaaaaatggccagacgcagt

SEQ ID NO: 78631 - DNA, 31 bp, Homo sapiens; identical to SEQ ID NO: 23657
  chr9:136045257-136045288
  hypo

SEQ ID NO: 78632 - DNA, 30 bp, Homo sapiens; identical to SEQ ID NO: 46699
  chr9:136137090-136137120
  hypo

SEQ ID NO: 78633 - DNA, 30 bp, Homo sapiens; identical to SEQ ID NO: 46700
  chr9:136149213-136149243
  hypo

SEQ ID NO: 78634 - DNA, 151 bp, Homo sapiens
  chr9:136369630-136369781
  hypo
aggactacacggggccgtcatggaagctgaccacatgctgggccatagagagagacagccgctgtgaaggcttgccgtctcagagactgtgttttctgaccgacctcagtaccagttagaacaataatgatgatggcgataaaatagtttg

SEQ ID NO: 78635 - DNA, 423 bp, Homo sapiens; identical to SEQ ID NO: 23658
  chr9:136372632-136373055
  hypo

SEQ ID NO: 78636 - DNA, 39 bp, Homo sapiens
  chr9:136375606-136375645
  hypo
cctggccggacccatgtgactattcgaacttaaattatt

SEQ ID NO: 78637 - DNA, 30 bp, Homo sapiens
  chr9:136375901-136375931
  hypo
attccagggacacgacgccctcggggctgg

SEQ ID NO: 78638 - DNA, 1138 bp, Homo sapiens
  chr9:136376181-136377319
  hypo
tcccgagctgtctgacgtccctggccctcggagtccttattggcaaagtgggctcaggactgtgtcctggggcccccgaggggtcgcctgtgaaggggaggggcctgcccctgtcgggagggtcgaggctgggcctggagcccgggatcctgcagtggtgggcagggactgagggctggagcgcgcctcctaattgtccgtgacttacagacttggccaggctctgggcggccttcgtaaatcgctgcagtgaggagcctgccagtgtggcccttcgcgcttggcagggccctcgtcgccgccctgctcggagtggcctgccgcctccaactttccatgtgctgctgctgcgaagcgggaaaggggggtgctggctgcttgctgtggtggggagggaggtggggcggccaccgtgcaggtgcctgcttctgcagggatgtccagggctctccagctacggggtccccagagcctgtcccctacaaagcctggtgtgaggcttatgtggtctccacacggggccagaggggaagacgctgattcaaggacaccccgtcttttcacagtgcatgtagcgtgtgtgggtgtgtggtgtatgaagtgtgtacatgtgtgcacgtgcgtgtgtgtatgtgtggtgtgtatgtgtagtttatggagggtgtatgtgtgtgcacatgcgtgtgtgtatgtgtggtgtatggagtgtgtatatatgtgcacgtgtgtatgtgtggtgtatggcatgtgtacatgtgtgcacgtgtatgtgtggtgtgtgtgtggtgtatggagtgtgcatatgtgtgcacatatgtgtgtgtatgtgtggtgtatggagtgtgtacatttgtgcacgtgtgtgtggtgtgtgtggtgtatggagtgtgtatatgtgtgcacatgtgtatgtgtggtctatggagcgtgtacgtgtgtgcatgtgcatgtgtgtatgtgtggtgtgtggtgtatggagtgtgtatatatgtgcacgtgtgtgtatgtgatgtatggagtgtgtacatgcatgcatgtgcatgtatgtgtggtgtatggagtgtgtatatgtgtgcacgtgcatgtgtgtatgtgtggtgtatggagtgtttatatgtgtgcacgtgcatgtgtgtat

SEQ ID NO: 78639 - DNA, 314 bp, Homo sapiens
  chr9:136377538-136377852
  hypo
gcgtacatgtgtgcacgtgcatgtgtggtgtgtgtatgtatggagtgcatacatgggtgcacttgcgtgtatgtgtagtgtgtgtggtgtatgcagtgtgcacatgtgtgtacgtgtggtgtgtggagtgcgtgcatgtgtgcacatgcgtgtatgtgtggtgtatggagtgcgtacatgtgtgcacatgtgtgtatgtgtggtgtgtggtgtatggagtgtgtacatgtgtgcacgtgcatgtgtgtatgtgtggtgtgtgtgcaggcatgtgtgcacctcctcaggtggactggaagcgtacagaggcagtg

SEQ ID NO: 78640 - DNA, 350 bp, Homo sapiens; identical to SEQ ID NO: 23660
  chr9:136380582-136380932
  hypo

SEQ ID NO: 78641 - DNA, 120 bp, Homo sapiens; identical to SEQ ID NO: 23661
  chr9:136381249-136381369
  hypo

SEQ ID NO: 78642 - DNA, 30 bp, Homo sapiens; identical to SEQ ID NO: 23662
  chr9:136382255-136382285
  hypo

SEQ ID NO: 78643 - DNA, 203 bp, Homo sapiens; identical to SEQ ID NO: 23663
  chr9:136382776-136382979
  hypo

SEQ ID NO: 78644 - DNA, 261 bp, Homo sapiens; identical to SEQ ID NO: 23664
  chr9:136383896-136384157
  hypo

SEQ ID NO: 78645 - DNA, 583 bp, Homo sapiens
  chr9:136385190-136385773
  hypo
agtggggatagagggctgcagcgggactggtttgaggctgggtgtgcggacactggggagccggtccttgtccgcaaggcttgtctgcaggggttgaccactcacccatcagcgagacccacatgctcagggctgtcccgtagacactgaaatactccaggatgtcgtgacgcatgaagcacagcacagacaagccgggtccattgcaggcatggtggagctgccagaaaacccacaggtggtcacagcacaaagaggccagagctggtccccgagccacggcccccagagtgccaggtcacttgctggctgtgagaagtcactttggcgagtcacttaatgactgtgtgcctcagtctccccgtctgaaaaatgggggtactgccgagcactcccgcagagggtcctgtggggattaagtggcacatgccagcgaggtgtttaggggctggggtgtgccaagggttcactcaatgtcacctcagcagaattcgctcatctgcactggcaggactgggcggagactgagtggtcactcaggtgaagcccgcttaggtggggcggtctccgggagggaccctac

SEQ ID NO: 78646 - DNA, 30 bp, Homo sapiens
  chr9:136389876-136389906
  hypo
gaaccgcctcttggccgcgatgctgacagt

SEQ ID NO: 78647 - DNA, 30 bp, Homo sapiens
  chr9:136390125-136390155
  hypo
ggggatgtgcgtgcacgtgtcgagtaacac

SEQ ID NO: 78648 - DNA, 74 bp, Homo sapiens
  chr9:136395957-136396031
  hypo
ccagctggagagagacggagtcaggatttgaacccaaagagtccggttccaggcactcacgcgtgaggctgctg

SEQ ID NO: 78649 - DNA, 335 bp, Homo sapiens; identical to SEQ ID NO: 23667
  chr9:136397021-136397356
  hypo

SEQ ID NO: 78650 - DNA, 212 bp, Homo sapiens; identical to SEQ ID NO: 23668
  chr9:136402543-136402755
  hypo

SEQ ID NO: 78651 - DNA, 30 bp, Homo sapiens; identical to SEQ ID NO: 23669
  chr9:136407493-136407523
  hypo

SEQ ID NO: 78652 - DNA, 30 bp, Homo sapiens
  chr9:136409649-136409679
  hypo
gaagaagtccgctgacgtgctaggtgggta

SEQ ID NO: 78653 - DNA, 30 bp, Homo sapiens
  chr9:136410355-136410385
  hypo
gagctgctctgtgctcggcccttcccttta

SEQ ID NO: 78654 - DNA, 30 bp, Homo sapiens
  chr9:136463740-136463770
  hypo
gagggagagagggaccgctttcccaggact

SEQ ID NO: 78655 - DNA, 30 bp, Homo sapiens
  chr9:136464286-136464316
  hypo
cacctgcacagagttcgcctctgcctcctg

SEQ ID NO: 78656 - DNA, 42 bp, Homo sapiens; identical to SEQ ID NO: 23670
  chr9:136501757-136501799
  hypo

SEQ ID NO: 78657 - DNA, 496 bp, Homo sapiens
  chr9:136537809-136538305
  hypo
tctgcccttcaggactcagctcggccgtgagcacaaccatgttctgggtgaggaaggggccggaaagcaagacccctgcctgggacgccagaccaggctagcaggcagaccaggagattgccgtcgcagacgggccttccaggtgaggtgcaaaggcccagcgttgggcagcggacatggtgggaggcaggagagaaaggcctgtggggctgtggatacctgactgtgaaagacacgatggctcaagccctgcagaagtgacagtgccgattatcgggtgctctgggctaagcttcatctcgtccctccacggcccttgcaacggtgggaacacggtcagtaatgtctgtgggctgaggcggacacagaggctcccagaggcactgagcagggcctaggcacaccctgctccgctgaggacagctggtgtctttgggagggtgtgtcccgcacgcctgcacaacaggctagcactcggctgcgtggaggccacaga

SEQ ID NO: 78658 - DNA, 240 bp, Homo sapiens
  chr9:136557920-136558160
  hypo
tccatgaggcacgagcgctgtggctcagcccatggctccctcagcctccacgtcgccaacggcaggagggaaggggtgggcgagctctgcgcaccccataggacccctcactcacgctctcagcctcatctccgccaccagcctccagaccgcagggctcacctcactactccctgcttttggcagaaccgcagaggcccaggagcccctgccagcccccagccccgaagacccgctggg

SEQ ID NO: 78659 - DNA, 30 bp, Homo sapiens
  chr9:136558393-136558423
  hypo
ctgctgccgaaggtgcgggttatgagctga

SEQ ID NO: 78660 - DNA, 31 bp, Homo sapiens; identical to SEQ ID NO: 23671
  chr9:136568774-136568805
  hypo

SEQ ID NO: 78661 - DNA, 30 bp, Homo sapiens
  chr9:136573503-136573533
  hypo
gctctcggatccagcgggggtggtccgtga

SEQ ID NO: 78662 - DNA, 43 bp, Homo sapiens
  chr9:136575548-136575591
  hypo
gagcccagacaggccccgcacccagggacggctcaggctgcct

SEQ ID NO: 78663 - DNA, 75 bp, Homo sapiens
  chr9:136641168-136641243
  hypo
cgatctcccgggatggcggccggctgatgggcggctggtggcagagcacaagagtgttaacggccccccagggcc

SEQ ID NO: 78664 - DNA, 31 bp, Homo sapiens
  chr9:136642035-136642066
  hypo
cacagagccgagaattcgctccatatccctc

SEQ ID NO: 78665 - DNA, 197 bp, Homo sapiens
  chr9:136645035-136645232
  hypo
tcacctggtcccgctccggaggcgtcctgtgaggacaaggacagaacacagagatgagggaaggctgctctttgactgtggcccatgcatcaacgcaccccgccctccctgtccccactagttcctagatagaggggtcaaggcaggagcaggggaggagagggacactgttccctatgggacgcccccaccctggc

SEQ ID NO: 78666 - DNA, 31 bp, Homo sapiens
  chr9:136646294-136646325
  hypo
tgaggaggcattggtacgcatgctacctgct

SEQ ID NO: 78667 - DNA, 173 bp, Homo sapiens; identical to SEQ ID NO: 23673
  chr9:136648155-136648328
  hypo

SEQ ID NO: 78668 - DNA, 144 bp, Homo sapiens
  chr9:136651135-136651279
  hypo
ctgtgtgaacacatgttctcacgtgtgtacctgctctcttgcccatgctgtacgtgcacacgtgcctctgtatgcatgcatgtatagctgtgtgcccataccctcacgtgagaatacatatgcgcttgtgccttcacctctgca

SEQ ID NO: 78669 - DNA, 289 bp, Homo sapiens; identical to SEQ ID NO: 23675
  chr9:136655638-136655927
  hypo

SEQ ID NO: 78670 - DNA, 31 bp, Homo sapiens; identical to SEQ ID NO: 23676
  chr9:136656439-136656470
  hypo

SEQ ID NO: 78671 - DNA, 164 bp, Homo sapiens; identical to SEQ ID NO: 23677
  chr9:136664523-136664687
  hypo

SEQ ID NO: 78672 - DNA, 34 bp, Homo sapiens
  chr9:136669112-136669146
  hypo
ctgggctctccagcaacgccgcagctccccccgg

SEQ ID NO: 78673 - DNA, 280 bp, Homo sapiens
  chr9:136671964-136672244
  hypo
tgctctgctaaccacgtctaggtgactctttgcatggggaactgcctttctatgactgagttcagacacccgcagggcaggcgagggggtccgctcaaaggggtggagggacacgtttctctctggccgctgacaaaaacttcatttacattctcagcgtcatccgtgcctccagccacgcacgtcagtgctgccctcacccgcagacaagcggagcccagaaacctgctaccctggctcctaaatccaaagaccctggagagagcggtgggggctcctc

SEQ ID NO: 78674 - DNA, 31 bp, Homo sapiens
  chr9:136672779-136672810
  hypo
aggcagggccatcacccgtggggactctctg

SEQ ID NO: 78675 - DNA, 31 bp, Homo sapiens; identical to SEQ ID NO: 23679
  chr9:136674468-136674499
  hypo

SEQ ID NO: 78676 - DNA, 31 bp, Homo sapiens; identical to SEQ ID NO: 23680
  chr9:136675284-136675315
  hypo

SEQ ID NO: 78677 - DNA, 31 bp, Homo sapiens
  chr9:136676240-136676271
  hypo
aagggccaccatccctcgggggagacccccc

SEQ ID NO: 78678 - DNA, 301 bp, Homo sapiens
  chr9:136677204-136677505
  hypo
ggaagggagggaggagcggggcagggctcaccatgggctgctgcacctccaccttgatgatgtcctcgtagatgtcgtcccctccatcctcacacgggacgcagtcgtagatgtcctcccccaggtcatgctcgctgcacaggaggaggcgggttagaggggaggggaggctcccgccaccctgaccggggagccgcagagcacgagggtccacgagggacgcaggcggctggggccacagcgaggtcacctgcccgggcctcagtctacaaagtggggtgggccccgcctgcagggcgtc

SEQ ID NO: 78679 - DNA, 963 bp, Homo sapiens
  chr9:136680292-136681255
  hypo
ggaaggcagagtcccccgcccgcctccctcttccctggccccatcttgaagacagaactgtcacgcccggatctaggtacaagtccacgtctgtgtagcacccgctgcgtctgaagcttggtgagaaatgccaagcatagggttctcataatatttttgctaagctttttaaggatcaaaatacgcccttagtggtacctttctgacaagtggctacacctgtgtcactcatgccctcccacaccatagagtattttcatctcaccggagctcctgcccttccccatcagtctccttcccgccccgagcaaccacccttctgactgttcttcaccacagacgagccttgtctgtagaatgtcaacggtgttgtgcgttagatttgtttttgtgcctggcttcttcccctcaacattggatcttgtttgagacacatccattctgacttgcccacatttgcagctcattcctgtttactgctgagtactaatccacggcatgaacaacaacgtgctacccatcttccttctttatggacatttgggttgcctccaagttgttgcttattgtgaataaaagctgctatatgagcattcaagttgtgtgtgtgcgtgtgtatgcacgcacgcctgtgtggtgggtggggggttacacaggctttcttttcctttggaaacaaaattccactaggactggaactcctggtcaaaggggaggtctagactcaacctcataagcagctgacaaatgcttttctaaagtgggtgcattctacacccccagccagcagcgctcaccagccccagctgcgccacatcctcatcagcttctgctgttgccggtctttttccattcagcccccagagtgcgtgtggagtgaaacagaactgtggttctatttggcactttcctgatggctaacgctgctgaggggtctcctgcgtccttactgtataccttcct

SEQ ID NO: 78680 - DNA, 120 bp, Homo sapiens; identical to SEQ ID NO: 23683
  chr9:136686386-136686506
  hypo

SEQ ID NO: 78681 - DNA, 116 bp, Homo sapiens; identical to SEQ ID NO: 23684
  chr9:136691770-136691886
  hypo

SEQ ID NO: 78682 - DNA, 76 bp, Homo sapiens
  chr9:136694903-136694979
  hypo
atgcccagcctataaaatacattcttatgattaatttcgtttgtcccttcttattttttgacgtggctccgctgta

SEQ ID NO: 78683 - DNA, 31 bp, Homo sapiens; identical to SEQ ID NO: 23686
  chr9:136696894-136696925
  hypo

SEQ ID NO: 78684 - DNA, 120 bp, Homo sapiens
  chr9:136698780-136698900
  hypo
tggtcacagattcccacggtcccgatggggccctggtgctgtggccaggcttgggcagcgcctgggtggagcagaggcctctcagagagaggaatgaggtggacacggagaagagcagag

SEQ ID NO: 78685 - DNA, 175 bp, Homo sapiens
  chr9:136699683-136699858
  hypo
ggcaaggaatgtgtcacgcccactccgggctccgggtgtccagtgggaagacgagaggcccaggtcagggctgcagaaagcgttcatctgctgggcgacctgccttcccctttacccaccctcccacttccagggggttcacagtggagatgaggctcctcgcacacctcctggt

SEQ ID NO: 78686 - DNA, 309 bp, Homo sapiens
  chr9:136714184-136714493
  hypo
acagttgctgaagaggcggccttggtttgttttgcttgttacagagtaaaaccatcttcgctccctaaagggaaggacaggagttggaaagggcttcacctcatgccaatgagcaggcacgggacattcctcccgccccgaacgcaccatgctattatacttgggacagggcactgggaaggaggaggccactgaccccgaaggctcacccctcatccctgctacctggaggggtgtccttgaaccccaaacctcccccaccagctgcgggcctcctcctgggccgggagttctcgtggatgccagggc

SEQ ID NO: 78687 - DNA, 240 bp, Homo sapiens
  chr9:136718545-136718785
  hypo
actggggaggccctgccccagcggcctctgctgacgcttgcttgtcccctctctgcaccatgagtcccacccaccagtggcaactcccacaggtgtggcaggttccatctgacaagcacccaaaaggctagagcggggcagggaacggccaagcggagtctgcatcaccctgcactacagccaacccacacatgccgcccccctttgctgcaccaaagcgcttccccacccagggccagc

SEQ ID NO: 78688 - DNA, 31 bp, Homo sapiens
  chr9:136719371-136719402
  hypo
catctgcacacacacacgcacatacccatat

SEQ ID NO: 78689 - DNA, 435 bp, Homo sapiens
  chr9:136722068-136722503
  hypo
caaggaccaggtgctgcgctgcacgatgcacagacacagagcaaccccgcgaggcagagtcatgctcccagcctacagaagagacaaaggttccaagagcatccctgcccaaggtcatttggctgacagaagcttccttcatgggacctgacctcccagcctgaggacacctttcggtttccttctcaggaagtcctacccttcaccatctcctccctcccagccgttcagagctgtgatgaccccaaattagggcacccccaatctggagggctagctctggccacagcaagacccacatccccacacgcctcgctgggtgccttccacaaacccctctcccactctacaaccacaatcctcccccttgccccgcttccccaacacgtttgatcccccagccggcaccagggcgggattcttagattaagtctc

SEQ ID NO: 78690 - DNA, 180 bp, Homo sapiens
  chr9:136723289-136723469
  hypo
ctttgtatacctgaggcgttgggccacgcagcgtatgctcacaatgtggtttatggtggggctgtgggcatgcaggatcagtgtggcctctgcaggcgctggggatggagtaactaaggtcagcctcacaggcatgcccaaccccaccggccaccagtgaggacccgcactccagggctt

SEQ ID NO: 78691 - DNA, 31 bp, Homo sapiens
  chr9:136723744-136723775
  hypo
gagcccttctctgggccgagccctgagccct

SEQ ID NO: 78692 - DNA, 22 bp, Homo sapiens
  chr9:136725133-136725155
  hypo
tctatccatggccgggcgaggt

SEQ ID NO: 78693 - DNA, 81 bp, Homo sapiens
  chr9:136725454-136725535
  hypo
cattttttaaaaacctcaattcaaaggaatttctgtgtcctctgagaatccaacaacggaagtccccgtgggtttaggaac

SEQ ID NO: 78694 - DNA, 30 bp, Homo sapiens
  chr9:136727117-136727147
  hypo
ctccatggagggctcgggatgcagaaggtc

SEQ ID NO: 78695 - DNA, 156 bp, Homo sapiens
  chr9:136728457-136728613
  hypo
ggaggcaccagcattcggtcagcgctgacacacaagaacctgtttgtcaacctggagtcagcgcaaaggccccaggtcgggtcgtacagatggaaccgggtcgtacagatggaaccggagacagagaggaggcgtggcgggcgagccagccaaggc

SEQ ID NO: 78696 - DNA, 66 bp, Homo sapiens
  chr9:136729691-136729757
  hypo
cacaaccttttaaaggcggcactttaaaagacagaccctaggtcctacccccgccaccccacaggc

SEQ ID NO: 78697 - DNA, 48 bp, Homo sapiens
  chr9:136729988-136730036
  hypo
cacaggaaagggcatgcggtctgtgagctcctccggggtaggaacaaa

SEQ ID NO: 78698 - DNA, 36 bp, Homo sapiens; identical to SEQ ID NO: 23694
  chr9:136731600-136731636
  hypo

SEQ ID NO: 78699 - DNA, 173 bp, Homo sapiens
  chr9:136732401-136732574
  hypo
atctcgccaggtggtgcgtgcgcaactctagctttctctttctggcgccttggagagatggaagccaaaaaagtgacccaatcaccctgcacttgagccagtgaagccactgagtgcccccatggtggggccgcctggggccctagggaagggtgccacgtgctctgaaaagg

SEQ ID NO: 78700 - DNA, 456 bp, Homo sapiens
  chr9:136733333-136733789
  hypo
tgagctacccggggctcgggtctgtgtggcaacacgaggggcaacctgcccacagcacagcaggcaccgcatccccatgaggtggggcgcggtggggagaaggaagagaaatgagtcttctggttctggccaggagatgctctgcgaatggggaagagcccagactgccctgggttcaaatccgcccttcccgggcaccgtgctgaggctccctgaggctcggttggctcatctgtgagatggggataacagtgtctacccgtgtggctgtaggtgaatgagacggagcctggcccaaagcagggactcgcgcacagcttgcggaaaggggactgtgcccgatcagaaggtccacggagggactcatggctgcactccatcctccacttgctcgaatgaagaaacaaaaacagagcaaagtactaggctcagggccagaagcgtgcatgtttgtta

SEQ ID NO: 78701 - DNA, 336 bp, Homo sapiens
  chr9:136737402-136737738
  hypo
ttcctccctgcatgctcggctcccagcacccacgtcctccatgtttccatggctgtgctgggtgggtgactgcgagtctaacttccccctcttctctgccatggtgtggccaggctagaggaaaagggctgatggcgtcctcactccgcgcaccgtcttttccccactgcagtcagctacactggcccagctgccccaaccagcatgtgggggcacagcctctcctcggcttgaagggtcggggtcctaggcccagttcccgacacctccagaggaaacccaaagcctggagcagaggcaggaaggctggcagggaagccccgggggtcagagtcg

SEQ ID NO: 78702 - DNA, 115 bp, Homo sapiens
  chr9:136739159-136739274
  hypo
ccctttctgaggaggagtcaccggggctggggcagacagctggtgcctctggcagcagagcccggctctccacgccgccctgccctggagggccggctatccatcctggatttga

SEQ ID NO: 78703 - DNA, 101 bp, Homo sapiens; identical to SEQ ID NO: 23697
  chr9:136743437-136743538
  hypo

SEQ ID NO: 78704 - DNA, 48 bp, Homo sapiens
  chr9:136743949-136743997
  hypo
acagcagctgagcactcggagtggaagcgccctcggcccgggcagcct

SEQ ID NO: 78705 - DNA, 172 bp, Homo sapiens; identical to SEQ ID NO: 23699
  chr9:136751546-136751718
  hypo

SEQ ID NO: 78706 - DNA, 138 bp, Homo sapiens
  chr9:136758976-136759114
  hypo
gagagtcgggcgcccacgtgtaccacacacacagttgaatgctttactggacctcacggatcctcacagacctctggaaagttctgtcgtaatctccaccttacatctgcagaaactgaggctcggggagaaggaaga

SEQ ID NO: 78707 - DNA, 78 bp, Homo sapiens
  chr9:136762225-136762303
  hypo
cccaaccgaaacagatgttgggcttgtgagaacgcagcactaggaagcgactcgggagcctatcggcacatgctggtt

SEQ ID NO: 78708 - DNA, 60 bp, Homo sapiens
  chr9:136763772-136763832
  hypo
atcatcagttgaatggcgaggtagctggactttttatgtggtgcccggggaagcttccag

SEQ ID NO: 78709 - DNA, 304 bp, Homo sapiens
  chr9:136766706-136767010
  hypo
gaggctggccctgagccgcaggggcctctcctgccctccagcaagggcccggagctgccctgaggggctcctgccggcccggcctggtgactctacctaggtctgtaggcactgggctgggcccatccctcctggggtatttatttcccccactgttctgacaccaggccctcccgtaagcacagacagccctgctgtccctgactctggaaccccagcgcccactgccacattctaccttttcccaggagacgggccgatggggtcagtggcaatgtgccaccaccatcggagggggctgggg

SEQ ID NO: 78710 - DNA, 369 bp, Homo sapiens
  chr9:136771808-136772177
  hypo
acccatgacctcacgccgcagaacctggcacagctcacaagtcagaaccacagacacaaaacccagtggcgcctggagagctgggggcagcggggtccctgcggagccaggctctgggtcctcagccctcccttctgacgtgcggagacccatggctctacaccgggggccactcaagtcactgcagctgagacactttggggaccctcgccccgtcccatcccttcacaacagacagacatagagacctgcaggagcagggaccctggcctgccactgggcccagcgagcccctccgtgagtgatggccgctatgctgctcggccccctcaggcctgcctcagcctggctggccggcggcggggggag

SEQ ID NO: 78711 - DNA, 127 bp, Homo sapiens
  chr9:136773824-136773951
  hypo
ggaaccgctgggagggcgtccccacgcccttgccagcgctgcacccctctgaggcagacgcagctacaaaccaggtgccaggagcaggccccctcgggagcggacttccaaccgcttgcctggtttg

SEQ ID NO: 78712 - DNA, 31 bp, Homo sapiens
  chr9:136777464-136777495
  hypo
aacacgaggctatgtccgtccaaatccccac

SEQ ID NO: 78713 - DNA, 58 bp, Homo sapiens; identical to SEQ ID NO: 23704
  chr9:136785102-136785160
  hypo

SEQ ID NO: 78714 - DNA, 40 bp, Homo sapiens
  chr9:136786009-136786049
  hypo
tctaactcatacccctcggcccacccgcttcctggctggc

SEQ ID NO: 78715 - DNA, 162 bp, Homo sapiens
  chr9:136802013-136802175
  hypo
tgcagcccctcagagccgcagccgcctcactggaaaccatggacgatgacaagggctgcccatttgcaaactgcttggccacacagctggtaagttgaataatgagagtttaatccaaatttatgtacgtcttacatcactgcattccgccatagcaaatta

SEQ ID NO: 78716 - DNA, 31 bp, Homo sapiens
  chr9:136808205-136808236
  hypo
aagaatgaagccatgtcgacatcggccaggg

SEQ ID NO: 78717 - DNA, 26 bp, Homo sapiens
  chr9:136817742-136817768
  hypo
cctgaggctctcgagataagataatc

SEQ ID NO: 78718 - DNA, 304 bp, Homo sapiens; identical to SEQ ID NO: 23705
  chr9:136835361-136835665
  hypo

SEQ ID NO: 78719 - DNA, 172 bp, Homo sapiens
  chr9:136836375-136836547
  hypo
ggtcagacccacttggcccctcggtgtttaactgatcctgatcgtcaccatctgggtcgccacggcagcccaggggcagccgcaagcaggcaccgtgggaccggtgactccactgtgccccaggaacccaggagggggccacatgttctacgccaatgactctctagcctag

SEQ ID NO: 78720 - DNA, 30 bp, Homo sapiens
  chr9:136842308-136842338
  hypo
cccccagcatcccacgaggacctccggcat

SEQ ID NO: 78721 - DNA, 31 bp, Homo sapiens; identical to SEQ ID NO: 23706
  chr9:136852076-136852107
  hypo

SEQ ID NO: 78722 - DNA, 197 bp, Homo sapiens
  chr9:136852628-136852825
  hypo
accatcgccaggctggcgtgtccgggaagaggcagggagcacagggagttgaggtggaggtgggggacagactctggcaggcccagggccaagcctttgcgtggtgtccagcaatggctgcctgatgtgttttacgaggaggaggccaccaggacgatgtgggcaagtcagaggctgggcggcgggtggtaccttaa

SEQ ID NO: 78723 - DNA, 31 bp, Homo sapiens; identical to SEQ ID NO: 46707
  chr9:136856910-136856941
  hypo

SEQ ID NO: 78724 - DNA, 192 bp, Homo sapiens; identical to SEQ ID NO: 23707
  chr9:136905411-136905603
  hypo

SEQ ID NO: 78725 - DNA, 31 bp, Homo sapiens
  chr9:136911190-136911221
  hypo
ctacagcaaaacccaccgcaggtcccacctg

SEQ ID NO: 78726 - DNA, 30 bp, Homo sapiens
  chr9:136916158-136916188
  hypo
caacacctgcatgccgggttcccaggccag

SEQ ID NO: 78727 - DNA, 30 bp, Homo sapiens
  chr9:136919129-136919159
  hypo
aagagtgacccatgcgtggacagccacggt

SEQ ID NO: 78728 - DNA, 231 bp, Homo sapiens
  chr9:136920305-136920536
  hypo
gcagggctccctgctctgccccgcaaggaccgcctagcccgcaccgcagggtgatcctgttaaaaccaagtcggatcaagtcaccggtctgctcaaaacctcccaggggctccacgtgactcagagtgaaagcgagtcctgccccaccctggttggtggggcctggggtgaccgagtcctgagacctgtgtcctgtctcctgtgacttgcggccctccctcaaggcctgga

SEQ ID NO: 78729 - DNA, 30 bp, Homo sapiens; identical to SEQ ID NO: 23708
  chr9:136923094-136923124
  hypo

SEQ ID NO: 78730 - DNA, 85 bp, Homo sapiens
  chr9:136993425-136993510
  hypo
cctcttaacaacatgtcgctgccgttgctctgtggcaggactacccaagctaccttatccttttggcggccgtggactgttccag

SEQ ID NO: 78731 - DNA, 23 bp, Homo sapiens
  chr9:136999214-136999237
  hypo
atcttttttatttttttgagacg

SEQ ID NO: 78732 - DNA, 29 bp, Homo sapiens
  chr9:136999416-136999445
  hypo
gcccggccggattttctcatttttactag

SEQ ID NO: 78733 - DNA, 108 bp, Homo sapiens; identical to SEQ ID NO: 23709
  chr9:137287804-137287912
  hypo

SEQ ID NO: 78734 - DNA, 49 bp, Homo sapiens
  chr9:137293294-137293343
  hypo
gggcacacctggcccgtagtgagtgtgaatttgcgtcagagagctgtcg

SEQ ID NO: 78735 - DNA, 83 bp, Homo sapiens
  chr9:137314809-137314892
  hypo
tgcacagaaatgcctgctccacgcgcatcacactccccgtgatgccatgcggcggccaggacggtggctgggagctcagcttt

SEQ ID NO: 78736 - DNA, 35 bp, Homo sapiens; identical to SEQ ID NO: 23710
  chr9:137330714-137330749
  hypo

SEQ ID NO: 78737 - DNA, 61 bp, Homo sapiens
  chr9:137352255-137352316
  hypo
ctcccacgatacactcggtttccaacactccagtatgcgcttctgccgatggctctccttc

SEQ ID NO: 78738 - DNA, 30 bp, Homo sapiens
  chr9:137433139-137433169
  hypo
cagagtcatcagatccgcctggtggttaca

SEQ ID NO: 78739 - DNA, 30 bp, Homo sapiens
  chr9:137433706-137433736
  hypo
agggtgcagggtatacgcagtttagatacc

SEQ ID NO: 78740 - DNA, 30 bp, Homo sapiens; identical to SEQ ID NO: 23711
  chr9:137485433-137485463
  hypo

SEQ ID NO: 78741 - DNA, 30 bp, Homo sapiens; identical to SEQ ID NO: 23712
  chr9:137485708-137485738
  hypo

SEQ ID NO: 78742 - DNA, 30 bp, Homo sapiens
  chr9:137542329-137542359
  hypo
caggtgagcgataggcgagccgtctgtgcc

SEQ ID NO: 78743 - DNA, 30 bp, Homo sapiens
  chr9:137542672-137542702
  hypo
tgtgatcctcaaacccgcccttcgtgccag

SEQ ID NO: 78744 - DNA, 37 bp, Homo sapiens
  chr9:137583039-137583076
  hypo
gcccctctcacgagcccggcttcgtttcactgtagtg

SEQ ID NO: 78745 - DNA, 31 bp, Homo sapiens
  chr9:137599728-137599759
  hypo
cttcccggcacacaggcgggcgagactgggt

SEQ ID NO: 78746 - DNA, 217 bp, Homo sapiens
  chr9:137601995-137602212
  hypo
ggggatgttaggcttgtggtgcggatgaaaggaggcaaagccggtgcggcccgccccgtgctcactcagcgtggtggcaggtgcgccgctgtgtgctggcaggctctcctgcccgcgcgagacggtggctgttgtgatgatgatgatggtagtcatagtgattgtgcagtattttcatagcatcgccgtcagtgccgttaaccctgtctcattgaaa

SEQ ID NO: 78747 - DNA, 200 bp, Homo sapiens
  chr9:137609683-137609883
  hypo
ccctgtttcggttggacgaggagggggcctgggtgccaggcagtcatgggggggctggctcaacccagggatgggggatggggttgaaaggaggagtgcatgattaaatggcagaggaggcactgagcatgcgattagagggagcagcagcatgagaagcagcctgggctggggggccgcggccacgggagcctctaatt

SEQ ID NO: 78748 - DNA, 616 bp, Homo sapiens
  chr9:137621051-137621667
  hypo
gtctgaggtcggcctcgggtcctccccgctctgggctgtcatcccctcacctctgaaattggggagggttgtgagggtgcgtgagcggcagtgagagccggagggtcacacctagcagggcccgggccccgtgcaggagtgtgtatgggtgggtgtcctcctggggaggaggctgtccagcctcagagccattgtcagaggtaaagagggtggggtgtgagcatgggcggtgtgtgtgtgtgcatgaacgagtgtgtgtgagcatgtggcatgcaggcacgggtgtgcttgagcctgcgtgtgtgtgagagtgtgtgtgagcgtgtgtgcatgcgggcacgggtgtgcatgagcctgtgtgtgtgagcgtgtgtgagcgtgtgtgcatgcgggcacgggtgtgcatgagcctgtgtgtgtgagcgtgtgtgagcgtgtgtgcatgcgggcacgggtgtgcatgagcctgtgtgtgtgagcgtgtgtgagcgtgtgtgcatgcgggcacgggtgtgcatgagcctgtgtgtgtgagcgtgtgtgagcgtgtgtgcatgcgggcacgggtgtgcatgagcctgtgtgtgtgagcgtgtgtgagcgtgtgtgcatgcgg

SEQ ID NO: 78749 - DNA, 146 bp, Homo sapiens; identical to SEQ ID NO: 23713
  chr9:137645688-137645834
  hypo

SEQ ID NO: 78750 - DNA, 205 bp, Homo sapiens; identical to SEQ ID NO: 23714
  chr9:137646058-137646263
  hypo

SEQ ID NO: 78751 - DNA, 114 bp, Homo sapiens
  chr9:137650027-137650141
  hypo
aaggcggggtgtccacgtgtgcagggtggcgtctgaggcagcctttctgtcctttttgcagggtgaccggggtttcgacggcctggctgggttgccaggcgagaagggccacag

SEQ ID NO: 78752 - DNA, 91 bp, Homo sapiens
  chr9:137650657-137650748
  hypo
agtcccgagctagtgcggtgacctgggggtcttcctggctgcgccgtttctatgtggttgttggagaacacagatgcggcagctttggata

SEQ ID NO: 78753 - DNA, 31 bp, Homo sapiens
  chr9:137693755-137693786
  hypo
caggccactgcagcaccgtcagtgcagtgac

SEQ ID NO: 78754 - DNA, 31 bp, Homo sapiens
  chr9:137698684-137698715
  hypo
ggggatgggtggataacggaaagacaaggcg

SEQ ID NO: 78755 - DNA, 30 bp, Homo sapiens; identical to SEQ ID NO: 23715
  chr9:137709414-137709444
  hypo

SEQ ID NO: 78756 - DNA, 228 bp, Homo sapiens
  chr9:137709948-137710176
  hypo
gtagttatgtcccccggagccctgcgacctcatgcctggtctttgagtcggccagacctgagccgcctacctctgaagtggaccgtgtccgatggtgaccgtgtctgctgcggggcccgtgcagaagatgggacgccgtcacccatgcagttggcttggggcctggcccagagcacacgggaggctattctgtcagtgaggtgatggcggcccggcctggcactgtct

SEQ ID NO: 78757 - DNA, 80 bp, Homo sapiens
  chr9:137710619-137710699
  hypo
tgtgaggggcagaggggttgccgagtggagggacgggggaccagcaactcatgcagagcgtctctgtgtttcagggagaa

SEQ ID NO: 78758 - DNA, 275 bp, Homo sapiens
  chr9:137718799-137719074
  hypo
agccttggcccaggcgaggactgagtctccctgttgctcctggaaggtgaccaagcctgcagctctcgtgcccctgcatcagcttgaacggcctctccttcatgagctcgcagttgtcgcgtggccccaggcaaaggccgcccatttctggggccgcagcggtttgctgtgcaggtccagacctgtgcgcccctgcagcctctgcttcctaacaacctcagtgccccagaagcagtttcctgccaggggaagagcagctacgttctccccaggga

SEQ ID NO: 78759 - DNA, 34 bp, Homo sapiens
  chr9:137727554-137727588
  hypo
ggaatggaggccggagcggcgggaggcttgctga

SEQ ID NO: 78760 - DNA, 553 bp, Homo sapiens
  chr9:137759999-137760552
  hypo
agaccaaggacccagcggagcagatccaggctccctggaacttcatggagaatgccctatttttccctctgagcaggtgattctgacacaccacaacaactaccccttctccaccgaagaccaagacaacgaccgagatgctgaaaactgtgccgtgcactatcagggagcctggtggtatgccagctgtcacctgtcacacctgaatggtgtctacctcgggggggcccgtgacagctttacaaacggcatcaactggaagtcggggaaagggaacaactacagctacaaggtgtcggagatgaaggtgcggcccacctagcccggcgctgaggtcagaggttctctccacacaccctggctggaggagcgcatccctcagccctcaccaagagggcaatgtggggatcatggcccccatcctcatgggaagagggagctcccaccagtcccttataggcatggcccgcagagctttgcacccagtgccagcatccagccccctgcctcccatctgcaaggctaggcgaagccccagcgtgcctccctcacc

SEQ ID NO: 78761 - DNA, 30 bp, Homo sapiens; identical to SEQ ID NO: 7114
  chr9:137835238-137835268
  hypo

SEQ ID NO: 78762 - DNA, 178 bp, Homo sapiens; identical to SEQ ID NO: 46721
  chr9:137967472-137967650
  hypo

SEQ ID NO: 78763 - DNA, 291 bp, Homo sapiens; identical to SEQ ID NO: 23718
  chr9:138011544-138011835
  hypo

SEQ ID NO: 78764 - DNA, 304 bp, Homo sapiens; identical to SEQ ID NO: 23719
  chr9:138012097-138012401
  hypo

SEQ ID NO: 78765 - DNA, 69 bp, Homo sapiens
  chr9:138068321-138068390
  hypo
cagcaggccccagacaactcccgggagggggtcttgctgacagccagcggggcagggcccctggtctgg

SEQ ID NO: 78766 - DNA, 38 bp, Homo sapiens; identical to SEQ ID NO: 23720
  chr9:138106858-138106896
  hypo

SEQ ID NO: 78767 - DNA, 31 bp, Homo sapiens; identical to SEQ ID NO: 7118
  chr9:138120293-138120324
  hypo

SEQ ID NO: 78768 - DNA, 377 bp, Homo sapiens; identical to SEQ ID NO: 23722
  chr9:138143893-138144270
  hypo

SEQ ID NO: 78769 - DNA, 278 bp, Homo sapiens
  chr9:138150457-138150735
  hypo
accgtatggggtgaccgaggtgatgccaaccgtatggggtgactgaggtgatgccgactgcatggggtgactgaggtgatgccgactgcatggggtgaccgaggtgatgcccactctatggggcgacagcagtggtgctgactgcatagggtgatggtggtgatgcccactgtatggggtgacggtggtgatgccgactgcatggggtgatggcagtgatgccaactgcgtggggtgaccgaggtgatgctgactgcatggggcgaccaaggtgatgc

SEQ ID NO: 78770 - DNA, 263 bp, Homo sapiens
  chr9:138150963-138151226
  hypo
cgtatggggtgacttcggtgatgccgactgcatggggtgaccaaggtgatgctgactgcatggggtgacggcggtgatgccaactgtatggggtgacttcggtgatgccgactgcatggggtgacggtggtgatgccaactgtatggggtgacttcggtgatgccgactgcatggggcgacggcggtgatgccaaccatatggggtgacggtggtgatgctgaccgtatggggtgacggtggtgatgccgaccgtatggggtg

SEQ ID NO: 78771 - DNA, 31 bp, Homo sapiens; identical to SEQ ID NO: 23723
  chr9:138156950-138156981
  hypo

SEQ ID NO: 78772 - DNA, 30 bp, Homo sapiens
  chr9:138190761-138190791
  hypo
tcgggaggacttggccgggcagttcccaca

SEQ ID NO: 78773 - DNA, 176 bp, Homo sapiens
  chr9:138247968-138248144
  hypo
ctctatcgggatggacgctcagacccttgcaaggcagcactgacgggagccacggcggagcaatggcctcgatagtgaccgggcactgacgggagccacggcggagcaacggcctcgatagtgacctggcactgacgggagccacggcggagcaacggcctcgatagtgaccgggc

SEQ ID NO: 78774 - DNA, 30 bp, Homo sapiens
  chr9:138264674-138264704
  hypo
cgcccacagaagccccgccttcctcccagc

SEQ ID NO: 78775 - DNA, 162 bp, Homo sapiens
  chr9:138265192-138265354
  hypo
ctggaggcagccttgcgatgagctctgctgcaggcctgtggacgcgagccccactgcttcatggtcgcccactccctctgttagagtctgacctgagtccatttgtactggcagcttccacaacacccactgagacccacgccaacgcgccccgcccacgag

SEQ ID NO: 78776 - DNA, 163 bp, Homo sapiens
  chr9:138274929-138275092
  hypo
gccgtacccacttctcgatcagggctggcagcagaaggccccaagcccctcccactcttgtgtgccccccgctctccgacaactttaaaaaataggcaaccgacaccagatgtagagccccaggcagggtcctcgtggccacggctgccggcaattcgtggac

SEQ ID NO: 78777 - DNA, 581 bp, Homo sapiens; identical to SEQ ID NO: 23724
  chr9:138289346-138289927
  hypo

SEQ ID NO: 78778 - DNA, 43 bp, Homo sapiens; identical to SEQ ID NO: 23725
  chr9:138296700-138296743
  hypo

SEQ ID NO: 78779 - DNA, 90 bp, Homo sapiens; identical to SEQ ID NO: 23726
  chr9:138297096-138297186
  hypo

SEQ ID NO: 78780 - DNA, 43 bp, Homo sapiens
  chr9:138339187-138339230
  hypo
ccatcctccacctgtcggggaactgtgccgcccgggcctgtcc

SEQ ID NO: 78781 - DNA, 31 bp, Homo sapiens
  chr9:138357660-138357691
  hypo
cccagctgcccatggccgtcacccttccact

SEQ ID NO: 78782 - DNA, 94 bp, Homo sapiens; identical to SEQ ID NO: 46726
  chr9:138372194-138372288
  hypo

SEQ ID NO: 78783 - DNA, 30 bp, Homo sapiens
  chr9:138375660-138375690
  hypo
aatgcagtcccatgcgaccacctggcaaat

SEQ ID NO: 78784 - DNA, 122 bp, Homo sapiens
  chr9:138393596-138393718
  hypo
gcacttgggagcaggggtgggcgggaactgcgctctgcctgtctctgctgccaccggtgggagacgcagcgtcgctcctcctccctgccgtagatttcaacgacaagattttgaatgagccc

SEQ ID NO: 78785 - DNA, 30 bp, Homo sapiens
  chr9:138395331-138395361
  hypo
agtggagatggccccgtgaactctcatccc

SEQ ID NO: 78786 - DNA, 5 bp, Homo sapiens
  chr9:138456650-138456655
  hypo
ggctg

SEQ ID NO: 78787 - DNA, 31 bp, Homo sapiens
  chr9:138507284-138507315
  hypo
cgctctccactccatccggaccagggacggc

SEQ ID NO: 78788 - DNA, 30 bp, Homo sapiens
  chr9:138531497-138531527
  hypo
gtagatcttgtaaacggagaatgaagtcta

SEQ ID NO: 78789 - DNA, 31 bp, Homo sapiens
  chr9:138547729-138547760
  hypo
gcatcctcccctctgacgtctcaggaggagg

SEQ ID NO: 78790 - DNA, 544 bp, Homo sapiens
  chr9:138562809-138563353
  hypo
cgtgcaaatgcaccgcgtgtacaggacggctgtgtgcacacgtgcaccggggcgaggggctgtcgatgccacttcccttcgcagtgttctcttagttaccgacagcgtggcagcctgcagttaccagggaagccggagctaggagcagaggcaggcgaagccccaggaggggaggcatgtccactccccacagcccctcccataccagaggcccttgacaatgcgcctgcaggtcaggcgaccagctaggtgtggggtgagcccccgcctctgtttccccaaatgactggtatgttcctgggcacacatccgatggctgccagcctgcacgtcacgcccagctgccggagctactgcgggattccagaacaaggaacgtgacatgctcggcctggagcggaacaaggcacctggctcccgcaccctcgacggggccctgcccagtggacacgaccacgtggaagcctcttcctcctggcactgcagagcggatggcggatgcagatcccactttggggatggcgggcactgctggtaaattcta

SEQ ID NO: 78791 - DNA, 150 bp, Homo sapiens
  chr9:138569513-138569663
  hypo
tacaccatggtctgtgtgtgtcgtggtctgtgtgcaccgtggcctgtgtacaccgtggtctgtgtgcgccatggccgtctgcctgtcttcggcactggagcctccctttggctaacggagcacctgggcgcctgccttctgcttgtcaga

SEQ ID NO: 78792 - DNA, 43 bp, Homo sapiens
  chr9:138603671-138603714
  hypo
gctcagccaaactgctggccacgctacacctgctgtagctgaa

SEQ ID NO: 78793 - DNA, 88 bp, Homo sapiens; identical to SEQ ID NO: 46728
  chr9:138606160-138606248
  hypo

SEQ ID NO: 78794 - DNA, 250 bp, Homo sapiens; identical to SEQ ID NO: 46729
  chr9:138606523-138606773
  hypo

SEQ ID NO: 78795 - DNA, 23 bp, Homo sapiens
  chr9:138606820-138606843
  hypo
cgcggaggcggagggcggcctgg

SEQ ID NO: 78796 - DNA, 30 bp, Homo sapiens
  chr9:138637320-138637350
  hypo
tgagtcgaaggcctgcgctgtctcttttgg

SEQ ID NO: 78797 - DNA, 350 bp, Homo sapiens
  chr9:138637699-138638049
  hypo
actctgaggagctagcggagccctccaggctaccagtgtccatgaacctctgccgcagcaaggaggcttgggccactctggcaggaaccaccaggcgggtctaccccagccgggtcggcctagagctgaccccagccaggcctctgcagccacaggctccctccccaggtgccgctgcgtgactcgtgaagacagatcgcaccagtcacctgaaatacactgcaggggaaaatggatcgttttcatctcctttttgtggtggtgctcggagaagtgggcggccacagttcattaaaaattaaaagcagaggaggcttcattaatgtctctggcatcgcaggctccagttt

SEQ ID NO: 78798 - DNA, 304 bp, Homo sapiens; identical to SEQ ID NO: 23730
  chr9:138649884-138650188
  hypo

SEQ ID NO: 78799 - DNA, 38 bp, Homo sapiens
  chr9:138654777-138654815
  hypo
aggtgtcactgtagctcgagctccgtgtccacagtggg

SEQ ID NO: 78800 - DNA, 768 bp, Homo sapiens; identical to SEQ ID NO: 23732
  chr9:138660476-138661244
  hypo

SEQ ID NO: 78801 - DNA, 305 bp, Homo sapiens; identical to SEQ ID NO: 23733
  chr9:138661729-138662034
  hypo

SEQ ID NO: 78802 - DNA, 309 bp, Homo sapiens
  chr9:138662705-138663014
  hypo
tggcgtgtgcctcatcgggctgaagcgggaggacaacaagagcatcctgctgaacccggggccccggcacatcctggccgcctctgacacctgcttctacatcaacatcaccaaggaggagaactcggccttcatcttcaagcaggaggagaagcggaagaagagggccttctcggggcaggggctgcacgagggtccggcccgcctgcccgtgcacagcatcatcgcctccatgggtgagccgggacaggcgcgcgggactccctgggcctgctcctttggcgggagaccaggcgggacaccggcagg

SEQ ID NO: 78803 - DNA, 127 bp, Homo sapiens
  chr9:138663354-138663481
  hypo
ggttggcagctcaaccggaggctcctggtggtcccatcagcccggagggtctgcttcacgtgtgtccctcaaacagtcgggagtcctgacgtccactggggccaggagttggcggaatgaggtcgca

SEQ ID NO: 78804 - DNA, 30 bp, Homo sapiens
  chr9:138671241-138671271
  hypo
cacccttccaacatgcgcttcatgcagttc

SEQ ID NO: 78805 - DNA, 30 bp, Homo sapiens
  chr9:138671743-138671773
  hypo
ctgccctggccactacgcccgaccttgaaa

SEQ ID NO: 78806 - DNA, 30 bp, Homo sapiens
  chr9:138682388-138682418
  hypo
ctagcctgtgcccccgccaccctggcagca

SEQ ID NO: 78807 - DNA, 30 bp, Homo sapiens
  chr9:138710963-138710993
  hypo
gcgagctcatcttccgctttctgttcatcc

SEQ ID NO: 78808 - DNA, 31 bp, Homo sapiens
  chr9:138712991-138713022
  hypo
tggagcctgtaactgtcgaagagacacttcc

SEQ ID NO: 78809 - DNA, 204 bp, Homo sapiens; identical to SEQ ID NO: 23734
  chr9:138718006-138718210
  hypo

SEQ ID NO: 78810 - DNA, 215 bp, Homo sapiens; identical to SEQ ID NO: 23735
  chr9:138719253-138719468
  hypo

SEQ ID NO: 78811 - DNA, 30 bp, Homo sapiens
  chr9:138719699-138719729
  hypo
tcaccgtctagcacccgcacaaaagccctc

SEQ ID NO: 78812 - DNA, 312 bp, Homo sapiens
  chr9:138743578-138743890
  hypo
tcaaacagatctatgttgatacggagagatttccgtcactcatcttgaccgctatatggtcctccacgatttctcacaattatgacaaatgctgccatcacaaagcttgcgtgtgctgtctatgcgtgtacagacgggtgttgcccaggcatactctgagaggggactcgctgggccacgagctaggcacgccctcctgtgtcacctggcaacgcccttctgcctggttgtgcctcgctccagtcccacccacagcactccacagcttgctccttcccacctgcaccgcagcatgaccgacctgtccatgtc

SEQ ID NO: 78813 - DNA, 247 bp, Homo sapiens
  chr9:138770461-138770708
  hypo
tgaaagctttggggcacagctcgaagccagtgaagcatctgagaacccacaccggagagggcctaggaacacagcgcgggtgagagagtttgctcggggaactcgcacttcctacacacccgggcattcacactgcaaaaggtgctttggaagcattcagccggtatcgcatcctgcagtgaggactcgcacccgggagaaagtcacataaggagaaaccactaacgtaaggaacttaaattcatat

SEQ ID NO: 78814 - DNA, 184 bp, Homo sapiens
  chr9:138774056-138774240
  hypo
ctacctgctacagctgcaccacgccttagtgcagcttcctcattcgacaggaatgacactctcttcaaccaccgcacggcacccgcagtctcaccgggaacgccatgggagcaaccaaacaaaggcagtgcaggaggcaccgagaatggccctgacccagaacgctctggaaaaggcacaccag

SEQ ID NO: 78815 - DNA, 118 bp, Homo sapiens
  chr9:138774511-138774629
  hypo
agtttcctaaggaacgccagtgtgcaaaagcacgggtctccaccacctcgccgcacaccgtgttcacaccatccatgcaccaggtgcgccacacgagagcccacggctccagaggatg

SEQ ID NO: 78816 - DNA, 202 bp, Homo sapiens
  chr9:138780558-138780760
  hypo
gatataaggagtcaacggaaataattccaactcaaggtaaaagcgaccagtagtccacgccccagctccatcctggagaggccagacacaagggtaagaaaagctgatgtaatggtccccacagggccaagaccacctgacccccacccagggacaaccagtaacaaactgcaccttgacagcggagcgccaggtgcacaga

SEQ ID NO: 78817 - DNA, 30 bp, Homo sapiens
  chr9:138781020-138781050
  hypo
cgaaaatgaaacctacgctcaactgtatgt

SEQ ID NO: 78818 - DNA, 1 bp, Homo sapiens
  chr9:138796567-138796568
  hypo
a

SEQ ID NO: 78819 - DNA, 78 bp, Homo sapiens
  chr9:138796807-138796885
  hypo
ctcaaaaaaaaaaaaaaaagtggaaaccagacctcctaaaatcggagtctgatgtgcgaaggcactgtcacccaccag

SEQ ID NO: 78820 - DNA, 30 bp, Homo sapiens
  chr9:138821407-138821437
  hypo
gttcaaggggagaccgtcaggcgggaaacc

SEQ ID NO: 78821 - DNA, 41 bp, Homo sapiens; identical to SEQ ID NO: 23740
  chr9:138824556-138824597
  hypo

SEQ ID NO: 78822 - DNA, 84 bp, Homo sapiens
  chr9:138831882-138831966
  hypo
aggtagaaacgcatcgcttatgtggacacgaggcagtcaggccaacttcagaccctttcaggtttgtcccgatgactgtgtgga

SEQ ID NO: 78823 - DNA, 248 bp, Homo sapiens
  chr9:138836302-138836550
  hypo
aggaggaagtaaaacccgaatcaaagaacaggagagagaaggaagaatggggagatgaggcgcgggcgaggaaggtccacacacacaggcgcagggacccttcagccctgcagactgtgccatggaggcggctggcagcctgagcggcccctcgctcatggacacccccgacggcaaatgaccctcccggtctctgggcagggcccccaccccgcagagaggctgccgaacagggggggcttgtggat

SEQ ID NO: 78824 - DNA, 30 bp, Homo sapiens
  chr9:138838012-138838042
  hypo
aagcactgaggttccggtcagtggtcagtg

SEQ ID NO: 78825 - DNA, 30 bp, Homo sapiens
  chr9:138839929-138839959
  hypo
agacgtgtcctcagcgtctgctctgacgta

SEQ ID NO: 78826 - DNA, 155 bp, Homo sapiens
  chr9:138841433-138841588
  hypo
cctccacagctgctgcgctggaatacgaggcctccagacagtttcccctcctggcacccgaggaagtcaggctccaccagaccaagggacagatcgagaagaacaagacacctggtcctgcggcaggcagaactcgaggacggccgcacgctccc

SEQ ID NO: 78827 - DNA, 61 bp, Homo sapiens
  chr9:138867840-138867901
  hypo
cacttcctggcccctggcacccggcattctactttctgtcgctaggggcttgatgacccta

SEQ ID NO: 78828 - DNA, 331 bp, Homo sapiens; identical to SEQ ID NO: 23743
  chr9:138873214-138873545
  hypo

SEQ ID NO: 78829 - DNA, 30 bp, Homo sapiens
  chr9:138873972-138874002
  hypo
ccagcatcacctggccgagacggacctagg

SEQ ID NO: 78830 - DNA, 178 bp, Homo sapiens
  chr9:138874535-138874713
  hypo
gcagggccaccagcacggatggccatcagccgggaggagctggggatcctgggggtctgcactattgtgctgtcatctcagagccggagcagccagggaagggaacggaaagatatttgggggcacagctggctgccaccacctgctaaggtgggtctacggccggggcaggaaagag

SEQ ID NO: 78831 - DNA, 251 bp, Homo sapiens
  chr9:138877591-138877842
  hypo
ggcaatcagaaaggacgcgctgagggctgcgcttacccccatctctctttccctggggtaggccccttcctcctgctcctcctgaatgctggcacctgcgcagccctctgccatgactccagagccaacccatgctcacaacctccacgtgctgcccccagctggcctgggcactcggcctccccctctcctaggtccagagaacgggtctgaaagcctgtgggggccaacagcagcggcctgttccccaa

SEQ ID NO: 78832 - DNA, 45 bp, Homo sapiens
  chr9:138878498-138878543
  hypo
tgcaggggtgccgtgccgggtcctcagcaccggctcccaggcagc

SEQ ID NO: 78833 - DNA, 30 bp, Homo sapiens
  chr9:138880241-138880271
  hypo
gctggctctaccatcgttcagcagaacctc

SEQ ID NO: 78834 - DNA, 31 bp, Homo sapiens
  chr9:138888187-138888218
  hypo
gactctgaaagtcccccggccaggacatgga

SEQ ID NO: 78835 - DNA, 44 bp, Homo sapiens; identical to SEQ ID NO: 23745
  chr9:138901583-138901627
  hypo

SEQ ID NO: 78836 - DNA, 123 bp, Homo sapiens
  chr9:138902148-138902271
  hypo
cacccctcaaggcagacggggagcccagcaccgggaggaccgactctcgccctggcccagccctggccgctgcctcctgcccgagcggagtcccccgctccccaggtccggccctgagctcag

SEQ ID NO: 78837 - DNA, 49 bp, Homo sapiens
  chr9:138906091-138906140
  hypo
aaactccaagctctcccggccatgctgcggtccccggcctcagctccct

SEQ ID NO: 78838 - DNA, 56 bp, Homo sapiens
  chr9:138907130-138907186
  hypo
caggggcccacccagccgccccggcagcccagcactgcgctcgccatccagaagca

SEQ ID NO: 78839 - DNA, 31 bp, Homo sapiens; identical to SEQ ID NO: 23749
  chr9:138908323-138908354
  hypo

SEQ ID NO: 78840 - DNA, 31 bp, Homo sapiens
  chr9:138908900-138908931
  hypo
gactgtgctggcctgacgaggagcaactcca

SEQ ID NO: 78841 - DNA, 40 bp, Homo sapiens
  chr9:138909963-138910003
  hypo
atgcagagcccacctgcggccgcaccgcaccaggacgctc

SEQ ID NO: 78842 - DNA, 185 bp, Homo sapiens
  chr9:138910982-138911167
  hypo
gcagcctccacctccccggcccccagctcaccctctgcaggagctgagcttcaaggtccaggctacaactgggctttaacggagaacccgcagagagacttgttcatggcagagacaggacggctcatccctcgtggcccccggaagggccattcagaggccccgtgagtcggggccagagctgg

SEQ ID NO: 78843 - DNA, 570 bp, Homo sapiens
  chr9:138911433-138912003
  hypo
atggaggtgaacaaccgcgcccccacacagggaaggtgcaccagggtcacgacgagagggcccggagcagcagcctcccgggcagcagggcccagctactgagggtaggcaggtgggcagcctccctggaccacacggggcgaagcaaacacaaggacaaatgctgcccggggcgcggggttggggccttcagggacccagaaggagcccccgccgtaccttccaggcccttctgctcccagccgggcgacaccaggggagcttgcgagagggcggctgagcctggaggacaccacactcaggaagctgccagacacagaaggacacatcccggggctccactcgcaggcggcccccagagtcgtcaggtccacagaggcgggaaacagagggtgggtgccggggctgggtgggggaacggggagggaccgtttcatggggatgagaggttcatctggggaagatgggaagttctggagccgatggcagtgatgctcacaaaacagtgggaatgcgcttagcatcaccgaaccacgcacgtaaaagtcactgcaacggcccctctcacgt

SEQ ID NO: 78844 - DNA, 30 bp, Homo sapiens; identical to SEQ ID NO: 23752
  chr9:138916649-138916679
  hypo

SEQ ID NO: 78845 - DNA, 32 bp, Homo sapiens
  chr9:138922160-138922192
  hypo
agagggtactggaggccgggcgcggtggctca

SEQ ID NO: 78846 - DNA, 30 bp, Homo sapiens
  chr9:138948513-138948543
  hypo
gatgacgggccccctcggactatcactgtc

SEQ ID NO: 78847 - DNA, 73 bp, Homo sapiens
  chr9:138948934-138949007
  hypo
cagcagcaggctctgcgtccgatagggccttgtggggtgcccgtggcgttggctctgccgggggtctggtcca

SEQ ID NO: 78848 - DNA, 105 bp, Homo sapiens
  chr9:138950819-138950924
  hypo
tctggcccctgggccccgccctcctgtctgcagggagaggcagtgtgggggctgtagagggaaggtgctgggtcaggggcaggggagaagcgtgatctggaaccc

SEQ ID NO: 78849 - DNA, 86 bp, Homo sapiens
  chr9:138954963-138955049
  hypo
tgtgggccaggtctgtcgatctgtctctctcctgtcaaacgtgtggtttgagccgcattcccattacgtggcggggaccagggatg

SEQ ID NO: 78850 - DNA, 37 bp, Homo sapiens; identical to SEQ ID NO: 23754
  chr9:138970474-138970511
  hypo

SEQ ID NO: 78851 - DNA, 30 bp, Homo sapiens
  chr9:138970808-138970838
  hypo
atgccgcgccgccgccgcccctctccgatt

SEQ ID NO: 78852 - DNA, 193 bp, Homo sapiens
  chr9:138975399-138975592
  hypo
gtgtcttctgagaagggaaaacgcggacacctgtgaagagcgccgtgcagaggccaggccgagactggcacgagacgggcatgagcccagggcaccacaggcggctggcaccacgctgcggaggcaggcgggggccccgagacactgtggcctggggcttttggcctccaccgctgtgcaagaagaaattcct

SEQ ID NO: 78853 - DNA, 259 bp, Homo sapiens
  chr9:138976373-138976632
  hypo
aaactggcccagaccccggagtcagggtcacgaaggccatggaaaggccacagaatacaccaggctggaagagcccagagacacagcaagactcaaacagacgcgcacgccacgtccatagcggcagcaccagacagccaagaggcaagtggccccagggtccgccaatgggtgacagtcaaaggaaatggcggcgggcgcacacacacacatacatcacgcagcctggagaagggacgggctccgccactccctgcaa

SEQ ID NO: 78854 - DNA, 31 bp, Homo sapiens
  chr9:138979535-138979566
  hypo
tttgcccagcttccaccgcagcacgggggga

SEQ ID NO: 78855 - DNA, 31 bp, Homo sapiens; identical to SEQ ID NO: 23755
  chr9:138979873-138979904
  hypo

SEQ ID NO: 78856 - DNA, 986 bp, Homo sapiens; identical to SEQ ID NO: 7122
  chr9:138986170-138987156
  hypo

SEQ ID NO: 78857 - DNA, 560 bp, Homo sapiens; identical to SEQ ID NO: 46735
  chr9:138987167-138987727
  hypo

SEQ ID NO: 78858 - DNA, 30 bp, Homo sapiens
  chr9:138989725-138989755
  hypo
tgcctggacacctgcgtgtcctcccctgga

SEQ ID NO: 78859 - DNA, 30 bp, Homo sapiens
  chr9:138994465-138994495
  hypo
tagggaagatcgggacgaatggcccgctgc

SEQ ID NO: 78860 - DNA, 31 bp, Homo sapiens
  chr9:139000600-139000631
  hypo
aagcggcaagaatgcccgtccccatgtcgtg

SEQ ID NO: 78861 - DNA, 123 bp, Homo sapiens
  chr9:139006537-139006660
  hypo
acaactccctgcagcgttgacaccgcacgagcggcaccaccagccccctcccgcctcccgtcccaccttcaccctcagccaagaggcttgggtgactctgagtaatacgttaacaaaaaacaa

SEQ ID NO: 78862 - DNA, 30 bp, Homo sapiens
  chr9:139008859-139008889
  hypo
gaggcgtcggcctgcggggagagccgcaaa

SEQ ID NO: 78863 - DNA, 91 bp, Homo sapiens; identical to SEQ ID NO: 7124
  chr9:139024429-139024520
  hypo

SEQ ID NO: 78864 - DNA, 138 bp, Homo sapiens; identical to SEQ ID NO: 46738
  chr9:139024749-139024887
  hypo

SEQ ID NO: 78865 - DNA, 43 bp, Homo sapiens
  chr9:139028202-139028245
  hypo
ttaccatggtagctttaaacccggtatcttattaattctgcat

SEQ ID NO: 78866 - DNA, 30 bp, Homo sapiens
  chr9:139028607-139028637
  hypo
tgcggactgggacctcgtggcgctgccgag

SEQ ID NO: 78867 - DNA, 30 bp, Homo sapiens
  chr9:139028910-139028940
  hypo
gcactttacgtgccccggataaagctgaat

SEQ ID NO: 78868 - DNA, 60 bp, Homo sapiens
  chr9:139043907-139043967
  hypo
cctcagcagctttgggcgagggggtctggtcagctgccctgtggccgaagccccaccttc

SEQ ID NO: 78869 - DNA, 67 bp, Homo sapiens
  chr9:139044755-139044822
  hypo
ctcgaccacagcagaacgtgggctgaggagggggaactgccaggccaggtcacgggtgagcctcgtc

SEQ ID NO: 78870 - DNA, 815 bp, Homo sapiens; identical to SEQ ID NO: 23760
  chr9:139051192-139052007
  hypo

SEQ ID NO: 78871 - DNA, 236 bp, Homo sapiens
  chr9:139061802-139062038
  hypo
cagcccctgccacggcgtcagagcaatggcccttcatagagagacctcagagtgcccccacccctgtcactgggagaagggctgggtgagacggggaggacagggccatggggcctgatggagagggaaggggctttcagggatccggcactgtggccagagcattgaaaggttccaagggcgctgtgccccttccacccgccctccctcctgggcaagcccgggcccccgggtgg

SEQ ID NO: 78872 - DNA, 171 bp, Homo sapiens; identical to SEQ ID NO: 23761
  chr9:139069741-139069912
  hypo

SEQ ID NO: 78873 - DNA, 88 bp, Homo sapiens
  chr9:139075088-139075176
  hypo
ggggctgctatcataaagtgccgccagcttggcagtttacacaacggaaaggcatcctgccggtgtcggggggccacagtctgaaatc

SEQ ID NO: 78874 - DNA, 30 bp, Homo sapiens
  chr9:139079095-139079125
  hypo
gaagtccatgcccgtcgcgctgtccagcgt

SEQ ID NO: 78875 - DNA, 113 bp, Homo sapiens; identical to SEQ ID NO: 23762
  chr9:139079353-139079466
  hypo

SEQ ID NO: 78876 - DNA, 30 bp, Homo sapiens; identical to SEQ ID NO: 23763
  chr9:139079953-139079983
  hypo

SEQ ID NO: 78877 - DNA, 152 bp, Homo sapiens; identical to SEQ ID NO: 7127
  chr9:139090399-139090551
  hypo

SEQ ID NO: 78878 - DNA, 155 bp, Homo sapiens; identical to SEQ ID NO: 7128
  chr9:139090586-139090741
  hypo

SEQ ID NO: 78879 - DNA, 453 bp, Homo sapiens; identical to SEQ ID NO: 46746
  chr9:139091071-139091524
  hypo

SEQ ID NO: 78880 - DNA, 95 bp, Homo sapiens; identical to SEQ ID NO: 46747
  chr9:139093772-139093867
  hypo

SEQ ID NO: 78881 - DNA, 178 bp, Homo sapiens; identical to SEQ ID NO: 46748
  chr9:139096723-139096901
  hypo

SEQ ID NO: 78882 - DNA, 30 bp, Homo sapiens; identical to SEQ ID NO: 23768
  chr9:139100455-139100485
  hypo

SEQ ID NO: 78883 - DNA, 106 bp, Homo sapiens; identical to SEQ ID NO: 23769
  chr9:139101083-139101189
  hypo

SEQ ID NO: 78884 - DNA, 35 bp, Homo sapiens; identical to SEQ ID NO: 23770
  chr9:139103913-139103948
  hypo

SEQ ID NO: 78885 - DNA, 30 bp, Homo sapiens; identical to SEQ ID NO: 23771
  chr9:139106573-139106603
  hypo

SEQ ID NO: 78886 - DNA, 237 bp, Homo sapiens; identical to SEQ ID NO: 23772
  chr9:139106805-139107042
  hypo

SEQ ID NO: 78887 - DNA, 604 bp, Homo sapiens; identical to SEQ ID NO: 23773
  chr9:139110882-139111486
  hypo

SEQ ID NO: 78888 - DNA, 30 bp, Homo sapiens
  chr9:139114546-139114576
  hypo
gagcctggctgccccgaacgcaccagcatg

SEQ ID NO: 78889 - DNA, 31 bp, Homo sapiens; identical to SEQ ID NO: 23774
  chr9:139114782-139114813
  hypo

SEQ ID NO: 78890 - DNA, 31 bp, Homo sapiens; identical to SEQ ID NO: 23775
  chr9:139115298-139115329
  hypo

SEQ ID NO: 78891 - DNA, 236 bp, Homo sapiens; identical to SEQ ID NO: 23776
  chr9:139118752-139118988
  hypo

SEQ ID NO: 78892 - DNA, 139 bp, Homo sapiens
  chr9:139121426-139121565
  hypo
actgcacacacaacagaatcacggccgtgtgacatcatcaagccggcctagaaacagcaaaaacaaaagacgggaagaagaaaacgttccaagatgtttgccaggatttggttttcacggtgggatctggtcccatctg

SEQ ID NO: 78893 - DNA, 85 bp, Homo sapiens; identical to SEQ ID NO: 23777
  chr9:139128187-139128272
  hypo

SEQ ID NO: 78894 - DNA, 90 bp, Homo sapiens; identical to SEQ ID NO: 23778
  chr9:139130638-139130728
  hypo

SEQ ID NO: 78895 - DNA, 551 bp, Homo sapiens; identical to SEQ ID NO: 23779
  chr9:139133093-139133644
  hypo

SEQ ID NO: 78896 - DNA, 31 bp, Homo sapiens
  chr9:139253100-139253131
  hypo
ctggtcttgggatggccgtgtgacaggcatg

SEQ ID NO: 78897 - DNA, 169 bp, Homo sapiens
  chr9:139256370-139256539
  hypo
ttattgatagaaaacaggccacgtccagagaggcccagggccaaaacctccttctggaaggccgaagtcccacagtgccggggagcgcaggagtcagctcggctccgtcttgccagggctggggggaccctcatcctcacccgcttccggagctgcagtggatgtgggg

SEQ ID NO: 78898 - DNA, 31 bp, Homo sapiens
  chr9:139261466-139261497
  hypo
ggaggtgggcactgtccgtgccttaccttac

SEQ ID NO: 78899 - DNA, 30 bp, Homo sapiens
  chr9:139262118-139262148
  hypo
gagcctgccctccacggccagtagctgcgc

SEQ ID NO: 78900 - DNA, 30 bp, Homo sapiens; identical to SEQ ID NO: 23780
  chr9:139262661-139262691
  hypo

SEQ ID NO: 78901 - DNA, 81 bp, Homo sapiens
  chr9:139264124-139264205
  hypo
aactgccctcaagggccgtggccctggtgcacccacccgcgagtggggtgctttgtcctgcccctgcgagtgcccacctgg

SEQ ID NO: 78902 - DNA, 30 bp, Homo sapiens; identical to SEQ ID NO: 23782
  chr9:139265711-139265741
  hypo

SEQ ID NO: 78903 - DNA, 936 bp, Homo sapiens
  chr9:139268641-139269577
  hypo
cccttccagaagtgtcgttatcctcgttatccccatcatgaggcatccctgctctccaccaggatgcatgtgaggactgaggccactctcggggtcccccaaaccagcttcagaagagccggtgacagcagggcacagctcggcccccatccagggacaacggacagcagagtctgccctgaactgtgcacttcagcgtgtgggctgccagagcctcatccctgcaggcttgggaacccccaggccccgcctcacccggtaaagctggttgaactgagttgccacccaacaggttcgagaaggggccgccaggctggaaggcaaggaagctggtgtggagcttgcctaaccgttctcagcctccagccctcaggcctctgtgcggacaacgtctgacatcacacattaaggagcggacagttaggggtcctcctgggctctcgggaatgccacattccagggggccgtgcccctgctggacccctcaccatcaacatgagcgagtgtgcaggccggggccatcctgggccctgccagggagcgaaccggagctggcaccaggccctcatgacccagtgtttccccagcgtttaaaacgcggaccttagtgacttccctgtggtgtgtgtccttaggagtgaacacacataccatgttctctaaccatatcggaagctaaaaatcggtaacagatatcggcaaaatctctaaatatttggaaattaaataatataccgctaaataacccacagatcagagtggcccccagactaggcaccagactagagaaccaggcacagcaacacatactcaggagtgaggtcggccatgggaccgtcccgtctgccaggtgcccagggctgaggccccacagtggctccagtgaaggatcgaagcccagatagccaagggcctgggggcgctgctgccacagag

SEQ ID NO: 78904 - DNA, 35 bp, Homo sapiens; identical to SEQ ID NO: 23784
  chr9:139272164-139272199
  hypo

SEQ ID NO: 78905 - DNA, 31 bp, Homo sapiens
  chr9:139273917-139273948
  hypo
ccagatggcaatgctccggccaaagccaggg

SEQ ID NO: 78906 - DNA, 31 bp, Homo sapiens; identical to SEQ ID NO: 7131
  chr9:139294770-139294801
  hypo

SEQ ID NO: 78907 - DNA, 149 bp, Homo sapiens; identical to SEQ ID NO: 23786
  chr9:139300479-139300628
  hypo

SEQ ID NO: 78908 - DNA, 30 bp, Homo sapiens
  chr9:139301526-139301556
  hypo
ctccaggttctccccgggagaagccgctcg

SEQ ID NO: 78909 - DNA, 190 bp, Homo sapiens
  chr9:139302150-139302340
  hypo
agagctgctccccagcactgacgcctgcctgctctgccacactcatgcacgattcctccaaaggaggctgcagaggccggaacagaaacgtcccacagagccatcgcccacagtgccgtggatttacctttgcataaattctgctggccggatcctctttcgagaggccgaggttcttggtcttcagaaa

SEQ ID NO: 78910 - DNA, 751 bp, Homo sapiens
  chr9:139317509-139318260
  hypo
gcgcgctcgtgtgacacgcgtttgccctctgcactaggcaacgtgaagccggaagatgtgaagagagtcgcttctaagatgctccgagggaagccggcagtggccgccctgggtgacctgactgacctgcccacgtatgagcacatccagaccgccctgtcgagtaaggacgggcgcctgcccaggacgtaccggctcttccggtagaaccgctccccggcctgacagacccagggagctgcagctggagcccgttcccgtgcgtgttagtttggacacgaatttagtctaaaaagctgtctggttgtataaacggtgcaaacaatgtcgccacagcacccacgcggtttgcattcttttggaactcaatgtgccgatcagtggagtcagtatcgagcctgaccaccgcaagccaggaagcaggtgaagtgcccagcgctggagtgcagcgtgccacgaggagggcggtcggtgcttccctcctcgggctgtgggcacatggggccccgcaggttccttggaggagccctgagctgggaggcagcaaaggctgacctatcaaagcctcccggaggccaccgtgctgggtaccaggactcacctctgacaagcaggagaaggtaagggcccggtcagctccaaggagcgcgctccacgcgcgtgcacacagcttccctggtaataaagagctggcatctttcttagcacggtgttttccttctcgcctggggaggggcggttcttaagggct

SEQ ID NO: 78911 - DNA, 30 bp, Homo sapiens
  chr9:139324912-139324942
  hypo
cgtggggcgtggcccgctcacctccctgct

SEQ ID NO: 78912 - DNA, 30 bp, Homo sapiens
  chr9:139327480-139327510
  hypo
cttgatctgagacacgatgcgtgtggtcac

SEQ ID NO: 78913 - DNA, 59 bp, Homo sapiens; identical to SEQ ID NO: 7132
  chr9:139334258-139334317
  hypo

SEQ ID NO: 78914 - DNA, 366 bp, Homo sapiens
  chr9:139345459-139345825
  hypo
gtagtggccagaggcgacctctgggggccgggctgtgtccccatgctgacctgggtgggctattatcctattatctgaaggcacaaatacacagacacccatcatgccgtgtgcactgtagacactcggctgtttgtatcaggaggctatttgcatgtgtggtgaattaagaggatggcgctctgggaagcgtgcctcctgcccaaaccctcccggccgccaggcgcaccgtgggcaggctgtactaccttcttaggttccttcgtttctttcttggctgcctgtccgggtctctttgtttcgggagcgggtgagagagacagaggtggctgcgtgggacccgagtcggcacgatcccaccctggg

SEQ ID NO: 78915 - DNA, 276 bp, Homo sapiens
  chr9:139347809-139348085
  hypo
caaggagtctgggtgcccactcgatgaactttatggaaaacaaacagtttaagaaaatgtgacaaagtaccagattagcaaattttccatcaaaattttcttcgcttagctcggaaagtgagtttccaacaggcgcctcctgcggcactatccctgtcaacgggaaagagagcaactatgatctcagtcacgagaaggcgggacgtgtgtgtggcgcacagatcaacaggcacaccaccttcccacccagctaccgccacaccagcatgatctgca

SEQ ID NO: 78916 - DNA, 142 bp, Homo sapiens
  chr9:139349658-139349800
  hypo
gctggcccttccaccgacggggccgactgggagaagcaggttacagaggggcacagccgagggcgccgcccagacacggtgcggctgaggctcccggagaaacaagcagggaggctgagcaggcagcgggcgctcagggcag

SEQ ID NO: 78917 - DNA, 97 bp, Homo sapiens; identical to SEQ ID NO: 23794
  chr9:139351903-139352000
  hypo

SEQ ID NO: 78918 - DNA, 30 bp, Homo sapiens; identical to SEQ ID NO: 23795
  chr9:139360261-139360291
  hypo

SEQ ID NO: 78919 - DNA, 31 bp, Homo sapiens; identical to SEQ ID NO: 23796
  chr9:139361343-139361374
  hypo

SEQ ID NO: 78920 - DNA, 68 bp, Homo sapiens; identical to SEQ ID NO: 23797
  chr9:139361591-139361659
  hypo

SEQ ID NO: 78921 - DNA, 126 bp, Homo sapiens
  chr9:139367912-139368038
  hypo
ggcacagaagaatcttctgcacgagcacagccggtccccgagccgctgcccgcaccaccacgtgctgacagcagcttgcgggactccgcctcgcttagctgatgcgtgtggctcatgctccaaaac

SEQ ID NO: 78922 - DNA, 30 bp, Homo sapiens
  chr9:139368734-139368764
  hypo
ctgctgacccgcgtcgaccagaaccagact

SEQ ID NO: 78923 - DNA, 142 bp, Homo sapiens
  chr9:139374943-139375085
  hypo
ataaaatgcgagaatcgatgtgattattttttcctaaaaaacccgggtttaatcttatgagattctactcacagtggattctgggatgtcctaatcccacctgctgtttaacaggggtggccgggcacggtggctcacacct

SEQ ID NO: 78924 - DNA, 14 bp, Homo sapiens
  chr9:139375325-139375339
  hypo
gagactccgtctca

SEQ ID NO: 78925 - DNA, 90 bp, Homo sapiens
  chr9:139384887-139384977
  hypo
tgctgggattacaggcgtgagccaccacgcctggccaacgccagcactttcaacgcaccgggaccaagctggacccggttttgttttgaa

SEQ ID NO: 78926 - DNA, 31 bp, Homo sapiens
  chr9:139388144-139388175
  hypo
atctcagactccccaccgctctggtttgaag

SEQ ID NO: 78927 - DNA, 30 bp, Homo sapiens; identical to SEQ ID NO: 23799
  chr9:139389753-139389783
  hypo

SEQ ID NO: 78928 - DNA, 30 bp, Homo sapiens
  chr9:139393035-139393065
  hypo
agcagcgttccccacgccaggctgtgtgcc

SEQ ID NO: 78929 - DNA, 30 bp, Homo sapiens
  chr9:139393721-139393751
  hypo
gggagaggctcaggcgggtgctgggcagac

SEQ ID NO: 78930 - DNA, 30 bp, Homo sapiens
  chr9:139396032-139396062
  hypo
ccaggacccccccacgtctactctgaatgg

SEQ ID NO: 78931 - DNA, 30 bp, Homo sapiens
  chr9:139401574-139401604
  hypo
cccactgggacccccgctctgggccctttc

SEQ ID NO: 78932 - DNA, 30 bp, Homo sapiens
  chr9:139401916-139401946
  hypo
ttcggctcagccggcgccaggatgcagtgc

SEQ ID NO: 78933 - DNA, 30 bp, Homo sapiens; identical to SEQ ID NO: 23800
  chr9:139407964-139407994
  hypo

SEQ ID NO: 78934 - DNA, 30 bp, Homo sapiens
  chr9:139408978-139409008
  hypo
gcaggccccgtggacgcaggggttgctgtt

SEQ ID NO: 78935 - DNA, 30 bp, Homo sapiens; identical to SEQ ID NO: 23801
  chr9:139410895-139410925
  hypo

SEQ ID NO: 78936 - DNA, 30 bp, Homo sapiens; identical to SEQ ID NO: 23802
  chr9:139412389-139412419
  hypo

SEQ ID NO: 78937 - DNA, 31 bp, Homo sapiens; identical to SEQ ID NO: 23803
  chr9:139417760-139417791
  hypo

SEQ ID NO: 78938 - DNA, 31 bp, Homo sapiens; identical to SEQ ID NO: 23804
  chr9:139420230-139420261
  hypo

SEQ ID NO: 78939 - DNA, 775 bp, Homo sapiens
  chr9:139421469-139422244
  hypo
gaggttccgtgagacgcgctagctggggggaaccgggccgagcctggagaaagttttgagccaggtgtgggggtctgtgtgtggggggcagctttgggcccagtctcccgctgctgctgtgggcagcctccagcctgtgcccgccccagtctgtacctctctcccacatggccacagagctggagcaccctacagacggcgaacacctgccctccgcacagcacccagacgtccctgagaaggtgggagggacctcaggcctgcagcatggccatggccaggaccaccagcctgtgagcaaatccttcacagctttggcgctggccacacccccggtacccgggccactctgtcttcaatgctgtcccggcggccaggtgggtgtgggccgcgaggtgggcgccagggcttggccgagtgaggtggcacccaacagctgccgcgcccacggggatcctcagggcttccatgagtgacccgcaccccaccttccaccgtccccgcatctcctcctatcaggggcggtggggagacccctctggggctaaaaagtgaggcttgagatagggaacgccagtctcccccgactggacgagagagctgccctgtccaccaagccacccagctctcgggctcccacggaggagacccaacccacgccaggtgtgcccccgtggactccccttccgtgcgtccctcttagggtcacccggcacctgcctgtcccatcccccacgctcagtggcctggcggcgctggggtaacctgtcctatc

SEQ ID NO: 78940 - DNA, 31 bp, Homo sapiens; identical to SEQ ID NO: 23807
  chr9:139429159-139429190
  hypo

SEQ ID NO: 78941 - DNA, 216 bp, Homo sapiens; identical to SEQ ID NO: 46753
  chr9:139440689-139440905
  hypo

SEQ ID NO: 78942 - DNA, 31 bp, Homo sapiens
  chr9:139449119-139449150
  hypo
ggagcacaggggttgccggcacccaacagaa

SEQ ID NO: 78943 - DNA, 35 bp, Homo sapiens
  chr9:139456526-139456561
  hypo
tggcttctcctggccgcctcgagtcccacagccga

SEQ ID NO: 78944 - DNA, 31 bp, Homo sapiens
  chr9:139465108-139465139
  hypo
ccctgctggagcccttcgccctgtcccccag

SEQ ID NO: 78945 - DNA, 205 bp, Homo sapiens
  chr9:139480858-139481063
  hypo
gtgtgagaacgtgtgcgtgtgcaccagtgcttgctcacctgagtccacacgcaggtgtgcaagtgtgtgcccgtgtgtgtagaggggtgcatgtgtgtgcctctacatgtgaggggtgcgtgtgtgtgcatgtgtgagagtgtgtacgtgtgtgtgcttgctcacgtgagtgtccacacacgggtgctcccgtgtgcatgcgcgt

SEQ ID NO: 78946 - DNA, 250 bp, Homo sapiens
  chr9:139484034-139484284
  hypo
gcagcggctcaaagagcggaggaaatctgtggatgcccccaccgtgcgatgtcccccccgccatgtgacacacccaccatgcgatgccctctcatccactgtgatccccccacactgttcagtgctcccgccaccacgcgatgccctctcatccagtgtgatccccccacactgttcagtgctccccccaccacgcgatgcccccctccacagtgcggtgcccccctccacagtgcgatgccccctactg

SEQ ID NO: 78947 - DNA, 141 bp, Homo sapiens; identical to SEQ ID NO: 23811
  chr9:139501901-139502042
  hypo

SEQ ID NO: 78948 - DNA, 31 bp, Homo sapiens
  chr9:139506457-139506488
  hypo
gatgaaccgggtagaccgtctgtacaatgga

SEQ ID NO: 78949 - DNA, 174 bp, Homo sapiens
  chr9:139509480-139509654
  hypo
gaaacccaggcaggaccgtaaaacccaggcctcgacccgtcagcctccagccgctctccgaggcaccttgcagggggtgggatggcagtggggagcctctcacaacaggaactggggtcccagatgctgcccggagcctggaactgcgagtggccgtggcggtggctgtgctgc

SEQ ID NO: 78950 - DNA, 239 bp, Homo sapiens
  chr9:139517554-139517793
  hypo
aggaggctccagccagagccccgtgatgggggacccgcctctgatgctgctgggctctcagggcagccccggccggttcccaccaggcagctcctggtgtggagagcgggcacatgcccgggcagcatcctccacagctggctgctcagaggacggggcgcctgccccacacccaccgtgggctcatgcccctcagggtcagggttcagggaggccccgtgcactcctggctctgggcc

SEQ ID NO: 78951 - DNA, 95 bp, Homo sapiens
  chr9:139546508-139546603
  hypo
gtcaatgcactcatccgtggatgcgcatccgggtctatccacctctcggctcctgtgagcacaacgctgtgtgtacattgcgcgtctgtttgaat

SEQ ID NO: 78952 - DNA, 31 bp, Homo sapiens
  chr9:139570934-139570965
  hypo
tcaagggtcctcagctcggctggtggtcacc

SEQ ID NO: 78953 - DNA, 93 bp, Homo sapiens
  chr9:139571843-139571936
  hypo
ccccagaagccacccccgaggcccggcctacccatcatgtccaggatgctctggtggttggagacgatgacacagggacgggcctcctgcagc

SEQ ID NO: 78954 - DNA, 31 bp, Homo sapiens
  chr9:139579045-139579076
  hypo
caggggcaagatggagcgcccctcccagagc

SEQ ID NO: 78955 - DNA, 31 bp, Homo sapiens; identical to SEQ ID NO: 7136
  chr9:139580673-139580704
  hypo

SEQ ID NO: 78956 - DNA, 196 bp, Homo sapiens; identical to SEQ ID NO: 7137
  chr9:139581074-139581270
  hypo

SEQ ID NO: 78957 - DNA, 97 bp, Homo sapiens; identical to SEQ ID NO: 46757
  chr9:139581778-139581875
  hypo

SEQ ID NO: 78958 - DNA, 322 bp, Homo sapiens
  chr9:139585993-139586315
  hypo
gctcacacaggaccacggaggcccagagggtgcctgggtcccagtccgagaggggtgtggtgtggggctgaagagcccagggtcagggtcaggcagcccgacccagcgaggagaccctgggtgaccttggatcagccctgcctctctaggcctcagtttccctttcgtgcagggtgcgtgtgatgattcagtgggaccgaggcttgggacggcccaggccagcccaagcaaggcagggatgaaggcccagcccccagcctcggcctcaccccatggctttttactcactgctgagggcggcgtccaatcaggcctagggcct

SEQ ID NO: 78959 - DNA, 683 bp, Homo sapiens
  chr9:139586515-139587198
  hypo
tcccaaccccagcaagcgggggcaggggggcctgggctgcagtcggctcctccttcacccttcccccaaatacctccagagcacctatttccccagtttccccaccggcagtggtgtccaggggcttggctcttgcagggtggccctggctctggccctgcgccctgcccatgatgtggtcggaagggcctttggcagcaccggtccaagccttagcaaacccaactgggggctcagagccgccccccaatttcgggagcgacttcacctttccacaggatcatcctcttggcaagatgaggctgaggccgggggttcggggctcagcatcgaaagccggggcctgggtgccacaggccgtgacctcttccaccaaatgagagaaacggcaagacctccaggaagggccgtcggagcccagacgaggctgcagcttcctttggtgaagcgtccgagggccggctctggcgcctacaggggcttccgacgctgggtccttctcaggctgagcgccgcactcccacggccacccgggtggtgcacacagtttccagggtgtccaggcagcccccagtggacctggtgtccacgtcctcctctgaaccatgccaggcctgggccgtgggcatccgtgctgccgtgtggggcaggggcctgtgtcctggggccgtgtcaggcctggg

SEQ ID NO: 78960 - DNA, 160 bp, Homo sapiens; identical to SEQ ID NO: 23817
  chr9:139598242-139598402
  hypo

SEQ ID NO: 78961 - DNA, 30 bp, Homo sapiens; identical to SEQ ID NO: 23818
  chr9:139604153-139604183
  hypo

SEQ ID NO: 78962 - DNA, 30 bp, Homo sapiens; identical to SEQ ID NO: 23819
  chr9:139634181-139634211
  hypo

SEQ ID NO: 78963 - DNA, 31 bp, Homo sapiens; identical to SEQ ID NO: 23820
  chr9:139641115-139641146
  hypo

SEQ ID NO: 78964 - DNA, 30 bp, Homo sapiens; identical to SEQ ID NO: 23821
  chr9:139641387-139641417
  hypo

SEQ ID NO: 78965 - DNA, 32 bp, Homo sapiens
  chr9:139666884-139666916
  hypo
agaagtgatctacagtcgggtgcggtggctca

SEQ ID NO: 78966 - DNA, 19 bp, Homo sapiens
  chr9:139684617-139684636
  hypo
ccaccgcacctggccaaga

SEQ ID NO: 78967 - DNA, 31 bp, Homo sapiens; identical to SEQ ID NO: 23822
  chr9:139687078-139687109
  hypo

SEQ ID NO: 78968 - DNA, 87 bp, Homo sapiens
  chr9:139687830-139687917
  hypo
gatgtacagggaagttcccagcgctgaaccccagaattagacgttcgcatcagccccgtaggccacgtgacaccaccacagcctctc

SEQ ID NO: 78969 - DNA, 30 bp, Homo sapiens; identical to SEQ ID NO: 23823
  chr9:139693181-139693211
  hypo

SEQ ID NO: 78970 - DNA, 858 bp, Homo sapiens
  chr9:139698437-139699295
  hypo
atcacctgggtatacccggggtggagaaggggtggccaggagcaacggagctgagaactcctcaagaggcaaccccactaagcgctggcaacgagagtggcgagggtgagagcagtgtctggggtgcgtgagcaggggttagcagatgacggttttagctgcccaagggcacgctggaagaggccaggttttggggaagaggatgaatctgtcttcaggcaggctgaatgcacttccgtgagttctaggtggacctggccaggaggcagctgggggccagcggctggagggcagcagagcgtctgggctggcacatgctctgaggcatgggcaaggagggccgtgagctgaggggccacgggcacaagtggtttaggaaaagggtgtggccattggccggggatgcagttccaaagtctagtaaggtgagcatggccaaccgcccgctggctttactgccattaggggccttgttgagacagctccccaaccctgtgcccacccgcatgtccccagaggaacatgaggcaaagggaggcgtccttcatcgaggagcgccgggcaagggagaaccggctcaaccagcagaagaagctgatcgacaagatccacacgaaggagaccagcgagaagtaccgccgggtaagccccaggccagggcctggctggctgcccatccccatgacagctgggtggacacaggctcagggccaccactcagggcccactccctgccaaggatgtctcatcccttccccgcccccacctcccatcagggccagatggacttggacttcccctcgaacctgatgagcacggagaccctgaaatgtaagcgctcagctccccacctgcccc

SEQ ID NO: 78971 - DNA, 31 bp, Homo sapiens; identical to SEQ ID NO: 23825
  chr9:139700525-139700556
  hypo

SEQ ID NO: 78972 - DNA, 341 bp, Homo sapiens
  chr9:139704089-139704430
  hypo
gaaagttgatgtccgaaccaagggccgtattggcttttcttatactctagaacatacgacgacaaagaagattttgatgaagttcaaattagagtcagcgtgctcatcagaaagaaagcgcagccaacacgtttaggaacagaaacggattatgttgaagacaaacaatccattgcgtttgtgttcagtaacccaagcatcaaaggaacttgtggctggggagaaggcttgactatttgaaatctcaggactcctctgtccaggagctcccagactcccgtggagtggaagcctgggggctcgctgaagaagtcacgtgactggaacgtgcttaatgcttg

SEQ ID NO: 78973 - DNA, 31 bp, Homo sapiens
  chr9:139705002-139705033
  hypo
ttgagacagagttttgcgttttgctgtgtct

SEQ ID NO: 78974 - DNA, 30 bp, Homo sapiens
  chr9:139705453-139705483
  hypo
gtggtcccggtagacgtgtgggacacccac

SEQ ID NO: 78975 - DNA, 252 bp, Homo sapiens; identical to SEQ ID NO: 23827
  chr9:139717804-139718056
  hypo

SEQ ID NO: 78976 - DNA, 30 bp, Homo sapiens; identical to SEQ ID NO: 23828
  chr9:139718360-139718390
  hypo

SEQ ID NO: 78977 - DNA, 30 bp, Homo sapiens; identical to SEQ ID NO: 23829
  chr9:139719277-139719307
  hypo

SEQ ID NO: 78978 - DNA, 30 bp, Homo sapiens
  chr9:139723868-139723898
  hypo
gctgagttcctggacgtgtacaagaactgc

SEQ ID NO: 78979 - DNA, 101 bp, Homo sapiens
  chr9:139724684-139724785
  hypo
gacccccacaccagggttaagcgtaccgcctgtcacggggccgcacactcagcacgcatcagcagcccaggcctgagggcggcttgaagcacctgaccagc

SEQ ID NO: 78980 - DNA, 30 bp, Homo sapiens
  chr9:139726203-139726233
  hypo
aaagtgcccacccacgtgccagtgtgcgtg

SEQ ID NO: 78981 - DNA, 30 bp, Homo sapiens
  chr9:139727383-139727413
  hypo
ggcttgaacctcctcgccctgggctgccct

SEQ ID NO: 78982 - DNA, 56 bp, Homo sapiens
  chr9:139729625-139729681
  hypo
gatcacctgaggtcaggagttcgtgaggctccggcgtttgtatttcatttgaatct

SEQ ID NO: 78983 - DNA, 31 bp, Homo sapiens; identical to SEQ ID NO: 23830
  chr9:139731838-139731869
  hypo

SEQ ID NO: 78984 - DNA, 31 bp, Homo sapiens; identical to SEQ ID NO: 23831
  chr9:139732505-139732536
  hypo

SEQ ID NO: 78985 - DNA, 661 bp, Homo sapiens
  chr9:139734901-139735562
  hypo
gctggaggctttcctggggggcggggccccgggcggccgccaccctgggggtggcgactacgaggagctctaggccggcgtgggcagtggccgccctggggcggggggcgtgcctgtcactgcctggggaggcatttgcctctgtaccatcgcctttgccgctgccccgtggctgccgtgtgcgcttctgagctggaagaggccgggcattggtggtccccaggctgggccctgcaggtgctgggccttcaggcccagtgtgagcctgctctgcaagaagggaggggacagctggcttcagccaggctcggtggacaccctggccctctcggggcagagccgccagtgtttctcagggatgtgactgaggcccaggagggacctgtgagggtctgtttacagaggctgggcaggggccgcttggctgtggggtgtgcgctgccccggcacctgcttgccctccgcgctcatctggggccgcagcatgcctatggttccgcttccggccgggagccctgaacacgggtgtgcagactcaccctaaagggcggcccaggccccacgctagaaggctggcgagaccgaaggcagcatgtgaggcctctcctgggagtgggggttgtgtttcccacagtggcctcagctgcgcccccgctcaggt

SEQ ID NO: 78986 - DNA, 43 bp, Homo sapiens
  chr9:139754946-139754989
  hypo
tggttgacaagagcgaaactccgtctcaggaaagaaagaaaaa

SEQ ID NO: 78987 - DNA, 43 bp, Homo sapiens
  chr9:139782733-139782776
  hypo
gttagaatcaggtgccattgacgcctgtagtcccagctactcc

SEQ ID NO: 78988 - DNA, 42 bp, Homo sapiens
  chr9:139782895-139782937
  hypo
tgccacccagtgaactcttacgtggagtccagtattgtatga

SEQ ID NO: 78989 - DNA, 278 bp, Homo sapiens
  chr9:139787442-139787720
  hypo
gttctgtgaaccttttagtgacgtacatgtatgtagcacgtctccacatgtcatgatgaatgtgcgctgagggtgcagtcctggtgagcaggctaccacctcagtttgccacggctggtatgcatctgtgagctccggaacatccacatagctctgccgcccacaggagcaggtgcacccaccttcgagaaagtgggagaaacaggtgtggcgtccccaccgagggaccttgagcactgggcaggcagagccccagcgtcccttctgttgggtggttg

SEQ ID NO: 78990 - DNA, 392 bp, Homo sapiens
  chr9:139794873-139795265
  hypo
gccttcccagataatgctgcccgcagggaggtggagagcctgccggccgtctgtcccagtgatggatgcacctggaaggggaccctgaaagaatacgaggtaaagatgcctgcgtgtggcatggtgacagaagctccagcagtcgggagtcgtccacgctccccaagcagttatgaccttgtcctgcacgttcctctcactggggctgaagcctgtctgatgtctgtggaggaagagacggagctgctccttagagtatgtccatttagaaactcaagtagtgcagagcacagacctgcaccatggagcttgggctgtgtgacctcgggcgaggtatttaccctctctgtgcctcaggtttcttgtctgtcgatgggggtgcaggatcccac

SEQ ID NO: 78991 - DNA, 151 bp, Homo sapiens
  chr9:139798423-139798574
  hypo
gcgcccagccaagaaagattttatttttgacatttcgagcatgcagcgcatctgagcagtgaggctgagagtagaggtgtgccgctgccccacaggcctacatgctgccccgcagcacctgccagccttcgccagcctactttcagccctt

SEQ ID NO: 78992 - DNA, 30 bp, Homo sapiens
  chr9:139802029-139802059
  hypo
tgctatctcccgtgcgtgttccctacctct

SEQ ID NO: 78993 - DNA, 30 bp, Homo sapiens
  chr9:139802588-139802618
  hypo
ttggtgaaaaggagcgccacctggagcacg

SEQ ID NO: 78994 - DNA, 722 bp, Homo sapiens
  chr9:139803919-139804641
  hypo
taaactgtcagatggacgggcctgaccatagcacatctggggtgccaagccctccgcagcagcatgtcagggtctgtcttggagacgtcccgcatgccgccagccctgcccatccgccaggccctcccaccggcctcgcctcccagcgggagcagcgtttccccatcttcaccggggccgttgtttcacgtggcttccaaatctcctctggtggcttgggtctccctcgcattgccctgagctggcagaacaaacaaagcgttaagatctccgaggctcctgggtggtgctggcaggatcctgcccgggaggagcactgtccttcgaggctggagggtgaccacgtgctcctgcggcccctcggcgctgcccagcctgagcactgtgtgccgccctccacccgcgcctggcattggcgtccaccctcacactcctgatcccttcttttgaaggcgcaccacgaggtctgccccaagttccccttaacttgtgacggctgcggcaagaagaagatcccccgggagaaggtgagtgtccttcacctccttggaggaccgcagggcggggcccatgtgttggacgtgagggtcccgtgggtgggggtggggcaggttatgacccttgtgcccaaaggaacagcagtgcaaagcccctgtaacgttgggtcatggatgcgttcagggtggcggccgctctcctgagtgggccgggggccaggtggc

SEQ ID NO: 78995 - DNA, 350 bp, Homo sapiens; identical to SEQ ID NO: 23837
  chr9:139805156-139805506
  hypo

SEQ ID NO: 78996 - DNA, 164 bp, Homo sapiens; identical to SEQ ID NO: 23838
  chr9:139809858-139810022
  hypo

SEQ ID NO: 78997 - DNA, 143 bp, Homo sapiens; identical to SEQ ID NO: 23839
  chr9:139814739-139814882
  hypo

SEQ ID NO: 78998 - DNA, 31 bp, Homo sapiens; identical to SEQ ID NO: 23840
  chr9:139817151-139817182
  hypo

SEQ ID NO: 78999 - DNA, 333 bp, Homo sapiens
  chr9:139818347-139818680
  hypo
tacctgaacggcgacggcaccgggcgaggaacacacctgtccctcttctttgtggtgatgaagggcccgaatgacgccctgctgcggtggcccttcaaccagaaggtgaggccgtccctgcaggcttcgctagggccgcacctgggagtccctctgggcagtgcagcttctgtggtgcagggttgtgcgggacaaggtggcttgggctcgctggaccaggtgtctgcagcaggcacgtcaccctgtgatgctgtgtcacgcggtggagagctctggcagtttgttgtttccatgatttctgagcactggtccgtgacacaagcacctggcttc

SEQ ID NO: 79000 - DNA, 30 bp, Homo sapiens
  chr9:139821631-139821661
  hypo
acggagctgaccgacgggcattgtctgtgt

SEQ ID NO: 79001 - DNA, 196 bp, Homo sapiens
  chr9:139833901-139834097
  hypo
gagttggcagggcagaggctccgtccctctgggtggcgcagcctctctcggtggtgctgtccctgatcccgtcggtgctcgagctcagccccagggtctctacctgcggcccacgtggctcaggggaaccatcacctcgacactcactcgtctcctctgcgtcctttctctgtacggggttgcttgctgccatgtt

SEQ ID NO: 79002 - DNA, 2276 bp, Homo sapiens
  chr9:139835148-139837424
  hypo
aagttgcccaggaggccgagggggccttgggctccatctgcactggccaccccgtgccaagcatcacagctgcgtgagcaggtttgtgtgtgagcgtgtggcggggcctggttgtccccttcctaaggcgtaactgctataagcatctccacctctcccgctcgggaaaaagccacagagcctggcgatgtcctcaaggggtcccggtggctccagtgcacccagcacacctcagcgcctctggctggcaagccaggagaagaaggtgcgaggccgtgggcgaggtgcctggaggacgcgcatggtgcgtggggagcgccaggctttgatggtggcgtcgtcgctggccgtgagcagcagctcctgctcctggggactgaagaccactgagttgaccacatcctcgtgccgcagcctggccagacagatgttgtagtggcggtcccagatgtagccgtgccggtcctccgccccgctgcagaacagcgcctgggtgagccggccgcccgcccgctgctgcccacacccgccctgcaccacgccgcgccctgcacctggccacgaagtccctgctgacgtccaggaagatgaagaagcactcgtcgttgggcgtgtaggcgcggtgcgcacgcagagcccgcctcacctcccgcatggtcttgaggtcgaacaccagcaggtcaatctcctccgcgattggtggcggctgcatggggtcggccaccaccgcaccgttgggccaggcgcggctgttcacgtacaggtacctgggcgaggggcactgtgctaggtgtgggccgcctgcgggcaccccgcctgggacactggcaagaggcccacctgttgtcgggcgacaggcccatgccgatgatgtgtccgtgtatgtctatgacgtggtccagcgcgtcgaagaaggcatcggagccccggccctcacccagcacgggccctgccgtggtcatctggtgtggcaggatctgcttgatgcctgcagggagggctacggtgagggtccctgtccaatgccccaaggacatcactccagggcagcttcctacctcagtggtgtctctggggctgtgagcaccacagaggtccgtgggcactgcctgctccgggggccccagacctgaatcaggcccgtcggttgcttgctggccagcggccctgcctgcgtttgttttcactgctcatcccacaggccccaggtctgggcttgtgaccccaggggcgagtgaacgatcccagctttgcctgtggacttgcttgctgtctgcccctcaggacccctgcccggcctcccccaagctcctaggaccgaggcgggcagcatggcggcaggggtgtaccgatctggtgtggggagtaggtgaggcagccagtggtgaagatgaggtacttgctcttggcgcctgtggcactgcgctcgggtggcttggtgtggccctgggccagcagctcggccaccttggtctctagcatgcgctccgacagctgtggctgcgcccgcccctccagcacgcggtccagaaagtgccgcaagccctccttggcgtgggcgggggccgggccagccaccacctcctcgttgtcgctgcccaggtcaaagatgcggcagggggacgtggccgggtcaccggcttccagcagcaggtcagggctgtcgaagcggctgcagtcggccaccatcaccgtgcggacggtgctggcattgaggttctggatcttgaacagccgcttcaccacgttgacgttctctgactccacatcctgggggcgggggcacgtgccaggtgggcgccgggcgccaggccccaggagggcagccccgcccctagccccgcacgcacctggaaggcattgttgagccacagcaccgagcaggaggtgatatctccgatgcggtgcaggttccccgagatgaggctggtctcggtgagccaacagccaaacacgtcatagggcttgttccgcacgcgggacagcagcgcgaaggagtctgtggggaggccggggctggacaggctgtcggcgtggggcgggggcagggtcaacccgccgcccgtgctcacctaggctgatgacagcaatctcgccggatgaggagttgtgcggccccaggaacacccccgaggccagcagtagcgagtcgtccttgttgaactgggagaactgggtgtagctccagttgtagggccgcatgtccgcgctgtgcagcagcgagatggtcaggtcgttgctccagatctgttcggcaggggcggctgtagtgatcg

SEQ ID NO: 79003 - DNA, 566 bp, Homo sapiens
  chr9:139847084-139847650
  hypo
gtcagcccagcccatcgctccctctgtgcgtgaggggaaacaggctcgggaaggccgcacagccactggccagggtcaccatgtccctgccagacccagagtaggctctggttcttgccagtgtccctggcgccggcccagccaggagcactgctctgtgaggggtccagaagctgccagggagggcgggagggggctcctgaccctgcccactgccacccctgcccaccgccgcccctgcccaccaccgcctctgtagttccagggggaatggttcgtcctgggcctggcgggcaacagcttcaggccggagcacagggcgctgctgaacgctttcaccgcaacttttgagctaagtgatgatggccgctttgaggtgtggaatgcgatgactcggtgagtggctgtccctgccgttccaagcgggtgaggaggatcccgggcctgggtcccagccgccagtggctcaggtgcgccatgggccctgtcccagcacaggcagcttcatgactctgcctgccaatgaccaaacccagctggggagtatacaaaaaagtgtgggcagc

SEQ ID NO: 79004 - DNA, 30 bp, Homo sapiens
  chr9:139848030-139848060
  hypo
cgcttggccactcccgccgtgggtccctct

SEQ ID NO: 79005 - DNA, 24 bp, Homo sapiens
  chr9:139856856-139856880
  hypo
caccttgcccggccctcaaattca

SEQ ID NO: 79006 - DNA, 30 bp, Homo sapiens
  chr9:139873699-139873729
  hypo
atgctgctgcagcccgcggggtccctcggc

SEQ ID NO: 79007 - DNA, 31 bp, Homo sapiens
  chr9:139885997-139886028
  hypo
cttcttccctggagatcgctctgtactgtga

SEQ ID NO: 79008 - DNA, 221 bp, Homo sapiens
  chr9:139888842-139889063
  hypo
gcaccccgccccaccccggcctgactggtttgggagcccagtccggtcctggagatccctgaggccaccggttgcaggaggcctggagtctgcgccttcttagcgtggaggatgggaccggcccgacccccggcgctcctgcccctgtggttctgggctatcgggctgagcgtcccaccctggggtttggggatgggaagtgatcccgagacctctggccc

SEQ ID NO: 79009 - DNA, 30 bp, Homo sapiens; identical to SEQ ID NO: 23847
  chr9:139902478-139902508
  hypo

SEQ ID NO: 79010 - DNA, 30 bp, Homo sapiens; identical to SEQ ID NO: 23848
  chr9:139902713-139902743
  hypo

SEQ ID NO: 79011 - DNA, 30 bp, Homo sapiens; identical to SEQ ID NO: 23849
  chr9:139903846-139903876
  hypo

SEQ ID NO: 79012 - DNA, 30 bp, Homo sapiens
  chr9:139905750-139905780
  hypo
accttcaggtcctgcggggtggccggggtc

SEQ ID NO: 79013 - DNA, 98 bp, Homo sapiens
  chr9:139906299-139906397
  hypo
tcccacacgtagttcgccagccagtagatgatggggttgcagccgctgacaaactgcaggtgcttggccttggtggacttctcggccacgaggaagac

SEQ ID NO: 79014 - DNA, 172 bp, Homo sapiens
  chr9:139909004-139909176
  hypo
ggctaaccccggggcgtcccctggcttccacccaggaccagggtggcgcccccagacaccaggcaggagtgacagcgcaggcccgagctggggccttgtgggtggggtgggctgagcaagtggtccaggcccctcaccggcctcactgttctccagcgactgatcctcctcc

SEQ ID NO: 79015 - DNA, 44 bp, Homo sapiens
  chr9:139910703-139910747
  hypo
gtcagcagatgcccaccgccctgcccctccgacactcacatggt

SEQ ID NO: 79016 - DNA, 30 bp, Homo sapiens; identical to SEQ ID NO: 23850
  chr9:139912554-139912584
  hypo

SEQ ID NO: 79017 - DNA, 30 bp, Homo sapiens; identical to SEQ ID NO: 23851
  chr9:139913421-139913451
  hypo

SEQ ID NO: 79018 - DNA, 30 bp, Homo sapiens
  chr9:139915035-139915065
  hypo
ggcacagggcagggcgccaaatgagacctc

SEQ ID NO: 79019 - DNA, 30 bp, Homo sapiens; identical to SEQ ID NO: 23852
  chr9:139915373-139915403
  hypo

SEQ ID NO: 79020 - DNA, 66 bp, Homo sapiens
  chr9:139915973-139916039
  hypo
ctctcaggcacagtgaggatccggcccagctcccccgagcccggcgtgcaggtgagctgctccagg

SEQ ID NO: 79021 - DNA, 713 bp, Homo sapiens
  chr9:139934674-139935387
  hypo
gggaggtgaaggttagcgtgcaggtgagggtggcagggcctggggtaaagttggccaggggaggtggaaatggaggtggaggtggggatggggggtgggtgggtgggggtggcagtgccggggcggccactcaccgctccaggcacagcatctgttgccgttggtgctggtagtggtacatctccgcgctctgtgccagccgctggtccccaggctgtgggaaggaggaggcgagggtcagttggcggccagagttgggcgggagcctcagggctgaagggggccacacaccgagatccggggagctgcaggtgagccaggggccttcgcagtggcgtagtcggccttctgagtcaggcggatctcacgctgcagcctgtggggagtggggcctgagacctctgagcgtgtggcaccctccctgccctgcccgcggccactggctcacctgcaccagcagagggaggctacggagagggcggctgcaccggccacacagaacgccaggatcagcactgcaggagggggcgtgtgagggcggccttctgcagggcgccctgctgcccctgcccacccccgaccaagacctaccaagggcgaggccgtcgccttgccctccccggggctccaggggcgacatgtgcaccgggtcggatgacacaggggagcccagggaggtgtggggcgtgggcgtgggggttcctggagtggag

SEQ ID NO: 79022 - DNA, 31 bp, Homo sapiens
  chr9:139945423-139945454
  hypo
actcggtagtgctggccgtagagatgcagct

SEQ ID NO: 79023 - DNA, 532 bp, Homo sapiens; identical to SEQ ID NO: 46769
  chr9:139948372-139948904
  hypo

SEQ ID NO: 79024 - DNA, 31 bp, Homo sapiens; identical to SEQ ID NO: 7141
  chr9:139964409-139964440
  hypo

SEQ ID NO: 79025 - DNA, 30 bp, Homo sapiens
  chr9:139975268-139975298
  hypo
tgcgggccggggcccgcttcctggatgccc

SEQ ID NO: 79026 - DNA, 19 bp, Homo sapiens
  chr9:139978920-139978939
  hypo
gggccggttgctggcatct

SEQ ID NO: 79027 - DNA, 30 bp, Homo sapiens
  chr9:140001715-140001745
  hypo
cttcctgccagggacgctggctctgggcgt

SEQ ID NO: 79028 - DNA, 30 bp, Homo sapiens; identical to SEQ ID NO: 23856
  chr9:140007684-140007714
  hypo

SEQ ID NO: 79029 - DNA, 159 bp, Homo sapiens; identical to SEQ ID NO: 46774
  chr9:140024611-140024770
  hypo

SEQ ID NO: 79030 - DNA, 132 bp, Homo sapiens; identical to SEQ ID NO: 46775
  chr9:140024786-140024918
  hypo

SEQ ID NO: 79031 - DNA, 74 bp, Homo sapiens; identical to SEQ ID NO: 46776
  chr9:140024956-140025030
  hypo

SEQ ID NO: 79032 - DNA, 214 bp, Homo sapiens
  chr9:140030219-140030433
  hypo
cgcccggctgggaggtgttctttctagacctcacctgggagtcacgcaccattacctctaccacgttccatttgtaagtgcaggccatgtatgcctggagggaaatcaatcttctgccgaacagggtggtgttcaaagcaccaccggctccaccacactctgccttttattctgcattctgtttcttgagaccacgcgccgctacgtggaatgg

SEQ ID NO: 79033 - DNA, 58 bp, Homo sapiens; identical to SEQ ID NO: 46777
  chr9:140033432-140033490
  hypo

SEQ ID NO: 79034 - DNA, 8 bp, Homo sapiens
  chr9:140033618-140033626
  hypo
cgtccgga

SEQ ID NO: 79035 - DNA, 296 bp, Homo sapiens; identical to SEQ ID NO: 46779
  chr9:140033762-140034058
  hypo

SEQ ID NO: 79036 - DNA, 175 bp, Homo sapiens
  chr9:140041717-140041892
  hypo
cacgtactcaggtgcgctcctcacacacacacctggacacgcacaggtgcgctcctcacacacacacctggacacacgctcaggtgcgctcctcatgtgcatgctcacccttacttgcgccagccagcacagacacacatgcacacacgcacacacgtgcacaggcacacacatg

SEQ ID NO: 79037 - DNA, 34 bp, Homo sapiens
  chr9:140078704-140078738
  hypo
agacacagagcagacacggcgaaggcacagggag

SEQ ID NO: 79038 - DNA, 88 bp, Homo sapiens
  chr9:140081899-140081987
  hypo
gcaagggcatggccatcgggacagactactcacaagacctggctgagctgatggaactgctccagagcctggcgacaccagcactgtt

SEQ ID NO: 79039 - DNA, 31 bp, Homo sapiens; identical to SEQ ID NO: 23858
  chr9:140088446-140088477
  hypo

SEQ ID NO: 79040 - DNA, 30 bp, Homo sapiens
  chr9:140096434-140096464
  hypo
cagtctgcagcagccgctagcttaatgctt

SEQ ID NO: 79041 - DNA, 1403 bp, Homo sapiens
  chr9:140107259-140108662
  hypo
caaagggctgggctccagccacgctgacgtcacacaggcctacctggcgccggtccccacttttacaaaaaggcgtgctgtgaagtgttgacgactttgagcctggaggaggaccccgtatgctcctgccaccccagaggccacctctgccttttctcctgggcattttcacagtgctcctctgcaccctaagcaaggagtggcatgttcagtgtgcaaatggcatctttagaccccacaacggtgaaaaccccgactgtccacgtagggcccaggtccgctgagcaccgagcatcaaaagccgtttgcatagccaggtgtcagtcatttcagatgaaaaagaacgggaagatcggagacagctccccccggttctgccgggaggttttgttccgtgcgtgacgtaggtccgtgcatgacgttgtttcctgcgtgacgttgttctgtgtgggacacagtgttcgttcaagagagggagggaggccgctgccgacagcgttcccagggaggagcgtgacccagagccagtcatgcctcggaaccagagtgagaagagaaactgacccccgggaagatgcctggctctctccccagcacagagtttctcagctgaggagtgacccacatcttggctgggggcctggaggcctcagctgcctcaagtccctgcccagggatgagggcccatcagtgggacgaggccgcctgctcccacccacacaggctcattctctgcgagcagaggacctgctgcttggcaccctggcagctgccctggtctcggcagcccctggcgtgtggaggccctgccccctcctagggtgcggccagcgtggagtgtgttttccacccgagggaggccctccccaggctccactcttcgcccgggctccactctcccgggttccactctgcctgggcaccactctccgcccgggctccagcccaggaccagcctcactgtctccacaggttcaacttcgtggccaagaagctgcaccgacggctactgcagcttgggggcagcgccctcctgcccgtgtgcctgggcgatgaccagcatgagctggggtgagtctgcgggcgtggtacccgcctccacagtctggtctggccacacgcagggtccgctcaggccagcgcacgtgctccctcccaggcccgacgctgctgtggacccctggctgcgagacttgtgggacagggttctggggctgtacccgccgcctccgggcctcactgagatccctcccggagtcccgtgagtgtgggccccgggtcacccacaggcgcagcagacccaacctggcctggggacctcgccctgggtccctcccgtgtgggtgggcggcccctggggagtgggtcctggtctgaccagcgtgccctcccacagcctgccc

SEQ ID NO: 79042 - DNA, 136 bp, Homo sapiens; identical to SEQ ID NO: 23860
  chr9:140111067-140111203
  hypo

SEQ ID NO: 79043 - DNA, 121 bp, Homo sapiens
  chr9:140112977-140113098
  hypo
tggggctgctgctggtcttcacgccgctcctgctgctgggactgctcttcgtgctcctggaccgctctggccgctgagcagagcccaggacagccccgccgccaacaggccagggggccca

SEQ ID NO: 79044 - DNA, 31 bp, Homo sapiens; identical to SEQ ID NO: 23861
  chr9:140120570-140120601
  hypo

SEQ ID NO: 79045 - DNA, 31 bp, Homo sapiens
  chr9:140124090-140124121
  hypo
cactgtgtgtcgggtgcggttctgggagggt

SEQ ID NO: 79046 - DNA, 278 bp, Homo sapiens
  chr9:140133506-140133784
  hypo
ggcaaactggcaacagacccccgaggagtgagcacagctgcaggccctcgccccagaaggacaatgctgatccccgcgcatgctccggtgctgcgtgtcccgagttctggtatcgcgcattatgtggtgaagacagaggtgcagtccctccaggaagagagaaataaataagcagatgttgtttccaacagcctccaattgggagacagatgcccagtggccagagcacaggagactgtcagggccgacctgatggtgtaatttatttaaaatgctac

SEQ ID NO: 79047 - DNA, 181 bp, Homo sapiens
  chr9:140137587-140137768
  hypo
ccatggccgctacctgacggttgccgccgtgttcaggggccgcatgtccatgaaggaggtggatgagcaaatgcttaatgtccaaaacaaaaacagcagctattttgttgagtggatccccaacaatgtgaaaacggctgtctgtgacatcccacctcgggggctaaaaatgtccgccacc

SEQ ID NO: 79048 - DNA, 52 bp, Homo sapiens
  chr9:140137947-140137999
  hypo
ggatgccacagccgaggaggagggcgagttcgaggaggaggctgaggaggag

SEQ ID NO: 79049 - DNA, 169 bp, Homo sapiens
  chr9:140157483-140157652
  hypo
tgcaggtggtgcagcggctgacgcggatggtggggaagaacgtgaagctgtacgacatggtgctgcagtttctgcgcacgctcttcctgcgcacgcggaatgtgcactactgcacgctgcgggctgagctgctcatgtccctgcacgacctggacgtgggtgaaatctg

SEQ ID NO: 79050 - DNA, 30 bp, Homo sapiens
  chr9:140166591-140166621
  hypo
cttgcgctgctggccgacgaatttgccctt

SEQ ID NO: 79051 - DNA, 646 bp, Homo sapiens
  chr9:140166924-140167570
  hypo
gcctcctgccccagccctgcacggccttttccaggaaggagaacgtgcaccggcacgcgctgcggctcctcattcacctgcaccccagggtggccccgtctaagctggaggcgttgcagaaggccctggagcctacaggccaggtgggtgcccgggggggctgcatctgaaggcacctggtccctaccagcccgtgtgtgcttgccaagctgcccttgtggtgcttgtgtgtggtcggtgggcacccacccctgtgccccctgggcctgcccatgcgcctcgcctgccccatggtgtggttccccgcagagcggagaggcagtgaaggagctttactcccagctcggcgagaagctggaacagctggatcaccggaagcccagcccggcacaggctgcggagacgccggccctggagctgcccctccccagcgtgcccgcccctgccccgctctgagggccctccagacctgctcgggtgctggggccatgccgagtcgcggccctgctcagccggaagaggctcccggacctggatgtacagggcagtctctcttcccggggctatggctgggcctgtcctgccgtcatggccccctgcttcctgctccttggagctggctcccggaccttgcccaccatccatg

SEQ ID NO: 79052 - DNA, 18 bp, Homo sapiens
  chr9:140176951-140176969
  hypo
ctctttttatttattcct

SEQ ID NO: 79053 - DNA, 838 bp, Homo sapiens; identical to SEQ ID NO: 46786
  chr9:140195551-140196389
  hypo

SEQ ID NO: 79054 - DNA, 427 bp, Homo sapiens; identical to SEQ ID NO: 46787
  chr9:140196990-140197417
  hypo

SEQ ID NO: 79055 - DNA, 31 bp, Homo sapiens; identical to SEQ ID NO: 23868
  chr9:140198309-140198340
  hypo

SEQ ID NO: 79056 - DNA, 201 bp, Homo sapiens; identical to SEQ ID NO: 23869
  chr9:140216161-140216362
  hypo

SEQ ID NO: 79057 - DNA, 33 bp, Homo sapiens
  chr9:140216845-140216878
  hypo
caacatctcaccccagacccacgagggatgctc

SEQ ID NO: 79058 - DNA, 186 bp, Homo sapiens
  chr9:140243516-140243702
  hypo
ttccccaagaatgctgacaaacggaccctgcggggcttcacccacctgcctgggtgcggccggtgctgacgctttctgcaggccgggtggcttccgtgcccctggtctctctctgtgcctgggcctccggctcccagccaggtcctccgacaggtggaagcgggcgggctctctgcacagggcttg

SEQ ID NO: 79059 - DNA, 31 bp, Homo sapiens
  chr9:140244415-140244446
  hypo
tgtgtgtctggggtggcgtgtgtgcccagag

SEQ ID NO: 79060 - DNA, 31 bp, Homo sapiens; identical to SEQ ID NO: 23870
  chr9:140260841-140260872
  hypo

SEQ ID NO: 79061 - DNA, 30 bp, Homo sapiens
  chr9:140261956-140261986
  hypo
agacactgtgggttcgaggactgtgtcatc

SEQ ID NO: 79062 - DNA, 88 bp, Homo sapiens
  chr9:140263677-140263765
  hypo
ctgggaggtgggcttacggctgtgagcatgggcgcaggggccaccacatggggaccaccccagcagtgacacccgcagcttcacacaa

SEQ ID NO: 79063 - DNA, 757 bp, Homo sapiens
  chr9:140265349-140266106
  hypo
cccagggccagccgctgccctcgacatgaaatatcgcagcacattgagtcgtgagtcccagctaatccgagcggacaggcctgaatgcggcctctttcggccgggcgcggcggtgagcagtggagcatgcatcgcctgccgggcggccccgctcggggacaatggctttcttcgcagaaggggcctgtgcgggacaagaccccctttgtgtggggattcctgcctcggagcgcgagggaggcgcattcagccggccccagacagtctttgaaaggctctgtaacagaagacggcccgaaacactagcctgccttctgcctccctgcactctccgcaggcacggccgccattcagcgtcgcgccacatgagggggaccctccatcctgcattgtcctgtgccgggacatggtggcttctcagcgccatgcacccgccgcgagacgacggccccgggcgtggcaggtgacagcgccaggggtggggcccgcgcggcccacacaggggacactcctgtgagggcccggccagggcagcccccgatgcccgtgcccaggttccaatgcacctcctcacggtgaggggtcttgctgggaagaggaacccagggtgccatcgggacggcgtctcagcagcagggtcccacgtgggcaggcagcggggtggtggccttcacgctcggccctgaagtaagggggccctaatggggcggggagtggaccagtgcccctgagtgccggcctcctcatacatgatcag

SEQ ID NO: 79064 - DNA, 30 bp, Homo sapiens
  chr9:140267369-140267399
  hypo
ccctcgtggtggaggcggtggacgtgtgcc

SEQ ID NO: 79065 - DNA, 426 bp, Homo sapiens; identical to SEQ ID NO: 23872
  chr9:140267956-140268382
  hypo

SEQ ID NO: 79066 - DNA, 30 bp, Homo sapiens
  chr9:140268624-140268654
  hypo
gcaagtgagtcaaccgctatagacttcaag

SEQ ID NO: 79067 - DNA, 31 bp, Homo sapiens
  chr9:140269908-140269939
  hypo
cgagttctaactctagcgagttctaggtcta

SEQ ID NO: 79068 - DNA, 152 bp, Homo sapiens
  chr9:140290858-140291010
  hypo
caaagctcagcatgtgaactccgaatcctaacacaggcgtgcaggagagagctgtgccgccctcccccaggcagccctcacggtggccattcccggggagacggacctgtgtgtgtttctcagccacacgcggcacagtcacttagaggcct

SEQ ID NO: 79069 - DNA, 30 bp, Homo sapiens
  chr9:140304116-140304146
  hypo
actgagaatggaaacggctggcaaggattc

SEQ ID NO: 79070 - DNA, 42 bp, Homo sapiens
  chr9:140327519-140327561
  hypo
tccccaggtatgggcgtcctcagcggcggggtccccgggtga

SEQ ID NO: 79071 - DNA, 343 bp, Homo sapiens
  chr9:140328417-140328760
  hypo
gagccgggggtcggccggtcctctaccaggtggtggcccagcacagctactccgcccaggggccagaggacctgggcttccgacagggggacacggtggacgtcctgtgtgaaggtagggtgggcatggcccttcccaggcagcaccgtggtgcccggggtgtggggggcttagagctcggcctgtgctgtgagcagacgtggcacccagaggccacgcctgggtaacgccctgcagagcccgatgtcccccttgcagtggaccaggcatggctggagggccactgtgacggccgcatcggcatcttccccaagtgcttcgtggtccccgccggccctcggat

SEQ ID NO: 79072 - DNA, 30 bp, Homo sapiens; identical to SEQ ID NO: 23874
  chr9:140333124-140333154
  hypo

SEQ ID NO: 79073 - DNA, 30 bp, Homo sapiens
  chr9:140343310-140343340
  hypo
gctgggcagcccggcgacgctggccccacg

SEQ ID NO: 79074 - DNA, 488 bp, Homo sapiens
  chr9:140351845-140352333
  hypo
acaaacccctcaccagacacacggtcaacgctgtacatcctctccagcttcttgcggcgaccggaggtctcaggcagaggtggctggtccagcccaaaggcccgaggggtggggccaggagccagctgggcacatccggggcactccttggagccctggcggctgcccgcccagctctggcagggcctgctgacgtcctcccggctgccaccagggctggcgcgcaggggctggctgtgatggtgagggtgccgctgccgccgccccttcaccaccgccagctcaatggcctccgcctcagggctgggcagcagggcaggctccccagagatggtgtacactcgaggctgagggccctcgcctgcgggcttcctaatgctgggctcctctgagaggctgccctcgtagcagccgttggagacgagggacaggcggcgcttgttctggggggccggctgcatctcgggggacccgtcgtggccagagta

SEQ ID NO: 79075 - DNA, 185 bp, Homo sapiens
  chr9:140355148-140355333
  hypo
cagcagctcctcctcgtactccgtctggtagtcagattcgtctggcaccgagggtagggctgcgtcagtcccctcccaaggaagggaccgtacccagcatagccacactcagaggcagaaccggccacagatgcccacccccgcctccaaggtggcccggggccctacacgcagccacctggtcc

SEQ ID NO: 79076 - DNA, 30 bp, Homo sapiens
  chr9:140357691-140357721
  hypo
cgtgtgcatgttctcggagctctgatgcca

SEQ ID NO: 79077 - DNA, 168 bp, Homo sapiens
  chr9:140359324-140359492
  hypo
cagtggattgctttcgggaaggtcagagccacccagccctggctcacatgccactgcggtactccatcaggggtcccggggaagccgggctctcttgggttccttctgggtgggcctggggcccatccttcctcagtgaggcaggcaggactcgagactgacctcaaa

SEQ ID NO: 79078 - DNA, 31 bp, Homo sapiens
  chr9:140361288-140361319
  hypo
tccatcacctcagacccgggcacggatcaga

SEQ ID NO: 79079 - DNA, 31 bp, Homo sapiens
  chr9:140373388-140373419
  hypo
aggaagggcccaggagcgcaggtgtcaggga

SEQ ID NO: 79080 - DNA, 31 bp, Homo sapiens
  chr9:140375091-140375122
  hypo
agggcctaggcagtcacgcagaggctgcagt

SEQ ID NO: 79081 - DNA, 30 bp, Homo sapiens
  chr9:140375565-140375595
  hypo
gagccaggcaccgacgcccagccaggcacc

SEQ ID NO: 79082 - DNA, 31 bp, Homo sapiens
  chr9:140378940-140378971
  hypo
caccgccgcgtcccctcgaagacagagggca

SEQ ID NO: 79083 - DNA, 410 bp, Homo sapiens; identical to SEQ ID NO: 23877
  chr9:140379672-140380082
  hypo

SEQ ID NO: 79084 - DNA, 30 bp, Homo sapiens; identical to SEQ ID NO: 23878
  chr9:140380752-140380782
  hypo

SEQ ID NO: 79085 - DNA, 387 bp, Homo sapiens
  chr9:140382337-140382724
  hypo
atcaccttcaccgcacgcacttcagcccctcactgcagctgagccttggccacacgggaggagcgggggactcaggcccagatgatgtgtctccgcctctaggcgctgagtggaaggcaggtggcttctataatcaggaggaaataactcccagatagcaaacaaacaatgcacacacacaccaaagtgctgctgagcacagaaagacggagaaccgcctcctcatcctgagcttcggcctgaacgctgctctcgtggtctgatgtctcgtcccgagcttcacttgcagtctgatgtctcgtcccgagcttcggcccgaacgcggctctcgcggtctgatgtctcgtcccgagcttcggcccgaacgtggctctctgatgtggattt

SEQ ID NO: 79086 - DNA, 677 bp, Homo sapiens
  chr9:140388965-140389642
  hypo
atggcctgtgccaccctcacccgcaccaccctcacccgcgccctcacctgctctgcgccctcacctgctccgcaccctcacctgcgccctgccctcacctgctccgtgacctcatccactccgcaccctcacctgctccgcgccctcacctgtgccctgccctcacctgctccatgacctcatccactctgtgccttcacctgctctgcgccctcaccagctccgcaccctcacctgcgccctgccctcacctgctccgtgacctcatccactccgcaccctcacctgcgccctgccctcacctgctccgtgacctcatccactctgcaccctcacctgcgccctgccctcacctgctccgtgacctcatccactccgcgccttcacctgctctgcgctctcacctgctccgcgccctcacctgctctgtgccctcacccgctccgccctcacctgttccatgccctcatccactccacaccctcatccgctccgcatcctcacccacgccatgctcacctgtgggtacctgcgcttgatggacgtgagggctcctgccggcagcttggccaattctgagtcccgaacggcatgcaccgtggtcgcccgggcctggtgggtcagtgtctccacctgaggacaggagccggctgctggggccgcgggcttgggagggc

SEQ ID NO: 79087 - DNA, 30 bp, Homo sapiens
  chr9:140391465-140391495
  hypo
atggaggcagagcccggggctcacagcaaa

SEQ ID NO: 79088 - DNA, 30 bp, Homo sapiens; identical to SEQ ID NO: 23880
  chr9:140394124-140394154
  hypo

SEQ ID NO: 79089 - DNA, 501 bp, Homo sapiens
  chr9:140396596-140397097
  hypo
gctcccagaggtgacccgggagtgcccaacacactggaacccagaaggcagaggttgcagtggacccggagcctgtggagaggccctggggcaaaccaagggtgagggagcgtctgcgggcaccacacccacgaaggtttgaaacatcaggtgtgtaaacccccagtccacagtgatgatgaaataaaaataagaagccccacccagcatctttggaaaatgatcgaaaaacaaaccattaaacttcccaaaccctgacggtgaagggggtgaaggcagctcccccccaaaagagaaatgacatcacatgtcgccaaaagtttgtcaaacaggagggagaaagagatggaggaggatgagaagaatctgagcagccacatatccagctctcaggcagaggacggccgctgacggagaggccgcatcgccccagggcgcgttgtcagcccgaggaggagccgtgggaggttcttcaggagaagaaagcggcctccctgagga

SEQ ID NO: 79090 - DNA, 179 bp, Homo sapiens
  chr9:140400332-140400511
  hypo
ggtgccacatgacaccaaagccggcggcgcccccaatgcaccagcaagccacggagagggtggggccccaggcggagggtgagaatgacagccagggcctaccttgctggccacggagctcccggggtgctcgtccgagtgcaggaagaccctggcacggtcacatgccatccccagat

SEQ ID NO: 79091 - DNA, 224 bp, Homo sapiens
  chr9:140401367-140401591
  hypo
cacccatttctcagcggaatacagaggaaccgcgcagacactaaccgcagacacatgccacacagatgccgcagccacatggcgctgcgggaaggaaccaggcccaggagcacagccatgtgcccctccctgggaagccagacacagagagccaggagcgctgggccttggaaaggggcgcatgtctccgaggcttacgctgagggtgcgctggtcgggtttca

SEQ ID NO: 79092 - DNA, 31 bp, Homo sapiens; identical to SEQ ID NO: 23884
  chr9:140416957-140416988
  hypo

SEQ ID NO: 79093 - DNA, 30 bp, Homo sapiens
  chr9:140417840-140417870
  hypo
acagtggctcaccgcgtggatgtggccagc

SEQ ID NO: 79094 - DNA, 38 bp, Homo sapiens
  chr9:140418787-140418825
  hypo
agtcgagattcccccacggtggcgcgtctgccagaggc

SEQ ID NO: 79095 - DNA, 674 bp, Homo sapiens; identical to SEQ ID NO: 46790
  chr9:140445801-140446475
  hypo

SEQ ID NO: 79096 - DNA, 30 bp, Homo sapiens
  chr9:140469093-140469123
  hypo
ctgaggagcacagtcgcagctcgctgaagg

SEQ ID NO: 79097 - DNA, 123 bp, Homo sapiens; identical to SEQ ID NO: 46791
  chr9:140473436-140473559
  hypo

SEQ ID NO: 79098 - DNA, 30 bp, Homo sapiens; identical to SEQ ID NO: 23887
  chr9:140481483-140481513
  hypo

SEQ ID NO: 79099 - DNA, 30 bp, Homo sapiens; identical to SEQ ID NO: 23888
  chr9:140483462-140483492
  hypo

SEQ ID NO: 79100 - DNA, 82 bp, Homo sapiens
  chr9:140487907-140487989
  hypo
ttgttctcagcttctagaggtcgctcacatcttcaaaaccagcaagactttcttttctttttagacagagtctggcttcgtc

SEQ ID NO: 79101 - DNA, 31 bp, Homo sapiens
  chr9:140507427-140507458
  hypo
ttcaacagttccctgtcgctggcagacaagg

SEQ ID NO: 79102 - DNA, 31 bp, Homo sapiens; identical to SEQ ID NO: 23890
  chr9:140538197-140538228
  hypo

SEQ ID NO: 79103 - DNA, 21 bp, Homo sapiens
  chr9:140539609-140539630
  hypo
ccgccacggcctgcttattta

SEQ ID NO: 79104 - DNA, 30 bp, Homo sapiens
  chr9:140540204-140540234
  hypo
gtggctgcagccccacgtgggcctcagacc

SEQ ID NO: 79105 - DNA, 43 bp, Homo sapiens; identical to SEQ ID NO: 23891
  chr9:140576166-140576209
  hypo

SEQ ID NO: 79106 - DNA, 31 bp, Homo sapiens; identical to SEQ ID NO: 23892
  chr9:140576695-140576726
  hypo

SEQ ID NO: 79107 - DNA, 175 bp, Homo sapiens; identical to SEQ ID NO: 23893
  chr9:140577313-140577488
  hypo

SEQ ID NO: 79108 - DNA, 701 bp, Homo sapiens; identical to SEQ ID NO: 23894
  chr9:140587005-140587706
  hypo

SEQ ID NO: 79109 - DNA, 30 bp, Homo sapiens; identical to SEQ ID NO: 23895
  chr9:140587996-140588026
  hypo

SEQ ID NO: 79110 - DNA, 21 bp, Homo sapiens
  chr9:140588505-140588526
  hypo
acacagtggctcaggacgctg

SEQ ID NO: 79111 - DNA, 80 bp, Homo sapiens; identical to SEQ ID NO: 23897
  chr9:140588765-140588845
  hypo

SEQ ID NO: 79112 - DNA, 191 bp, Homo sapiens
  chr9:140592431-140592622
  hypo
ctgttgtgagggcagcgtgtgagggcggtgtggctcgcggaggcctcaatccccactgtcgtgagggcagcgtgtgagggcggcgtggctcgcggaggcctcactccctggctttcactccagcctcctggtagcatgcagagacacagtgtggaaacggaggccactgtcacaagcgctgaggaggatca

SEQ ID NO: 79113 - DNA, 545 bp, Homo sapiens
  chr9:140606072-140606617
  hypo
gcagggtgaggggagttggggcgaggggagtcggcggggctgcacccctctgtaaggcgtggcgcacacatagggttcggatgttcttggagagcctgcaccaccaagagcgcccccaggaaatgagggcaggtggcgccagacgagctgtgctgtgctccacagtgaagggagagtggtgttctggctggacccataagggtggcggccgtgggagcagctcagacactggacttgcctaaggctctcccagctggagcctgctcctctccagacagcgcgcaaggcctggctcctcatggactgtgggctgtggcccctgccgtgttctcctttcaccctagatggcctcgctgtgcctgtgggttctcgtccacccactggctgtgcactgtggtgaccgctgcccgcctctgccgctacccctagccggccctccagggttgcccccacctcctgcgccatccacctcctgcagcctgactgggtgttttcttcctgtactttggccccttcctgttgccgtcctttctgtgtctttgaac

SEQ ID NO: 79114 - DNA, 284 bp, Homo sapiens; identical to SEQ ID NO: 23900
  chr9:140611159-140611443
  hypo

SEQ ID NO: 79115 - DNA, 152 bp, Homo sapiens
  chr9:140612586-140612738
  hypo
gcgcctgcccctcacacgcaccgtgctgattttcacacacagggcgcgcccgcccctcacgcgcaccgtgctgattttcacacacagggcacgcgtgcttctcacacatgctgtgctggactgatcaccagatcttacgtggtgcatacacg

SEQ ID NO: 79116 - DNA, 509 bp, Homo sapiens; identical to SEQ ID NO: 23901
  chr9:140615062-140615571
  hypo

SEQ ID NO: 79117 - DNA, 31 bp, Homo sapiens; identical to SEQ ID NO: 23902
  chr9:140620042-140620073
  hypo

SEQ ID NO: 79118 - DNA, 135 bp, Homo sapiens; identical to SEQ ID NO: 23903
  chr9:140620769-140620904
  hypo

SEQ ID NO: 79119 - DNA, 329 bp, Homo sapiens
  chr9:140622679-140623008
  hypo
ttgtatctcatctttcggttgtggggaattatcggggagaagaactgtgattttggttgcatgttatttcagtgaccacctgcttatgcagttatagttattcactgtctttgttttgaagcatgcagccagtaaagatcccagagaagttcgagaagctagagatcataaggaaccaaaagaggagatcaacaaaaacatttctgactttggacgacagcagcttttaccccccttcccatcccttcatcagtcgctacctcagaaccagtgctacatggccaccacaaaatcacagacaggtaaagaggacccggcaactgtctctg

SEQ ID NO: 79120 - DNA, 258 bp, Homo sapiens; identical to SEQ ID NO: 23905
  chr9:140623352-140623610
  hypo

SEQ ID NO: 79121 - DNA, 41 bp, Homo sapiens
  chr9:140633523-140633564
  hypo
gtaaaaaaaaaaaaaacaggccgggcgcggtggctcatgcc

SEQ ID NO: 79122 - DNA, 154 bp, Homo sapiens; identical to SEQ ID NO: 23906
  chr9:140645281-140645435
  hypo

SEQ ID NO: 79123 - DNA, 181 bp, Homo sapiens; identical to SEQ ID NO: 23907
  chr9:140647979-140648160
  hypo

SEQ ID NO: 79124 - DNA, 30 bp, Homo sapiens; identical to SEQ ID NO: 23908
  chr9:140652670-140652700
  hypo

SEQ ID NO: 79125 - DNA, 675 bp, Homo sapiens
  chr9:140653936-140654611
  hypo
ctgtctctggtgaggtcgggggaaggtagctctaaaggaaggatggtgccgagcatcagggccaaagggcgagagccaacacaaagccggaggagaaatggcagggagtagaggctcctcagcttgtgtgacattttgtaaactgcctcccagaattgatttccctgtgtttgatcagcgccgattggtcagtcagcgattggcctgttcagtcatgctcttgatgtagatcatcagtgtgtagaagagacaggcggtgcgcccactgtgctggtgctggccgtgtggcccgggaccccagagggaggcagtggtcaagtggcgctggatggcgtctggggctctgggagacctgggtggtgtgtgtttcagatgggacaggcgccatcggcctgtggagtgtgctgagcgggtcagtgggggcaggtgatgccgctggttgtgggtcagggggtccaggcttgagccttgggccaaggagaatatgaagatgagaagtcctctccgtatgcattcgtctctttccccgttgccttgctcttgggcctgccttattgaggctgaatggcgatgtcacccagcagcaacaggaggcagagggtctgagcctgggaggggccaggagtcggtaaccatggcaacgtgggctagggcgggagaggcagagcttggcgg

SEQ ID NO: 79126 - DNA, 404 bp, Homo sapiens
  chr9:140657348-140657752
  hypo
cccctcgagtgagttgtgctgcgtgaccagggcgggagcctgagtggattctgcgcagaaccaatcgagcagatcccaacagtgaaatcacggcagatgatgaaacacaggtctagagcttgttaaaaaggaggactgtgtagacaaagtctttgaatgaaaatggcctgttgtatttcttttttatgatcatggttttgtcaaggtttttcctaccttgctataaacaaagtgagtagattgaggcaggatagtcacaccaaggtgagtccagaactgcccagaactgtggtttcctgcagggcaggccccgcaagggccgggcctcggccacctccctcctttcaccggggatcacagactcagagggttcagcacgtcccgtctctgctgcctctgggaca

SEQ ID NO: 79127 - DNA, 325 bp, Homo sapiens
  chr9:140658421-140658746
  hypo
ctggtgcctgttggcgtggccggggtttctgattcagcaggtctggcctggctgggattttgcttttctaaagtgttccccgtttctcctgatgcttctggtccagggaccacactttgagaaccactggttcgcctcctcttctccttctccgtaggtgttaaacaggatccagtggagtcagatccccgtgtgacacgtgcttccctgtgacttttctctctgtatctccacgtttccggtgcacatgcctttactcagactccgacactggcgttgcttttgtctcatcccagctaggcgacgtctgcgtcagcgcctctca

SEQ ID NO: 79128 - DNA, 91 bp, Homo sapiens
  chr9:140659466-140659557
  hypo
ctgtggaggttcgtgcgctgggagcggtgctgagaaggctctgggtttctgcggcggccgcctgtccgcccgaaggcggtattgtccttgg

SEQ ID NO: 79129 - DNA, 24 bp, Homo sapiens
  chr9:140664574-140664598
  hypo
cactgtgcccggcccactttattt

SEQ ID NO: 79130 - DNA, 30 bp, Homo sapiens
  chr9:140664818-140664848
  hypo
agcgttttacgctgacgttcttgaaattcc

SEQ ID NO: 79131 - DNA, 30 bp, Homo sapiens
  chr9:140673921-140673951
  hypo
gggcagacgtctgccgggccttccagcctt

SEQ ID NO: 79132 - DNA, 30 bp, Homo sapiens
  chr9:140675914-140675944
  hypo
atgtgtggtcatgacgctggaatgtgtggt

SEQ ID NO: 79133 - DNA, 311 bp, Homo sapiens
  chr9:140680231-140680542
  hypo
ccccgtgagacacagcgttgctggctccctggacacctggtggacgcctgggtgccctccccgggaacagcagccgttttggtctcaccgccctgcaagtgcctcgcatagcagggttccgtttgtttgcttttaacctttatgctaactgagttgtccagcgtgagttcctttgtgtctgcttccgtcagtcaggaaaacaagggagtgtagaaaagggacatggctgtggggctgagtggcctggccctgccagggctccctgctgactgcctgtgctctgtgcttgtctgaaacgtcgtctttgggga

SEQ ID NO: 79134 - DNA, 223 bp, Homo sapiens
  chr9:140682706-140682929
  hypo
catgctgaagccattgctgggcggtggcagatgaccgagcggctggtaggactggcatgcagcactcagggggcccaggacgttggcgaaggctccacccgcaccgccttctgccagcgcctcagccggggtgacgctcacgcaggtgtaaggaggttgcaggtttagggatcttgtaggtgaaaggaggttgcaggcgtacggaggttgcaggtgtagggag

SEQ ID NO: 79135 - DNA, 30 bp, Homo sapiens
  chr9:140684827-140684857
  hypo
aatggaaactgttccggaatgcatgctact

SEQ ID NO: 79136 - DNA, 30 bp, Homo sapiens
  chr9:140691321-140691351
  hypo
aaaagactgacggggcgggacatagagcag

SEQ ID NO: 79137 - DNA, 107 bp, Homo sapiens
  chr9:140691708-140691815
  hypo
ccttacctgcagccccgctctttgccaccttcacgtctattcccacggggttcctttggctgactctcaatcccctcaccccaccactctgccgctcccagccctgc

SEQ ID NO: 79138 - DNA, 243 bp, Homo sapiens
  chr9:140692172-140692415
  hypo
gtgcagtgatgcctgcgaaactctatgactgctacacggactccaccgagataaggggagaaaggtaatgaaggaacatggttaagtggagacaggaacaggggagcaaagcaaagcaaacacctgaagggagacggtggtggagtgcgtctgcgggcctgtgtgaggagcacaggcaggaagaaccctgtgtaaggcgtgtggatggcacagcggtgtgggcggcaccggctcccctgcctc

SEQ ID NO: 79139 - DNA, 27 bp, Homo sapiens
  chr9:140703099-140703126
  hypo
tctcaaaaatgtaattctgggcggggg

SEQ ID NO: 79140 - DNA, 26 bp, Homo sapiens
  chr9:140703365-140703391
  hypo
actccgcctctaaaaaaaaataaaaa

SEQ ID NO: 79141 - DNA, 622 bp, Homo sapiens; identical to SEQ ID NO: 46793
  chr9:140703837-140704459
  hypo

SEQ ID NO: 79142 - DNA, 102 bp, Homo sapiens; identical to SEQ ID NO: 23915
  chr9:140704675-140704777
  hypo

SEQ ID NO: 79143 - DNA, 30 bp, Homo sapiens; identical to SEQ ID NO: 46794
  chr9:140704853-140704883
  hypo

SEQ ID NO: 79144 - DNA, 30 bp, Homo sapiens; identical to SEQ ID NO: 23916
  chr9:140705975-140706005
  hypo

SEQ ID NO: 79145 - DNA, 609 bp, Homo sapiens
  chr9:140707363-140707972
  hypo
attgttagtgatgacggacattttataaatctcatctgtatcacattttcaagtcagctttaaatgttttgtggccttacattttcccttttagcctctttctttctcgggattcagatgtcaccttaaagaacaaggaaggagagacgcccctgcagtgtgcgagcctcaactctcaggtgtggagcgctctgcagatgagcaaggctctgcaggactcggcccccgacaggcccagccccgtggagaggatagtgagcaggtgagcccagccccaggacggctttgtggcaaatcagcggtcagcagggctttgggaacttgcggtgaaagctgctcctgaagccgaaacatccccaggctgcagtccaaattgtcagggccaggtgtttgccagccgccccactgcacgctgtgccaccccctgggcagagcacgtcagccaccaggtgacacctgtcctttccatggcagggacatcgctcgaggctacgagcgcatccccatcccctgtgtcaacgccgtggacagcgagccatgccccagcaactacaagtacgtctctcagaactgcgtgacgtcccccatgaacatcgacagaaatatcac

SEQ ID NO: 79146 - DNA, 982 bp, Homo sapiens
  chr9:140708199-140709181
  hypo
ccaaggcttcttaccgacccaaagcagtggcaggcatctttgtgccttttttgtaacctcacactcaggggccccggtgtggcttcgtgctgggggcacaggcgagaggagcccttgcgaggcctgcaggacgacctggatccctgcacctcccagcccccggagagatgggtccagcacatgccagctttcccagcctccgagtgcatgcagcctggtgccctcactgcttgcgccttctcgagcactttccttgtggctctgcttgtgggcagctccctcctcttcccaggccgggcactgcccaggcccccccccccccccgccccccgccccacaaggtgtgtcaggctctgtgttcttgcctttcccatcgagcatctggccacaaatgcagccgccgcccagcccttcacccaccccacgtcacccactgccgcgtcgctgccctgcctgccccctgtccctctgtcagggtcctcagccagagctccctcccacaggcactcgacatgtttctgcctgcacagccttctccctaagaggccacacactcacgtggtgcctttgagaagcacttaccagaatcagggttaacagaactggaagacgtagttgtgactgggaggggaaatggaaggcctgtgcctgcacgtctgaccccccggcgcctctcttctcagtactgcgtgtgcatcgacgactgctcctccagcaactgcatgtgcggccagctcagcatgcgctgctggtacgacaaggtgagggcggcctcgtgtgcgtgggctcaggtggtaagtgccgctggtccgggtctgcaaaaacagtgcaggcgtctgtgaccccagcgctgtcgtggcagcgtcgggaaggagttggaggtgagctgggtgtgacaggcaggggaggcacagcgggcaccagcacccgagtcagggtcgtgagccgaggacatggctgcggattccctggggctggggtc

SEQ ID NO: 79147 - DNA, 467 bp, Homo sapiens
  chr9:140709435-140709902
  hypo
ctgctgaggaggagacgggagtggggagtagccctggctagcaggggtgcaattcaggggagggatgtctaagcagaggcggagagttcctggtctcccgagttcagaggtcacggtgggggcggaagccagcatggcctgggtaaagagacgcgagcagggagaggcaacaggcgtcccctctggaagcagactttggaggagagtggacatggagggtcaagtgtttacccatctgaattagaggctccaatgggaaaaggattcgtgccagtgagggctatggagatggtacgctcagaaagccaccaagctcatgtccgagtggtgtcttttcaggtggacagtgttgctgagggggcgcaggaaggaatgttctgaggagcgccctaattgttcagagcagcccctgaagccgtcaagccagagtgtgcctgggcagccctgggccccgcgcctcagctcac

SEQ ID NO: 79148 - DNA, 30 bp, Homo sapiens
  chr9:140715047-140715077
  hypo
catgtttgctttcacgtggcttccatgtgt

SEQ ID NO: 79149 - DNA, 106 bp, Homo sapiens
  chr9:140723473-140723579
  hypo
tgtctgtacagagcccgggtggggcatccaggcaccacggggaggcccccgccctggtctcacagacgttgccactggagctcgtgccgtgcgcccactgccacca

SEQ ID NO: 79150 - DNA, 30 bp, Homo sapiens
  chr9:140724249-140724279
  hypo
agggctgaggtttggcgacactcacaccgg

SEQ ID NO: 79151 - DNA, 528 bp, Homo sapiens
  chr9:140727425-140727953
  hypo
gtaaaccaggaggcagcttcccgcgcctttggctttgggggctgtggctggtcctgtcctgcggccgtgctcgcctggtttactgtcttgtcactgcccgcgccgtgaaggttgacggagagctgctctcgtccacgcctttacccgcttgttggtttgggttttaacctcttgacctctgagcgtccctggctctctggttaatgttcatgctggggcaggttgtggaccaggtgtctctgccggcaggccccgccctctcggaactcggtcctggaaagccccaggtgcctccttccccgtctgcctggctgtcgtctgtggtgttgcctcttcccgtcgctgggtaacaaaccacgccacccacccgcagctcgccatggcggccacccactcggcccagtgtgcgcagcaggggttgggcgtgccgggcctcgggctgcacaggcagggtgctgctgagcccaggtccctgtggttgcgtgggcagcgtctaggttccttgctagctgccggccgggaccacct

SEQ ID NO: 79152 - DNA, 31 bp, Homo sapiens; identical to SEQ ID NO: 23921
  chr9:140728257-140728288
  hypo

SEQ ID NO: 79153 - DNA, 137 bp, Homo sapiens
  chr9:140731430-140731567
  hypo
gtgggctgggttcccgccaagcccgggctcaggagggtgtaggggtcgcaggtcacctcatcccagaggcagtggcaggaggtgactgagggcccactggagcttgaacctcaggctctgccggctccaccagccct

SEQ ID NO: 79154 - DNA, 544 bp, Homo sapiens; identical to SEQ ID NO: 46795
  chr9:140772859-140773403
  hypo

SEQ ID NO: 79155 - DNA, 31 bp, Homo sapiens
  chr9:140852045-140852076
  hypo
gcagtgctgaagagagcggccaccaagaaga

SEQ ID NO: 79156 - DNA, 30 bp, Homo sapiens; identical to SEQ ID NO: 7156
  chr9:140876711-140876741
  hypo

SEQ ID NO: 79157 - DNA, 31 bp, Homo sapiens
  chr9:140938683-140938714
  hypo
gcacctgtgttgcctgcgtgtgtgcactgtg

SEQ ID NO: 79158 - DNA, 31 bp, Homo sapiens
  chr9:141015037-141015068
  hypo
ctgccttgggcctggccgtgctaacttcttc

SEQ ID NO: 79159 - DNA, 78 bp, Homo sapiens
  chr9:141022644-141022722
  hypo
gcccccagtccctgagcgctcccacctgctgccctctcccgcccagcccagcccagctgcctgcgttgcggcctccac

SEQ ID NO: 79160 - DNA, 207 bp, Homo sapiens
  chr9:141069526-141069733
  hypo
agtgcgggaaccagatcggggccaaggttggcagccagggctctgagggcccagcccgggcctgccgggtggccggggaagatgttagcagtggcggggcggtgcccctgcattgcggcccctgggctccctgccggggacggtggaactgggtggctggcgaggcggccggggtggaccccagggacagggcggcctagggatggg

SEQ ID NO: 79161 - DNA, 31 bp, Homo sapiens
  chr9:141070600-141070631
  hypo
ggtgaccactgatgaccgtatacctggccat

SEQ ID NO: 79162 - DNA, 30 bp, Homo sapiens
  chr10:300239-300269
  hypo
tgtctctgttgacacggttgcacatttcca

SEQ ID NO: 79163 - DNA, 31 bp, Homo sapiens
  chr10:326506-326537
  hypo
cctactgctgaatctccggcagcaccattga

SEQ ID NO: 79164 - DNA, 31 bp, Homo sapiens
  chr10:327401-327432
  hypo
ttgtttccttctgccacggagctccttggca

SEQ ID NO: 79165 - DNA, 31 bp, Homo sapiens
  chr10:338152-338183
  hypo
gcccaaatcggctccacgaaccattactgct

SEQ ID NO: 79166 - DNA, 195 bp, Homo sapiens; identical to SEQ ID NO: 23926
  chr10:373929-374124
  hypo

SEQ ID NO: 79167 - DNA, 31 bp, Homo sapiens
  chr10:387526-387557
  hypo
gacacccgggacaatacggggctgcactgaa

SEQ ID NO: 79168 - DNA, 30 bp, Homo sapiens
  chr10:390313-390343
  hypo
ccccaagggtggggcgggggcggggcgggg

SEQ ID NO: 79169 - DNA, 31 bp, Homo sapiens
  chr10:391367-391398
  hypo
cacacccagacacatcgcgcacagttctccc

SEQ ID NO: 79170 - DNA, 326 bp, Homo sapiens
  chr10:396922-397248
  hypo
tgcatgagtgtagggatggagcgcgcggcgggcctggcaaggctgtcgggaccggacgctgtgattcagagattggggacagagtgcacagcgagcccgagatggctgtcggggaccagacactgcgattcagagtgaaggcgcagggagagaggcccagaggggcttgcgggtagccgagttagtgcaaccaaaaggacgccgcacggacgaacagtatctggggctattcatcggcgatgctgggaaaagcacgtcagcctcccagctcgaagggcccgtgtcagaaacacatggcggggcacggtgagtggaagataatgtct

SEQ ID NO: 79171 - DNA, 31 bp, Homo sapiens
  chr10:410433-410464
  hypo
aggcctccgggacccacgaaccccagcaagc

SEQ ID NO: 79172 - DNA, 124 bp, Homo sapiens
  chr10:415396-415520
  hypo
aactggttaatctgtgcagctcgcgacccacactcacctccaggcatcacgaggccgacatcctgcacggtgagcacggacagcttctcttccgagtccacacgaatgaccccataggtcagtc

SEQ ID NO: 79173 - DNA, 173 bp, Homo sapiens
  chr10:422172-422345
  hypo
acccaggccgacctcggcccccgacagagccggcagggagaaggacccaggcccacctcggcccccgacggagccggcagggagaaggacccaggcccacctcggcccccgacggagccggcacagagcaagaatgaggtggtgctcatcccacacacgacgttccctgtgct

SEQ ID NO: 79174 - DNA, 521 bp, Homo sapiens
  chr10:425872-426393
  hypo
ctgtccctggaagatggttaacgtgcagaagaggatgtccctagaagatggttaacacgcagaagaggctgtccctggatgatggttaacgcacagaagaggctgtccctggaagatggttaacacgcagaagaggctgtccctggaagacggttaaagcgcagaagaggctgtccctggaagatggttaacgtgcagaagaggctgtccctggatgatggttaacgcacagaagaggctgtccctggaaaatggttaacgtgcagaagaggctctccctggatgatggttaagacgaagaagaggctgtccctggaagatggttaacgtgcagaagaggctgtccctggatgatggttaacacgcagaagaggctgtccctggaagatggttaacgtgcagaagaggctgtccctggaagatggttaacgcgcagaagaggctgtccctggatgatggttaatgcgcagaagaggctgtccctggatgatgtttaacacgcagaagaggctgtccctgga

SEQ ID NO: 79175 - DNA, 31 bp, Homo sapiens
  chr10:431729-431760
  hypo
acggggtgggggcagacgagagggcagagac

SEQ ID NO: 79176 - DNA, 30 bp, Homo sapiens
  chr10:435938-435968
  hypo
tagccacacgcctgcgtcagggcctggcag

SEQ ID NO: 79177 - DNA, 45 bp, Homo sapiens
  chr10:463656-463701
  hypo
cctccctgtctgcctgcgcctgtcagggctcggataggcatccct

SEQ ID NO: 79178 - DNA, 30 bp, Homo sapiens
  chr10:465020-465050
  hypo
gagctcggcgttgccgtacttgggcgctgt

SEQ ID NO: 79179 - DNA, 458 bp, Homo sapiens
  chr10:482018-482476
  hypo
taactggtgtctttcacacagcgaattcagttcagaccgggcgcacttcatgtactcagccaccacgtgtggtgagtgacagagatcatcttgcatgtgtgtccacattttactgcctttttcttgaccacagattctacctccggtttctctgtgtatgcagtgattgtttgcttaatattgcacattgtgggtaacgtgttgagcacgctcaggatcccataagcttcttcggaagctttccagctcttgttttagcaggcagcgcaggcactgctgggtcatcgtgaccatgggcaggcttggattgatttgctgctggtgtggatgggtggagagctccagtcctgcacccactccgatctccgcctcctggacttggcagggtggcatgctccgcccacaccagagctctctccgagctccgcctcctggacgtagtagggtggccatgctcc

SEQ ID NO: 79180 - DNA, 30 bp, Homo sapiens; identical to SEQ ID NO: 23930
  chr10:482898-482928
  hypo

SEQ ID NO: 79181 - DNA, 160 bp, Homo sapiens
  chr10:483295-483455
  hypo
ccacacctgagctctgagctccgcctcctgaatgtggtagggtgatatgctccgcccacacctgagctctctctgatctccgcctcctggacgtggtagggtggccatgctccactcacacctgagctctctgagccacggtctgcaggtgttctccagg

SEQ ID NO: 79182 - DNA, 30 bp, Homo sapiens
  chr10:518455-518485
  hypo
gcccggcgttcttgcggcaaagcttggtcc

SEQ ID NO: 79183 - DNA, 428 bp, Homo sapiens
  chr10:524386-524814
  hypo
ttttctcactcatctcatgtccgggcatgccgggggtgcagatgcacccaaattcccatcttattctcactcatccagtgtccaggcatgctgggggtgtagacacatccaaattcctgtcttattcccactcatcccgtgtccgggcgtgctggggctgcagacacatccaaattcccatcttattctcaactcatcccgtgtctgggcatgctaggggtgtagacacatccaagttcccgtcttattctcactcatctcgtgtccgggcgtgctgggggtgtagacacatccaaattcccgtcttattctcactcatcgcgtgtccaggcgtgcagatacatccaaattcccatcttattctcactcatcgcgtgtccgggcgtgctgggggtgcagatagcaacgtctctatggctcaccttagc

SEQ ID NO: 79184 - DNA, 30 bp, Homo sapiens
  chr10:525931-525961
  hypo
gcctgagctccagtcgacgctcactggatg

SEQ ID NO: 79185 - DNA, 159 bp, Homo sapiens; identical to SEQ ID NO: 23932
  chr10:545442-545601
  hypo

SEQ ID NO: 79186 - DNA, 30 bp, Homo sapiens
  chr10:576017-576047
  hypo
tccacgcctgccgccgtctaagtgactgac

SEQ ID NO: 79187 - DNA, 428 bp, Homo sapiens
  chr10:583335-583763
  hypo
ataaggatcaccctggcgcagactccggttcctttcaattcgcctcttttcttcccacaagtagccctctaatgcccaaggaagctcagacaacacaagtaactacgacctggctccagcatctgccccccacacatttgtccccagggcacccagcatcctgccccccgtccccctcccccgcacacttgtgcccagggcacccaggacacgggtatcacccatgtttcagccaggcttgtgtttcccccattaacatgacaacaggagagggatgagggaagacacgagacacaggctggtaagtcaactctaggtggtgcaaacccattgctctggcaataagcaaagctcttggggtctccctaaatatcgagcagttatctttcgtctgcgaatttttttttttcccccgagaccgagtctcg

SEQ ID NO: 79188 - DNA, 181 bp, Homo sapiens
  chr10:603005-603186
  hypo
tggtcagtgtggcccacgggacacggccaggagaccggccaccttgacactgggcgtaagaccagcactcctatgtctctgcagaaaggagcagccctgggcagggatgtgcctggcagccccacagagggaccggtgtggaggaccaggcctccgccagcagacacgtcagcacagcatc

SEQ ID NO: 79189 - DNA, 182 bp, Homo sapiens
  chr10:606108-606290
  hypo
tgtccactgatcatccctccacgcacagcagagagcagtcctcgggataaaacccacaggggtggagaagacacgcgatcaaggtggacaggatggaggagtcacaaagaggggaggttcggagaatgaggccatgtgaacacaaagctaaagtgctcagcggctggaagacaaaagctgca

SEQ ID NO: 79190 - DNA, 299 bp, Homo sapiens
  chr10:630293-630592
  hypo
gacagattccaaatctcggagcccacgacctgacacccactcacgcgcatcacctctcaatctcggggcccacaacctgacccccactcacgcgcatcacctctcaatctcggggcccgcaacctggcccccactcacgcgcatcacctctcagataatctcggggcccgcgacctggcccccactcacgggcaccacctctctagtctcggggcccgcgacctgacccccactcacgcgcatcacctctcaatctcggggcccgcgacctgacccccactcacgcgcatcacctctca

SEQ ID NO: 79191 - DNA, 31 bp, Homo sapiens
  chr10:644048-644079
  hypo
ggatcacggcctcccacgaggaaagtgccag

SEQ ID NO: 79192 - DNA, 31 bp, Homo sapiens
  chr10:661289-661320
  hypo
gaaactcgcagccacccgcataggggccacg

SEQ ID NO: 79193 - DNA, 353 bp, Homo sapiens; identical to SEQ ID NO: 23934
  chr10:669049-669402
  hypo

SEQ ID NO: 79194 - DNA, 220 bp, Homo sapiens; identical to SEQ ID NO: 23935
  chr10:669946-670166
  hypo

SEQ ID NO: 79195 - DNA, 30 bp, Homo sapiens
  chr10:673295-673325
  hypo
accagccgctctgccgtacaagagaactgg

SEQ ID NO: 79196 - DNA, 30 bp, Homo sapiens; identical to SEQ ID NO: 23936
  chr10:678248-678278
  hypo

SEQ ID NO: 79197 - DNA, 30 bp, Homo sapiens; identical to SEQ ID NO: 23937
  chr10:678905-678935
  hypo

SEQ ID NO: 79198 - DNA, 358 bp, Homo sapiens
  chr10:679149-679507
  hypo
atgtcaatcaaagcttaggcacgtgggttacttcactgttctctgtaccctttccaaataaaacccggggccgcctgtgtacccaagagcctgggcactgagcagagagagaaaacgtccagggcaacagcgttcacattccggcggtgccatagagcagacggggggagtccgaggcggtgccgcagagcggacgcggggagtccgaggcggtgctgcagagcggacgcggggagtccgaggtggtgccgtagagtggatggggagagttcgagccacaggtggccacgcctcccctgcctccggccggtgcccactgctcacgcattcctctctcggcccatcctgagccaggggg

SEQ ID NO: 79199 - DNA, 31 bp, Homo sapiens
  chr10:682647-682678
  hypo
atctgtgatgacttttcgagagtctggggcc

SEQ ID NO: 79200 - DNA, 161 bp, Homo sapiens; identical to SEQ ID NO: 23939
  chr10:685211-685372
  hypo

SEQ ID NO: 79201 - DNA, 31 bp, Homo sapiens; identical to SEQ ID NO: 23940
  chr10:685731-685762
  hypo

SEQ ID NO: 79202 - DNA, 30 bp, Homo sapiens
  chr10:687478-687508
  hypo
gggagaaaggaacccgggtgtcagcttgat

SEQ ID NO: 79203 - DNA, 42 bp, Homo sapiens
  chr10:712415-712457
  hypo
tgagatcctgtggcctgagtcggggccggggaaaccaagcct

SEQ ID NO: 79204 - DNA, 153 bp, Homo sapiens; identical to SEQ ID NO: 23941
  chr10:746637-746790
  hypo

SEQ ID NO: 79205 - DNA, 230 bp, Homo sapiens; identical to SEQ ID NO: 23942
  chr10:769016-769246
  hypo

SEQ ID NO: 79206 - DNA, 132 bp, Homo sapiens
  chr10:802982-803114
  hypo
acctgcccaatatctagagtgcggcggggacgtgcccaattctagagtgcggcggggacctgcccaatatctggagtgtggcggggacctgcccaatatctggagtgtggcggggacctgcccaatatctgg

SEQ ID NO: 79207 - DNA, 30 bp, Homo sapiens; identical to SEQ ID NO: 23943
  chr10:819061-819091
  hypo

SEQ ID NO: 79208 - DNA, 596 bp, Homo sapiens
  chr10:819330-819926
  hypo
gattacaggcgtgaaccactgcgctcagcctggcgagatttcattttattgataaatgtaagtttttgcactgaactaaccccagacttcactaacgtgggtaggaagacatggctcctaggtgtagacgcaacccccagggctcttggacggagatcacgtggaatccagagtccagtgactttggcagtaactgaaatgggatatttaatattcacgcatttatttcacaaatgatcccagtgtgcctgtgtgtgcctgggccccggcagcggccagccttgccctggaacacaaatgactcacagagagggacgggtcacgcggagaataagccaggagctgatgcgggaggagacgggtcagaggtgctttccctggcaggaagagccaggccccccagaactcctagagcgccctgagatcttcgggttctgatggtggcaggttctgctggggcgggtggtgggccctgctagggagggtgacgggccctgctggggagggtggcgggccctgctggggagggcggcaggccctgcgggagcatgtgagcagggacatgatggggtcgcgcattttgcagggaaaccagc

SEQ ID NO: 79209 - DNA, 561 bp, Homo sapiens
  chr10:832975-833536
  hypo
cagctgtcacaggtgcagccacgggcagcaccgcatcccccaaatccattcactgaagtctcagcttcgacgtgtggtatttggagacgcagccttttcagaggtagttagggtaactgagccgggagtgtggggtcctgatcccatgggccgtggcctccaggagaagaacagacaccacgtgctccctgcctgtgcagagggaaggcgcgaggtggctccaggaaccaggtcggccggcaccttggcccggaacttccagcctccagattgtcagaaacaaatccctggtgtctgcggtgttggggctgacacgcgctctgcctggctgccaggtcctctgcaggcggggacggtgccggccattgctagatccctggggcgcagcacagactgcgggaaacaggctcaccagcccggctgcacgcaccgaggcagcgtccagactcgagacatcctccagccacgggcgaaatcacagccattgctgcaaagttcttgcgtcctgtgaaaactggatgtgagcctctctctggtggcagcttctactagtgctttttt

SEQ ID NO: 79210 - DNA, 573 bp, Homo sapiens
  chr10:851104-851677
  hypo
ggggcggctggaggtcgagggcgcgtggggggcctggagggtgcaggggacgccgagggcgcggggcccaacctccggccagccgcctggattctggtctctgctctgagcgaggtgcgtgggtgcctccctgcttttgagcggggatgcaaaggacccccgggctgctgcgcggaaaaaggcggacggggatccagggcgcaagcagggatggagggagaggccgacacagacggcggcaggtgtgcgtggtgaggccgccccacgcagggatgggaggggcgcgcaagccgggacttgaacctgcactggctgagctgtggacgcggcctggcggcctctgcggagcgccctctgcggagctgcctctggcacctgtccacagcgtctggacaccgggcgaggaatggacccggaagcgtcccctgcccagggggtgctgcaggtacccaggggaagagcattcacgggtgccaggcccaaggggctcacgccagaagtagaccaattagacgactacaaacggtgctcagtgctgcagaagcagccggggacaggcggctgtcggagagg

SEQ ID NO: 79211 - DNA, 220 bp, Homo sapiens
  chr10:851987-852207
  hypo
ggatttgggcttgcctgtctgcgtcggggctgcccgtggagatggggttccggtgaggagcaggaggatccaggccggagggtgggtggtcccatctgaaatgtggactgactgcaggtggccacgccaaggacacagtgagacatgggctggaggctgagcaggctggggctgaggagctcgaatgtactgagtggacgtattagttaccccttctttc

SEQ ID NO: 79212 - DNA, 30 bp, Homo sapiens
  chr10:853200-853230
  hypo
cccacacttgtaagcgccccacatttctgc

SEQ ID NO: 79213 - DNA, 195 bp, Homo sapiens; identical to SEQ ID NO: 23947
  chr10:863714-863909
  hypo

SEQ ID NO: 79214 - DNA, 181 bp, Homo sapiens; identical to SEQ ID NO: 23948
  chr10:868645-868826
  hypo

SEQ ID NO: 79215 - DNA, 29 bp, Homo sapiens
  chr10:872924-872953
  hypo
tcacacatggccgggcgcagtggctcatg

SEQ ID NO: 79216 - DNA, 31 bp, Homo sapiens; identical to SEQ ID NO: 23950
  chr10:894780-894811
  hypo

SEQ ID NO: 79217 - DNA, 18 bp, Homo sapiens
  chr10:941141-941159
  hypo
taacgtaaaataaaataa

SEQ ID NO: 79218 - DNA, 30 bp, Homo sapiens
  chr10:963337-963367
  hypo
aagttcaataaaaaccggtttattgtaaca

SEQ ID NO: 79219 - DNA, 207 bp, Homo sapiens
  chr10:978805-979012
  hypo
ccacacctgggatcaaggccccggcccttccccaaacccccaacccacacccgggaccaaaaggccccggccccacgtttcctagaggcgctgggttcgggcccacgttgcaacgagtcagatgctcttggtagctcagggaggtgttcacactcctgccgtttccgtgaggatggtgacgactccgaactatagcagcatactcta

SEQ ID NO: 79220 - DNA, 109 bp, Homo sapiens
  chr10:986577-986686
  hypo
ttttgaaacagaaaaatagcacgggcatttgtggggtacataagaaagagacaaaatggaaccatttggaccagaaggcatgacgggagaagtgcgggagcgcaggaga

SEQ ID NO: 79221 - DNA, 30 bp, Homo sapiens
  chr10:1000560-1000590
  hypo
acctaaatgggacccgtgggtctgggggtg

SEQ ID NO: 79222 - DNA, 53 bp, Homo sapiens
  chr10:1007454-1007507
  hypo
gcttctggtgaggcctcgggaaggtccactcatggcggcgtggtgccagcatc

SEQ ID NO: 79223 - DNA, 30 bp, Homo sapiens; identical to SEQ ID NO: 23954
  chr10:1011233-1011263
  hypo

SEQ ID NO: 79224 - DNA, 241 bp, Homo sapiens
  chr10:1020586-1020827
  hypo
aatgaggccaggccactggtccgagctccctcgcccattaggccagactgtaatcggttctgtgtttacagaagttcaacaagatgtagtttacctcaaccgtgaaacacctgctaatacagacctcaagggtgctgtgaagattaaacagcttcacgctcatcgaaagcttggagctccacaacattcaacaaatgtcggctgtcactgttgcacagacgctcaagcctcccactctgcc

SEQ ID NO: 79225 - DNA, 46 bp, Homo sapiens
  chr10:1031929-1031975
  hypo
gtggggatccagggaagtggccgacgggcccaatggagcactcata

SEQ ID NO: 79226 - DNA, 44 bp, Homo sapiens
  chr10:1043353-1043397
  hypo
ctgtattctgactgcgtgggattcaggacggccttggtaataat

SEQ ID NO: 79227 - DNA, 43 bp, Homo sapiens
  chr10:1053769-1053812
  hypo
gtgtttatgtaatgctgggtgcggttgagcatgtttgtctgct

SEQ ID NO: 79228 - DNA, 37 bp, Homo sapiens
  chr10:1080386-1080423
  hypo
cctgggcgaaggagcgagactccgtctcaaaaaaaaa

SEQ ID NO: 79229 - DNA, 211 bp, Homo sapiens
  chr10:1106059-1106270
  hypo
tgagccatcatgcctggcccaatattacagcatttctaaagatgaggaattcagcttgctaacacagtgtgtttatgggtttcattaattagtcgaatgtttggccagtgcctgctgtgtgtagagcactgtgctgcatcacagctgtgtgcctgttgttctgactgcttacaagcagtggggtgtattacgtacacggcaacatatacta

SEQ ID NO: 79230 - DNA, 30 bp, Homo sapiens
  chr10:1118534-1118564
  hypo
tgagccaccggccccgggatcaaggcctta

SEQ ID NO: 79231 - DNA, 30 bp, Homo sapiens
  chr10:1120366-1120396
  hypo
tgtgtctcccacgctcgctccctagacgga

SEQ ID NO: 79232 - DNA, 328 bp, Homo sapiens
  chr10:1120708-1121036
  hypo
agatgagtctgagggagacatcgtgttaggtttaactttatacatctcagatttgccagtctgaagtagtttagaaagccaggttcgcgcaggcgcaggaggtctgtcgttgccgagaactgcgacgtccacgtgcacacagtgctggctgcggcctgaagagctggctgcttcccgcacgtgcgtgcaggtgctttcaggtgtgtgttggtgtcgatgtgatggaagaaattcatttaaaagctttgctgagtcacggcagtagtgtcttgagttttctcaagtggtaccaaaagttcaacaactcgtttgagagtctgtgaaattg

SEQ ID NO: 79233 - DNA, 30 bp, Homo sapiens
  chr10:1130150-1130180
  hypo
atatgagctgaacccgccaccctttccacg

SEQ ID NO: 79234 - DNA, 30 bp, Homo sapiens
  chr10:1147660-1147690
  hypo
tcccgtagctgttccgcacatggcgggaat

SEQ ID NO: 79235 - DNA, 172 bp, Homo sapiens
  chr10:1147964-1148136
  hypo
gtgcgtccctgtgacgtgcgttcccttgctgctgtgcgtccatgtgacatgtttccgtgctgccgtgcgtccctgtgacgtgtgttcccgtgctgctgtgcgtccctgtgacgtgggaacccttgctgttgtgcgtccctgtgacgtgttctcgtgcggctgtgtgtccatg

SEQ ID NO: 79236 - DNA, 91 bp, Homo sapiens
  chr10:1148460-1148551
  hypo
gctttcactcacagcagaaggcgaagcgggagaaggcgtcatgtgatggaaacaggagtaaggcgggggcggggggtgccccacatccaag

SEQ ID NO: 79237 - DNA, 146 bp, Homo sapiens
  chr10:1163781-1163927
  hypo
tcagcatctgcgctgcgtgcactcagccaccctcagccagctctgtttgaagtccctgcacgcatctgagccgcgtgcactcagccaccctcaaccagctctgtttgaagtccctgcacacatctgagccgcgtgcactcagccac

SEQ ID NO: 79238 - DNA, 31 bp, Homo sapiens; identical to SEQ ID NO: 23958
  chr10:1166112-1166143
  hypo

SEQ ID NO: 79239 - DNA, 368 bp, Homo sapiens
  chr10:1167471-1167839
  hypo
gctgctctcgtaacccgtgctgctctcgttacccaggctgggcgtttgcttgtgtcctgccccgtgtgatgccgtggtttccagttgggcagtttccccccaggagacagtgtttgttgtcacccctggggaggggtctgctctagtttctaatgtgcctgggcagggcggctgctacatccacaggccaggatgctgcaccacagggaagggccccgaccagacatcaggtcctagcgggggaataagtgtcagcaatccacaccgcagctgtgggcaccacgaccaggcctttgagaatgcagacgtgaaaacggtcgccgccgcatcatcctgactgtgttccggggtctcggtgtcagagcgtg

SEQ ID NO: 79240 - DNA, 30 bp, Homo sapiens
  chr10:1174802-1174832
  hypo
cggcggtccatgctcggtggtcctgctcag

SEQ ID NO: 79241 - DNA, 31 bp, Homo sapiens; identical to SEQ ID NO: 23960
  chr10:1199245-1199276
  hypo

SEQ ID NO: 79242 - DNA, 30 bp, Homo sapiens; identical to SEQ ID NO: 23961
  chr10:1206626-1206656
  hypo

SEQ ID NO: 79243 - DNA, 178 bp, Homo sapiens
  chr10:1219333-1219511
  hypo
gcactggtggaggtagcatcccgggtctcagcagtcataggtgcgcgtgaacacagggcatgcgctccacccgccgtcctcagcggcgcacacgcacaggtggtgttcagagtgtgacgacagctggggtttgtttgttcgtttgttttatggagacgcaaggtctcaaggtctcact

SEQ ID NO: 79244 - DNA, 30 bp, Homo sapiens; identical to SEQ ID NO: 23962
  chr10:1222489-1222519
  hypo

SEQ ID NO: 79245 - DNA, 285 bp, Homo sapiens
  chr10:1230857-1231142
  hypo
gcccccacagctcctccgcccagtggtggcgttgataatctccaggtccgcgctgcccacgacccagttcatgctgaaggggggcgacttccccggctggcgcgcctcggcgtcactcacgcctgtcggggagatggggaaaggcgggcgttaatattcctggcctcacacggggctcccccaagggcagctgcggggaaatggagcctgtatgtgagtgggaatggtcctcccttttcatcctcaggactggccagttcacgtgtcacccgcagggcggaggct

SEQ ID NO: 79246 - DNA, 177 bp, Homo sapiens
  chr10:1233134-1233311
  hypo
agggacaatctggcccgttggccgctgtggctgtcctactaggcaggggccgcctgggcaggaggagccagccaccaaggccagggatgaccgggcactgggagaggcagtcactaccctgatctgcgtgcactgggcagcctcccctcctcctcccactcccgtcaccaggcggcc

SEQ ID NO: 79247 - DNA, 114 bp, Homo sapiens
  chr10:1245936-1246050
  hypo
ggcgggcagctggccgacaccctccatgcggtggctcatgacgcgtgcgaggtggcccgtgtggtgcaggctgcccaccacgatgctctgcaggtacacgggctccacgaagtg

SEQ ID NO: 79248 - DNA, 30 bp, Homo sapiens; identical to SEQ ID NO: 23964
  chr10:1246321-1246351
  hypo

SEQ ID NO: 79249 - DNA, 164 bp, Homo sapiens
  chr10:1251713-1251877
  hypo
gttctgcgtggtggccgggatggaccgagactgggtagatgccatcctgactgctgacgtttgggacgtgagacatctgggggcatggggcagcccgctgcggccaggtggggtcatggggcagcccactggggtcaggtggaggtcacggggcagcccgctgg

SEQ ID NO: 79250 - DNA, 652 bp, Homo sapiens; identical to SEQ ID NO: 23966
  chr10:1252096-1252748
  hypo

SEQ ID NO: 79251 - DNA, 608 bp, Homo sapiens; identical to SEQ ID NO: 23967
  chr10:1259925-1260533
  hypo

SEQ ID NO: 79252 - DNA, 212 bp, Homo sapiens
  chr10:1286698-1286910
  hypo
ccgagggagatgacgcggtcagaaacggctgcagcatgagacgtcgtatgagaaatgtcgcggaagtgctgtacatggaatgtcaccagcatgacagtgagggaggaaaagggagagacggactcacacccagggagcttctgcacaggtggcaggaggaggcgtcctaggcagagtgggcatggtggtcagaggcacggataggaaagggc

SEQ ID NO: 79253 - DNA, 30 bp, Homo sapiens
  chr10:1357204-1357234
  hypo
ggagagaagccgccccgaggttccaacatg

SEQ ID NO: 79254 - DNA, 75 bp, Homo sapiens
  chr10:1357510-1357585
  hypo
ggcttccaaggtttccgccttcattgattgctgctggggcacccagcacggctgagtgagcgcaaagcgtcctga

SEQ ID NO: 79255 - DNA, 122 bp, Homo sapiens
  chr10:1376281-1376403
  hypo
taggcaggggccatggcaagacgcagactcatgggcagaggccggaggctgttttgtgtttcctggagcagcggtacggcgggaaacatggaagaagcggcggggtggcctaggtgagtgtt

SEQ ID NO: 79256 - DNA, 30 bp, Homo sapiens
  chr10:1416127-1416157
  hypo
tcctagtgaaaccgcgtgggctccgcgcac

SEQ ID NO: 79257 - DNA, 118 bp, Homo sapiens
  chr10:1418212-1418330
  hypo
tcacacaccccacacacgtgcacgtaccacacaccacacataccacatgcatgaacacacatcacgacacacacacacacacgcacatctttttctaccttcccgtgcatctggatta

SEQ ID NO: 79258 - DNA, 30 bp, Homo sapiens
  chr10:1419354-1419384
  hypo
tggggtgtgtgtgtgcgcctctggggtgtg

SEQ ID NO: 79259 - DNA, 286 bp, Homo sapiens; identical to SEQ ID NO: 23968
  chr10:1443298-1443584
  hypo

SEQ ID NO: 79260 - DNA, 30 bp, Homo sapiens
  chr10:1443823-1443853
  hypo
ctacactgtgtatcccgtgtccccatttct

SEQ ID NO: 79261 - DNA, 135 bp, Homo sapiens
  chr10:1476321-1476456
  hypo
cgagaaggctgataacgagagatttaaaataacacgaagattcaggtgaagctattagattccgagaaggctgataacgagagatttaaaataacacgaagaggtgatgtacacagaggccggtatgagaaattc

SEQ ID NO: 79262 - DNA, 70 bp, Homo sapiens
  chr10:1506521-1506591
  hypo
ggacacacactcccccacacacgcgcgggggccagtcacagcgggcagcgtgctggagaagagggtggac

SEQ ID NO: 79263 - DNA, 144 bp, Homo sapiens
  chr10:1527765-1527909
  hypo
aagcgtcccaggtctcgtcagcatagttgatgactctcctggtctgatccacaaggctgaaacactaacttgttcattgctgtcctgtcaccttgtcacaacacgtgccccggtgggatggaataataacgctccgtctatggc

SEQ ID NO: 79264 - DNA, 101 bp, Homo sapiens
  chr10:1547437-1547538
  hypo
aatcagcctcactgtgtgcctcgcattgccccatttaacccgcatcctgcgttgttggaaagtgtgtatgtgatgatgacgctgaggaagatgacagcaca

SEQ ID NO: 79265 - DNA, 45 bp, Homo sapiens
  chr10:1555731-1555776
  hypo
caggagtctctcatgatggagcgcgctgggaagggctactctggg

SEQ ID NO: 79266 - DNA, 233 bp, Homo sapiens; identical to SEQ ID NO: 23969
  chr10:1558645-1558878
  hypo

SEQ ID NO: 79267 - DNA, 385 bp, Homo sapiens; identical to SEQ ID NO: 23970
  chr10:1585130-1585515
  hypo

SEQ ID NO: 79268 - DNA, 112 bp, Homo sapiens
  chr10:1668890-1669002
  hypo
cagagggaaggtggctacacacgtcccggcttgtcgctcaccacctgttaacagccacgcacaaagcaacccgcacggtctgaagtggcccgattgttacatgttgtattat

SEQ ID NO: 79269 - DNA, 31 bp, Homo sapiens
  chr10:1671647-1671678
  hypo
tcaagcaccccgccagcgcccaaccccgccc

SEQ ID NO: 79270 - DNA, 405 bp, Homo sapiens; identical to SEQ ID NO: 23971
  chr10:1708435-1708840
  hypo

SEQ ID NO: 79271 - DNA, 31 bp, Homo sapiens; identical to SEQ ID NO: 23972
  chr10:1720646-1720677
  hypo

SEQ ID NO: 79272 - DNA, 148 bp, Homo sapiens
  chr10:1767854-1768002
  hypo
cacttccaggacagaaggccacgctgccgcactcgtatccgaagtttgaatgtcctcagccgcagatgcgttttttgttatgagtgacaagaacgctgacacaagacactaacctttctagaggtgcgggtgaagctatcctgggaaa

SEQ ID NO: 79273 - DNA, 30 bp, Homo sapiens
  chr10:1814135-1814165
  hypo
ttggcctgaagaagacgctgagagtcgtcg

SEQ ID NO: 79274 - DNA, 961 bp, Homo sapiens
  chr10:1994527-1995488
  hypo
gcccgctggcggccgcgctcctatccgcaccccttatccgcaccccttatccgcgccccttatccacacccgttatccgcaccccttatctgcactccttatccgcatcccctatccgcaccccctatccgcacccctggcccaacacctccactccgaggcctcttcagggggtcctttcccagcgcgtctcctctccctccctgggactcccagagccataaaatcaggccccgtccttagggctccgtccccagttccgtgaccggccctctgctctgtgctgacacccagcaccctccccggcctctgctccgaggggaaaataaaacaggggccttcaggcctcaccgctggctcactccatcgcagcaaatcgaccgagggtcctctgctgcgtccttgcggcctgttgtcttactcagcggccctgacacccggcatttatttaaagcctcgaggctggatgcggttgcgacagcagggcgtgttcagaggaaagaaggggctggagcccgggcactcgggttaggcaacgtcaaggggctcgggaggagagtgggctccgccaaggcggtggctgcaggggccacgtgtggcctcttggaacacggaggaaggaagcgctgaaggacgtaaggactgtctgtaaaatcctccctgacaagggaggtcagggtcgggatgtccccttggacgtggcgatgcggaggcctgagtgacctcaggagaggggctaggtggagatgacgctcacggagggtgactcgggagacaaaccgcagacagtaggtgcaggtggccctgagaggcgtcctgcacagcacagcaaaagccagggtcctagttagtgggcgaagtgagttccagactttgggaaaataatcgcgttttgtactgctgtaaatgagcggaagaaagggagaggccgggcgcggtggctgaggcctgtactcccagc

SEQ ID NO: 79275 - DNA, 208 bp, Homo sapiens; identical to SEQ ID NO: 23974
  chr10:2006675-2006883
  hypo

SEQ ID NO: 79276 - DNA, 64 bp, Homo sapiens
  chr10:2140550-2140614
  hypo
acttgaaataaaatgttcagacgtactcaccccagccttcatcgcttgggcatgaggatatcct

SEQ ID NO: 79277 - DNA, 173 bp, Homo sapiens; identical to SEQ ID NO: 23975
  chr10:2416381-2416554
  hypo

SEQ ID NO: 79278 - DNA, 30 bp, Homo sapiens
  chr10:2606117-2606147
  hypo
attagatctacactacgccaggcacgtgcg

SEQ ID NO: 79279 - DNA, 186 bp, Homo sapiens; identical to SEQ ID NO: 23976
  chr10:2610007-2610193
  hypo

SEQ ID NO: 79280 - DNA, 222 bp, Homo sapiens; identical to SEQ ID NO: 23977
  chr10:2620064-2620286
  hypo

SEQ ID NO: 79281 - DNA, 102 bp, Homo sapiens; identical to SEQ ID NO: 23978
  chr10:2620525-2620627
  hypo

SEQ ID NO: 79282 - DNA, 43 bp, Homo sapiens
  chr10:2782245-2782288
  hypo
ctggatgtgctggacacagaacgactgtctgaatagtcaagtg

SEQ ID NO: 79283 - DNA, 458 bp, Homo sapiens; identical to SEQ ID NO: 23979
  chr10:2932054-2932512
  hypo

SEQ ID NO: 79284 - DNA, 30 bp, Homo sapiens
  chr10:2936419-2936449
  hypo
ctctaagcacggcacgcagtagtctccgct

SEQ ID NO: 79285 - DNA, 42 bp, Homo sapiens; identical to SEQ ID NO: 46808
  chr10:3109026-3109068
  hypo

SEQ ID NO: 79286 - DNA, 2014 bp, Homo sapiens; identical to SEQ ID NO: 46809
  chr10:3109346-3111360
  hypo

SEQ ID NO: 79287 - DNA, 67 bp, Homo sapiens
  chr10:3141465-3141532
  hypo
gggctaccagggcatggtggacggaggctcaaacatcgcagaggccgactgggagagtgtctccagc

SEQ ID NO: 79288 - DNA, 55 bp, Homo sapiens
  chr10:3146042-3146097
  hypo
atgatttctgcggcaccgacatgaccatcggcacggactccgccctgcacaggat

SEQ ID NO: 79289 - DNA, 31 bp, Homo sapiens; identical to SEQ ID NO: 23983
  chr10:3150920-3150951
  hypo

SEQ ID NO: 79290 - DNA, 443 bp, Homo sapiens
  chr10:3151596-3152039
  hypo
ggacaccccagcttgcgtcgtgtcactgaacgggaaccacgccgtgcgcctgccgctgatggagtgcgtgcagatggtgagtgggcagcccatggccaagggcagggcggagacggctgggacagaagctgcttgtcaggccagcctgggcaccttgggtgtctcgtcggtgcacgatgcattacacggcctttctgagaaggaggtgagctgcccgtggggagggagaaggcttatgttctctcccacacctgcagagcctgcgccgtcttcgctctttggttttctaagttaccatccatctgtgtggcacatagtcgtaacctcccctgagtgggggtctagagcatcgggatcctcaacagtcgaggatccaggtggccccagtgcaccaggtgctgcagaaggacagagtgcagggaggcagccgagagagagagatc

SEQ ID NO: 79291 - DNA, 329 bp, Homo sapiens
  chr10:3158925-3159254
  hypo
cattgttcactttagctgtttcgttctgtgtttgcacattagatcaaagaaatcggctggacagatgtcgggggctggaccggccaaggaggctccattcttgggacaaaacggtaacttccaaatctcaactctatgacctgcttttaaggaagaaggaagagccgtgttctgggagagaatcgctgggtgccgacgccagttggattcctggaaaggcgtccctaagggaggggtgcaggcagttaccggtcctccctccagtggaactgcccgtgttccagggagctggggatgtgtcccagggcgtaagagagaagaggaggtaa

SEQ ID NO: 79292 - DNA, 511 bp, Homo sapiens; identical to SEQ ID NO: 23985
  chr10:3160806-3161317
  hypo

SEQ ID NO: 79293 - DNA, 30 bp, Homo sapiens; identical to SEQ ID NO: 23986
  chr10:3162176-3162206
  hypo

SEQ ID NO: 79294 - DNA, 30 bp, Homo sapiens; identical to SEQ ID NO: 23987
  chr10:3168654-3168684
  hypo

SEQ ID NO: 79295 - DNA, 46 bp, Homo sapiens
  chr10:3171115-3171161
  hypo
gtgccgggagcaggcggggccggggattcccgacaaaggcttgatg

SEQ ID NO: 79296 - DNA, 233 bp, Homo sapiens
  chr10:3179619-3179852
  hypo
tctgtttgggaaatcagagtccgacagccaagaaagagctagcgcggaggctttcctttctggctctgtaacgatgaagcaagcgcttactcaccccaacccacttgcttctcaggacggtttccatgcagccgccgcggtgaactcccgtctggtggacactcccccagggcctcggtgtgatggagtttcctgaatcagcgcaggcagacgtgggacacccttgtgcacct

SEQ ID NO: 79297 - DNA, 30 bp, Homo sapiens
  chr10:3180258-3180288
  hypo
cgggttctcgggtccgaggatggccaggcc

SEQ ID NO: 79298 - DNA, 30 bp, Homo sapiens
  chr10:3184122-3184152
  hypo
gtctccaccagcaccggcagggatggcgtt

SEQ ID NO: 79299 - DNA, 30 bp, Homo sapiens
  chr10:3185689-3185719
  hypo
gttcctgagggacacggtatggtcagaggc

SEQ ID NO: 79300 - DNA, 30 bp, Homo sapiens
  chr10:3186099-3186129
  hypo
accaggctgagtcgcggaaaggatctgtca

SEQ ID NO: 79301 - DNA, 30 bp, Homo sapiens
  chr10:3190386-3190416
  hypo
gtcgtcggggagcacgtggggagaagcact

SEQ ID NO: 79302 - DNA, 31 bp, Homo sapiens; identical to SEQ ID NO: 23988
  chr10:3192624-3192655
  hypo

SEQ ID NO: 79303 - DNA, 30 bp, Homo sapiens; identical to SEQ ID NO: 23989
  chr10:3192934-3192964
  hypo

SEQ ID NO: 79304 - DNA, 30 bp, Homo sapiens; identical to SEQ ID NO: 23990
  chr10:3196495-3196525
  hypo

SEQ ID NO: 79305 - DNA, 547 bp, Homo sapiens; identical to SEQ ID NO: 23991
  chr10:3196874-3197421
  hypo

SEQ ID NO: 79306 - DNA, 30 bp, Homo sapiens
  chr10:3197723-3197753
  hypo
aagtccactaggcccgagtgcaggttaggg

SEQ ID NO: 79307 - DNA, 30 bp, Homo sapiens
  chr10:3212289-3212319
  hypo
ccatacctggtttacggtgaatccatggat

SEQ ID NO: 79308 - DNA, 112 bp, Homo sapiens
  chr10:3216515-3216627
  hypo
gttctgggctgcaggtaaacacgtacctccttattgaagagcccaaaggaaccagaacacaggcaataataggagcgacagacacaaacacgctctgcgcatcacccgtctt

SEQ ID NO: 79309 - DNA, 71 bp, Homo sapiens
  chr10:3243875-3243946
  hypo
ctggagggaagttcacggtgatgctgagtgaggatgagcagctctgggatggaatgcgacacgctgagcca

SEQ ID NO: 79310 - DNA, 30 bp, Homo sapiens
  chr10:3244438-3244468
  hypo
gaacccaagggtgggcgggctgttgctgga

SEQ ID NO: 79311 - DNA, 189 bp, Homo sapiens
  chr10:3277175-3277364
  hypo
gtcgagtggtggaagccgatgttgcatagggagttacaacccagtgtgggcgtctcctggaggaggttcaggggccactgagcatgttgcagtggtgtcacgcatgccagctggggacctggcaccgagtggagaactggtggatgatgaggacagtgaggggcagagggtgccgcggctctcctaaaa

SEQ ID NO: 79312 - DNA, 70 bp, Homo sapiens
  chr10:3284259-3284329
  hypo
gctctgcaagccatgtctggccgtgtaggggaaagagacaaaacaacacgctggttaccttggaagagga

SEQ ID NO: 79313 - DNA, 30 bp, Homo sapiens
  chr10:3285675-3285705
  hypo
tgagactccgtctcaaaaaataataacaat

SEQ ID NO: 79314 - DNA, 351 bp, Homo sapiens; identical to SEQ ID NO: 23995
  chr10:3329665-3330016
  hypo

SEQ ID NO: 79315 - DNA, 256 bp, Homo sapiens
  chr10:3330369-3330625
  hypo
gttgccttgcagccaaacttacgcagtgtgcagacggagctgctcagaggggaggggcagcgagcaggtgccacgtccacaccgggtgaggcgtgaggtgagggctcccccgcgccgccctggcgtccaggtggtgagggctgcacggaaacgtggacttcggcagaacatgtgtgcgccacggagcggctgcgtgcagcccgcaggtgagaccgtctgcataactctgccaaccgtggagtatccaagtaatttt

SEQ ID NO: 79316 - DNA, 398 bp, Homo sapiens; identical to SEQ ID NO: 23997
  chr10:3342839-3343237
  hypo

SEQ ID NO: 79317 - DNA, 53 bp, Homo sapiens
  chr10:3365238-3365291
  hypo
cttctaccagtgcccggatgtgtttgttgggattctgcgccctttgagtgtct

SEQ ID NO: 79318 - DNA, 231 bp, Homo sapiens
  chr10:3512564-3512795
  hypo
agtttgttccatctgcggttggttgaatccactgatgtgggactccagtatatgggcagcgggctgtgtgtcactggccccgtgttaataggtacctgtgttttcctatttgctgttatgtcaacaaaaaccgagaacaatcccttctaagggtgactgcttttagcttcaaaatcaagaacactaaaactccagcatccataggaaagtatcgcacggacttaaccatat

SEQ ID NO: 79319 - DNA, 43 bp, Homo sapiens
  chr10:3518834-3518877
  hypo
aaaataatttaacaggtacctcgcagatgggggagtagttggg

SEQ ID NO: 79320 - DNA, 247 bp, Homo sapiens
  chr10:3572531-3572778
  hypo
catcaagatgggcatgtgggccgggatgctgctgtaccccaggattcacactggcctcgcggccgtgcagaaaagcaagacagtggatctgagctccatccccgcagtctgcactggccccttcatggcacagcgacagctttgccatcagccggcaagcatgcggggtgtggacgacacagccggagagagcagaggccaggctcatgaatcggacaacgagctcgagttttcaaggtgtgactca

SEQ ID NO: 79321 - DNA, 30 bp, Homo sapiens
  chr10:3596481-3596511
  hypo
agaggcgttcagctacggcaagaggggctg

SEQ ID NO: 79322 - DNA, 31 bp, Homo sapiens
  chr10:3641660-3641691
  hypo
gaggaaaactgccagtcgcctgactagtttg

SEQ ID NO: 79323 - DNA, 557 bp, Homo sapiens
  chr10:3678616-3679173
  hypo
agacaccgtgcctggtccaaagagatgtttttatgtggttcaccttcgaccttcatcagggtgactcaggaggcacattctgaagccactctccaacacttaagttttttgccaggtatttttcacaaagcaacgatttgaacaatgaaggagaaaatgtagcctcgcaacttcattcgtaaataatccagactaaccgcacggagtataatggatcaaagtgagcagaatcgctcactttggatgagatcagccctagaatgaaagcaaaaccgagatgatggacggcgcaggctccttggagatccgtgttcatgacacctgcaaggactgtgggcaagctgccaaccagacatgaaattagcaattagttgcatattcttccgagtgggtcatgtgctccttgcaatccaggcacatctctttccatctggcaggggtgtggcgtatttccagagggcttcaatgcgcaatccggcagcgcactgctgggagccccggcacaggacgcctgaccacactgacatacacatattcgcgtccgtctttccctctct

SEQ ID NO: 79324 - DNA, 123 bp, Homo sapiens
  chr10:3712902-3713025
  hypo
gaggtcagggacctgccggccagtctcagtaagatgaaacgtagaaaattcactcactatccccagagagcacaaggcttagggtgtccatcggggagtggctgctcacggggtcaatggggc

SEQ ID NO: 79325 - DNA, 31 bp, Homo sapiens; identical to SEQ ID NO: 7166
  chr10:3862627-3862658
  hypo

SEQ ID NO: 79326 - DNA, 30 bp, Homo sapiens
  chr10:3868099-3868129
  hypo
aagcacagaaacacacgcgttctgggtgac

SEQ ID NO: 79327 - DNA, 30 bp, Homo sapiens
  chr10:3868330-3868360
  hypo
ctgaccggtgaccggcgtggctggctcaag

SEQ ID NO: 79328 - DNA, 30 bp, Homo sapiens; identical to SEQ ID NO: 23999
  chr10:3983404-3983434
  hypo

SEQ ID NO: 79329 - DNA, 139 bp, Homo sapiens
  chr10:4191044-4191183
  hypo
ttatctttggtagttaccttgcgtgtgtgtctacgtagtgagagtgaaacgagaaaggttcccttgtgccctttgcagggcgtgtgcccggaggtgtgactcgcttcttcaggcccccgctgctcagacttctagggga

SEQ ID NO: 79330 - DNA, 31 bp, Homo sapiens
  chr10:4500574-4500605
  hypo
gctgcatccacgttgccgtaaaggacataat

SEQ ID NO: 79331 - DNA, 161 bp, Homo sapiens
  chr10:4867811-4867972
  hypo
aagggcacagtggctccctgacggggaaccaaggccaggcacgcttctcccagactgggggcctcggggcacctgagaatggccatccttggtacaagagagcggggacccactcccgcgcaccctgtgccccaggggacgcaggactctgcaccctgacc

SEQ ID NO: 79332 - DNA, 27 bp, Homo sapiens
  chr10:4959070-4959097
  hypo
ggtccgtatacaacacgaaatgctgtg

SEQ ID NO: 79333 - DNA, 30 bp, Homo sapiens
  chr10:4959679-4959709
  hypo
actcctcaggccttgcgaggctctctttag

SEQ ID NO: 79334 - DNA, 98 bp, Homo sapiens
  chr10:5509174-5509272
  hypo
ttatggggtggcagatggaaccgaaagctcaaagcagcctttaaactttccagccccagcaggcccgtgagtccctcgggttctttgcagcctctgct

SEQ ID NO: 79335 - DNA, 31 bp, Homo sapiens
  chr10:5512031-5512062
  hypo
acagggctctcagccgcgaaagcaggcagcc

SEQ ID NO: 79336 - DNA, 19 bp, Homo sapiens
  chr10:5518992-5519011
  hypo
tctccgtttctgcatcaca

SEQ ID NO: 79337 - DNA, 100 bp, Homo sapiens
  chr10:5523191-5523291
  hypo
tgttgatccaggacacgggaggagacctgggcagcggcggactcattgcaggtcgctctgcggtgaggacgccacaggcaccagcgtgcttctcctcagg

SEQ ID NO: 79338 - DNA, 176 bp, Homo sapiens
  chr10:5527429-5527605
  hypo
ctggtggggtgggaagcgtgggtggatggaaaaaaaggcaaaaatgcctaactgtgatggatgctctgcagagctaagaggggtctcgtagtaaagggggacaggctgatagcttttattagagatcgagtcagcgtctctgagggatgacgtttatgctgcgaactcggtgacaa

SEQ ID NO: 79339 - DNA, 308 bp, Homo sapiens
  chr10:5529519-5529827
  hypo
agcaaaccatcaggctgtctgcgacggcattcggacctctcccttacctcccaggcagcgcgggctccccaaaagacactgacgctcccacttccaaaccgtcactcatgcagtttcctcaccaagaacgccccacccctgttgaaatctgcccccgcctcagtgccacttcctggaagtctgtccccttctctgagcacctcctcgaatgggaatccactgacgagggacctgacccactgtctttgcatggccatttatgttacatctcctgggcccagaggccggcgcagcgtctccctccaagt

SEQ ID NO: 79340 - DNA, 860 bp, Homo sapiens
  chr10:5530259-5531119
  hypo
attccagttgtgagtcaccgtgcccggtccaaaacactgagatttgacttcttcctaggccaaaggtcatctgggcagcaaggcaggagctcccggatcaggaaagtgcaggcacaccatgtctctgagtggtggggtggggacagaggctggcaggccaccaacagggcagcatctgctcccaaccaaggtgactcagacctcgccttgtccaacctgcaggcctcccaacagtggggctctataaggctggcgttcgcctccagggttctccccgacactggatgccaacctgcccaggggcagaagggaggttgggcgtggggagtgccgggtacagtcagagttgccaggacagtttggagcagtgcctcttaatcttggccgcacagcacctgggagctttaaatagacccccacgcctgggcgcccccaccgctgacccaccagggctcagtgcagggggatggctcacacggcacattctccagaagctcctggggtagcttccaggtgcagccggggttgggaatcgctggcttatgcaacccagcagagaggcgggaaaggcagagctgagatcgggtggggccacctgtggtggggaaagagatgagctcacacctggagatggtaaacagtgcaaaagcaagaagaagcttacagaaggagtcgttgggcctttgccccagctgcagccacgtgagagggaagccaggggaggagcaaggtgcaggcatctgtgggctgggcagggcctgactgcactgggcccaggctgggaaggcctcacctgcttctccagcgggaacggagggcgacctgcgcagcctaggcactgcggccgtggttcacatgca

SEQ ID NO: 79341 - DNA, 123 bp, Homo sapiens
  chr10:5535439-5535562
  hypo
ggtctctactcaccttagaaacgcccaccgcacaggagactggcgaagctccctcttgaactttctccctgctcgatgacctctcatcttcaggagactggcgaagctccctctagaactttc

SEQ ID NO: 79342 - DNA, 139 bp, Homo sapiens
  chr10:5536520-5536659
  hypo
ctcaaaaaaaaaaaaatagtcagaccaaggcttttggggccctgactcccatttccctcgaagtgtgtgagtttctggacaggtttttagccaccgggcaccattccctcatcctcatctgggtcgatcagctcagccc

SEQ ID NO: 79343 - DNA, 103 bp, Homo sapiens
  chr10:5537075-5537178
  hypo
gttggaccttggtccacggttgcaaggagagcccagatctaaccatcatcacaaatctggatgtatatgctgaccctagagttggtaacgctactgtagaaaa

SEQ ID NO: 79344 - DNA, 429 bp, Homo sapiens
  chr10:5538685-5539114
  hypo
cactggccaggctctgagcaccgggcaagaaggaacaggtcgcaatgagtgaccgcaagagatcatggtgactcctgaaaacgcccaggccccgcctcagtgccccgggctacccctggccccccaggctttgtgctgaagccgagataaagtggacaggcgcacctcactcctccacaggtgtgccccacccccccacccgcaggtctgcccgagagcacggcaggtgggaaagagacgaatcctgactccaaggccagggccgccacctccccaaagcccgatttcacccaatgctaccataagttggcctgggctgctcctgtacccacctggggcttcagtttccacatctgccaagcaaggtgcctgggtccgaccatctgagacccaggacaaagggagccctgggaacgccaggctgtgatg

SEQ ID NO: 79345 - DNA, 1491 bp, Homo sapiens
  chr10:5540250-5541741
  hypo
agatgcacacatacagagacacgcatacagacacacagacacacacacagatgcacacacagacgtacacgtatattatttgcagccgaagagaggcaggctgcgtgcagaggctggcagctgggctccgtctgtccatgcgaggcgcccgctcctgtttgtgcgggacacgtgcccaggtcctcaccagcagctcaggcagaacctggagccacagacaccgcccagcaccatcctcacacatcctctgcccacctgccctctgctccgcgtcaggggaggcaggagctgcccctggggcctgctccaggcagttctgccaccgcaggtgagaggggtgggctggaaggaaccctggaagcaggtgggggccctcggaggcagccgccccacaaacaccaagcacacatggaactcggcagtcctttatttagatcaatgcggggctgaggggccctcattccactgcagggcaaagggggaccaggcccaaggaggcctccttctgcccaaggtctggaggcagagaggggctcgcaggcggcccgagggcgccgcatccaggccccggagcgcaaagccttcctcccagggggaggcagtttcccatccaccgaccaggtttccccggagagtcccagcacaaaagcagcagcgggcggtggccctgaaggctcagagcgcagccagggggacacaggcggggagcctcactcctgggcgagcatcctcgcgaactcctcgtagttcacccgcccgtcctggtccacgtcggcctcgcggatcatggcgtccagctcctcctgcggcagcggctgccccagccccgccatggcccgcctgagctcgtccacggtgatgtggccgtcgccatcctggtcgaaggcgcggaaggcgacctgcaggtcctccaggccggccctggccttcttcgccgccgtcaggaactcctggaagctgatttcgccgtcgccgtcgctgtcaacctcggagatgagtttccttagctgggcctccgagaggttcttgcccgtggccttcagcgccgcgcccagctcctgggcattgatggtgccgtttccatccgtgtcaaccgcggagaaagcctttttgtactgggcctcctcctcaggagtcagctcaccggccatgcctgcgtctcctgcacctcgcggagcctccgagctgctgcccaccggccctcaacctgctgctctcagagctcgtggtccagagtgcaggcagccgcagggatccgggcagcgtctgtcccagacagttctgccttggcatgggaaccccctccttttctgcaatcggaacaaagggaggagggaggctccccaccctccaaatgccctggggtgagagcctcctcccagggagggccagatcagctgcagacaggaaatgcaggaatgggagttgggagagctgtcaggtgccaggtgggaactgccatggggtcggggtatcggatggctagcctgc

SEQ ID NO: 79346 - DNA, 63 bp, Homo sapiens
  chr10:5548689-5548752
  hypo
cccacctcccaccaggagctgcgggtgcctggtcagtggcccgtccagtaagttggtggccac

SEQ ID NO: 79347 - DNA, 31 bp, Homo sapiens
  chr10:5549565-5549596
  hypo
gagggcaggaagatcccgctcccaaaaccac

SEQ ID NO: 79348 - DNA, 30 bp, Homo sapiens
  chr10:5554532-5554562
  hypo
ggaagcagcaaatccggccttgcgctggct

SEQ ID NO: 79349 - DNA, 762 bp, Homo sapiens
  chr10:5566907-5567669
  hypo
cgtctcaagccagggcgagacagcccgccggccgcccggatctccacctgccaccccagagctgggacagcagccgggctgcggcactgggagggagaccccacagtggcctcttctgccacccacgcccccacccctggcatggccgaccagctgactgaggagcaggtcacagaattcaaggaggccttctccctgtttgacaaggatggggacggctgcatcaccacccgcgagctgggcacggtcatgcggtccctgggccagaaccccacggaggccgagctgcgggacatgatgagtgagatcgaccgggacggcaacggcaccgtggacttccccgagttcctgggcatgatggccaggaagatgaaggacacggacaacgaggaggagatccgcgaggccttccgcgtgttcgacaaggacggcaacggcttcgtcagcgccgccgagctgcgacacgtcatgacccggctgggggagaagctgagtgacgaggaggtggacgagatgatccgggccgcggacacggacggagacggacaggtgaactacgaggagtttgtccgtgtgctggtgtccaagtgaggccggcgcccaccatgctcctgggcgcccacgcggcccacagggcaagaacccggggcctcccgcctcctcccccatccccctgcctcccctgggcactgtggcttcctcctgcgcctggttgattcagcccacctctctgcatcccgcttcccgcgtctcttctctgca

SEQ ID NO: 79350 - DNA, 31 bp, Homo sapiens; identical to SEQ ID NO: 24007
  chr10:5571209-5571240
  hypo

SEQ ID NO: 79351 - DNA, 154 bp, Homo sapiens
  chr10:5572906-5573060
  hypo
gagtttgaccctgggtttgaccgaccccaaagctcacactattcccactgtgccagagaggagttcttagagcaaggagcctgaaaccgagaggcgctgagctcacagaggcggtgagtgctggagagatctcggtaggaaaggcctggaagtg

SEQ ID NO: 79352 - DNA, 30 bp, Homo sapiens; identical to SEQ ID NO: 24008
  chr10:5576241-5576271
  hypo

SEQ ID NO: 79353 - DNA, 30 bp, Homo sapiens; identical to SEQ ID NO: 7168
  chr10:5615942-5615972
  hypo

SEQ ID NO: 79354 - DNA, 30 bp, Homo sapiens
  chr10:5626580-5626610
  hypo
gagtccaaatcactcgcaagctcagtgcac

SEQ ID NO: 79355 - DNA, 138 bp, Homo sapiens
  chr10:5638922-5639060
  hypo
ttcagccacccggagcggccgccccacccgcctcctgcaaagaggtgagctgcccctgcccactgctgctccagctcacacccgtcatccgtgagccattactgactacctacagggtgcgcccgccgtggtctgcat

SEQ ID NO: 79356 - DNA, 31 bp, Homo sapiens
  chr10:5640942-5640973
  hypo
ccaggaccctgccacccggacctgcactcag

SEQ ID NO: 79357 - DNA, 30 bp, Homo sapiens
  chr10:5658234-5658264
  hypo
gcctcgctgagtgccgcccatccccctgag

SEQ ID NO: 79358 - DNA, 216 bp, Homo sapiens
  chr10:5666827-5667043
  hypo
ccatctcgaaggctcgccacccgcgggaggcaccggaaacggaactgccaggacccttttctcaagatggcgcccaaggtaatgaaggaagcgcctgcccctcccaaagcccaagccacagtaggggctttgaggaccaaggaggcggtgctgaaaggtgtccacagccacaaaaagtagatccgccgtcagccaccctccggcggcccaagacgc

SEQ ID NO: 79359 - DNA, 41 bp, Homo sapiens
  chr10:5680698-5680739
  hypo
tccctggcaagcacagcgctgccaaacgacctgggacacag

SEQ ID NO: 79360 - DNA, 59 bp, Homo sapiens
  chr10:5681053-5681112
  hypo
tcttctcagtttaggacgaagacccgccatgacaatggcgggaacgctggagtaaaacc

SEQ ID NO: 79361 - DNA, 102 bp, Homo sapiens
  chr10:5683748-5683850
  hypo
gcacttggcgggagcgctgctgctccacgtgtagtcagacggcttcttcccgcggttgtcccgggcgtagatgttgccgccaaactcgataagcatctcgat

SEQ ID NO: 79362 - DNA, 761 bp, Homo sapiens; identical to SEQ ID NO: 46817
  chr10:5707984-5708745
  hypo

SEQ ID NO: 79363 - DNA, 27 bp, Homo sapiens
  chr10:5757600-5757627
  hypo
ttttggttttttttttggtggcggggt

SEQ ID NO: 79364 - DNA, 31 bp, Homo sapiens; identical to SEQ ID NO: 24011
  chr10:5784320-5784351
  hypo

SEQ ID NO: 79365 - DNA, 23 bp, Homo sapiens
  chr10:5786671-5786694
  hypo
gcagcctccgcctcccgggttca

SEQ ID NO: 79366 - DNA, 22 bp, Homo sapiens
  chr10:5786873-5786895
  hypo
gagaagccgtgccctacctaag

SEQ ID NO: 79367 - DNA, 181 bp, Homo sapiens; identical to SEQ ID NO: 24012
  chr10:5796176-5796357
  hypo

SEQ ID NO: 79368 - DNA, 31 bp, Homo sapiens; identical to SEQ ID NO: 24013
  chr10:5809843-5809874
  hypo

SEQ ID NO: 79369 - DNA, 27 bp, Homo sapiens
  chr10:5829459-5829486
  hypo
gactccgtctcaaaaaaaaaaaagaaa

SEQ ID NO: 79370 - DNA, 83 bp, Homo sapiens
  chr10:5863289-5863372
  hypo
tcaaaaaaaaaaaaaaaaaaaaaaagaaaaagaaaaagaaaaagtatttaatgcaggggttcctaactcgagtataattgtac

SEQ ID NO: 79371 - DNA, 318 bp, Homo sapiens; identical to SEQ ID NO: 24015
  chr10:5875004-5875322
  hypo

SEQ ID NO: 79372 - DNA, 91 bp, Homo sapiens; identical to SEQ ID NO: 24016
  chr10:5901981-5902072
  hypo

SEQ ID NO: 79373 - DNA, 79 bp, Homo sapiens
  chr10:5902470-5902549
  hypo
ttctgcataccatcaggaccccgtaacaaatcttctgcataagctggctccaatgaacgctagtctctgctaactgaac

SEQ ID NO: 79374 - DNA, 30 bp, Homo sapiens; identical to SEQ ID NO: 24017
  chr10:5935938-5935968
  hypo

SEQ ID NO: 79375 - DNA, 31 bp, Homo sapiens; identical to SEQ ID NO: 24018
  chr10:5939819-5939850
  hypo

SEQ ID NO: 79376 - DNA, 30 bp, Homo sapiens
  chr10:5952454-5952484
  hypo
cccacagcctgcgtgcggccctctcctgtg

SEQ ID NO: 79377 - DNA, 632 bp, Homo sapiens; identical to SEQ ID NO: 24019
  chr10:5953028-5953660
  hypo

SEQ ID NO: 79378 - DNA, 463 bp, Homo sapiens
  chr10:5960337-5960800
  hypo
ggaaaatctttgtaggggacccgcaccagcagatctataccttccggggtgcggtcaacgccctgttcacagtgccccacacccacgtcttctatctcacgcaggtaagtgcgcactctgcatgggaggcattgcatctctctcccaatgtcttacgtgccaggccctgtgaaaggtggtatgccaggctcaccagatctagcaaatccttgcttctaagccatggttctcaaagtgtggttctcaggggtctgccaagtcacactgttttcataagaggtgtgtgcacagcggtcgtctgaggaagagctgctgcggctgaactgtgaaccgatggctgctgccgccttgtacatttgtgcttagaacagttgttagaccagcgctggttgttcagacttgtgtatttggcactttttcaaagacaagtgaaacaagctgcgacttcagggaaaataactga

SEQ ID NO: 79379 - DNA, 169 bp, Homo sapiens; identical to SEQ ID NO: 24021
  chr10:5962671-5962840
  hypo

SEQ ID NO: 79380 - DNA, 30 bp, Homo sapiens; identical to SEQ ID NO: 24022
  chr10:5969442-5969472
  hypo

SEQ ID NO: 79381 - DNA, 139 bp, Homo sapiens
  chr10:5979159-5979298
  hypo
ccggagcaggtgcgcgccatggagcgcactgtggagaacatcgtactgccccggcatgaggccctgctcttcctcgtcttctgaggacaaggcgcacgttctccgcagtgcagagcagcttgccgaggaccccgcgtga

SEQ ID NO: 79382 - DNA, 30 bp, Homo sapiens
  chr10:5995013-5995043
  hypo
aggctccttcactccggacttagctgggct

SEQ ID NO: 79383 - DNA, 31 bp, Homo sapiens; identical to SEQ ID NO: 24023
  chr10:5998387-5998418
  hypo

SEQ ID NO: 79384 - DNA, 30 bp, Homo sapiens
  chr10:6000625-6000655
  hypo
aggtgtgagctacctcgcccagcctgattg

SEQ ID NO: 79385 - DNA, 569 bp, Homo sapiens
  chr10:6003401-6003970
  hypo
tgtcaaagatctgagtcgttcagcttgtttactagagaaggcaggcccaacgctggaggctcagctgagagcaggtgaagctgcgctggccgaggacgctcggagcggctgcgtgtgaaacacgggaagcctgggctctggcctgaactctccgggctgtgtgggaggaaagcgtcctgatgagcttgctctcaggaacagaggctgccttgtgttcagcgtcttccctgtcttccttgtccttccctggaaggtggctgcccctgcactgtaagggtgtggcgtaactgtgctgttccctctccatgaaaaatgtgtcttccattgtgacagccacggaatctaggaaacgtgaggccaagcgctgtggctctctggacgcactgttgttgccgcgttcccatggtctcccagccacacaggtcatgagaaggcctcacgccccttaatcctgtgtcaccacctttcatataacttgccctacgctcactgccaatgctccagggctccctgcacaggacgcaccaaggcatcctcagccaagtgcccacggtcgtgccagctcgggt

SEQ ID NO: 79386 - DNA, 29 bp, Homo sapiens
  chr10:6009694-6009723
  hypo
ctggaaaagtgcaagtgtggccggaagta

SEQ ID NO: 79387 - DNA, 31 bp, Homo sapiens; identical to SEQ ID NO: 7172
  chr10:6019532-6019563
  hypo

SEQ ID NO: 79388 - DNA, 159 bp, Homo sapiens
  chr10:6023433-6023592
  hypo
gtggctccagttgttcgttcattgaccgatgatgaacaatggcaaaacggttctgaaccaaggtgcttgtgctaacagtgatgacgaacataatgctgttatcacagcagaacacgcacctgcaggcgccatgatgaaagcatgcgatgggctcattga

SEQ ID NO: 79389 - DNA, 120 bp, Homo sapiens
  chr10:6042314-6042434
  hypo
ttccttaaggcgtgccgttaaatattcgtaaaatgaacacatgaagagcctagagtccagaggtcctagcagatggtgttacatcctcatcgtgaggcacgtggacgggggtttccgacc

SEQ ID NO: 79390 - DNA, 240 bp, Homo sapiens
  chr10:6078742-6078982
  hypo
ggggacagtcattttagagagcggacaccactgctgaagaagaaggatatcccggttggctgctctagagccggcaggacggatgctgaggttgttcgcagcagcgtgtgtgcagagcccccgggatcttgcagactgggatttgtcagggcaggtgtggacattgaggctatttctaacaagctcctacatgatgctggggctgcagagccccaggccgcacttggagtatgagagttt

SEQ ID NO: 79391 - DNA, 50 bp, Homo sapiens
  chr10:6135598-6135648
  hypo
tttctggtggcactaacgtattcataaacactttcggtaaagttctcaag

SEQ ID NO: 79392 - DNA, 159 bp, Homo sapiens
  chr10:6159772-6159931
  hypo
ccgagcccagcctgaaacgcctttttctgtgtggggaacttccttgtttccctcctccccgcaagagactagaaacttgctttcccagcctgtcttgcaggttgagtagggttgtgcgcttgggatctctgatcagaccggcaccgcagtgtgggagag

SEQ ID NO: 79393 - DNA, 18 bp, Homo sapiens
  chr10:6160975-6160993
  hypo
ggctggtgttatggcttg

SEQ ID NO: 79394 - DNA, 30 bp, Homo sapiens
  chr10:6161687-6161717
  hypo
ccattcacctactgacggccatattgatta

SEQ ID NO: 79395 - DNA, 248 bp, Homo sapiens
  chr10:6161977-6162225
  hypo
gagaatcccaacatcccgcctccacctccttgcttcttactgcctcttccactcagcccacacttgcagaatgaggactgcgtcgactacaaattagacctctgcttccaccaggcctccttgatagttcagctaagagccgtgcggtgagtctcctgacgttttatggcacttgacgctggtaaccactcccttcccgaggacggagaccgcggccctgccagtatcgctcacgctttacctcttcc

SEQ ID NO: 79396 - DNA, 22 bp, Homo sapiens
  chr10:6163551-6163573
  hypo
ttcttttttttgagacggactc

SEQ ID NO: 79397 - DNA, 31 bp, Homo sapiens
  chr10:6164389-6164420
  hypo
ctgtctggaagtttcacgactatgccgtgga

SEQ ID NO: 79398 - DNA, 29 bp, Homo sapiens
  chr10:6199195-6199224
  hypo
ctttttttttttgagacggagtctcgctc

SEQ ID NO: 79399 - DNA, 30 bp, Homo sapiens
  chr10:6208579-6208609
  hypo
gggcttctctcagacggaggcagcctccca

SEQ ID NO: 79400 - DNA, 163 bp, Homo sapiens
  chr10:6211183-6211346
  hypo
cgtgagccaccgcgcccagtcttcttatattttcttgtcacagtgcatctgcttgggtggcaggtgcacctacctgggggagagcacattttctgttcttttcttagtcttacgcagggaggattgtgattgggactctggcggctgtgagcagggtaggggg

SEQ ID NO: 79401 - DNA, 30 bp, Homo sapiens
  chr10:6219895-6219925
  hypo
acgtggggtggacacgtgggtgtgagtggt

SEQ ID NO: 79402 - DNA, 30 bp, Homo sapiens
  chr10:6466364-6466394
  hypo
ttcatacttctcacccgcccatgctcagtc

SEQ ID NO: 79403 - DNA, 300 bp, Homo sapiens; identical to SEQ ID NO: 24029
  chr10:6531083-6531383
  hypo

SEQ ID NO: 79404 - DNA, 21 bp, Homo sapiens
  chr10:6543757-6543778
  hypo
cctgggcgacatgagcgaaac

SEQ ID NO: 79405 - DNA, 9 bp, Homo sapiens
  chr10:6547161-6547170
  hypo
attcttaaa

SEQ ID NO: 79406 - DNA, 219 bp, Homo sapiens
  chr10:6578875-6579094
  hypo
ccagaaacaaaacaatacctacggtgcctttggaagaatacccttccccatcccagttctcgctctcccaagccaggggctcagagtagcatgagctctggtggggctgacgatggaacaatttgacaagcatcagggacagaaagatggggcgcagtgggggtgtcggagtgtggctggtggggatgcagaagaggcggtttgactcctcttgttggt

SEQ ID NO: 79407 - DNA, 30 bp, Homo sapiens; identical to SEQ ID NO: 46825
  chr10:6621950-6621980
  hypo

SEQ ID NO: 79408 - DNA, 30 bp, Homo sapiens; identical to SEQ ID NO: 46826
  chr10:6622418-6622448
  hypo

SEQ ID NO: 79409 - DNA, 45 bp, Homo sapiens; identical to SEQ ID NO: 24030
  chr10:6647893-6647938
  hypo

SEQ ID NO: 79410 - DNA, 144 bp, Homo sapiens
  chr10:6664619-6664763
  hypo
gataactactatgtctacttacgtgtccacgagtaacctcatcaccacgttgggagaagctacatacgatactttttgggagaaactgagctccggagctgcttggtcaatctccctgtaaccgaatcacaggttcacttgatc

SEQ ID NO: 79411 - DNA, 43 bp, Homo sapiens
  chr10:6852534-6852577
  hypo
ttctccctttacatctgaatacgaagaaaccaggcaaagttct

SEQ ID NO: 79412 - DNA, 90 bp, Homo sapiens
  chr10:6864688-6864778
  hypo
gaatcaggaaagccaatacaacggtattataggtgacccgcgagaacattgttagggtgagaatgacaagtttaggcattaaaaatgcca

SEQ ID NO: 79413 - DNA, 26 bp, Homo sapiens
  chr10:6953233-6953259
  hypo
acttgaattaacagtggctcacgcct

SEQ ID NO: 79414 - DNA, 211 bp, Homo sapiens
  chr10:6984457-6984668
  hypo
ggctgggttatgatagaataacggcactgaactaccttacctatttgaagtacgggaactcctaaacacacttaatttctaagtaggcatgttttcgaggagaactctcgaagcacctgtagtattaaccacttctctctcaggagagcagcgtggtttcttccaagcgcaacctttggcatcacacatcgccatggtgatttttccctga

SEQ ID NO: 79415 - DNA, 30 bp, Homo sapiens
  chr10:6997705-6997735
  hypo
caccatgttgctggacgcggctacagtgat

SEQ ID NO: 79416 - DNA, 43 bp, Homo sapiens
  chr10:7083316-7083359
  hypo
tccttgagacacctacccttccgaatcccattctacaggtcca

SEQ ID NO: 79417 - DNA, 83 bp, Homo sapiens
  chr10:7138551-7138634
  hypo
aagtttacctgagcccaaggccgcatgggtggagttggcgcctggttgccccggccaactccggggcttctcggaaaggggag

SEQ ID NO: 79418 - DNA, 184 bp, Homo sapiens
  chr10:7139932-7140116
  hypo
gaggtctgctgccagtgcctccgggagcccagctcctccagcggggttctctccagatccttgcagaccccaaacagagagatgatggggcctgcagaccttgcctggctgtcagaaattttccacccgctgaagaggtggctggcagtggtctacgctctgcgtgtggccttcctaaattaac

SEQ ID NO: 79419 - DNA, 75 bp, Homo sapiens
  chr10:7156188-7156263
  hypo
atgacacatgctctgaatggccgctaggcgagcactgatcccaccagattctccgggagctctggttttgacatc

SEQ ID NO: 79420 - DNA, 288 bp, Homo sapiens; identical to SEQ ID NO: 24033
  chr10:7202878-7203166
  hypo

SEQ ID NO: 79421 - DNA, 116 bp, Homo sapiens
  chr10:7204659-7204775
  hypo
actcactccctgatccggctacgattaaacaacaacactggagatagttgagggtctagaaaagactgggtagagtttgtctctacagatgttctaggcttcaatcaaaaaccatc

SEQ ID NO: 79422 - DNA, 31 bp, Homo sapiens
  chr10:7205122-7205153
  hypo
catggagatgcctgccggccttccttcactc

SEQ ID NO: 79423 - DNA, 378 bp, Homo sapiens
  chr10:7205705-7206083
  hypo
taatgggccacctcccgagggcagactcagttggcgtactgggcgtagaaagccactttgactctctcgatctggtggcataacttgatggcaggccccagcttcagctccatgcactcctgcaccgtcggaagggtcagaagcaggagtgcttggccgtcaatatcctgcaggaaaagaaaggcaggttagagaaggggcagtgtgcactggggtacacagatgcgtcacagcaggctccagtccggggccaaacatgacaacaggatgctcttgtttcattcaattcaggggattgttggtagagataccagcccggcttgatgactgtctaatctttgtgttactaaaatctttttgtagccgggcacagtggct

SEQ ID NO: 79424 - DNA, 301 bp, Homo sapiens
  chr10:7212763-7213064
  hypo
acacctgccgagcagcgccgaagaaccccctcgcaggtgtcacgaggaagccggctaggacacgaggttcatttcagatgcagagtctcagcacatcaaacaatcgacacgcggcaaccaccgtacctgctcctgaaatatcttggccaagggggcacagtctgtcagcttaatgaacctcaccacgtcggtgaccgtccactccaacgggttgctctccagaaccagtctctcctcctcctcctgtttcgtgtcctgcagagaaagggcaggaggagctcagctgcggcacagtcagctg

SEQ ID NO: 79425 - DNA, 367 bp, Homo sapiens
  chr10:7213828-7214195
  hypo
gccctctgtccccacgcccgggcatcacctctgtcccctcgggcttggtcggcgggcacttctccccttcctctgctgaggaggcagccggcgccccgcggccccttcgtgtcctctctgggggtggccggcgcacgggctctgagccgctccgcagggtgacggccctccggggccgggccgagggcacctccgccgacgaggtgtccgtctggtcatcccggagctcggagccggtctcctcactggcggtgtcatcgtccatggcgtcagcgtcctcctcttcactttcctgggaaggaggaaaaggcatttaaggggctggtggcccgggggcctgtagcggtggccccgcggtcagaccctg

SEQ ID NO: 79426 - DNA, 150 bp, Homo sapiens
  chr10:7214428-7214578
  hypo
gctggcaggtgccccgggcagaacatacctcccccgagcccgcggtgaagtccacggcagaagacctccgtttcttctgcacgaaaatggatttccgtcgcttcctccgcctggcgggtttggggtgtccgctgtcggggttgctttccc

SEQ ID NO: 79427 - DNA, 130 bp, Homo sapiens
  chr10:7216123-7216253
  hypo
ggagagcttggaacaatgtcccgtgtccagttctataaggaccgtgttactcagtgagcaggaataaactgccgtgggcgagcattgctctgtggccatctccaggtacggggcaaatgagcaagcctct

SEQ ID NO: 79428 - DNA, 96 bp, Homo sapiens
  chr10:7235748-7235844
  hypo
gcaaaaatttcctgaacacctcgtgcaatgcaaaggaacgcaacagccgacaagacccttttggtcataggaggcgagcaatctcctgatatgaca

SEQ ID NO: 79429 - DNA, 31 bp, Homo sapiens
  chr10:7236486-7236517
  hypo
aagttcctaataacaccgatggccaggaaaa

SEQ ID NO: 79430 - DNA, 139 bp, Homo sapiens
  chr10:7238963-7239102
  hypo
ccatgacacaaacctcgtcaaagtacctggagaccattgaaatacttaccattacctcccgtgtgcaggtaccaggtgctcggaagagatggatgaaacaaaaagatggcacagcaccatgacccggccaaggagcgcc

SEQ ID NO: 79431 - DNA, 30 bp, Homo sapiens
  chr10:7239511-7239541
  hypo
ctttaagaaccagcacgcatttgcccggtc

SEQ ID NO: 79432 - DNA, 178 bp, Homo sapiens
  chr10:7239773-7239951
  hypo
ctgatggggagtcaggcgtaataaaagcaatggaacccaaaatgaacacaataaccgtgacagccagtgtcgttagaactgtaattaggaggccacactctagttccaaatcgtgacaaagcagcagagaaaaacagatgattttcttcttttgagaaagaggcgctgtgtcctaata

SEQ ID NO: 79433 - DNA, 215 bp, Homo sapiens; identical to SEQ ID NO: 24039
  chr10:7252610-7252825
  hypo

SEQ ID NO: 79434 - DNA, 30 bp, Homo sapiens; identical to SEQ ID NO: 24040
  chr10:7255520-7255550
  hypo

SEQ ID NO: 79435 - DNA, 158 bp, Homo sapiens
  chr10:7256060-7256218
  hypo
tcaccaagggtggtagagaaacgtactaaaaagaaaacatcacgagtaaaaagcaagaaacaaccaaccaaagcaggagatggagaatatatgcgatccttcttaacaagaggttaagaaaacgtccagcatcttccggccaccactcttaagaacac

SEQ ID NO: 79436 - DNA, 32 bp, Homo sapiens
  chr10:7288382-7288414
  hypo
gcataagaatgtgagagaggccgggtgcagtg

SEQ ID NO: 79437 - DNA, 92 bp, Homo sapiens
  chr10:7288713-7288805
  hypo
gacgctaccgctgacaggctatgcacatcaagtctgttgagtttaattgataaataccaggtgaagcgactctgtagcgtgatacatctgca

SEQ ID NO: 79438 - DNA, 225 bp, Homo sapiens
  chr10:7290463-7290688
  hypo
gatccactctaggggctgggtcgaagagcgagggaggaaaacccaccttagtcaccgacgcaggagagatgtaaaagggctcgcacatattcactgtctcaagcttcatcccaactgtgaagaaatggcttcgcaaatctgcgtgatcctgcagggagaaagatgaaaatattgaaagccacggtattgtaaatgacctcagccactgtccggatgcgctcctgg

SEQ ID NO: 79439 - DNA, 30 bp, Homo sapiens
  chr10:7295944-7295974
  hypo
tgacgatttcagaaacgttttactgcaaga

SEQ ID NO: 79440 - DNA, 106 bp, Homo sapiens
  chr10:7304465-7304571
  hypo
tcaccctccctgcaagttccccgggaactggcaagagccagaattatccgcggtaagcagaagccatttgggagtgagaactcccggagcagataactgaaagttg

SEQ ID NO: 79441 - DNA, 169 bp, Homo sapiens
  chr10:7317008-7317177
  hypo
ggaagcatacacaggctggaacgccacaaagagaggcacaggcaggacccgcacagctgtgaggccccgggtgccctggtcccgcagggaggcagacctggggctgcagcgggggcttcactggcctggcagctccgaggcttagaccggagggtgggcatctgtaatt

SEQ ID NO: 79442 - DNA, 101 bp, Homo sapiens
  chr10:7330643-7330744
  hypo
ctatgctaacaggtgcttcttcgtcattaactcttgaccaagttcacggaaaaaaattagaaacagcggccaggtgcggtggctcacacctgcaatcccag

SEQ ID NO: 79443 - DNA, 43 bp, Homo sapiens; identical to SEQ ID NO: 24042
  chr10:7352681-7352724
  hypo

SEQ ID NO: 79444 - DNA, 79 bp, Homo sapiens
  chr10:7367241-7367320
  hypo
tttcaaacacagccacactgcgggggcttcaacataggaatttggggagttcacaaacgttcaggccataaccaatatt

SEQ ID NO: 79445 - DNA, 30 bp, Homo sapiens; identical to SEQ ID NO: 24043
  chr10:7392001-7392031
  hypo

SEQ ID NO: 79446 - DNA, 30 bp, Homo sapiens
  chr10:7396413-7396443
  hypo
atccttctcaaccaacgtaggagaggaaag

SEQ ID NO: 79447 - DNA, 37 bp, Homo sapiens
  chr10:7401230-7401267
  hypo
gagccctccatgcacccgaggccgtgatcatctgagc

SEQ ID NO: 79448 - DNA, 30 bp, Homo sapiens
  chr10:7404090-7404120
  hypo
cgcggcactgggtgacgctttaatgtcata

SEQ ID NO: 79449 - DNA, 302 bp, Homo sapiens; identical to SEQ ID NO: 24044
  chr10:7409502-7409804
  hypo

SEQ ID NO: 79450 - DNA, 30 bp, Homo sapiens
  chr10:7414647-7414677
  hypo
tcccctgcctcccaacggcactgggcacct

SEQ ID NO: 79451 - DNA, 233 bp, Homo sapiens
  chr10:7424553-7424786
  hypo
gtaagacactccccccgccttgaagctatgtagcagcaacctccaccccccacacaacctcagcatcccacgcgcaggtactgcaacacgcagtgccctgcctcaggaagaagtcctcacgtgttacacatgatctgttaccaaaaccagttaaagtatcgatgtttgtcaataatgtgctttttcacaaagcagaaatggagacaagactttccctacgatagcactgctat

SEQ ID NO: 79452 - DNA, 139 bp, Homo sapiens
  chr10:7426167-7426306
  hypo
catctcaaaaaaaaaaaaaaaaaaaaaaaaaaacaaccacagaaaggacaaataagtaccatccctgaagagaaatggacatgacgtgctcactgtggcaccgtctggggcacctcggaggaagcgagtgagcacaatc

SEQ ID NO: 79453 - DNA, 37 bp, Homo sapiens
  chr10:7442790-7442827
  hypo
catctcaaaaagcatcccccccggccaggcgcggtgg

SEQ ID NO: 79454 - DNA, 301 bp, Homo sapiens; identical to SEQ ID NO: 7174
  chr10:7449888-7450189
  hypo

SEQ ID NO: 79455 - DNA, 3166 bp, Homo sapiens; identical to SEQ ID NO: 7175
  chr10:7450490-7453656
  hypo

SEQ ID NO: 79456 - DNA, 57 bp, Homo sapiens
  chr10:7498706-7498763
  hypo
tgcacctggccttgttatatgcgtgtagcttcttacgctgccatgcatgttgtgtat

SEQ ID NO: 79457 - DNA, 52 bp, Homo sapiens
  chr10:7583451-7583503
  hypo
agggaaagtcctgaacgcccccttccccctgtcttttcggcggggctttggg

SEQ ID NO: 79458 - DNA, 332 bp, Homo sapiens
  chr10:7618356-7618688
  hypo
aggtgagtggtatctcaggcccgcgtcccccacacctggctggcacaggtgcctcgtacctggctgcgtgccagctcctcgcacgctctgcaccaccggttcgggtcccatggcagccgacatgccgtgggcctcctccaggccatccatgcgtgggaccggccccctcagcttcatggaggtgaagggagtgaggaagcggtagctcacagccagggcctgggcccgctgccgcagccgctccttctccggttcatcgtcactttgcagccaggagctcagcagctcctttgtggtgaggtagctccagagacgctcgatgtggttggtgt

SEQ ID NO: 79459 - DNA, 42 bp, Homo sapiens; identical to SEQ ID NO: 24049
  chr10:7679268-7679310
  hypo

SEQ ID NO: 79460 - DNA, 172 bp, Homo sapiens
  chr10:7780610-7780782
  hypo
ttccagattccaccccgtcttgggccaatccttcaccaacgcccgtgatctccatgctggcacaaggatctcaggtgctagagtccacgccacccccacatgtgatgagaggtaacgcttctacactgcttgcacgtcccagaactcagccgaccataatcctgggaagcat

SEQ ID NO: 79461 - DNA, 30 bp, Homo sapiens
  chr10:7852583-7852613
  hypo
ctcgtcagcattgaccgctacgccccagta

SEQ ID NO: 79462 - DNA, 185 bp, Homo sapiens; identical to SEQ ID NO: 24051
  chr10:7871222-7871407
  hypo

SEQ ID NO: 79463 - DNA, 168 bp, Homo sapiens; identical to SEQ ID NO: 24052
  chr10:7985033-7985201
  hypo

SEQ ID NO: 79464 - DNA, 30 bp, Homo sapiens
  chr10:8006631-8006661
  hypo
attgaggcctctatcgatgctgtgattgca

SEQ ID NO: 79465 - DNA, 30 bp, Homo sapiens; identical to SEQ ID NO: 24053
  chr10:8051085-8051115
  hypo

SEQ ID NO: 79466 - DNA, 353 bp, Homo sapiens
  chr10:8055518-8055871
  hypo
ctaaaacagtgatgacgctgatcatggcattaatgaagtgctgatctactatattttttagtttaatatgcctgtttattcggttaacagtataaagtaatcattctgatctggcctctttttgttttttttcccattccctccatttttgccgcttccgctttgcaaacatcagatccgagatgagtggggcaatcagatctggatctgccctgggtgtaacaagcctgacgatgggagtcccatgattgggtgtgacgactgcgatgactggtaccactggtgagtgcccagggcgccctgccggccacactcattaggcagcatcagccgctcctgagatgaagcatcca

SEQ ID NO: 79467 - DNA, 30 bp, Homo sapiens; identical to SEQ ID NO: 24055
  chr10:8056845-8056875
  hypo

SEQ ID NO: 79468 - DNA, 146 bp, Homo sapiens; identical to SEQ ID NO: 46838
  chr10:8075798-8075944
  hypo

SEQ ID NO: 79469 - DNA, 2095 bp, Homo sapiens; identical to SEQ ID NO: 46855
  chr10:8095492-8097587
  hypo

SEQ ID NO: 79470 - DNA, 43 bp, Homo sapiens
  chr10:8124884-8124927
  hypo
agaatgaaacttcaggctgggcgcggtggctcacgcctgtaat

SEQ ID NO: 79471 - DNA, 19 bp, Homo sapiens
  chr10:8166125-8166144
  hypo
cccaatccaagtctttaaa

SEQ ID NO: 79472 - DNA, 175 bp, Homo sapiens
  chr10:8203923-8204098
  hypo
aggagtctgtctcccagaaggcggaatcgatctcccaaaagtagaagccccttctcccgccgagaaaggcatccgagcaagggtccaagacatcaccgcagcagatcccgagaccggcggcacagatcccgttccaagtccccagatcctcaccgtagtcacagacacaggagct

SEQ ID NO: 79473 - DNA, 86 bp, Homo sapiens
  chr10:8556147-8556233
  hypo
tgggaccggctgatgttccggttcatctcggagatctcagtctttgtactccgcaggtgatcctcgtgcttcccaggcagggtctg

SEQ ID NO: 79474 - DNA, 30 bp, Homo sapiens; identical to SEQ ID NO: 46856
  chr10:8701203-8701233
  hypo

SEQ ID NO: 79475 - DNA, 30 bp, Homo sapiens; identical to SEQ ID NO: 46857
  chr10:8739564-8739594
  hypo

SEQ ID NO: 79476 - DNA, 94 bp, Homo sapiens
  chr10:9043111-9043205
  hypo
gcttgaaacaaaccagaaagccggcggtggattatatgttatatgctccaggccgtcgtcagaagggtgataaaagaaaatgaacgggccgggc

SEQ ID NO: 79477 - DNA, 44 bp, Homo sapiens
  chr10:9141898-9141942
  hypo
cgcgagccactgtgcccgaccacggctaatttttggctaatttt

SEQ ID NO: 79478 - DNA, 31 bp, Homo sapiens
  chr10:9171726-9171757
  hypo
caccgcgcccggccaaagcatacaatttatt

SEQ ID NO: 79479 - DNA, 30 bp, Homo sapiens; identical to SEQ ID NO: 7190
  chr10:9423701-9423731
  hypo

SEQ ID NO: 79480 - DNA, 18 bp, Homo sapiens
  chr10:9841517-9841535
  hypo
ttttttttttttttttga

SEQ ID NO: 79481 - DNA, 19 bp, Homo sapiens
  chr10:9919403-9919422
  hypo
ctcaataataataataata

SEQ ID NO: 79482 - DNA, 445 bp, Homo sapiens
  chr10:9919834-9920279
  hypo
tacaggtagttaggcaatgagcggggcaggagagggctctctcccacccgctaggaatgtcaggtgacatcgttcagcaattatcgcattgcctctctaaaaatgataattgggcagccagggagagaaaatctcctcaaggtccacacctgctaacattacaaacgttcattgaatgcaggcgccagagagaggcaacttcctcagcccgcctgttaagagacaaaaaaaaaaaaaaaaaaaaaaaaaaaatggcgaagtatcagcttccggggacacattccatcggaataggggagaaaagcctcagatgggcgtctgggtaagtgccctaaaaacaatgcgcatgctcagttcccaagggtgaggtgggcacagcgcatgcggaaagcccatcttaaagggagagtcttgggaaagaggcgagcctataaagtctcaggag

SEQ ID NO: 79483 - DNA, 30 bp, Homo sapiens; identical to SEQ ID NO: 7191
  chr10:10043570-10043600
  hypo

SEQ ID NO: 79484 - DNA, 30 bp, Homo sapiens; identical to SEQ ID NO: 24059
  chr10:10687296-10687326
  hypo

SEQ ID NO: 79485 - DNA, 21 bp, Homo sapiens
  chr10:10692753-10692774
  hypo
cagagtcaccatctgacccag

SEQ ID NO: 79486 - DNA, 43 bp, Homo sapiens
  chr10:10979085-10979128
  hypo
tttttttttttttttttttttcgtgacagagcctcggtctgtt

SEQ ID NO: 79487 - DNA, 242 bp, Homo sapiens; identical to SEQ ID NO: 46860
  chr10:11059421-11059663
  hypo

SEQ ID NO: 79488 - DNA, 225 bp, Homo sapiens; identical to SEQ ID NO: 7193
  chr10:11059932-11060157
  hypo

SEQ ID NO: 79489 - DNA, 120 bp, Homo sapiens; identical to SEQ ID NO: 7194
  chr10:11060314-11060434
  hypo

SEQ ID NO: 79490 - DNA, 116 bp, Homo sapiens; identical to SEQ ID NO: 7195
  chr10:11060512-11060628
  hypo

SEQ ID NO: 79491 - DNA, 68 bp, Homo sapiens; identical to SEQ ID NO: 46864
  chr10:11060741-11060809
  hypo

SEQ ID NO: 79492 - DNA, 33 bp, Homo sapiens
  chr10:11081057-11081090
  hypo
gcatcgaccatgtaacggcgataacagccgagt

SEQ ID NO: 79493 - DNA, 312 bp, Homo sapiens
  chr10:11198991-11199303
  hypo
ctctccacaggattcccacagcgtgtgagaatgaagggtggaaatggaaggtcctttgcggaacaggctccagggggtggcatttcaagagcaggttgggggatgaggctgtgtcccctgtgcaaagtcacccatgcacatgactgccgtcggcgccagggtctttgctggtacttccgtgcctctcacacatgcatggttgtagaggagctgtgctctggggccgcgtttcccaccttcccagctcccttccttgttagagccgcctttttctccccagttttttgtttcgtttcaatgccattgccaact

SEQ ID NO: 79494 - DNA, 243 bp, Homo sapiens
  chr10:11296955-11297198
  hypo
tcccatgttagtgagcacaggcggtgtagacggcctgcagcaggtggtgtggacggcctgcaggtacactcgttgcccagggtatctggtgtctctctggcttagctgtcgcgcctgtgctgcccatgactgaccaggcttcaccagttcacagcggatccatgctactttgccttctctgaagggaggaaaaagaacttgaattagaagttttccgtcagcgtacaggaggtcaggtcctca

SEQ ID NO: 79495 - DNA, 222 bp, Homo sapiens; identical to SEQ ID NO: 24068
  chr10:11317671-11317893
  hypo

SEQ ID NO: 79496 - DNA, 30 bp, Homo sapiens; identical to SEQ ID NO: 24069
  chr10:11322284-11322314
  hypo

SEQ ID NO: 79497 - DNA, 107 bp, Homo sapiens
  chr10:11338048-11338155
  hypo
tgtgccctgagctctccttggcgggtgccttcatccccgggatggacagatcctcgcgtgcatcttagggctgccactcaccaagcgcattgttccttgttttgagt

SEQ ID NO: 79498 - DNA, 30 bp, Homo sapiens
  chr10:11343304-11343334
  hypo
gcgggccctgctcccgctccccaccccgct

SEQ ID NO: 79499 - DNA, 30 bp, Homo sapiens; identical to SEQ ID NO: 24070
  chr10:11344071-11344101
  hypo

SEQ ID NO: 79500 - DNA, 253 bp, Homo sapiens
  chr10:11360788-11361041
  hypo
tatctggcactctggagaagccgagtcgtggaggctgcacatcgcaggaaggatcccccgtgggtctcacatgacagggcctgaaaactcccacccgcagcagacaaggcatcatggtggtgcgatgctgcccacccctccatgggaacttggaggcgtccactggagacgagctgctgtcttcagcccgtcctcgtctggcagcaaggccccacatggctctgcaggctgcgaggcacacccagaacctcat

SEQ ID NO: 79501 - DNA, 319 bp, Homo sapiens
  chr10:11381579-11381898
  hypo
gtcccaaatggaagacttgcccgctatgaggtcaagccacctcagatgtcccgtcatctctttctgcacccgctcaggaacattttctatctcgacagaagtttaacatctgagatcagaacggacatagaactaagcgcacatgaacagaaactgtggagacaggcgcctgactcaggcattcctgagaagcggatccgctccctttcccccatctcccacggcagctcctgttgggcctggcaagttagtgcccagggcaggatggggccgacgccagccccccaccctgcacagcacaaccgagccattcaaacag

SEQ ID NO: 79502 - DNA, 30 bp, Homo sapiens; identical to SEQ ID NO: 24072
  chr10:11386128-11386158
  hypo

SEQ ID NO: 79503 - DNA, 299 bp, Homo sapiens; identical to SEQ ID NO: 24073
  chr10:11472667-11472966
  hypo

SEQ ID NO: 79504 - DNA, 30 bp, Homo sapiens
  chr10:11485614-11485644
  hypo
ggtgaatatctcaccgcgcagcttccttac

SEQ ID NO: 79505 - DNA, 145 bp, Homo sapiens
  chr10:11504536-11504681
  hypo
gcatcttctgcggccggtgaagctttatatctcacgggactatctacagaaactgcagggaggccatggtcctgaaagggtgcgagttgaaaggctgagtattttggtaaattgccacggctagcatctcgggtccatgattgtc

SEQ ID NO: 79506 - DNA, 30 bp, Homo sapiens
  chr10:11505265-11505295
  hypo
acgttgtcgtactgcgatgcagtggagccc

SEQ ID NO: 79507 - DNA, 30 bp, Homo sapiens
  chr10:11515987-11516017
  hypo
gcaggcaccaccttcgagataataaaggcg

SEQ ID NO: 79508 - DNA, 31 bp, Homo sapiens
  chr10:11520400-11520431
  hypo
agaaaacaaacctcaacgactgtaaaataaa

SEQ ID NO: 79509 - DNA, 82 bp, Homo sapiens
  chr10:11661766-11661848
  hypo
ctgatgactcattcacgtaagattttgttgctgttattaaggtgaaattcacataaaataaaatcaaccgtttttcaagtga

SEQ ID NO: 79510 - DNA, 425 bp, Homo sapiens
  chr10:11731794-11732219
  hypo
ccggaccgattttcaacatttttaatgtgggcttgtacttgtttccatgtttggccgctgacagtgattttctttgctggacatgaccatgttttgctgaatgatttcggctttggggagagagagagctgtgctctggcgttatttactcttgagaaaatacaggcgcatggatacagcagccagcgttgcctggtagaatgtgggcagcagcaggctggggggttgcctcgtggttctggaggagcgagcggctcagccatccacacaactccttcaccagcctttcctcacccgcctggagatagccttggacttcgccctcagccagagccagaagatacaggcccaggtttcagtggaatttacactggagaataagaagtccctctatttcttctagaagcctccgccctgaccgctaa

SEQ ID NO: 79511 - DNA, 170 bp, Homo sapiens
  chr10:11761570-11761740
  hypo
ggtttacttggcagaaccacacgatgttgagtagcaacaaggatgttgaccccttcagcctcaggtggccaggtagggcacagtggacgctcaccctgggcggtggcagggcgtgactcagtgtgcttgacgaacatggtgttgtcatcgccccttggctgggaagcttg

SEQ ID NO: 79512 - DNA, 30 bp, Homo sapiens
  chr10:11805267-11805297
  hypo
gaggccctgctccacgggctgcttagcaag

SEQ ID NO: 79513 - DNA, 30 bp, Homo sapiens; identical to SEQ ID NO: 46869
  chr10:11865967-11865997
  hypo

SEQ ID NO: 79514 - DNA, 194 bp, Homo sapiens; identical to SEQ ID NO: 24075
  chr10:11870931-11871125
  hypo

SEQ ID NO: 79515 - DNA, 30 bp, Homo sapiens
  chr10:11876443-11876473
  hypo
agccacctggcagggcgtggtggctcatgc

SEQ ID NO: 79516 - DNA, 30 bp, Homo sapiens
  chr10:11876811-11876841
  hypo
gttattgaggctgggcgcagtggctcacgc

SEQ ID NO: 79517 - DNA, 36 bp, Homo sapiens
  chr10:11878793-11878829
  hypo
gtctataaacctataccgaagtcctctcttatacac

SEQ ID NO: 79518 - DNA, 151 bp, Homo sapiens
  chr10:11894858-11895009
  hypo
ccggccactcaagctgatgtttcactcctgtgcaagtaaagatgcttttgtatccttctcagaatccagacctttgcatagctttgggaactttacaaaaagagttggtgaagttaagaggatctcgtgccttccccggtgaggacattca

SEQ ID NO: 79519 - DNA, 29 bp, Homo sapiens
  chr10:11897183-11897212
  hypo
aagataaggccaggtgcggtggctcacgc

SEQ ID NO: 79520 - DNA, 47 bp, Homo sapiens; identical to SEQ ID NO: 24077
  chr10:11898438-11898485
  hypo

SEQ ID NO: 79521 - DNA, 24 bp, Homo sapiens
  chr10:11899444-11899468
  hypo
agtaaccattattggccgggtgca

SEQ ID NO: 79522 - DNA, 79 bp, Homo sapiens
  chr10:11911398-11911477
  hypo
ttgaggctcttttcagttcagcgagagggaacttcatgcatttactttcacgtgggccggtggctcacaggctcctccc

SEQ ID NO: 79523 - DNA, 33 bp, Homo sapiens
  chr10:11914995-11915028
  hypo
aagtactgggattacaggcgtaagccactgccc

SEQ ID NO: 79524 - DNA, 117 bp, Homo sapiens
  chr10:11920972-11921089
  hypo
aatgtcaggtgcttggcgtgtgcctggcttacaccttcctcatccccatcatcaccgcagggaattcctacatggccctgggaactcgggagcaagaccagacgcaggagtgaaagc

SEQ ID NO: 79525 - DNA, 152 bp, Homo sapiens
  chr10:11923031-11923183
  hypo
atggcagagcatgcaccggggaatctgagaggcacacacatgatcagactcgcctcacgcctgatggatcagaaactctggggtgggctccaggaaggtgtgatctcaatgcactgggctggcaaacagaacccagcgcgctcccccgaggt

SEQ ID NO: 79526 - DNA, 51 bp, Homo sapiens
  chr10:11941265-11941316
  hypo
cctctgggactccagccgactccaccacgggatgggcgaagggggaggctc

SEQ ID NO: 79527 - DNA, 30 bp, Homo sapiens; identical to SEQ ID NO: 24078
  chr10:11950036-11950066
  hypo

SEQ ID NO: 79528 - DNA, 31 bp, Homo sapiens
  chr10:11951074-11951105
  hypo
gtacacgtcccactggcgaccaagcccactc

SEQ ID NO: 79529 - DNA, 94 bp, Homo sapiens
  chr10:11952516-11952610
  hypo
aattggtgtgagctggtcctgcgggtacacccgatcgctgccactgtaccggaaggatggcaaaggagcagtcggtggtcagtcctgtgttgaa

SEQ ID NO: 79530 - DNA, 22 bp, Homo sapiens
  chr10:11993069-11993091
  hypo
tatttttttgagatggagtttc

SEQ ID NO: 79531 - DNA, 25 bp, Homo sapiens
  chr10:12117184-12117209
  hypo
tttcttttttttgagacggagtctc

SEQ ID NO: 79532 - DNA, 30 bp, Homo sapiens
  chr10:12211495-12211525
  hypo
cgggcctgtgactccgagctgcgctgcctc

SEQ ID NO: 79533 - DNA, 41 bp, Homo sapiens
  chr10:12309042-12309083
  hypo
aaatatatatatatagcctggcgcggtggtcacgcctgtaa

SEQ ID NO: 79534 - DNA, 22 bp, Homo sapiens
  chr10:12336504-12336526
  hypo
cgagactcagtctaaaaaaaaa

SEQ ID NO: 79535 - DNA, 25 bp, Homo sapiens
  chr10:12341300-12341325
  hypo
agtgaaactccgtctcaaaaaaaaa

SEQ ID NO: 79536 - DNA, 43 bp, Homo sapiens
  chr10:12346515-12346558
  hypo
cactaagagctttggaaaggtcgacatggaaccagctctttgc

SEQ ID NO: 79537 - DNA, 1900 bp, Homo sapiens; identical to SEQ ID NO: 46876
  chr10:12390765-12392665
  hypo

SEQ ID NO: 79538 - DNA, 96 bp, Homo sapiens
  chr10:12460891-12460987
  hypo
ccatagatggaaggcctcagccgagagtggccataggtggaaggcctcagtcgcgggcgtggtgtgtccgaagccgttgctcacagaacacttaag

SEQ ID NO: 79539 - DNA, 67 bp, Homo sapiens
  chr10:12485159-12485226
  hypo
agtagtgaaactgactcgaggaggaaagacgtttatgtgcggcagatcttctcggggtttgcctatt

SEQ ID NO: 79540 - DNA, 189 bp, Homo sapiens
  chr10:12531841-12532030
  hypo
aagctggttctgcagggaccacgggctgatgtccctgcagctgccagacgccccgacacctccgagtctgcattccggcattcagcccgagaggaatgtgttgctggatgtgatgttccctggcttgagggagcgtggggcaggtgtgaacggggcaggcacactcacgggtctgggctctggatgtgt

SEQ ID NO: 79541 - DNA, 94 bp, Homo sapiens
  chr10:12545390-12545484
  hypo
gcaggtcccctcttggcgtgtgtcacagctgtctggcagcctgggctacttttaacaagggaggagagagcaggtgaggcgaagaggccagaag

SEQ ID NO: 79542 - DNA, 29 bp, Homo sapiens
  chr10:12548514-12548543
  hypo
ctctttcttttttttttgagacggggagt

SEQ ID NO: 79543 - DNA, 148 bp, Homo sapiens
  chr10:12548782-12548930
  hypo
ctgggattacaggcgtgagccaccgcgcccggcctgggctctttcatgcccacctagcccttggtgcccccgagcccgagggtaggacctgccaacctcgggtcacatcatgtccttagttcctagcgtgatgctccatgaatgtgtg

SEQ ID NO: 79544 - DNA, 55 bp, Homo sapiens
  chr10:12595202-12595257
  hypo
tttttccttctttgttcacagcggggccttttccgaagtggttttagctgaagag

SEQ ID NO: 79545 - DNA, 58 bp, Homo sapiens
  chr10:12611334-12611392
  hypo
ttacagaaaatcttgttatttcgaactctgtttactcggcatacaagtccaattgaaa

SEQ ID NO: 79546 - DNA, 43 bp, Homo sapiens; identical to SEQ ID NO: 24081
  chr10:12671579-12671622
  hypo

SEQ ID NO: 79547 - DNA, 30 bp, Homo sapiens; identical to SEQ ID NO: 24082
  chr10:12680724-12680754
  hypo

SEQ ID NO: 79548 - DNA, 213 bp, Homo sapiens; identical to SEQ ID NO: 24083
  chr10:12707776-12707989
  hypo

SEQ ID NO: 79549 - DNA, 285 bp, Homo sapiens
  chr10:12837374-12837659
  hypo
ttcctgtgggtccaccgtgcctggtctcccattcccacctaaagacttatgcacaaggccactgagcggtccatgagcaacaggcagcatgccagggaggccacctccccacacggaagtcacggagcgcctcattcttcccagccactgtaatggaaaagaggtcagcccctgcagtgttttggagcatagcactcttattttttatttttgtttgataaacctgtcacgctgagatatcagactgcagccaaagtggccgtgacaagccgtggcaccgagttt

SEQ ID NO: 79550 - DNA, 43 bp, Homo sapiens
  chr10:12872605-12872648
  hypo
tgtgtggcccagggaaagctgcgtttcatggaggcttccagga

SEQ ID NO: 79551 - DNA, 30 bp, Homo sapiens; identical to SEQ ID NO: 24084
  chr10:12874192-12874222
  hypo

SEQ ID NO: 79552 - DNA, 72 bp, Homo sapiens
  chr10:12965604-12965676
  hypo
atattttgtgatatgatacctcgatgggttttcctttgggatatgcgtcccggtcatttctatccttttttc

SEQ ID NO: 79553 - DNA, 30 bp, Homo sapiens; identical to SEQ ID NO: 24085
  chr10:13146883-13146913
  hypo

SEQ ID NO: 79554 - DNA, 38 bp, Homo sapiens; identical to SEQ ID NO: 24086
  chr10:13150490-13150528
  hypo

SEQ ID NO: 79555 - DNA, 202 bp, Homo sapiens
  chr10:13263526-13263728
  hypo
gcacatatatatatatatgttatgacccagcgtttcatgtccagaaatcgatcacactgatagacgactgggtgagtcaactctagcatattcggtggcatatgggacatattgagaagagtgagcaatgctcctcaagttcaagctttcaaacacccaagtcagcaagaatcacatcatcgctcagggaagacagcatgac

SEQ ID NO: 79556 - DNA, 30 bp, Homo sapiens
  chr10:13264033-13264063
  hypo
agattgctggaacacggggatgccaatggt

SEQ ID NO: 79557 - DNA, 20 bp, Homo sapiens
  chr10:13281207-13281227
  hypo
ccattcggccagtcgcggtg

SEQ ID NO: 79558 - DNA, 177 bp, Homo sapiens; identical to SEQ ID NO: 46881
  chr10:13341451-13341628
  hypo

SEQ ID NO: 79559 - DNA, 30 bp, Homo sapiens
  chr10:13404822-13404852
  hypo
gaaaagatctcaaaccggccgggcgcggtg

SEQ ID NO: 79560 - DNA, 165 bp, Homo sapiens
  chr10:13405107-13405272
  hypo
agtctccgtctcaaaaaacaaaaaacaaaaagatctcacaccactgcgcggtggcagaacggaggcaggagacaggacttgaactcagtctagacagcaacgcaagggggcatctatgcgattgaccatggccggaagcacacctccatgcgatgcggtgagggg

SEQ ID NO: 79561 - DNA, 89 bp, Homo sapiens
  chr10:13451815-13451904
  hypo
cattgtgctgttttatgctcccgtctctcaagccaggctcgtgcttgtgatatcggtagtcctagtgcgttagaggagaagggattggg

SEQ ID NO: 79562 - DNA, 173 bp, Homo sapiens
  chr10:13480543-13480716
  hypo
catatctgtatatattactttcggggggataatcaatttcacgcatttgaggttacaaaacataataggagttgatctgtgtaaattcaagttgctttgaatcgctagcgtttattaaattctcatggagtacaacctgcatctctttggtcgatctattgacacaatttctc

SEQ ID NO: 79563 - DNA, 36 bp, Homo sapiens
  chr10:13516621-13516657
  hypo
tcatcgctgttggactcgggtcgatacccgtcatcg

SEQ ID NO: 79564 - DNA, 31 bp, Homo sapiens
  chr10:13531358-13531389
  hypo
acagtgactgagtgttcgtcacacacaggca

SEQ ID NO: 79565 - DNA, 133 bp, Homo sapiens
  chr10:13688015-13688148
  hypo
ccccctgcatggaccggggctaacagtaccctctacgactcccacaggtctctctttgtgtccagatggatggcgactgtgagtcagcaacgccagccaagacttcctcgcctttaccgtggcattggggcag

SEQ ID NO: 79566 - DNA, 171 bp, Homo sapiens; identical to SEQ ID NO: 24089
  chr10:13692404-13692575
  hypo

SEQ ID NO: 79567 - DNA, 30 bp, Homo sapiens
  chr10:13699411-13699441
  hypo
ccggtgtcgttttccgagcccaggagcttg

SEQ ID NO: 79568 - DNA, 94 bp, Homo sapiens; identical to SEQ ID NO: 24090
  chr10:13711292-13711386
  hypo

SEQ ID NO: 79569 - DNA, 38 bp, Homo sapiens
  chr10:13715560-13715598
  hypo
tgcacacatgtgcatgcgtgcgcgcgcgcacacacaca

SEQ ID NO: 79570 - DNA, 31 bp, Homo sapiens; identical to SEQ ID NO: 24091
  chr10:13735187-13735218
  hypo

SEQ ID NO: 79571 - DNA, 30 bp, Homo sapiens
  chr10:13735421-13735451
  hypo
tcatgccctgcgacacgatggagagagtat

SEQ ID NO: 79572 - DNA, 30 bp, Homo sapiens
  chr10:13735972-13736002
  hypo
tcagcgtccccgtctcggtcaggtcgatgg

SEQ ID NO: 79573 - DNA, 86 bp, Homo sapiens
  chr10:13737447-13737533
  hypo
tggtttttataaggtatctgctccagtttctaccttcggtagtgacaatgtgtttgtttgcatttcccacacgtgtgtccaatgtt

SEQ ID NO: 79574 - DNA, 96 bp, Homo sapiens
  chr10:13739453-13739549
  hypo
ctttctagaatggaaaatatcacagcgacctaacagactcggtggggagaggaccgggaggacatgggcattgtcggggagagtctctctttgcaa

SEQ ID NO: 79575 - DNA, 31 bp, Homo sapiens
  chr10:13741937-13741968
  hypo
gaaattctctgtcctgcgctcattcatccca

SEQ ID NO: 79576 - DNA, 334 bp, Homo sapiens
  chr10:13769491-13769825
  hypo
gggtcatcctagcttccgagtttcgtctaggttgagggcgccatgttgggactgcatcagcttctctctctgcctggttctgcttcctttactttaccatttgttgttagtccagggcacaccccagtaaacttcctgcatgcgagttcatcttagactgcttcccagggaatcgtatgtacaacactcgggagtagagagtcactgaaacggccctagctctgagagacccctcctgaccagccatcacccctcccgctcttccttactctgatttattgtcttcgtagaatttaactctcaggtctatggccatactgccctgaatgcgcct

SEQ ID NO: 79577 - DNA, 33 bp, Homo sapiens
  chr10:13769884-13769917
  hypo
aatttagtgctcgaacactattgctgtagcttt

SEQ ID NO: 79578 - DNA, 472 bp, Homo sapiens; identical to SEQ ID NO: 24093
  chr10:13771116-13771588
  hypo

SEQ ID NO: 79579 - DNA, 43 bp, Homo sapiens
  chr10:13776211-13776254
  hypo
cccttctccatcctgaagccccgccaggtgttgcccgccctac

SEQ ID NO: 79580 - DNA, 29 bp, Homo sapiens
  chr10:13798636-13798665
  hypo
ttaaagacgtgagccaccatgctttgctt

SEQ ID NO: 79581 - DNA, 292 bp, Homo sapiens; identical to SEQ ID NO: 46887
  chr10:13933246-13933538
  hypo

SEQ ID NO: 79582 - DNA, 338 bp, Homo sapiens; identical to SEQ ID NO: 7209
  chr10:13933596-13933934
  hypo

SEQ ID NO: 79583 - DNA, 143 bp, Homo sapiens; identical to SEQ ID NO: 7210
  chr10:13933982-13934125
  hypo

SEQ ID NO: 79584 - DNA, 145 bp, Homo sapiens; identical to SEQ ID NO: 46890
  chr10:13934168-13934313
  hypo

SEQ ID NO: 79585 - DNA, 168 bp, Homo sapiens
  chr10:14195966-14196134
  hypo
tcccaacggccatgacggggtcgcggcttcctgctgtcacctcgccatcccctgcttggcctcttagctcttccagcgcctgagggacccattccctgtcttaaaccatctgtgtttgaaatacttgactggaaagtatctggcagtgacgcccgataggttaggcag

SEQ ID NO: 79586 - DNA, 17 bp, Homo sapiens
  chr10:14393905-14393922
  hypo
tatgacatggccaggcg

SEQ ID NO: 79587 - DNA, 30 bp, Homo sapiens; identical to SEQ ID NO: 24098
  chr10:14492011-14492041
  hypo

SEQ ID NO: 79588 - DNA, 30 bp, Homo sapiens; identical to SEQ ID NO: 24099
  chr10:14562020-14562050
  hypo

SEQ ID NO: 79589 - DNA, 354 bp, Homo sapiens
  chr10:14575211-14575565
  hypo
gtgagagatgctttagactcacgcagcagcagcataggtaggcggagagcctgattcaagatgtattttaaaggtaaagtctctgggacttcctgaaggactggacacgaggcgtgaaaagcactgaggaatcaaggatgacttggaggtttccggcctgagcaaccagaaggctcaagttgccatgacgggaggctgaaagagcaagtggatctaggacgtgtcgagtctgagacgtctgatcgacatgaaagaggtgacattgagagggcaagtgcagccagcgctcaagcctgggtgactcgctctcctttacctgactgactcgctctcgtttacctgactgactggccc

SEQ ID NO: 79590 - DNA, 161 bp, Homo sapiens; identical to SEQ ID NO: 24100
  chr10:14626300-14626461
  hypo

SEQ ID NO: 79591 - DNA, 72 bp, Homo sapiens; identical to SEQ ID NO: 46891
  chr10:14646261-14646333
  hypo

SEQ ID NO: 79592 - DNA, 101 bp, Homo sapiens; identical to SEQ ID NO: 46892
  chr10:14646653-14646754
  hypo

SEQ ID NO: 79593 - DNA, 31 bp, Homo sapiens; identical to SEQ ID NO: 24101
  chr10:14735179-14735210
  hypo

SEQ ID NO: 79594 - DNA, 436 bp, Homo sapiens
  chr10:14816083-14816519
  hypo
ctctgagaatctacacggctttaacacacttcttcgcactagtgagaacgcccgcaatgccttattcagtaaggttaaatgagtttgtttgctgaaacattcgccacatgatcccaacgctcctccagctccatcccgtctataatcgcagagcgaacactcactcaccttgggcgtgtcaataattgatggtctggggatggaagcgtgaaacaccactgcttcacagtccgccccatcatccagggacccgggcacatcttcaggcgtctccgcgggctgggccgcagtgcggtgacttgaattccgattcgcactgccatttctctctgcatgggtgctcgaatcttgccttttctctggagctccttctgcgcttgggtgtcttggctgtctgcctgctttggccacaggctgcacacggacggtggaatga

SEQ ID NO: 79595 - DNA, 30 bp, Homo sapiens; identical to SEQ ID NO: 24103
  chr10:14816958-14816988
  hypo

SEQ ID NO: 79596 - DNA, 37 bp, Homo sapiens; identical to SEQ ID NO: 24104
  chr10:14851281-14851318
  hypo

SEQ ID NO: 79597 - DNA, 35 bp, Homo sapiens
  chr10:14947695-14947730
  hypo
tgtttcggctggacacggtagctgacgcctgtaat

SEQ ID NO: 79598 - DNA, 125 bp, Homo sapiens
  chr10:14966087-14966212
  hypo
ggacacacatcaagtacgaagcagagaaagatgtttccacacaaggtactgagctgccgcaggctgtgtgctcacgctaacgggagtgcttgctctctctcactcgcgtgcgctctctctcaata

SEQ ID NO: 79599 - DNA, 37 bp, Homo sapiens
  chr10:14966551-14966588
  hypo
aataaaatcatccaggccaggcgtggtggctcacacc

SEQ ID NO: 79600 - DNA, 31 bp, Homo sapiens; identical to SEQ ID NO: 24106
  chr10:14975093-14975124
  hypo

SEQ ID NO: 79601 - DNA, 8 bp, Homo sapiens
  chr10:15000600-15000608
  hypo
aaacatgt

SEQ ID NO: 79602 - DNA, 17 bp, Homo sapiens
  chr10:15009624-15009641
  hypo
ttttacaaattcagttc

SEQ ID NO: 79603 - DNA, 54 bp, Homo sapiens
  chr10:15022642-15022696
  hypo
gctcaacctactggagcaaagcgcagcctatgtctctggttggaaacctctgga

SEQ ID NO: 79604 - DNA, 50 bp, Homo sapiens; identical to SEQ ID NO: 24107
  chr10:15140582-15140632
  hypo

SEQ ID NO: 79605 - DNA, 28 bp, Homo sapiens
  chr10:15140871-15140899
  hypo
agactccgtctcaaaaaaaaaaaaaaaa

SEQ ID NO: 79606 - DNA, 30 bp, Homo sapiens
  chr10:15145400-15145430
  hypo
atcatccgctggagcgctctggagagcgag

SEQ ID NO: 79607 - DNA, 30 bp, Homo sapiens
  chr10:15166258-15166288
  hypo
agggtagggaggcatcgtaaggcgtgtttc

SEQ ID NO: 79608 - DNA, 26 bp, Homo sapiens
  chr10:15203628-15203654
  hypo
gattacaggtgcgagccaccacgcct

SEQ ID NO: 79609 - DNA, 204 bp, Homo sapiens
  chr10:15255040-15255244
  hypo
ctggctgctggctccgagggggcatccgcagtccgtctggtcgtctcctcctgcaggctgggcagctggccaccacttctccgactcgacccctccaacaagcatcgcagggcactgtcctcgggggtacagaccgtggtcccacattcgctaccactctgttccacgtcatccaggtacacgagctgcgtgtaggccgtgctg

SEQ ID NO: 79610 - DNA, 30 bp, Homo sapiens; identical to SEQ ID NO: 24109
  chr10:15256407-15256437
  hypo

SEQ ID NO: 79611 - DNA, 30 bp, Homo sapiens
  chr10:15264099-15264129
  hypo
cccgcgcacccactccgacctatcagcatg

SEQ ID NO: 79612 - DNA, 84 bp, Homo sapiens
  chr10:15273617-15273701
  hypo
gtcaggcagagttgccacacccgcaaaatgccctaatgccatttcctaccatgtggctgtagcgggttcactaggtggccagtg

SEQ ID NO: 79613 - DNA, 61 bp, Homo sapiens; identical to SEQ ID NO: 24110
  chr10:15345842-15345903
  hypo

SEQ ID NO: 79614 - DNA, 41 bp, Homo sapiens
  chr10:15355002-15355043
  hypo
tttattctctacttttgagcgagatgttcttgatgaagcaa

SEQ ID NO: 79615 - DNA, 237 bp, Homo sapiens
  chr10:15356715-15356952
  hypo
atttcatcccaactccaaagacgccaaccacgaaatggcacaggttcctggcgtgcccaggtgggaagttggggagtatccgctgccacattcctgtcacttctcacgagcccaggaatgacttccaagccagcacccctgccacctcggcctggcctgcagccgcggggaggaggctggttggcgctgtctgggccctgtctctccggttcctccgggatgggtggctgagtttca

SEQ ID NO: 79616 - DNA, 122 bp, Homo sapiens; identical to SEQ ID NO: 24111
  chr10:15484067-15484189
  hypo

SEQ ID NO: 79617 - DNA, 1241 bp, Homo sapiens; identical to SEQ ID NO: 46899
  chr10:15760996-15762237
  hypo

SEQ ID NO: 79618 - DNA, 172 bp, Homo sapiens
  chr10:15828304-15828476
  hypo
ccgaactgttctctccgtatcattatgtgtatagactggtgtctgcgtcatcttctgctgccctccccatcaaggcactgcgttaccgtattcgaacacacattccctctgtctgggaaggtttccatgtaacggtgttttctcagtctcatatctgcgcattaggacattg

SEQ ID NO: 79619 - DNA, 30 bp, Homo sapiens
  chr10:16482310-16482340
  hypo
cctgcctcagcctcccggcatgagccacca

SEQ ID NO: 79620 - DNA, 30 bp, Homo sapiens; identical to SEQ ID NO: 24113
  chr10:16715185-16715215
  hypo

SEQ ID NO: 79621 - DNA, 151 bp, Homo sapiens; identical to SEQ ID NO: 24114
  chr10:16715648-16715799
  hypo

SEQ ID NO: 79622 - DNA, 270 bp, Homo sapiens
  chr10:16716535-16716805
  hypo
acagagcagtgtacaaaactacgtctcccgctcttgcaggagactccattctaagcataagagagacgataaaattggaggcaggagtgggtggtgggcgatggggtccactttagatacagtgataatggaaaaaactttgctgagatggcatttgaactgaaacttgaatgagataagacagcaagcctaaggtcatttagaaactgaatataagtgtaaagccggccagaagctgtaatcccagcactgtgggaggccgaggtgggc

SEQ ID NO: 79623 - DNA, 50 bp, Homo sapiens; identical to SEQ ID NO: 24115
  chr10:16769342-16769392
  hypo

SEQ ID NO: 79624 - DNA, 109 bp, Homo sapiens
  chr10:16806476-16806585
  hypo
aattcttcagttctgcgatgttcggtggcaccactatggaaacaaaaatgctgagtgtgaatctgggaatggaactcctagcaagggatggcagcggcacattttgttt

SEQ ID NO: 79625 - DNA, 33 bp, Homo sapiens
  chr10:16915426-16915459
  hypo
tgtatcctttgaggctgggtgcggtggctcatg

SEQ ID NO: 79626 - DNA, 98 bp, Homo sapiens
  chr10:16955824-16955922
  hypo
gttgcaggacggatgcgtggccagcctcaggttgttaaacattagggtgatccgccttccctccggggcagtgattctccactcgcagatccggccat

SEQ ID NO: 79627 - DNA, 30 bp, Homo sapiens; identical to SEQ ID NO: 24116
  chr10:17156913-17156943
  hypo

SEQ ID NO: 79628 - DNA, 305 bp, Homo sapiens
  chr10:17157464-17157769
  hypo
cccacctctccagcttgctctcgcattaaatcctcacagatgccatggacacagcgtgccacagaacccccttcacagtcgtcatatttggatgcacactggggtccgtacgtctcaggtgggcagtgacaactgttggttacacaagagcacaatgtcagggcacgcgctttggggccagtgcctgtctcttaatatcaatgagaaaaataattcaaattacaaatcaacgatgttaacttggaatcgtcagccagcaatgcaaatttactgactggagtctcgggagaaaatcactctgctgt

SEQ ID NO: 79629 - DNA, 1182 bp, Homo sapiens; identical to SEQ ID NO: 7224
  chr10:17270072-17271254
  hypo

SEQ ID NO: 79630 - DNA, 797 bp, Homo sapiens; identical to SEQ ID NO: 7225
  chr10:17271443-17272240
  hypo

SEQ ID NO: 79631 - DNA, 22 bp, Homo sapiens
  chr10:17412265-17412287
  hypo
gccaccacgccctgcctgacaa

SEQ ID NO: 79632 - DNA, 30 bp, Homo sapiens
  chr10:17428556-17428586
  hypo
gtagttaacctgcaacgacatcaaacacag

SEQ ID NO: 79633 - DNA, 85 bp, Homo sapiens
  chr10:17429165-17429250
  hypo
gggcccagtggaagacgcacagcaccgtggattccccttgcaagcttaaggcccgctagttggaatttaaggaaaagaaaacaat

SEQ ID NO: 79634 - DNA, 25 bp, Homo sapiens
  chr10:17429549-17429574
  hypo
gccaccgcgccgggcccagaaaact

SEQ ID NO: 79635 - DNA, 30 bp, Homo sapiens
  chr10:17460695-17460725
  hypo
atttaagtcaagctagctgggcgcgatggc

SEQ ID NO: 79636 - DNA, 326 bp, Homo sapiens; identical to SEQ ID NO: 46912
  chr10:17495119-17495445
  hypo

SEQ ID NO: 79637 - DNA, 621 bp, Homo sapiens; identical to SEQ ID NO: 7228
  chr10:17495474-17496095
  hypo

SEQ ID NO: 79638 - DNA, 307 bp, Homo sapiens; identical to SEQ ID NO: 7229
  chr10:17496544-17496851
  hypo

SEQ ID NO: 79639 - DNA, 114 bp, Homo sapiens
  chr10:17507083-17507197
  hypo
cctcatctcattttgtactcccgccacattcgccctcccgcagatgagctagtgtgacatactctctcttgcttctggacttttgcacgtgccgtgttttctccaagaccctcc

SEQ ID NO: 79640 - DNA, 82 bp, Homo sapiens; identical to SEQ ID NO: 24123
  chr10:17509665-17509747
  hypo

SEQ ID NO: 79641 - DNA, 39 bp, Homo sapiens
  chr10:17608666-17608705
  hypo
accgcacccggcccagtcgcactttcttgatgcattttt

SEQ ID NO: 79642 - DNA, 633 bp, Homo sapiens; identical to SEQ ID NO: 7231
  chr10:18429517-18430150
  hypo

SEQ ID NO: 79643 - DNA, 30 bp, Homo sapiens
  chr10:18950067-18950097
  hypo
gcgcccagcggtaaaacagcattttaagac

SEQ ID NO: 79644 - DNA, 147 bp, Homo sapiens
  chr10:20538374-20538521
  hypo
ggcttcaggggataatcgtttccttgccattttcagcttccacatgccgcatgtgttccttggctcatggtttcttctcatatcattccaacttctgttcccaccgtcacatctcctaccactaacgttgaccctccagcctccttt

SEQ ID NO: 79645 - DNA, 35 bp, Homo sapiens
  chr10:21606053-21606088
  hypo
agagtgcattttcaggcgcccggcctctgttgtgt

SEQ ID NO: 79646 - DNA, 30 bp, Homo sapiens
  chr10:21683108-21683138
  hypo
cggaagcgcgctcccgggaagcagcccggc

SEQ ID NO: 79647 - DNA, 30 bp, Homo sapiens; identical to SEQ ID NO: 7238
  chr10:21785720-21785750
  hypo

SEQ ID NO: 79648 - DNA, 466 bp, Homo sapiens
  chr10:21797634-21798100
  hypo
gagcctgctctgccccgcagaccctgcggtctccaggcccggtaggctttttcaggttccgcaggcctggccgaaccggccagatcccgcgttccaagcgtctggagaactggagacaaagcccaagatccaatcccaccgcagagcggctcaagccggcgcccgggacccgcgggcctaggcgcgacccccagcagcctgtgaccgaagaggggagcccgggacccctccgcctctccgcagccctctcgggcggggtcccccaggcccgcccggttccccctgccgcactcagccagctgcttttggaggcctgcgagttccaaacacgccttcccattaattaaaacctggaaagcctggccactttcttctcaggccgaggcagcatctccagaggtccccgcggcactctcggccggcaacggctcccgcgcggggccttggaggccgagcggccatttac

SEQ ID NO: 79649 - DNA, 154 bp, Homo sapiens; identical to SEQ ID NO: 46925
  chr10:21805906-21806060
  hypo

SEQ ID NO: 79650 - DNA, 167 bp, Homo sapiens; identical to SEQ ID NO: 46927
  chr10:21815984-21816151
  hypo

SEQ ID NO: 79651 - DNA, 143 bp, Homo sapiens; identical to SEQ ID NO: 46930
  chr10:21824263-21824406
  hypo

SEQ ID NO: 79652 - DNA, 31 bp, Homo sapiens; identical to SEQ ID NO: 46931
  chr10:21878818-21878849
  hypo

SEQ ID NO: 79653 - DNA, 169 bp, Homo sapiens
  chr10:21915223-21915392
  hypo
gcaggggctggtggctgggcccgtgagaaccagtgcaaggcattttgaaaatgactagaaatctcgcacgcgtgccaccccccaagtctatgattcttatgtttacatggcaaagaagctgaaggggaagcaggtacgtgtgcagaacgggagaccaaacatgagaggc

SEQ ID NO: 79654 - DNA, 30 bp, Homo sapiens; identical to SEQ ID NO: 46932
  chr10:21915603-21915633
  hypo

SEQ ID NO: 79655 - DNA, 22 bp, Homo sapiens
  chr10:21984186-21984208
  hypo
cgaactcctgacctcaagtgag

SEQ ID NO: 79656 - DNA, 18 bp, Homo sapiens
  chr10:21998445-21998463
  hypo
caccgcatctggctgcag

SEQ ID NO: 79657 - DNA, 61 bp, Homo sapiens
  chr10:22004066-22004127
  hypo
gcataatttccattgcgtgtgttgttaggatatatatacgcttttccggcaagcacaatgt

SEQ ID NO: 79658 - DNA, 30 bp, Homo sapiens; identical to SEQ ID NO: 46933
  chr10:22032926-22032956
  hypo

SEQ ID NO: 79659 - DNA, 185 bp, Homo sapiens
  chr10:22033211-22033396
  hypo
gtctcttctcccaaggcgaaggattaccttccctctagaatgacaggtgactcatccatcaactcctgcgagtttaattcctcaacatgtgtcctttgccttagctgcatgtttgtaagtgtccgcttctgtagctctctggcttcctggaggctccgggacgtcgacctcgtcatcctgggttg

SEQ ID NO: 79660 - DNA, 30 bp, Homo sapiens
  chr10:22038248-22038278
  hypo
gcagctaagttgcccgcgtacattgaattg

SEQ ID NO: 79661 - DNA, 302 bp, Homo sapiens
  chr10:22039218-22039520
  hypo
ctggctcccaccccacgtctcaaactcaggagtgaggttacaaagggagtcccccgactagagggaaacactatgcgtgtttcagcccaatatttggaagtcggatttgttttagaaaataccaacatctgtttttaccaaatgactaaccttgtctagttgcagtcacgcaagccgcacgccaaagtctcgcctctcctcagcctccacagccaactcctggtcttaaaggcctgagcccaggtgctggtccgtggctgggagcgggaggcctgcagcacaggtgccggtgcacgtagttg

SEQ ID NO: 79662 - DNA, 259 bp, Homo sapiens
  chr10:22042774-22043033
  hypo
ttctcatgagcaagacggcaagaacagaaaagcaagcacgggctacctgtggcggctgggcacggcatggggaggcctcctcagtgggcagggtgaggtggcttgggaggacacgggtctgggagtgggagaggagaaggggcacggtggggctgtcacgtggctggtggatgtgccacgtccccacatgcattcagcacattccctctcgaggatcctcgctctcctgctgtgacccggggtggcagctgtcatctgt

SEQ ID NO: 79663 - DNA, 405 bp, Homo sapiens
  chr10:22047230-22047635
  hypo
ctgttcctggttcctcgactaacaatctagctacagggaaagaagcctcaagagacactgtgttaggatcacaccctggggctctctgcagcgcctcatggccagatcacaggaaagaggccgcccaagcccggtgggtgggctctccacagggcactcccgccccctcctcccatctgaggaccatctcagaaatatctgagcaggcaccaagagctaccagcagggagaaaggccaactacaaacggccacggccgtggaaagtaagccgaaccctagctgtcgcctggcactgaccacatacggagatggcctcagggcctctggacagccaccaggtgtacctgctgagtccaaagttattcacatggcagaatcgaagatgatcacggtaataccatcta

SEQ ID NO: 79664 - DNA, 164 bp, Homo sapiens
  chr10:22048280-22048444
  hypo
caaagtccttctgccgcttggctctggacttctcctctggctccggcttcgctgtagcctccagcagcctggctggcttccgcctccgaggccgggcatcagtggccccggtctcctgctcaccggagtctccctcctgctcctcctccgctgccaccccctct

SEQ ID NO: 79665 - DNA, 31 bp, Homo sapiens; identical to SEQ ID NO: 24131
  chr10:22288660-22288691
  hypo

SEQ ID NO: 79666 - DNA, 30 bp, Homo sapiens; identical to SEQ ID NO: 46936
  chr10:22315827-22315857
  hypo

SEQ ID NO: 79667 - DNA, 37 bp, Homo sapiens
  chr10:22477765-22477802
  hypo
attaaatggtacccccccccccgcaaaaaaaaagact

SEQ ID NO: 79668 - DNA, 37 bp, Homo sapiens
  chr10:22478101-22478138
  hypo
aaaaaaaaagaaagacgtatgaacataggattcagga

SEQ ID NO: 79669 - DNA, 20 bp, Homo sapiens
  chr10:22540686-22540706
  hypo
aaaacaaaaagagaaagtat

SEQ ID NO: 79670 - DNA, 1110 bp, Homo sapiens; identical to SEQ ID NO: 7243
  chr10:22540740-22541850
  hypo

SEQ ID NO: 79671 - DNA, 225 bp, Homo sapiens; identical to SEQ ID NO: 7244
  chr10:22542024-22542249
  hypo

SEQ ID NO: 79672 - DNA, 38 bp, Homo sapiens; identical to SEQ ID NO: 24135
  chr10:22567377-22567415
  hypo

SEQ ID NO: 79673 - DNA, 31 bp, Homo sapiens; identical to SEQ ID NO: 46944
  chr10:22605455-22605486
  hypo

SEQ ID NO: 79674 - DNA, 772 bp, Homo sapiens; identical to SEQ ID NO: 46947
  chr10:22614078-22614850
  hypo

SEQ ID NO: 79675 - DNA, 83 bp, Homo sapiens; identical to SEQ ID NO: 7251
  chr10:22634091-22634174
  hypo

SEQ ID NO: 79676 - DNA, 330 bp, Homo sapiens; identical to SEQ ID NO: 46953
  chr10:22634324-22634654
  hypo

SEQ ID NO: 79677 - DNA, 258 bp, Homo sapiens
  chr10:22833843-22834101
  hypo
gagtctgggtgtttagggcaccgcacactcctccccagtgacacggggcctcgctgcacattcattttgttggagtatttgagcgacttctctctttcccaagcaaggcagccccaaacggggctctaaggttttggctttcactgcattcccgaatcccggcaggcagagggctcgggaaagtattcggcacttgttggacaagtgaatgggatgcttgttacttcttccctatccgtcccaactctccctaattct

SEQ ID NO: 79678 - DNA, 135 bp, Homo sapiens
  chr10:22849146-22849281
  hypo
caacccccctttaaccgatgatccgcccacagtggaaaaagaggcacttcttagctgagcggcaaataaagatttccagaaggatacgctgctgtgcttttgtgtcacgtttggggagcccgccgccctggccac

SEQ ID NO: 79679 - DNA, 167 bp, Homo sapiens; identical to SEQ ID NO: 24138
  chr10:22869799-22869966
  hypo

SEQ ID NO: 79680 - DNA, 104 bp, Homo sapiens
  chr10:22883123-22883227
  hypo
gcacgtaaagtctagcgtattaagtacattataattacagacttaccggcactcatgcctttcccattatattctctacacctctagttcgattaaaatgggaa

SEQ ID NO: 79681 - DNA, 30 bp, Homo sapiens; identical to SEQ ID NO: 24139
  chr10:22901509-22901539
  hypo

SEQ ID NO: 79682 - DNA, 642 bp, Homo sapiens; identical to SEQ ID NO: 46957
  chr10:23001887-23002529
  hypo

SEQ ID NO: 79683 - DNA, 559 bp, Homo sapiens; identical to SEQ ID NO: 7257
  chr10:23461903-23462462
  hypo

SEQ ID NO: 79684 - DNA, 129 bp, Homo sapiens; identical to SEQ ID NO: 7258
  chr10:23462485-23462614
  hypo

SEQ ID NO: 79685 - DNA, 758 bp, Homo sapiens; identical to SEQ ID NO: 7266
  chr10:23983617-23984375
  hypo

SEQ ID NO: 79686 - DNA, 30 bp, Homo sapiens; identical to SEQ ID NO: 46978
  chr10:23984962-23984992
  hypo

SEQ ID NO: 79687 - DNA, 78 bp, Homo sapiens
  chr10:24839341-24839419
  hypo
gatcattgggaggattaaatacgatgtatacaaaattctgaagacagagtcaaacatacggagcactcaaaagttaat

SEQ ID NO: 79688 - DNA, 265 bp, Homo sapiens
  chr10:24863016-24863281
  hypo
ggatccactgtgcaaggctctcgtttagagattcctgcgtgtttcaaggggatgtggaagccgggctgtgtccagtctgtggtaagaggaaagcatatagaagcccatgccccctgcgtgtgcacgcagtggctagagtttgcgttaaaccacttcatctagtcccgtggccacacctagctgtgaaggaggctgagaagtgtggtctctaagaagcagtactgggaaataaccgggactctgcgtcacaatctgtttactgcac

SEQ ID NO: 79689 - DNA, 142 bp, Homo sapiens; identical to SEQ ID NO: 24145
  chr10:24908407-24908549
  hypo

SEQ ID NO: 79690 - DNA, 149 bp, Homo sapiens
  chr10:24988566-24988715
  hypo
tttaaaagctgatgactagaacactacattatatccttcggtaaagagaaggcatcaagcacccagactttggagtctcactccctgggcctgcgtgctgctctgcaccttcttagctatgtggccccgacaagagacttaagcccttg

SEQ ID NO: 79691 - DNA, 165 bp, Homo sapiens; identical to SEQ ID NO: 7267
  chr10:25012545-25012710
  hypo

SEQ ID NO: 79692 - DNA, 34 bp, Homo sapiens
  chr10:25097336-25097370
  hypo
gattacaggcatgagccaccgtgtctggcctcat

SEQ ID NO: 79693 - DNA, 30 bp, Homo sapiens
  chr10:25239942-25239972
  hypo
cccatccatcacaccgctaggcttgcccct

SEQ ID NO: 79694 - DNA, 30 bp, Homo sapiens; identical to SEQ ID NO: 46985
  chr10:25463457-25463487
  hypo

SEQ ID NO: 79695 - DNA, 530 bp, Homo sapiens; identical to SEQ ID NO: 46986
  chr10:25463806-25464336
  hypo

SEQ ID NO: 79696 - DNA, 30 bp, Homo sapiens
  chr10:26158265-26158295
  hypo
caagtccttgccaaacgacataagcgcggg

SEQ ID NO: 79697 - DNA, 227 bp, Homo sapiens; identical to SEQ ID NO: 46996
  chr10:26505008-26505235
  hypo

SEQ ID NO: 79698 - DNA, 176 bp, Homo sapiens; identical to SEQ ID NO: 46997
  chr10:26505441-26505617
  hypo

SEQ ID NO: 79699 - DNA, 905 bp, Homo sapiens; identical to SEQ ID NO: 46998
  chr10:26505713-26506618
  hypo

SEQ ID NO: 79700 - DNA, 833 bp, Homo sapiens; identical to SEQ ID NO: 47000
  chr10:26726983-26727816
  hypo

SEQ ID NO: 79701 - DNA, 303 bp, Homo sapiens; identical to SEQ ID NO: 47001
  chr10:26727867-26728170
  hypo

SEQ ID NO: 79702 - DNA, 28 bp, Homo sapiens
  chr10:26759487-26759515
  hypo
tatgttcgttagatgattttgcccaact

SEQ ID NO: 79703 - DNA, 90 bp, Homo sapiens
  chr10:26822791-26822881
  hypo
atgctctctcaacattttagacgtggtaggaagtgtgagatttggagtcagggacccgttacaggaggcggctctgcctagcactcttca

SEQ ID NO: 79704 - DNA, 31 bp, Homo sapiens; identical to SEQ ID NO: 24153
  chr10:26840145-26840176
  hypo

SEQ ID NO: 79705 - DNA, 37 bp, Homo sapiens
  chr10:27020721-27020758
  hypo
tttatttatttgtttatttatcggagtctcactctgt

SEQ ID NO: 79706 - DNA, 276 bp, Homo sapiens
  chr10:27020877-27021153
  hypo
gcccagcccttcccagtctcgttgagacgtggcttgtaaggatgtgatgcaaggtgtgaaccttccccagaaagaagtgcatacgcacagcacagcctggctgcagcatctgcttcaaacaaaacagtcagccgagctccactttctttgacttaatcattcttcatgctccacccatttccggaaagatgtgaggcatccctctgatgctgagcgcaagtctgtgcacctctttgccttcttgtatgttgtgctatgttgcgtccaatttgtggc

SEQ ID NO: 79707 - DNA, 31 bp, Homo sapiens; identical to SEQ ID NO: 24155
  chr10:27033792-27033823
  hypo

SEQ ID NO: 79708 - DNA, 90 bp, Homo sapiens; identical to SEQ ID NO: 24156
  chr10:27089295-27089385
  hypo

SEQ ID NO: 79709 - DNA, 37 bp, Homo sapiens; identical to SEQ ID NO: 24157
  chr10:27096988-27097025
  hypo

SEQ ID NO: 79710 - DNA, 78 bp, Homo sapiens
  chr10:27144550-27144628
  hypo
acccttctctattaccctctgcgcacattgtttttatcccctatgttgccataagaaccctgtttagggccgggtgcg

SEQ ID NO: 79711 - DNA, 30 bp, Homo sapiens
  chr10:27233090-27233120
  hypo
tgcgcctttgctggccgcccactcatagat

SEQ ID NO: 79712 - DNA, 282 bp, Homo sapiens
  chr10:27233409-27233691
  hypo
gttccccccacgcgccgcccttccatttgtgacgtgctgtgcgagtccaggcactggctcacaaggccccgcccccacagcagcccgccccacctttcatttattagtacccggtagcaactttcaggtttccttactgtgaattatgaatatgaattatgcggaaattactgtataccaatgtacctcgcgcactatctgacattcaaagacccaccttgccccatcgcctctgatttttttggaaactagaaaaaagacaaggttcggcagctgttttca

SEQ ID NO: 79713 - DNA, 31 bp, Homo sapiens; identical to SEQ ID NO: 24160
  chr10:27478290-27478321
  hypo

SEQ ID NO: 79714 - DNA, 23 bp, Homo sapiens
  chr10:27488710-27488733
  hypo
tgcttaagaaaactggttagacg

SEQ ID NO: 79715 - DNA, 30 bp, Homo sapiens
  chr10:27541531-27541561
  hypo
gtgtggtgtggtgtgcgtgtgtgggggcgg

SEQ ID NO: 79716 - DNA, 30 bp, Homo sapiens
  chr10:27552255-27552285
  hypo
taaaccagggattgcgaaccagaaacacac

SEQ ID NO: 79717 - DNA, 83 bp, Homo sapiens
  chr10:27825967-27826050
  hypo
atccagtagagagagcgtttggtccttcggtgaatgagaagggatgggactccaggaacaaaagaaggcgatggcttggatag

SEQ ID NO: 79718 - DNA, 33 bp, Homo sapiens
  chr10:27846685-27846718
  hypo
tgagagacggcggagcgtggtggctcacccctg

SEQ ID NO: 79719 - DNA, 32 bp, Homo sapiens; identical to SEQ ID NO: 24162
  chr10:27846957-27846989
  hypo

SEQ ID NO: 79720 - DNA, 30 bp, Homo sapiens; identical to SEQ ID NO: 7284
  chr10:27928208-27928238
  hypo

SEQ ID NO: 79721 - DNA, 91 bp, Homo sapiens; identical to SEQ ID NO: 24164
  chr10:27978842-27978933
  hypo

SEQ ID NO: 79722 - DNA, 2822 bp, Homo sapiens; identical to SEQ ID NO: 47006
  chr10:28030824-28033646
  hypo

SEQ ID NO: 79723 - DNA, 498 bp, Homo sapiens; identical to SEQ ID NO: 7287
  chr10:28033688-28034186
  hypo

SEQ ID NO: 79724 - DNA, 229 bp, Homo sapiens; identical to SEQ ID NO: 7288
  chr10:28034326-28034555
  hypo

SEQ ID NO: 79725 - DNA, 434 bp, Homo sapiens; identical to SEQ ID NO: 7289
  chr10:28034873-28035307
  hypo

SEQ ID NO: 79726 - DNA, 30 bp, Homo sapiens; identical to SEQ ID NO: 7290
  chr10:28035639-28035669
  hypo

SEQ ID NO: 79727 - DNA, 30 bp, Homo sapiens
  chr10:28288654-28288684
  hypo
ttaaggaccaatgccggagcacttaggatg

SEQ ID NO: 79728 - DNA, 44 bp, Homo sapiens
  chr10:28551684-28551728
  hypo
atgctaaatctcacatttagccggacgcagtggctcacgcctgt

SEQ ID NO: 79729 - DNA, 31 bp, Homo sapiens
  chr10:28557287-28557318
  hypo
gttacatcatagagtacgttgtaagccactt

SEQ ID NO: 79730 - DNA, 43 bp, Homo sapiens
  chr10:28558916-28558959
  hypo
tcttaaaaacagcaacatggccgcagccagtcccagaatcccc

SEQ ID NO: 79731 - DNA, 26 bp, Homo sapiens
  chr10:28791005-28791031
  hypo
gtgagccaccacgccctgccagtatg

SEQ ID NO: 79732 - DNA, 30 bp, Homo sapiens; identical to SEQ ID NO: 24170
  chr10:28824536-28824566
  hypo

SEQ ID NO: 79733 - DNA, 30 bp, Homo sapiens; identical to SEQ ID NO: 24171
  chr10:28860337-28860367
  hypo

SEQ ID NO: 79734 - DNA, 66 bp, Homo sapiens; identical to SEQ ID NO: 7292
  chr10:28966235-28966301
  hypo

SEQ ID NO: 79735 - DNA, 240 bp, Homo sapiens; identical to SEQ ID NO: 47019
  chr10:28966597-28966837
  hypo

SEQ ID NO: 79736 - DNA, 173 bp, Homo sapiens
  chr10:29186602-29186775
  hypo
tttgctgtgtgcaggcctcagcgttccgtatcgttttgttcccttcattccactagagcggctccaagtcatgacaaccggtggggataattgacgtaaaagtgctcaaccccgagtggccgagcttcccccagacaattgctggattgttcggggacctgttgatgcaacaa

SEQ ID NO: 79737 - DNA, 80 bp, Homo sapiens
  chr10:29213403-29213483
  hypo
cactgcgcccggccctattttctatgtaatttgaaaggcgctgtagaatttgatgagtcgggaagcagaagcaactgtgg

SEQ ID NO: 79738 - DNA, 152 bp, Homo sapiens; identical to SEQ ID NO: 24174
  chr10:29300089-29300241
  hypo

SEQ ID NO: 79739 - DNA, 229 bp, Homo sapiens
  chr10:29311384-29311613
  hypo
tgttttcttgggacttaaaaacgctgaatgtggcagctcaattctttttgctgtcgaaaatagtttaaatattttatttctcttttaatttgctgttttctctaacccccaccacagagatatgtgtgcacgcgtgccacacacacacgcacatgtctgagccccattttgacactggccccgagcttcagcctgtgttgtgttttacggtctgactggttgcacagaa

SEQ ID NO: 79740 - DNA, 29 bp, Homo sapiens
  chr10:29433666-29433695
  hypo
tttttttttttttttttgagacggagtct

SEQ ID NO: 79741 - DNA, 118 bp, Homo sapiens
  chr10:29581545-29581663
  hypo
ttcgcgtggtgcagacgcggaaagctgaaggagaacaaccactgccatgtcgcctgctcaggtgaggctctgactttccagtgatgccatcctcaggactaggcgagaaagccgacaa

SEQ ID NO: 79742 - DNA, 81 bp, Homo sapiens
  chr10:29666996-29667077
  hypo
gcggtaaacatacgcgtgtggtgtccttttcatataatgacttctaggaaacgcagtttcgatgaacactccaacctacat

SEQ ID NO: 79743 - DNA, 29 bp, Homo sapiens
  chr10:29718757-29718786
  hypo
ttaaagaaatatggtagtggccgggcatg

SEQ ID NO: 79744 - DNA, 79 bp, Homo sapiens; identical to SEQ ID NO: 7296
  chr10:29738054-29738133
  hypo

SEQ ID NO: 79745 - DNA, 30 bp, Homo sapiens; identical to SEQ ID NO: 24177
  chr10:29759212-29759242
  hypo

SEQ ID NO: 79746 - DNA, 46 bp, Homo sapiens
  chr10:29777544-29777590
  hypo
gcatcagcctcttgtagggcacggcgctgttgttagagttctgttc

SEQ ID NO: 79747 - DNA, 31 bp, Homo sapiens
  chr10:29784320-29784351
  hypo
gtagtggctgacaagccgatattccaaaatg

SEQ ID NO: 79748 - DNA, 172 bp, Homo sapiens
  chr10:29805521-29805693
  hypo
ttcaaacaactgtcagcgcttctaacaactgccaagccaaagtgctgtttgcaggactgtgatgctgggagcctgggcagtggctaggcctgggctgtgtgaacccagagagaggcacgacactggcccgctcacccaacgcctggcccagggccaccgtgacaggtgcctg

SEQ ID NO: 79749 - DNA, 146 bp, Homo sapiens
  chr10:29815840-29815986
  hypo
ttcggcacctttgcaccgggtgccgcatgcatctgtatctgtccagtacctggcaggctgcacagcgctcctagctacagtggggctaggaagtctcgccattacagggtgggtgcccccagaacacgaagcggggataggttcac

SEQ ID NO: 79750 - DNA, 159 bp, Homo sapiens
  chr10:29821665-29821824
  hypo
ggaccttgcgctttttcgaggcttccctgttgtgaccagttggtttggcgtcttgggacacaggctcactttgaatgtagagaaccatctcgctcctgcctgtcctctcagtgggctggtgcggagcttgagggggttgtgccacgttttccagttcct

SEQ ID NO: 79751 - DNA, 40 bp, Homo sapiens
  chr10:29840086-29840126
  hypo
ccatagggtgagtcaccgtggacaccggaggtttctgtgc

SEQ ID NO: 79752 - DNA, 36 bp, Homo sapiens
  chr10:29857036-29857072
  hypo
cccattaaaaaagtgacgtttcgtgagtcagttaag

SEQ ID NO: 79753 - DNA, 208 bp, Homo sapiens
  chr10:29884471-29884679
  hypo
cattcatttcactaatcgttttcttaatggagaaagaactaaaaatgtaaatatgaaacaaaatagcttttgggtaggcaaacccttacgactcctctttcaagacaaaaatacatatggcccaggggaaagtctctagcatcagtgcctctcttctgcagtgagccaggcccatatcgtccaagcaggcaacgcggtcttcggtgcc

SEQ ID NO: 79754 - DNA, 31 bp, Homo sapiens; identical to SEQ ID NO: 24178
  chr10:29993108-29993139
  hypo

SEQ ID NO: 79755 - DNA, 759 bp, Homo sapiens; identical to SEQ ID NO: 7297
  chr10:30024793-30025552
  hypo

SEQ ID NO: 79756 - DNA, 31 bp, Homo sapiens
  chr10:30102454-30102485
  hypo
tggtcatagggccgggcgcagtgactcacgc

SEQ ID NO: 79757 - DNA, 48 bp, Homo sapiens
  chr10:30280768-30280816
  hypo
acctaaaattaaccatcgcactaacgctttatgcggtcaatattttaa

SEQ ID NO: 79758 - DNA, 120 bp, Homo sapiens
  chr10:30282370-30282490
  hypo
aaagatgtggacccactggagcgagttcagagaagcgcagcagccccagggaggcgaggtcgcgggctgatttacgaggcaaggctggagggggatcacgagagcagaagacaccctggg

SEQ ID NO: 79759 - DNA, 30 bp, Homo sapiens
  chr10:30317912-30317942
  hypo
tgaaggaggctgaccgctggccccagcctt

SEQ ID NO: 79760 - DNA, 31 bp, Homo sapiens
  chr10:30336420-30336451
  hypo
ctgagtcaaaagaaaacggtgggttcacagt

SEQ ID NO: 79761 - DNA, 241 bp, Homo sapiens
  chr10:30454425-30454666
  hypo
gcaaggttcaaacactggaagcgtccaaacatcaaaccgcactaagaggacatctgtatgattatccattcaagaaatcgggccattgtactcagcgaggaacaatccgcgatggtgtgtggtgcgtggcagtggtgcactctgcttctggccagtgaggtcatggtggctttgaccatgagatagggatggcgtgggggcagggggcatccatggatgcgtcacaaataactcagtcaga

SEQ ID NO: 79762 - DNA, 31 bp, Homo sapiens
  chr10:30471109-30471140
  hypo
tgggacctctatacaacgcagaattgtggaa

SEQ ID NO: 79763 - DNA, 35 bp, Homo sapiens
  chr10:30692598-30692633
  hypo
gtaggcgcagtgcacgcagcgctactccaagggga

SEQ ID NO: 79764 - DNA, 19 bp, Homo sapiens
  chr10:30733374-30733393
  hypo
agaacgaaactccatcaca

SEQ ID NO: 79765 - DNA, 179 bp, Homo sapiens
  chr10:30736710-30736889
  hypo
gtcatcactccccaaaatggacgttaccaaatagattccgatgttctcctgatcccctggaagctgacttacaggaatattggttctgattttattcctcggggcgcctttggaaaggtatacttggcacaagatataaagacgaagaaaagaatggcgtgtaaactggtatgtgtttt

SEQ ID NO: 79766 - DNA, 82 bp, Homo sapiens
  chr10:30798126-30798208
  hypo
tattttctctagagcacggttcatcttctcagaccttaagtttattaccagagtatgaaacgctggaacagtcatccataca

SEQ ID NO: 79767 - DNA, 30 bp, Homo sapiens
  chr10:30848293-30848323
  hypo
tcactaaacacactgcgcatgcggtcccgc

SEQ ID NO: 79768 - DNA, 35 bp, Homo sapiens; identical to SEQ ID NO: 24180
  chr10:30981746-30981781
  hypo

SEQ ID NO: 79769 - DNA, 30 bp, Homo sapiens
  chr10:31076177-31076207
  hypo
ggcaagccctgtgccgcccattctggggga

SEQ ID NO: 79770 - DNA, 31 bp, Homo sapiens; identical to SEQ ID NO: 24181
  chr10:31076407-31076438
  hypo

SEQ ID NO: 79771 - DNA, 276 bp, Homo sapiens
  chr10:31108013-31108289
  hypo
ccagagtggccccaccgctccacccactctgggtaactcatgggcacaccctggaaaccagaaaaacagtggagctctgcctgtccccgaaggaaagaattacattgccgcaagcaatttggaaaggagcaaggagcttggaaactcggagcaagcggaatcatctcctaccgccccgcttctgctcggctcagggcgcacgatgaaaaggctgaatttgtcacatttccccacactcagtcccaaacaggctatcccagtcgtctctccctccgg

SEQ ID NO: 79772 - DNA, 30 bp, Homo sapiens; identical to SEQ ID NO: 24183
  chr10:31133814-31133844
  hypo

SEQ ID NO: 79773 - DNA, 31 bp, Homo sapiens; identical to SEQ ID NO: 24184
  chr10:31137749-31137780
  hypo

SEQ ID NO: 79774 - DNA, 2174 bp, Homo sapiens; identical to SEQ ID NO: 47034
  chr10:31607940-31610114
  hypo

SEQ ID NO: 79775 - DNA, 47 bp, Homo sapiens
  chr10:31892893-31892940
  hypo
tcccgtggccagcacccgaggcctgctggctccgatctgggccacgt

SEQ ID NO: 79776 - DNA, 31 bp, Homo sapiens
  chr10:32042434-32042465
  hypo
cctcctttggcccaatcgggtgttgcaggcc

SEQ ID NO: 79777 - DNA, 31 bp, Homo sapiens
  chr10:32062806-32062837
  hypo
ccccaggctcagcccacggtggttgtggggc

SEQ ID NO: 79778 - DNA, 46 bp, Homo sapiens
  chr10:32171068-32171114
  hypo
cctgacctcgtgatccgcccgcctcggcctcccaaagtgctagatg

SEQ ID NO: 79779 - DNA, 156 bp, Homo sapiens
  chr10:32205148-32205304
  hypo
tacctactgcctgctacaccccgatgctgctcttagcagtctcaaaaacgcccatacaagcttttcatgcctcttaccagtcttcttcctcctccctttttccacgtttcaacaaccaccacccccgacacacacgcctgcttatatattttactt

SEQ ID NO: 79780 - DNA, 25 bp, Homo sapiens
  chr10:32292573-32292598
  hypo
gattgtgccacagcactccagcgtg

SEQ ID NO: 79781 - DNA, 31 bp, Homo sapiens; identical to SEQ ID NO: 24188
  chr10:32332318-32332349
  hypo

SEQ ID NO: 79782 - DNA, 37 bp, Homo sapiens; identical to SEQ ID NO: 24189
  chr10:32333608-32333645
  hypo

SEQ ID NO: 79783 - DNA, 30 bp, Homo sapiens
  chr10:32398763-32398793
  hypo
ggagctctggcccacggctgctttttcacc

SEQ ID NO: 79784 - DNA, 62 bp, Homo sapiens
  chr10:32499019-32499081
  hypo
gcaatgcaaattctccagtcccgcctcagacctactgaagcggacacactgtgggtgctgcc

SEQ ID NO: 79785 - DNA, 18 bp, Homo sapiens
  chr10:32585161-32585179
  hypo
caatgttctgcttcttaa

SEQ ID NO: 79786 - DNA, 34 bp, Homo sapiens
  chr10:32587052-32587086
  hypo
tctggtacaaaccgtggtatttaaagtctagtaa

SEQ ID NO: 79787 - DNA, 30 bp, Homo sapiens
  chr10:32638803-32638833
  hypo
aggtgtgagccactgcgttcggacccatgc

SEQ ID NO: 79788 - DNA, 30 bp, Homo sapiens
  chr10:32639442-32639472
  hypo
caaaagggtgagaggcggcaactgtcaggt

SEQ ID NO: 79789 - DNA, 55 bp, Homo sapiens
  chr10:33233313-33233368
  hypo
tggtctgtaaaggggcgtctacgcggcagcagccgtgatcatgggggccctgggc

SEQ ID NO: 79790 - DNA, 30 bp, Homo sapiens
  chr10:33265703-33265733
  hypo
tcactttttttagacgggcatattaatgtt

SEQ ID NO: 79791 - DNA, 20 bp, Homo sapiens
  chr10:33271671-33271691
  hypo
aactcctggccttaagtgat

SEQ ID NO: 79792 - DNA, 41 bp, Homo sapiens; identical to SEQ ID NO: 24191
  chr10:33293519-33293560
  hypo

SEQ ID NO: 79793 - DNA, 105 bp, Homo sapiens
  chr10:33432804-33432909
  hypo
cccctctggagtgaagcgcagagatccaggctgctgacttatgtttcttccttccctcttgtctttcatgagtgctgcccttgtcactgaggtgttgaggaggag

SEQ ID NO: 79794 - DNA, 18 bp, Homo sapiens
  chr10:33433526-33433544
  hypo
aaatttatttctaggccg

SEQ ID NO: 79795 - DNA, 31 bp, Homo sapiens
  chr10:33780120-33780151
  hypo
aaccatccaatcatgacgttagcgatgtgtt

SEQ ID NO: 79796 - DNA, 27 bp, Homo sapiens
  chr10:33867644-33867671
  hypo
gcacccggccctgaaatggatcttaag

SEQ ID NO: 79797 - DNA, 44 bp, Homo sapiens
  chr10:34063091-34063135
  hypo
ctagcaggcagacacaagtagctggacatcgtgaggaacacatc

SEQ ID NO: 79798 - DNA, 48 bp, Homo sapiens
  chr10:34151693-34151741
  hypo
gaacagcagttattcattctccgtcccgcaatctgccttggtggaacc

SEQ ID NO: 79799 - DNA, 25 bp, Homo sapiens
  chr10:34248563-34248588
  hypo
gcccggccacttaatttcccttttc

SEQ ID NO: 79800 - DNA, 183 bp, Homo sapiens; identical to SEQ ID NO: 24193
  chr10:34276836-34277019
  hypo

SEQ ID NO: 79801 - DNA, 31 bp, Homo sapiens
  chr10:34318438-34318469
  hypo
ttgcttctcagttcctcgggttgacctgatg

SEQ ID NO: 79802 - DNA, 172 bp, Homo sapiens
  chr10:34333799-34333971
  hypo
agtgaacttgggatatacaaccgagacacactcgggatccaggccaagctgtcaagcagaggagagccgtccatcaggcatcactgcaggatcacttttcccagcgacaactacctcattctgagcacagaagcatccgtgctaaacaaccgatcaggctctcagttctttc

SEQ ID NO: 79803 - DNA, 77 bp, Homo sapiens
  chr10:34345646-34345723
  hypo
agctgtaatcgtgccactgcactccagccttggtgacaagtataagatccgatctcgatcaaaattaacaataaaaa

SEQ ID NO: 79804 - DNA, 26 bp, Homo sapiens
  chr10:34378907-34378933
  hypo
actccgtctcaaacaaaagaaaaaaa

SEQ ID NO: 79805 - DNA, 161 bp, Homo sapiens
  chr10:34472411-34472572
  hypo
gctttaatacacaaatgcaggcgagtagaaactgggtctacctaacacggccaacatggtgattcccgccctcttctcaccaggtgtaccaagtgtcatggccacctgcggataacaccatgtgttcaaaacatcatggcgtctgcatttgcatattaaaa

SEQ ID NO: 79806 - DNA, 41 bp, Homo sapiens
  chr10:34532752-34532793
  hypo
tgtatatagtcatcaaatttgacctgcgccataattaaata

SEQ ID NO: 79807 - DNA, 31 bp, Homo sapiens
  chr10:34777861-34777892
  hypo
ggttcccagcagccagcgcccacagcccagc

SEQ ID NO: 79808 - DNA, 17 bp, Homo sapiens
  chr10:34845327-34845344
  hypo
tgagacagagtcttgct

SEQ ID NO: 79809 - DNA, 78 bp, Homo sapiens
  chr10:34845583-34845661
  hypo
acaagcgtgagtcaccatgcccagcccaattcctttgcttaaagaattcagatgagcgtagtgtttattattttttct

SEQ ID NO: 79810 - DNA, 28 bp, Homo sapiens
  chr10:35023510-35023538
  hypo
ccacctcggcccatatggggcattttta

SEQ ID NO: 79811 - DNA, 94 bp, Homo sapiens
  chr10:35043968-35044062
  hypo
caggcagagtgagccaaaaatcgacattttcaatgaggcaaaggatgactgacagcttcaagaagaattgctgggccgaggctgggcgcggtgg

SEQ ID NO: 79812 - DNA, 2584 bp, Homo sapiens; identical to SEQ ID NO: 47041
  chr10:35102969-35105553
  hypo

SEQ ID NO: 79813 - DNA, 93 bp, Homo sapiens
  chr10:35152266-35152359
  hypo
tttctttttttttttttgagacggagtcttgccaccatacctggcctatttacaggcatcctgtttaagagatgtttcaggccgggcgcggcg

SEQ ID NO: 79814 - DNA, 32 bp, Homo sapiens
  chr10:35243812-35243844
  hypo
tgtccactgccgctctggcctaaagtggcttt

SEQ ID NO: 79815 - DNA, 82 bp, Homo sapiens
  chr10:35254595-35254677
  hypo
ccctctgcttgctgacgtgacctgaagttgtctgagaattacggcgtgttgaaaacagacgagggcattgtctgcaggggct

SEQ ID NO: 79816 - DNA, 30 bp, Homo sapiens; identical to SEQ ID NO: 24198
  chr10:35299079-35299109
  hypo

SEQ ID NO: 79817 - DNA, 36 bp, Homo sapiens
  chr10:35394057-35394093
  hypo
aaaactaagtaattggctgggcgcggtggctcatgc

SEQ ID NO: 79818 - DNA, 30 bp, Homo sapiens
  chr10:35502673-35502703
  hypo
acacagaggggacacgaggatcagcaggca

SEQ ID NO: 79819 - DNA, 123 bp, Homo sapiens; identical to SEQ ID NO: 24199
  chr10:35503792-35503915
  hypo

SEQ ID NO: 79820 - DNA, 35 bp, Homo sapiens; identical to SEQ ID NO: 24200
  chr10:35621533-35621568
  hypo

SEQ ID NO: 79821 - DNA, 31 bp, Homo sapiens; identical to SEQ ID NO: 47044
  chr10:35626505-35626536
  hypo

SEQ ID NO: 79822 - DNA, 30 bp, Homo sapiens; identical to SEQ ID NO: 24201
  chr10:35781947-35781977
  hypo

SEQ ID NO: 79823 - DNA, 849 bp, Homo sapiens; identical to SEQ ID NO: 47045
  chr10:35929333-35930182
  hypo

SEQ ID NO: 79824 - DNA, 199 bp, Homo sapiens; identical to SEQ ID NO: 24203
  chr10:36639322-36639521
  hypo

SEQ ID NO: 79825 - DNA, 43 bp, Homo sapiens; identical to SEQ ID NO: 24204
  chr10:36930095-36930138
  hypo

SEQ ID NO: 79826 - DNA, 17 bp, Homo sapiens
  chr10:37301908-37301925
  hypo
cagaaaaaaaaaaaaag

SEQ ID NO: 79827 - DNA, 17 bp, Homo sapiens
  chr10:38078894-38078911
  hypo
aaaacctgcctggggcc

SEQ ID NO: 79828 - DNA, 31 bp, Homo sapiens; identical to SEQ ID NO: 24205
  chr10:38301639-38301670
  hypo

SEQ ID NO: 79829 - DNA, 30 bp, Homo sapiens; identical to SEQ ID NO: 7317
  chr10:38654417-38654447
  hypo

SEQ ID NO: 79830 - DNA, 35 bp, Homo sapiens; identical to SEQ ID NO: 24207
  chr10:43131975-43132010
  hypo

SEQ ID NO: 79831 - DNA, 1440 bp, Homo sapiens; identical to SEQ ID NO: 47057
  chr10:43248678-43250118
  hypo

SEQ ID NO: 79832 - DNA, 643 bp, Homo sapiens; identical to SEQ ID NO: 47058
  chr10:43250136-43250779
  hypo

SEQ ID NO: 79833 - DNA, 78 bp, Homo sapiens; identical to SEQ ID NO: 47059
  chr10:43250854-43250932
  hypo

SEQ ID NO: 79834 - DNA, 30 bp, Homo sapiens; identical to SEQ ID NO: 47060
  chr10:43361300-43361330
  hypo

SEQ ID NO: 79835 - DNA, 261 bp, Homo sapiens; identical to SEQ ID NO: 47061
  chr10:43361589-43361850
  hypo

SEQ ID NO: 79836 - DNA, 30 bp, Homo sapiens
  chr10:43394632-43394662
  hypo
gctctagctgtgaacggggtccttagcggc

SEQ ID NO: 79837 - DNA, 378 bp, Homo sapiens; identical to SEQ ID NO: 47066
  chr10:43571918-43572296
  hypo

SEQ ID NO: 79838 - DNA, 652 bp, Homo sapiens; identical to SEQ ID NO: 47067
  chr10:43572558-43573210
  hypo

SEQ ID NO: 79839 - DNA, 50 bp, Homo sapiens
  chr10:43584497-43584547
  hypo
tggtcaggcattttttcagaacgggcagcgtggggcagcccccttggccc

SEQ ID NO: 79840 - DNA, 30 bp, Homo sapiens; identical to SEQ ID NO: 47068
  chr10:43593497-43593527
  hypo

SEQ ID NO: 79841 - DNA, 171 bp, Homo sapiens; identical to SEQ ID NO: 47069
  chr10:43600550-43600721
  hypo

SEQ ID NO: 79842 - DNA, 30 bp, Homo sapiens; identical to SEQ ID NO: 24211
  chr10:43605397-43605427
  hypo

SEQ ID NO: 79843 - DNA, 240 bp, Homo sapiens
  chr10:43701716-43701956
  hypo
cagggcagggcaggcgggctccttggtggtcccccagccgctgcacatctgatcactgtgtcttcagctccctgtgggccagacctcattccagggccctggacactcaaagccggcagagaagagaaactctgggaaaaatgtccaagaagggacagggagcctgcggtgggcagtcagggctgcctggggtgagagggctgtgaacaactgatggggctggccgcgcagctcccagga

SEQ ID NO: 79844 - DNA, 30 bp, Homo sapiens; identical to SEQ ID NO: 24212
  chr10:43815765-43815795
  hypo

SEQ ID NO: 79845 - DNA, 61 bp, Homo sapiens
  chr10:43858288-43858349
  hypo
ggggacactcacagggcgggggtccaggcgggagtccagtagtcctcgtggagacagctgg

SEQ ID NO: 79846 - DNA, 30 bp, Homo sapiens
  chr10:43889094-43889124
  hypo
ccatctacggctcacgtgtacttttaaaac

SEQ ID NO: 79847 - DNA, 30 bp, Homo sapiens
  chr10:43905817-43905847
  hypo
tattatttccagactgagtatcgccctgtc

SEQ ID NO: 79848 - DNA, 89 bp, Homo sapiens; identical to SEQ ID NO: 24213
  chr10:43906026-43906115
  hypo

SEQ ID NO: 79849 - DNA, 28 bp, Homo sapiens
  chr10:43915512-43915540
  hypo
tgtctccgttttccaaagtgctgggatc

SEQ ID NO: 79850 - DNA, 273 bp, Homo sapiens; identical to SEQ ID NO: 24215
  chr10:44163387-44163660
  hypo

SEQ ID NO: 79851 - DNA, 92 bp, Homo sapiens; identical to SEQ ID NO: 24216
  chr10:44163719-44163811
  hypo

SEQ ID NO: 79852 - DNA, 78 bp, Homo sapiens
  chr10:44184177-44184255
  hypo
ttgcaagctgggaatgtttagcggtggccagtacctcagagtgcagcagggcgaggcggaaaagagactgaccatgtc

SEQ ID NO: 79853 - DNA, 30 bp, Homo sapiens; identical to SEQ ID NO: 24217
  chr10:44198425-44198455
  hypo

SEQ ID NO: 79854 - DNA, 30 bp, Homo sapiens
  chr10:44321615-44321645
  hypo
ggctcccgggctcgcgctcctctgagttgc

SEQ ID NO: 79855 - DNA, 31 bp, Homo sapiens; identical to SEQ ID NO: 7333
  chr10:44420042-44420073
  hypo

SEQ ID NO: 79856 - DNA, 454 bp, Homo sapiens; identical to SEQ ID NO: 24219
  chr10:44500932-44501386
  hypo

SEQ ID NO: 79857 - DNA, 30 bp, Homo sapiens; identical to SEQ ID NO: 7335
  chr10:44848905-44848935
  hypo

SEQ ID NO: 79858 - DNA, 253 bp, Homo sapiens; identical to SEQ ID NO: 24221
  chr10:44874107-44874360
  hypo

SEQ ID NO: 79859 - DNA, 31 bp, Homo sapiens; identical to SEQ ID NO: 24222
  chr10:45419799-45419830
  hypo

SEQ ID NO: 79860 - DNA, 35 bp, Homo sapiens
  chr10:45986734-45986769
  hypo
tttcactttgggaggctgaggcgggcagattgcct

SEQ ID NO: 79861 - DNA, 30 bp, Homo sapiens; identical to SEQ ID NO: 24223
  chr10:46010010-46010040
  hypo

SEQ ID NO: 79862 - DNA, 32 bp, Homo sapiens
  chr10:46195656-46195688
  hypo
gctgccccgacgagtgcgtgtagttctgtttt

SEQ ID NO: 79863 - DNA, 30 bp, Homo sapiens
  chr10:46221210-46221240
  hypo
cgggtaattgttaccgcaggattgtccacg

SEQ ID NO: 79864 - DNA, 51 bp, Homo sapiens; identical to SEQ ID NO: 7340
  chr10:49514478-49514529
  hypo

SEQ ID NO: 79865 - DNA, 267 bp, Homo sapiens
  chr10:49541832-49542099
  hypo
acgttgggtcagcaacggccagaggaaatcctaaggccaaacagtatctgtggcctccctacctttgggcatcttctggtcgccaatttgctgcaagtcacagctcccaaatctggttgtgcaggctccaaagcagtggagcctggcgcttctgccatctccacctcctggatctcagagctgctggatggctccacccaccacccgctgagctggccccacttggggctggcattggtggacagcatgttccgggcgcctctgctc

SEQ ID NO: 79866 - DNA, 30 bp, Homo sapiens; identical to SEQ ID NO: 24226
  chr10:49542400-49542430
  hypo

SEQ ID NO: 79867 - DNA, 41 bp, Homo sapiens; identical to SEQ ID NO: 24227
  chr10:49592261-49592302
  hypo

SEQ ID NO: 79868 - DNA, 167 bp, Homo sapiens
  chr10:49658305-49658472
  hypo
tttcacactcctctcgtactcagtccgctggcggcacagctcggccctgagctcagtgaccagcccctgtaaggcctcggagcggcgcgcgtgttcccgggtggggctgtccggctcgctgggctcgctgttgctggcacccgcgcccgcctcgtccatgctgtggt

SEQ ID NO: 79869 - DNA, 31 bp, Homo sapiens; identical to SEQ ID NO: 7344
  chr10:49892636-49892667
  hypo

SEQ ID NO: 79870 - DNA, 154 bp, Homo sapiens
  chr10:50099025-50099179
  hypo
gggatcagtccttcaattattcgcatggctgaattcagtcgccgtcaacttactcactcaacgacatgttagttgctcattctgcgtgagaaaacaggcaccgcccctctcttccgagggacttaatgcaatcggcagcatgcacaggttcttt

SEQ ID NO: 79871 - DNA, 156 bp, Homo sapiens; identical to SEQ ID NO: 24229
  chr10:50340032-50340188
  hypo

SEQ ID NO: 79872 - DNA, 1664 bp, Homo sapiens; identical to SEQ ID NO: 47106
  chr10:50605213-50606877
  hypo

SEQ ID NO: 79873 - DNA, 154 bp, Homo sapiens
  chr10:50680405-50680559
  hypo
cactgtgtgcactgaccggtggtagatcttttcttcaatggtgcccgcagtcaggagcctgtacacagtcacttgcttcttctggcctattctccatgctcgctcccgggcctgcaacagagagagagagacctctcaacgagaatccttccca

SEQ ID NO: 79874 - DNA, 194 bp, Homo sapiens
  chr10:50724152-50724346
  hypo
actaaactgaaggacaagtgacgcaccgacaccatattcctcatgtttagtatttgggtttttaccctgatacggctgaaaccagcaaatgtagcccagacaggtggcaccacaccaaaacttatagccaaaccgaatgggctttccccgaataaattgtttgcacccgtgacgaccaaaataaggaaccatga

SEQ ID NO: 79875 - DNA, 119 bp, Homo sapiens; identical to SEQ ID NO: 7349
  chr10:50817753-50817872
  hypo

SEQ ID NO: 79876 - DNA, 479 bp, Homo sapiens; identical to SEQ ID NO: 47111
  chr10:50818152-50818631
  hypo

SEQ ID NO: 79877 - DNA, 421 bp, Homo sapiens; identical to SEQ ID NO: 47112
  chr10:50818986-50819407
  hypo

SEQ ID NO: 79878 - DNA, 580 bp, Homo sapiens; identical to SEQ ID NO: 47115
  chr10:50822143-50822723
  hypo

SEQ ID NO: 79879 - DNA, 314 bp, Homo sapiens
  chr10:50854540-50854854
  hypo
tcccctgcagactccaccaaccgggactcgctggacatgattgagcgctgcatctgccttgtatgcctggacgcgccaggaggcgtggagctcagcgacacccacagggcactccagctccttcacggcggaggctacagcaagaacggggccaatcgctggtacgacaagtccctgcaggtaagccgtccaggtggccctgcaagagcacagccatgcccccagcgagagagtgagtaggcaagcgggcacagcctggtgcccaggcccgcacgtgcttgtgtctggcaggcgcactcactggtttctgctgc

SEQ ID NO: 79880 - DNA, 777 bp, Homo sapiens; identical to SEQ ID NO: 47116
  chr10:50969829-50970606
  hypo

SEQ ID NO: 79881 - DNA, 30 bp, Homo sapiens
  chr10:51027364-51027394
  hypo
agatgctattcgctcggctcctcaggtccc

SEQ ID NO: 79882 - DNA, 119 bp, Homo sapiens; identical to SEQ ID NO: 7357
  chr10:52177703-52177822
  hypo

SEQ ID NO: 79883 - DNA, 210 bp, Homo sapiens; identical to SEQ ID NO: 24239
  chr10:52180039-52180249
  hypo

SEQ ID NO: 79884 - DNA, 127 bp, Homo sapiens; identical to SEQ ID NO: 24240
  chr10:52369821-52369948
  hypo

SEQ ID NO: 79885 - DNA, 16 bp, Homo sapiens
  chr10:52372715-52372731
  hypo
ttaaaaacaaagaaag

SEQ ID NO: 79886 - DNA, 31 bp, Homo sapiens
  chr10:52429237-52429268
  hypo
acatgaagctgagatgcgcttgccactccag

SEQ ID NO: 79887 - DNA, 1436 bp, Homo sapiens; identical to SEQ ID NO: 47124
  chr10:52833429-52834865
  hypo

SEQ ID NO: 79888 - DNA, 23 bp, Homo sapiens
  chr10:52896915-52896938
  hypo
attacaggcgtgagtaccgcacc

SEQ ID NO: 79889 - DNA, 479 bp, Homo sapiens; identical to SEQ ID NO: 47127
  chr10:54072981-54073460
  hypo

SEQ ID NO: 79890 - DNA, 30 bp, Homo sapiens; identical to SEQ ID NO: 24244
  chr10:58775425-58775455
  hypo

SEQ ID NO: 79891 - DNA, 290 bp, Homo sapiens; identical to SEQ ID NO: 24245
  chr10:59866612-59866902
  hypo

SEQ ID NO: 79892 - DNA, 30 bp, Homo sapiens
  chr10:60046048-60046078
  hypo
ccagcgtagtaggccgatcaacgtaacata

SEQ ID NO: 79893 - DNA, 30 bp, Homo sapiens; identical to SEQ ID NO: 7371
  chr10:60262026-60262056
  hypo

SEQ ID NO: 79894 - DNA, 30 bp, Homo sapiens; identical to SEQ ID NO: 7380
  chr10:61164087-61164117
  hypo

SEQ ID NO: 79895 - DNA, 229 bp, Homo sapiens
  chr10:61552611-61552840
  hypo
tggcgttgagtagacggctccattggatgagtcccaacttgaaattcagactaagctcatgcattaaggctgggaggaggggtgcgccgaatgttgcgaaggagtaggctgcgaggtggctgctgaggggaccgtgggctgcatgggtggcggaggtggaggcggaggtggctggactggggtctgtgtgttgggagatggaggcggcgtgggccgtttgaatttgtca

SEQ ID NO: 79896 - DNA, 180 bp, Homo sapiens
  chr10:62662662-62662842
  hypo
acaccaggccacgtatcggggatagaaaatagaaagacaaaatctctgtcctaaatatactaggataataggataaggggaatgggagaaaattaaggagccaattttcccgcaatacagttattgctacgatagggatttgcaaagctgtcctatgggaacatacggagagacacctca

SEQ ID NO: 79897 - DNA, 30 bp, Homo sapiens; identical to SEQ ID NO: 24249
  chr10:62668835-62668865
  hypo

SEQ ID NO: 79898 - DNA, 30 bp, Homo sapiens; identical to SEQ ID NO: 7382
  chr10:62703726-62703756
  hypo

SEQ ID NO: 79899 - DNA, 128 bp, Homo sapiens; identical to SEQ ID NO: 47153
  chr10:62704176-62704304
  hypo

SEQ ID NO: 79900 - DNA, 44 bp, Homo sapiens
  chr10:63669382-63669426
  hypo
cttcagtgagtattttctgagtgactgaacgacataattaaaat

SEQ ID NO: 79901 - DNA, 30 bp, Homo sapiens; identical to SEQ ID NO: 24252
  chr10:63671388-63671418
  hypo

SEQ ID NO: 79902 - DNA, 30 bp, Homo sapiens
  chr10:63709395-63709425
  hypo
acaccacccccccacgcccccacaaaaaaa

SEQ ID NO: 79903 - DNA, 42 bp, Homo sapiens; identical to SEQ ID NO: 24253
  chr10:63757868-63757910
  hypo

SEQ ID NO: 79904 - DNA, 28 bp, Homo sapiens
  chr10:63930995-63931023
  hypo
actttttttttttttttgatacggagtc

SEQ ID NO: 79905 - DNA, 95 bp, Homo sapiens; identical to SEQ ID NO: 47157
  chr10:64028002-64028097
  hypo

SEQ ID NO: 79906 - DNA, 30 bp, Homo sapiens; identical to SEQ ID NO: 47159
  chr10:64278666-64278696
  hypo

SEQ ID NO: 79907 - DNA, 30 bp, Homo sapiens
  chr10:64571430-64571460
  hypo
taagtatttattttccggagcccactcagg

SEQ ID NO: 79908 - DNA, 376 bp, Homo sapiens; identical to SEQ ID NO: 7386
  chr10:64574691-64575067
  hypo

SEQ ID NO: 79909 - DNA, 667 bp, Homo sapiens; identical to SEQ ID NO: 47162
  chr10:64575127-64575794
  hypo

SEQ ID NO: 79910 - DNA, 112 bp, Homo sapiens
  chr10:64914129-64914241
  hypo
ggaaacagtcactgtgaaatgcgctgcgtatctcattcactcacttcagctaatgattccgacttggcagacgctaaactcatggaggttcggtttctcctgatacaaacca

SEQ ID NO: 79911 - DNA, 104 bp, Homo sapiens; identical to SEQ ID NO: 24257
  chr10:64945156-64945260
  hypo

SEQ ID NO: 79912 - DNA, 31 bp, Homo sapiens; identical to SEQ ID NO: 24258
  chr10:64983779-64983810
  hypo

SEQ ID NO: 79913 - DNA, 24 bp, Homo sapiens
  chr10:65031223-65031247
  hypo
caccatgcccggatgtaaatagtc

SEQ ID NO: 79914 - DNA, 30 bp, Homo sapiens; identical to SEQ ID NO: 24259
  chr10:65160317-65160347
  hypo

SEQ ID NO: 79915 - DNA, 30 bp, Homo sapiens
  chr10:65186975-65187005
  hypo
cgagctccggtccccgcgtgtctcccagaa

SEQ ID NO: 79916 - DNA, 24 bp, Homo sapiens
  chr10:65313569-65313593
  hypo
ttagattggccgggggcggtggct

SEQ ID NO: 79917 - DNA, 23 bp, Homo sapiens
  chr10:65313892-65313915
  hypo
aactttcacgttatctttaagtc

SEQ ID NO: 79918 - DNA, 20 bp, Homo sapiens
  chr10:65424398-65424418
  hypo
ggccagtccttgctccgaga

SEQ ID NO: 79919 - DNA, 30 bp, Homo sapiens
  chr10:69571123-69571153
  hypo
cttcatgggatttacggacactgaattata

SEQ ID NO: 79920 - DNA, 20 bp, Homo sapiens
  chr10:69646926-69646946
  hypo
gctatcttttctgtttttta

SEQ ID NO: 79921 - DNA, 31 bp, Homo sapiens; identical to SEQ ID NO: 24260
  chr10:69836219-69836250
  hypo

SEQ ID NO: 79922 - DNA, 121 bp, Homo sapiens
  chr10:69853848-69853969
  hypo
gatttggtggattttggctggcttcttgaccatatcctgttttatcagcagtatctttacgatctatatcttgtgaaaccaatcctgcccgccttctgtctcatcctgtgactaagaatgc

SEQ ID NO: 79923 - DNA, 30 bp, Homo sapiens
  chr10:70043829-70043859
  hypo
taagtagactactacgcacatttgctaaag

SEQ ID NO: 79924 - DNA, 440 bp, Homo sapiens
  chr10:70184273-70184713
  hypo
aaaacaaaacaggcctgaggccgccgctagccggagcatcaccatgaagttcaatcccttcgtgaacttggaccgcagcaaaaaccgcaaacgtcacttccatgcccccttgcacgtgcaccggaagatcatgtcatccccgctctccaaggagctgcggcagaagtacaatgtccgctccacacccatccgcaaggacgacgaggtccaggtagttcaaggacactacaaaggtcagcaaattggcaaggtagtccaggtgtacagaaagaaagatgtcatctacactgagcaggtgcagcgtgagtaggccaacagcacaaccgtccacgtgggtactcacccaaacaaggtggttatcaccaggctaaatctcaacaaggatcggaaaaaaattattgaacacaaagccaagtctcgacaagtcagaaaagagaaag

SEQ ID NO: 79925 - DNA, 169 bp, Homo sapiens; identical to SEQ ID NO: 24263
  chr10:70218970-70219139
  hypo

SEQ ID NO: 79926 - DNA, 34 bp, Homo sapiens
  chr10:70232451-70232485
  hypo
cctgggtagagcgagactccgtctccaaaaaaaa

SEQ ID NO: 79927 - DNA, 35 bp, Homo sapiens; identical to SEQ ID NO: 24264
  chr10:70266165-70266200
  hypo

SEQ ID NO: 79928 - DNA, 39 bp, Homo sapiens
  chr10:70288834-70288873
  hypo
tctaacctgcggcttctcgctttttcaggcatgttttga

SEQ ID NO: 79929 - DNA, 21 bp, Homo sapiens
  chr10:70392096-70392117
  hypo
gcagggcgggtggagtcgcgg

SEQ ID NO: 79930 - DNA, 36 bp, Homo sapiens
  chr10:70472769-70472805
  hypo
actcaagcctttttacaatgtcggtatattgccggg

SEQ ID NO: 79931 - DNA, 44 bp, Homo sapiens
  chr10:70478653-70478697
  hypo
tggaaaaaatattaaagaatgcgcaatgtggccgggcgcggtgg

SEQ ID NO: 79932 - DNA, 121 bp, Homo sapiens; identical to SEQ ID NO: 24265
  chr10:70483198-70483319
  hypo

SEQ ID NO: 79933 - DNA, 140 bp, Homo sapiens
  chr10:70530863-70531003
  hypo
aatcgttgtatgtggcaagtttttatttgctaaattactctgctagctttattatttctgttgaaatttggctaggttcatgttgatatctttttataggtttcattgtttgcggaacttttcaacgaaatgcttcaaag

SEQ ID NO: 79934 - DNA, 23 bp, Homo sapiens
  chr10:70586517-70586540
  hypo
tgagactccgcctcaaaaaaaaa

SEQ ID NO: 79935 - DNA, 31 bp, Homo sapiens
  chr10:70987006-70987037
  hypo
tttggacatcatgaggcggttccgggctgag

SEQ ID NO: 79936 - DNA, 160 bp, Homo sapiens
  chr10:71007177-71007337
  hypo
aggctgactgcattgccgtccagcatgtctgtaccatcgtctccttccgctcggccaatctctgtgcagcagctctggcggccatcctgacacgcctccgggagaacaagaaggtggaacggctccggaccacagtgggcatggacggcaccctctacaa

SEQ ID NO: 79937 - DNA, 31 bp, Homo sapiens
  chr10:71008307-71008338
  hypo
cccagcggaagcagatcgacagggtgctggc

SEQ ID NO: 79938 - DNA, 30 bp, Homo sapiens
  chr10:71009531-71009561
  hypo
ggcgtgagccaccgcgccagaccggaggcc

SEQ ID NO: 79939 - DNA, 31 bp, Homo sapiens
  chr10:71014928-71014959
  hypo
agaaggaggggagacccgtgggcagctaaaa

SEQ ID NO: 79940 - DNA, 1258 bp, Homo sapiens; identical to SEQ ID NO: 47186
  chr10:71078139-71079397
  hypo

SEQ ID NO: 79941 - DNA, 197 bp, Homo sapiens
  chr10:71097943-71098140
  hypo
tggaaagtgtttgagcaagagcgcccgccctgtgcagccggtctggctaccctcataggaagggctcttcactctgggcagcggtggacagaggccctggaggctggatgcgggttctcaggcaagagtctgagggacccagctcggtgtctgatgtctggtgtctgggactgggcgccttcccatttccatcccag

SEQ ID NO: 79942 - DNA, 22 bp, Homo sapiens
  chr10:71108272-71108294
  hypo
ttaattcattgaggctgggcac

SEQ ID NO: 79943 - DNA, 23 bp, Homo sapiens
  chr10:71110631-71110654
  hypo
taaaaccaaagctggccgggcgc

SEQ ID NO: 79944 - DNA, 30 bp, Homo sapiens; identical to SEQ ID NO: 7399
  chr10:71122697-71122727
  hypo

SEQ ID NO: 79945 - DNA, 31 bp, Homo sapiens; identical to SEQ ID NO: 24270
  chr10:71128907-71128938
  hypo

SEQ ID NO: 79946 - DNA, 654 bp, Homo sapiens
  chr10:71133918-71134572
  hypo
atctctcggcagctccggtcctggtttgcttggccatgggcctctgtctcttttctttccttgggcttctacctgaagcagacccagggtgctgagggctcctctttggtgtgcaggtccttgcccatgacttctcgtggttgatgatgctcccctcccccatctcagcccttcctgggcccaccagcaggcagattggttggaacgctgccacgccgcctctcactgcctgtctgtggtcgtaggtgtctgactgccgagacacctgggcattacctgttcagttatcacaaggaaaagggcccgggcgttacccgttcagttatcacaggtggcatgccctgagaggcagatcatgacttgctcgatttcattaatttcacttgagcagatgggaagcacgctgttggaacaggagccggtctccatgagccttggtttgaacagagagaagctcgtgagaggtgctatttgcttgttctgctgctctaacagggcctttagggactgggaaaggacagaccctggccgtgggcctctatctggaaaagggggtatcactatccatgtgtgtaataggccatgtagaaaagggagcagattgttctgggcgtctttagaaggcagagtgaaaagcagcgggcagagggtgcc

SEQ ID NO: 79947 - DNA, 174 bp, Homo sapiens
  chr10:71136631-71136805
  hypo
ccctcgtgtgtggggcgcagaggaaggctgacaagtgccggtgtgcctttctccacaggtttgagaagatggtcagtggcatgtacttgggagagctggttcgactgatcctagtcaagatggccaaggagggcctcttatttgaagggcggatcaccccggagctgctcaccc

SEQ ID NO: 79948 - DNA, 110 bp, Homo sapiens; identical to SEQ ID NO: 24271
  chr10:71144612-71144722
  hypo

SEQ ID NO: 79949 - DNA, 30 bp, Homo sapiens
  chr10:71151975-71152005
  hypo
gcctttggggacaacgggtgtctggatgat

SEQ ID NO: 79950 - DNA, 49 bp, Homo sapiens
  chr10:71154728-71154777
  hypo
tgtacctgggtgaaatcgtccgcaacatcttaatcgacttcaccaagaa

SEQ ID NO: 79951 - DNA, 30 bp, Homo sapiens; identical to SEQ ID NO: 24272
  chr10:71160984-71161014
  hypo

SEQ ID NO: 79952 - DNA, 51 bp, Homo sapiens
  chr10:71174692-71174743
  hypo
ggccttacaggaggagcgtcttgcccccgctgtcttcgggccaggccacca

SEQ ID NO: 79953 - DNA, 191 bp, Homo sapiens; identical to SEQ ID NO: 24274
  chr10:71245587-71245778
  hypo

SEQ ID NO: 79954 - DNA, 30 bp, Homo sapiens
  chr10:71266782-71266812
  hypo
ctctcagtcaacatcgtggggctggacagg

SEQ ID NO: 79955 - DNA, 1103 bp, Homo sapiens; identical to SEQ ID NO: 47196
  chr10:71331949-71333052
  hypo

SEQ ID NO: 79956 - DNA, 71 bp, Homo sapiens
  chr10:71566070-71566141
  hypo
gagggggcagagactgcgtgtatgaggcagaagggagagggagctgcagggagggccggccaaggggaccc

SEQ ID NO: 79957 - DNA, 31 bp, Homo sapiens; identical to SEQ ID NO: 24276
  chr10:71568580-71568611
  hypo

SEQ ID NO: 79958 - DNA, 31 bp, Homo sapiens
  chr10:71581897-71581928
  hypo
ctccaaagacatcagacgctgtgattaccgg

SEQ ID NO: 79959 - DNA, 167 bp, Homo sapiens
  chr10:71639772-71639939
  hypo
gccagatgggtatttgcggagggggagctggaaagcatcctgggctgggccggggagagactcaggcctgggcagccttgctaagtctcccctctctccctgtgtctccctgtttcccgccactccaatggatcctgttcttctcgcttccccggcctggggtccca

SEQ ID NO: 79960 - DNA, 184 bp, Homo sapiens
  chr10:71703275-71703459
  hypo
ctgccaggccggtgtcggtgcagacattgaggcaccctaattcaccccccgatccagccagttccgcaggcctgtgagtggggcgagaaggccccggccagagactgaggccagggctgtgggtctgcggtgggccggtggggtgggtgttggctgaacaaccctctctcgtctgcccctgtgt

SEQ ID NO: 79961 - DNA, 31 bp, Homo sapiens
  chr10:71848017-71848048
  hypo
acacacagtacattcacgcacacgcacacat

SEQ ID NO: 79962 - DNA, 54 bp, Homo sapiens
  chr10:71871349-71871403
  hypo
tcctcgctgaagaacgtgtacttcctgctcttcgacagcgagagcatcggcatc

SEQ ID NO: 79963 - DNA, 30 bp, Homo sapiens
  chr10:71873584-71873614
  hypo
catgaccacaagcacgtacacacacatgca

SEQ ID NO: 79964 - DNA, 30 bp, Homo sapiens; identical to SEQ ID NO: 24279
  chr10:72032484-72032514
  hypo

SEQ ID NO: 79965 - DNA, 30 bp, Homo sapiens
  chr10:72059784-72059814
  hypo
acacaggatttggacggcctggctttgcct

SEQ ID NO: 79966 - DNA, 517 bp, Homo sapiens; identical to SEQ ID NO: 47215
  chr10:72238391-72238908
  hypo

SEQ ID NO: 79967 - DNA, 186 bp, Homo sapiens; identical to SEQ ID NO: 24281
  chr10:72288399-72288585
  hypo

SEQ ID NO: 79968 - DNA, 114 bp, Homo sapiens; identical to SEQ ID NO: 24282
  chr10:72442675-72442789
  hypo

SEQ ID NO: 79969 - DNA, 166 bp, Homo sapiens
  chr10:72491961-72492127
  hypo
cacctgccctccacctcgctctccaccttttctttctctcttcggcagggtatgcacccgtcactggcatgtgtcaccccctgaggagctgtgccctcaaccatgaggatggcttctcctcagccttcgtgatagctcatgagaccggccacgtgtaagtggcagc

SEQ ID NO: 79970 - DNA, 31 bp, Homo sapiens
  chr10:72503154-72503185
  hypo
agggattttcagcccccgtgccacacccagt

SEQ ID NO: 79971 - DNA, 38 bp, Homo sapiens
  chr10:72503443-72503481
  hypo
gcacccccagccaccccgactaccggcacagggagact

SEQ ID NO: 79972 - DNA, 57 bp, Homo sapiens
  chr10:72509554-72509611
  hypo
gaccctctccccccaccggtcagtggtgaagaaccaggtcaccggcagcttcatcct

SEQ ID NO: 79973 - DNA, 31 bp, Homo sapiens
  chr10:72537207-72537238
  hypo
aatcccagcatcacagcgttgccagggtccc

SEQ ID NO: 79974 - DNA, 30 bp, Homo sapiens
  chr10:72539412-72539442
  hypo
ccccatttgacagccggaaaagacagttga

SEQ ID NO: 79975 - DNA, 30 bp, Homo sapiens; identical to SEQ ID NO: 47217
  chr10:72738258-72738288
  hypo

SEQ ID NO: 79976 - DNA, 189 bp, Homo sapiens; identical to SEQ ID NO: 24283
  chr10:72765319-72765508
  hypo

SEQ ID NO: 79977 - DNA, 30 bp, Homo sapiens
  chr10:72784993-72785023
  hypo
gcaacttgtatgaatcgcaaaggcttatgc

SEQ ID NO: 79978 - DNA, 213 bp, Homo sapiens
  chr10:72838754-72838967
  hypo
tcccctgttagatgtccgtcctcatcttgtcacctctgtgaccacacccctagcgcgcgtcctcatcaccttcacttgaataaatgccttggcctccccctaacttaagccttgcccctgttcccattccctttcactctgtatgacacatcagagctgaaggtctttccaaaacatcaccttcttttgaaaacccttcgataatagactctt

SEQ ID NO: 79979 - DNA, 203 bp, Homo sapiens
  chr10:72887225-72887428
  hypo
cccctcattctgtttccgtgtgcgcacgtgtgtgcttacgtgcacacatgtgtatacacacatacgagtctcccaagctcagagagcttttaatgactctgttttctaacccccaactgaaatggaacaatcatgtccttaccaattctttgtggcccaagttttcccaagaaccagaaatggaacaccgttttctttcaaat

SEQ ID NO: 79980 - DNA, 30 bp, Homo sapiens
  chr10:72978709-72978739
  hypo
ctggactccactgtcgttacaactttcttg

SEQ ID NO: 79981 - DNA, 19 bp, Homo sapiens
  chr10:73002694-73002713
  hypo
caagagtctggggagccgg

SEQ ID NO: 79982 - DNA, 38 bp, Homo sapiens; identical to SEQ ID NO: 7413
  chr10:73113222-73113260
  hypo

SEQ ID NO: 79983 - DNA, 30 bp, Homo sapiens
  chr10:73160222-73160252
  hypo
agacattcagacatcgatttgaaaatcagt

SEQ ID NO: 79984 - DNA, 30 bp, Homo sapiens
  chr10:73202923-73202953
  hypo
cctggggaggcgaccggggcttggactcag

SEQ ID NO: 79985 - DNA, 193 bp, Homo sapiens; identical to SEQ ID NO: 24285
  chr10:73288225-73288418
  hypo

SEQ ID NO: 79986 - DNA, 35 bp, Homo sapiens
  chr10:73326699-73326734
  hypo
ctccatgctggggccccggccgtcccagctgcctc

SEQ ID NO: 79987 - DNA, 30 bp, Homo sapiens; identical to SEQ ID NO: 24286
  chr10:73421686-73421716
  hypo

SEQ ID NO: 79988 - DNA, 191 bp, Homo sapiens
  chr10:73445870-73446061
  hypo
ggacaataagcttttgtagagcgagccgctgatttagaactaatagcgaatgcagcgccaagatccggggaaatatcaccgctaataagtttctgcctcatgctctgtcactgacattctccacaccgtttcgtgcagccaagcagaagcttaaatgtataagtatatggggcgctcgcacccgcaccagg

SEQ ID NO: 79989 - DNA, 43 bp, Homo sapiens; identical to SEQ ID NO: 24288
  chr10:73455133-73455176
  hypo

SEQ ID NO: 79990 - DNA, 31 bp, Homo sapiens; identical to SEQ ID NO: 24289
  chr10:73483375-73483406
  hypo

SEQ ID NO: 79991 - DNA, 134 bp, Homo sapiens; identical to SEQ ID NO: 24290
  chr10:73515005-73515139
  hypo

SEQ ID NO: 79992 - DNA, 93 bp, Homo sapiens
  chr10:73553123-73553216
  hypo
accgaccggggcaccgttcctctctcgggcacagccattgtcaccattctgatcgatgacatcaatgactcccgccccgagttcctcaacccc

SEQ ID NO: 79993 - DNA, 93 bp, Homo sapiens
  chr10:73574840-73574933
  hypo
acgctgctggccaccgacctcaacagcctgcccgaggaagaccagaagggcctgggccgctcgctggagacgctgaccgctgccgaggccact

SEQ ID NO: 79994 - DNA, 30 bp, Homo sapiens
  chr10:73575425-73575455
  hypo
caagggaggcccagcgcggacatcccctgc

SEQ ID NO: 79995 - DNA, 30 bp, Homo sapiens
  chr10:73576395-73576425
  hypo
acatgtaggcaacacgagcaggcacagcgc

SEQ ID NO: 79996 - DNA, 110 bp, Homo sapiens
  chr10:73591507-73591617
  hypo
caccattcctctttagacacccggaatcacagctctcttaggaaccagtgcacgtgcccgtggctcaagcaccatccccactcaccgccgctcacctcagtggcattgtc

SEQ ID NO: 79997 - DNA, 30 bp, Homo sapiens
  chr10:73614492-73614522
  hypo
atcctgcagcctgccgcaccccaaagagag

SEQ ID NO: 79998 - DNA, 31 bp, Homo sapiens; identical to SEQ ID NO: 24293
  chr10:73767276-73767307
  hypo

SEQ ID NO: 79999 - DNA, 408 bp, Homo sapiens
  chr10:73767528-73767936
  hypo
gcaagaaccgccgctgcggccccctcaacgtgacgctggccgcagaggcctgccgccgcaaggagcacatggccctcaaggcggtgcgcatccggcagctggagttcctgcagccgctggccgaggacccccgcctggacctgcgcgtcatccagctggtgcgcgacccccgggccgtgctggcctcgcgcatggtggccttcgccggcaagtataagacctggaagaagtggctggacgacgagggccaggacggcctgagggaagaggaggtgcagcggctgcggggcaactgcgagagcatccgcctgtccgcggagctggggctgcggcagcccgcctggctgcggggccgctacatgctggtgcgctacgaggacgtggcacgcgggccgctgcagaaggccc

SEQ ID NO: 80000 - DNA, 31 bp, Homo sapiens; identical to SEQ ID NO: 24296
  chr10:73822605-73822636
  hypo

SEQ ID NO: 80001 - DNA, 364 bp, Homo sapiens; identical to SEQ ID NO: 7419
  chr10:73847427-73847791
  hypo

SEQ ID NO: 80002 - DNA, 161 bp, Homo sapiens; identical to SEQ ID NO: 47234
  chr10:73848208-73848369
  hypo

SEQ ID NO: 80003 - DNA, 25 bp, Homo sapiens
  chr10:73925165-73925190
  hypo
gcccggccaagttgaagctcttcta

SEQ ID NO: 80004 - DNA, 39 bp, Homo sapiens
  chr10:73929855-73929894
  hypo
cgacaagagtgaaactccgtctcaaagaaaaaaaaaaaa

SEQ ID NO: 80005 - DNA, 93 bp, Homo sapiens
  chr10:73970689-73970782
  hypo
tacacaggcataaagaacagccggacactgtacattccatgacactgctctgatactccttctgacccgatcgtataggaaataaaccttaaa

SEQ ID NO: 80006 - DNA, 152 bp, Homo sapiens
  chr10:74003509-74003661
  hypo
aggacttgggagtgggaatgccgaggagatgacaaggagcctttcctagagaaggcgagcctgctcttgaacatgatgatgagagacagcgcgccacacacaaagggaaagatgccaaagaagcgttccacgcacagggaacagcatgtgca

SEQ ID NO: 80007 - DNA, 205 bp, Homo sapiens; identical to SEQ ID NO: 7421
  chr10:74032649-74032854
  hypo

SEQ ID NO: 80008 - DNA, 31 bp, Homo sapiens
  chr10:74052002-74052033
  hypo
agtaagactcggtctaaaaaaagaaaaaaaa

SEQ ID NO: 80009 - DNA, 102 bp, Homo sapiens; identical to SEQ ID NO: 7425
  chr10:74079590-74079692
  hypo

SEQ ID NO: 80010 - DNA, 193 bp, Homo sapiens; identical to SEQ ID NO: 7426
  chr10:74079752-74079945
  hypo

SEQ ID NO: 80011 - DNA, 41 bp, Homo sapiens
  chr10:74100576-74100617
  hypo
ttgctggtaggtatagcgcatgcggccgttgctgtagacgt

SEQ ID NO: 80012 - DNA, 31 bp, Homo sapiens; identical to SEQ ID NO: 24302
  chr10:74115963-74115994
  hypo

SEQ ID NO: 80013 - DNA, 26 bp, Homo sapiens
  chr10:74153530-74153556
  hypo
tttgtttgttttgagacggagtcttg

SEQ ID NO: 80014 - DNA, 21 bp, Homo sapiens
  chr10:74292062-74292083
  hypo
gagactccatctcaaaaaaaa

SEQ ID NO: 80015 - DNA, 43 bp, Homo sapiens
  chr10:74439297-74439340
  hypo
agcataatttttttgactgggcgcggtggctcatgcctgtaat

SEQ ID NO: 80016 - DNA, 37 bp, Homo sapiens
  chr10:74451109-74451146
  hypo
ggattacaggcgtgagccaccgcgcccggccttacat

SEQ ID NO: 80017 - DNA, 85 bp, Homo sapiens; identical to SEQ ID NO: 24303
  chr10:74518789-74518874
  hypo

SEQ ID NO: 80018 - DNA, 253 bp, Homo sapiens
  chr10:74684077-74684330
  hypo
gcaagctgctgatcccggtgacctgcgagtttccacgcctgtacaccatttctgaaggatacgttcccaaccttcgaaactccccactggaaatcatgagccgaaatcatgggatcttcccattcactctggagatcttcaaggacaatgagtttgaagagccttaccgggaagctctgcccaccctcaagcttcgtgactccctctactttggcattgagcccgtggtgcacgtgagcggcttggaaagctt

SEQ ID NO: 80019 - DNA, 30 bp, Homo sapiens
  chr10:74692247-74692277
  hypo
caggcggcccgatccgcatcgactgggagg

SEQ ID NO: 80020 - DNA, 32 bp, Homo sapiens
  chr10:74880400-74880432
  hypo
cagagttccatcatggccaggcgcggtggctc

SEQ ID NO: 80021 - DNA, 30 bp, Homo sapiens
  chr10:75197913-75197943
  hypo
acagtcagcttggccgacccctccagctcc

SEQ ID NO: 80022 - DNA, 19 bp, Homo sapiens
  chr10:75344163-75344182
  hypo
ttgacgtagtttgtgatcc

SEQ ID NO: 80023 - DNA, 41 bp, Homo sapiens; identical to SEQ ID NO: 24304
  chr10:75384237-75384278
  hypo

SEQ ID NO: 80024 - DNA, 36 bp, Homo sapiens; identical to SEQ ID NO: 47258
  chr10:75408168-75408204
  hypo

SEQ ID NO: 80025 - DNA, 227 bp, Homo sapiens
  chr10:75423484-75423711
  hypo
ggtgggccaggccctcggcagccagctttcccaggcctcccaacatcgtgtggcagcagacagtggtgaactaggaggctgaggactggcccaacatgcttttatagctgcctctggtgcctatctaggctctggggcaacaagccctcgccccagcccagtaggaggctggacaggtgagtcagcgagggcggcagcaggaaggggctgggcggagccaccctggc

SEQ ID NO: 80026 - DNA, 144 bp, Homo sapiens
  chr10:75491398-75491542
  hypo
ccatggtcggcgcagccgagctggcgagggcagcgcgggtcccccggaacgccccccgaggcgagcgctaacgaggtccggcaccatgtgctaggtcactcccagtgcaaggccacacttgggccatccgagcaacccctcctc

SEQ ID NO: 80027 - DNA, 30 bp, Homo sapiens
  chr10:75492848-75492878
  hypo
gctgcacggcccgtcggagccacgctgagc

SEQ ID NO: 80028 - DNA, 35 bp, Homo sapiens; identical to SEQ ID NO: 24305
  chr10:75493100-75493135
  hypo

SEQ ID NO: 80029 - DNA, 30 bp, Homo sapiens; identical to SEQ ID NO: 24306
  chr10:75501526-75501556
  hypo

SEQ ID NO: 80030 - DNA, 181 bp, Homo sapiens
  chr10:75632894-75633075
  hypo
gacacacttcaagtctggggacgatgatgctcccaccaccagacctctagtcacactcacgtacatgcacacacaccggcgctgtgaccaccaccatccaacatgaggcaaaaggacgcggccaccgcaggacactgaacagatgtgggtggcgtgccgcgctcccaccccctcatccagt

SEQ ID NO: 80031 - DNA, 30 bp, Homo sapiens; identical to SEQ ID NO: 47269
  chr10:75700453-75700483
  hypo

SEQ ID NO: 80032 - DNA, 30 bp, Homo sapiens; identical to SEQ ID NO: 47270
  chr10:75700833-75700863
  hypo

SEQ ID NO: 80033 - DNA, 27 bp, Homo sapiens
  chr10:75749181-75749208
  hypo
acagattacaggcgtgagctactgctc

SEQ ID NO: 80034 - DNA, 26 bp, Homo sapiens
  chr10:75756849-75756875
  hypo
ttatacaaagcgtgagggaactggat

SEQ ID NO: 80035 - DNA, 171 bp, Homo sapiens
  chr10:75832422-75832593
  hypo
ctgagaaagccagacccgggattgtttcactactcaccctgcacaatttcttctttgtgccccaggaatgactaagatggccaagatgattgacgagagacagcaggagctcactcaccaggagcaccgagtgatgttggtgaactcgatgaacaccgtgaaagagttgct

SEQ ID NO: 80036 - DNA, 160 bp, Homo sapiens
  chr10:75893716-75893876
  hypo
tcagttttctattcatctgtgtcagatgaattgtttttccccaaataagatgacatgcacacaattacctgatttatctataattgcgtctatttcttcaacaacatcaaaataggcttcattgtttgtgtactttacccctgcccgacgccatggtatg

SEQ ID NO: 80037 - DNA, 30 bp, Homo sapiens
  chr10:75900002-75900032
  hypo
tgcaggcggccgtgcgcccaagccccacgt

SEQ ID NO: 80038 - DNA, 25 bp, Homo sapiens
  chr10:75948531-75948556
  hypo
attcatacattcattcagagacgga

SEQ ID NO: 80039 - DNA, 25 bp, Homo sapiens
  chr10:75948795-75948820
  hypo
caccgctcccagccacatttctttc

SEQ ID NO: 80040 - DNA, 32 bp, Homo sapiens; identical to SEQ ID NO: 24307
  chr10:76013803-76013835
  hypo

SEQ ID NO: 80041 - DNA, 32 bp, Homo sapiens; identical to SEQ ID NO: 24308
  chr10:76019175-76019207
  hypo

SEQ ID NO: 80042 - DNA, 35 bp, Homo sapiens; identical to SEQ ID NO: 24309
  chr10:76538432-76538467
  hypo

SEQ ID NO: 80043 - DNA, 18 bp, Homo sapiens
  chr10:76539612-76539630
  hypo
taagaatattaacttctg

SEQ ID NO: 80044 - DNA, 30 bp, Homo sapiens
  chr10:76574011-76574041
  hypo
acttccagtgtcctcgcaggctggagatgg

SEQ ID NO: 80045 - DNA, 62 bp, Homo sapiens; identical to SEQ ID NO: 24310
  chr10:76585430-76585492
  hypo

SEQ ID NO: 80046 - DNA, 27 bp, Homo sapiens
  chr10:76588326-76588353
  hypo
tttttttttttttttttgagacggagt

SEQ ID NO: 80047 - DNA, 147 bp, Homo sapiens
  chr10:76588592-76588739
  hypo
gggattacaggcgtgagccaccgcgcccggccattcataagttctttacacatttatcagaatgaatttggacagtattttatgtttttaagaaggaaaggataatgcacatgttttttcttttccgagaacttctactgagagtta

SEQ ID NO: 80048 - DNA, 31 bp, Homo sapiens; identical to SEQ ID NO: 24311
  chr10:76655265-76655296
  hypo

SEQ ID NO: 80049 - DNA, 45 bp, Homo sapiens
  chr10:76693643-76693688
  hypo
ttaaaaatgcctacaattggccgggtgcggtggcttatgcctgta

SEQ ID NO: 80050 - DNA, 311 bp, Homo sapiens
  chr10:76780202-76780513
  hypo
gctacattcctaaagcgaatgcacttctctgttgtgatgtttttaccttgtcactactcatattatttctagtggctcctgttctaagctctgggaatgccacagtgaggaatgcccatttattttttctgccctaggctatttgctttctagaagagaaggccaagcagggtctcctgaaaagcctctctccgatctgggccgtctctcctacctggcatattggaagagcgtcatcttggagtatctctaccaccaccatgagaggcacatcagcatcaaggcaattagcagagcgacgggcatgtgcc

SEQ ID NO: 80051 - DNA, 174 bp, Homo sapiens
  chr10:76796612-76796786
  hypo
tctccttcagagtggaaatcacgcagccatcgtgcctggcttagctctcagggaggcaaactccacacctgagcttacctggctgccccatcgtcccattccacagcagacaacaatttgcaaatactttctgctatgactgaaaagcagctcgtgttgctttgactagaaccc

SEQ ID NO: 80052 - DNA, 497 bp, Homo sapiens
  chr10:76797022-76797519
  hypo
gagcacatctagagatggtggcgtgagcctaggggttccgctgaaaagacaagcggcgtgcaagggatgccacagaaacgcaggatgcccgggaaggagcctccacagctacgcaggcactcccgtgacactgctcacctggtacggttctgtggttggaaaagcaatttctattttaaaatactttttataagaagatgactttcctttcagacaaagccaaacgtttaatcacaacatactgcctacacattttaaaatcttttccctcttccttctcaccaaaaaaacaaaaccaaagcaggagacttggtgcagcgtggcatgctcctctgtgacccagagccggggagcccgtccctcccattttgctgagaggctgagcgctcagctctgcccgggggcagctctgggtcctccctgtccccagcacacatggggaagttgaacaagatggtttggaagagtcgagcttcggtttcaccatcccttctctg

SEQ ID NO: 80053 - DNA, 30 bp, Homo sapiens; identical to SEQ ID NO: 24315
  chr10:76818192-76818222
  hypo

SEQ ID NO: 80054 - DNA, 30 bp, Homo sapiens
  chr10:76833190-76833220
  hypo
cactagaaggaggtcggctattccccacag

SEQ ID NO: 80055 - DNA, 36 bp, Homo sapiens
  chr10:76845052-76845088
  hypo
acagtcctggatccatcgacccgccatcctcccaaa

SEQ ID NO: 80056 - DNA, 147 bp, Homo sapiens
  chr10:76857398-76857545
  hypo
ctcatgcccccattcccgtgtgaacctcacacccttccgccatccccactcctaacgtgggtcttactcacgcatctcccaggaagaggctgggccagacctcatcgatatggttcagtgtggcagcctgacggacccacagcaagc

SEQ ID NO: 80057 - DNA, 34 bp, Homo sapiens
  chr10:76875398-76875432
  hypo
actatagaatgtaacatactgcgggcacggtggc

SEQ ID NO: 80058 - DNA, 26 bp, Homo sapiens
  chr10:76898723-76898749
  hypo
ttttttttttttgagacggagtttcg

SEQ ID NO: 80059 - DNA, 23 bp, Homo sapiens
  chr10:76951433-76951456
  hypo
gcgcccaacaaagtctttttttt

SEQ ID NO: 80060 - DNA, 27 bp, Homo sapiens
  chr10:76966537-76966564
  hypo
agcaaaaaaaaaaaaacctggcgccgt

SEQ ID NO: 80061 - DNA, 89 bp, Homo sapiens
  chr10:76968430-76968519
  hypo
gatggctattaaagatcacttcgtttcatttgtcattttatagattaaaaaaatgaggtaggccgagcgcggtggctcacacctgtaat

SEQ ID NO: 80062 - DNA, 29 bp, Homo sapiens
  chr10:76968758-76968787
  hypo
gagactccgtctcaaaaaaaaaagaagaa

SEQ ID NO: 80063 - DNA, 26 bp, Homo sapiens
  chr10:76975731-76975757
  hypo
gggattacaggcgtgagccacagcgc

SEQ ID NO: 80064 - DNA, 45 bp, Homo sapiens
  chr10:76992469-76992514
  hypo
ttgtcccaggagctgtgagctcgtgtggctttttttttttttttt

SEQ ID NO: 80065 - DNA, 31 bp, Homo sapiens; identical to SEQ ID NO: 24318
  chr10:76998105-76998136
  hypo

SEQ ID NO: 80066 - DNA, 249 bp, Homo sapiens; identical to SEQ ID NO: 24319
  chr10:76998418-76998667
  hypo

SEQ ID NO: 80067 - DNA, 390 bp, Homo sapiens; identical to SEQ ID NO: 47278
  chr10:77054512-77054902
  hypo

SEQ ID NO: 80068 - DNA, 30 bp, Homo sapiens
  chr10:77107146-77107176
  hypo
gacgagaggagaacgcggaagcccgagaag

SEQ ID NO: 80069 - DNA, 4329 bp, Homo sapiens; identical to SEQ ID NO: 47279
  chr10:77159486-77163815
  hypo

SEQ ID NO: 80070 - DNA, 179 bp, Homo sapiens
  chr10:77242294-77242473
  hypo
aagttctgtgaaggtacgcccaggtctgttactgtgcgcgtatttcctggcttcctgcacagggtctgacccatggtagatgtgcagcacataattgttaagtgactgagtagagtctgtgtcagctcaactatgtccctatcgtaggagtttactggttctggcgaaatcagcccact

SEQ ID NO: 80071 - DNA, 30 bp, Homo sapiens
  chr10:77359109-77359139
  hypo
aaataagctaaaatcgctggcaagaaagac

SEQ ID NO: 80072 - DNA, 20 bp, Homo sapiens
  chr10:77635472-77635492
  hypo
agccacggtgcccagccagc

SEQ ID NO: 80073 - DNA, 31 bp, Homo sapiens
  chr10:77663258-77663289
  hypo
accacattactgcctgcgttttagggctaaa

SEQ ID NO: 80074 - DNA, 31 bp, Homo sapiens; identical to SEQ ID NO: 24321
  chr10:77838045-77838076
  hypo

SEQ ID NO: 80075 - DNA, 100 bp, Homo sapiens
  chr10:77892385-77892485
  hypo
actgggaaagttttgtgggagcgtgtatgtttacatgtgtaggtgagcgcatgagtacgagtatcggagtacgagtatcggaggaacaatgagctggagt

SEQ ID NO: 80076 - DNA, 30 bp, Homo sapiens; identical to SEQ ID NO: 24322
  chr10:77909913-77909943
  hypo

SEQ ID NO: 80077 - DNA, 1904 bp, Homo sapiens; identical to SEQ ID NO: 7442
  chr10:79396526-79398430
  hypo

SEQ ID NO: 80078 - DNA, 45 bp, Homo sapiens
  chr10:79540285-79540330
  hypo
tgtcctggatggagcccgagacaccctgtgcgatcttcaccttat

SEQ ID NO: 80079 - DNA, 23 bp, Homo sapiens
  chr10:79547018-79547041
  hypo
accgcgcccggccagactttgct

SEQ ID NO: 80080 - DNA, 31 bp, Homo sapiens; identical to SEQ ID NO: 24324
  chr10:79565637-79565668
  hypo

SEQ ID NO: 80081 - DNA, 107 bp, Homo sapiens
  chr10:79581128-79581235
  hypo
agagtggcttctgactcggagctagtctccagcctgtgctggaacttaatggagtcgctccttctgggaggttttgggggtgtcagaggccccgccctcttggaggg

SEQ ID NO: 80082 - DNA, 30 bp, Homo sapiens
  chr10:79598455-79598485
  hypo
atgaagatggctctgcggtgagggagctag

SEQ ID NO: 80083 - DNA, 270 bp, Homo sapiens
  chr10:79598692-79598962
  hypo
tcctgcctgctgactcggaacagggcctggaaaagatccctgcctcagctgacaggtgcacttgatgcccagtcaacaccccctgtggaggatggaggcgggctccaggctgaatggctcgcctgagtgctgggaatgcggtggttgccgcaaggacgtcaggcctggaggtctcattgctggacgccagcaccacagggaactcaggtgttctttgtgcatctctgtgctttctatatttctacaaacagtcttcacgattaacttcaa

SEQ ID NO: 80084 - DNA, 541 bp, Homo sapiens; identical to SEQ ID NO: 24325
  chr10:79601536-79602077
  hypo

SEQ ID NO: 80085 - DNA, 30 bp, Homo sapiens; identical to SEQ ID NO: 24326
  chr10:79602350-79602380
  hypo

SEQ ID NO: 80086 - DNA, 449 bp, Homo sapiens
  chr10:79610502-79610951
  hypo
agcgcctcatacacacgggcacgcggcgccagtgccttctacgcagtgtcttcatgacagccatacagaccaattctcctacactgagatgtgccaacctcgtgctttctagcaaggctgtggggcttcccttggaccgaggtggagccacatacacctctgaaatgatgattctctcaaggaagtatagaatccaaactaaaccccaaggcaaaaggttacctgagccaagcgtagaccaagaagaacaaactgccggcaggcaaaacagcaagaaaacaaagcacacagcagggtgtaggtaaaggccgggagaggccgcctgccctcaggtgggggaagttaccacgcaccccagggcagagaaggggctcaaacccttagagggccatcccctcgggcagcttcctgggagctttgttttgacacagcaccgccatccttacctg

SEQ ID NO: 80087 - DNA, 30 bp, Homo sapiens; identical to SEQ ID NO: 24327
  chr10:79626162-79626192
  hypo

SEQ ID NO: 80088 - DNA, 30 bp, Homo sapiens; identical to SEQ ID NO: 24328
  chr10:79628926-79628956
  hypo

SEQ ID NO: 80089 - DNA, 32 bp, Homo sapiens
  chr10:79670434-79670466
  hypo
cttaagaaatgtaggccgggcgtcgtggttca

SEQ ID NO: 80090 - DNA, 46 bp, Homo sapiens; identical to SEQ ID NO: 47287
  chr10:79686267-79686313
  hypo

SEQ ID NO: 80091 - DNA, 470 bp, Homo sapiens; identical to SEQ ID NO: 47288
  chr10:79686574-79687044
  hypo

SEQ ID NO: 80092 - DNA, 43 bp, Homo sapiens
  chr10:79713477-79713520
  hypo
agacttcaaggtaaagcgtattacccttcgtcacttgcaactt

SEQ ID NO: 80093 - DNA, 31 bp, Homo sapiens
  chr10:79739250-79739281
  hypo
tggggagagttcccctcgtgctccctctccc

SEQ ID NO: 80094 - DNA, 105 bp, Homo sapiens
  chr10:79770244-79770349
  hypo
aatagcagcaatcagcggttccccattcctcggggttacaagatttgctttagtctgtaggaaaagtaagcgcagtcagttagctgttctcggatgcatgatgca

SEQ ID NO: 80095 - DNA, 31 bp, Homo sapiens
  chr10:79814428-79814459
  hypo
gacatgtggcagattgcggaggggctgtggc

SEQ ID NO: 80096 - DNA, 30 bp, Homo sapiens
  chr10:80061903-80061933
  hypo
acccctaagcttgcgcggtggcacgattta

SEQ ID NO: 80097 - DNA, 30 bp, Homo sapiens; identical to SEQ ID NO: 7447
  chr10:80159487-80159517
  hypo

SEQ ID NO: 80098 - DNA, 30 bp, Homo sapiens; identical to SEQ ID NO: 47292
  chr10:80181336-80181366
  hypo

SEQ ID NO: 80099 - DNA, 30 bp, Homo sapiens; identical to SEQ ID NO: 24331
  chr10:80232164-80232194
  hypo

SEQ ID NO: 80100 - DNA, 213 bp, Homo sapiens
  chr10:80540447-80540660
  hypo
tctgagcactccatcccggaagtgccagagtgctacgcagggttgggccaccaaaggtttgtcctccaaggagggtccccaagacagaaataactcaggaagccctgtcctgagtgtccctgggtgctgctgcttgggcctgcactgccgcatggtgttggtgtcagccagcggcctgtgagagccctgccaggtcatcgggaggtgtgtgag

SEQ ID NO: 80101 - DNA, 31 bp, Homo sapiens
  chr10:80588138-80588169
  hypo
agcctcaagccagcagcggcccacactctgg

SEQ ID NO: 80102 - DNA, 31 bp, Homo sapiens; identical to SEQ ID NO: 24333
  chr10:80638009-80638040
  hypo

SEQ ID NO: 80103 - DNA, 31 bp, Homo sapiens; identical to SEQ ID NO: 24334
  chr10:80714408-80714439
  hypo

SEQ ID NO: 80104 - DNA, 38 bp, Homo sapiens; identical to SEQ ID NO: 7448
  chr10:80733745-80733783
  hypo

SEQ ID NO: 80105 - DNA, 64 bp, Homo sapiens; identical to SEQ ID NO: 24336
  chr10:80739955-80740019
  hypo

SEQ ID NO: 80106 - DNA, 19 bp, Homo sapiens
  chr10:80762723-80762742
  hypo
attagcaatggtgcagctg

SEQ ID NO: 80107 - DNA, 31 bp, Homo sapiens
  chr10:80763088-80763119
  hypo
cattccagtagtatctcgtgctgatgctggg

SEQ ID NO: 80108 - DNA, 195 bp, Homo sapiens
  chr10:80766187-80766382
  hypo
tttgttactccaggcacgtccctgacccctggggcctcagggtggaggtgatgagcagagcataaatccgctcagtgcgagcaagctctgctggaatcaccatgacaaatcatttatccagcctaaaatcagaagggacatggggtgggagaggcccctgggggccgagtgggcctgttgcgcctccttggatac

SEQ ID NO: 80109 - DNA, 24 bp, Homo sapiens
  chr10:80769677-80769701
  hypo
ccctggttcaaaccaccgctctgg

SEQ ID NO: 80110 - DNA, 28 bp, Homo sapiens
  chr10:80793777-80793805
  hypo
tggggttttggaacgtatgccccaggga

SEQ ID NO: 80111 - DNA, 30 bp, Homo sapiens; identical to SEQ ID NO: 47294
  chr10:80819116-80819146
  hypo

SEQ ID NO: 80112 - DNA, 34 bp, Homo sapiens; identical to SEQ ID NO: 7449
  chr10:80827232-80827266
  hypo

SEQ ID NO: 80113 - DNA, 408 bp, Homo sapiens; identical to SEQ ID NO: 47297
  chr10:80828531-80828939
  hypo

SEQ ID NO: 80114 - DNA, 30 bp, Homo sapiens; identical to SEQ ID NO: 47299
  chr10:80830745-80830775
  hypo

SEQ ID NO: 80115 - DNA, 76 bp, Homo sapiens; identical to SEQ ID NO: 24341
  chr10:80840368-80840444
  hypo

SEQ ID NO: 80116 - DNA, 30 bp, Homo sapiens; identical to SEQ ID NO: 47300
  chr10:80841132-80841162
  hypo

SEQ ID NO: 80117 - DNA, 39 bp, Homo sapiens; identical to SEQ ID NO: 24342
  chr10:80870192-80870231
  hypo

SEQ ID NO: 80118 - DNA, 452 bp, Homo sapiens
  chr10:80878240-80878692
  hypo
tgagagagggctccacggaagcacttgagcagagtctcaaaggccaggggcccttgaaagacagagaagtggggagaagagctctgagcggggcacccagcgtgtgccaaggccggagccaggggctctgggaggccgggctgactggagcctagtggtgggcaggcaggtttggctgctgctgtggtctggctttcagggctgcggggctgctcggccggtgctggggcttcgaatgtgacgttcaggagctgcgacctttatttggcagtggcaggacggtatccagtgtctcgagtagctccacgttggtgggccagttccatcttccaggagatggcagccaggacctagaggtccatgacgtgggtgaggggctgcccgcagggtcagagcttggagctcactgccccctttcttgtctcccataggactcacggcagctgtgttct

SEQ ID NO: 80119 - DNA, 31 bp, Homo sapiens
  chr10:80882132-80882163
  hypo
cccatttaccttccagcgctgcccctgtcta

SEQ ID NO: 80120 - DNA, 31 bp, Homo sapiens; identical to SEQ ID NO: 24343
  chr10:80882864-80882895
  hypo

SEQ ID NO: 80121 - DNA, 25 bp, Homo sapiens
  chr10:80900499-80900524
  hypo
cacaccaggccaggcccgcattaag

SEQ ID NO: 80122 - DNA, 283 bp, Homo sapiens; identical to SEQ ID NO: 24344
  chr10:80921745-80922028
  hypo

SEQ ID NO: 80123 - DNA, 31 bp, Homo sapiens; identical to SEQ ID NO: 24345
  chr10:80927517-80927548
  hypo

SEQ ID NO: 80124 - DNA, 31 bp, Homo sapiens
  chr10:80928562-80928593
  hypo
gacccccacaggtgtccgtccaccctggctg

SEQ ID NO: 80125 - DNA, 426 bp, Homo sapiens
  chr10:80930707-80931133
  hypo
catctcaggacaggtccgaggggctgcctgctcctgaacactggtcccttcttggacccgcactgtcagcctaaatcaagaaccccctcccagcccatgggtcctcccaccccagccagggcagcccccatggaagctttccagaaatatccacgcacagtgcggtgagctccagaaatgaaaaggctctcacactccctgctccctcccgttttccactcactgctgctcaggggagttaataagcagaggtgaaaaagctggccctgtcctgatgagatctcgtttgaggcagctgggtctgggctaatgccagagaaggaattcttcactgccgggccttcactccaccggggatgaggccagggcctagaacttagggactggcctgggctgtcgctcagaggatgccgggggccagagctt

SEQ ID NO: 80126 - DNA, 109 bp, Homo sapiens
  chr10:80953513-80953622
  hypo
ggtgtccaggcattgcgggcagagggacagtcagaggcaaagacatggaggtgcgatcttcagagcacagtccgggaggcagggagcagccccacgttggggacaaggg

SEQ ID NO: 80127 - DNA, 60 bp, Homo sapiens; identical to SEQ ID NO: 24347
  chr10:80956203-80956263
  hypo

SEQ ID NO: 80128 - DNA, 24 bp, Homo sapiens
  chr10:80957700-80957724
  hypo
gaccccgcacagtgtcgttattaa

SEQ ID NO: 80129 - DNA, 33 bp, Homo sapiens; identical to SEQ ID NO: 24349
  chr10:80958500-80958533
  hypo

SEQ ID NO: 80130 - DNA, 18 bp, Homo sapiens
  chr10:80958772-80958790
  hypo
gagcgagactcagtctca

SEQ ID NO: 80131 - DNA, 220 bp, Homo sapiens
  chr10:80961367-80961587
  hypo
agaacctagtgaaacggccagaatgaattctatggacaggcacatccagcagaccaatgaccgactgcagtgcatcaagcaggtgggtgtggggcaaggcacactccgagggcggggcagatggggcgggctgcagcagcagggcatctggtgggttctggctggagacgatggcagggcctcctgaccacctacctatcgaggccgttattggcatgct

SEQ ID NO: 80132 - DNA, 259 bp, Homo sapiens
  chr10:80966469-80966728
  hypo
gccccacatgggagcaccccacgcgccaggcactttgccaggggctgtataagcctcatcttgtttaagcctcactgcggccccgtgatggagggctttgttgctgcttgcctgccctctttctctcctacatctctttctctccctttacttccatggaaggaggacattctccttcatttcactttcctccacccatttttaaataccttgcctcgcatgaactacattgtagcaacagtcacggaaccttaagcga

SEQ ID NO: 80133 - DNA, 185 bp, Homo sapiens
  chr10:80969928-80970113
  hypo
tgggaaccttgtgtgacgtgtgtccagccaggctgccacagtctccagcacattgccccgagcctgaccctgtctatctaggatgtggggacttgagactgaatcagagagtggccctcaccggcctggatggaccaggaactggctctgcctcggtcctcttgtccatgcgttcattcatgaac

SEQ ID NO: 80134 - DNA, 172 bp, Homo sapiens
  chr10:80971585-80971757
  hypo
ccgtgggcttagggaacggcggaagacagaggagacagtgggagagcaggtccaggagggaaccgggtttcacatcagcaggcctctccttcatctccccaatgaggacgccctgcagcttcagaggaggtcagagtcagaaagacttttcgggtcccgccccctgccagta

SEQ ID NO: 80135 - DNA, 499 bp, Homo sapiens
  chr10:80974592-80975091
  hypo
ctgttcatgaggaaggcgggtgtgagggagcagatctgggagtcatgggacacctgggaatgggtggggacagagtgaagccagagcggcaacagcttgcaaagccacccaagggtcccctggagcgccccgtcccacactgccccccaggggaccgatggccctcccagtctgccgcctctcaccctgccagtccctacttctgagattttaaggagatgggtgggaccttcaggctccaaacacaccattgctgttatggaagccccccatttgctggggcttaaggctagagacagaccccaggctgagcgtgggagtcctgcggtttctagctgaggttgagggggctgcagggtgcttggcacggagcagcattacaatgcctgccccatcccggaagccttagtcgattaagcagctctgacctgaagccctgtgggaagcagcttgttctaaatcaccgctttttttttttttttgagaaggagtcttgctg

SEQ ID NO: 80136 - DNA, 304 bp, Homo sapiens
  chr10:80975645-80975949
  hypo
ctgagcccttggaagcggcggggcctatggctttggtgttggacccatcgtcagcctgggaaacccctaaggacggggccaggatcccagggcctggcacggaagaggtgttcatcagtatttgctgagcaactgaagaaggcacagtggacttctggctctgcctaatgatggggcactgccttagcttgcccacctcacccacttcacctgcaaaatgggcatatccattggctctgggctccgtgactcacctgccctcctcccctcttgctttcaggtggtcagtcgggtggcagcccag

SEQ ID NO: 80137 - DNA, 31 bp, Homo sapiens
  chr10:80976754-80976785
  hypo
cctgctagctttaagccggacagacctgtca

SEQ ID NO: 80138 - DNA, 29 bp, Homo sapiens
  chr10:80991615-80991644
  hypo
tgagccaccgtgcccggtcatgcctggtg

SEQ ID NO: 80139 - DNA, 33 bp, Homo sapiens; identical to SEQ ID NO: 24356
  chr10:81017843-81017876
  hypo

SEQ ID NO: 80140 - DNA, 30 bp, Homo sapiens
  chr10:81020990-81021020
  hypo
tgcccaactggtgcgcgctcagctcaggcc

SEQ ID NO: 80141 - DNA, 191 bp, Homo sapiens; identical to SEQ ID NO: 24357
  chr10:81023806-81023997
  hypo

SEQ ID NO: 80142 - DNA, 31 bp, Homo sapiens
  chr10:81032442-81032473
  hypo
gtaggttagaatggatcgaggtgagggagtc

SEQ ID NO: 80143 - DNA, 31 bp, Homo sapiens; identical to SEQ ID NO: 24358
  chr10:81032681-81032712
  hypo

SEQ ID NO: 80144 - DNA, 227 bp, Homo sapiens
  chr10:81035987-81036214
  hypo
caagatggtgactgagcgcagccagttccccagccctcagcgtcctcatgtacttcaggaggacaggccagctgagacacgatggacagcccaggctgagacacgctggcctgggaggcgcttttggctcctgtggccacgtggggacagtgaacagtgaaagaaaatggaagttttccccagtccccagttcatgtggggctctcttatcccggatgtggatggct

SEQ ID NO: 80145 - DNA, 434 bp, Homo sapiens; identical to SEQ ID NO: 24360
  chr10:81036656-81037090
  hypo

SEQ ID NO: 80146 - DNA, 291 bp, Homo sapiens
  chr10:81050746-81051037
  hypo
accccatgaatccaggcggcaaccccatggcgtcgggcatgaccaccagcaacccaggcctcaactccccacagtttgcggggcagcagcagcagttctcagccaaggctggccccgctcagccctacatccagcagagcatgtatggccggcccaactaccccggcagcgggggctttggggccaggtgagcagggctgacctgtggcagaagccatggacgccacccctcttcctccttccagtggggagggacccacttaaatcccagctccacgctttctgccctga

SEQ ID NO: 80147 - DNA, 30 bp, Homo sapiens
  chr10:81056343-81056373
  hypo
gatgcccagccagccgagctccgggcagta

SEQ ID NO: 80148 - DNA, 188 bp, Homo sapiens
  chr10:81057999-81058187
  hypo
gcaggacagagatctgcgagagagaagagtttccctggaggaggctctcctcccgaggggcatggctccaggcccctgggatgagtgcggtgtatgtccatagccatggccccttctgtctccgtaatcccataactcgtgcgtgtcttttctttccctccagcctcccaggccggttcctgtggcaa

SEQ ID NO: 80149 - DNA, 78 bp, Homo sapiens
  chr10:81059002-81059080
  hypo
atggcttccttgggcccgagtggggccctgggcagggggtagcagcatcttctgacaccttcacgtgttcagcatcat

SEQ ID NO: 80150 - DNA, 30 bp, Homo sapiens; identical to SEQ ID NO: 24364
  chr10:81059399-81059429
  hypo

SEQ ID NO: 80151 - DNA, 112 bp, Homo sapiens
  chr10:81060508-81060620
  hypo
tcaagtgctaccaccacgaggaccggcagatgaacaccaactggcccgcctcggtgcaggtcagcgtgaacgccacgcccctcaccattgagcgcggcgacaacaagacctc

SEQ ID NO: 80152 - DNA, 31 bp, Homo sapiens; identical to SEQ ID NO: 24366
  chr10:81063476-81063507
  hypo

SEQ ID NO: 80153 - DNA, 202 bp, Homo sapiens; identical to SEQ ID NO: 24367
  chr10:81063750-81063952
  hypo

SEQ ID NO: 80154 - DNA, 332 bp, Homo sapiens
  chr10:81065767-81066099
  hypo
tcacctgggtgtctgtcggagctggaggtgcttttatgcccaaagccaggcaccccggagcctcagctctgccacccttcctcccccagctccgagtttgaagaggtcaccatcgatcccacgtgcagctggcggccggtgcccatcaagtcggacttacacatcaaggacgaccctgatggcatcccctccaagcggttcaagaccatgagtcccagccagatgatcatgcccaatgtcatggagatgatcgcagccctgggccccggcccgtccccctatcccctcccgcctcccccagggggcaccaactccaacgactacagcagcca

SEQ ID NO: 80155 - DNA, 31 bp, Homo sapiens
  chr10:81067466-81067497
  hypo
ctaactgaggctacgtcgtgccctgtcagtg

SEQ ID NO: 80156 - DNA, 30 bp, Homo sapiens
  chr10:81070454-81070484
  hypo
gcccgagaggtccccgccgtccccctgcag

SEQ ID NO: 80157 - DNA, 30 bp, Homo sapiens
  chr10:81070939-81070969
  hypo
atgtaagttggggtcgccactcgccttggc

SEQ ID NO: 80158 - DNA, 43 bp, Homo sapiens
  chr10:81072191-81072234
  hypo
gggggtgccccacactcggtgcagtggccggggtatgtgtggg

SEQ ID NO: 80159 - DNA, 31 bp, Homo sapiens
  chr10:81072581-81072612
  hypo
gcctgtgccctcagaccgccccgcaccagag

SEQ ID NO: 80160 - DNA, 182 bp, Homo sapiens; identical to SEQ ID NO: 24369
  chr10:81073339-81073521
  hypo

SEQ ID NO: 80161 - DNA, 30 bp, Homo sapiens; identical to SEQ ID NO: 24370
  chr10:81142185-81142215
  hypo

SEQ ID NO: 80162 - DNA, 30 bp, Homo sapiens
  chr10:81144084-81144114
  hypo
aggtcccccatggccgggtccctggaaggg

SEQ ID NO: 80163 - DNA, 264 bp, Homo sapiens
  chr10:81145944-81146208
  hypo
acacaagacaaggacgctaagagcccccggcccagccccgcaggcctgcgagggcaccccatgcacagggcgacacgcagcccctcggagtagcacagggaagcagcgtctcctcgggctggcggggggtggctctgggtgcgggcgggcagcccgtcactgcacgcgacggcagtagtagcccaggaccttgcacttctcgcagaggtgctgcgggtgctccttgctctggtcggacacgtccaggccgtcgggcttctccag

SEQ ID NO: 80164 - DNA, 31 bp, Homo sapiens; identical to SEQ ID NO: 24372
  chr10:81153953-81153984
  hypo

SEQ ID NO: 80165 - DNA, 30 bp, Homo sapiens
  chr10:81371061-81371091
  hypo
ttttcattctcaggtcgctgatttcttgga

SEQ ID NO: 80166 - DNA, 30 bp, Homo sapiens
  chr10:81444388-81444418
  hypo
gtgcccggcgccgacggcctgctcagcaac

SEQ ID NO: 80167 - DNA, 30 bp, Homo sapiens
  chr10:81706242-81706272
  hypo
ccctctctcccatcccgtccatcgcgacca

SEQ ID NO: 80168 - DNA, 145 bp, Homo sapiens
  chr10:81861023-81861168
  hypo
tgcttccaaccaaatcgccaggattgtggattatcttactttctcctaagggtttaaaagtgaaaattccagccaaaggagcgactagtggattggtggtcgctggattctcaatccttacatcgctgggaccaacataggtgaa

SEQ ID NO: 80169 - DNA, 31 bp, Homo sapiens; identical to SEQ ID NO: 24373
  chr10:81921253-81921284
  hypo

SEQ ID NO: 80170 - DNA, 30 bp, Homo sapiens; identical to SEQ ID NO: 24374
  chr10:81924865-81924895
  hypo

SEQ ID NO: 80171 - DNA, 48 bp, Homo sapiens
  chr10:81931435-81931483
  hypo
ctttcctctacatggcagcttcggatcggctcttcatctccagggctc

SEQ ID NO: 80172 - DNA, 22 bp, Homo sapiens
  chr10:81958869-81958891
  hypo
tgagaccaagtcttgatctgtc

SEQ ID NO: 80173 - DNA, 166 bp, Homo sapiens
  chr10:81966465-81966631
  hypo
cttcccatccactgcacactgcgcgccatcgtgcgcttcaccattcttcattacctagctccttactgaaggacatttaggttgttgcctatgtttggctgttacaaacaagctgctggttcgattttcctttttttttttttttttctgagacggagtctcgatc

SEQ ID NO: 80174 - DNA, 30 bp, Homo sapiens
  chr10:82034734-82034764
  hypo
ccactgcaacaggacggtggtgggtggagg

SEQ ID NO: 80175 - DNA, 30 bp, Homo sapiens
  chr10:82131762-82131792
  hypo
agagacagacattagccgggcgtggtggct

SEQ ID NO: 80176 - DNA, 198 bp, Homo sapiens; identical to SEQ ID NO: 47316
  chr10:82213545-82213743
  hypo

SEQ ID NO: 80177 - DNA, 30 bp, Homo sapiens
  chr10:82214373-82214403
  hypo
ggacgagagccgcggcgggcccggggccgg

SEQ ID NO: 80178 - DNA, 30 bp, Homo sapiens; identical to SEQ ID NO: 24378
  chr10:82268203-82268233
  hypo

SEQ ID NO: 80179 - DNA, 18 bp, Homo sapiens
  chr10:82282239-82282257
  hypo
ctgggtgacaggagactc

SEQ ID NO: 80180 - DNA, 30 bp, Homo sapiens; identical to SEQ ID NO: 24379
  chr10:82297778-82297808
  hypo

SEQ ID NO: 80181 - DNA, 31 bp, Homo sapiens
  chr10:82329515-82329546
  hypo
cctcccattgttagctcggcctatgtgcgga

SEQ ID NO: 80182 - DNA, 80 bp, Homo sapiens
  chr10:82363369-82363449
  hypo
cgccgagcccagcgcgcccgggacgagtaccgacaccactcgctccgtgctatccagaagggcacggtcgctggcctcag

SEQ ID NO: 80183 - DNA, 30 bp, Homo sapiens; identical to SEQ ID NO: 7459
  chr10:84158654-84158684
  hypo

SEQ ID NO: 80184 - DNA, 163 bp, Homo sapiens; identical to SEQ ID NO: 24381
  chr10:84618970-84619133
  hypo

SEQ ID NO: 80185 - DNA, 30 bp, Homo sapiens; identical to SEQ ID NO: 7460
  chr10:85233864-85233894
  hypo

SEQ ID NO: 80186 - DNA, 30 bp, Homo sapiens; identical to SEQ ID NO: 7461
  chr10:85247485-85247515
  hypo

SEQ ID NO: 80187 - DNA, 30 bp, Homo sapiens; identical to SEQ ID NO: 7462
  chr10:85416512-85416542
  hypo

SEQ ID NO: 80188 - DNA, 34 bp, Homo sapiens; identical to SEQ ID NO: 24385
  chr10:86016116-86016150
  hypo

SEQ ID NO: 80189 - DNA, 43 bp, Homo sapiens; identical to SEQ ID NO: 7466
  chr10:86088146-86088189
  hypo

SEQ ID NO: 80190 - DNA, 178 bp, Homo sapiens
  chr10:86175508-86175686
  hypo
ggatcagctgagttgaccagacggcagagatggcggctgcccctcctcctggaaactcagtccttctcaggcagactccttgttactgctggctggctggaattccaagtcagtgggtcttaacgtgtaaggtgccgtgcaagtgggcctgcagatcgatgctgcttggatccttgga

SEQ ID NO: 80191 - DNA, 16 bp, Homo sapiens
  chr10:86176684-86176700
  hypo
aaaaaaaaaagagttt

SEQ ID NO: 80192 - DNA, 30 bp, Homo sapiens; identical to SEQ ID NO: 24387
  chr10:86296485-86296515
  hypo

SEQ ID NO: 80193 - DNA, 179 bp, Homo sapiens
  chr10:86306480-86306659
  hypo
ccatttgaacatgcacttggccgaggcagccctgggtgctctgcagggaacatacgctaacagctccccttcgagcactgcctgggagaagtgtggagcccaatccagccctcatcacgtccttaatttccaagcaccacttgcagccatgctgtggcgagaattcaactcttacctgc

SEQ ID NO: 80194 - DNA, 267 bp, Homo sapiens
  chr10:86361897-86362164
  hypo
acgccacaaatgcacactccataccacgtatacacacacggagtttctctgtccttccccccgtgttctccagggctgacctgtctccgtgtgcatttgtgacacgcaggcaaagctaagggagcaactgcaggtggcacctctccgcacctctctctgcacctctctctccgcacctctcctctctgcacttctctctctctccgcacctctcctctccgcacctctctctccgcacctctctccgcacctctcctctctgcactt

SEQ ID NO: 80195 - DNA, 30 bp, Homo sapiens; identical to SEQ ID NO: 47331
  chr10:86475849-86475879
  hypo

SEQ ID NO: 80196 - DNA, 30 bp, Homo sapiens; identical to SEQ ID NO: 47332
  chr10:86514862-86514892
  hypo

SEQ ID NO: 80197 - DNA, 30 bp, Homo sapiens; identical to SEQ ID NO: 47333
  chr10:86904510-86904540
  hypo

SEQ ID NO: 80198 - DNA, 30 bp, Homo sapiens; identical to SEQ ID NO: 47334
  chr10:87074845-87074875
  hypo

SEQ ID NO: 80199 - DNA, 30 bp, Homo sapiens; identical to SEQ ID NO: 47335
  chr10:87081956-87081986
  hypo

SEQ ID NO: 80200 - DNA, 30 bp, Homo sapiens; identical to SEQ ID NO: 47336
  chr10:87270873-87270903
  hypo

SEQ ID NO: 80201 - DNA, 30 bp, Homo sapiens; identical to SEQ ID NO: 47337
  chr10:87397127-87397157
  hypo

SEQ ID NO: 80202 - DNA, 30 bp, Homo sapiens; identical to SEQ ID NO: 47338
  chr10:87405011-87405041
  hypo

SEQ ID NO: 80203 - DNA, 30 bp, Homo sapiens; identical to SEQ ID NO: 47339
  chr10:87424457-87424487
  hypo

SEQ ID NO: 80204 - DNA, 30 bp, Homo sapiens; identical to SEQ ID NO: 47340
  chr10:87453632-87453662
  hypo

SEQ ID NO: 80205 - DNA, 57 bp, Homo sapiens; identical to SEQ ID NO: 47341
  chr10:87493569-87493626
  hypo

SEQ ID NO: 80206 - DNA, 30 bp, Homo sapiens; identical to SEQ ID NO: 47342
  chr10:87515091-87515121
  hypo

SEQ ID NO: 80207 - DNA, 30 bp, Homo sapiens; identical to SEQ ID NO: 47343
  chr10:87536102-87536132
  hypo

SEQ ID NO: 80208 - DNA, 30 bp, Homo sapiens; identical to SEQ ID NO: 47344
  chr10:87602797-87602827
  hypo

SEQ ID NO: 80209 - DNA, 30 bp, Homo sapiens; identical to SEQ ID NO: 47345
  chr10:87622976-87623006
  hypo

SEQ ID NO: 80210 - DNA, 30 bp, Homo sapiens; identical to SEQ ID NO: 47346
  chr10:87672380-87672410
  hypo

SEQ ID NO: 80211 - DNA, 30 bp, Homo sapiens; identical to SEQ ID NO: 47347
  chr10:87832587-87832617
  hypo

SEQ ID NO: 80212 - DNA, 30 bp, Homo sapiens; identical to SEQ ID NO: 47348
  chr10:87836471-87836501
  hypo

SEQ ID NO: 80213 - DNA, 30 bp, Homo sapiens; identical to SEQ ID NO: 47349
  chr10:87838181-87838211
  hypo

SEQ ID NO: 80214 - DNA, 30 bp, Homo sapiens; identical to SEQ ID NO: 47350
  chr10:87863910-87863940
  hypo

SEQ ID NO: 80215 - DNA, 30 bp, Homo sapiens; identical to SEQ ID NO: 47351
  chr10:87866056-87866086
  hypo

SEQ ID NO: 80216 - DNA, 30 bp, Homo sapiens; identical to SEQ ID NO: 47352
  chr10:87886909-87886939
  hypo

SEQ ID NO: 80217 - DNA, 30 bp, Homo sapiens; identical to SEQ ID NO: 47353
  chr10:87941840-87941870
  hypo

SEQ ID NO: 80218 - DNA, 178 bp, Homo sapiens
  chr10:87965963-87966141
  hypo
cctgactcatgaagctcgaggtttgaccctatcacctggaggcccactcagcacagaccacccctgaccggtccagggccccacccactctcaggtctcccagcatctggccatccctgtccccaagcagccccagctcgcctgccggacaactcaccatactcgctgtcgtagaaca

SEQ ID NO: 80219 - DNA, 30 bp, Homo sapiens; identical to SEQ ID NO: 47354
  chr10:87992037-87992067
  hypo

SEQ ID NO: 80220 - DNA, 30 bp, Homo sapiens; identical to SEQ ID NO: 47355
  chr10:88023113-88023143
  hypo

SEQ ID NO: 80221 - DNA, 30 bp, Homo sapiens; identical to SEQ ID NO: 47356
  chr10:88096446-88096476
  hypo

SEQ ID NO: 80222 - DNA, 31 bp, Homo sapiens
  chr10:88098234-88098265
  hypo
ctttgtcctgtacaaccgaagaaaccacagc

SEQ ID NO: 80223 - DNA, 31 bp, Homo sapiens
  chr10:88108300-88108331
  hypo
cacaggggcctggtgtcgggaagatgccctg

SEQ ID NO: 80224 - DNA, 30 bp, Homo sapiens; identical to SEQ ID NO: 47357
  chr10:88118882-88118912
  hypo

SEQ ID NO: 80225 - DNA, 30 bp, Homo sapiens; identical to SEQ ID NO: 47358
  chr10:88123778-88123808
  hypo

SEQ ID NO: 80226 - DNA, 30 bp, Homo sapiens; identical to SEQ ID NO: 47360
  chr10:88125456-88125486
  hypo

SEQ ID NO: 80227 - DNA, 31 bp, Homo sapiens; identical to SEQ ID NO: 7470
  chr10:88148418-88148449
  hypo

SEQ ID NO: 80228 - DNA, 30 bp, Homo sapiens; identical to SEQ ID NO: 47366
  chr10:88193994-88194024
  hypo

SEQ ID NO: 80229 - DNA, 204 bp, Homo sapiens
  chr10:88200327-88200531
  hypo
ttacaggcgtgagccactgcgcccggccttttttcactgcttttgaggcctgcctcttcctcctttcctgtgtgtgatgggtttctgatttgctcttaaaatcttgtcattggaaataagaaaaagggatataaagatcttgcggggcctccagagccacgatgagaactttggtcttgatcctgaaatcggcggtacccagag

SEQ ID NO: 80230 - DNA, 30 bp, Homo sapiens; identical to SEQ ID NO: 47367
  chr10:88224627-88224657
  hypo

SEQ ID NO: 80231 - DNA, 24 bp, Homo sapiens
  chr10:88237802-88237826
  hypo
actctgtctcggaaaaaaaaaaaa

SEQ ID NO: 80232 - DNA, 36 bp, Homo sapiens
  chr10:88241397-88241433
  hypo
gggattacaggcgtgaaccaccgcgccgggctgaaa

SEQ ID NO: 80233 - DNA, 30 bp, Homo sapiens; identical to SEQ ID NO: 47368
  chr10:88271572-88271602
  hypo

SEQ ID NO: 80234 - DNA, 80 bp, Homo sapiens
  chr10:88280085-88280165
  hypo
tgccaaaagaccacgtcttttacaaatacatagtgaaatactgatgaaataacgtcagcgattttccaacattaaggaat

SEQ ID NO: 80235 - DNA, 31 bp, Homo sapiens
  chr10:88282806-88282837
  hypo
ctccctccggtataatcggggaaactccaaa

SEQ ID NO: 80236 - DNA, 34 bp, Homo sapiens
  chr10:88286948-88286982
  hypo
gaagctttaaattgtgttcagcggccaggcacgg

SEQ ID NO: 80237 - DNA, 213 bp, Homo sapiens; identical to SEQ ID NO: 47369
  chr10:88294491-88294704
  hypo

SEQ ID NO: 80238 - DNA, 30 bp, Homo sapiens; identical to SEQ ID NO: 47370
  chr10:88318471-88318501
  hypo

SEQ ID NO: 80239 - DNA, 30 bp, Homo sapiens; identical to SEQ ID NO: 47371
  chr10:88332878-88332908
  hypo

SEQ ID NO: 80240 - DNA, 30 bp, Homo sapiens; identical to SEQ ID NO: 47373
  chr10:88413886-88413916
  hypo

SEQ ID NO: 80241 - DNA, 30 bp, Homo sapiens; identical to SEQ ID NO: 24392
  chr10:88414306-88414336
  hypo

SEQ ID NO: 80242 - DNA, 165 bp, Homo sapiens
  chr10:88422750-88422915
  hypo
aggcttctcagatcaacgctgtccaggtgtgcccagggatgggtgtcaaccttcctcggggccaggtgtgcccagggatgggtgtcagccctcctcagggcctgcagctctgcttcccctagatgtccccaggaaagctccgtgcgccaccggctcctgttccca

SEQ ID NO: 80243 - DNA, 654 bp, Homo sapiens; identical to SEQ ID NO: 24393
  chr10:88441136-88441790
  hypo

SEQ ID NO: 80244 - DNA, 30 bp, Homo sapiens
  chr10:88445501-88445531
  hypo
ccagcatgtgtctgcgtgtgtctggcgtgg

SEQ ID NO: 80245 - DNA, 30 bp, Homo sapiens; identical to SEQ ID NO: 47374
  chr10:88453438-88453468
  hypo

SEQ ID NO: 80246 - DNA, 225 bp, Homo sapiens
  chr10:88470509-88470734
  hypo
ggccttgcttcggggcgctggttcatgaagctcgctctgacagcagggctgagtgtgggcggtcgaagcggcttttgcccgagacagaggccggtgccacggcctgctctgctctcgaaggcaaagtgcctcatccatccaggctgcgctgttcatggacaccttgtgttctggggatggaatgaagcacccagcacagcgtctgtcacacgggaggtgcccttc

SEQ ID NO: 80247 - DNA, 30 bp, Homo sapiens; identical to SEQ ID NO: 47375
  chr10:88480957-88480987
  hypo

SEQ ID NO: 80248 - DNA, 30 bp, Homo sapiens; identical to SEQ ID NO: 47376
  chr10:88487419-88487449
  hypo

SEQ ID NO: 80249 - DNA, 30 bp, Homo sapiens; identical to SEQ ID NO: 47377
  chr10:88499801-88499831
  hypo

SEQ ID NO: 80250 - DNA, 30 bp, Homo sapiens; identical to SEQ ID NO: 47379
  chr10:88550295-88550325
  hypo

SEQ ID NO: 80251 - DNA, 30 bp, Homo sapiens; identical to SEQ ID NO: 47380
  chr10:88560576-88560606
  hypo

SEQ ID NO: 80252 - DNA, 30 bp, Homo sapiens; identical to SEQ ID NO: 47381
  chr10:88581192-88581222
  hypo

SEQ ID NO: 80253 - DNA, 36 bp, Homo sapiens
  chr10:88587610-88587646
  hypo
ttaaagaaaaaagttgcaggccgggcacggtggttt

SEQ ID NO: 80254 - DNA, 30 bp, Homo sapiens; identical to SEQ ID NO: 47382
  chr10:88592397-88592427
  hypo

SEQ ID NO: 80255 - DNA, 30 bp, Homo sapiens; identical to SEQ ID NO: 24394
  chr10:88615949-88615979
  hypo

SEQ ID NO: 80256 - DNA, 30 bp, Homo sapiens; identical to SEQ ID NO: 47383
  chr10:88628328-88628358
  hypo

SEQ ID NO: 80257 - DNA, 30 bp, Homo sapiens; identical to SEQ ID NO: 47384
  chr10:88629689-88629719
  hypo

SEQ ID NO: 80258 - DNA, 31 bp, Homo sapiens
  chr10:88698619-88698650
  hypo
ttcagattgtgtcaaatcagccgggcgcagt

SEQ ID NO: 80259 - DNA, 30 bp, Homo sapiens; identical to SEQ ID NO: 24395
  chr10:88702780-88702810
  hypo

SEQ ID NO: 80260 - DNA, 31 bp, Homo sapiens; identical to SEQ ID NO: 24396
  chr10:89420153-89420184
  hypo

SEQ ID NO: 80261 - DNA, 30 bp, Homo sapiens; identical to SEQ ID NO: 7476
  chr10:89692890-89692920
  hypo

SEQ ID NO: 80262 - DNA, 30 bp, Homo sapiens; identical to SEQ ID NO: 7477
  chr10:89717657-89717687
  hypo

SEQ ID NO: 80263 - DNA, 31 bp, Homo sapiens
  chr10:89762183-89762214
  hypo
catgagccaccatgcccggcccaaaatcctc

SEQ ID NO: 80264 - DNA, 278 bp, Homo sapiens
  chr10:90029771-90030049
  hypo
tagtgcagtttgaaatccacttgtctaaccaaacccttcatatttctgacaaagccctgagaagaagagtcatttctttaagccagccgggaacatgagtcttctaaactttgaggccctctttgacaagaggagagaggagtaaacgaaacaatgacacttatttctacctataatctccgttgatcgacctttgtactccacggtgagtcttgcagctaagagacgcaaattagacctatttgcactcctagtgcggtcaagtgcagtcaagatct

SEQ ID NO: 80265 - DNA, 30 bp, Homo sapiens
  chr10:90345845-90345875
  hypo
tgcagttgtgaatccgcatttatctttgtc

SEQ ID NO: 80266 - DNA, 56 bp, Homo sapiens; identical to SEQ ID NO: 47396
  chr10:90750729-90750785
  hypo

SEQ ID NO: 80267 - DNA, 81 bp, Homo sapiens; identical to SEQ ID NO: 47402
  chr10:91295584-91295665
  hypo

SEQ ID NO: 80268 - DNA, 31 bp, Homo sapiens; identical to SEQ ID NO: 7483
  chr10:91295738-91295769
  hypo

SEQ ID NO: 80269 - DNA, 30 bp, Homo sapiens
  chr10:91353097-91353127
  hypo
agagtgttcaaaatcgtcctcaggcagggc

SEQ ID NO: 80270 - DNA, 30 bp, Homo sapiens
  chr10:91589219-91589249
  hypo
cagccccgcgcttgcgcgccaatcacggcc

SEQ ID NO: 80271 - DNA, 624 bp, Homo sapiens; identical to SEQ ID NO: 47406
  chr10:92617016-92617640
  hypo

SEQ ID NO: 80272 - DNA, 256 bp, Homo sapiens; identical to SEQ ID NO: 47407
  chr10:92617900-92618156
  hypo

SEQ ID NO: 80273 - DNA, 30 bp, Homo sapiens
  chr10:92663305-92663335
  hypo
tgtttgcagttgtgcgtgctttctattcat

SEQ ID NO: 80274 - DNA, 333 bp, Homo sapiens
  chr10:92913457-92913790
  hypo
tcggttgctctctgcgtgggggcgcagtctccactgcagatcagcacccgcccgcggggaggtggccacgtttctctcctgaacaccagttgatggcccgccttcctaaaaggccgtgtggcgtctccagtggctacaacggggcgcgccaatggctcgtgcgtggaggtaacggtgccgcggggttgccaggggcgtaccacgaccgggccgcgcactctcgctgccgccctggcgttttggttgtaaattgagagattttgacctctggaaaagctcccaaatggaaagtgctggggttgaggacatcttcctaacgacaataaaattagc

SEQ ID NO: 80275 - DNA, 137 bp, Homo sapiens; identical to SEQ ID NO: 24403
  chr10:93567139-93567276
  hypo

SEQ ID NO: 80276 - DNA, 215 bp, Homo sapiens; identical to SEQ ID NO: 24404
  chr10:93572697-93572912
  hypo

SEQ ID NO: 80277 - DNA, 709 bp, Homo sapiens; identical to SEQ ID NO: 7490
  chr10:93647031-93647740
  hypo

SEQ ID NO: 80278 - DNA, 18 bp, Homo sapiens
  chr10:93682877-93682895
  hypo
gagcgaaactcggtcaaa

SEQ ID NO: 80279 - DNA, 43 bp, Homo sapiens
  chr10:93744095-93744138
  hypo
gtacatattgaagttggtaatcgagtaaacaacaatgttttaa

SEQ ID NO: 80280 - DNA, 30 bp, Homo sapiens
  chr10:93804883-93804913
  hypo
ttaatgtccatccgcgctgctggtgatgag

SEQ ID NO: 80281 - DNA, 320 bp, Homo sapiens
  chr10:93811839-93812159
  hypo
acccaattcttctttaaaaatcgagaacgaatgcacagatttccagaacactgtaagccctgaggcagtgccctctcttttccctccttgttatctactccagtacttgtggctgggtcggcccgtggctcagctccagcggaacgggacgtgacgagggcggtcgcctccctccttcaccagcggtttgtggaactcccgcccggctcgggaatgtatgctcgcccagcagtattcacagtaatactgcagacaggtgacgttggcacagaagaacggggcaaacttcccaccacagcgtgtgccctggcactcatcac

SEQ ID NO: 80282 - DNA, 38 bp, Homo sapiens; identical to SEQ ID NO: 24408
  chr10:93843637-93843675
  hypo

SEQ ID NO: 80283 - DNA, 38 bp, Homo sapiens
  chr10:94219876-94219914
  hypo
agccaccacgcccagccggtgtgaatctcttaaagctt

SEQ ID NO: 80284 - DNA, 38 bp, Homo sapiens; identical to SEQ ID NO: 24409
  chr10:94310595-94310633
  hypo

SEQ ID NO: 80285 - DNA, 30 bp, Homo sapiens; identical to SEQ ID NO: 24410
  chr10:94429554-94429584
  hypo

SEQ ID NO: 80286 - DNA, 364 bp, Homo sapiens; identical to SEQ ID NO: 47421
  chr10:94449797-94450161
  hypo

SEQ ID NO: 80287 - DNA, 477 bp, Homo sapiens; identical to SEQ ID NO: 47422
  chr10:94450377-94450854
  hypo

SEQ ID NO: 80288 - DNA, 28 bp, Homo sapiens
  chr10:94676999-94677027
  hypo
gtgtgggccactgcgcccaaatctaatt

SEQ ID NO: 80289 - DNA, 103 bp, Homo sapiens
  chr10:94770432-94770535
  hypo
atgacaaagcaagactccatctcttaaaaaaaaaaaaaaaaaaatggactcggcaacttttaaactgagtctttaggggactgttggacgtgtttcaaagagg

SEQ ID NO: 80290 - DNA, 30 bp, Homo sapiens
  chr10:94819544-94819574
  hypo
ggggctgcccttcgcgccttacccagcctt

SEQ ID NO: 80291 - DNA, 31 bp, Homo sapiens
  chr10:94819875-94819906
  hypo
attcggtccttgagaccggaaaggtgctcgt

SEQ ID NO: 80292 - DNA, 1396 bp, Homo sapiens; identical to SEQ ID NO: 47429
  chr10:94833574-94834970
  hypo

SEQ ID NO: 80293 - DNA, 23 bp, Homo sapiens
  chr10:94939631-94939654
  hypo
caggtgcggtggctcacgcctgt

SEQ ID NO: 80294 - DNA, 31 bp, Homo sapiens
  chr10:94973477-94973508
  hypo
ctcgaactcctgacctcgtgatctgcccaaa

SEQ ID NO: 80295 - DNA, 31 bp, Homo sapiens
  chr10:94981204-94981235
  hypo
ggcaatgggattccatcgggtactcaggttg

SEQ ID NO: 80296 - DNA, 30 bp, Homo sapiens
  chr10:95143643-95143673
  hypo
gggccggctctaccccgtaggcctccacat

SEQ ID NO: 80297 - DNA, 770 bp, Homo sapiens; identical to SEQ ID NO: 47435
  chr10:95753501-95754271
  hypo

SEQ ID NO: 80298 - DNA, 30 bp, Homo sapiens; identical to SEQ ID NO: 47436
  chr10:96066325-96066355
  hypo

SEQ ID NO: 80299 - DNA, 61 bp, Homo sapiens; identical to SEQ ID NO: 7504
  chr10:96122755-96122816
  hypo

SEQ ID NO: 80300 - DNA, 159 bp, Homo sapiens
  chr10:96154780-96154939
  hypo
gctctcagcaaagaggcgtcctagagagggtggctcctctctgcaggcaggtcgttccaagaggataagtcctctctgaagctggtcatcttgtgacctgctcagctctggccgagctgggggcttttttttttttttgagatggagtctaactctgtc

SEQ ID NO: 80301 - DNA, 1601 bp, Homo sapiens; identical to SEQ ID NO: 47438
  chr10:96161936-96163537
  hypo

SEQ ID NO: 80302 - DNA, 19 bp, Homo sapiens
  chr10:96944423-96944442
  hypo
cagagcaagccttgtctca

SEQ ID NO: 80303 - DNA, 30 bp, Homo sapiens
  chr10:96953432-96953462
  hypo
ctcccaccgccccccgctgaggatcatgag

SEQ ID NO: 80304 - DNA, 30 bp, Homo sapiens
  chr10:96991416-96991446
  hypo
gaaagccagaggcacgcaggcctaggttgc

SEQ ID NO: 80305 - DNA, 30 bp, Homo sapiens; identical to SEQ ID NO: 47439
  chr10:97050342-97050372
  hypo

SEQ ID NO: 80306 - DNA, 93 bp, Homo sapiens
  chr10:97096179-97096272
  hypo
gcattcacttggcctccgtagatggaccaggggcgagacgtgcagcccaccctgccaagtgagacgccaagtgcacacgcggcatgctgcagt

SEQ ID NO: 80307 - DNA, 38 bp, Homo sapiens; identical to SEQ ID NO: 24416
  chr10:97118424-97118462
  hypo

SEQ ID NO: 80308 - DNA, 30 bp, Homo sapiens; identical to SEQ ID NO: 7509
  chr10:97208010-97208040
  hypo

SEQ ID NO: 80309 - DNA, 30 bp, Homo sapiens
  chr10:97317228-97317258
  hypo
atttacaaaaaaaccgggacttcagcagaa

SEQ ID NO: 80310 - DNA, 59 bp, Homo sapiens; identical to SEQ ID NO: 7510
  chr10:97321333-97321392
  hypo

SEQ ID NO: 80311 - DNA, 45 bp, Homo sapiens
  chr10:97617585-97617630
  hypo
aaacacaaacaaaggcaaatccgactgctgcaaatcaaaaggaac

SEQ ID NO: 80312 - DNA, 30 bp, Homo sapiens; identical to SEQ ID NO: 7511
  chr10:97659562-97659592
  hypo

SEQ ID NO: 80313 - DNA, 412 bp, Homo sapiens
  chr10:98129735-98130147
  hypo
ggactgaaagccgggcgtgtctgactccacaactcctgctgtgaatcatcacactctgccccggccccagcgtctccgggacttaccccagagccacagaagcggccgagcctgggcgctgagctgtcgtagccgtcgtaggcttccatgtagtcgtagccgcagtcggcctcctcctcaacctcaaaggtccggaatgtcagctccacgccgtagccgtcctctgccacgatcacccagtcacagcgggcctcgctcgggtagttgttgtccccaaactgggcgtgggaatagagctctttggtctgcacttcagccttcagcctgcccccgcactctggagcagagagaagtgagatgtcccctcagcacaagacaccctcgtgcctcccgcctgcgtctgctcggcttt

SEQ ID NO: 80314 - DNA, 31 bp, Homo sapiens
  chr10:98292765-98292796
  hypo
tattgtgtgaaacaatcgcataagatttagc

SEQ ID NO: 80315 - DNA, 39 bp, Homo sapiens
  chr10:98338544-98338583
  hypo
gttcatggccgggtacggtgactcacacctgtaatccca

SEQ ID NO: 80316 - DNA, 137 bp, Homo sapiens; identical to SEQ ID NO: 24421
  chr10:98350861-98350998
  hypo

SEQ ID NO: 80317 - DNA, 30 bp, Homo sapiens
  chr10:98351470-98351500
  hypo
gtgtctcctcccgcgcgcatttcccacaca

SEQ ID NO: 80318 - DNA, 177 bp, Homo sapiens
  chr10:98380114-98380291
  hypo
gaaacgaaaggactccgatcgtttcttctggttgagctgccactctttgaagtggagcacagcctcatccacgttgacaatgcccagcttcacctgctcctggagggtgataagctgccgctggcctggcgttttcattcccgcaaaagggtcatatatactcgactggggcctgtc

SEQ ID NO: 80319 - DNA, 31 bp, Homo sapiens; identical to SEQ ID NO: 24422
  chr10:98403875-98403906
  hypo

SEQ ID NO: 80320 - DNA, 145 bp, Homo sapiens
  chr10:98469422-98469567
  hypo
actcctcgctgtcccgcacgccgcagagcagcctgaccacgcggtgcggaggatggaaagctctctgcagcaggggcagcaaggcgggcttgtggaagtgctgcaccagctccgcggacagcagcaccacgacacagcgggtgct

SEQ ID NO: 80321 - DNA, 96 bp, Homo sapiens
  chr10:98482589-98482685
  hypo
gaccctgctccactccgtgcactggctctctccaggttctgcagtcggtccctgcaacactgggtggtaggtgaattggctcgaggaagaatggag

SEQ ID NO: 80322 - DNA, 11 bp, Homo sapiens
  chr10:98526508-98526519
  hypo
aagaattatga

SEQ ID NO: 80323 - DNA, 91 bp, Homo sapiens
  chr10:98528135-98528226
  hypo
cacctcctgctgtgtgacgcggttcctaacagaccacggactgatacaggtctctgtaccctggtttaatgggtaccgggtttcagcttgg

SEQ ID NO: 80324 - DNA, 24 bp, Homo sapiens
  chr10:98577449-98577473
  hypo
tttttttttttttttttgagacgg

SEQ ID NO: 80325 - DNA, 217 bp, Homo sapiens; identical to SEQ ID NO: 47452
  chr10:98593381-98593598
  hypo

SEQ ID NO: 80326 - DNA, 30 bp, Homo sapiens; identical to SEQ ID NO: 24425
  chr10:98645908-98645938
  hypo

SEQ ID NO: 80327 - DNA, 35 bp, Homo sapiens
  chr10:98676069-98676104
  hypo
gagccaccacacccggcccccttgaaagtttatat

SEQ ID NO: 80328 - DNA, 30 bp, Homo sapiens
  chr10:98708806-98708836
  hypo
gtgagatcatgcagcgaatgatccaacaat

SEQ ID NO: 80329 - DNA, 46 bp, Homo sapiens
  chr10:98713008-98713054
  hypo
tatatcaaaaaatacttgagccgggcgtggtggctcaggcctgtaa

SEQ ID NO: 80330 - DNA, 30 bp, Homo sapiens; identical to SEQ ID NO: 24426
  chr10:98740820-98740850
  hypo

SEQ ID NO: 80331 - DNA, 61 bp, Homo sapiens
  chr10:98982989-98983050
  hypo
ctgtagttttggttacgattcattacctgctcctttttttacggttcgttacctgctcctg

SEQ ID NO: 80332 - DNA, 23 bp, Homo sapiens
  chr10:99042885-99042908
  hypo
cacccgcccggctgttactatgt

SEQ ID NO: 80333 - DNA, 394 bp, Homo sapiens
  chr10:99206758-99207152
  hypo
tccggccttttcccggttttttaaactgcagcttccagtcctgcggtccgatcctcttcgcggcccctcatccccacttcagtaagctttctctggttgaaaaagccgaactctggttgtgtgggcccgtcatcaaaagataagcagccccaaaataaagttgttactctttttcttctcagcgtgttagcccagaagggaggtctgcacatgaataaaatgctactctttattgatgttgggtatctcctacttgagattgcaaacatcctgagagcagcgtctttgtccagatgacattcgccacgactttgatctcagttcacctgacttctgatggctttgccgtctgtccttccctgtcccctcagtcgactttcccattgggaaacag

SEQ ID NO: 80334 - DNA, 29 bp, Homo sapiens
  chr10:99207384-99207413
  hypo
atgaaaagtctgggccaggtgcggtggct

SEQ ID NO: 80335 - DNA, 31 bp, Homo sapiens
  chr10:99233071-99233102
  hypo
tgtgagccactgcgcccggcctagaatttct

SEQ ID NO: 80336 - DNA, 252 bp, Homo sapiens
  chr10:99240757-99241009
  hypo
gctcgtgcccgagttcggggttctggattctctagagaggacctaggggaaaacaggatagagagaacctgcaattacccagttcaaatgtttgaagaaataaacattttacattagtcacactcaccccctgggcatggaagcagagccaagccctgttaagagtaaaaacagcccaggaaggtgttcctgaggtaacggcattacagataccagtaaggacagaaggcttaagagcgatcctcagactga

SEQ ID NO: 80337 - DNA, 337 bp, Homo sapiens; identical to SEQ ID NO: 47467
  chr10:99259372-99259709
  hypo

SEQ ID NO: 80338 - DNA, 22 bp, Homo sapiens
  chr10:99269408-99269430
  hypo
ttttttccccccaccctgagac

SEQ ID NO: 80339 - DNA, 30 bp, Homo sapiens
  chr10:99285190-99285220
  hypo
ttctagctgggcgccgacattttctatttc

SEQ ID NO: 80340 - DNA, 30 bp, Homo sapiens
  chr10:99329946-99329976
  hypo
ctactgcctgtcaccgccggtgaacctgct

SEQ ID NO: 80341 - DNA, 30 bp, Homo sapiens; identical to SEQ ID NO: 24429
  chr10:99330432-99330462
  hypo

SEQ ID NO: 80342 - DNA, 30 bp, Homo sapiens; identical to SEQ ID NO: 24430
  chr10:99331793-99331823
  hypo

SEQ ID NO: 80343 - DNA, 30 bp, Homo sapiens
  chr10:99343435-99343465
  hypo
ctaatgatagtgggcgagagacccctcagc

SEQ ID NO: 80344 - DNA, 329 bp, Homo sapiens
  chr10:99358762-99359091
  hypo
catgctgaggcaccttcgcttggcccagtgtcctggtccaggcctccttctgcctgctctcacctctctccttcctctggcagccactcaagccacagtggagatgaccgtcagcatggcccaggtcggggctgacgcggccatggtggtgaccccttgctactatcgtggccgcatgagcagtgcggccctcattcaccactacaccaaggtgtgtgtgaggcctgagaccaagaggaggctctgcccagggagaggagataagggaagctgggaatagggtggtgcttcacatgaacggcagctataggaaacgggtggactgccac

SEQ ID NO: 80345 - DNA, 31 bp, Homo sapiens; identical to SEQ ID NO: 24431
  chr10:99375942-99375973
  hypo

SEQ ID NO: 80346 - DNA, 97 bp, Homo sapiens; identical to SEQ ID NO: 47469
  chr10:99447291-99447388
  hypo

SEQ ID NO: 80347 - DNA, 23 bp, Homo sapiens
  chr10:99449195-99449218
  hypo
acagcgcccggcccgttaaaaag

SEQ ID NO: 80348 - DNA, 22 bp, Homo sapiens
  chr10:99451149-99451171
  hypo
aatggtacaagctgggcgccgt

SEQ ID NO: 80349 - DNA, 261 bp, Homo sapiens; identical to SEQ ID NO: 47471
  chr10:99474282-99474543
  hypo

SEQ ID NO: 80350 - DNA, 30 bp, Homo sapiens; identical to SEQ ID NO: 24434
  chr10:99481793-99481823
  hypo

SEQ ID NO: 80351 - DNA, 867 bp, Homo sapiens; identical to SEQ ID NO: 47473
  chr10:99531037-99531904
  hypo

SEQ ID NO: 80352 - DNA, 30 bp, Homo sapiens
  chr10:99566060-99566090
  hypo
gaggtagtgagcttcgatcccaagccatgt

SEQ ID NO: 80353 - DNA, 192 bp, Homo sapiens
  chr10:99626198-99626390
  hypo
aagagacatagccatgcggggcctgaatctcctgaactacagccagtttcctgagattagaacctgtgtgtatgcacatgtgaatgtatgtgtgagtgcacatgtgtgtaagtgcagtgtgcgtaaatgtgtgagtctgcgtgtgttagcatgcctgtatgtgagcgcgtgtgtgagcgcatgtgtgtgcac

SEQ ID NO: 80354 - DNA, 31 bp, Homo sapiens
  chr10:99656697-99656728
  hypo
ccgggattgagctcctcgatgagggggtctc

SEQ ID NO: 80355 - DNA, 30 bp, Homo sapiens
  chr10:99696017-99696047
  hypo
ccggtcccgcagcgcgtagtagggtgagct

SEQ ID NO: 80356 - DNA, 318 bp, Homo sapiens; identical to SEQ ID NO: 47478
  chr10:99790021-99790339
  hypo

SEQ ID NO: 80357 - DNA, 322 bp, Homo sapiens; identical to SEQ ID NO: 47479
  chr10:99790437-99790759
  hypo

SEQ ID NO: 80358 - DNA, 260 bp, Homo sapiens; identical to SEQ ID NO: 7527
  chr10:99790917-99791177
  hypo

SEQ ID NO: 80359 - DNA, 30 bp, Homo sapiens
  chr10:100020680-100020710
  hypo
gtagtagtggctgtcgacaggcacctcgct

SEQ ID NO: 80360 - DNA, 31 bp, Homo sapiens; identical to SEQ ID NO: 24439
  chr10:100078103-100078134
  hypo

SEQ ID NO: 80361 - DNA, 175 bp, Homo sapiens; identical to SEQ ID NO: 24440
  chr10:100170636-100170811
  hypo

SEQ ID NO: 80362 - DNA, 143 bp, Homo sapiens; identical to SEQ ID NO: 24441
  chr10:100171091-100171234
  hypo

SEQ ID NO: 80363 - DNA, 267 bp, Homo sapiens; identical to SEQ ID NO: 24442
  chr10:100178669-100178936
  hypo

SEQ ID NO: 80364 - DNA, 87 bp, Homo sapiens
  chr10:100207453-100207540
  hypo
atagccctgccacacgcatctctttgctcagcccaccgttgagatcgttcactcactatgctttcagtggtcgaatgaattccatca

SEQ ID NO: 80365 - DNA, 30 bp, Homo sapiens
  chr10:100248279-100248309
  hypo
gcttctatgaggagacgcaaatcctgctaa

SEQ ID NO: 80366 - DNA, 30 bp, Homo sapiens
  chr10:101194081-101194111
  hypo
tcattctttggagtcgttatatttgggtga

SEQ ID NO: 80367 - DNA, 30 bp, Homo sapiens; identical to SEQ ID NO: 47500
  chr10:101294628-101294658
  hypo

SEQ ID NO: 80368 - DNA, 30 bp, Homo sapiens; identical to SEQ ID NO: 47501
  chr10:101294911-101294941
  hypo

SEQ ID NO: 80369 - DNA, 158 bp, Homo sapiens; identical to SEQ ID NO: 47502
  chr10:101296558-101296716
  hypo

SEQ ID NO: 80370 - DNA, 629 bp, Homo sapiens; identical to SEQ ID NO: 47503
  chr10:101296737-101297366
  hypo

SEQ ID NO: 80371 - DNA, 30 bp, Homo sapiens; identical to SEQ ID NO: 47505
  chr10:101345350-101345380
  hypo

SEQ ID NO: 80372 - DNA, 30 bp, Homo sapiens; identical to SEQ ID NO: 47506
  chr10:101351688-101351718
  hypo

SEQ ID NO: 80373 - DNA, 241 bp, Homo sapiens
  chr10:101493072-101493313
  hypo
taaaaataaaattaaaacaaaattttaaaatattgattagaaaataaccatagtaaacccattacatattgacataatatttttttgaaaaagaaatattcctaaacaacaacaacaaaaaaagcaaaagagtggaaatatatttttgcaagtttcttcagtatatcttaatggaagacagctggattctcatgcccgctgcttcattcagtctaacatgtcaagtagcctcttgaaaacg

SEQ ID NO: 80374 - DNA, 25 bp, Homo sapiens
  chr10:101726505-101726530
  hypo
aacagagcgtggtggcgttttctct

SEQ ID NO: 80375 - DNA, 31 bp, Homo sapiens
  chr10:101873876-101873907
  hypo
ctgtcctaagagactgcgtttactaggaaat

SEQ ID NO: 80376 - DNA, 40 bp, Homo sapiens
  chr10:102180546-102180586
  hypo
gcacatagtggtgtttaaaaacgatgtgttaaggctgggc

SEQ ID NO: 80377 - DNA, 30 bp, Homo sapiens; identical to SEQ ID NO: 47516
  chr10:102196220-102196250
  hypo

SEQ ID NO: 80378 - DNA, 30 bp, Homo sapiens
  chr10:102286164-102286194
  hypo
gtagacagggtacacgtcccccacccagca

SEQ ID NO: 80379 - DNA, 204 bp, Homo sapiens
  chr10:102409485-102409689
  hypo
cgaagaatttcagcgcgggcagtgccagtaaatgctgtgcatgtttaaaagtcatttccataagtaagtgcaatttctctactgtttgcccctgtttaatgaagtgaaatcttgtttgcattcctcccaatttcccaacgaaaggcgcccaaccgttcgcacaaaaattacgccgcccaaattaaaactcgggctctaagggag

SEQ ID NO: 80380 - DNA, 385 bp, Homo sapiens; identical to SEQ ID NO: 47523
  chr10:102430676-102431061
  hypo

SEQ ID NO: 80381 - DNA, 219 bp, Homo sapiens; identical to SEQ ID NO: 47531
  chr10:102484026-102484245
  hypo

SEQ ID NO: 80382 - DNA, 292 bp, Homo sapiens; identical to SEQ ID NO: 7555
  chr10:102484269-102484561
  hypo

SEQ ID NO: 80383 - DNA, 57 bp, Homo sapiens; identical to SEQ ID NO: 47548
  chr10:102508232-102508289
  hypo

SEQ ID NO: 80384 - DNA, 477 bp, Homo sapiens; identical to SEQ ID NO: 47549
  chr10:102508341-102508818
  hypo

SEQ ID NO: 80385 - DNA, 357 bp, Homo sapiens; identical to SEQ ID NO: 7565
  chr10:102586048-102586405
  hypo

SEQ ID NO: 80386 - DNA, 27 bp, Homo sapiens
  chr10:102668241-102668268
  hypo
ttaaacaactcttggccgggtgcagca

SEQ ID NO: 80387 - DNA, 30 bp, Homo sapiens
  chr10:102671206-102671236
  hypo
tcactgtttaccttcgaccctctactttgc

SEQ ID NO: 80388 - DNA, 204 bp, Homo sapiens
  chr10:102748644-102748848
  hypo
ccagggggatggagtgagctacgaggaaaccactattccccgacccagcgcctaccacaatctgtttggattaccactgattagtcgtcgagatgctgaggtggtactgacgagtcgtgagcttgacagcctggccttgaaccagtccacggggctgcctacccttactctaccccgaggaacgacctgcttaccccctgcctt

SEQ ID NO: 80389 - DNA, 30 bp, Homo sapiens
  chr10:102753813-102753843
  hypo
acctggaggggaatcggggacttcatgcga

SEQ ID NO: 80390 - DNA, 31 bp, Homo sapiens
  chr10:102762723-102762754
  hypo
gtgggcctgggtagaacgggagtcctcgctt

SEQ ID NO: 80391 - DNA, 318 bp, Homo sapiens
  chr10:102766307-102766625
  hypo
gtgcagaagggcagcgagctggtggctctgcgggtggcgctgcgggaggcccgtgctacgctgcgggtcagtgagggccgtgcgcggggtctacaggaggccgcccgagctcgggagctggagctggaagcctgttcccaggagctgcagcgacaccgccaggaagctgagcagctgcgggagaaagctgggcagttggatgctgaggcggccggactccgggagccccctgtgccacctgccaccgctgacccattcctcctggcagagagtgatgaggccaaagtgcagcgggcagcagccggggttgggggcagc

SEQ ID NO: 80392 - DNA, 263 bp, Homo sapiens
  chr10:102770158-102770421
  hypo
ctccccatccagaggtcgtggcagagggggtctggccttccgaggcttgtggtagcgcccattggtcatgctgggggcaggggtaggcaccggggatggggagcgtctacctggagacttgccttgaccccggctgctgcggctgcggctgcggctacggctgcggctacggctctgagcccggccccggatctggctctgcggagggtgctctcggctcaggggttctgtcagcagccagttaggccgcaggggccggggag

SEQ ID NO: 80393 - DNA, 206 bp, Homo sapiens; identical to SEQ ID NO: 47564
  chr10:102802795-102803001
  hypo

SEQ ID NO: 80394 - DNA, 361 bp, Homo sapiens; identical to SEQ ID NO: 7576
  chr10:102822533-102822894
  hypo

SEQ ID NO: 80395 - DNA, 62 bp, Homo sapiens; identical to SEQ ID NO: 24451
  chr10:102872321-102872383
  hypo

SEQ ID NO: 80396 - DNA, 58 bp, Homo sapiens; identical to SEQ ID NO: 7583
  chr10:102973586-102973644
  hypo

SEQ ID NO: 80397 - DNA, 1159 bp, Homo sapiens; identical to SEQ ID NO: 47580
  chr10:102976889-102978048
  hypo

SEQ ID NO: 80398 - DNA, 493 bp, Homo sapiens; identical to SEQ ID NO: 47589
  chr10:102988125-102988618
  hypo

SEQ ID NO: 80399 - DNA, 30 bp, Homo sapiens; identical to SEQ ID NO: 47590
  chr10:102988874-102988904
  hypo

SEQ ID NO: 80400 - DNA, 655 bp, Homo sapiens; identical to SEQ ID NO: 47592
  chr10:102989583-102990238
  hypo

SEQ ID NO: 80401 - DNA, 31 bp, Homo sapiens; identical to SEQ ID NO: 24455
  chr10:103002233-103002264
  hypo

SEQ ID NO: 80402 - DNA, 30 bp, Homo sapiens; identical to SEQ ID NO: 47601
  chr10:103051306-103051336
  hypo

SEQ ID NO: 80403 - DNA, 43 bp, Homo sapiens
  chr10:103198985-103199028
  hypo
caaattggatgtgtgcctgagcgcttcatcctgggctgtaatt

SEQ ID NO: 80404 - DNA, 35 bp, Homo sapiens
  chr10:103259006-103259041
  hypo
ttttttttgagacaggagtctcgttctgtcgggct

SEQ ID NO: 80405 - DNA, 30 bp, Homo sapiens
  chr10:103334187-103334217
  hypo
gcgctattgatggccgctcaaggctgacgc

SEQ ID NO: 80406 - DNA, 203 bp, Homo sapiens; identical to SEQ ID NO: 7591
  chr10:103348787-103348990
  hypo

SEQ ID NO: 80407 - DNA, 30 bp, Homo sapiens
  chr10:103374628-103374658
  hypo
aacagaaatggcaccgtgggcccttctcgg

SEQ ID NO: 80408 - DNA, 30 bp, Homo sapiens; identical to SEQ ID NO: 24457
  chr10:103411731-103411761
  hypo

SEQ ID NO: 80409 - DNA, 272 bp, Homo sapiens
  chr10:103425892-103426164
  hypo
tccattttccactctccgctcccacacacttagcctctccactccctgctggtctttccttccctctttcctacgattgctagaatgatttgttttgaacagcgacaggtttataggttagccgacacctctgctctgtggaattttaattaacttctctcatcgtcaatatgctaaggaatggggtctccattctccggggtcagcaatgtgtttcaggtcctgctatatcagccgtcaaattgaagaattaatgacgtggctaatcggct

SEQ ID NO: 80410 - DNA, 30 bp, Homo sapiens; identical to SEQ ID NO: 47608
  chr10:103535412-103535442
  hypo

SEQ ID NO: 80411 - DNA, 415 bp, Homo sapiens; identical to SEQ ID NO: 47609
  chr10:103535841-103536256
  hypo

SEQ ID NO: 80412 - DNA, 113 bp, Homo sapiens; identical to SEQ ID NO: 47610
  chr10:103536299-103536412
  hypo

SEQ ID NO: 80413 - DNA, 17 bp, Homo sapiens
  chr10:103548959-103548976
  hypo
tatgaagaaaatgaggc

SEQ ID NO: 80414 - DNA, 27 bp, Homo sapiens
  chr10:103549444-103549471
  hypo
tactggccaggcacagtggctcgtgct

SEQ ID NO: 80415 - DNA, 74 bp, Homo sapiens; identical to SEQ ID NO: 24461
  chr10:103553396-103553470
  hypo

SEQ ID NO: 80416 - DNA, 130 bp, Homo sapiens
  chr10:103588892-103589022
  hypo
agctgctccagaccctcaggccggtgacacacggtggacaattcaaattcatcgtccacgctgtctgcgggagcggtgaggacagccgcgcctcaggcccagcctccgcgacccctcttcaaatcactgc

SEQ ID NO: 80417 - DNA, 31 bp, Homo sapiens; identical to SEQ ID NO: 24462
  chr10:103606761-103606792
  hypo

SEQ ID NO: 80418 - DNA, 92 bp, Homo sapiens
  chr10:103720632-103720724
  hypo
caaaactccgtctcaaaaaaaaaaaaaaaaaaagaagattaaacaaataaaggtgcgagatcaagctgaacgtgaaagtggggttacagctt

SEQ ID NO: 80419 - DNA, 31 bp, Homo sapiens
  chr10:103752253-103752284
  hypo
attttttttttttttttgagacggagtctcg

SEQ ID NO: 80420 - DNA, 30 bp, Homo sapiens; identical to SEQ ID NO: 24463
  chr10:103869733-103869763
  hypo

SEQ ID NO: 80421 - DNA, 43 bp, Homo sapiens; identical to SEQ ID NO: 24464
  chr10:103897006-103897049
  hypo

SEQ ID NO: 80422 - DNA, 23 bp, Homo sapiens
  chr10:103930134-103930157
  hypo
accgcgcccggccgagaagggag

SEQ ID NO: 80423 - DNA, 30 bp, Homo sapiens
  chr10:104139055-104139085
  hypo
cacaccctgcacacgcgggcagcctctatc

SEQ ID NO: 80424 - DNA, 145 bp, Homo sapiens
  chr10:104140853-104140998
  hypo
ggtgccatctcaattctctaccgtctccagaccccatgcccatggagcctcaaggccaaaagcctctcgcctcagcccacctgacttccgctgctggcgacactaggacacctggccatccaccgcccccagagattccatctga

SEQ ID NO: 80425 - DNA, 61 bp, Homo sapiens; identical to SEQ ID NO: 7600
  chr10:104170201-104170262
  hypo

SEQ ID NO: 80426 - DNA, 393 bp, Homo sapiens; identical to SEQ ID NO: 47628
  chr10:104170407-104170800
  hypo

SEQ ID NO: 80427 - DNA, 43 bp, Homo sapiens
  chr10:104198521-104198564
  hypo
cccaagacttctaggccgggcacagtggctcacgcctgtaatc

SEQ ID NO: 80428 - DNA, 35 bp, Homo sapiens; identical to SEQ ID NO: 24468
  chr10:104230569-104230604
  hypo

SEQ ID NO: 80429 - DNA, 240 bp, Homo sapiens; identical to SEQ ID NO: 24469
  chr10:104239033-104239273
  hypo

SEQ ID NO: 80430 - DNA, 30 bp, Homo sapiens
  chr10:104265489-104265519
  hypo
aggtggaactggtgtcgcagtcctctctca

SEQ ID NO: 80431 - DNA, 527 bp, Homo sapiens; identical to SEQ ID NO: 24470
  chr10:104416698-104417225
  hypo

SEQ ID NO: 80432 - DNA, 30 bp, Homo sapiens; identical to SEQ ID NO: 24471
  chr10:104455554-104455584
  hypo

SEQ ID NO: 80433 - DNA, 19 bp, Homo sapiens
  chr10:104581680-104581699
  hypo
ggagttttgctcttgtcgc

SEQ ID NO: 80434 - DNA, 19 bp, Homo sapiens
  chr10:104581938-104581957
  hypo
gcatgagccaccacacctg

SEQ ID NO: 80435 - DNA, 30 bp, Homo sapiens; identical to SEQ ID NO: 47640
  chr10:104595232-104595262
  hypo

SEQ ID NO: 80436 - DNA, 30 bp, Homo sapiens; identical to SEQ ID NO: 24473
  chr10:104596875-104596905
  hypo

SEQ ID NO: 80437 - DNA, 42 bp, Homo sapiens
  chr10:104793214-104793256
  hypo
gggattacaaataggcgtgagccaccacgcctggacaatcta

SEQ ID NO: 80438 - DNA, 95 bp, Homo sapiens
  chr10:104812048-104812143
  hypo
aaaaaaaaaaaaacccaaaccgagtgtgtctgtatttctgtttgcccaggggtagtacttaccattaggaaggcgatttaccatttaggagatcc

SEQ ID NO: 80439 - DNA, 30 bp, Homo sapiens
  chr10:104832107-104832137
  hypo
gttcttcccacatccgtgtgagtggagcgc

SEQ ID NO: 80440 - DNA, 30 bp, Homo sapiens
  chr10:104832342-104832372
  hypo
tatcccgctgctgccgactgccctgcagga

SEQ ID NO: 80441 - DNA, 30 bp, Homo sapiens; identical to SEQ ID NO: 24474
  chr10:104837126-104837156
  hypo

SEQ ID NO: 80442 - DNA, 30 bp, Homo sapiens; identical to SEQ ID NO: 24475
  chr10:104837439-104837469
  hypo

SEQ ID NO: 80443 - DNA, 337 bp, Homo sapiens
  chr10:104837796-104838133
  hypo
aagctcacagagtgtcgtcgcccacctccctggtccttgctcttgttaacccaagatgctgctacacagatgccaaatggaaatcttccacagggctttttcagtaaacacgtgatgtggagtgcaagctcctccccttcccactagaacatactttaacagaaaacgagtcggaccttctagctgcactctgtactgtgtgccgagaaggcatttctagacccgtgtttttaaaggagggaactttggggattgccagcccctgctcctcctcccagggagccaactgtccctcctcccctgtccctgggcccatggggcccggcagtggctgtgt

SEQ ID NO: 80444 - DNA, 32 bp, Homo sapiens
  chr10:104874861-104874893
  hypo
tgaaaatagcctttggctgggcgcggtggctc

SEQ ID NO: 80445 - DNA, 31 bp, Homo sapiens
  chr10:104947825-104947856
  hypo
aaaatagggcggacgcggtggctcacgcctg

SEQ ID NO: 80446 - DNA, 31 bp, Homo sapiens; identical to SEQ ID NO: 7607
  chr10:104951847-104951878
  hypo

SEQ ID NO: 80447 - DNA, 208 bp, Homo sapiens; identical to SEQ ID NO: 47643
  chr10:105036450-105036658
  hypo

SEQ ID NO: 80448 - DNA, 182 bp, Homo sapiens; identical to SEQ ID NO: 7609
  chr10:105036700-105036882
  hypo

SEQ ID NO: 80449 - DNA, 998 bp, Homo sapiens; identical to SEQ ID NO: 7610
  chr10:105036893-105037891
  hypo

SEQ ID NO: 80450 - DNA, 24 bp, Homo sapiens
  chr10:105119650-105119674
  hypo
taaaattgaacacagccgggcgtg

SEQ ID NO: 80451 - DNA, 147 bp, Homo sapiens
  chr10:105127014-105127161
  hypo
tctcaaaagttaaataaataaataaatgtaatgtaatgcatgcagctcgattaacttttacaaaagtaaaaatgacaaaaaaaaaaaaaaagtaagcactattcaggtcaaaatgtaaaactaccagtatctcggaagcctccctct

SEQ ID NO: 80452 - DNA, 30 bp, Homo sapiens; identical to SEQ ID NO: 24482
  chr10:105215408-105215438
  hypo

SEQ ID NO: 80453 - DNA, 30 bp, Homo sapiens; identical to SEQ ID NO: 24483
  chr10:105216247-105216277
  hypo

SEQ ID NO: 80454 - DNA, 30 bp, Homo sapiens
  chr10:105218271-105218301
  hypo
ggccagcatggacacgttgttgttcatgac

SEQ ID NO: 80455 - DNA, 34 bp, Homo sapiens
  chr10:105238591-105238625
  hypo
gcagagaaacagggcgagcgggggcgtcagcagc

SEQ ID NO: 80456 - DNA, 156 bp, Homo sapiens
  chr10:105345188-105345344
  hypo
ggcgagggaaagcgcggattattgagtttgatgcccagaatcagatcaacccatagtctcacagatacataaacagtccagaagcacacaacccactgaccactcaaaaatgagaggaaaaggccaggtgcggtggctcacgcctgtaatctcagc

SEQ ID NO: 80457 - DNA, 22 bp, Homo sapiens
  chr10:105345583-105345605
  hypo
cgtctcaaaaaaaaaaaaaaaa

SEQ ID NO: 80458 - DNA, 30 bp, Homo sapiens
  chr10:105350122-105350152
  hypo
ctcctagcccgttgcggtggcccatcccgc

SEQ ID NO: 80459 - DNA, 30 bp, Homo sapiens
  chr10:105362042-105362072
  hypo
tgaccgccacctgccgcactccgttcctca

SEQ ID NO: 80460 - DNA, 86 bp, Homo sapiens
  chr10:105403517-105403603
  hypo
tgcacgacccactctcggggaaccactgatcttcttcaggtgaagcttggggtaaagaatctgcagaccaggccaggcgcggtggc

SEQ ID NO: 80461 - DNA, 158 bp, Homo sapiens
  chr10:105413626-105413784
  hypo
ttctcagggagttctccggctcaccagcttcccgaggccccaccctcccacctcctgctgcccagctcccgcttttcttctgcttggggcacatagatgcatgcctgctttgcagtcgcagccccaccacgccctgtactcctcgctctgcctgtcta

SEQ ID NO: 80462 - DNA, 43 bp, Homo sapiens
  chr10:105440560-105440603
  hypo
atatttttttctttcacacttcgaaacagaccaattctaaaaa

SEQ ID NO: 80463 - DNA, 30 bp, Homo sapiens; identical to SEQ ID NO: 47654
  chr10:105694285-105694315
  hypo

SEQ ID NO: 80464 - DNA, 77 bp, Homo sapiens; identical to SEQ ID NO: 24485
  chr10:105725849-105725926
  hypo

SEQ ID NO: 80465 - DNA, 77 bp, Homo sapiens
  chr10:106029645-106029722
  hypo
ctaataaatattgaagagattcgaatctagcctgaactcttacagtaagaccgttcgtgagatgaatttatatgtgc

SEQ ID NO: 80466 - DNA, 76 bp, Homo sapiens
  chr10:106030046-106030122
  hypo
aggcgtgagccaccgcgcccggcctgtatctgcctttttgaccacaccattattcgtgggatttaacaggagttaa

SEQ ID NO: 80467 - DNA, 36 bp, Homo sapiens
  chr10:106032650-106032686
  hypo
tgagccaccgcacccggcccagttattggactattt

SEQ ID NO: 80468 - DNA, 30 bp, Homo sapiens
  chr10:106075053-106075083
  hypo
tgtgtccccatcggcgcggaccaccttgat

SEQ ID NO: 80469 - DNA, 56 bp, Homo sapiens
  chr10:106075695-106075751
  hypo
gatgatctcctcctcgttctcggggactgtggcgttctcccgcgggaacagcagcg

SEQ ID NO: 80470 - DNA, 30 bp, Homo sapiens; identical to SEQ ID NO: 24487
  chr10:106094151-106094181
  hypo

SEQ ID NO: 80471 - DNA, 736 bp, Homo sapiens; identical to SEQ ID NO: 47660
  chr10:106097222-106097958
  hypo

SEQ ID NO: 80472 - DNA, 551 bp, Homo sapiens; identical to SEQ ID NO: 47661
  chr10:106098025-106098576
  hypo

SEQ ID NO: 80473 - DNA, 336 bp, Homo sapiens; identical to SEQ ID NO: 47663
  chr10:106113480-106113816
  hypo

SEQ ID NO: 80474 - DNA, 33 bp, Homo sapiens
  chr10:106174642-106174675
  hypo
tataaactcttcgaaaacagaaaaggtcttctc

SEQ ID NO: 80475 - DNA, 37 bp, Homo sapiens
  chr10:106199913-106199950
  hypo
ccctttaaacatttaccgtctacgcatgctaacgtct

SEQ ID NO: 80476 - DNA, 1426 bp, Homo sapiens; identical to SEQ ID NO: 47666
  chr10:106399491-106400917
  hypo

SEQ ID NO: 80477 - DNA, 110 bp, Homo sapiens; identical to SEQ ID NO: 7618
  chr10:106401322-106401432
  hypo

SEQ ID NO: 80478 - DNA, 680 bp, Homo sapiens; identical to SEQ ID NO: 7619
  chr10:106401510-106402190
  hypo

SEQ ID NO: 80479 - DNA, 42 bp, Homo sapiens; identical to SEQ ID NO: 24491
  chr10:111674529-111674571
  hypo

SEQ ID NO: 80480 - DNA, 188 bp, Homo sapiens
  chr10:111684021-111684209
  hypo
agagggttgtaccaccccacccgtgtggttacagcagccccccaaatatcccctcaccatcccgcacctgcacagtccagcctgaacaaagccgccagaccagtcctttgaagcgtgacaccaggtcacttctttgctcagcactttccattaatttctcgtttcacgcagcataaaagctccatttg

SEQ ID NO: 80481 - DNA, 33 bp, Homo sapiens
  chr10:111696449-111696482
  hypo
ggcatgagccactgcgcccggccagcaagttgg

SEQ ID NO: 80482 - DNA, 767 bp, Homo sapiens; identical to SEQ ID NO: 47685
  chr10:111767115-111767882
  hypo

SEQ ID NO: 80483 - DNA, 40 bp, Homo sapiens; identical to SEQ ID NO: 24494
  chr10:111946084-111946124
  hypo

SEQ ID NO: 80484 - DNA, 202 bp, Homo sapiens
  chr10:111987862-111988064
  hypo
tactgcaaagacctcggatttgtgggtcaatggatttgggtactatattcttcttaccgtatctttttttcttgctttcttcagagtgtgaacatggctacgcctcttcattcccgtccatgccgagcccccgactgcagcattcaaagcccccacggaggttgagccgggcacagaaacacagcagcgggagcagcaacac

SEQ ID NO: 80485 - DNA, 43 bp, Homo sapiens
  chr10:112030547-112030590
  hypo
actattaaaaaaggtgttggccggttgcggtggctcatgccta

SEQ ID NO: 80486 - DNA, 267 bp, Homo sapiens
  chr10:112170715-112170982
  hypo
gccatgccccagaccccaccacgaactctgaattctcgtggcaatcctctatgtggcgaccatcagccacactggaatggagggacaaggctgtcgggaggaggcatttctcacgcctgtgccgtgaacgtgctacctctgcatgctcaagcccatgctgcgccactcacaaggggctgtagcattctgggccagcgcccttctctctctgcctcctcgcctacagcaagctttcttcaggcctgcggctggtgggccccaagccaa

SEQ ID NO: 80487 - DNA, 168 bp, Homo sapiens; identical to SEQ ID NO: 47695
  chr10:112327447-112327615
  hypo

SEQ ID NO: 80488 - DNA, 77 bp, Homo sapiens; identical to SEQ ID NO: 7640
  chr10:112328694-112328771
  hypo

SEQ ID NO: 80489 - DNA, 40 bp, Homo sapiens; identical to SEQ ID NO: 7641
  chr10:112333463-112333503
  hypo

SEQ ID NO: 80490 - DNA, 69 bp, Homo sapiens; identical to SEQ ID NO: 7642
  chr10:112335092-112335161
  hypo

SEQ ID NO: 80491 - DNA, 73 bp, Homo sapiens; identical to SEQ ID NO: 7643
  chr10:112337177-112337250
  hypo

SEQ ID NO: 80492 - DNA, 81 bp, Homo sapiens; identical to SEQ ID NO: 7644
  chr10:112337591-112337672
  hypo

SEQ ID NO: 80493 - DNA, 80 bp, Homo sapiens; identical to SEQ ID NO: 7645
  chr10:112338384-112338464
  hypo

SEQ ID NO: 80494 - DNA, 119 bp, Homo sapiens; identical to SEQ ID NO: 7646
  chr10:112340660-112340779
  hypo

SEQ ID NO: 80495 - DNA, 177 bp, Homo sapiens; identical to SEQ ID NO: 7647
  chr10:112341679-112341856
  hypo

SEQ ID NO: 80496 - DNA, 82 bp, Homo sapiens; identical to SEQ ID NO: 7648
  chr10:112342318-112342400
  hypo

SEQ ID NO: 80497 - DNA, 166 bp, Homo sapiens; identical to SEQ ID NO: 7649
  chr10:112343140-112343306
  hypo

SEQ ID NO: 80498 - DNA, 123 bp, Homo sapiens; identical to SEQ ID NO: 7650
  chr10:112343597-112343720
  hypo

SEQ ID NO: 80499 - DNA, 215 bp, Homo sapiens; identical to SEQ ID NO: 7651
  chr10:112343939-112344154
  hypo

SEQ ID NO: 80500 - DNA, 388 bp, Homo sapiens; identical to SEQ ID NO: 7652
  chr10:112349361-112349749
  hypo

SEQ ID NO: 80501 - DNA, 162 bp, Homo sapiens; identical to SEQ ID NO: 7653
  chr10:112350168-112350330
  hypo

SEQ ID NO: 80502 - DNA, 143 bp, Homo sapiens; identical to SEQ ID NO: 7654
  chr10:112350747-112350890
  hypo

SEQ ID NO: 80503 - DNA, 152 bp, Homo sapiens; identical to SEQ ID NO: 7655
  chr10:112352829-112352981
  hypo

SEQ ID NO: 80504 - DNA, 154 bp, Homo sapiens; identical to SEQ ID NO: 7656
  chr10:112356154-112356308
  hypo

SEQ ID NO: 80505 - DNA, 153 bp, Homo sapiens; identical to SEQ ID NO: 7657
  chr10:112357895-112358048
  hypo

SEQ ID NO: 80506 - DNA, 17 bp, Homo sapiens
  chr10:112359152-112359169
  hypo
actttttgttcttataa

SEQ ID NO: 80507 - DNA, 160 bp, Homo sapiens; identical to SEQ ID NO: 7658
  chr10:112359410-112359570
  hypo

SEQ ID NO: 80508 - DNA, 109 bp, Homo sapiens; identical to SEQ ID NO: 7659
  chr10:112360195-112360304
  hypo

SEQ ID NO: 80509 - DNA, 110 bp, Homo sapiens; identical to SEQ ID NO: 7660
  chr10:112360778-112360888
  hypo

SEQ ID NO: 80510 - DNA, 543 bp, Homo sapiens; identical to SEQ ID NO: 7661
  chr10:112361393-112361936
  hypo

SEQ ID NO: 80511 - DNA, 818 bp, Homo sapiens; identical to SEQ ID NO: 7662
  chr10:112362230-112363048
  hypo

SEQ ID NO: 80512 - DNA, 405 bp, Homo sapiens; identical to SEQ ID NO: 7663
  chr10:112363987-112364392
  hypo

SEQ ID NO: 80513 - DNA, 887 bp, Homo sapiens; identical to SEQ ID NO: 47720
  chr10:112403083-112403970
  hypo

SEQ ID NO: 80514 - DNA, 30 bp, Homo sapiens; identical to SEQ ID NO: 47721
  chr10:112404172-112404202
  hypo

SEQ ID NO: 80515 - DNA, 632 bp, Homo sapiens; identical to SEQ ID NO: 7665
  chr10:112431814-112432446
  hypo

SEQ ID NO: 80516 - DNA, 31 bp, Homo sapiens
  chr10:112459871-112459902
  hypo
ctgaaagtttggaaagcgaaactgtgggtaa

SEQ ID NO: 80517 - DNA, 347 bp, Homo sapiens
  chr10:112524227-112524574
  hypo
gagaacatgtggcataaacatcgactgatattgtttgccatttacactcagcatgtgtaatgcagcaggaatggctcccggtggcatgtgactgcccttccaggcgggtatgccgtgctcaggcactgctctttctctttcgctccctccctccctcgcttgcataccccctccgctgcccctttccagactcgagagagtttgagtgaaggcttgtcatgattggcatgcagaaagctggtagaatgtcattggaattttctagggaggcacatgcgcaacacccaaaatgactccaggcttcgatagccgcaggtcagcccgtcgtgccaggcaccctggtatgt

SEQ ID NO: 80518 - DNA, 167 bp, Homo sapiens
  chr10:112553599-112553766
  hypo
ttgataaagaaattcaaagtacgatctcaactcgcatttttcaatgtaaagaataatgtttagccccctgcttcctgtggtattattacctttgaagacctttaagggcttataagagagcccgggttgggaattactgcgtagcatggtgacgcttgctcaagagc

SEQ ID NO: 80519 - DNA, 44 bp, Homo sapiens
  chr10:112595365-112595409
  hypo
tacaggtgtgagacaccacgctcggcctgtactttctacatttt

SEQ ID NO: 80520 - DNA, 30 bp, Homo sapiens; identical to SEQ ID NO: 24525
  chr10:112696771-112696801
  hypo

SEQ ID NO: 80521 - DNA, 29 bp, Homo sapiens
  chr10:112838325-112838354
  hypo
gcggcggcggcggcccgcagccggccgag

SEQ ID NO: 80522 - DNA, 30 bp, Homo sapiens; identical to SEQ ID NO: 7669
  chr10:113005648-113005678
  hypo

SEQ ID NO: 80523 - DNA, 30 bp, Homo sapiens; identical to SEQ ID NO: 7670
  chr10:113134325-113134355
  hypo

SEQ ID NO: 80524 - DNA, 30 bp, Homo sapiens
  chr10:114037461-114037491
  hypo
aatgcttaacataggcgttgcaattctcca

SEQ ID NO: 80525 - DNA, 211 bp, Homo sapiens; identical to SEQ ID NO: 24528
  chr10:114200385-114200596
  hypo

SEQ ID NO: 80526 - DNA, 107 bp, Homo sapiens
  chr10:114252633-114252740
  hypo
atacagttgttcaaacataaccgtaatcgagttttatgacacttcttagaggctccctcacgatcatgtgcagtccgtcctcattcgtactcccattccatgtgacc

SEQ ID NO: 80527 - DNA, 30 bp, Homo sapiens; identical to SEQ ID NO: 47732
  chr10:114280686-114280716
  hypo

SEQ ID NO: 80528 - DNA, 30 bp, Homo sapiens; identical to SEQ ID NO: 47733
  chr10:114319364-114319394
  hypo

SEQ ID NO: 80529 - DNA, 74 bp, Homo sapiens
  chr10:114343130-114343204
  hypo
gtttgtgtgtatatccgctttatcaggaatgcggttgcattcaggtctgttgtcctaagcgcctttgtttgtgg

SEQ ID NO: 80530 - DNA, 22 bp, Homo sapiens
  chr10:114350979-114351001
  hypo
gttagaagagatactgttgacc

SEQ ID NO: 80531 - DNA, 22 bp, Homo sapiens
  chr10:114351300-114351322
  hypo
cgaagaagagatactttactta

SEQ ID NO: 80532 - DNA, 97 bp, Homo sapiens
  chr10:114410444-114410541
  hypo
ctaccatgtcactagggataggaattttcagcgctattataatcttttggggccactgtcctatacgtagtccctcgttgaccaaaacattgttatg

SEQ ID NO: 80533 - DNA, 41 bp, Homo sapiens; identical to SEQ ID NO: 47734
  chr10:114571158-114571199
  hypo

SEQ ID NO: 80534 - DNA, 220 bp, Homo sapiens; identical to SEQ ID NO: 24529
  chr10:114571438-114571658
  hypo

SEQ ID NO: 80535 - DNA, 237 bp, Homo sapiens
  chr10:114591122-114591359
  hypo
gaggcgctgggccatcggccacacctgagctaatattcctggcgcatcaggtgcttctcaagtgtttgtggacagacggctgccttggatgaaatggtattcaccaggcgtgtccttttactgtccagtttggtcaccaagattctcccctattttaagagggagctgagcagcttcacaaggctagtcttgtttggatgcgtagcacaatgaatttgtacccgccgagcctccagc

SEQ ID NO: 80536 - DNA, 229 bp, Homo sapiens
  chr10:114591691-114591920
  hypo
cagaggctgaggtttcggccgctgtacactcagcagccccgcgctcttgccggccgacaccacagtgtgggaatcgagaatatcggcttcggcttggaatttaaggaggaggagagaaaaaggatagctcggctggtcttcaatgattttcttgtaaaacttttacaagggagacttaggctgtttgatgtgttctagacaatcaaatgcccgccgagtctgcggcaga

SEQ ID NO: 80537 - DNA, 34 bp, Homo sapiens; identical to SEQ ID NO: 7673
  chr10:114709863-114709897
  hypo

SEQ ID NO: 80538 - DNA, 31 bp, Homo sapiens; identical to SEQ ID NO: 47737
  chr10:114710140-114710171
  hypo

SEQ ID NO: 80539 - DNA, 31 bp, Homo sapiens; identical to SEQ ID NO: 47739
  chr10:114710919-114710950
  hypo

SEQ ID NO: 80540 - DNA, 47 bp, Homo sapiens; identical to SEQ ID NO: 47740
  chr10:114711333-114711380
  hypo

SEQ ID NO: 80541 - DNA, 318 bp, Homo sapiens; identical to SEQ ID NO: 47742
  chr10:114712159-114712477
  hypo

SEQ ID NO: 80542 - DNA, 30 bp, Homo sapiens; identical to SEQ ID NO: 47743
  chr10:114726827-114726857
  hypo

SEQ ID NO: 80543 - DNA, 98 bp, Homo sapiens
  chr10:114752171-114752269
  hypo
ctggaggtgagaatctgtgggcgttgggattcctgggttcgagttccagctcactgccaattgcccgagtgctgggcgaacatttctggaatcaaaag

SEQ ID NO: 80544 - DNA, 30 bp, Homo sapiens; identical to SEQ ID NO: 47744
  chr10:114773911-114773941
  hypo

SEQ ID NO: 80545 - DNA, 31 bp, Homo sapiens; identical to SEQ ID NO: 24532
  chr10:114817202-114817233
  hypo

SEQ ID NO: 80546 - DNA, 94 bp, Homo sapiens
  chr10:114834270-114834364
  hypo
agggacatttaaaagagttgtcggactgtgcgggaccttggcacactgctgacggctgcacactcatcactgcggggctcatcacacattgaca

SEQ ID NO: 80547 - DNA, 103 bp, Homo sapiens
  chr10:114867547-114867650
  hypo
caaggtacatcacttgcaattagggaaataatgcttttgggtcctgtgaaataatggtgtttcttaaagcagcctatattggtcaagcgttgctggcaggggc

SEQ ID NO: 80548 - DNA, 30 bp, Homo sapiens
  chr10:114868117-114868147
  hypo
acctccttttgtgtccggtgctctcctaac

SEQ ID NO: 80549 - DNA, 242 bp, Homo sapiens
  chr10:114878743-114878985
  hypo
atcaggcgctgtcattcgttccttcctattttcgggctgctaattgatgtttttgatgtcagcaagaaaattgaagaaaatgtcatgtgtgaaccagtgcggaagttaataagattgacttcgttgacagaatttacaatgagagcagagaccgcataatgggaccgctgcgaattcgtgtgctctctttggagtcaaaattgacacctcacgctaggccagtggtcgataggagagatgga

SEQ ID NO: 80550 - DNA, 42 bp, Homo sapiens
  chr10:114913257-114913299
  hypo
cggtgaagcagcttgacgtataggggtcgaggtcgttaaatt

SEQ ID NO: 80551 - DNA, 238 bp, Homo sapiens
  chr10:114925527-114925765
  hypo
cccgccctcctgctcgctgaggccacccacaaggcctccgccctctgtcccaacggggccctggacctgcccccagccgctttgcagcctgccgccccctcctcatcaattgcacagccgtcgacttcttccttacattcccacagctccctggccgggacccagccccagccgctgtcgctcgtcaccaagtctttagaatagctttagcgtcgtgaaccccgctgctttgtttatg

SEQ ID NO: 80552 - DNA, 22 bp, Homo sapiens
  chr10:114987697-114987719
  hypo
tgggcacagtggctcacgccta

SEQ ID NO: 80553 - DNA, 30 bp, Homo sapiens
  chr10:115059328-115059358
  hypo
cggagaagccgggtacggcgcactcatcag

SEQ ID NO: 80554 - DNA, 205 bp, Homo sapiens
  chr10:115201244-115201449
  hypo
cttgtcttccctggcacggcataatcaacctcaccaactgtcccacagatttttaccatgttctcctgaaaattacttcaaaggtgctttgctcagaatgaccccaagcagacactgctattaatgacagctggggcgcacacacatgcatgcatgtgcacacacatgtgcgcgtgcacacatacacacacgccactgctaatga

SEQ ID NO: 80555 - DNA, 31 bp, Homo sapiens
  chr10:115350627-115350658
  hypo
gaaagcctctttgtaccggaactgcaagtca

SEQ ID NO: 80556 - DNA, 31 bp, Homo sapiens; identical to SEQ ID NO: 24534
  chr10:115370274-115370305
  hypo

SEQ ID NO: 80557 - DNA, 84 bp, Homo sapiens
  chr10:115548280-115548364
  hypo
gcgagaccctctctcaaaacaaaaacaaaacaaaaaacagccctgcgagaccaggactcttattgtccccgggtttcggatggg

SEQ ID NO: 80558 - DNA, 38 bp, Homo sapiens
  chr10:115612072-115612110
  hypo
caacagagagagactccgtctcaaaaaaataaataacc

SEQ ID NO: 80559 - DNA, 30 bp, Homo sapiens; identical to SEQ ID NO: 24535
  chr10:115671807-115671837
  hypo

SEQ ID NO: 80560 - DNA, 694 bp, Homo sapiens; identical to SEQ ID NO: 7675
  chr10:115804794-115805488
  hypo

SEQ ID NO: 80561 - DNA, 30 bp, Homo sapiens
  chr10:115844917-115844947
  hypo
ggcctctcagaacagcgtggcacctgcaga

SEQ ID NO: 80562 - DNA, 34 bp, Homo sapiens; identical to SEQ ID NO: 24537
  chr10:115925580-115925614
  hypo

SEQ ID NO: 80563 - DNA, 12 bp, Homo sapiens
  chr10:115940263-115940275
  hypo
gcccaggctgga

SEQ ID NO: 80564 - DNA, 27 bp, Homo sapiens
  chr10:116006272-116006299
  hypo
aaaaaaaaaaaacgagtatcatgggtt

SEQ ID NO: 80565 - DNA, 38 bp, Homo sapiens
  chr10:116007332-116007370
  hypo
cagacaagagccaccgcgaagggcttattttttaaaaa

SEQ ID NO: 80566 - DNA, 82 bp, Homo sapiens; identical to SEQ ID NO: 24538
  chr10:116011527-116011609
  hypo

SEQ ID NO: 80567 - DNA, 22 bp, Homo sapiens
  chr10:116011848-116011870
  hypo
gccaccccgctggcctgttttt

SEQ ID NO: 80568 - DNA, 22 bp, Homo sapiens
  chr10:116023377-116023399
  hypo
gagccaccgtgcctggccgaat

SEQ ID NO: 80569 - DNA, 106 bp, Homo sapiens
  chr10:116028356-116028462
  hypo
ttcctcgtttgttaaacgtagaaatagaccctgagctcagaacagactcttaggcagaagtgcttcctggagtaagcggagggatttctttttcttttttcttttt

SEQ ID NO: 80570 - DNA, 263 bp, Homo sapiens; identical to SEQ ID NO: 24540
  chr10:116045908-116046171
  hypo

SEQ ID NO: 80571 - DNA, 31 bp, Homo sapiens
  chr10:116105879-116105910
  hypo
cccagggttgaaggagcgcaggcctggggat

SEQ ID NO: 80572 - DNA, 31 bp, Homo sapiens
  chr10:116123045-116123076
  hypo
cagaattcacgacacacgctctgaggcagcg

SEQ ID NO: 80573 - DNA, 39 bp, Homo sapiens
  chr10:116188467-116188506
  hypo
aagccattttaagtgctcgtttagtatcatgcaggctct

SEQ ID NO: 80574 - DNA, 187 bp, Homo sapiens
  chr10:116203665-116203852
  hypo
cccacacttcctttcccgtggaatactctgtaggttccaccacaagtgaacagtcaaggcaggtgccttacaagcaggtggctggctctcgaatcagggaaggttgggggtttgctgcttacctgagttgatgggagaatcgtagcgactggctaacagagatgacctttcccggctctctttctcc

SEQ ID NO: 80575 - DNA, 31 bp, Homo sapiens
  chr10:116228469-116228500
  hypo
gactctgacaaagttccggggagattctggt

SEQ ID NO: 80576 - DNA, 39 bp, Homo sapiens; identical to SEQ ID NO: 24541
  chr10:116282621-116282660
  hypo

SEQ ID NO: 80577 - DNA, 197 bp, Homo sapiens
  chr10:116331008-116331205
  hypo
tctggactacataggtattcacgtcagtgggtcaccggggcacttactgctggagaaggtggtttctttcggactggacgacatcggctgtgcacagagttgacaaaggcagtctctcccattgaatgtgactcggtctccgggtggaaacgggcgcctggaggcagaaagacatcgccctcaaggttattgcagca

SEQ ID NO: 80578 - DNA, 27 bp, Homo sapiens
  chr10:116394180-116394207
  hypo
gcgcccggcctcaatttttcttttact

SEQ ID NO: 80579 - DNA, 20 bp, Homo sapiens
  chr10:116495235-116495255
  hypo
tgttgttgttttgagacgga

SEQ ID NO: 80580 - DNA, 934 bp, Homo sapiens; identical to SEQ ID NO: 47760
  chr10:116527399-116528333
  hypo

SEQ ID NO: 80581 - DNA, 30 bp, Homo sapiens; identical to SEQ ID NO: 47763
  chr10:116852171-116852201
  hypo

SEQ ID NO: 80582 - DNA, 247 bp, Homo sapiens; identical to SEQ ID NO: 47764
  chr10:116852455-116852702
  hypo

SEQ ID NO: 80583 - DNA, 31 bp, Homo sapiens; identical to SEQ ID NO: 7682
  chr10:117350835-117350866
  hypo

SEQ ID NO: 80584 - DNA, 18 bp, Homo sapiens
  chr10:117472085-117472103
  hypo
gaaatttgtggctgggcg

SEQ ID NO: 80585 - DNA, 90 bp, Homo sapiens
  chr10:118740857-118740947
  hypo
caacagaaaaagatttgactgacctagaatgaagctctctgcacaccagctcttcatcagccccaccacacgcaccgcaagaactaagta

SEQ ID NO: 80586 - DNA, 31 bp, Homo sapiens; identical to SEQ ID NO: 24545
  chr10:118741274-118741305
  hypo

SEQ ID NO: 80587 - DNA, 34 bp, Homo sapiens
  chr10:118742172-118742206
  hypo
aagagattaatctggccgggcgcagtggctcacg

SEQ ID NO: 80588 - DNA, 24 bp, Homo sapiens
  chr10:118763413-118763437
  hypo
ttttttttggagatggagtttcgt

SEQ ID NO: 80589 - DNA, 407 bp, Homo sapiens; identical to SEQ ID NO: 47775
  chr10:118764186-118764593
  hypo

SEQ ID NO: 80590 - DNA, 181 bp, Homo sapiens; identical to SEQ ID NO: 47776
  chr10:118764979-118765160
  hypo

SEQ ID NO: 80591 - DNA, 917 bp, Homo sapiens; identical to SEQ ID NO: 47786
  chr10:118896501-118897418
  hypo

SEQ ID NO: 80592 - DNA, 619 bp, Homo sapiens; identical to SEQ ID NO: 47787
  chr10:118897478-118898097
  hypo

SEQ ID NO: 80593 - DNA, 163 bp, Homo sapiens; identical to SEQ ID NO: 47797
  chr10:119000428-119000591
  hypo

SEQ ID NO: 80594 - DNA, 465 bp, Homo sapiens; identical to SEQ ID NO: 47798
  chr10:119000689-119001154
  hypo

SEQ ID NO: 80595 - DNA, 308 bp, Homo sapiens; identical to SEQ ID NO: 47799
  chr10:119001328-119001636
  hypo

SEQ ID NO: 80596 - DNA, 100 bp, Homo sapiens; identical to SEQ ID NO: 24551
  chr10:119180986-119181086
  hypo

SEQ ID NO: 80597 - DNA, 309 bp, Homo sapiens; identical to SEQ ID NO: 7706
  chr10:119256045-119256354
  hypo

SEQ ID NO: 80598 - DNA, 2020 bp, Homo sapiens; identical to SEQ ID NO: 47814
  chr10:119302458-119304478
  hypo

SEQ ID NO: 80599 - DNA, 338 bp, Homo sapiens; identical to SEQ ID NO: 47823
  chr10:119312752-119313090
  hypo

SEQ ID NO: 80600 - DNA, 103 bp, Homo sapiens
  chr10:119374700-119374803
  hypo
gagacggggtttcaccgtattagccaggatggtctcaatatttactatcattgtagaaaaagtttgtagccttgtgctttgagacatgcgctctggagttaga

SEQ ID NO: 80601 - DNA, 30 bp, Homo sapiens; identical to SEQ ID NO: 24555
  chr10:119498852-119498882
  hypo

SEQ ID NO: 80602 - DNA, 205 bp, Homo sapiens
  chr10:119543605-119543810
  hypo
aaaacttggcagggaagggcacggacagtggcggtggggctgggtggaggggctgccctgtgaacgcttgtgcccgagcagagctctaagccttgacctcagctgaggaccccggctgaccccctcgcagccctgtgacggccttgcgagcctttctttctgggacagcggttatggacttctcgtgcctgacctcaacccctct

SEQ ID NO: 80603 - DNA, 64 bp, Homo sapiens
  chr10:119876201-119876265
  hypo
gagagtgcgtgtgtgcgcacgcacacgtgtgtgtgtgtctgtgtgtgtgcgcgtgagcgtgcat

SEQ ID NO: 80604 - DNA, 31 bp, Homo sapiens; identical to SEQ ID NO: 24556
  chr10:119904561-119904592
  hypo

SEQ ID NO: 80605 - DNA, 48 bp, Homo sapiens; identical to SEQ ID NO: 24557
  chr10:120011732-120011780
  hypo

SEQ ID NO: 80606 - DNA, 190 bp, Homo sapiens
  chr10:120170437-120170627
  hypo
atacattccccacagcactgccgctttccagaaggtttcatgcttggtctttcccgagtccaagctggcatcggagaagaacaggaatggctctcagtgcttggcatagccccgtgcaaactccagtgagtgtgtgcttgaaggacaggtgccacatcagcactggatcggcttcctagggctgcagcag

SEQ ID NO: 80607 - DNA, 30 bp, Homo sapiens; identical to SEQ ID NO: 47828
  chr10:120278928-120278958
  hypo

SEQ ID NO: 80608 - DNA, 31 bp, Homo sapiens; identical to SEQ ID NO: 24558
  chr10:120476537-120476568
  hypo

SEQ ID NO: 80609 - DNA, 17 bp, Homo sapiens
  chr10:120500413-120500430
  hypo
ggcgacagtgtgagatt

SEQ ID NO: 80610 - DNA, 42 bp, Homo sapiens
  chr10:120518463-120518505
  hypo
tcaagaaagacataaccggccaggcagtgtctgatatctgta

SEQ ID NO: 80611 - DNA, 31 bp, Homo sapiens
  chr10:120526070-120526101
  hypo
agagagagagagagggcggggttgataatga

SEQ ID NO: 80612 - DNA, 35 bp, Homo sapiens
  chr10:120584842-120584877
  hypo
aaatgctgcgattacaggcccgaactcatgatctc

SEQ ID NO: 80613 - DNA, 109 bp, Homo sapiens
  chr10:120601820-120601929
  hypo
gcatagctgcagccaccgaaactgcagctgcagacctgggcctcgtgctccatggatcaggcaggagcccagcgcccccgggtgcagctgcagccgcccaaaccatggc

SEQ ID NO: 80614 - DNA, 30 bp, Homo sapiens; identical to SEQ ID NO: 7734
  chr10:120670186-120670216
  hypo

SEQ ID NO: 80615 - DNA, 94 bp, Homo sapiens; identical to SEQ ID NO: 24562
  chr10:120822533-120822627
  hypo

SEQ ID NO: 80616 - DNA, 65 bp, Homo sapiens; identical to SEQ ID NO: 24563
  chr10:120840485-120840550
  hypo

SEQ ID NO: 80617 - DNA, 29 bp, Homo sapiens
  chr10:120890670-120890699
  hypo
ctaaattgttccaaattaggccggccatg

SEQ ID NO: 80618 - DNA, 152 bp, Homo sapiens; identical to SEQ ID NO: 24564
  chr10:120926966-120927118
  hypo

SEQ ID NO: 80619 - DNA, 22 bp, Homo sapiens
  chr10:120937188-120937210
  hypo
ctccatgcgcttaaagcaacac

SEQ ID NO: 80620 - DNA, 36 bp, Homo sapiens
  chr10:120996575-120996611
  hypo
tttttttttttttttttgagacggagtctcactctg

SEQ ID NO: 80621 - DNA, 31 bp, Homo sapiens; identical to SEQ ID NO: 24566
  chr10:121088294-121088325
  hypo

SEQ ID NO: 80622 - DNA, 31 bp, Homo sapiens; identical to SEQ ID NO: 24567
  chr10:121128015-121128046
  hypo

SEQ ID NO: 80623 - DNA, 30 bp, Homo sapiens; identical to SEQ ID NO: 24568
  chr10:121172883-121172913
  hypo

SEQ ID NO: 80624 - DNA, 30 bp, Homo sapiens
  chr10:121249992-121250022
  hypo
ttaggcagaccacacgacctatccctggtt

SEQ ID NO: 80625 - DNA, 150 bp, Homo sapiens
  chr10:121260421-121260571
  hypo
ctctaaggtatgtcaggtgagcgaagaggacacccgacagagctgaagtgccccagattagacggctgcccccgccggcatggcaggtgctcagagggctgtccccaggcacagtagcttcctctggccgccactgaacctcttttctgg

SEQ ID NO: 80626 - DNA, 117 bp, Homo sapiens
  chr10:121264339-121264456
  hypo
ccccccacaccctctcgccaccacccaccagagtcttgtggagaacagggccctgccaacaccttgatgtcatattttcaatccgtttctgctgagcgaatacgtttctgctgtttg

SEQ ID NO: 80627 - DNA, 81 bp, Homo sapiens
  chr10:121264729-121264810
  hypo
ggtgagtggaagacacgggaacagagctgaggccaccatccgtccaacaaacggctgctggtgaagcggaaaactcaagtt

SEQ ID NO: 80628 - DNA, 132 bp, Homo sapiens; identical to SEQ ID NO: 24569
  chr10:121265439-121265571
  hypo

SEQ ID NO: 80629 - DNA, 119 bp, Homo sapiens
  chr10:121265789-121265908
  hypo
acagcagatgagcagacgaagcagctcaagtcagcccttgccccagagcgccaggacgggccacacagaaggctctgtcgccttgcacggctctccagcttcacgacagaccagccaga

SEQ ID NO: 80630 - DNA, 30 bp, Homo sapiens; identical to SEQ ID NO: 24571
  chr10:121266566-121266596
  hypo

SEQ ID NO: 80631 - DNA, 22 bp, Homo sapiens
  chr10:121267523-121267545
  hypo
tttgagacagagtttcgctctt

SEQ ID NO: 80632 - DNA, 85 bp, Homo sapiens; identical to SEQ ID NO: 47836
  chr10:121271621-121271706
  hypo

SEQ ID NO: 80633 - DNA, 30 bp, Homo sapiens
  chr10:121271963-121271993
  hypo
gactcactgtgaaatcggctctgattccaa

SEQ ID NO: 80634 - DNA, 738 bp, Homo sapiens; identical to SEQ ID NO: 47837
  chr10:121301365-121302103
  hypo

SEQ ID NO: 80635 - DNA, 31 bp, Homo sapiens
  chr10:121329546-121329577
  hypo
caccacgcccggccacaaaagcttaattcta

SEQ ID NO: 80636 - DNA, 44 bp, Homo sapiens; identical to SEQ ID NO: 7736
  chr10:121356078-121356122
  hypo

SEQ ID NO: 80637 - DNA, 280 bp, Homo sapiens
  chr10:121429482-121429762
  hypo
gaaggcgctgagaaccggcaggtgcaccctttccatgtctatccccagcctgggatgcagcgattccgaactgaggcggcagcagcggctcctcagaggtcccagtcacctctgcggggcatgccagaaaccactcagccagataaacagtgtggacaggtggcagcggcggcggcagcccagcccccagcctcccacggacctgaggtaaggagaggccaggctcaccagcctgctggggagcaagccgctgtgcttcccaggccgggcccatcccctc

SEQ ID NO: 80638 - DNA, 30 bp, Homo sapiens
  chr10:121436804-121436834
  hypo
gtaaaaatcagactcggaaccgatgtgtgc

SEQ ID NO: 80639 - DNA, 28 bp, Homo sapiens
  chr10:121488642-121488670
  hypo
ttttgggggagggggaaagggcggggcg

SEQ ID NO: 80640 - DNA, 30 bp, Homo sapiens
  chr10:121495328-121495358
  hypo
ctaacaaattacatcgcctaaaattctgtg

SEQ ID NO: 80641 - DNA, 31 bp, Homo sapiens; identical to SEQ ID NO: 24576
  chr10:121507663-121507694
  hypo

SEQ ID NO: 80642 - DNA, 31 bp, Homo sapiens; identical to SEQ ID NO: 24577
  chr10:121508292-121508323
  hypo

SEQ ID NO: 80643 - DNA, 175 bp, Homo sapiens; identical to SEQ ID NO: 24578
  chr10:121550360-121550535
  hypo

SEQ ID NO: 80644 - DNA, 23 bp, Homo sapiens
  chr10:121568723-121568746
  hypo
gcgagactctgtctcaaaaaaaa

SEQ ID NO: 80645 - DNA, 62 bp, Homo sapiens; identical to SEQ ID NO: 24579
  chr10:121591476-121591538
  hypo

SEQ ID NO: 80646 - DNA, 18 bp, Homo sapiens
  chr10:121691374-121691392
  hypo
tttatggtatttgaactt

SEQ ID NO: 80647 - DNA, 166 bp, Homo sapiens
  chr10:121702238-121702404
  hypo
aagacacccaggcctcgtcagctatgttaacgtgctgtatgacaagaggaacctgctttctaagtctgctggacacgcgtgcttcttgaatccaaccagacaagcatgttttctcaaaaccacagtataagacaaggaaactgcacagattcgagtgatttttgag

SEQ ID NO: 80648 - DNA, 43 bp, Homo sapiens
  chr10:122214595-122214638
  hypo
gtccaaaagccagctcctttccgtgaggctgtgtcctcaggct

SEQ ID NO: 80649 - DNA, 330 bp, Homo sapiens; identical to SEQ ID NO: 47847
  chr10:122216793-122217123
  hypo

SEQ ID NO: 80650 - DNA, 30 bp, Homo sapiens; identical to SEQ ID NO: 24581
  chr10:122393515-122393545
  hypo

SEQ ID NO: 80651 - DNA, 30 bp, Homo sapiens
  chr10:122610143-122610173
  hypo
tgctatagttaaagcgtataaacccaacac

SEQ ID NO: 80652 - DNA, 31 bp, Homo sapiens; identical to SEQ ID NO: 24582
  chr10:122846742-122846773
  hypo

SEQ ID NO: 80653 - DNA, 35 bp, Homo sapiens; identical to SEQ ID NO: 24583
  chr10:123037579-123037614
  hypo

SEQ ID NO: 80654 - DNA, 35 bp, Homo sapiens; identical to SEQ ID NO: 24584
  chr10:123037853-123037888
  hypo

SEQ ID NO: 80655 - DNA, 85 bp, Homo sapiens; identical to SEQ ID NO: 24585
  chr10:123063522-123063607
  hypo

SEQ ID NO: 80656 - DNA, 30 bp, Homo sapiens; identical to SEQ ID NO: 47852
  chr10:123093885-123093915
  hypo

SEQ ID NO: 80657 - DNA, 78 bp, Homo sapiens
  chr10:123335737-123335815
  hypo
cagaaagcatttcccaaagcgacaggccattagatcatgtagcgcccaggaaatagatacttacgttacaagctatgt

SEQ ID NO: 80658 - DNA, 30 bp, Homo sapiens; identical to SEQ ID NO: 47853
  chr10:123337319-123337349
  hypo

SEQ ID NO: 80659 - DNA, 49 bp, Homo sapiens
  chr10:123493063-123493112
  hypo
ttctctagcaggtttctccaacgagtccggcctttctttggctccctta

SEQ ID NO: 80660 - DNA, 30 bp, Homo sapiens; identical to SEQ ID NO: 24586
  chr10:123532108-123532138
  hypo

SEQ ID NO: 80661 - DNA, 31 bp, Homo sapiens
  chr10:123554225-123554256
  hypo
taagaccttaaacatacgaatggccccattt

SEQ ID NO: 80662 - DNA, 18 bp, Homo sapiens
  chr10:123667286-123667304
  hypo
aaaaaaaaaagattaaaa

SEQ ID NO: 80663 - DNA, 31 bp, Homo sapiens; identical to SEQ ID NO: 24587
  chr10:123706878-123706909
  hypo

SEQ ID NO: 80664 - DNA, 197 bp, Homo sapiens
  chr10:123757356-123757553
  hypo
cactctgatgcgatcccgatccaatgctctgaatcccaaggaggccacaagcctaggggagatttgtccatctcagcccaagaggtcccatcccacccccaaaggcaggcacgaagaccaagacttcaggtggtggcagcaagggagcagccagacgctgctcaaggaactgacaaggaagactcctcggctgggca

SEQ ID NO: 80665 - DNA, 239 bp, Homo sapiens
  chr10:123842297-123842536
  hypo
ctgcccagcccaccaccgtcccaggagcgagagcacccctcgtcctccatgccctttgccgagtgtcccccggaaggttgcttggcaagtccagcagcggcacctgaagatggtcctcagactcagtctcccaggagggaacctgccccaaatgccccaggagacatcgcggcggcatttcccgctgagagggacagctctactccataccaagagattgctgccgtccccagtgctgg

SEQ ID NO: 80666 - DNA, 30 bp, Homo sapiens; identical to SEQ ID NO: 47859
  chr10:123853457-123853487
  hypo

SEQ ID NO: 80667 - DNA, 31 bp, Homo sapiens
  chr10:123865057-123865088
  hypo
gctggtgttttggttccgtattcctgcttct

SEQ ID NO: 80668 - DNA, 335 bp, Homo sapiens
  chr10:123879959-123880294
  hypo
tggttagagccaccgcgggtgccctggctggttgcgcacaccctcttcctagggaggcagcacccacttggctctcagcacgccactccctctttgtcgcacatcatgagtcgacgctgctctgaggctgtagggtccttcgctgagagagtcagagcagctgggatggagctcagcctcgtgcggccttggggagagggactttctgctgtcacattgctcacagtgatgaagggcctgcatagagcctggcgcatgctaggtgctcataaacattgattcccttcacttgttgccacctgtattcattctttctttctttctttttttttttg

SEQ ID NO: 80669 - DNA, 238 bp, Homo sapiens
  chr10:123910180-123910418
  hypo
atggtacgagcatgtgcggctcaggaccccaccatgcccgagtgcctcgccgtgttgatgagccagtttctttaatacttcgctgtcaggagaaggacctgctgagcgctggagtctaggtggagtcatgcagcgttcctgggtcctttcttctgctttgtttgcattttttgatcctgccagccagcctctcggcagatacatcccggttgattctatgccacggactattcggaag

SEQ ID NO: 80670 - DNA, 177 bp, Homo sapiens
  chr10:123952374-123952551
  hypo
gaggaagctgggttcccggggcagcacccggggcagcacccagggctcgccaggctgatctgaactctcattcttctttgctcctcagttgtgtgacctccttttgttttccacaccgataaacagatgcttcaggtacctcgatctgttgttgtgcaagtgcggatctttccttct

SEQ ID NO: 80671 - DNA, 31 bp, Homo sapiens
  chr10:123954597-123954628
  hypo
acccctgtcaaagctccgccagctccacccc

SEQ ID NO: 80672 - DNA, 31 bp, Homo sapiens
  chr10:123958278-123958309
  hypo
agctggtgcctttgtgcgcctagcctggggc

SEQ ID NO: 80673 - DNA, 31 bp, Homo sapiens
  chr10:123961235-123961266
  hypo
cagcccattatcctcccgggaagacaggggt

SEQ ID NO: 80674 - DNA, 43 bp, Homo sapiens; identical to SEQ ID NO: 24590
  chr10:123971194-123971237
  hypo

SEQ ID NO: 80675 - DNA, 40 bp, Homo sapiens; identical to SEQ ID NO: 24591
  chr10:123977731-123977771
  hypo

SEQ ID NO: 80676 - DNA, 180 bp, Homo sapiens
  chr10:123988939-123989119
  hypo
ttgactatctggagcccgacttagcagaaaagaaccccccactattcgctcagaaactccaggtttgtagcccacgtgtgaccttttgggagtttgtcaaaacctcagtagagaatgaacccccgaggcccaaatgaaataaggcaggatttgatgaggaactgccgagaacgttcccag

SEQ ID NO: 80677 - DNA, 31 bp, Homo sapiens
  chr10:124001600-124001631
  hypo
tgggtttctggtagagcgtgaagcctttcag

SEQ ID NO: 80678 - DNA, 88 bp, Homo sapiens
  chr10:124028461-124028549
  hypo
gacttcgtctcaaaaaaaaagcacagtgtcgccattaacagtcatgtacaaaaatgcaggagaaagcgtctaacacttagtgaacaac

SEQ ID NO: 80679 - DNA, 31 bp, Homo sapiens
  chr10:124050740-124050771
  hypo
cgggcctgggggaaatcggaagggcaattcc

SEQ ID NO: 80680 - DNA, 1127 bp, Homo sapiens; identical to SEQ ID NO: 47863
  chr10:124133757-124134884
  hypo

SEQ ID NO: 80681 - DNA, 30 bp, Homo sapiens; identical to SEQ ID NO: 24593
  chr10:124138748-124138778
  hypo

SEQ ID NO: 80682 - DNA, 285 bp, Homo sapiens
  chr10:124248921-124249206
  hypo
ctcctttggattttaggcttccgttttctaaacgagaggtgccggtggctagtgggtctgggtttattgtgtcggaagatggactgatcgtgacaaatgcccacgtggtgaccaacaagcaccgggtcaaagttgagctgaagaacggtgccacttacgaagccaaaatcaaggatgtggatgagaaagcagacatcgcactcatcaaaattgaccaccaggtaagggtgttctcgcctgcagaggtgagttctcagatgccccggaacacccttggcaaaggca

SEQ ID NO: 80683 - DNA, 31 bp, Homo sapiens
  chr10:124311934-124311965
  hypo
agaaaaaaaaagcagccggactgggacctgt

SEQ ID NO: 80684 - DNA, 190 bp, Homo sapiens
  chr10:124609890-124610080
  hypo
cccatgtgactcactttagtacgttgtttattttgaacttgtgactcactttagcgcgttgtgtattttgaagtaaagacagagcacgacaactatcagcaggagcaaggccgccaggataccaccagcgatgacaggcataatcactgtatggaggtcaaaagacttcgatgtacctaggcagataagt

SEQ ID NO: 80685 - DNA, 46 bp, Homo sapiens; identical to SEQ ID NO: 24594
  chr10:124712594-124712640
  hypo

SEQ ID NO: 80686 - DNA, 3 bp, Homo sapiens
  chr10:124738943-124738946
  hypo
ctc

SEQ ID NO: 80687 - DNA, 30 bp, Homo sapiens; identical to SEQ ID NO: 47871
  chr10:124895228-124895258
  hypo

SEQ ID NO: 80688 - DNA, 378 bp, Homo sapiens; identical to SEQ ID NO: 7754
  chr10:124896154-124896532
  hypo

SEQ ID NO: 80689 - DNA, 32 bp, Homo sapiens
  chr10:124931353-124931385
  hypo
gccctttttggcacgaccgttgttccttcttt

SEQ ID NO: 80690 - DNA, 30 bp, Homo sapiens
  chr10:124953675-124953705
  hypo
ctgggaaatggggacgagatgttttactct

SEQ ID NO: 80691 - DNA, 101 bp, Homo sapiens
  chr10:125017587-125017688
  hypo
atagtgcagggtttgcgccatggtgattttcgatggttatctgccctcgccgctgctgctccagctgcatcttccgcggggctcagcgcagcattttgctc

SEQ ID NO: 80692 - DNA, 30 bp, Homo sapiens
  chr10:125528084-125528114
  hypo
aggacgtgaatccgcgtctcctccaccagg

SEQ ID NO: 80693 - DNA, 215 bp, Homo sapiens; identical to SEQ ID NO: 24596
  chr10:125617036-125617251
  hypo

SEQ ID NO: 80694 - DNA, 30 bp, Homo sapiens
  chr10:125769682-125769712
  hypo
aaacgcctcatccgcgaggacctgcgccag

SEQ ID NO: 80695 - DNA, 46 bp, Homo sapiens
  chr10:126101960-126102006
  hypo
aaagatattgttgaccaggtgcggtgactcatgcctataatcccag

SEQ ID NO: 80696 - DNA, 46 bp, Homo sapiens
  chr10:126102245-126102291
  hypo
cgtctcaaaaaacaaacaaacaaacgaaaaagctattgttagcaaa

SEQ ID NO: 80697 - DNA, 108 bp, Homo sapiens; identical to SEQ ID NO: 47894
  chr10:126107130-126107238
  hypo

SEQ ID NO: 80698 - DNA, 415 bp, Homo sapiens; identical to SEQ ID NO: 47895
  chr10:126107456-126107871
  hypo

SEQ ID NO: 80699 - DNA, 30 bp, Homo sapiens; identical to SEQ ID NO: 24600
  chr10:126149556-126149586
  hypo

SEQ ID NO: 80700 - DNA, 30 bp, Homo sapiens; identical to SEQ ID NO: 24601
  chr10:126185131-126185161
  hypo

SEQ ID NO: 80701 - DNA, 30 bp, Homo sapiens
  chr10:126185380-126185410
  hypo
cattctcagcgtagcgcctggactgcccct

SEQ ID NO: 80702 - DNA, 94 bp, Homo sapiens; identical to SEQ ID NO: 24602
  chr10:126190196-126190290
  hypo

SEQ ID NO: 80703 - DNA, 30 bp, Homo sapiens; identical to SEQ ID NO: 24603
  chr10:126190715-126190745
  hypo

SEQ ID NO: 80704 - DNA, 265 bp, Homo sapiens
  chr10:126198877-126199142
  hypo
ccctggggtcctgagcgcactttggtatgcggagcccacaagctggcctggacaggcatcactgctccaggcagctgtgcacccagccggccctggcgtcccggcccccagcctccgcctccctcgccgacagcttcccggggctctgcctggaggcagcctcgctttatcccgcagaacctccacgctgttcctgcatgagaactcttcctccaagagaccacgttcctctggtcctgtctccgtgggccacatccacaaatgt

SEQ ID NO: 80705 - DNA, 31 bp, Homo sapiens; identical to SEQ ID NO: 24605
  chr10:126237288-126237319
  hypo

SEQ ID NO: 80706 - DNA, 143 bp, Homo sapiens; identical to SEQ ID NO: 24606
  chr10:126238652-126238795
  hypo

SEQ ID NO: 80707 - DNA, 35 bp, Homo sapiens
  chr10:126240417-126240452
  hypo
gacctcaccacggaggcgcacgcaggatgtccgca

SEQ ID NO: 80708 - DNA, 152 bp, Homo sapiens
  chr10:126265311-126265463
  hypo
aggagttacctgccctgtagacggggagaccacattagtgtttgtgcaaagccctgccctcgtgcacctgtccttccgtagcccacgatacctcatccagcccgggcccgtgggtgggctgctgagcacccgaccacagccaggcctccatg

SEQ ID NO: 80709 - DNA, 31 bp, Homo sapiens; identical to SEQ ID NO: 24608
  chr10:126276742-126276773
  hypo

SEQ ID NO: 80710 - DNA, 30 bp, Homo sapiens
  chr10:126281449-126281479
  hypo
cctgtgggcacaatcggcccagtgtggggc

SEQ ID NO: 80711 - DNA, 30 bp, Homo sapiens
  chr10:126281817-126281847
  hypo
tgggtcctgcagcccgtgggtggcagggcg

SEQ ID NO: 80712 - DNA, 18 bp, Homo sapiens
  chr10:126287148-126287166
  hypo
gaggccagggccagcacg

SEQ ID NO: 80713 - DNA, 78 bp, Homo sapiens
  chr10:126287225-126287303
  hypo
ccatccctatccacctgtccaccctgatgcagttcctgccatccacgtgtccatctgtctacccgtacacctgttcat

SEQ ID NO: 80714 - DNA, 31 bp, Homo sapiens; identical to SEQ ID NO: 24611
  chr10:126287859-126287890
  hypo

SEQ ID NO: 80715 - DNA, 31 bp, Homo sapiens; identical to SEQ ID NO: 24612
  chr10:126290723-126290754
  hypo

SEQ ID NO: 80716 - DNA, 30 bp, Homo sapiens; identical to SEQ ID NO: 24613
  chr10:126296156-126296186
  hypo

SEQ ID NO: 80717 - DNA, 31 bp, Homo sapiens; identical to SEQ ID NO: 24614
  chr10:126296748-126296779
  hypo

SEQ ID NO: 80718 - DNA, 30 bp, Homo sapiens
  chr10:126305305-126305335
  hypo
gcggggctggagttcggggctgccaatggg

SEQ ID NO: 80719 - DNA, 31 bp, Homo sapiens; identical to SEQ ID NO: 24615
  chr10:126305775-126305806
  hypo

SEQ ID NO: 80720 - DNA, 31 bp, Homo sapiens; identical to SEQ ID NO: 24616
  chr10:126306137-126306168
  hypo

SEQ ID NO: 80721 - DNA, 30 bp, Homo sapiens
  chr10:126309463-126309493
  hypo
gctgggcttgctggtcgatgggaccagctt

SEQ ID NO: 80722 - DNA, 241 bp, Homo sapiens
  chr10:126309752-126309993
  hypo
gaggctgtgtgccctcggccacaccgggcatgtggtgccaggaccccccacgcccagtggtactccgggggcaagacatggccatgtgctctccacattcacccaacaactgccctggccgcctccacatttgctctaagaagacatggtctccatgacccccaggcagggacaggccaagatgtctctgtctgctcagagccaccagctcttgggttcggctgtccgggatcacaagtag

SEQ ID NO: 80723 - DNA, 30 bp, Homo sapiens
  chr10:126311129-126311159
  hypo
aagcaccctccaaatcgttccttgggcccg

SEQ ID NO: 80724 - DNA, 120 bp, Homo sapiens
  chr10:126311517-126311637
  hypo
aagaggcagaaaagacgcaaacttcaaagctgtcctctgggctgcagtagttctgtggacctggtggctgccacgctcggggagccggtgagaggctgacacacccgctgtatgacgcgg

SEQ ID NO: 80725 - DNA, 220 bp, Homo sapiens
  chr10:126311863-126312083
  hypo
tgttcccaggggccccgcggtcccgccaggctgcagccggctccgctctcctgccacaatcctcgtccagggcgcagctgtctgactcctcacaggacaggtcctcctggcaggcgaggtggtcgtcgaaggaagggggaagaggctcagggaccggggtcccagcgggggtcctgccccctgggccggaggctgagagcagggcggtccaggccctggt

SEQ ID NO: 80726 - DNA, 185 bp, Homo sapiens
  chr10:126312313-126312498
  hypo
gggcccatgagcaacgtactcatgaagatgcacctccggccaatgagcgctctgtgctcataaagacacgcgcaattccactattcacctactaactcggcaaagcacacaaatttgatgcagacccagttctggggggctgcggtgaaacaggaatgctcctaacacttcgtccacagcctttc

SEQ ID NO: 80727 - DNA, 151 bp, Homo sapiens
  chr10:126314039-126314190
  hypo
acaatcccctcaccacggcagagagctggagacggcgacccctgcacaacagccccaggttcctcaccggctcctggccaggcctggacgatggatcggcaaccaggatcctcgcctgcccctggccaggcctgggcgatggaccagcagc

SEQ ID NO: 80728 - DNA, 285 bp, Homo sapiens
  chr10:126314662-126314947
  hypo
tgcctgacgcccgaacgcgtgccagcgttttctgcgagctgtcatgtgaggggcctggggcgtggcctgctgcgagtgttttctgtggcctcgcacgtgaacgcagcaggagcgcagcctgcgcaatcggacagacgccgcacagcgcttgtctgtgctcaccctctcggtcctgctcggagcttcccactgacctcctctggcataaggcgcaggtagcgggggtgcctaacttatggccaccatgattgtgtgggtctcggcactaaccgtggtgctacggtc

SEQ ID NO: 80729 - DNA, 218 bp, Homo sapiens; identical to SEQ ID NO: 24619
  chr10:126317367-126317585
  hypo

SEQ ID NO: 80730 - DNA, 31 bp, Homo sapiens; identical to SEQ ID NO: 24620
  chr10:126323262-126323293
  hypo

SEQ ID NO: 80731 - DNA, 191 bp, Homo sapiens; identical to SEQ ID NO: 24621
  chr10:126325796-126325987
  hypo

SEQ ID NO: 80732 - DNA, 377 bp, Homo sapiens
  chr10:126331894-126332271
  hypo
aagcccaggcggctcggcagggccctcagcagttctccctattcacgacgcgcaggtggctgataaatttcccagggtttctcggcgcggtgattgcgcctggctctttcagcgtggctgcaggaatctatacaggtccacttaaatcagtctgaagctgtgaaagcctccatcactcgtcgcccgggcccggccgcccaaacagagccccgggagggccagcgggggggtgcagggctgggaggacagtgccaattaaaaatctgagcctgtgggcctttctctctcttgttttcattcctacagctacattgtgtccactggcagcggattccaaaggcgaagaggctgcattcacggcccggagctttagagcc

SEQ ID NO: 80733 - DNA, 31 bp, Homo sapiens; identical to SEQ ID NO: 24623
  chr10:126334816-126334847
  hypo

SEQ ID NO: 80734 - DNA, 173 bp, Homo sapiens
  chr10:126354413-126354586
  hypo
gattaatctagaattgaatctcgatcctcagaggacaagactagctcatcttactgtgactcggcttatagtcggctacgtagacacagctgtctccaccccagccctgtagcctgcacctaccttgcaggtaaggatggggtcttgtacacgctagtcttccctgagccctg

SEQ ID NO: 80735 - DNA, 30 bp, Homo sapiens
  chr10:126355217-126355247
  hypo
ccccagccctgccccggccacacgccagga

SEQ ID NO: 80736 - DNA, 30 bp, Homo sapiens
  chr10:126367643-126367673
  hypo
tctcacccccaaaggcgaatgtgtaaacca

SEQ ID NO: 80737 - DNA, 30 bp, Homo sapiens
  chr10:126367942-126367972
  hypo
ctcatcaggttcccacgcacaaggccgtgc

SEQ ID NO: 80738 - DNA, 311 bp, Homo sapiens
  chr10:126370267-126370578
  hypo
cacacggctgggagcggctgcgggaaaggccgctggagcgtctcgccagctctggtgttgaggcaggtgtgctgttggctgagggaggacagtattccacaaaggaaaactgctcatgtgagcaagagagggaccgctgcaggtccagccggcctcctcccacggggtgcaggtcagggctccaggtgtcacctgcctgtccacacggggctgagcctggcaccccttggcagggctgccctccaaatcggtggtggagtcctgcctggtcgcagggtgaggagagcacgttggcccgggaagggaggctg

SEQ ID NO: 80739 - DNA, 29 bp, Homo sapiens
  chr10:126380993-126381022
  hypo
aaagcataggccaggcgcggtggctcatg

SEQ ID NO: 80740 - DNA, 129 bp, Homo sapiens
  chr10:126420269-126420398
  hypo
gcggctcccttctagcgtgcgggattccagtgaggtgtggcatgctagactgccacatgaagttttggctgtggcccttccccgcatcacctccaaaactgtaaaatgcttccccgaccttggagacgg

SEQ ID NO: 80741 - DNA, 30 bp, Homo sapiens; identical to SEQ ID NO: 47901
  chr10:126431871-126431901
  hypo

SEQ ID NO: 80742 - DNA, 30 bp, Homo sapiens
  chr10:126438752-126438782
  hypo
acaggtgtgagccaccgagccgggccaaac

SEQ ID NO: 80743 - DNA, 26 bp, Homo sapiens
  chr10:126464744-126464770
  hypo
ctaccggttccttcttttcccatgcc

SEQ ID NO: 80744 - DNA, 31 bp, Homo sapiens; identical to SEQ ID NO: 24627
  chr10:126497161-126497192
  hypo

SEQ ID NO: 80745 - DNA, 25 bp, Homo sapiens
  chr10:126607814-126607839
  hypo
ttacaaaagtagtccactggccggg

SEQ ID NO: 80746 - DNA, 30 bp, Homo sapiens
  chr10:126632144-126632174
  hypo
tgattcattcagcacgatagctgtactttc

SEQ ID NO: 80747 - DNA, 31 bp, Homo sapiens; identical to SEQ ID NO: 24628
  chr10:126667503-126667534
  hypo

SEQ ID NO: 80748 - DNA, 31 bp, Homo sapiens
  chr10:126686478-126686509
  hypo
acaccagccccagtgtcggaggggttggggg

SEQ ID NO: 80749 - DNA, 30 bp, Homo sapiens; identical to SEQ ID NO: 24629
  chr10:126688777-126688807
  hypo

SEQ ID NO: 80750 - DNA, 372 bp, Homo sapiens
  chr10:126691067-126691439
  hypo
ggctgccctcccagaacgggaggcccaggttcccatgtggacaggggcctagagctgtgcacacggcaggggcagtttaggggacacacacggcaggggtcatttaggggacgcacccagcaggggtggtttagaggacatgtggccagtcgcattctcccctctggaggcggcactgggtgtctccaaattgagcctgtgccagctgggtgttgctctgagggcagagatgcctcacagccccgcagaccccacacaagggccagcagggactatcctacctgtgtcatgtgaaggcagggccgcaaggtgctccacagcccggcctggaggcagccaccttgctacagccagaagcggctgctccgtggt

SEQ ID NO: 80751 - DNA, 30 bp, Homo sapiens; identical to SEQ ID NO: 24631
  chr10:126694132-126694162
  hypo

SEQ ID NO: 80752 - DNA, 30 bp, Homo sapiens
  chr10:126694738-126694768
  hypo
ggctgaggctggcccgagacctgtccaagg

SEQ ID NO: 80753 - DNA, 340 bp, Homo sapiens
  chr10:126697822-126698162
  hypo
aacagagccaagcgattcacggcttcatcagcccctgtgacctgcaggtggcctgggaggcaggaggagcctaagcagccggtgtggctcccagcctcatgcacaatgatccaggaagaaagaggagacaaaaccacacaaactccagaggccggggcgggacagggagtgacccaacacagccgaacctgaggccccgcctgcctccaaggaagccccacttaatatcccaccgatcccaccaccctcagaaaagcttcctcttaaatgcggcctgctccccaattaagtggccgctttctgcaatccagcatgacccgatccccactggctgagctca

SEQ ID NO: 80754 - DNA, 30 bp, Homo sapiens
  chr10:126698632-126698662
  hypo
tgcagagaagactgcgggcaacaggcatct

SEQ ID NO: 80755 - DNA, 37 bp, Homo sapiens; identical to SEQ ID NO: 24632
  chr10:126709395-126709432
  hypo

SEQ ID NO: 80756 - DNA, 137 bp, Homo sapiens
  chr10:126711479-126711616
  hypo
ggtgtgggccgatggcggcgaccctctatacagattctgatagggctaaaattattgatggaggtgctttctacctaggagatcagcgttcacacctccagttgctggaaaccgaggccacacgaaaagaagccatg

SEQ ID NO: 80757 - DNA, 31 bp, Homo sapiens
  chr10:126714617-126714648
  hypo
ccccaggcagggcaggcggggaggatgtatt

SEQ ID NO: 80758 - DNA, 1449 bp, Homo sapiens
  chr10:126715000-126716449
  hypo
gtgggagagctgtacccggagttggaggggaagtgtggggcatgggtgcccacgccaggggcagaataggtggctgccgtctccaggaggtgctgagatggtgcgctggagggacggcgagccgggtctccagctcggggggatgctgtctgcagaggagccgcagcgcccagagaagccaagtcaccatggagcagttcgcttcggtggctgaagctgctggaccgcgcccggggcagcgggcccccccggtcctgcctccgcagctgcatttcggtcctgcagctattggccaggcggctcagaacacgggcctggcccaggttgggtgcgacagacttgatatccgcgtcctccagggtagccaggacggccggggagtcaaagccctgctgcagtagggctcccagcgtggcctctgccagcccctccgcccgcagaaaggccaggaactcagggagcacggtcctcttgccaccaggaccctggaaggtggacaggtcagcttcgtaagtctcgtaagccatcttggatgggatgctttcccgggcaggcccgtagccacgattcagggcccctggggccacccctgtgctgccttcgggggcagcagctgaactggggtccacaaccaggcacgtcggggccacctgtctggcaggggcagggtcaatgggtctttcgctgatgtcgctgaagacctggctgagggggtaggcaggcacctccgccccatacctggtgtcgggctgctcccgtccataccgcccgggagatgcagccctgctctgtgtctgccgcccctgagggatcattttacctccaggatcccggtacaggtgaccggcgtcctgcagggcaggtgaccggccttgcattggatcccatgacgttctgctgccaagcactccgtagctggggaccggccggctgactcctgggtcccgatagaggggaggctctttgggtaccctagcagctccagacggatcactgtagtactcccgtggcagcagggggctgcgaccagacatcactgcctgtctgctgtcgtagaaggtgaagtcaggagtagacccctttcttgcagccactgagttataaacggcctcccggtacaggtagggctcggcggccacgggcagggcagcgtcctgtggtcggtggtttggctcaaaccaagtcccctctgctgtgccatacgtcagggagcttctcctccccagaggccgcagggactcggcgttctcccaggggccctcgtaccacccagcagcatcccagctctgagaacgaccaatatttatatgcctgctgggaactggcattggaaaaaaaatgactgcggatgaggcagaggagaagcttttctttataaatcttcaattacatacatcaaaaacagacctggctgtgtgctaacccttccgagacggcagggacaaccaa

SEQ ID NO: 80759 - DNA, 31 bp, Homo sapiens
  chr10:126720966-126720997
  hypo
gaaggtcccaggatgccgtccttcctctggt

SEQ ID NO: 80760 - DNA, 30 bp, Homo sapiens
  chr10:126721634-126721664
  hypo
tctcggataaatctgcgtcacccatcccag

SEQ ID NO: 80761 - DNA, 314 bp, Homo sapiens
  chr10:126721931-126722245
  hypo
aggaacgccctcgagcgcgcacgccaaggtgcctgagctttagtagcaagcgagccaagtggtagaaaccaatcagagaggagtctcatttcacagctttaacactgtacgttctggaaaaggagagagggcaagaagccggcagcaaaatgtatcttggggttctggttcacagtcaccccaaatacctgtcaattaggttgagctgtgtgaagcgcgcagaaggttctccgcattcgtgcgggctgctgtctgctgctgtctggctaccctggggcctcctccaaacacggagactacggatgcactgttcc

SEQ ID NO: 80762 - DNA, 41 bp, Homo sapiens
  chr10:126726952-126726993
  hypo
cactcacccctaaacccgaacccacacgctggtttcttacc

SEQ ID NO: 80763 - DNA, 31 bp, Homo sapiens; identical to SEQ ID NO: 24635
  chr10:126727934-126727965
  hypo

SEQ ID NO: 80764 - DNA, 30 bp, Homo sapiens
  chr10:126731742-126731772
  hypo
aacaaaaaggaaaaacggcacattttacaa

SEQ ID NO: 80765 - DNA, 18 bp, Homo sapiens
  chr10:126732290-126732308
  hypo
aaccgtgcccggccgacc

SEQ ID NO: 80766 - DNA, 307 bp, Homo sapiens; identical to SEQ ID NO: 24637
  chr10:126732715-126733022
  hypo

SEQ ID NO: 80767 - DNA, 43 bp, Homo sapiens
  chr10:126738867-126738910
  hypo
aatctctagattcaaagacaccgcttcccagaccttatctttt

SEQ ID NO: 80768 - DNA, 30 bp, Homo sapiens
  chr10:126744831-126744861
  hypo
agaactattctaagcggctgtgagtagtaa

SEQ ID NO: 80769 - DNA, 90 bp, Homo sapiens; identical to SEQ ID NO: 24638
  chr10:126751062-126751152
  hypo

SEQ ID NO: 80770 - DNA, 182 bp, Homo sapiens
  chr10:126763481-126763663
  hypo
ccatgagtcctaccttgactacgacttccacaggcggagccgagaaaacaataataggtgggaacctggactcctaactgacgccaggcagactcaataaagtaaaccaaacttttaaaagaaaacaaaggagaatgtcctaaggatcttgggtagacaacggtgatctaagacacaaatgc

SEQ ID NO: 80771 - DNA, 286 bp, Homo sapiens
  chr10:126767710-126767996
  hypo
gtctcgaggaaaaaaaaaaaaaaaaaaaaaaggtggaaaaaccagcccctgatgggccaccaggagctttcgggagcctgcccgggatatcacccggctccaccatgtgtgacgctcctgctctaaagtacacggaggacacagggcacagcgcctttcacagccactggctcacatgccagtccacggttcccagcggtggcggcattcctctccagggaggaaaatgctacagaatattcaccaccggtcaattcatctgcccggttggatctccttccaaact

SEQ ID NO: 80772 - DNA, 371 bp, Homo sapiens; identical to SEQ ID NO: 24640
  chr10:126771969-126772340
  hypo

SEQ ID NO: 80773 - DNA, 39 bp, Homo sapiens; identical to SEQ ID NO: 24641
  chr10:126772639-126772678
  hypo

SEQ ID NO: 80774 - DNA, 121 bp, Homo sapiens
  chr10:126774971-126775092
  hypo
ttgatccagcaatccctgtaatctcagctacccgggagactgaggcaggagaaaatacaaaaatttgccaagtgtgctggtaatcggctgtaatcccagctacttgggaggatgaggcagg

SEQ ID NO: 80775 - DNA, 200 bp, Homo sapiens; identical to SEQ ID NO: 24642
  chr10:126775427-126775627
  hypo

SEQ ID NO: 80776 - DNA, 31 bp, Homo sapiens
  chr10:126776897-126776928
  hypo
gaaaaagggatgggagcgggatgacctgtgc

SEQ ID NO: 80777 - DNA, 114 bp, Homo sapiens; identical to SEQ ID NO: 24643
  chr10:126789759-126789873
  hypo

SEQ ID NO: 80778 - DNA, 31 bp, Homo sapiens; identical to SEQ ID NO: 24644
  chr10:126792359-126792390
  hypo

SEQ ID NO: 80779 - DNA, 194 bp, Homo sapiens
  chr10:126792666-126792860
  hypo
aatccctattaaaagacagcacggtaccgttcccagaaatcaaggctcacaccacgtggagctgactggatgctcacggggacattcgatcccagcggcctggagaaaggacggaacaggaggaccctgtgcgggcgccattgttgttcatcagtatacatttataaagaaacggaaattaaacactgtcatca

SEQ ID NO: 80780 - DNA, 31 bp, Homo sapiens
  chr10:126807512-126807543
  hypo
aacctgccagaaggagcggacataggagatg

SEQ ID NO: 80781 - DNA, 51 bp, Homo sapiens
  chr10:126809816-126809867
  hypo
aataccaatgcacagcgctcagcgtggcgcctggcacgccagaggcaccca

SEQ ID NO: 80782 - DNA, 30 bp, Homo sapiens; identical to SEQ ID NO: 24645
  chr10:126810201-126810231
  hypo

SEQ ID NO: 80783 - DNA, 30 bp, Homo sapiens; identical to SEQ ID NO: 24646
  chr10:126819037-126819067
  hypo

SEQ ID NO: 80784 - DNA, 422 bp, Homo sapiens
  chr10:126819308-126819730
  hypo
aagcatatttagagaccgactgtactgccagacaagactagcggaactctaactcccaggttgccttgatctgaacaggttctagaaactgccaagcatcgccccctcattttagagggaggcaccctgccacccagagagggcaaagggctcgctgtccaagctggagaaaatccctgggtatcgcctccgacccactgtatctcaaatacgatgtgtgttggctcggctcttccaaaaaccgaagccaagacacgatcagctctggaagagacttcttggggaggcagacaggcggggaggcagagggagacgcaagtctgacagcagatgcagatgagatggcagggaaggcaggaggctggggaggaggagtcttcacctgctgtccccggctgggagcagcccgcagagtgcaggct

SEQ ID NO: 80785 - DNA, 30 bp, Homo sapiens
  chr10:126820125-126820155
  hypo
acagggagggggcagcggcgggttggaact

SEQ ID NO: 80786 - DNA, 30 bp, Homo sapiens
  chr10:126824383-126824413
  hypo
ccccacagcaggagcgtacctgtcagtcag

SEQ ID NO: 80787 - DNA, 405 bp, Homo sapiens
  chr10:126830137-126830542
  hypo
agaagtcacaggagcacggaacaggaagcagggagacagcacacagtaagcacatggcaagcacacagtaaacacacggcaagtacatggcaaatacacagcaggtacacagcgagcacacagtaagcacacggtaaacactcagcaagtacatggcaaatgcacagcaggtacacagcgagcacacagtaagcacatggcaagcacacagtaaatacacagcaagcacacagcaagtacacagtgagcacgcggcaaacacacgacatgcacacggttagcacactgcccggctccctccaaagccacttcccccacagagaaaggagaaagcggccctggcctggcagtcactcacagtccctctggacctggagccagcggctatggcggacgaagaggcac

SEQ ID NO: 80788 - DNA, 66 bp, Homo sapiens
  chr10:126839586-126839652
  hypo
accaatgaagagtcagggcaacgcaacaacacacaatggcccagcgagctagtgccagacactaag

SEQ ID NO: 80789 - DNA, 285 bp, Homo sapiens; identical to SEQ ID NO: 47905
  chr10:126847583-126847868
  hypo

SEQ ID NO: 80790 - DNA, 123 bp, Homo sapiens; identical to SEQ ID NO: 47906
  chr10:126847900-126848023
  hypo

SEQ ID NO: 80791 - DNA, 648 bp, Homo sapiens; identical to SEQ ID NO: 47909
  chr10:126849497-126850145
  hypo

SEQ ID NO: 80792 - DNA, 38 bp, Homo sapiens
  chr10:127277449-127277487
  hypo
gctgggattgcaggcgtgagccacggcacccaacaacc

SEQ ID NO: 80793 - DNA, 275 bp, Homo sapiens
  chr10:127314343-127314618
  hypo
gacccagtgcagagccactttcgtggcaaatactttctgtgtatctaccgggctatgtttctccaagcgatgccaccgctgctacaggtgaaggatttcctcaactctgagcacgctccctctggtcatgggttctgtcggagttggtatagtggacaccgaggtgtgccgcccagaccgccccctgccatgaaggaggcattacccatcacctgctctcgtagacaccttcagggaccacggctgcagagaacgacctcacccaaggttacaga

SEQ ID NO: 80794 - DNA, 172 bp, Homo sapiens
  chr10:127415614-127415786
  hypo
tcattcttggagctgcgtattgtacaaataagtaaactaacgctcatcaaaagatgtttcacatggtcatacagctggcgaaactctcaggctagggcttaaacccagatctttctgcctgcagaggcctgttcctccagcagtactccactgtgtccgtgtactccacaca

SEQ ID NO: 80795 - DNA, 30 bp, Homo sapiens; identical to SEQ ID NO: 24651
  chr10:127451325-127451355
  hypo

SEQ ID NO: 80796 - DNA, 323 bp, Homo sapiens
  chr10:127451803-127452126
  hypo
ggacctctgaattgtcggtaggcattgctggtcccttacctgtctctttttcttttttaaccctagcaataacatcgaagatgacacaattctcaaaaccaacaagcacatttactcccagcttttgagagcaactgcaaataaaaccgcgactcttctggaaagaatcaacgttatcgtccacctgctgggccagcttgccgccggcagtgcagcgagcagcaatgccgttcagtgactgcacagagccgtgtcccagacacgctgtcagtgccttcaacacggagccggtttgttcattcggtgctttgtttcattaaata

SEQ ID NO: 80797 - DNA, 106 bp, Homo sapiens
  chr10:127463305-127463411
  hypo
tcgcgggggaggaagacgctccccccggccttgcggggcaggtcgcgcagggcaggtcgtgcggggcaggtggggggtgccaaggaagtccgggcgtggccacacc

SEQ ID NO: 80798 - DNA, 102 bp, Homo sapiens
  chr10:127464150-127464252
  hypo
cctgtgcgcgcgtgcgcatgtgcctgtgtgcacgtgcacgggcctgggggtattgctgttcttccagcttcctcctacctgagcagcgtggaggtcggcaat

SEQ ID NO: 80799 - DNA, 30 bp, Homo sapiens
  chr10:127478313-127478343
  hypo
tctgtgcagagcctcgcctgggatggagca

SEQ ID NO: 80800 - DNA, 92 bp, Homo sapiens
  chr10:127616425-127616517
  hypo
tgtacttaccttttggtgcacacgtgtgtactttaatttgatctgtatctgggagtgcaagtgctttatagagtgtacgtacagttttagga

SEQ ID NO: 80801 - DNA, 86 bp, Homo sapiens
  chr10:127659355-127659441
  hypo
agggggaccgtggaaagtgagagatggagacgagggagaggggaagaccgtggaaagcaggagacgggagagggagagggagagct

SEQ ID NO: 80802 - DNA, 30 bp, Homo sapiens
  chr10:127802681-127802711
  hypo
tctaccatccttgaccgtgactggcatggg

SEQ ID NO: 80803 - DNA, 260 bp, Homo sapiens; identical to SEQ ID NO: 24653
  chr10:127817215-127817475
  hypo

SEQ ID NO: 80804 - DNA, 37 bp, Homo sapiens; identical to SEQ ID NO: 24654
  chr10:127937967-127938004
  hypo

SEQ ID NO: 80805 - DNA, 31 bp, Homo sapiens
  chr10:128595435-128595466
  hypo
cagccctgggtcctaccgggcctgcacttag

SEQ ID NO: 80806 - DNA, 31 bp, Homo sapiens
  chr10:128600072-128600103
  hypo
gtcgcttgtcaagatgcggttgtcaagatgt

SEQ ID NO: 80807 - DNA, 31 bp, Homo sapiens
  chr10:128602214-128602245
  hypo
cacatgcccacatgcacgtgggaaactgagt

SEQ ID NO: 80808 - DNA, 85 bp, Homo sapiens
  chr10:128767290-128767375
  hypo
aaaagaattcaggtagcggtagacatcttgatagcagtaaaaaaaatacaaccaaaaggaaggccttcaccgttacctgagtgtt

SEQ ID NO: 80809 - DNA, 35 bp, Homo sapiens; identical to SEQ ID NO: 24655
  chr10:128767589-128767624
  hypo

SEQ ID NO: 80810 - DNA, 45 bp, Homo sapiens
  chr10:128779078-128779123
  hypo
aatctcatgcaggaagcggtagctgggctgcgttgcactgcccaa

SEQ ID NO: 80811 - DNA, 31 bp, Homo sapiens
  chr10:128783518-128783549
  hypo
acaggcgtgagccaccgcgtggagccccatt

SEQ ID NO: 80812 - DNA, 31 bp, Homo sapiens
  chr10:128804388-128804419
  hypo
aggccagcccctgcagcggagttgctgactc

SEQ ID NO: 80813 - DNA, 141 bp, Homo sapiens
  chr10:128804852-128804993
  hypo
agtccctgggaagcgcgatgagcggtgatgactggtgacgtcaaggccttctcctcgaggctcaggatgggtgcgggactcggggtgttttccacctgtgggtgctcaggctctgattgcgtttcccgcttgtttgctgcc

SEQ ID NO: 80814 - DNA, 30 bp, Homo sapiens
  chr10:128805259-128805289
  hypo
ggtgctgcagtcagtcgcgtgtgggtcagt

SEQ ID NO: 80815 - DNA, 255 bp, Homo sapiens; identical to SEQ ID NO: 24658
  chr10:128813791-128814046
  hypo

SEQ ID NO: 80816 - DNA, 117 bp, Homo sapiens
  chr10:128816342-128816459
  hypo
tcttggagaaaagagccgagagcggctggggctttgttttcttttgcggtggcactgtggtacagagggcctgggctccacaggctgcacctgtcctggctgcggagggctgtcctg

SEQ ID NO: 80817 - DNA, 31 bp, Homo sapiens
  chr10:128818999-128819030
  hypo
cgagtaatcactggccgcgctgtgggcacca

SEQ ID NO: 80818 - DNA, 20 bp, Homo sapiens
  chr10:128819443-128819463
  hypo
gaggctgtgggagtttcgcc

SEQ ID NO: 80819 - DNA, 20 bp, Homo sapiens
  chr10:128819702-128819722
  hypo
acaggcgtgagccactgcac

SEQ ID NO: 80820 - DNA, 30 bp, Homo sapiens
  chr10:128825468-128825498
  hypo
ccgtgggggtcacaccgtgcagtgggcagt

SEQ ID NO: 80821 - DNA, 31 bp, Homo sapiens
  chr10:128851343-128851374
  hypo
aaagcattggcgatgacgcaggtgcaatcct

SEQ ID NO: 80822 - DNA, 31 bp, Homo sapiens; identical to SEQ ID NO: 24660
  chr10:128862778-128862809
  hypo

SEQ ID NO: 80823 - DNA, 77 bp, Homo sapiens
  chr10:128863993-128864070
  hypo
cttgagtgaatgatgcggctccgactgctgcattgaaaaggcctggggtcagaggcggaggttgcagtgagccgaga

SEQ ID NO: 80824 - DNA, 31 bp, Homo sapiens
  chr10:128867668-128867699
  hypo
aatgagatgttggcaccgtcatagaccagca

SEQ ID NO: 80825 - DNA, 39 bp, Homo sapiens; identical to SEQ ID NO: 24661
  chr10:128874461-128874500
  hypo

SEQ ID NO: 80826 - DNA, 218 bp, Homo sapiens
  chr10:128888486-128888704
  hypo
ctgggtaccaggcagtggcaccggaactcattaagaaggtgactaatttcagggccgtgttaacatagactgaggctccatcatggttcccaggtgtttgtcggtcgccgctggagaccattgtgtggatcagtcacatggtctgctgcagtgtgagtgacagacggtgacttgctatcagtatgcaaaggtcacccggtgactattccaagaagtgt

SEQ ID NO: 80827 - DNA, 32 bp, Homo sapiens; identical to SEQ ID NO: 24662
  chr10:128891889-128891921
  hypo

SEQ ID NO: 80828 - DNA, 31 bp, Homo sapiens
  chr10:128898685-128898716
  hypo
gaatccctagggaaggcgaggcagcggtggc

SEQ ID NO: 80829 - DNA, 31 bp, Homo sapiens
  chr10:128899123-128899154
  hypo
tcgtgtgggaagtggacgcaggccttgccca

SEQ ID NO: 80830 - DNA, 195 bp, Homo sapiens
  chr10:128899934-128900129
  hypo
cgattcacacagtgtccggcagcccaaggggagccagcagcaggtgggccataaaggcctgtcttgtttgtggccgattcaccctggtgaaatggtatttatgaacttgctacaggcggttgatgctttgctgggcacagtataaaatgcatgaagccagttcgtgcctcaccctctgggcgttcgcaagcgaaa

SEQ ID NO: 80831 - DNA, 204 bp, Homo sapiens
  chr10:128904394-128904598
  hypo
cttctcagtatttctgcggttcttctcataaggattacaaattggtatgaacactccctaacctgcatgctgctcagccttcttgtttcttgatttgcagggggcagcactgaaatacttaccaacgatcgtcaacgatgtgaaattggtgtttgatcccaaagagctcaggtaagtatgcagcccaggcgaatgcttgtcacg

SEQ ID NO: 80832 - DNA, 31 bp, Homo sapiens
  chr10:128905316-128905347
  hypo
cctcaagcacccctcccgcctctgccttcaa

SEQ ID NO: 80833 - DNA, 31 bp, Homo sapiens
  chr10:128905986-128906017
  hypo
taacaacctccctccccgtgcaggtgcttcc

SEQ ID NO: 80834 - DNA, 63 bp, Homo sapiens
  chr10:128930827-128930890
  hypo
agcatttttcctcatcacacacggatctgagcaggtgaccgcggctgggataggtgctgttgt

SEQ ID NO: 80835 - DNA, 195 bp, Homo sapiens
  chr10:128936061-128936256
  hypo
gttctaaagacggcctcgagactccagacaccgtgagtgttaaaggaaccagagtttccatcttccgtgctttttagattcagttttggatttttgcttgggagttgaggagtaagtctcctgagagtaaggcgaaggtatgacctgagtttcctcaatagggtggagttttcttagaaccggctggagtttgtc

SEQ ID NO: 80836 - DNA, 205 bp, Homo sapiens; identical to SEQ ID NO: 24663
  chr10:128999160-128999365
  hypo

SEQ ID NO: 80837 - DNA, 42 bp, Homo sapiens
  chr10:129057987-129058029
  hypo
catgtcgctcctactccgagggtctcccgtttaggagggaat

SEQ ID NO: 80838 - DNA, 31 bp, Homo sapiens
  chr10:129059291-129059322
  hypo
tctgtatgtgtgtacccgtgctcatgtgtgt

SEQ ID NO: 80839 - DNA, 132 bp, Homo sapiens; identical to SEQ ID NO: 24664
  chr10:129065862-129065994
  hypo

SEQ ID NO: 80840 - DNA, 272 bp, Homo sapiens
  chr10:129144157-129144429
  hypo
tgctgggaattgtagtgcagacggtagtgaccaacacacacaaagcacagtgcggcacaacgcacttcaacgcactgtaatccaccaggtgcggacacacctccttcagcacgcgccccttgttgtcccgtccagcaaaaggacagctcggccacagcaggtgaagccacctgcccaagtgtccagcgcccgctattgggtgaagctgggacccgagcccagccacagctcctggcctcggagatgcctgcgggagaagagaggtgaattta

SEQ ID NO: 80841 - DNA, 31 bp, Homo sapiens
  chr10:129145541-129145572
  hypo
gacacagacctcgtgacgaagaaggtcatgg

SEQ ID NO: 80842 - DNA, 31 bp, Homo sapiens
  chr10:129145797-129145828
  hypo
acatgatctgggttgtcgaagtgtaagggag

SEQ ID NO: 80843 - DNA, 30 bp, Homo sapiens
  chr10:129151720-129151750
  hypo
tagctttgctgcctgcgtgctttccccaac

SEQ ID NO: 80844 - DNA, 92 bp, Homo sapiens
  chr10:129156701-129156793
  hypo
ctcctgagttatttatcaaagcgcactctgtgcagcagcctgccggagcacctgatctccttgcctgtgccgcctcaatttacattttgttt

SEQ ID NO: 80845 - DNA, 31 bp, Homo sapiens; identical to SEQ ID NO: 24665
  chr10:129159705-129159736
  hypo

SEQ ID NO: 80846 - DNA, 215 bp, Homo sapiens
  chr10:129165712-129165927
  hypo
gggactctctgtccagcgctgcagtgagtgccttaggtcagcttgacagcactcgctctggggaggtggcgatgaagctccacaaaaggctccaggctgaaggtccctgatgctagtggaagcctgctgtgaagtgtcgtgttctgcaggagctgggccagacagaagcctgtgagatgggaggccccagatgtgcacagcggccttgaattctt

SEQ ID NO: 80847 - DNA, 31 bp, Homo sapiens
  chr10:129176710-129176741
  hypo
gaggagtgggagcaccgcgtgaacctttacg

SEQ ID NO: 80848 - DNA, 95 bp, Homo sapiens
  chr10:129182942-129183037
  hypo
acatgtctccagaaccgcggcccacacgcgtgtccgatgcgaagctcacaccattctgacgtccctgggtgtttccgcctcgggtccgctcatgc

SEQ ID NO: 80849 - DNA, 31 bp, Homo sapiens
  chr10:129186940-129186971
  hypo
cacagaggaacacagccggagaggacagcaa

SEQ ID NO: 80850 - DNA, 31 bp, Homo sapiens
  chr10:129187397-129187428
  hypo
atgggctcctgacccccgtgactgcgatgtg

SEQ ID NO: 80851 - DNA, 31 bp, Homo sapiens
  chr10:129189357-129189388
  hypo
aggaatatttaaacagcgaaaatatttctga

SEQ ID NO: 80852 - DNA, 328 bp, Homo sapiens
  chr10:129195280-129195608
  hypo
ctgagcatgagttacacgggcggcgactcctatgtgatctgagcatgagttacacgggcagcgactcctatgtgatctgagcatcagttacacgggcggtgtctcctatgtgatctgagcatcagttacacgggcagcgactcctatgtgatctgagcatgagttacacgggcagcgtctcctgtgatctgagcatcagttacacgggcagcgactcctatgtgatctgagcatgagttacacgggcggcgactcctatgtgatctgagcatgagttacacgggcggcaactcctatgtgatctgagcatgagttacacgggcggtgt

SEQ ID NO: 80853 - DNA, 448 bp, Homo sapiens
  chr10:129195667-129196115
  hypo
agttacatgggcagcgactcctatgtgatctgagcatgagttacaagggcagtgtctcctatgtgatctgagcatgagttacacgggcagcaactcctatgtgatctgagcatgagttacacgggcggtgtctcctatgtgatctgagcatgagttacatgggcagtgtgtcctttgtgatctgagcatgagttacacgggcagcgtctcctatgtgatctgagcatgagttacacgggcagcgactcctatgtgatctcagcagcgtctcctgcatgacacaggtagtagctcctctatgacccgggcagcgactcctgtgtgacccgggcagcgactcctgtatgacacgggcagcgactcctgtatgacacgggcagtgactcctgtatgacacgggcagtgactcctgtatgacccgggcagcgactcctgtgtgacctgtgca

SEQ ID NO: 80854 - DNA, 197 bp, Homo sapiens; identical to SEQ ID NO: 24668
  chr10:129236891-129237088
  hypo

SEQ ID NO: 80855 - DNA, 201 bp, Homo sapiens
  chr10:129237714-129237915
  hypo
tccgcagggcctggggcgaggccgctctgctgctaggctctgccgctctgttggacttgtttcctacacatgtcctaatatcccagaagatgagcaggagtccttttgttgtcaggaaacagtccttggtgtccgctaatgccttccccttgccccttgctgactggaactcttctaagctagttacggcccaagtgttaa

SEQ ID NO: 80856 - DNA, 202 bp, Homo sapiens
  chr10:129241060-129241262
  hypo
tttgttcttgaccgcacggatgttgccccgtgtgtccttgctggctatctgcatgtcttgcaataatactcagccacttttgcatctatattcaggtcacctgcgatgtgctgtccagcccaggctgtgtgaggacagcagtgccagcccctcgtgtgggggaggtctgctgtaaccacatgctgggcggctccaaccccag

SEQ ID NO: 80857 - DNA, 777 bp, Homo sapiens; identical to SEQ ID NO: 24670
  chr10:129245251-129246028
  hypo

SEQ ID NO: 80858 - DNA, 91 bp, Homo sapiens
  chr10:129249787-129249878
  hypo
tgtgatgttaacatttcgtgcgactgctttttcttcaaaggagttcagttctcaccatggagtgagtggcctttagcgtcatggagcaagg

SEQ ID NO: 80859 - DNA, 30 bp, Homo sapiens
  chr10:129683351-129683381
  hypo
taaagaacagaaagcgaaaaggccaggtag

SEQ ID NO: 80860 - DNA, 20 bp, Homo sapiens
  chr10:129716803-129716823
  hypo
cagagcgagactccatctca

SEQ ID NO: 80861 - DNA, 100 bp, Homo sapiens
  chr10:129721601-129721701
  hypo
ggaagaacctcataatggaatcgcttgcctgttttgatcctgatgtgaaaaccagtttgaatttttttttttttttttttttttgagacggaattttgct

SEQ ID NO: 80862 - DNA, 30 bp, Homo sapiens
  chr10:129732977-129733007
  hypo
ggccgagccttccccgctctgtgcctgggg

SEQ ID NO: 80863 - DNA, 31 bp, Homo sapiens
  chr10:129833477-129833508
  hypo
gctcaaagcgatctgtcggcctgggcatcca

SEQ ID NO: 80864 - DNA, 85 bp, Homo sapiens
  chr10:129865328-129865413
  hypo
cacgtacacccacacacaggcacacacatgcacacacacgcacacaaccgtacaatgcatgcacgttcacacacacatgtgcaca

SEQ ID NO: 80865 - DNA, 223 bp, Homo sapiens; identical to SEQ ID NO: 24671
  chr10:129907593-129907816
  hypo

SEQ ID NO: 80866 - DNA, 27 bp, Homo sapiens
  chr10:129953932-129953959
  hypo
ggcgtgagccaccgcacccggccttga

SEQ ID NO: 80867 - DNA, 30 bp, Homo sapiens; identical to SEQ ID NO: 24672
  chr10:129964196-129964226
  hypo

SEQ ID NO: 80868 - DNA, 31 bp, Homo sapiens; identical to SEQ ID NO: 7794
  chr10:130009066-130009097
  hypo

SEQ ID NO: 80869 - DNA, 30 bp, Homo sapiens; identical to SEQ ID NO: 7795
  chr10:130009107-130009137
  hypo

SEQ ID NO: 80870 - DNA, 43 bp, Homo sapiens
  chr10:130123787-130123830
  hypo
tcataaataatttgttataaccgcagggtatcatgttaccatg

SEQ ID NO: 80871 - DNA, 284 bp, Homo sapiens; identical to SEQ ID NO: 24675
  chr10:130203289-130203573
  hypo

SEQ ID NO: 80872 - DNA, 53 bp, Homo sapiens
  chr10:130259850-130259903
  hypo
ttcagttcttgcctttggtcccggctgctgccggaactcctggtctgggctcc

SEQ ID NO: 80873 - DNA, 217 bp, Homo sapiens; identical to SEQ ID NO: 24676
  chr10:130300170-130300387
  hypo

SEQ ID NO: 80874 - DNA, 43 bp, Homo sapiens
  chr10:130577810-130577853
  hypo
caaggctgccaatttgagcaccggccaaactgcaaccagaccc

SEQ ID NO: 80875 - DNA, 303 bp, Homo sapiens
  chr10:130748863-130749166
  hypo
gtaaagtggagaggcatccagcgggtcccagcagctcagcccaccgtgctgctccctgcctcccaaagcctcccgaggccatgcaaggacacaggcaacatccgctaagcgcttcccccagagagcacaccgggaccctctggctcggccttacccttccccgcagagctaggacggtgcgcacaggccatggtagtgaggaattgccacgttgtggagaaggagaacctggcttcctgggagagagccgacttcagttgcccttcacaacacttagggcccggctgctgggggctaattagg

SEQ ID NO: 80876 - DNA, 30 bp, Homo sapiens
  chr10:130828614-130828644
  hypo
aaagcgccccagctacgtcgctgggcagcc

SEQ ID NO: 80877 - DNA, 135 bp, Homo sapiens
  chr10:130828960-130829095
  hypo
acatgcataatacggcggatgtgcccgctctgactgcagctcatttcctaagtcgcaagaaacgctggtatttttcaaaagtgatttcaaagaatttgtgtatgtgcatgtgtgtgcgcacgcgagcgtgtatga

SEQ ID NO: 80878 - DNA, 43 bp, Homo sapiens
  chr10:130911837-130911880
  hypo
gcagaaggaggataatggtgacgctgatccttgctgatggagc

SEQ ID NO: 80879 - DNA, 30 bp, Homo sapiens
  chr10:131263947-131263977
  hypo
atccaaggcagggtcggggtggggaacctc

SEQ ID NO: 80880 - DNA, 30 bp, Homo sapiens; identical to SEQ ID NO: 24677
  chr10:131264297-131264327
  hypo

SEQ ID NO: 80881 - DNA, 72 bp, Homo sapiens
  chr10:131301186-131301258
  hypo
cactttttctttttacggctctaccccgtatttcatttatatttaaaactgagttgacgaatatgaatacag

SEQ ID NO: 80882 - DNA, 43 bp, Homo sapiens
  chr10:131329867-131329910
  hypo
cagccattgcattttaggaatcggcactaaactaacttctact

SEQ ID NO: 80883 - DNA, 298 bp, Homo sapiens
  chr10:131348387-131348685
  hypo
cctgcatctgccatttgtgaacgtacagttgagcgacattagttggtgccatctgtgagtgcacagtgcagcaactttagggggttcacaatgttccgcagccatcaccgccgcccagcactggcatgtttcacagtgttccgcagccatcaccgccacccagcaccggcatgtttcacagtgttccgcagccaccaccgccgcccagcaccggcatgtttcacagtgttccgcagccaccaccgccacccagcaccggaatgtttcacagtgttccgcagccatcaccaccacccag

SEQ ID NO: 80884 - DNA, 140 bp, Homo sapiens
  chr10:131377659-131377799
  hypo
gcagagctttctgctcatccccggatcatggcagcgtcagatggaactcggcctgccccgtttctgtgcagctgtcaggatgtatggggttttcccatgctccgtgcctccatgcctgcggcactttggaaggacgttaa

SEQ ID NO: 80885 - DNA, 30 bp, Homo sapiens
  chr10:131378315-131378345
  hypo
ggctttgttcgacccgggtgggagggagga

SEQ ID NO: 80886 - DNA, 125 bp, Homo sapiens
  chr10:131412742-131412867
  hypo
agtgtgttcctggccctgacacgtgctcggcggctggtttttctccttcagatcagcggccttggacagctttcgcttctttggcagccgtttcaagctgctccgtcttgtcattttagagttca

SEQ ID NO: 80887 - DNA, 30 bp, Homo sapiens
  chr10:131504557-131504587
  hypo
tgggacggtgctcccggctgcatcggccgc

SEQ ID NO: 80888 - DNA, 190 bp, Homo sapiens; identical to SEQ ID NO: 24678
  chr10:131566933-131567123
  hypo

SEQ ID NO: 80889 - DNA, 192 bp, Homo sapiens
  chr10:131577564-131577756
  hypo
cgccctgcagtgtgggcgtgagtgcccgtgtggtcgtttatgtcgaggactgtatgctctgaccacgatgccacgtgacccagttcccaaacatacgaacccacgtctggacctcagtgtgacttaagaccaagggcccgagatggcaccgggtgcatccgcgtcggcgctgaattcgagccatggttgaaa

SEQ ID NO: 80890 - DNA, 393 bp, Homo sapiens; identical to SEQ ID NO: 24680
  chr10:131638467-131638860
  hypo

SEQ ID NO: 80891 - DNA, 535 bp, Homo sapiens
  chr10:131647409-131647944
  hypo
acagtgcatgaatcacggccgggactccgtccgactgcacacactgtgtttaacaagctttataaggagccatcgggctttattatggctctgcctgactccaacaaaaactgagcctggaggcccggggacacgagttaagatgaaaatacttattggagtacattacttcttgatgtagatggcgttttccgtggagtcactccacggtgcgtggcacaacataaatcagaggtttttcggagactaataagacctgccaccatctattcattactctgcctgcaatttgggccatcactcattagtaatttgatgattaacacgccccacctcagcaggtgtgcaaggtgcgggggcggacacaaagactgcggcttccggagaggacggctagggggccgcctttgcaagtgctctccaaaataattggtcaccgttctcgagtgcttgggcgtcggcgcatcttgtaagcaacgcaggaagcctcgcacgtacactcaataatgcgcccgaaagttgaggaccacaatat

SEQ ID NO: 80892 - DNA, 141 bp, Homo sapiens
  chr10:131660569-131660710
  hypo
actgcatcccagggctgggagcggtccaggtattccgccgtcaagagctccctgtgtccacttcggatgtggttgctatcgactgccaatatcttgtttagtaactgggttcagtctgtcgcagacaacatgttgactccc

SEQ ID NO: 80893 - DNA, 30 bp, Homo sapiens
  chr10:131666154-131666184
  hypo
atggccttgatgcacggagtggctgctcac

SEQ ID NO: 80894 - DNA, 30 bp, Homo sapiens
  chr10:131666993-131667023
  hypo
caggaggccagggccggggctgagggctgc

SEQ ID NO: 80895 - DNA, 176 bp, Homo sapiens
  chr10:131686724-131686900
  hypo
tgttcacaaggccgcggaggcccagtcccactggtgaatggccattgtgtttgtccagctactgatacctgcgcttttgtggaggaaagaaggccggggccacgacatcggcgcagcacaagcatccctctgtgcggatgcccagagcgggtcccggccgcggtgggaaccgaaca

SEQ ID NO: 80896 - DNA, 85 bp, Homo sapiens
  chr10:131694682-131694767
  hypo
gccacgcggccaccgtcagccaccctggcctggcgtcgcccgccattcctggcccctccgagcagctggctggacggggcggggg

SEQ ID NO: 80897 - DNA, 161 bp, Homo sapiens
  chr10:131694792-131694953
  hypo
cgacaggcccttgggggctgcccctgtccctgcacagcgagtggggggctggagtttgcaggacgtgctggggcgcggcctcctggcgagcctcccggaggcggtgcaccgtgcagcccttgagctccgctgacctcgccggtgcctttgtcttccctgct

SEQ ID NO: 80898 - DNA, 121 bp, Homo sapiens
  chr10:131713786-131713907
  hypo
tgctacgaagtgagtcggggagcccattcttgcggggtgtgacgtcccatgaagtttgttgtaacgagcgacagcccagacatcaatgctgggcgagcacagccgccgagagtgcgggaaa

SEQ ID NO: 80899 - DNA, 31 bp, Homo sapiens
  chr10:131718519-131718550
  hypo
gctgtgcagtctagggcgagtatctccagga

SEQ ID NO: 80900 - DNA, 238 bp, Homo sapiens; identical to SEQ ID NO: 7800
  chr10:131757614-131757852
  hypo

SEQ ID NO: 80901 - DNA, 390 bp, Homo sapiens; identical to SEQ ID NO: 47940
  chr10:131762946-131763336
  hypo

SEQ ID NO: 80902 - DNA, 250 bp, Homo sapiens; identical to SEQ ID NO: 47941
  chr10:131763632-131763882
  hypo

SEQ ID NO: 80903 - DNA, 847 bp, Homo sapiens; identical to SEQ ID NO: 7804
  chr10:131769490-131770337
  hypo

SEQ ID NO: 80904 - DNA, 31 bp, Homo sapiens; identical to SEQ ID NO: 24687
  chr10:131821309-131821340
  hypo

SEQ ID NO: 80905 - DNA, 30 bp, Homo sapiens; identical to SEQ ID NO: 24688
  chr10:131825391-131825421
  hypo

SEQ ID NO: 80906 - DNA, 592 bp, Homo sapiens
  chr10:131844031-131844623
  hypo
gcgattgcctcgactcgaggctcagctaaggagcagtcaggtccgtgtcacctgtggcttccactcccaggaagtctgatggctccggtcgtggctgttgtggggaatccgtcgtgtggagaacgtgcctgccacgtgcgggggagaaaggagccaccttccgagtacgcgacctcacctgccgggcgtgaggtgctggactgagaccagggtggggctctgggcatgggaggtggggctgggcgtggggcacgtggcacagagggatgcgcgtggtagggctcagggcagacggaacgtggaacagggagtggctcagggcatggggatggggcggggcgtgggacggggcgtggcgtggggcacaggaaggggcagggcacgaggagtggggcgagaggtgctaagtggggcctgagtggggcgcggggcgtggcgcggagtggggtggagcgggtggggcgaggctcggcgtgggacacgagggacgggacgcgggggcacggcaatgggtggcgcagggcgcactctcgggctccctgcaggtgggcagccccacctgtgcacgccgctcccccgcccagcgcctccc

SEQ ID NO: 80907 - DNA, 76 bp, Homo sapiens; identical to SEQ ID NO: 24690
  chr10:131936597-131936673
  hypo

SEQ ID NO: 80908 - DNA, 181 bp, Homo sapiens
  chr10:131937431-131937612
  hypo
gtttaaatgtaagtaccatttggatgttgtatccttgccgctggcctgtacttgaaatggcccaggaaacaatgtgcactttccttagtgactagttcaaacggacacgtgataaatgatgtgtggcatctggggaaggagcacatttctgcagcttttttggtgaagatggagacattta

SEQ ID NO: 80909 - DNA, 74 bp, Homo sapiens
  chr10:131975643-131975717
  hypo
ttccacctgccggctcgcattaacagcagtgagggtggcgaggactgccttatttggcgcgctcccaatgttcc

SEQ ID NO: 80910 - DNA, 97 bp, Homo sapiens
  chr10:131987177-131987274
  hypo
gatcctgcttctcccggatcacagcaagcgctgtgcttaggcctggggtgggggacggattctccctgaaggcaggtctgacgcgggcgggagcacc

SEQ ID NO: 80911 - DNA, 30 bp, Homo sapiens
  chr10:131993155-131993185
  hypo
ggttcagagatgagcgagaaggagcggtga

SEQ ID NO: 80912 - DNA, 39 bp, Homo sapiens
  chr10:132251718-132251757
  hypo
tcagctgctccgtgaacggccgtgcgctttcatctgtgc

SEQ ID NO: 80913 - DNA, 224 bp, Homo sapiens
  chr10:132365747-132365971
  hypo
atggcgtgacagccacatgtgcggggccggggaagtggaggctggctgctcctcacgggcactcgggtgaggctctctccacctcgcgcaggggctacccgctcgccgtgctgagcccttccagctctgccacgcgcaggaagccggtgcggtgacggcagcgcacgctcccaggcacctgcctttgcccacgccggggaggcgcttcctgtgagtcaggactc

SEQ ID NO: 80914 - DNA, 140 bp, Homo sapiens
  chr10:132869741-132869881
  hypo
gtgggcaaggtcctttattatcggagatgcatgctgatgacgacgtattcaagggtaaaatgtcgtgatgtcttacactcgctccacgtcttcgtgaaaatgtacgtgtgtgtgcacgcgcttgtatgtacatatggaca

SEQ ID NO: 80915 - DNA, 30 bp, Homo sapiens
  chr10:132873755-132873785
  hypo
cttaggcctccttgcgctgggcgcacccgg

SEQ ID NO: 80916 - DNA, 164 bp, Homo sapiens
  chr10:132958984-132959148
  hypo
cctcacctacccaggattcatcggcaaagacccacgccgagggaggggagtgcagcagccagggaaccgttttcatttgctggatcgcacgaagccttgctcatggtaacacaatatcgctggggaagaaagccgcagctttcgcagtgagaaggttctagggc

SEQ ID NO: 80917 - DNA, 235 bp, Homo sapiens
  chr10:132977108-132977343
  hypo
atgggactccactgtacactccgcagagctgcaaatgaattgtttaatgagaaggcaaagcggttccagcagagccccgctcactactcatgtatgctcatcagtgctcgtgcggtccctcagggacacactcctacgtgtcatcacggagggttccgtctcatgatggcaccagcccagcctccagcccctctgacagcaggggaggctgagcccgcgtcggcaccatgctggt

SEQ ID NO: 80918 - DNA, 193 bp, Homo sapiens; identical to SEQ ID NO: 24692
  chr10:132992256-132992449
  hypo

SEQ ID NO: 80919 - DNA, 31 bp, Homo sapiens
  chr10:133004437-133004468
  hypo
ctgccaatcgggtgtacgccaaggtccgcaa

SEQ ID NO: 80920 - DNA, 209 bp, Homo sapiens; identical to SEQ ID NO: 24693
  chr10:133058384-133058593
  hypo

SEQ ID NO: 80921 - DNA, 120 bp, Homo sapiens; identical to SEQ ID NO: 47947
  chr10:133110064-133110184
  hypo

SEQ ID NO: 80922 - DNA, 321 bp, Homo sapiens; identical to SEQ ID NO: 47948
  chr10:133110553-133110874
  hypo

SEQ ID NO: 80923 - DNA, 125 bp, Homo sapiens; identical to SEQ ID NO: 47949
  chr10:133110966-133111091
  hypo

SEQ ID NO: 80924 - DNA, 35 bp, Homo sapiens
  chr10:133146660-133146695
  hypo
tcgtcccccaggtcccggggcgagggcaggcacag

SEQ ID NO: 80925 - DNA, 30 bp, Homo sapiens
  chr10:133217038-133217068
  hypo
tgaagtcatgtgaagcgaagagcgaatttc

SEQ ID NO: 80926 - DNA, 33 bp, Homo sapiens
  chr10:133229419-133229452
  hypo
ctcccactccacaaccgccgtcgctcatgctgg

SEQ ID NO: 80927 - DNA, 31 bp, Homo sapiens
  chr10:133441393-133441424
  hypo
tttcccacgccctgttcgggccccactgtgc

SEQ ID NO: 80928 - DNA, 30 bp, Homo sapiens; identical to SEQ ID NO: 24695
  chr10:133448522-133448552
  hypo

SEQ ID NO: 80929 - DNA, 115 bp, Homo sapiens
  chr10:133514940-133515055
  hypo
cacccatgacctagacgtgtgttgttattacacaaaagagattacctgccttctgcctgcccagaagagaggtccccgtgggcagagctagagagcaacgcgggagtcagtaagc

SEQ ID NO: 80930 - DNA, 90 bp, Homo sapiens; identical to SEQ ID NO: 24696
  chr10:133557717-133557807
  hypo

SEQ ID NO: 80931 - DNA, 384 bp, Homo sapiens; identical to SEQ ID NO: 24697
  chr10:133783037-133783421
  hypo

SEQ ID NO: 80932 - DNA, 35 bp, Homo sapiens; identical to SEQ ID NO: 24698
  chr10:133790490-133790525
  hypo

SEQ ID NO: 80933 - DNA, 571 bp, Homo sapiens; identical to SEQ ID NO: 7811
  chr10:133795312-133795883
  hypo

SEQ ID NO: 80934 - DNA, 83 bp, Homo sapiens; identical to SEQ ID NO: 7812
  chr10:133795975-133796058
  hypo

SEQ ID NO: 80935 - DNA, 1 bp, Homo sapiens
  chr10:133796301-133796302
  hypo
g

SEQ ID NO: 80936 - DNA, 30 bp, Homo sapiens; identical to SEQ ID NO: 24701
  chr10:133797312-133797342
  hypo

SEQ ID NO: 80937 - DNA, 30 bp, Homo sapiens
  chr10:133799405-133799435
  hypo
taatccacctgcttcgttttagggaatctt

SEQ ID NO: 80938 - DNA, 197 bp, Homo sapiens
  chr10:133806788-133806985
  hypo
gttttcagttcttgccgctggcaaatcgagctgctgggaacgttcacattcatgtgccagcgtttgtatcgacatgttctttcatttcttgcaggtaaatgccatggagtgcagcggctgggtcgtatggggagggtgtgcttagctttttaaggagctgccatcgtgttctccaaagtgctcgcacatgttacttt

SEQ ID NO: 80939 - DNA, 280 bp, Homo sapiens
  chr10:133834564-133834844
  hypo
tacactctgaaagagaggattcggggtcggctgctcatgaggatgagacggcaaagactggaaggagggagattccctctatgggagtcttccatgattacgcatgaggaggtgcgagaggcgttgctgggaagcttgttccgggtgctcctccaggtgcgcacgcgcagtacccgtccacgcttgttcatacgtcgcctgtctcactagcgtcttcaacgccagggtcggtgtgaggacaggtaagctcacagtgcgcgtgctctccagaggggaaggt

SEQ ID NO: 80940 - DNA, 30 bp, Homo sapiens
  chr10:133872433-133872463
  hypo
ccttcgcatcgcgtcgcgcccacgtgagcc

SEQ ID NO: 80941 - DNA, 30 bp, Homo sapiens
  chr10:133878001-133878031
  hypo
ccgacccaccgttccgggtctgaatccagc

SEQ ID NO: 80942 - DNA, 163 bp, Homo sapiens; identical to SEQ ID NO: 24703
  chr10:133920808-133920971
  hypo

SEQ ID NO: 80943 - DNA, 30 bp, Homo sapiens
  chr10:133948426-133948456
  hypo
tggaggtaaaggcgcgcgtcccacggcagc

SEQ ID NO: 80944 - DNA, 30 bp, Homo sapiens; identical to SEQ ID NO: 24704
  chr10:133949194-133949224
  hypo

SEQ ID NO: 80945 - DNA, 30 bp, Homo sapiens; identical to SEQ ID NO: 24705
  chr10:133949902-133949932
  hypo

SEQ ID NO: 80946 - DNA, 30 bp, Homo sapiens
  chr10:133950885-133950915
  hypo
gacagaagcggccgcggcagcctttcgggt

SEQ ID NO: 80947 - DNA, 376 bp, Homo sapiens
  chr10:133951603-133951979
  hypo
cttcaactggcttccgcaggagcgggacaagctgttaagattccggaagcaaagaaagaaaatggcaaaacttcccaaggtaaggaacagcacaccggcacgtgcggagagtacgccgggtgtgtgcggagaggaccacgcccgcgtgtgtggagagcgctggtgtgtgcggagaggggtgcgccggtgtacgtggagggcgctgggtgtgtgtgccgaggaccgcgcccacgtgtgtggagagtatgccgggtgcgtgtggagaggaccgcgcccgcgtgtgtggagagtacgccgggtgtgtgcggagaggggtgcgccggtgtatgtggagggcgctgggtgtgtgtgccgaggaccgcgcccgcgtgtgtgg

SEQ ID NO: 80948 - DNA, 593 bp, Homo sapiens; identical to SEQ ID NO: 24707
  chr10:133953706-133954299
  hypo

SEQ ID NO: 80949 - DNA, 73 bp, Homo sapiens
  chr10:133955512-133955585
  hypo
gcaggttggagggacgctggacgcagagcgagaagttaaggtctacgtgacttccaccgcgcgttccggcccc

SEQ ID NO: 80950 - DNA, 31 bp, Homo sapiens; identical to SEQ ID NO: 24709
  chr10:133962081-133962112
  hypo

SEQ ID NO: 80951 - DNA, 449 bp, Homo sapiens
  chr10:133982427-133982876
  hypo
gagcagcccaggtggggatggcgggcgcaagaagggaaccgcggggacggcctttcccctcccgccctgtgtggggacgctgcacgagccgtggaccaagaggctgacaggtaagggctgccatctgtccgcggggagggcctttgcaccctccctgcgaggtgagctccagcttcttcacacctctgtgtccccgtctgcacatgcgtgacgctgccaccccgtccactgctgacccgtcaagatcacctctcccgccactgacgggacagggcctgggggctggtgtggagcgtggcgtgagctgtcgctggggcagggtctgcagacatggtgctccacggggacctggcgtctggcagagctggtcctcctcccacttgcaggaggaggcttgcgggaaaagggagaaaccccgtaggtgcaatgaggccgctctccgagtgcgc

SEQ ID NO: 80952 - DNA, 220 bp, Homo sapiens; identical to SEQ ID NO: 24711
  chr10:133983712-133983932
  hypo

SEQ ID NO: 80953 - DNA, 194 bp, Homo sapiens; identical to SEQ ID NO: 47959
  chr10:134000108-134000302
  hypo

SEQ ID NO: 80954 - DNA, 30 bp, Homo sapiens; identical to SEQ ID NO: 47960
  chr10:134001231-134001261
  hypo

SEQ ID NO: 80955 - DNA, 31 bp, Homo sapiens
  chr10:134002755-134002786
  hypo
gagggaaaagcgttgccgagtccagcccgtg

SEQ ID NO: 80956 - DNA, 30 bp, Homo sapiens
  chr10:134014521-134014551
  hypo
ggagcggctgtgggcgggattgtgatggct

SEQ ID NO: 80957 - DNA, 30 bp, Homo sapiens; identical to SEQ ID NO: 24713
  chr10:134016252-134016282
  hypo

SEQ ID NO: 80958 - DNA, 31 bp, Homo sapiens
  chr10:134019459-134019490
  hypo
cagccaacatccagggcgggacagaggcccc

SEQ ID NO: 80959 - DNA, 287 bp, Homo sapiens
  chr10:134024096-134024383
  hypo
acaccctgtaaacccacgaacagagtgtgggagatgcagaaggctgttctccgatgaacggttcagggatttgctgacgtgcgtcacactcggacgtgcccgccaagataaaggacaagcggtctcaccttgcgcctcttcccacgaggaaggaagcatagggctcaacacatttcttgggtttggggagcagctcacgttccccaccccgaggcagtgccctccgtgtctctcctggatctgtggtggtgtgagggtttcaccctggcagcgggaatgtggactct

SEQ ID NO: 80960 - DNA, 30 bp, Homo sapiens
  chr10:134035796-134035826
  hypo
catacctgatgctgacgcacctgggcgagt

SEQ ID NO: 80961 - DNA, 289 bp, Homo sapiens
  chr10:134036098-134036387
  hypo
ccaagcccagcccgccgccgcgccctgagcctgccctggcactcacggactgggagctgtccctgctgttgtcccgggacttgttcttggccagacgcttcttcttcttgtgcaggggcctggactccaggatcatctcctccagctcaaaggtggggtcgcagtgcagacggcctttctacagagggatgggtgctgagccccggcccgtggaggacgccacatccatccccagggccccccacctgagccgcccacaggcttacgttgggcacgaagcccggctcca

SEQ ID NO: 80962 - DNA, 31 bp, Homo sapiens
  chr10:134038356-134038387
  hypo
aggacccccagcctcccggtctccaggactg

SEQ ID NO: 80963 - DNA, 30 bp, Homo sapiens
  chr10:134041491-134041521
  hypo
caggaagacgtgctcgatctcctgcaggat

SEQ ID NO: 80964 - DNA, 31 bp, Homo sapiens
  chr10:134043176-134043207
  hypo
agtcacatcctggctccggggcccttactgg

SEQ ID NO: 80965 - DNA, 106 bp, Homo sapiens
  chr10:134044631-134044737
  hypo
tgctctccccgtcacacgcatcccatcacccacagccagggagcagggacagaagagccacctcgagacagggcctggcctcgcacacccacggctctgctgtcca

SEQ ID NO: 80966 - DNA, 31 bp, Homo sapiens
  chr10:134049933-134049964
  hypo
gcagccccaccgtgcacgggccccacacaca

SEQ ID NO: 80967 - DNA, 334 bp, Homo sapiens; identical to SEQ ID NO: 24715
  chr10:134053689-134054023
  hypo

SEQ ID NO: 80968 - DNA, 31 bp, Homo sapiens
  chr10:134057212-134057243
  hypo
ccgagagcggcggccccgagggtggagccat

SEQ ID NO: 80969 - DNA, 30 bp, Homo sapiens; identical to SEQ ID NO: 24716
  chr10:134065999-134066029
  hypo

SEQ ID NO: 80970 - DNA, 30 bp, Homo sapiens
  chr10:134072063-134072093
  hypo
tggctgggccagcgcgcaggccttcctctg

SEQ ID NO: 80971 - DNA, 30 bp, Homo sapiens
  chr10:134073292-134073322
  hypo
catggccggcattccggagcggcccctgca

SEQ ID NO: 80972 - DNA, 90 bp, Homo sapiens
  chr10:134116576-134116666
  hypo
agccagcgtggaaacggtcccactccagtcccacaggccgggagcagcaagggcgcagcctgcctggggctctgcggtgaggggctgcgt

SEQ ID NO: 80973 - DNA, 30 bp, Homo sapiens; identical to SEQ ID NO: 24717
  chr10:134117344-134117374
  hypo

SEQ ID NO: 80974 - DNA, 30 bp, Homo sapiens
  chr10:134120014-134120044
  hypo
ggaacggcggtgcacggccccacactcacc

SEQ ID NO: 80975 - DNA, 769 bp, Homo sapiens; identical to SEQ ID NO: 7817
  chr10:134120668-134121437
  hypo

SEQ ID NO: 80976 - DNA, 619 bp, Homo sapiens; identical to SEQ ID NO: 47965
  chr10:134121687-134122306
  hypo

SEQ ID NO: 80977 - DNA, 30 bp, Homo sapiens
  chr10:134161567-134161597
  hypo
caaggagctgtgaacgctcaggacccagag

SEQ ID NO: 80978 - DNA, 30 bp, Homo sapiens
  chr10:134161981-134162011
  hypo
tgtgcagtgagtgccggtcccaggtttagg

SEQ ID NO: 80979 - DNA, 105 bp, Homo sapiens
  chr10:134164630-134164735
  hypo
ctcccacatcacccagcgatgggattccgacctgctgcagcaccaccccatgcacctgaactccaggcacgtcacatcgtccagcccgggcgagctgctggccag

SEQ ID NO: 80980 - DNA, 45 bp, Homo sapiens
  chr10:134171805-134171850
  hypo
gagcgtggggaggagccgaggtgatggagcagcgtggggaggagc

SEQ ID NO: 80981 - DNA, 31 bp, Homo sapiens
  chr10:134176770-134176801
  hypo
cagctgctcgggggtccggggttcacccctc

SEQ ID NO: 80982 - DNA, 30 bp, Homo sapiens
  chr10:134184508-134184538
  hypo
gcccaccagcctgccgtatggaggcgggca

SEQ ID NO: 80983 - DNA, 31 bp, Homo sapiens
  chr10:134198071-134198102
  hypo
ttcttctcccctgcctcggctgaggccttta

SEQ ID NO: 80984 - DNA, 295 bp, Homo sapiens; identical to SEQ ID NO: 47966
  chr10:134209483-134209778
  hypo

SEQ ID NO: 80985 - DNA, 946 bp, Homo sapiens; identical to SEQ ID NO: 47967
  chr10:134210376-134211322
  hypo

SEQ ID NO: 80986 - DNA, 402 bp, Homo sapiens
  chr10:134212590-134212992
  hypo
cggttctctgcccttgtattccgagtcccagggctcctgtttccagccctgcctcggaccgcagggtgctgacctgccttccccaggtgccagtttctcatcagggcgtggtgcccgcccttatcccctgcatgtgacagtggaggcccagtccccaagtgtgggtgctgactcacagggaagagctgctgggagccctatgacaggtgtccgcccacctcagggaacctgtgggtcccagcacaaccggcgctgttgagcgcaggcggcgggcagccaggcacctgttcagagcaatcccacgggaatggcggccccgctcacacaggcgccgggatgcagggctgaggtgggcccagcagccagcgtttgttgtcggccggtttgggagatggcattctc

SEQ ID NO: 80987 - DNA, 30 bp, Homo sapiens
  chr10:134218393-134218423
  hypo
gtggctccgggacacgtacaagctgtgggt

SEQ ID NO: 80988 - DNA, 30 bp, Homo sapiens; identical to SEQ ID NO: 24724
  chr10:134218741-134218771
  hypo

SEQ ID NO: 80989 - DNA, 30 bp, Homo sapiens
  chr10:134219190-134219220
  hypo
agggtccacagggacgcgagggcttggctt

SEQ ID NO: 80990 - DNA, 31 bp, Homo sapiens
  chr10:134242153-134242184
  hypo
gtggaggggagaatgccgcctttggagaggt

SEQ ID NO: 80991 - DNA, 30 bp, Homo sapiens; identical to SEQ ID NO: 24725
  chr10:134246645-134246675
  hypo

SEQ ID NO: 80992 - DNA, 31 bp, Homo sapiens; identical to SEQ ID NO: 24726
  chr10:134252926-134252957
  hypo

SEQ ID NO: 80993 - DNA, 31 bp, Homo sapiens
  chr10:134253239-134253270
  hypo
tgtctgtgtgtgcctgcgtgtggatgcatgt

SEQ ID NO: 80994 - DNA, 202 bp, Homo sapiens
  chr10:134269925-134270127
  hypo
gcggccaccttggccacggcctccccaagacacgacatgctttgaggtgtgagttggtgctggccctgccatgtggctgccaccacaccgcttccagaccatgaggcccctcacacacgtgtggccagagtgtccgcacggcccagggacaggagcgtgtgccctccaggaggctgttctgaggctgcgtggcagggcatgg

SEQ ID NO: 80995 - DNA, 136 bp, Homo sapiens
  chr10:134273058-134273194
  hypo
gtctacagaacaactcagacccgccgcaggtgcctggtgatggtgggagctgtgttgcgtgcagtctggcggtgcacaggccacgtgctcctttctctgccgggctgcaggcttcggaaaggtggtggaggagtct

SEQ ID NO: 80996 - DNA, 44 bp, Homo sapiens
  chr10:134276611-134276655
  hypo
cgtggccagtggggatcgggtcaattccacgaggctccacatct

SEQ ID NO: 80997 - DNA, 82 bp, Homo sapiens
  chr10:134279121-134279203
  hypo
tccgtcagtcacaccgagcccagcctggggaaggccccagaagcaggagtgtgcagcctcacagaccgcacccggccctccg

SEQ ID NO: 80998 - DNA, 106 bp, Homo sapiens
  chr10:134279497-134279603
  hypo
ccaggcacccggaccacgcagggggccttgtgcaggacaggggtcatgtctggtcccgtccaggtcaccttacaggtgagacgcccgggcccgcaggttgaggccg

SEQ ID NO: 80999 - DNA, 107 bp, Homo sapiens
  chr10:134280449-134280556
  hypo
aagccagtggggccatcgccttggtgcaggttccgtgggaaagggtcctttttccaacggggcgggaagaggtgccaggcagatggaagtctcggtttccccaaagg

SEQ ID NO: 81000 - DNA, 112 bp, Homo sapiens
  chr10:134292418-134292530
  hypo
agcatgtgagtggctaagacacgtgtttgctcccacagtgctggaggccacgtgcctgcagtcaaggtgtcagcagggccacgctccctccgaagcctctgtccctcagggg

SEQ ID NO: 81001 - DNA, 384 bp, Homo sapiens
  chr10:134300835-134301219
  hypo
tacctccagctggtgaagagtcgcaccaggtgtgggtgcaggaggacgtctggttagaggtcagaggcgtcatccccaaccccggccgatgttatcttacgtgcggggaaaggcaaggactggactcgttcatcttttacggaacgtggtgagtcaggcaagagacccgggccctgtgctccgtcctgttttgtcttcgatgcttctctccggtgagctgcaggtggccacagagtcaggcttgggaagctgtgccgcaagcgggaatgagtggacggggctgctcacgcggctgcttttccgtcacggatgccccacccggtcctgtgcgggaggccctgttgaggtgagctccgccctgccgagtgtagggactttgcctcc

SEQ ID NO: 81002 - DNA, 54 bp, Homo sapiens; identical to SEQ ID NO: 24731
  chr10:134302491-134302545
  hypo

SEQ ID NO: 81003 - DNA, 86 bp, Homo sapiens
  chr10:134304826-134304912
  hypo
agaacctgcatggacacggaacttgtgtggacacaaaaccgcccaaagcccatgctttgcatcagtgttcacgcttgcttttttct

SEQ ID NO: 81004 - DNA, 31 bp, Homo sapiens
  chr10:134344093-134344124
  hypo
tcttaatctattaatacgatatattaaattg

SEQ ID NO: 81005 - DNA, 123 bp, Homo sapiens
  chr10:134346518-134346641
  hypo
atggagtaagtctgacccacccggcaggagtactgaagagcgatgattattagacgctagaaatgcactttacggctgcgcagtgctagacgcagacatgccgcagggcaccttctgaatctg

SEQ ID NO: 81006 - DNA, 771 bp, Homo sapiens; identical to SEQ ID NO: 47970
  chr10:134351008-134351779
  hypo

SEQ ID NO: 81007 - DNA, 30 bp, Homo sapiens
  chr10:134359202-134359232
  hypo
ggaatctcagagcccggtgggaaccaggaa

SEQ ID NO: 81008 - DNA, 249 bp, Homo sapiens
  chr10:134370570-134370819
  hypo
tgtatgctgtgacaccggtttggtaggtctgagtggagatttggtcagttccgcctaaaggccgacgggcccggctttctggggagaaggttttcccttgcagaggggtatcctttggtgtctgttgccgctgtgaccgactgtctcacatgagggatggagtccaggctgaggcaccctcgcccggggccactgtgactcccatggagcctgggatttgttccggttaggccacgggtcacagtgctc

SEQ ID NO: 81009 - DNA, 30 bp, Homo sapiens; identical to SEQ ID NO: 24732
  chr10:134400336-134400366
  hypo

SEQ ID NO: 81010 - DNA, 30 bp, Homo sapiens; identical to SEQ ID NO: 24733
  chr10:134421015-134421045
  hypo

SEQ ID NO: 81011 - DNA, 56 bp, Homo sapiens; identical to SEQ ID NO: 24734
  chr10:134421292-134421348
  hypo

SEQ ID NO: 81012 - DNA, 46 bp, Homo sapiens
  chr10:134421770-134421816
  hypo
atccccagtggggccgtggagagctggcagcgaggctgggtgtgct

SEQ ID NO: 81013 - DNA, 56 bp, Homo sapiens
  chr10:134427567-134427623
  hypo
cagtcgtgagcaccctcgacgcctttgggacccacggctttcgaagattaggtcca

SEQ ID NO: 81014 - DNA, 30 bp, Homo sapiens
  chr10:134455848-134455878
  hypo
tccacgcggttcgccggccatcctctcgca

SEQ ID NO: 81015 - DNA, 37 bp, Homo sapiens; identical to SEQ ID NO: 24735
  chr10:134457708-134457745
  hypo

SEQ ID NO: 81016 - DNA, 202 bp, Homo sapiens
  chr10:134459515-134459717
  hypo
gtgtggggtgccggcgggggtcttttcatggtactatgatcaccagcctcaccattcgggactcacctgggggtcatcttggctgagtctcagttttccaaagagaggagtggcccagacgtgtggccacgagcctccttggggcggcgacagaaggccacggagtgacagcctgctgcctccacacggcgagggtctgtgc

SEQ ID NO: 81017 - DNA, 56 bp, Homo sapiens
  chr10:134460289-134460345
  hypo
gctctgtgggccgacgccgctgccacacactgtgggccgacgctgctgccacgctc

SEQ ID NO: 81018 - DNA, 31 bp, Homo sapiens
  chr10:134466578-134466609
  hypo
ccgacagaaggcacccgcgtgctgggccctg

SEQ ID NO: 81019 - DNA, 30 bp, Homo sapiens
  chr10:134466859-134466889
  hypo
aggtgggtccggagcggcctgtgcttaagg

SEQ ID NO: 81020 - DNA, 40 bp, Homo sapiens
  chr10:134467310-134467350
  hypo
acggcagccttcagcgcggggagcacggcgccccccgtca

SEQ ID NO: 81021 - DNA, 30 bp, Homo sapiens
  chr10:134473537-134473567
  hypo
gcgctccgccgacgcgtggcccacggcacg

SEQ ID NO: 81022 - DNA, 139 bp, Homo sapiens; identical to SEQ ID NO: 24736
  chr10:134477317-134477456
  hypo

SEQ ID NO: 81023 - DNA, 379 bp, Homo sapiens
  chr10:134481124-134481503
  hypo
ataatgacatttgaatcgagcattaacaggcttaattactttaaaattgtcattttaatttacactgatatagtattgatcatacaagcagagattaagctgttcagtggagcagatgatggggaattaaacattaaagggtcctcagggggccgtgtgcgctgcccggcgcgagccggaagagggatgatatttctcggtaatgaactggcggcatgcggggacatgaatcttgggctcttggaaaaggggaaataatggggtttgggaggcatttgcaggttattcattcgccgccatgcaccaattctccagtgattcatccgcctcaccaacatttatttatccagcaaattccggagctttgacctttttgcta

SEQ ID NO: 81024 - DNA, 374 bp, Homo sapiens
  chr10:134491021-134491395
  hypo
agtgctggtagcaggcgagaagccaggactgctggtcaccttgccgccctcagatgtaccccctttggagaagcctgccgcaggctgttttacaggccatctcgttccatttcagttgctcctcaccgtggtaatcggaaatgttaacgggcgcactcgtctggtggaatttatcgtggccagcgagggcgattaagcggctggtatgtggcgtgtttaccctcgtgtcagcatgactggtgttccaccctggcagatgaaggcccggtccttcctgggctcctaattggggacactacatccaagagccgtgacagggttcagcaacccgcgtgcagaatgccggcttccacggggcacgctttataaaatgc

SEQ ID NO: 81025 - DNA, 360 bp, Homo sapiens
  chr10:134499450-134499810
  hypo
aaatactccatcttcactagccgcccctgtgagaggcactgagcccccatggtacgcagggttcgttgcgccctggtcgccagttggtgtggaagcctgatggtggtgactgggagcttcagttgcccattagctcccaggctgccttcagagaccagggtcccaccagtgcagccccagccagggcccaggttagccggggtctggatctcctgtgtggcccgcaccggatcgacttttcggtgccccaggggcttggctttgtccagtggaggccgcttcccggctgtgccgtggcctccgggggctggaggactcctgcccgtgtctgcagtcctcgcagaagcatcacagctaatg

SEQ ID NO: 81026 - DNA, 406 bp, Homo sapiens
  chr10:134503265-134503671
  hypo
ctgtggcgtccagccgcgtacttttgccttctctggtatgaagagcagggatccctgtgctctgcaaccatccggctaatttgtaagtgggagacactggcagctcctggggcgatggggcagggtggggccaggcgcagtggagctgatggttggaggccccaggacgaagccgagcatcagtgctgggaagggtctggtccactcaatgcccggccggtgggacctgcgcccctgctggagccagcaccggctgcacggctcacctgggaagggtctggtccactcaatgcccagcccgcgggacctgcgcccctgctggagccagcaccggctgcacggctcacctgggaagggtctggtccactcaatgcctggcccgtgggacttgcgtccctgctggagc

SEQ ID NO: 81027 - DNA, 193 bp, Homo sapiens
  chr10:134504488-134504681
  hypo
ttgtgcgatgacttcccgtctgacgctatcgtttcctgctgtgtgtgagttctcagaaccccacgcggcctccggagcagatgacatccatgtgaagtgccctgcacgtcgtagtaactgtggagccacaaacgatgtcgtttcgttcggattccgtgtttgtgctccctcgggagacggagcggctcctgtg

SEQ ID NO: 81028 - DNA, 31 bp, Homo sapiens; identical to SEQ ID NO: 24740
  chr10:134517986-134518017
  hypo

SEQ ID NO: 81029 - DNA, 30 bp, Homo sapiens; identical to SEQ ID NO: 24741
  chr10:134527157-134527187
  hypo

SEQ ID NO: 81030 - DNA, 125 bp, Homo sapiens
  chr10:134528538-134528663
  hypo
ggctcttggaggcgccgagcactcagcccgtgttgggggcagccccggtccctctcctggacacacaggtcagcccttggggggcatctgggggctgagccagaggtgcacgtcagccttcctag

SEQ ID NO: 81031 - DNA, 558 bp, Homo sapiens
  chr10:134529077-134529635
  hypo
cagttagctgtcagccgctcaaagagcccccaacctaaatgtttctctttagacgttcccagaacttgccttgctgtgcagccagtaaagaaaagctgctgcgtctccaggcaaaggcaaactcggcattaaagatctgggtcaccctgagcgctcctggccacagggctggttctcgcgctcctcacactcccgctggcctcggagaacagctcacaggctcttgctggtcgtgggctcgtcccaatcaggctttctcagactcggagacctcagggtggccgaggtcatgtgtctgtggagcccaccaggcaccctgtggtgtccctccgcatgcccgggactcctggcagcacaagcccgtgccctctgccgttccgctgccgtgaagcccgctgcctctgtgtcgccttagcctctccagggcgtggtcggtccactgctgcccggcaggaggggctcctttcgcctgtgcctcagctgatccatggctgcgatcttcattttgttgaacatggagtcaagagccaagaaaggtggtgccgctatgcagatgca

SEQ ID NO: 81032 - DNA, 50 bp, Homo sapiens
  chr10:134540683-134540733
  hypo
ggagctgctggagtgccgtcacagcgccaccccctcgatgcccacagagc

SEQ ID NO: 81033 - DNA, 239 bp, Homo sapiens
  chr10:134542066-134542305
  hypo
gctcatttctaacctgttactcgagagccagtgagtccacagtgcacataagtacttcccgctctgactgggaggggccaggatgaaagtcaagaagaacccgcgaaagaccaaagccgatcaatcccgggcgcccagcaattggggaaaggtcagggagcttggaaagggccttttccttctggtagagcaaatgtcacagtaaagggcagctggtcctggccgggtcagagccgtgg

SEQ ID NO: 81034 - DNA, 30 bp, Homo sapiens
  chr10:134543856-134543886
  hypo
agacccagtgcagccgggtgggctggtgga

SEQ ID NO: 81035 - DNA, 30 bp, Homo sapiens
  chr10:134544190-134544220
  hypo
acagtaagcaggaacgtggcagagctcctg

SEQ ID NO: 81036 - DNA, 30 bp, Homo sapiens
  chr10:134544993-134545023
  hypo
tcctgcgtatcagacgaccctgggagtgac

SEQ ID NO: 81037 - DNA, 68 bp, Homo sapiens
  chr10:134546238-134546306
  hypo
gcccctcagtgctgcgtggcacctccacgtggccatgtcgcttcctgtgggccgcagacacgtgcagg

SEQ ID NO: 81038 - DNA, 30 bp, Homo sapiens
  chr10:134547441-134547471
  hypo
atcctgggctctcccggacctgcgagtctc

SEQ ID NO: 81039 - DNA, 30 bp, Homo sapiens
  chr10:134550043-134550073
  hypo
ggcttcccaaaacacggctctcaatgggca

SEQ ID NO: 81040 - DNA, 30 bp, Homo sapiens
  chr10:134553173-134553203
  hypo
caagaagctgcacacgtgtgtgccatagga

SEQ ID NO: 81041 - DNA, 173 bp, Homo sapiens; identical to SEQ ID NO: 24742
  chr10:134559538-134559711
  hypo

SEQ ID NO: 81042 - DNA, 150 bp, Homo sapiens
  chr10:134562754-134562904
  hypo
agcagctctgtgggcggcagcagctccggggtgtcctcacggttgcagccacgctttgttggggagcagccagcctcaggcccttcgcacgtgtgagggtcggctgttgcgggagtggcccctgaccccaggtgcggaaatctgggtgtg

SEQ ID NO: 81043 - DNA, 123 bp, Homo sapiens
  chr10:134566207-134566330
  hypo
gcgtggaggcggtgcggcatggaggggtgtgtctagagcatctgggagcaattgtctttcatgtggatccaaagtcctccttttctctcagcattttgacacagagcacgcccctgctgtcgg

SEQ ID NO: 81044 - DNA, 30 bp, Homo sapiens
  chr10:134567744-134567774
  hypo
taggtgggaagacccgtggggtaaagaccg

SEQ ID NO: 81045 - DNA, 30 bp, Homo sapiens
  chr10:134571362-134571392
  hypo
ccacaacacagtgccgtggtgtgggtcccc

SEQ ID NO: 81046 - DNA, 30 bp, Homo sapiens
  chr10:134573012-134573042
  hypo
cctggggcttcgctcgctgctgtgctgtgg

SEQ ID NO: 81047 - DNA, 59 bp, Homo sapiens
  chr10:134575251-134575310
  hypo
caagacccaccaaagacgatcttacagttgcaaactgtgaaccacgtaaggacacattc

SEQ ID NO: 81048 - DNA, 145 bp, Homo sapiens; identical to SEQ ID NO: 24745
  chr10:134577902-134578047
  hypo

SEQ ID NO: 81049 - DNA, 30 bp, Homo sapiens
  chr10:134578984-134579014
  hypo
gccacggcagtgcccgaggccatgagtgct

SEQ ID NO: 81050 - DNA, 31 bp, Homo sapiens; identical to SEQ ID NO: 24746
  chr10:134580978-134581009
  hypo

SEQ ID NO: 81051 - DNA, 30 bp, Homo sapiens; identical to SEQ ID NO: 24747
  chr10:134582063-134582093
  hypo

SEQ ID NO: 81052 - DNA, 101 bp, Homo sapiens
  chr10:134583321-134583422
  hypo
tgatacgtgtggctcccggtacagcccaggctcaggtggcggcgatttggacaccccagtggtagcatggagctgctgcctttttgcgcatcctagctaga

SEQ ID NO: 81053 - DNA, 30 bp, Homo sapiens
  chr10:134589474-134589504
  hypo
cagtggacgtgtgtgcggatgcaatggaca

SEQ ID NO: 81054 - DNA, 242 bp, Homo sapiens
  chr10:134589800-134590042
  hypo
tggctcccgctggagcgcgcggaggatgggagctcctgcgtcagggcagagcaagttcccagtccccggctgtttccaggtggttgggcacagggcccacaggcgcccctgtgggcagggtccggggggcatgggaggggctgcagaatccgcagctgaggtgccgggatggacccgaaacccaatcacagccaacagggaaatttcacagagaatcagatcccagtcgcgacaggtgctgt

SEQ ID NO: 81055 - DNA, 34 bp, Homo sapiens
  chr10:134590302-134590336
  hypo
ttgcgtgttccagactcggcgggtagtgggggcc

SEQ ID NO: 81056 - DNA, 30 bp, Homo sapiens
  chr10:134590757-134590787
  hypo
cctgcacttacaggcgtttcgagctgatcc

SEQ ID NO: 81057 - DNA, 30 bp, Homo sapiens
  chr10:134592900-134592930
  hypo
cccctgggaaaacgtcggaggtcacgcgag

SEQ ID NO: 81058 - DNA, 343 bp, Homo sapiens
  chr10:134593221-134593564
  hypo
gcaggacaagcagacgggcgccgggcgcgctccgcagcctcatccatcatgacacgcgccgtcacctcgtcaccaagctccgttctgcctccggagccctaaaacaccaaaaggggctcgggacgcgggcggtgctgcttggggagcctcggtgacaagtgttcagtgaggtgtgccgcacgctgcctgtgcccgccgtaatttgtttatctgtccaaagattatgcagttgaaaatccacaattttatgctgcctttgtaaattaccacgctgcgtttgatgaatgtttctccacttctgcggaggcgccgcttcacccgcgagaggcgggaaggtgctcat

SEQ ID NO: 81059 - DNA, 30 bp, Homo sapiens
  chr10:134595431-134595461
  hypo
gtgtcgtgcagtgacgtggtggtaaatatg

SEQ ID NO: 81060 - DNA, 418 bp, Homo sapiens; identical to SEQ ID NO: 47978
  chr10:134602127-134602545
  hypo

SEQ ID NO: 81061 - DNA, 18 bp, Homo sapiens
  chr10:134606019-134606037
  hypo
aaccgtatgggtgcagca

SEQ ID NO: 81062 - DNA, 8 bp, Homo sapiens
  chr10:134606291-134606299
  hypo
accgggca

SEQ ID NO: 81063 - DNA, 34 bp, Homo sapiens
  chr10:134606520-134606554
  hypo
tgacttcggccctgacgcccgcctgcgttgcccc

SEQ ID NO: 81064 - DNA, 413 bp, Homo sapiens
  chr10:134607750-134608163
  hypo
cctcccagtgatggacgcctccacaggtcctcggggccccttcccgtccaggtcttcacagaggccccggcactgggtgcccagtggcctcggcagccgtgtctgcgtgacagaagccgagcgtgggacggctccagctcaggactgtctgagccccaccctgcgagggtgctctgagctctcagggcgttgcttctttgcccatttatcccgggtcttgggtgagttccagtggcggacagagctcagacaagagcagtgctcgcagcagcgccagcagggacagtggcaatacgagggtcacaggtgtgatcggaggccgccagcctgtgctgggtcaccgtgcggtgccagtgaaggtgccctctgcccaggagctgtgggggagccgggggtgccgccaggacgcagtg

SEQ ID NO: 81065 - DNA, 442 bp, Homo sapiens
  chr10:134610519-134610961
  hypo
tccttccctgggagccgtcaagcatgaacctggatgtgcctggcctggtcccgggccctcagcctcccaacgcccctgcgcccgttctcactggcacggctcagtgtccacaccgggccagcagcgcaggaactggaggctctgcttcgtgatttccgcagtggcagatgacaggaatcaggttcctgcgggtggcagcggatgggggtgcagaactgcctttttgctgtttgcctgtttaccctctttgtgcccgcgccaaggtgggagccgctacacccagggaggcgctggagcgtgtgcggaggtcagagcctgatgccgcctcggtctctgggtgccggggcagccattccttcaaacaatggggtgcttccaaaccggtgcctcgtgaggaattgggaaagacaggagattgtcatcatcacgagagacaaaaccc

SEQ ID NO: 81066 - DNA, 30 bp, Homo sapiens; identical to SEQ ID NO: 24753
  chr10:134620261-134620291
  hypo

SEQ ID NO: 81067 - DNA, 30 bp, Homo sapiens
  chr10:134621100-134621130
  hypo
agttgggtgggtgccgagccgggcgagtgg

SEQ ID NO: 81068 - DNA, 30 bp, Homo sapiens
  chr10:134639806-134639836
  hypo
agccaggcaggagtcggagccacggagcca

SEQ ID NO: 81069 - DNA, 30 bp, Homo sapiens
  chr10:134640755-134640785
  hypo
gagaaggggctgaccgtggcctgtgatgga

SEQ ID NO: 81070 - DNA, 30 bp, Homo sapiens
  chr10:134651606-134651636
  hypo
gcaggcagcagctccggcccgtccgctccc

SEQ ID NO: 81071 - DNA, 30 bp, Homo sapiens
  chr10:134659533-134659563
  hypo
ggttcagcggcatccgtgcccgcttacctt

SEQ ID NO: 81072 - DNA, 148 bp, Homo sapiens
  chr10:134663731-134663879
  hypo
aagcaggagcacctaccgaggggcccgcctcccagtagcaggtagggtgcacagggtcagcttgcatggccagcaggtgcagggccctcccggccaggcccaggagccgggcgcggatctccacacagcccacgctcagcggctgcag

SEQ ID NO: 81073 - DNA, 385 bp, Homo sapiens; identical to SEQ ID NO: 24754
  chr10:134664872-134665257
  hypo

SEQ ID NO: 81074 - DNA, 166 bp, Homo sapiens
  chr10:134671582-134671748
  hypo
aacttctgcaaggacaatgtacgacatccacagtaacagacacggctcaggtcagaccttgtggtgggttatgcttccctcgcgcaggcttctacacgcccgcactgggcccgccgtgtcgagacgcttgcgtgtggacaagtccgggggccataggttgggggca

SEQ ID NO: 81075 - DNA, 30 bp, Homo sapiens
  chr10:134672397-134672427
  hypo
gcatgtgatcagaacgtgtgggtgaggcgg

SEQ ID NO: 81076 - DNA, 30 bp, Homo sapiens
  chr10:134672849-134672879
  hypo
gatgctcggagaaacgctttcggagcattt

SEQ ID NO: 81077 - DNA, 30 bp, Homo sapiens
  chr10:134679441-134679471
  hypo
gcccaagcttctgcccgcagtccctccact

SEQ ID NO: 81078 - DNA, 30 bp, Homo sapiens
  chr10:134679683-134679713
  hypo
taccgcagccccaggcggcacgatcctgac

SEQ ID NO: 81079 - DNA, 119 bp, Homo sapiens
  chr10:134680048-134680167
  hypo
ctgcggctgtgcacccggccttgctagggcgccccgggtgtgggccggtggctgagcccctgcactaggatctgggcctaccccgcatccccccagcctctcctcgctaagcagagccc

SEQ ID NO: 81080 - DNA, 770 bp, Homo sapiens
  chr10:134680971-134681741
  hypo
cttatttttctcttttttcaacgcgatctcttttctgcagctaatgcgaggaaaacagacaatacgcaagagccacatggccacgaaaatgtcccttcacgagtaaccaaagaaacgcaaacgaaaacagccacaattacattcttcacgcgcgtgtttacaaagatttttaaaaatcctcaggatctaacggcacatccgactcccaaatttgtgtccatcactggttctctcttccaaactccaaggtcatgtccagctgctgtttgacagccaggggtgtttaatgagcatctccgactccatctctccggcgtgcccagccccggccccgctgtgcctcccgcgggcacccccaccggaaagttcggaaccaactacaggtccctgggtgggctcctgctccccgctcggccttcccacggggtcttcaaggtgtctgctaccttccccttcgctgctccacctggccccggccacggcccccggctgtcccgccttctcctgtgccatgaacaccaggtcctggccatttgccacagcacgtccagagaggtcctttagaaggcaggccagcagggggtcacagcagaggtcaagacccagcaggcccagccccagggcgttttcgtcctctgacctctgaccctctcccgaggcctgcacgcccctctgcccaggcctccccggccacgcgcgttccaagtcgaggtgccccttgccgccgagacgtcgctgctcccagcacaccacatcgcgctggccacccc

SEQ ID NO: 81081 - DNA, 646 bp, Homo sapiens
  chr10:134682471-134683117
  hypo
gcgcccagcacccagcgcccaagggtccagggcccggcagccagcctttctgtcctccggggaggggctcgggccaccctggagagcccccctcaccgcccctccctccctctgtgaggagcacctccccacaacccacctccagcacgacccaggagaaccggccacagccgtgtcccccaagtgctcactctccccagaggggcaggagtccagggaagagggtggccgcgcagctggctttcacctggccgcaccaagggcgagactcaaaccccaggcggcgcagggtgggacggcacacacctggcctgctccagctcgctgacgcacacctgcccgaccgcctcttcatggcgcgcggctgcttctctcagcttcagctcggagcacgcgtgggcgaggctgtggggagtgtggccgaaagagtcagtgttgcacgggcgcagagggagccagaaacgaagctactagtgtgcttcacagaaaacggtcaactaacacatcgaggcacacttggatggtattttcaatcatttttaaaggtaagcgaaattactagggaaaagtgcccggtagctccatcaaatttcaagtgggattcttctcccgctccttcacagatctcgtgcgaggcattatctgt

SEQ ID NO: 81082 - DNA, 82 bp, Homo sapiens
  chr10:134683495-134683577
  hypo
gaccaagtccatcggcgccattttcccacagcacctgctcactcggtgtctctgtgtcacattttggtaattctcaaaatat

SEQ ID NO: 81083 - DNA, 77 bp, Homo sapiens
  chr10:134683636-134683713
  hypo
gttaccattgtaattgttttggggcaccatcagccacgcccatatgagacggtgaactgagtcgataaatgtcccgt

SEQ ID NO: 81084 - DNA, 30 bp, Homo sapiens; identical to SEQ ID NO: 24757
  chr10:134698646-134698676
  hypo

SEQ ID NO: 81085 - DNA, 119 bp, Homo sapiens
  chr10:134699879-134699998
  hypo
ttggtgcccgcagcacgggaacaatccccgagtctccacgcaggcagcggagccatgtgacacgcagaggcaaaggtgcctgccttcagggcacacacaaaaatcgcctgcctgccggg

SEQ ID NO: 81086 - DNA, 30 bp, Homo sapiens; identical to SEQ ID NO: 24758
  chr10:134720519-134720549
  hypo

SEQ ID NO: 81087 - DNA, 31 bp, Homo sapiens; identical to SEQ ID NO: 24759
  chr10:134722344-134722375
  hypo

SEQ ID NO: 81088 - DNA, 44 bp, Homo sapiens
  chr10:134723476-134723520
  hypo
cttgacccaggtggcgataagctgctgccgggtgccggtgggca

SEQ ID NO: 81089 - DNA, 179 bp, Homo sapiens
  chr10:134724607-134724786
  hypo
ccacagctgcctgagccgcccacggcgccctcccctccgcagcctccagcctgatccctgtaggtccccggagccggccccttgtcccttctcggaagaacgacctgcacctgatgccacagccggtgttcctggccggcccacactgactgcccagggccagccgtccccactgggag

SEQ ID NO: 81090 - DNA, 992 bp, Homo sapiens; identical to SEQ ID NO: 24760
  chr10:134732864-134733856
  hypo

SEQ ID NO: 81091 - DNA, 63 bp, Homo sapiens
  chr10:134734085-134734148
  hypo
gatgttccgaatcaccgctccttttcctggcaaataatcacgagcacccggaactcagctcca

SEQ ID NO: 81092 - DNA, 360 bp, Homo sapiens
  chr10:134734566-134734926
  hypo
ccttcccttgcagggcgcgacccaccctgcgtctgcccatctcctcgtctcagacccgagacatgacccagcagctccactcccgaccaccatctccacaggctgcagtctgggtgacacctggttcgtcgtgctgggtgaaagccgccggctgctgggcactgagctggagggaggcctggcagcagcccccagcaggaccctcaggggaccagcgggaagggctcccaagccaggcccagcctggcccctgcactgggctggagagagtggggccgcctgcgttcccagagccactggcgagtgcccagagaagctcgggcagtgaggatgcaacacacctgccgaaccctggctcag

SEQ ID NO: 81093 - DNA, 155 bp, Homo sapiens; identical to SEQ ID NO: 24761
  chr10:134736023-134736178
  hypo

SEQ ID NO: 81094 - DNA, 1460 bp, Homo sapiens
  chr10:134738017-134739477
  hypo
ccacagaggacccgacgtgcctggcccggagctgggacagagggtggcccttattgagtacagggggagtctgttgcttgtggcactgtcatggcaagggggcttgggccaccttctcctcctctgtctcctcctatgcgccacgccctctgtggaggacacagcacaggtgagcgccccacctgtccagcttctccagcacgtccgcaacgccagccaggggcttccgcaggtggtgccgcaggttgtgctgcagcaggggcaggcaggtgttccactgcgtggcgcacaccacgtggatgacccgggggtcgcccaggcgcacggctcgctgcagcgcgacgtctagcctctgtatgatatccagctgggcctgcggagaagacgtgggggattctagggaggttgctggctcgagctgcggggctggggcggcacctgcgtgcagggcacactgagaacgcaggccctaaattcatcaccctgcgtggcgtcatgctcaaatctgtccgtgaaaatggccagagtgactctttctaggaggaagtggacgtctcacaagatattacatgcaggaggcttggcggtgcccacacatcgtggctgcgcccgcctcccccgtgtggactcagcgggcgctgctcccttcctgatcccgtctctttcctggggcctgtgctcgctacgcttcccacccccagaatgcctcctccggtctgtgctacacgggcccttcccaggacaaaggctttggccaggatttcagtggagcagtctccccacactcccacctcccacaagccctgctggaccgcccaccgtcctgggctcacttggccacgtccccacagcctgtggcttccacgggggcctagccctcacgctgcccctgggctgggtggggcctgaacctcacaactccatcctgccacttggctgctgggtctgaaagcctcgtacgccggtgccggcccctctgaggtcctcagcaggtgagtcggggaagcagccgcacaacccacagcgccacagccacaagcagcctctgttcactttcacaacaaagtgcaacagccaaagcgtctggaaatcattccttaaacgaacactcattaagcgcctaccacgtgtggcaccagcgcacagcagcagtcaaaaacctcccgcgagaagctcagccccacggaggcagacccaggagcaagtccacagcggcatcggcacccgccgggctgtgacacgtgtgccaggcagtgcgggctgaggatggatgcgttaggagtggggatggggaaggcctcccagctgccgtgctcatcccctgccacggcacctctggcactgacccgcacgcccctggctcctctgtacccagcggagcctcgcactgcctggctgacagggcctgagggttcccagccgaccctgtggcacttgccgtggtaccacatcagggctgc

SEQ ID NO: 81095 - DNA, 231 bp, Homo sapiens
  chr10:134739717-134739948
  hypo
agccctcatgggacgcgtggccgtcccccgtcctcccaggcaggcatcaccacacggcggggagggggcagctccgtgggggctgcaggaggagggtcagagggagtcgcatcccagcccccacctgcacgaccccaccccaccagggcggcgtgtaggcccctgtgcgcaggacagggagtgtggcactggaggctggactcacacccgctgtcacgggagccagggcga

SEQ ID NO: 81096 - DNA, 180 bp, Homo sapiens
  chr10:134740787-134740967
  hypo
ctatcagacacagacgtcccggggagcaggtcctcggcggcagacgcctccgtcccggggagcaggtcctcggcggcagacgcctccgtcccggggagcaggtcctcggcggcagacgcctccgtcccggggagcaggtcctcggcggcagacgtccacaagcacgggaagtacccgcag

SEQ ID NO: 81097 - DNA, 31 bp, Homo sapiens; identical to SEQ ID NO: 24765
  chr10:134747808-134747839
  hypo

SEQ ID NO: 81098 - DNA, 194 bp, Homo sapiens; identical to SEQ ID NO: 24766
  chr10:134758117-134758311
  hypo

SEQ ID NO: 81099 - DNA, 30 bp, Homo sapiens; identical to SEQ ID NO: 24767
  chr10:134758761-134758791
  hypo

SEQ ID NO: 81100 - DNA, 594 bp, Homo sapiens; identical to SEQ ID NO: 24768
  chr10:134793861-134794455
  hypo

SEQ ID NO: 81101 - DNA, 586 bp, Homo sapiens; identical to SEQ ID NO: 24769
  chr10:134797187-134797773
  hypo

SEQ ID NO: 81102 - DNA, 346 bp, Homo sapiens
  chr10:134803433-134803779
  hypo
aactgctccacttgacattcccgccagcagagcacgcgtgttccggtacctcccgccctcagcagccctagcccggtcggcgtttgtgtttttaattttggccattccattaggtgcaccgcgatttaatgtgcgtttccacgtggattaacggtgtgaactgtctcttcgcgtacttgctggttgtttgcgtgtgttctttgctgaatgaagtgtctgctggaaccgggggtgtgtatttgtatcaggttgttcgttgtcttatttctgggcgacgagttcctcgtctattctagatacaagtcccttcccagatccgggcatcgcagacagtttcacctgctca

SEQ ID NO: 81103 - DNA, 310 bp, Homo sapiens
  chr10:134807155-134807465
  hypo
cctgtgggcatctgtcttctgcggagtgtgcgtgaggcggcatcgcacactgcggcatctgtcttcggagtgtgtgtgagtgtgtgtgagtatgtgtgaggcagcgtcgcacactgcgtggacttttaactgcccgtcgggatgctttgcaggtgagtcccgataagcggaaaccgcaacgctccttcagcaccagtgcaggttcacggtttcatggggggaacgtcaattcagtaagacgagtgacgaggcgcgtctcagcggaaccccacccactgccgtcaccatcgctgaccactccattggttga

SEQ ID NO: 81104 - DNA, 223 bp, Homo sapiens
  chr10:134817169-134817392
  hypo
agtgcacgcacagacgtttgaggtgtgcgtgcggttagtacacgcacatacgtttgaggtgtgagtgcagttggtacatgcacatacactcacttgctctgttggcagagggggtctgcaatcagtgacaccccaggaggggtgagcaccctaccacccagacctcggcttacaaacacccttctccagtaaaagcagccagggctcccgatcctatgactgg

SEQ ID NO: 81105 - DNA, 30 bp, Homo sapiens; identical to SEQ ID NO: 24771
  chr10:134829384-134829414
  hypo

SEQ ID NO: 81106 - DNA, 217 bp, Homo sapiens; identical to SEQ ID NO: 24772
  chr10:134829640-134829857
  hypo

SEQ ID NO: 81107 - DNA, 30 bp, Homo sapiens
  chr10:134833357-134833387
  hypo
tctgaattcatgtccgcccatgcccgcccc

SEQ ID NO: 81108 - DNA, 30 bp, Homo sapiens
  chr10:134833859-134833889
  hypo
gtcgctggggtgggcgccggctgtggggca

SEQ ID NO: 81109 - DNA, 30 bp, Homo sapiens; identical to SEQ ID NO: 24773
  chr10:134834802-134834832
  hypo

SEQ ID NO: 81110 - DNA, 383 bp, Homo sapiens
  chr10:134836850-134837233
  hypo
atcaggtgacaccaacgtgaccacggcaagagcgagctggagcggagcctcgggtagccatgactaacagacatggttcgcaaacccacgcacaccttccaaaaacgccaggctggcctcacatgaccaggggcctcaccaagtgcagtgggtccctgcgtgtcagggaggctgcccagagctgtggctgctcctgtcttagcctcaacctgtgcccggggccctgtggatggatccgcgtggggcggtggtgttccaagtccacgtggggcggtggtgttccaggtccacgtggggcggtggtgttccaggtccacgtggggcggtggtgttccaggtccacgtggggtggtggtgttccaagtccacgtgggacggcggtg

SEQ ID NO: 81111 - DNA, 30 bp, Homo sapiens
  chr10:134858800-134858830
  hypo
cacggggctgttccacgcccagacactgag

SEQ ID NO: 81112 - DNA, 154 bp, Homo sapiens
  chr10:134875726-134875880
  hypo
gcgtagggggcgcgtcggtcctttccattttagctgcgtgggggagggtgttggcggcaccattgtgctttcattccacgtttcctcagtgattcaacacgttaagtaacgtgtcacgtgcctgctggccaccaccgtccgctcctgggaagaa

SEQ ID NO: 81113 - DNA, 92 bp, Homo sapiens; identical to SEQ ID NO: 24774
  chr10:134878527-134878619
  hypo

SEQ ID NO: 81114 - DNA, 254 bp, Homo sapiens
  chr10:134912128-134912382
  hypo
tttcccgtcccacagcgccatccgcatcagccgcaagggccggcacacgctcctgaatttctgcttccacgcggccctgaccttcactgtgttcgccggcggcatcaatcgcaccaagtaccccatcctgtgccaggcggtgagtgccggggcgccctcgttggctcctcccagaggggaactgcgtgagcgtcgtcttgtttactaaataatattccagcgtttgctcagctatttcccgggaagagggtcgg

SEQ ID NO: 81115 - DNA, 30 bp, Homo sapiens; identical to SEQ ID NO: 24776
  chr10:134913907-134913937
  hypo

SEQ ID NO: 81116 - DNA, 259 bp, Homo sapiens
  chr10:134920247-134920506
  hypo
tgcttcctgggggaaggccatcgaggccaaagaccctcacagataaagcggaaggtcatgtctctgcacacagtctcacccccgcggctcagagtgcccatcgcgggctcctgggcagtgtttatctggggccacgcccgctctgagcgccactggagtcacgattgcatctgaaggccacgttaagaagcgtcaccgtttcaacagcaccacgtcttccaattcgtgagcacaggacgtctttccttttatttagctc

SEQ ID NO: 81117 - DNA, 97 bp, Homo sapiens
  chr10:134926795-134926892
  hypo
aagtccaatggcaccgcggcacttagattccgtgtcacggcccggcttgccgaggatgcctgctcccgccttcacctgcctcgcagcctccccagtg

SEQ ID NO: 81118 - DNA, 30 bp, Homo sapiens
  chr10:134940449-134940479
  hypo
gttgcagagaagtccgcagccaacggagct

SEQ ID NO: 81119 - DNA, 470 bp, Homo sapiens
  chr10:134940814-134941284
  hypo
agaggacgaggacacggcgtagtgagtaccgggcacccagaaccgggagctgggagcagcgggtgggctctgcctgaggtccctcccaggcacctgtggtggggaagcccaggacgaagcagcaaggcctgggcctggacctggggcttgccgagagctgcgcccctcccagctcgcacccccgaggagtgcgcagcgccccctcctctcccagggagtccaacctaatctttgcctttggacaaggcaggcctggtttgccttctatgggaggggcctggggacaaatagcgatttggcaacagcacagagctcagctgagaagggaaaccccatcgagtaggaacggcggtccagccatcagtgcccagagccagcctggaacctctcattcagggccctcagttccttctgcggccccaggatggcccgcccgtctgccctccgccttgccccgcccacccagctcc

SEQ ID NO: 81120 - DNA, 1407 bp, Homo sapiens
  chr10:134941646-134943053
  hypo
tagggccaatagggcccggttcccatccacactctcagcgactctagaaacgcccaaggcccccaagccgcagctgtgcaaagccactcgctaggccgggtgggtgcagggccctttgctctgcagggggcgtcctgagtcctggccgtgctggccccgctgacactgacgtgcgtctccccacagctgctggatggcctgggagcccagcctgggcgccttctacggcccagccgccatcatcaccctggtcacctgtgtgtacttcctgggcacctacgtgcagctgcggcgccacccagggcgcaggtacgagctgcgcacacagcccgaggagcagcggcggctggcgacacccgagggcggccgtgggatccggccaggcaccccacccgcacacgatgcccccggcgcctccgtgctgcagaacgagcactcattccaggcacagctgcgcgccgccgccttcacgctgttcctgttcacggccacgtgggccttcggggcgctggcggtgtcacagggccacttcctggacatggtcttcagctgcctgtacggcgccttctgcgtgaccctgggactcttcgtgctcatccaccactgcgccaagcgtgaggacgtgtggcagtgctggtgggcatgctgcccgccccgcaaggacgcccaccccgcacttgacgccaacggggccgcgctgggccgcgccgcctgcctgcactcgccgggactgggccagccacggggcttcgcgcacccaccgggcccctgcaagatgaccaacctgcaggccgcgcagggccacgccagttgcctgtcaccggccaccccgtgctgcgccaagatgcactgcgagccactgacggcggacgaggcgcacgtgcacctgcaggaggagggcgccttcgggcacgacccccacctgcacgggtgccttcagggcagaactaagccgccctactttagccggcacccagcagaggagcccgagtacgcctaccacatcccatccagcctggatggcagcccccgcagctcgcgcacagacagcccccccagctctctggatggcccggcggggacacacacgctggcctgctgcacccagggcgaccccttccccatggtcacccagcccgagggcagtgatgggagccctgccctctacagctgccccacgcagccgggcagggaggcagcgctcgggcccggccacttggagatgctgcggaggacacagtccctgccctttggtggccccagccagaacgggctgcccaagggtaaattgctagaaggcctgccgtttggcaccgacgggaccggcaacatccgaacgggaccctggaaaaacgaaactactgtgtagatgggggcagaggacacggtgttcctggaggagcttca

SEQ ID NO: 81121 - DNA, 30 bp, Homo sapiens; identical to SEQ ID NO: 24780
  chr10:134955621-134955651
  hypo

SEQ ID NO: 81122 - DNA, 23 bp, Homo sapiens
  chr10:134959184-134959207
  hypo
gaattttaggccgggcgcggtgg

SEQ ID NO: 81123 - DNA, 30 bp, Homo sapiens; identical to SEQ ID NO: 24781
  chr10:134978033-134978063
  hypo

SEQ ID NO: 81124 - DNA, 724 bp, Homo sapiens
  chr10:134980288-134981012
  hypo
cacagctgagccctcgcggagtccaggagcccactcggatttggaggtgagcccacatgggggcggccgagccacatggagggaaccgccgtgactgtgtcctccgtgtgaattgcctggaacaaatgttggcagcgcgtgtggttgtaagtcatgtgagtgtcaggatcacgccccgttagctctgcacgagtccacagttggggatgtccactccgtcgcctcgctcatctgttggcagcctccacaggccagtccagccgtgagcctgcggggtcggggtgctccacggagcaggtgacccagcagctctggccgagcctccgggaggaaggccccgtgcccaggctccaggagccgacacctgctctgggcagcacgccgacggtgccaccaaatgttccgtggctctgacgtccagggaacagcaggacgactcttgaaacaaaatgagacgtggtctaaagccctttccctgacccacgcgttgaaacgctgccacgagtcgtccgtttccccagggaatcgtctcggtgggggtgccggggcctggctgggggtcctgccgggctcacggccagggccggtcttggcaggagaacgtgtctctggctgacatcctctccctgcgggaccgcggcctcagcgagcaggaagcctgggccgtgtgcctggagtgcagcctgtccatgcggagcgtggcccacgccgccatcttccagag

SEQ ID NO: 81125 - DNA, 30 bp, Homo sapiens; identical to SEQ ID NO: 24784
  chr10:134992325-134992355
  hypo

SEQ ID NO: 81126 - DNA, 216 bp, Homo sapiens
  chr10:134996304-134996520
  hypo
tctaggcccaactgcgcgggcggcgagggcgcgggcagtgtgggcgcaggtggtgtgggcgtgggtggcatgggcgcaggcggcaagggcatgggtggcgtgggtgcgagcaatgtgggcacggacggtgtgggcacaggcggtgtgggcacaggcggtgtgggcacaggcggtgtgggcacaggcggcgtgggcacaggcggcaagggcatgggt

SEQ ID NO: 81127 - DNA, 136 bp, Homo sapiens; identical to SEQ ID NO: 24786
  chr10:134996774-134996910
  hypo

SEQ ID NO: 81128 - DNA, 28 bp, Homo sapiens
  chr10:134997772-134997800
  hypo
ccatgcacacacacgctgcacacacacc

SEQ ID NO: 81129 - DNA, 30 bp, Homo sapiens
  chr10:134998506-134998536
  hypo
gtctgcattggcatcgctacctgcagcacg

SEQ ID NO: 81130 - DNA, 188 bp, Homo sapiens
  chr10:135001616-135001804
  hypo
gcccctgcgtccgtccgtggatgcctgggtgctccccgtgttggctatttcgagccgtgctgctgggaacatgggtgtgcacgtatgcgtgagccctgccctcggttcctcggggaatgtggccgtgtggaactgctgtcacctgggaggtgtatgttgagcttttcaaggaacggcagcactgtcgt

SEQ ID NO: 81131 - DNA, 324 bp, Homo sapiens
  chr10:135002063-135002387
  hypo
ctgtcccagctgggccggcccttccgggagtacgagctgtgggccctgtgcctggcctgcctccgcgcactgcagacacgccctgagcacccaggtgacgcacgcaccatcccatcccccccgccgtccccaccccccactgctgttccaccccccaccgccgtcccacacccccgccgtcccaccccccacaccgtcccacgcccccccactgtcccatcacccctgccgtcccatgcgtaactggcccccacctgaaccaagggacccaggggcagccaggacagtgtctccggtgaacggaacaggcggctcccgtctgga

SEQ ID NO: 81132 - DNA, 154 bp, Homo sapiens
  chr10:135002837-135002991
  hypo
ggctccctttcagccgcagatatgccgctgcagccactgtgtcggctggggcagcgctaccctcggggagggctgggaggaggcagctccgaggaccccgggggctggggtcaggccatgtgcgtgcactggcaggtgcgtgcccgtgcaatgg

SEQ ID NO: 81133 - DNA, 341 bp, Homo sapiens
  chr10:135009187-135009528
  hypo
gccgttctgtggaccgcagccaagttcagcgtcccccgcaaccacaagctggccctgccacgcaggctcaagaccctcctcctggacatggccaggcgcagtgccccggagcggccgtccgcggctgaggccatcaaggtaaccacaccacagtcatggccccagcccagggtccaaggactgtgggcagtggccgccctcgctgagctgggggtggaggagcacgggctgccagtgtccaggtgatgaggccaccaggtctgtttctaggtccctgtttctagacgtcggcctggccgtcgcatggggaagggagtgggtttcgcgtcatggccacgtcc

SEQ ID NO: 81134 - DNA, 30 bp, Homo sapiens; identical to SEQ ID NO: 24790
  chr10:135012439-135012469
  hypo

SEQ ID NO: 81135 - DNA, 748 bp, Homo sapiens
  chr10:135014641-135015389
  hypo
ttccagaagaaaagaggagagcgtgagggggcagagggacacagtcctgatagcagagccagcgaggacagggcccggccccaccccggggcgagtacgagtttggaagcagtgagggcgcagagtggggctccatctggggagaggcctctctctgtcacccggccccgtgcggcagttcagggtcccagcatctcccctgcactgggaggcggcagccgtgcccggggggcgcccgtggtgggcgggtgcaagagagaagggcgtcgggtgtgcaagcaccaccggcctcccattaacagcctgcccgggctccgcccacaggagccactgtccacgtaacctgcgtctctttctttcaaggaaaagagaagccagccatggccaggaccagcagcagggccccctgctcacccacctcggtgtcggatgtggactcggacgcactgtcacggggaaacttcgaggtggggtttcggcctcagaggtccgtaaaagccgagagagcgcagcagcctgaggctggcgaggacagacggccagctggcggggcctcagacgtggaggcagtgacccgactggccaggtccaaaggggtcggcccagccttgtcccccggcccagccggattccagagctgcagccccggctggtgcagcgccttctacgaggccgactgcttcggggccgacgtccacaactacgtgaaggacctggggcggcagcaggcggacggggccctgcccga

SEQ ID NO: 81136 - DNA, 856 bp, Homo sapiens
  chr10:135017131-135017987
  hypo
tggagctggcatccgcgtctcctgctgttaaaacaagcgtggctcccagagtcagcgtggacagcactggtgtgggttcctcccccgtctgtctgcaccggtgaagcctggcctcgtgtttccctcctcactgccccacatgtggtgtggattttagttaccgtggatttattaaaatcagtcaagaccgtcctcctcatggagtccgcctgtggttcccgcgtgaggagcgcccccgacggacatcgagtctgactgtgaacggaggccgtggaggtgccggccagagaggagtctgcgtgagctgcactccagccaggcgggcatcgggctcgcaggcacccgcctccaggttcctggatgcgtcagggtacacagacctttcccaggagattttctcgacatcagcacctctgcaaatggatgggggtgagagggctggatggagcctggcgccggtgacctccgggggccggacgagggccccatggtgcaggccatgggggaacgtggccaccaccatcctcagaagccaggaccaggtgccccggcagcagaacacagctccatggggacacctgcgtttaccaacctcaacctgcccagcccggtaggtccttccttgatgatggaatgttctagacgctgtccaccgggtagccaacagccacgtgtggctactgagctctggaaacatggcccacgtgactgaggacctgatgttttaatttcactgcactttaggcagccacggcagcctgcagctcagtgtgggaggcagggtcgcacttggctgggtggcagcggggtccggagggcttggggaacctggcttagtggccgaggttctgcagag

SEQ ID NO: 81137 - DNA, 102 bp, Homo sapiens; identical to SEQ ID NO: 24793
  chr10:135018211-135018313
  hypo

SEQ ID NO: 81138 - DNA, 30 bp, Homo sapiens; identical to SEQ ID NO: 24794
  chr10:135023526-135023556
  hypo

SEQ ID NO: 81139 - DNA, 375 bp, Homo sapiens; identical to SEQ ID NO: 24795
  chr10:135025539-135025914
  hypo

SEQ ID NO: 81140 - DNA, 30 bp, Homo sapiens
  chr10:135029279-135029309
  hypo
gctcgtcctggtcacgcacccgtgtacagg

SEQ ID NO: 81141 - DNA, 586 bp, Homo sapiens
  chr10:135030352-135030938
  hypo
ttaacaggagggaaattctgacgcctgcggcagcacgatgaacctcgagggactcaggctcagggaaacgagccagtcgcgaagcacggacagtggacggctccacgtacacgaggcgcctggaggcgcaagattcacggagacaaagtagcagggtgggcgccgggggctgggagtggggcacggggagctcgtgttgaacggggaccgagtttccgtttgggaagatggagagtcgcagacatgctgcacagtgtggatgtagttaacacggctgaaccgtgcactcagaaaaggctacaaaggtaaatcctctattacatactttttacaattaaaaatcaaaaggttaaaacaacagtgaaaaagtgtggcgaaatagttttatctcaaaattacatactttgcatctacttaaaccgatgaagaaacagactgagacgtcagcgtagaaagtgtatccggtaaacacttctcaagctcctctcaaggcgctcaggcaagagggctggggccgcagtcggggtgagcccaggatcacatgaggcgccttcagctgcacaggggccctgcagacaagagttga

SEQ ID NO: 81142 - DNA, 158 bp, Homo sapiens
  chr10:135035223-135035381
  hypo
atgccataaatgtatgcttatcgtaagagatcagaaaacccatgtcagcaaaagagaagttaaaaacttaaggtaggccagacgcggcggctcacgcctgtaaccctaggtaggccgggctgggtgcagccactcacgcctgtaaccctaggtgggca

SEQ ID NO: 81143 - DNA, 564 bp, Homo sapiens; identical to SEQ ID NO: 7830
  chr10:135043826-135044390
  hypo

SEQ ID NO: 81144 - DNA, 31 bp, Homo sapiens; identical to SEQ ID NO: 24799
  chr10:135064837-135064868
  hypo

SEQ ID NO: 81145 - DNA, 121 bp, Homo sapiens
  chr10:135069842-135069963
  hypo
aataagttttgccaccaaaggcgatcactgtggatcatgccggttcctgcacacctgtggggtgctctgagcgtggactccccacgcgagccgtccagacgtgctcagggtggcctcccct

SEQ ID NO: 81146 - DNA, 30 bp, Homo sapiens; identical to SEQ ID NO: 24800
  chr10:135073734-135073764
  hypo

SEQ ID NO: 81147 - DNA, 30 bp, Homo sapiens; identical to SEQ ID NO: 24801
  chr10:135073981-135074011
  hypo

SEQ ID NO: 81148 - DNA, 31 bp, Homo sapiens; identical to SEQ ID NO: 24802
  chr10:135075452-135075483
  hypo

SEQ ID NO: 81149 - DNA, 147 bp, Homo sapiens
  chr10:135081993-135082140
  hypo
gccccaagcccaaccggccaccaaaaccatgccccgccccagcctcaggggaaggtggagtccagagtggcactggccgagtggagccaggaaggcccttcaaactcagcccaagccggggggcgtcatgacgtcggggcacagagg

SEQ ID NO: 81150 - DNA, 247 bp, Homo sapiens
  chr10:135085112-135085359
  hypo
gtcaggggcgttggcgaggcacaccgactgcggccgctccaaaaagctctccaggtaggcctggctgcagtcactgaacatcctggggaaactggagctggggaggcggggcagcattgggggaggcggcctggccccttccccacccacctcgtacctccagcataccctggctctgcagggcctggccgcctcacccaatgctgcccgccatgatgcagcggccggcctcgaagcgttcctggca

SEQ ID NO: 81151 - DNA, 62 bp, Homo sapiens
  chr10:135086770-135086832
  hypo
ctgaagacggctgccgtccggggtcccaggaggctgcccaggctgtcgtcgctgaccccgca

SEQ ID NO: 81152 - DNA, 389 bp, Homo sapiens
  chr10:135087377-135087766
  hypo
gcccccatggccccacaggctcggggagggccgcccagcccctacctgcccgcccagctgctccgcccgacccatacctgcccgcgaggctgctccgtcacctcggagccattggcagccgtataggtctctgtgtagccggagcccagcaggtccctggaaaagaagtgctgtgactgcctcggccccctcggtgcagagaggctggcccagaggctggacgccggggacaccagtgtgctggagccaggcccgggcaggggggccgacccgagacccactcacctgttcttccgcaggtggagggtgaagttgtgccctgtggccccaaggacgtagctcaccctctctgggtgcaggccctgagcgaggagggaagggtcccaggt

SEQ ID NO: 81153 - DNA, 30 bp, Homo sapiens
  chr10:135095288-135095318
  hypo
agctccagctccagcgtgtgaacacgggac

SEQ ID NO: 81154 - DNA, 30 bp, Homo sapiens
  chr10:135096695-135096725
  hypo
gtggccaaggacgtcgtcaatgttggaggc

SEQ ID NO: 81155 - DNA, 30 bp, Homo sapiens
  chr10:135097462-135097492
  hypo
cgaagttgagcattcgctgccgcagagtga

SEQ ID NO: 81156 - DNA, 30 bp, Homo sapiens
  chr10:135097785-135097815
  hypo
cccctcggagcccacgccaggaaagtgcca

SEQ ID NO: 81157 - DNA, 78 bp, Homo sapiens; identical to SEQ ID NO: 24805
  chr10:135102836-135102914
  hypo

SEQ ID NO: 81158 - DNA, 31 bp, Homo sapiens; identical to SEQ ID NO: 24806
  chr10:135106411-135106442
  hypo

SEQ ID NO: 81159 - DNA, 30 bp, Homo sapiens
  chr10:135109196-135109226
  hypo
gagcatggcgggaacgtggagtgctggcag

SEQ ID NO: 81160 - DNA, 31 bp, Homo sapiens; identical to SEQ ID NO: 24807
  chr10:135117510-135117541
  hypo

SEQ ID NO: 81161 - DNA, 17 bp, Homo sapiens
  chr10:135118067-135118084
  hypo
aggatgagctcaacaaa

SEQ ID NO: 81162 - DNA, 580 bp, Homo sapiens; identical to SEQ ID NO: 24808
  chr10:135120290-135120870
  hypo

SEQ ID NO: 81163 - DNA, 84 bp, Homo sapiens
  chr10:135125635-135125719
  hypo
agtcacaacccaggcgtctgccttaatagcatcacctgtgccgtctgcgtttctagcgtcacctgtgccgtctgcgtttctagc

SEQ ID NO: 81164 - DNA, 30 bp, Homo sapiens
  chr10:135126544-135126574
  hypo
acagattttggaaacgacctggacacacta

SEQ ID NO: 81165 - DNA, 43 bp, Homo sapiens; identical to SEQ ID NO: 47995
  chr10:135139253-135139296
  hypo

SEQ ID NO: 81166 - DNA, 555 bp, Homo sapiens; identical to SEQ ID NO: 47996
  chr10:135150010-135150565
  hypo

SEQ ID NO: 81167 - DNA, 322 bp, Homo sapiens; identical to SEQ ID NO: 24810
  chr10:135153716-135154038
  hypo

SEQ ID NO: 81168 - DNA, 31 bp, Homo sapiens; identical to SEQ ID NO: 24811
  chr10:135180194-135180225
  hypo

SEQ ID NO: 81169 - DNA, 31 bp, Homo sapiens; identical to SEQ ID NO: 24812
  chr10:135198047-135198078
  hypo

SEQ ID NO: 81170 - DNA, 31 bp, Homo sapiens; identical to SEQ ID NO: 24813
  chr10:135204298-135204329
  hypo

SEQ ID NO: 81171 - DNA, 202 bp, Homo sapiens; identical to SEQ ID NO: 24814
  chr10:135204810-135205012
  hypo

SEQ ID NO: 81172 - DNA, 149 bp, Homo sapiens
  chr10:135228979-135229128
  hypo
ttggtctccctttctcacttgcgtggtgtctgatgagccgtctgcggtcatgtttgtttgttttagtgcttgagaggggttggtctccctttttcacctgcgtggtgtctgatgagccgtctgtggtcgtgtgtgtttgttcctctgct

SEQ ID NO: 81173 - DNA, 30 bp, Homo sapiens
  chr10:135234720-135234750
  hypo
agtgccacctgcatcgtgccataaccctga

SEQ ID NO: 81174 - DNA, 30 bp, Homo sapiens
  chr10:135255007-135255037
  hypo
gggtcagggtccgacggggctgtgagctca

SEQ ID NO: 81175 - DNA, 30 bp, Homo sapiens
  chr10:135270816-135270846
  hypo
ccgcagtccctgcgcgggactccccgagat

SEQ ID NO: 81176 - DNA, 30 bp, Homo sapiens
  chr10:135278115-135278145
  hypo
tggctctgaggctgcgaggtgggacctgct

SEQ ID NO: 81177 - DNA, 154 bp, Homo sapiens
  chr10:135381712-135381866
  hypo
ggtcctgttgcctccgggaacccagtcctcctcgtcctccaggccgcgttccccgggtcccgcggcccttctccagcctgagcccgccgccccggccgcagccacgcgcagggaggagcccggggcaccatagcacagcgccggcctcacacac

SEQ ID NO: 81178 - DNA, 30 bp, Homo sapiens; identical to SEQ ID NO: 24815
  chr11:197209-197239
  hypo

SEQ ID NO: 81179 - DNA, 30 bp, Homo sapiens; identical to SEQ ID NO: 24816
  chr11:223336-223366
  hypo

SEQ ID NO: 81180 - DNA, 30 bp, Homo sapiens
  chr11:231998-232028
  hypo
gcaccatatggatacggtcaagaaatcacc

SEQ ID NO: 81181 - DNA, 30 bp, Homo sapiens
  chr11:232403-232433
  hypo
cccacacctgtaatccggcacccggccgga

SEQ ID NO: 81182 - DNA, 400 bp, Homo sapiens; identical to SEQ ID NO: 24817
  chr11:232823-233223
  hypo

SEQ ID NO: 81183 - DNA, 81 bp, Homo sapiens
  chr11:251676-251757
  hypo
gagtcaaggctcttgtgtgagcgctgtgctccctagacagtaaaaaatgacgggaggagcggcatctgcttctcacaagcc

SEQ ID NO: 81184 - DNA, 30 bp, Homo sapiens
  chr11:252435-252465
  hypo
ctgtgccggccgctcggcctgtgtctcctg

SEQ ID NO: 81185 - DNA, 30 bp, Homo sapiens
  chr11:252668-252698
  hypo
gctgctcagacggtcgacattgaatttggg

SEQ ID NO: 81186 - DNA, 413 bp, Homo sapiens; identical to SEQ ID NO: 7839
  chr11:314082-314495
  hypo

SEQ ID NO: 81187 - DNA, 30 bp, Homo sapiens
  chr11:314929-314959
  hypo
caggaagatggttggcgacgtgaccggggc

SEQ ID NO: 81188 - DNA, 80 bp, Homo sapiens; identical to SEQ ID NO: 48008
  chr11:327112-327192
  hypo

SEQ ID NO: 81189 - DNA, 39 bp, Homo sapiens
  chr11:367111-367150
  hypo
gcgtgagccaccgcgcccggccaggttgttctcttattc

SEQ ID NO: 81190 - DNA, 95 bp, Homo sapiens; identical to SEQ ID NO: 48010
  chr11:369795-369890
  hypo

SEQ ID NO: 81191 - DNA, 156 bp, Homo sapiens
  chr11:372117-372273
  hypo
agctgaccagtgagaccgacggccggggggtccacgctgcgccatccacacagagggctgaggactccagtgagagccgtgaagaggagcaagcggtgagcagagccctggggagaacacgtgtgcacggagacgagaccccgaagccacttgtgt

SEQ ID NO: 81192 - DNA, 1660 bp, Homo sapiens
  chr11:375765-377425
  hypo
tttcctcagtgagagggggcccgcgcgggggcgagggcgggggtgcctgccccagccaccctgtgaccgcacctcctgcagctccacgcatggaatcttcgagcctggagaacgtgctggagccctgcgcctacgcccccacctacgtggtcaaggacttcccgatcgccagataccagggcctgcaatttgtgagtgcggctggagaccccgtctcccgtccgggactccgcggagccttctccagccccttgggaggccgccccgggaggtccgcgccctgagccctgcgcccccccaccccccaggtgtacctgtccttcgtttatcccaacgactacactcgcctcacccacatggagacggacaacaagtgcttctaccgcgagtctccgctgtatctggagaggtgggcgcgcggccgggctaatgcggggcggggtgggcggggcgggactcggctctgatgccccgccgcgccccaggtttgggttctataaatacatgaagatggacaaggaggagggggatgaggatgaagaagacgaggtgcagcgccgagccttcctcttcctcaacccggacggtgagtgtccgcagcgcccctggcccgcacccacctgcgcagggagcttctaacccgcgtttcccgcagacttcctggacgacgaggacgagggggagctgctcgacagcctggagcccaccgaggcggccccgcccaggagcggcccccagtcccccgccccagcagcccccgcccagcccggagccaccctcgccccgccgacccctccccgcccccgggacggggggacccccaggcactcccgggccctgagctgggccgccagggccgcccgccctttgccgctcttcttgggccgagctccgcccccgcgccctgcagtggagcagccgcccccaaaggtgtacgtgaccagggtgcggccgggacagcgggcatccccccgggccccagcgccgcgtgcgccctggccgcccttccctggcgtcttcctgcaccccaggcctctgcccagagtgcagctgcgggcgcccccacgcccaccccggccccacggccgcaggaccggcggcccccaggccacacagccgaggcccccagcccgggcgcaggccacccaagggggccgggagggccaggcgcgcacgctgggacctgcggcgcccacagtggactcaaacttgtcctccgaagcgcggcccgtgacctccttcctgagcttgtcccaggtgtccgggccgcagctgcccggggagggcgaagaggaggaggaaggggaggacgatggggccccgggcgacgaggccgcgtcggaggacagcgaggaggccgcgggcccggcgctcggacgctggcgtgaggacgccatcgactggcagcgcacgttcagcgtgggcgccgtggacttcgagctgctgcgctcggactggaacgacctgcgatgcaacgtttcggggaacctgcagctgccggaggcggaggccgtggacgtgaccgctcagtacatggagcggctgaacgcgcgccacggcgggtatgggggcggccgaacgcgcgccagggcggttttggaggcggggacagccggggagaggaggtcctggccttggcggactcctcagaccttcccca

SEQ ID NO: 81193 - DNA, 210 bp, Homo sapiens
  chr11:380578-380788
  hypo
agccccagtccccccgcaccagcacacccagggccatgccaggggccccaggaacctcctccagtatcccgcgtttatgcaccgcgctccagggtcatgacccagtaccaccggacgactcccggaagcccccgtggtgatgggacccggcacctgacccctcccgaggtctcctagcggcgctttgccggggggaccttgcaggacctg

SEQ ID NO: 81194 - DNA, 37 bp, Homo sapiens
  chr11:381323-381360
  hypo
accacctctccgcccccggccccggggtcctgaccac

SEQ ID NO: 81195 - DNA, 30 bp, Homo sapiens
  chr11:391908-391938
  hypo
tccaggaagcctaccgtcaagcccccctcc

SEQ ID NO: 81196 - DNA, 84 bp, Homo sapiens; identical to SEQ ID NO: 24821
  chr11:392493-392577
  hypo

SEQ ID NO: 81197 - DNA, 108 bp, Homo sapiens; identical to SEQ ID NO: 24822
  chr11:393555-393663
  hypo

SEQ ID NO: 81198 - DNA, 31 bp, Homo sapiens
  chr11:394126-394157
  hypo
tccccgcccccagctgcgctcagggctgggc

SEQ ID NO: 81199 - DNA, 32 bp, Homo sapiens
  chr11:394839-394871
  hypo
aacccggaacacgcacgcgcctggccccggta

SEQ ID NO: 81200 - DNA, 30 bp, Homo sapiens
  chr11:395128-395158
  hypo
ctggccccactcacgcgagtgtgtgtgcat

SEQ ID NO: 81201 - DNA, 30 bp, Homo sapiens
  chr11:395394-395424
  hypo
gcggaggggccggcccggcggcctggactg

SEQ ID NO: 81202 - DNA, 30 bp, Homo sapiens
  chr11:404581-404611
  hypo
ggaggagaaggtgacgtggcccagcgtcca

SEQ ID NO: 81203 - DNA, 53 bp, Homo sapiens
  chr11:405078-405131
  hypo
gctggcacctcagggccgagaggggacagggtggacagcgggtgcaccacagg

SEQ ID NO: 81204 - DNA, 272 bp, Homo sapiens; identical to SEQ ID NO: 7841
  chr11:406792-407064
  hypo

SEQ ID NO: 81205 - DNA, 30 bp, Homo sapiens; identical to SEQ ID NO: 7842
  chr11:407427-407457
  hypo

SEQ ID NO: 81206 - DNA, 239 bp, Homo sapiens; identical to SEQ ID NO: 48013
  chr11:417263-417502
  hypo

SEQ ID NO: 81207 - DNA, 154 bp, Homo sapiens
  chr11:419275-419429
  hypo
atcagaagaggacatgcggaacctcacatcgggagggagccgttctggcagggcctactcaggaggcagccaggtctgggaacttcacccccaactgcggtcctggccagttatccctgacctccagcccagggcctgccgtcagtgggcgcag

SEQ ID NO: 81208 - DNA, 31 bp, Homo sapiens; identical to SEQ ID NO: 24826
  chr11:420901-420932
  hypo

SEQ ID NO: 81209 - DNA, 376 bp, Homo sapiens
  chr11:421329-421705
  hypo
ggtgctcacacccagatgaaccgcacccgcacgtgggcacgcacacacacacacacacacacaggggaggccacaggctcccagatgaaccgcacccacacgtgggcgcgcgcacacacacacacacccccacacaggggaggccacaggctcccagacgaaccgcacctgcacgtgggcgcacacacacccacacacacacaggggaggccacaggctcccagatgaaccgcacccacacgtgggcgcgcgcacacacacacacacccccacacaggggaggccacaggctcccagacgaaccgcacctgcacgtgggcgcacacacacacacacaggcaaggccacaggctccaacacacgctccagacagtgt

SEQ ID NO: 81210 - DNA, 522 bp, Homo sapiens; identical to SEQ ID NO: 24827
  chr11:429288-429810
  hypo

SEQ ID NO: 81211 - DNA, 30 bp, Homo sapiens
  chr11:430824-430854
  hypo
tatctgggggcttccgcgggggtgtggggg

SEQ ID NO: 81212 - DNA, 145 bp, Homo sapiens
  chr11:431644-431789
  hypo
gaggcggggccgtccgcggggttcctgtgctctctttgggcagcgttacctgatttcatcaactggctgctcccggaacatgtgtctccaccgcgcccacgtcttcttcaggcgtccctccccctggctcgggtgacagagagtg

SEQ ID NO: 81213 - DNA, 30 bp, Homo sapiens; identical to SEQ ID NO: 24829
  chr11:433687-433717
  hypo

SEQ ID NO: 81214 - DNA, 135 bp, Homo sapiens
  chr11:438116-438251
  hypo
tggggtgatgaccccacgcctctgcaaacagcaggatcagcctcccctggggaatggggtgcaaagcccccatcactgacgtgggctgacagggagccctccccccagggcagagctacacgcacacctggggcg

SEQ ID NO: 81215 - DNA, 210 bp, Homo sapiens
  chr11:446022-446232
  hypo
gatatggcagccacccgtggagcggtccgggtgacaaagccagcgagagctagggagcgcccaggtgaaatcccacaggcaggtgtgagcaccaattgtcattacctttgccctgggcccctcagagacctgtcctccccccccgcccccaacagcctcctgggcgcggccacagacacagacacagtgtctggacgagcagactcgtcc

SEQ ID NO: 81216 - DNA, 30 bp, Homo sapiens
  chr11:446617-446647
  hypo
ccgggcacaggtgtgcgtgtggcacggtga

SEQ ID NO: 81217 - DNA, 155 bp, Homo sapiens
  chr11:449359-449514
  hypo
gcccggcctgcctagcataatgttttcaaggtccagctgtgctgtagcatgcgcatgcttcgctcctctatggctaataacatgccgctattatcaaaatgctgcaactaggagcgctagtgtgtaaatttggcgtggacacttgtttccaggtt

SEQ ID NO: 81218 - DNA, 37 bp, Homo sapiens; identical to SEQ ID NO: 7845
  chr11:450010-450047
  hypo

SEQ ID NO: 81219 - DNA, 33 bp, Homo sapiens; identical to SEQ ID NO: 7846
  chr11:450246-450279
  hypo

SEQ ID NO: 81220 - DNA, 30 bp, Homo sapiens; identical to SEQ ID NO: 24833
  chr11:453742-453772
  hypo

SEQ ID NO: 81221 - DNA, 204 bp, Homo sapiens; identical to SEQ ID NO: 24834
  chr11:455933-456137
  hypo

SEQ ID NO: 81222 - DNA, 30 bp, Homo sapiens
  chr11:459885-459915
  hypo
atacctgccctggacgccagtggcagcatg

SEQ ID NO: 81223 - DNA, 102 bp, Homo sapiens
  chr11:464467-464569
  hypo
aggcatctcccctgcgctcagagtgcctcaccccggctcgggcagtgccagtgcatctgcctgggtgagagcagggtctgtgctgccggccccggcttcctg

SEQ ID NO: 81224 - DNA, 35 bp, Homo sapiens; identical to SEQ ID NO: 24836
  chr11:471550-471585
  hypo

SEQ ID NO: 81225 - DNA, 196 bp, Homo sapiens
  chr11:472767-472963
  hypo
taaaaaatagatagcgtgtctctgtggccccgtctattcttgcggccacacgaacgtgcgtgtgtgtgtgcagcttccctcacggcagccaaaacccagaggccgcccagcgtgcgaacacgccaaggtgtgactgtcggcacggcactgccgagccgtgggagggactgggtggtgcagcggccagtggatctca

SEQ ID NO: 81226 - DNA, 43 bp, Homo sapiens
  chr11:475000-475043
  hypo
acgagtttgtgtgatacggacatattcacgtgtttgtgtgata

SEQ ID NO: 81227 - DNA, 50 bp, Homo sapiens
  chr11:476444-476494
  hypo
agggaagaaaagctgccggaagctcaacccatggccgtccttgcttggag

SEQ ID NO: 81228 - DNA, 224 bp, Homo sapiens; identical to SEQ ID NO: 48017
  chr11:485907-486131
  hypo

SEQ ID NO: 81229 - DNA, 30 bp, Homo sapiens
  chr11:486897-486927
  hypo
cactaactgtagccccgctgacgggggcac

SEQ ID NO: 81230 - DNA, 968 bp, Homo sapiens
  chr11:487198-488166
  hypo
gctgaggccctgtccgtctggatggtgctcatggtgggcagggggcccctgctctctaggctgtcgtggacgtggtctccacaggccacggcagcacctgtgagtccctggccttcttcccggggtctggcaggtgctgctcaggtgtgggctgatctgccggtgtggggagtgggggtggctgtgccccagggtcaagggtcataccctgtcgcccacaggacaagttggatggctttgttcccgcgcactttcttggctggtacctgaaggtacggcacctcctcttcccggcctccccgccccggttctgaggcctgccgtgggctctggaccgtttctgtccatggagttgagctcagggtgctctgagtgtggtgggagggtgtcgcactgcagccacccagaggttcgagaagccgtggggctcccggacctcccagaagccctgatcctggtcgggtccccgctccgtcctcagggtcggggcggtggaaagaggcggcagggcaggaagtcccgcccctgcctgggcttgggcactgccccatcccacttctgagggaccctgtgctacctatggggctaagagcagtgcctgcttgaccctgcagcccaccctggcagagtttggtgtcaggccccgggcacggggatgctgccttgtttgctgacagtcgtacatcgaggctgctggaggggcagccacccaccccacgctcaccctgagacctcactgggggccctgccagtgctgtcgactccaagaatgctgccagccggggtgggggctgcacgcacccgtgggcagggccgggcgtggcctgcgtcccatactctggctgccagccgggtgggggctgcacgcacccgtgggcagggccgggcgtggccggcgtcccatactctggctgccagccggggtgggggctgcacgcacccgtgggcagggccgggtgtggccggcg

SEQ ID NO: 81231 - DNA, 34 bp, Homo sapiens; identical to SEQ ID NO: 24840
  chr11:488634-488668
  hypo

SEQ ID NO: 81232 - DNA, 30 bp, Homo sapiens
  chr11:489439-489469
  hypo
agctgggttcgcttcgagtggaagccggcc

SEQ ID NO: 81233 - DNA, 730 bp, Homo sapiens; identical to SEQ ID NO: 24841
  chr11:492550-493280
  hypo

SEQ ID NO: 81234 - DNA, 30 bp, Homo sapiens
  chr11:498849-498879
  hypo
gccagctcccgcagcgaggccttggaggcc

SEQ ID NO: 81235 - DNA, 30 bp, Homo sapiens; identical to SEQ ID NO: 7847
  chr11:518711-518741
  hypo

SEQ ID NO: 81236 - DNA, 30 bp, Homo sapiens
  chr11:521031-521061
  hypo
gcaaacactgccaccgccagcgtactccgg

SEQ ID NO: 81237 - DNA, 65 bp, Homo sapiens
  chr11:528256-528321
  hypo
gaggcagctggtggcgagtcctgagcagggatgtgatccgacgggcaggcggcgcccgggacaga

SEQ ID NO: 81238 - DNA, 249 bp, Homo sapiens
  chr11:528638-528887
  hypo
cgcgggtgctctgacgatcgtctcgagccacgggggtgacagtgacaaggacctgtgtgcacgttagtggggcagccaggcctagctggagaagaaacacacacacgcacacgttcacccacatacacgtgcacacacatgctgccagttcagggggtggaggacgctgactccaggcccagctgacctgcgcggggccctattgtgatgtgtgcagccaccccatgacgtcaccggtgccaagtgccg

SEQ ID NO: 81239 - DNA, 30 bp, Homo sapiens; identical to SEQ ID NO: 24843
  chr11:533442-533472
  hypo

SEQ ID NO: 81240 - DNA, 30 bp, Homo sapiens; identical to SEQ ID NO: 24844
  chr11:534217-534247
  hypo

SEQ ID NO: 81241 - DNA, 37 bp, Homo sapiens
  chr11:539724-539761
  hypo
aggtaagcctgatgcacgtagtcgagggacacactgg

SEQ ID NO: 81242 - DNA, 142 bp, Homo sapiens
  chr11:548734-548876
  hypo
ggcgtgaaccaccgcgcccggcctcaagtggttttttaaggacagaaataacgaagtgctccttagacgtcgccacagtggacactggaacgaaaggctttgcagcctcctgggaagaggcgtgaactgagagtctgacacc

SEQ ID NO: 81243 - DNA, 30 bp, Homo sapiens
  chr11:551271-551301
  hypo
atcaagaagggcaacggccttcccccgctg

SEQ ID NO: 81244 - DNA, 1438 bp, Homo sapiens
  chr11:561903-563341
  hypo
cggggtcaggcaggccgggcaggtagagctgaagtgggacctggtggtccagctccatggtctcccccaaggagagtggggctggttgctgatcctttttgttcttcccaactcttcaagccaggtggacagagagtcggggggacataggctgaccttctcctcttcttcccaggccagactggccgctttgtgcttgtgcagcggcttcgggagaaggagcggcagttgctgccacaagagtgtccagtgggcgcccaggccacctgcggacagtttgccagcgatgtccagtttgtcctgaggcgcacagggcccagcctagctgggaggccctcctcagacagctgtccacccccggaacgctgcctaattcgtgccagcctccctgtaaagccacgggctgcgctgggctgtgagccccgcaaaacactgacccccgagccagcccccagcctctcacgccctgggcctgcggcccctgtgacacccacaccaggctgctgcacagacctgcggggcctggagctcagggtgcagaggaatgctgaggagctgggccatgaggccttctgggagcaagagctgcgccgggagcaggcccgggagcgagagggacaggcacgcctgcaggcactaagtgcggccactgctgagcatgccgcccggctgcaggccctggacgctcaggcccgtgccctggaggctgagctgcagctggcagcggaggcccctgggcccccctcacctatggcatctgccactgagcgcctgcaccaggacctggctgttcaggagcggcagagtgcggaggtgcagggcagcctggctctggtgagccgggccctggaggcagcagagcgagccttgcaggtgagcccggggacctgatcccctgtcactcccccacccctgatatgggcagatacggggatcacagggtcccactcgggaggcaggtgagcccggggacctgatcccctgtcactcccccacccctgacgtgggcagatatgggggtcacagggtctgactcgggaggcaggtgagcccgcggacctgatcccctgtcactcccccacccctgacgtgggcagatacgggggtcacagggtcccactcgggaggcaggtgagcccggggacctgatcccctgtcactccccaacccctgacgtgggcagatatgggggtcacagggcccgaccagggaaagtgctccctccggagcacaagggctgtggagcccagtggctgtgcctcctaaggatctcatgtgtccccaggctcaggctcaggagctggaggagctgaaccgagagctccgtcagtgcaacctgcagcagttcatccagcagaccggggctgcgctgccaccgcccccacggcctgacaggggccctcctggcactcaggtcggagtggttctggggggaggc

SEQ ID NO: 81245 - DNA, 160 bp, Homo sapiens; identical to SEQ ID NO: 24846
  chr11:563845-564005
  hypo

SEQ ID NO: 81246 - DNA, 157 bp, Homo sapiens
  chr11:567174-567331
  hypo
ggatcccacctggtgtaagtacgggcagagggcagagccaggctgtatcgaggggcggcgctgggaccctcctcgcccagagttcctactcatccccagcacagaagtgctctgtagggccagctgaggacaccccggttcactgagggtggcccac

SEQ ID NO: 81247 - DNA, 208 bp, Homo sapiens; identical to SEQ ID NO: 48021
  chr11:568191-568399
  hypo

SEQ ID NO: 81248 - DNA, 222 bp, Homo sapiens; identical to SEQ ID NO: 48023
  chr11:575603-575825
  hypo

SEQ ID NO: 81249 - DNA, 330 bp, Homo sapiens; identical to SEQ ID NO: 24849
  chr11:590963-591293
  hypo

SEQ ID NO: 81250 - DNA, 30 bp, Homo sapiens
  chr11:592570-592600
  hypo
aacaccaaagcgagcgaggaggaggaggac

SEQ ID NO: 81251 - DNA, 111 bp, Homo sapiens; identical to SEQ ID NO: 24850
  chr11:593650-593761
  hypo

SEQ ID NO: 81252 - DNA, 30 bp, Homo sapiens; identical to SEQ ID NO: 24851
  chr11:599075-599105
  hypo

SEQ ID NO: 81253 - DNA, 123 bp, Homo sapiens
  chr11:601645-601768
  hypo
caagatctaagaaacgccaacatcgagtgaagaagagaagagggaagaaggtaaaggtgagcattgggtggcagggcctgagtctcctgctggccacagcaccctcgcgtggttacggagcag

SEQ ID NO: 81254 - DNA, 61 bp, Homo sapiens; identical to SEQ ID NO: 24853
  chr11:609530-609591
  hypo

SEQ ID NO: 81255 - DNA, 117 bp, Homo sapiens
  chr11:618978-619095
  hypo
ctgttttctgcacccgggggccccccgggtgtggacgaggttggtggcctcagagttgtgccagagggtggatgagggcctgtgcctcccccagagctggtcgtggagggtccctgg

SEQ ID NO: 81256 - DNA, 303 bp, Homo sapiens
  chr11:625774-626077
  hypo
gctcagtgtcctaaccctgcacggtgccctcatggtcgccttcaagccctgcacgctccgtgctccacaggctctgaggggtcaagccactggtccgaggccacacgagacagagggtccggagtcctcacgccagagtggattcctggcaccccaggtgacacctccaccctcccctcttcctgcccgcctgagcccccctggccccttcacaccctccccactaccccttacagaaacactgaccacatgggcccccgggcaggagctgagagggtgtccgggatcccccgagccccagaa

SEQ ID NO: 81257 - DNA, 132 bp, Homo sapiens
  chr11:644101-644233
  hypo
ctccggcctggccgcgctgtcccgtgcaccagaggtgcggtgggcttggttttcccacctgcgcagtaggaggaaggggaggaaacccccccccgagggctggcactgcaaccggccgtgtggggcagggag

SEQ ID NO: 81258 - DNA, 165 bp, Homo sapiens
  chr11:688382-688547
  hypo
cccatctgtgtggacgacaatcagtgtcgctttttcggtgttcaggctgtccccgatctgaagggccgtcctaccagactagaaggaaaaaccgctccgtcaggtcacgtccgagagtgacaccaggcgtgtcactgagcccagctgggccgtcctccagcaggg

SEQ ID NO: 81259 - DNA, 139 bp, Homo sapiens
  chr11:700513-700652
  hypo
aagaccctgtctcaaaaaaaaaaaaaaggaaaaggcaagctgaggtggctgctgctgctgtgccaggttacttatgttccgtccgcgcctctgctcttcaggtcaggtgttcagctatcctcaccgctacctggtcctc

SEQ ID NO: 81260 - DNA, 487 bp, Homo sapiens; identical to SEQ ID NO: 48029
  chr11:705950-706437
  hypo

SEQ ID NO: 81261 - DNA, 30 bp, Homo sapiens; identical to SEQ ID NO: 24856
  chr11:712378-712408
  hypo

SEQ ID NO: 81262 - DNA, 31 bp, Homo sapiens; identical to SEQ ID NO: 24857
  chr11:724960-724991
  hypo

SEQ ID NO: 81263 - DNA, 136 bp, Homo sapiens
  chr11:727708-727844
  hypo
ccagttaagtctcccaggagccgtgtgtctcagttctctgggagtcggagtgggtcctggagcccccggaaactgcaccttttctaagcagtgccgggcagagggctggccgtccgccaggctgctctgcccctga

SEQ ID NO: 81264 - DNA, 194 bp, Homo sapiens
  chr11:733217-733411
  hypo
cacaccacccagtgtgcggcgtttgccatggcagccccgtgaaacacagaagcctgccttctcaaccgcactcacctttgctcgaatatgagcagcccccattcttccccgacacacacagtcaaatcagcaaacgtcactgatttgatgcagtctcacctggaagcgtaagcatccggcgtcccgggcgcctg

SEQ ID NO: 81265 - DNA, 34 bp, Homo sapiens; identical to SEQ ID NO: 24859
  chr11:744541-744575
  hypo

SEQ ID NO: 81266 - DNA, 400 bp, Homo sapiens
  chr11:763286-763686
  hypo
cgccctcacctgtccccgccctcacctgccccgccctcacctgtccccgccccgcagggagctcgaggagcagcacggcatccactgcaacatgacgttactcttctccttcgcccaggctgtggcctgtgccgaggcgggtgtgaccctcatctccccatttgttgggcgcatccttgattggcatgtggcaaacaccgacaagaaatcctatgagcccctggaagaccctggtgagggtccctctgtggtaatggggtaaggggagcagcctcagcagcacctcaggcaggaagagcccgagacggagctgccgcatcaacaagcagtgaggtgcacaggtcggcgcggggcaggcaggggtggcggctcaaggtagtgcagccggcaggcactggga

SEQ ID NO: 81267 - DNA, 213 bp, Homo sapiens
  chr11:763888-764101
  hypo
gggagagctgctgcaggacaacgccaagctggtgcctgtgctctcagccaaggcgggtgaggccccactgcccagctgtggctcctgctcgggcaaggccagcactgccgtgccacgctgccctgtgggtgatccctcccacctgtggggcgagctcatcttgggagacatgagggtgaagtagacctcaacggagggcttggctttcctaac

SEQ ID NO: 81268 - DNA, 166 bp, Homo sapiens; identical to SEQ ID NO: 24861
  chr11:772955-773121
  hypo

SEQ ID NO: 81269 - DNA, 190 bp, Homo sapiens
  chr11:775073-775263
  hypo
tggccacctgcaggttgaaggcggtgctggccatcgtgaaacagtggaggaaggactgggccgacacacctgcagaaggtcccagtgagtgtgggctcgacaggactagcgtgccccgcctcagggggctacccagacacccccatggcctcgactgaccccagaacacgctgaggagcagccctctccc

SEQ ID NO: 81270 - DNA, 143 bp, Homo sapiens
  chr11:782433-782576
  hypo
caggccctgctctgcccgtcgagcctccagggcaagtgcaagctcagcctgggcctggagacggcggatcggagcgtgtccaggtgctcagggactggtcaccgaaaggcaaggagccctccctgggacgagggagacaccca

SEQ ID NO: 81271 - DNA, 30 bp, Homo sapiens
  chr11:787670-787700
  hypo
acccccggggggtacgcaaagagcagaaat

SEQ ID NO: 81272 - DNA, 30 bp, Homo sapiens
  chr11:791998-792028
  hypo
cgcgatgaccagcgcgcggcagtaggcgcc

SEQ ID NO: 81273 - DNA, 30 bp, Homo sapiens
  chr11:799206-799236
  hypo
tgctcacagggacccgtccccacacactgg

SEQ ID NO: 81274 - DNA, 30 bp, Homo sapiens
  chr11:800579-800609
  hypo
gaactcttcgccctcgaacatctccaccgt

SEQ ID NO: 81275 - DNA, 30 bp, Homo sapiens
  chr11:800850-800880
  hypo
gctcccaggccttccgagccaggcctccca

SEQ ID NO: 81276 - DNA, 436 bp, Homo sapiens
  chr11:823570-824006
  hypo
ctttctgcagcggaacggtgcgcggacccgggcgggagagggcggggtgggctcggctctgctaccccctgcgggccgcggccgcgctgatgaactgagaatcccttctctccccaaccccaggcctcctgaaccggcccaaccccttgctggcgttgccccccgcccgcccccacggcccagaggacaaggaccaggcagtggagagcgcccaagcggaggattactcgcagctgcccggagaagatcacatcctggagcacctgcccgcccggctcaatgagggtgcgcacctgggggacgggaggggaggaggggaggcaggagggaaagagagagaggagaggacggtgagcaggggagggaagccgagcgggtcctgggccccgctgcctccactggccgccgacctcccgcccacccgcagccctgctgg

SEQ ID NO: 81277 - DNA, 47 bp, Homo sapiens
  chr11:826155-826202
  hypo
ccttttgtggttcagctgggtcgcacgctggatcccaggccccttcc

SEQ ID NO: 81278 - DNA, 35 bp, Homo sapiens; identical to SEQ ID NO: 7854
  chr11:832780-832815
  hypo

SEQ ID NO: 81279 - DNA, 30 bp, Homo sapiens; identical to SEQ ID NO: 24863
  chr11:840392-840422
  hypo

SEQ ID NO: 81280 - DNA, 170 bp, Homo sapiens; identical to SEQ ID NO: 24864
  chr11:850937-851107
  hypo

SEQ ID NO: 81281 - DNA, 30 bp, Homo sapiens; identical to SEQ ID NO: 24865
  chr11:855956-855986
  hypo

SEQ ID NO: 81282 - DNA, 157 bp, Homo sapiens
  chr11:859291-859448
  hypo
tgcaccccggctcacacgcaccccccctttcacacgcaccccgggctcacacgcaccccgggctcacacgcaccccccctttcacacgcaccccgggctcacatgcaccccggctcacacgcaccccctctcacacgcaccccggctcacacgcacc

SEQ ID NO: 81283 - DNA, 406 bp, Homo sapiens
  chr11:862652-863058
  hypo
tgctcatcatcaccggcgcctttgtcatggccatcggcttcgtgggctgcctgggtgccatcaaggagaacaagtgcctcctgctcactgtgagtgccggggcccaagcgatgctccgggtgggaccacgcagggtggggctccggtggcccccaggccttggctgccgcagtgaccccccagacgtgggcaccacctctggggccggacctccaggctggcagtgtggcccggggccctggccactgttgggtcttccaggccacactggggctggggggtgatttgcagagcggtgtgggggtcactcaagagaacgtgctgtaccttgtcaggggcctcccctgacgggacactggccctggtgagtgcaggcacagccccgcacacacgtacacacgcatgc

SEQ ID NO: 81284 - DNA, 110 bp, Homo sapiens
  chr11:864724-864834
  hypo
actgctaccccacccggagggtgcgccccaggttgtcccccgccctctgacgcagcgtcctgagccgtctgctcccagcgccccatccgggccgcgcaccgtggggttct

SEQ ID NO: 81285 - DNA, 30 bp, Homo sapiens
  chr11:865734-865764
  hypo
ggtgtacaacgccacgcgggtacctgactc

SEQ ID NO: 81286 - DNA, 30 bp, Homo sapiens
  chr11:867016-867046
  hypo
tcctggtgctccaggcggggccgtggaccc

SEQ ID NO: 81287 - DNA, 30 bp, Homo sapiens
  chr11:869477-869507
  hypo
ggagtgggcgagtccgggatggttccagag

SEQ ID NO: 81288 - DNA, 207 bp, Homo sapiens
  chr11:875481-875688
  hypo
agctgtagacactgagggccccgggtgtggagaagacctggctcctcgtcactggctatcggagagcgctggggtgttaggagaacacggtgagcatgaggccggggatcggggctggggttgctgaaactcttagcgccacatgaggccgagggagtcaagtcctggggtggccatgaggggctcgccacaccattctatgcactt

SEQ ID NO: 81289 - DNA, 31 bp, Homo sapiens; identical to SEQ ID NO: 24868
  chr11:880350-880381
  hypo

SEQ ID NO: 81290 - DNA, 30 bp, Homo sapiens
  chr11:888555-888585
  hypo
cgcagcgtgacttccgatgaacaggaatta

SEQ ID NO: 81291 - DNA, 30 bp, Homo sapiens
  chr11:889216-889246
  hypo
ccatgtacccacaccgtccctccagcacag

SEQ ID NO: 81292 - DNA, 30 bp, Homo sapiens
  chr11:890316-890346
  hypo
ggcctctgtgcaaacgtgcttgctggggat

SEQ ID NO: 81293 - DNA, 30 bp, Homo sapiens; identical to SEQ ID NO: 24869
  chr11:891002-891032
  hypo

SEQ ID NO: 81294 - DNA, 207 bp, Homo sapiens
  chr11:898337-898544
  hypo
aactacttcaggtggtgggggcgggggagccgattccagaacccacggctcacacagaaggctgaagggctggacagctgccatagggctctgctgtccaggcacccgcggtggagaccgcaccatcctcgctcgttgcaaccagtggagtgagaggagtccacctgtcctgagcatgtcgaggacgccccctaccaacatcctggg

SEQ ID NO: 81295 - DNA, 80 bp, Homo sapiens
  chr11:907471-907551
  hypo
ctgtctttaaaaaaaaaaaaaaagtgattctactttctatctttcactggggttgggggcagcggcggtgggagctgaac

SEQ ID NO: 81296 - DNA, 30 bp, Homo sapiens; identical to SEQ ID NO: 24871
  chr11:921977-922007
  hypo

SEQ ID NO: 81297 - DNA, 84 bp, Homo sapiens
  chr11:937329-937413
  hypo
taccactgaccacagcgcaacaccattgtccgtctccagaaagaggccttcagtgccgtgagcgcatgtcagatctctgccatc

SEQ ID NO: 81298 - DNA, 38 bp, Homo sapiens
  chr11:938959-938997
  hypo
aatgtagtttaaggccaggtgcggtggctcacgcctgt

SEQ ID NO: 81299 - DNA, 25 bp, Homo sapiens
  chr11:939450-939475
  hypo
ttgactttttttgagacggggtttc

SEQ ID NO: 81300 - DNA, 30 bp, Homo sapiens
  chr11:945187-945217
  hypo
agggtgactcctagcgtgggtagggcctag

SEQ ID NO: 81301 - DNA, 145 bp, Homo sapiens
  chr11:946373-946518
  hypo
tactgagcttgccatcgtatgagctagctcagtgtgaaaaccctgtttctgaaagagagactgtcagttgagaattctgtgtccagtaaaactgtcctttgaaaatagaggaattggctgggtgtggtggctcatgcctgtaatc

SEQ ID NO: 81302 - DNA, 263 bp, Homo sapiens
  chr11:971726-971989
  hypo
gtgatgtccggaacactcagacgcgtggcccacagtgaagtgagtgggaccggggggtccagttcctgttggcatctggctcgtggcacgctagtcaggtgtgccccacaggaacgctgcgccatgagagcatcgtagcagaggcatcctcggttccactggaacagacgtttgccgaatcctgagaggcgccgctcccacagcagtgccctgggtgcgtgggtggtgcctgggctgcttccgcatctgtgtgtcactgattg

SEQ ID NO: 81303 - DNA, 30 bp, Homo sapiens
  chr11:972232-972262
  hypo
atccctaaggtcctcgtagccgggtatgtg

SEQ ID NO: 81304 - DNA, 30 bp, Homo sapiens
  chr11:977265-977295
  hypo
acctttgggatggccgttgtgaagacacca

SEQ ID NO: 81305 - DNA, 30 bp, Homo sapiens
  chr11:977547-977577
  hypo
catctaggctctaacgtgcagtcttactaa

SEQ ID NO: 81306 - DNA, 30 bp, Homo sapiens
  chr11:980552-980582
  hypo
ggtgacaggctgcccggtgctttggggagg

SEQ ID NO: 81307 - DNA, 31 bp, Homo sapiens; identical to SEQ ID NO: 24873
  chr11:984630-984661
  hypo

SEQ ID NO: 81308 - DNA, 690 bp, Homo sapiens
  chr11:985301-985991
  hypo
cttccagctgggtacacaaatgtgaatgaactatattaaaaatgctctcatgatgtatgggtgcagccgggaggggcagggtgggctgcgggccactggagactggtgagcaccgttctgtcttgcccagaagaccctgcagtgcgaggccgcctgactgagtgcctggagaccatcctgaacaaagcccaagaaccgcccaagtcgaagaaggtccagcactccaacgcgaagaatgccgtgctcttcgaggccatcagcttaatcattcaccatgacaggtgtgtcggctgcctgtggagaggcttcgtctcgcgcacacacacacgttccttctcgttggcacgagactgggcggatcatgtctggtttgtccactccatgggcctccccttcgtcctgcctctgtgctccctgccggatgctttttttctttctgtgcagcccggcccctcctgctctgagctcaccgtggattgctttggtgactgtggtctcatcccacacgagggccttttcctccttcccctgagcatccccactcctgactggcttctcatgtagtggaacagagaggagacgggtggggtggggggtgtgcgcgcatgtcccgtggctttgctggatgtggagccgcacttggtgggtccagggtcgcagggcagtgctggaaacgtctgtgcccatcca

SEQ ID NO: 81309 - DNA, 30 bp, Homo sapiens
  chr11:986393-986423
  hypo
agcagccgcgctcccggccttctcggcctt

SEQ ID NO: 81310 - DNA, 31 bp, Homo sapiens
  chr11:986982-987013
  hypo
ctccctgagcaggtgccgtgggtcttcctgt

SEQ ID NO: 81311 - DNA, 363 bp, Homo sapiens
  chr11:991641-992004
  hypo
tgccctggaagtgtcacggagtcaggttggggtttgggggtccaggctccaggcagggacttggggtgggggggcacagtcaccagcacctgagaggccagtggcagggtgtggagagggggcggcagggtgtggggaggggcggcagggtattaggggtgccctcgggaggtgcgcggtcttgatgcctgctggcgttggtgttggcagctggcgctgttcgaagggggcttggttccaggcgaggtgactttggggagatgagtttggtgttgtacagcctggcagagctccatgtgggtggctgccacgtgggtgtgggctgggcaggtgcctccggggggcacccgtgagagtgagcca

SEQ ID NO: 81312 - DNA, 30 bp, Homo sapiens; identical to SEQ ID NO: 24877
  chr11:992637-992667
  hypo

SEQ ID NO: 81313 - DNA, 30 bp, Homo sapiens; identical to SEQ ID NO: 24878
  chr11:993357-993387
  hypo

SEQ ID NO: 81314 - DNA, 302 bp, Homo sapiens; identical to SEQ ID NO: 24879
  chr11:996127-996429
  hypo

SEQ ID NO: 81315 - DNA, 264 bp, Homo sapiens; identical to SEQ ID NO: 24880
  chr11:998036-998300
  hypo

SEQ ID NO: 81316 - DNA, 57 bp, Homo sapiens; identical to SEQ ID NO: 24881
  chr11:1000518-1000575
  hypo

SEQ ID NO: 81317 - DNA, 30 bp, Homo sapiens
  chr11:1001993-1002023
  hypo
tggctgctggcacacggctcacaggacagg

SEQ ID NO: 81318 - DNA, 330 bp, Homo sapiens
  chr11:1005988-1006318
  hypo
gtgccgtggctgagccgctgcagtgagggctagtgtgcaacaccgatgctgtgctggacgcgtgcccagccgggtcccctgacaggaggcagccggggccggtgcgtgtgtttgcatgttgcagtcatggggcggggccggcagaggcctgtgtgattgtggcgtccctggaaaagatgcttggcaggcccctccagctgtagcccagcctgcagacggggcgttctgtgggtccttccccgtgcatatgcgtgtgatctcacccatcccgtgtgggtgcgcaggaggggccgagggaggagggtgctggagggcggaagttacctctga

SEQ ID NO: 81319 - DNA, 164 bp, Homo sapiens
  chr11:1006970-1007134
  hypo
cagagtgtgggaggcgccagtggggactggagcgcggtgcgcaccccagccgagcttgtgtgtgcttctggcagagcttttagactgaagattttcccttcgtaatgccagaagcgttcctagaacttccccagctaaaacagggagacgctaacgtctctacc

SEQ ID NO: 81320 - DNA, 31 bp, Homo sapiens; identical to SEQ ID NO: 24884
  chr11:1007687-1007718
  hypo

SEQ ID NO: 81321 - DNA, 302 bp, Homo sapiens
  chr11:1008229-1008531
  hypo
gggacccggggcgtgcgggtgctcacggtgcatggatgcggcctgagctattgctgcccccggctctgcagagcgcaggaaacaaggggaggcggagccctgggctccgggacggcaggtggcagctcccacatggggccttgctaggatctttctgggcaccatggggcccacctcatggggtggcagacagccagggcccccgcgccacctgcccggcttggtaccagacgacagctgtggggtgcaggcagctggtttccttcggccccctggcctggggggcgcgttttttgctcagt

SEQ ID NO: 81322 - DNA, 60 bp, Homo sapiens
  chr11:1008940-1009000
  hypo
agccacacacgatccgtggggactgaaggctcggccccccgacccgctctggtgggtggc

SEQ ID NO: 81323 - DNA, 30 bp, Homo sapiens
  chr11:1009786-1009816
  hypo
gctgcgcttggagccgaacctgcaagccca

SEQ ID NO: 81324 - DNA, 30 bp, Homo sapiens; identical to SEQ ID NO: 24885
  chr11:1010697-1010727
  hypo

SEQ ID NO: 81325 - DNA, 30 bp, Homo sapiens
  chr11:1010968-1010998
  hypo
gctgccgcccaccccgcctcggagcctctg

SEQ ID NO: 81326 - DNA, 64 bp, Homo sapiens
  chr11:1011266-1011330
  hypo
tatgctcctgcagtcgccgaggccttggatgtgcagccaggggaggagcgtcctgccggccccg

SEQ ID NO: 81327 - DNA, 30 bp, Homo sapiens
  chr11:1012086-1012116
  hypo
gctgcgtgtgctgccgtggatctcctgcat

SEQ ID NO: 81328 - DNA, 31 bp, Homo sapiens; identical to SEQ ID NO: 24886
  chr11:1013851-1013882
  hypo

SEQ ID NO: 81329 - DNA, 30 bp, Homo sapiens
  chr11:1021797-1021827
  hypo
tcttctgtgctccccgatgcaggtgccctg

SEQ ID NO: 81330 - DNA, 30 bp, Homo sapiens
  chr11:1023558-1023588
  hypo
ggctggtagtgccacgtgcagttggcctcc

SEQ ID NO: 81331 - DNA, 30 bp, Homo sapiens
  chr11:1023931-1023961
  hypo
ggggtggtcactcacggcagaaggccgggg

SEQ ID NO: 81332 - DNA, 31 bp, Homo sapiens
  chr11:1025409-1025440
  hypo
cggcccctggcacagccgtgctggaccgagc

SEQ ID NO: 81333 - DNA, 30 bp, Homo sapiens; identical to SEQ ID NO: 24887
  chr11:1027545-1027575
  hypo

SEQ ID NO: 81334 - DNA, 30 bp, Homo sapiens; identical to SEQ ID NO: 24888
  chr11:1028276-1028306
  hypo

SEQ ID NO: 81335 - DNA, 30 bp, Homo sapiens
  chr11:1032120-1032150
  hypo
gcagagaggtcactcgtctccctgggccag

SEQ ID NO: 81336 - DNA, 30 bp, Homo sapiens; identical to SEQ ID NO: 24889
  chr11:1033142-1033172
  hypo

SEQ ID NO: 81337 - DNA, 30 bp, Homo sapiens
  chr11:1044780-1044810
  hypo
tgctgggattacaggcgtgcgccacctaga

SEQ ID NO: 81338 - DNA, 70 bp, Homo sapiens
  chr11:1047106-1047176
  hypo
ctattatgtcttcaagttcaccgctgtcctcttctgcattgtcgcatccgttgttaatcctgtccagtgt

SEQ ID NO: 81339 - DNA, 31 bp, Homo sapiens
  chr11:1055802-1055833
  hypo
ataagaacacatccaacgtccccaacaaggg

SEQ ID NO: 81340 - DNA, 39 bp, Homo sapiens
  chr11:1056098-1056137
  hypo
tgccattccccagggacgggtcctcgcctgcctcgccgg

SEQ ID NO: 81341 - DNA, 30 bp, Homo sapiens
  chr11:1056391-1056421
  hypo
tctgaaaggacgggcgcaaccccgcagaac

SEQ ID NO: 81342 - DNA, 81 bp, Homo sapiens
  chr11:1061400-1061481
  hypo
ataggtgtgagccagtgggcccggccacgtgctcttatgtagcttatcagagtgtatgacgctgcctgtcccattgctggg

SEQ ID NO: 81343 - DNA, 30 bp, Homo sapiens; identical to SEQ ID NO: 24890
  chr11:1077628-1077658
  hypo

SEQ ID NO: 81344 - DNA, 358 bp, Homo sapiens
  chr11:1082516-1082874
  hypo
tgcatctgtgagcgccgggccacactctgcctccctgcctcactgcccgtccaccttgctctgtcgcccagaggtgcaaatatgacacgtgtaactgtcagaacaatgaggactgcctgtgcgccgccctgtcctcctacgcgcgcgcctgcaccgccaagggcgtcatgctgtggggctggcgggagcatgtctgcagtgagtgccgtccccgtgggctgcatcctggggatggggtccgggctttgagctcctgggacggggctgggggccctgagcacgggtggtccagggagaggggtcggccccctgcagccacggaccaggctccagcttcgtcagccggtggtagcaggaa

SEQ ID NO: 81345 - DNA, 30 bp, Homo sapiens
  chr11:1095592-1095622
  hypo
ccgcccctcctgagcgcagaccaccccatc

SEQ ID NO: 81346 - DNA, 380 bp, Homo sapiens; identical to SEQ ID NO: 24891
  chr11:1096251-1096631
  hypo

SEQ ID NO: 81347 - DNA, 189 bp, Homo sapiens; identical to SEQ ID NO: 24892
  chr11:1098637-1098826
  hypo

SEQ ID NO: 81348 - DNA, 874 bp, Homo sapiens
  chr11:1103665-1104539
  hypo
gggtggctggaggctggacaacggcctctgggtgggcagtgagggctgggggctgaggccgagcctggggaggggacgcagcgagggagagcctcctcgaagatgtggaggccctgccctaagccgctgcccgctctccccaggcacccctcgcaatgagaccagggtgccctgctccaccgtccccgtcaccacggaggtttcgtacgccggctgcaccaagaccgtcctcatgaatcattgctccgggtcctgcgggacatttgtcatgtgagtcccaggctgggagtgtgcctggagggggtggtggagaccccagggaggcgagaggccagcgctggccccggaaggtcacccctcactccgccctccccccaggtactcggccaaggcccaggccctggaccacagctgctcctgctgcaaagaggagaaaaccagccagcgtgaggtggtcctgagctgccccaatggcggctcgctgacacacacctacacccacatcgagagctgccagtgccaggacaccgtctgcgggctccccaccggcacctcccgccgggcccggcgctcccctaggcatctggggagcgggtgagcggggtgggcacagcccccttcactgccctcgacagctttacctcccccggaccctctgagcctcctaagctcggcttcctctcttcagatatttattgtctgagtctttgttcagtccttgctttccaataataaactcagggggacatgctgtactgtgtggtttaggttggtgctgcaggggtgcggcttggccactgtgcatggcggaggccaccaggctctgcgtgcaggacacgggggcaccacacacacgccacgcggttggcaaatc

SEQ ID NO: 81349 - DNA, 346 bp, Homo sapiens; identical to SEQ ID NO: 24894
  chr11:1105011-1105357
  hypo

SEQ ID NO: 81350 - DNA, 31 bp, Homo sapiens; identical to SEQ ID NO: 48038
  chr11:1139541-1139572
  hypo

SEQ ID NO: 81351 - DNA, 30 bp, Homo sapiens; identical to SEQ ID NO: 24895
  chr11:1140343-1140373
  hypo

SEQ ID NO: 81352 - DNA, 31 bp, Homo sapiens
  chr11:1158948-1158979
  hypo
cagggacggtgcttgacgacatcggccagac

SEQ ID NO: 81353 - DNA, 132 bp, Homo sapiens; identical to SEQ ID NO: 24896
  chr11:1214721-1214853
  hypo

SEQ ID NO: 81354 - DNA, 728 bp, Homo sapiens; identical to SEQ ID NO: 24897
  chr11:1215278-1216006
  hypo

SEQ ID NO: 81355 - DNA, 30 bp, Homo sapiens
  chr11:1216290-1216320
  hypo
gtcgcttcctgctccgagatgtccggctct

SEQ ID NO: 81356 - DNA, 30 bp, Homo sapiens
  chr11:1217151-1217181
  hypo
gctgcgtctttgaccggtgccacatgacgg

SEQ ID NO: 81357 - DNA, 38 bp, Homo sapiens
  chr11:1221702-1221740
  hypo
gtgctgccaggagctgcggacctcgctgaggaatgtga

SEQ ID NO: 81358 - DNA, 124 bp, Homo sapiens
  chr11:1250877-1251001
  hypo
ccccgtgcatgggccggccctgcctcacgccgcgccccacaggcacggtgctggatgacatcacgcactctggctgcctgcccctcgggcagtgcccctgcacccacggcggccgcacctacag

SEQ ID NO: 81359 - DNA, 30 bp, Homo sapiens
  chr11:1251203-1251233
  hypo
tgccggttctgctcacggcctccctcccca

SEQ ID NO: 81360 - DNA, 30 bp, Homo sapiens
  chr11:1251751-1251781
  hypo
tgagctgcggaagtgcggcctgacggacaa

SEQ ID NO: 81361 - DNA, 100 bp, Homo sapiens
  chr11:1255096-1255196
  hypo
ctgccctgccctgccccgccccgcatcaccccgcctggcctggccccaacacgccccaccctgccccaccccacctgaaccctgccgggccaggtcagtc

SEQ ID NO: 81362 - DNA, 30 bp, Homo sapiens
  chr11:1256363-1256393
  hypo
acctgcgtggcctacggggatggccacttc

SEQ ID NO: 81363 - DNA, 30 bp, Homo sapiens; identical to SEQ ID NO: 24899
  chr11:1257644-1257674
  hypo

SEQ ID NO: 81364 - DNA, 30 bp, Homo sapiens
  chr11:1262160-1262190
  hypo
cccggcctgggaggcggagactttgagacg

SEQ ID NO: 81365 - DNA, 1368 bp, Homo sapiens
  chr11:1262524-1263892
  hypo
cgagcatccggtcgacggcggccctcacctcgcagactgggtccagctcaggccccgtgacggtcaccccctcggccccaggtaccaccacctgccagccccggtgtcagtggacagagtggtttgatgaggactaccccaagtctgaacaacttggaggggacgttgagtcctacgataagatcagggccgctggagggcacttatgccagcagcctaaggacatagagtgccaggccgagagcttccccaactggaccctggcacaggtggggcagaaggtgcactgtgacgtccacttcggcctggtgtgcaggaactgggagcaggagggcgtcttcaagatgtgctacaactacaggatccgggtcctctgctgcagtgacgaccactgcaggggacgtgccacaaccccgccaccgaccacagagctggagacggccaccaccaccaccacccaggccctgttctcaacgccgcagcctacgagtagcccggggctgaccagggctcccccggccagcaccacagcagtccccaccctctcagaaggactgacatcccccagatacacaagcacccttggtacagccaccacgggaggccccacgacgcctgcaggctccacagaacccactgtcccaggggtggccacatccacccttccaacacgctcagcccttccagggacgacggggagcttgggcacatggcgcccctcacagccacccacgctggccccaacaacaatggcaacctccagagctcgcccgacaggcacagccagcaccgcttccaaagagccgctgaccacgagcctggcgccaacactcacgagcgagctgtccacctctcaggccgagaccagcacgcccaggacagagacgacaatgagccccttgactaacaccaccaccagccagggcacgacccgctgtcaaccgaagtgtgagtggacagagtggtttgacgtggacttcccaacctcaggggttgcaggcggggacatggaaacttttgaaaacatcagggctgctgggggcaagatgtgctgggcaccaaagagcatagagtgccgggcggagaactaccccgaggtaagcatcgaccaggtcgggcaggtgctgacctgcagcctggagacggggctgacctgcaagaacgaagaccagacaggcaggttcaacatgtgcttcaactacaacgtgcgtgtgctttgctgtgacgactacagccactgccccagtaccccagccaccagctccacggccacgccctcctcaactccggggacgacctggatcctcacaaagccgaccacaacagccactacgactgcgtccactggatccacggccaccccgacct

SEQ ID NO: 81366 - DNA, 30 bp, Homo sapiens
  chr11:1273773-1273803
  hypo
cacctcccgtgctgcgtgcacacggtctgg

SEQ ID NO: 81367 - DNA, 100 bp, Homo sapiens
  chr11:1274055-1274155
  hypo
cctggagaactgcacggtggccaggtgcgtgggtgacaaccgtgtcgtcctgctggacccaaagcctgtggccaacgtcacctgcgtgaacaagcacctg

SEQ ID NO: 81368 - DNA, 319 bp, Homo sapiens
  chr11:1275369-1275688
  hypo
cctcttacaccttccggggcaactgcacctatgtcctcatgagagagatccatgcacgctttgggaatctcagcctctacctggacaaccactactgcacggcctctgccactgccgctgccgcccgctgcccccgcgccctcagcatccactacaagtccatggatatcgtcctcactgtcaccatggtgcatgggaaggaggagggcctggtgagtccaggctgcgggtggcacagtgttggcccagtcccaaccgcacctgggcaggccgactgcaggccggggtgacccaggtgccgcagcgatggcccagtgcc

SEQ ID NO: 81369 - DNA, 814 bp, Homo sapiens
  chr11:1275937-1276751
  hypo
aattccggtgagcagcggtttcagcaagaacggcgtgcttgtgtctgtgctggggaccaccaccatgcgtgtggacattcctgccctgggcgtgagcgtcaccttcaatggccaagtcttccaggcccggctgccctacagcctcttccacaacaacaccgagggccagtgcggtgagtgggcggcgggtcctgccccggccagggctgctgctgggcctgacaacccagtgagcataggggaagcctggggaggggaatgagtgggggaggggggtgggggctgtgaaaggctccccagattccagccccgcggtgacgcccccactcccaggcacctgcaccaacaaccagagggacgactgtctccagcgggacggaaccactgccgccagttgcaaggacatggccaagacgtggctggtccccgacagcagaaaggatggctgctgggccccgactggcacaccccccactgccagccccgcagccccggtgtctagcacacccacccccaccccatgcccaccacagccgctctgtgatctgatgctgagccagtgagtcctcccctcgggggttgcaggccctggggcgcccccgcccgcccgcatgcacgcacgcacgcagctccctggggctgggggccctccgtcctgatcgctttgccccacagggtctttgctgagtgccacaaccttgtgcccccgggcccattcttcaacgcctgcatcagcgaccactgcaggggccgccttgaggtgccctgccagagcctggaggcttacgcagagctctgccgcgcccggggagtg

SEQ ID NO: 81370 - DNA, 30 bp, Homo sapiens; identical to SEQ ID NO: 24905
  chr11:1282940-1282970
  hypo

SEQ ID NO: 81371 - DNA, 30 bp, Homo sapiens
  chr11:1293751-1293781
  hypo
ggagttcagggacccgcaggcggccagcga

SEQ ID NO: 81372 - DNA, 30 bp, Homo sapiens
  chr11:1298241-1298271
  hypo
gggcaaaacggcatcgaggcagaggctcta

SEQ ID NO: 81373 - DNA, 97 bp, Homo sapiens
  chr11:1301050-1301147
  hypo
agcatggtaagtcccggccgccggtgggcaggggagcatcagccctgctcaggctgaaggcatgtggccctgggctccagacgtctcgcaccacagt

SEQ ID NO: 81374 - DNA, 30 bp, Homo sapiens; identical to SEQ ID NO: 24907
  chr11:1302878-1302908
  hypo

SEQ ID NO: 81375 - DNA, 30 bp, Homo sapiens
  chr11:1304237-1304267
  hypo
ggggctgacaagggcgggatcttcacgtgg

SEQ ID NO: 81376 - DNA, 30 bp, Homo sapiens
  chr11:1306744-1306774
  hypo
cacacgacaacagacgcaacagcgcagtag

SEQ ID NO: 81377 - DNA, 140 bp, Homo sapiens
  chr11:1307127-1307267
  hypo
cgtccccaccccggcgctctaagccccgttccctcctcccgcacctgccctaggccctggggtttctaccaggggagaggcacccagggagggagcacacgcacctgtgatgggcacatagccaacgccctgctggtaca

SEQ ID NO: 81378 - DNA, 30 bp, Homo sapiens
  chr11:1308413-1308443
  hypo
gtcgtctctgagttcgaaactgtcaactgc

SEQ ID NO: 81379 - DNA, 30 bp, Homo sapiens
  chr11:1310343-1310373
  hypo
catccttgctccaccggctgccacctgtca

SEQ ID NO: 81380 - DNA, 110 bp, Homo sapiens
  chr11:1312470-1312580
  hypo
ttcagccctgcagctccggctgcctgtaaagcgtcctgcctggaatgcagacggcctccctgtaccactgccacccgctctcctgcagccaacccggctcacccccagga

SEQ ID NO: 81381 - DNA, 30 bp, Homo sapiens
  chr11:1315156-1315186
  hypo
tctgagacacgccgcgaggaaggggtgacg

SEQ ID NO: 81382 - DNA, 30 bp, Homo sapiens; identical to SEQ ID NO: 24910
  chr11:1359749-1359779
  hypo

SEQ ID NO: 81383 - DNA, 30 bp, Homo sapiens; identical to SEQ ID NO: 24911
  chr11:1360070-1360100
  hypo

SEQ ID NO: 81384 - DNA, 30 bp, Homo sapiens
  chr11:1360319-1360349
  hypo
atctgtgagtgtacacgtgcgtgtgtgagg

SEQ ID NO: 81385 - DNA, 30 bp, Homo sapiens
  chr11:1375642-1375672
  hypo
tgctgtgtgtccttcgcgacgtgcgctagg

SEQ ID NO: 81386 - DNA, 31 bp, Homo sapiens; identical to SEQ ID NO: 24912
  chr11:1377226-1377257
  hypo

SEQ ID NO: 81387 - DNA, 59 bp, Homo sapiens
  chr11:1390810-1390869
  hypo
cagagccgctgtagcacgaggttttgcggctcaggccccagctgcgtaccagggtctgg

SEQ ID NO: 81388 - DNA, 30 bp, Homo sapiens
  chr11:1394100-1394130
  hypo
agtgatggagccgggcgcggtgactcacgc

SEQ ID NO: 81389 - DNA, 30 bp, Homo sapiens
  chr11:1394614-1394644
  hypo
acgggctcaacccatcgagccgtattaact

SEQ ID NO: 81390 - DNA, 30 bp, Homo sapiens
  chr11:1396899-1396929
  hypo
gggatacgggactggcgcctgtgaggcagg

SEQ ID NO: 81391 - DNA, 30 bp, Homo sapiens
  chr11:1398002-1398032
  hypo
aaaatcagtgcaactcggcccggcgcggtg

SEQ ID NO: 81392 - DNA, 312 bp, Homo sapiens; identical to SEQ ID NO: 7858
  chr11:1411221-1411533
  hypo

SEQ ID NO: 81393 - DNA, 235 bp, Homo sapiens; identical to SEQ ID NO: 7859
  chr11:1411549-1411784
  hypo

SEQ ID NO: 81394 - DNA, 443 bp, Homo sapiens; identical to SEQ ID NO: 48044
  chr11:1411841-1412284
  hypo

SEQ ID NO: 81395 - DNA, 440 bp, Homo sapiens
  chr11:1430918-1431358
  hypo
ccctcaggtcatggtttcacacgcgtgtgctttaaatgcgtgctggctgtcacgtgtcagtcgtgcctccacagagcttcaggaaccaccgagatggggagcctgccggagacacaggttttctgagcgcaccagcggctccaaaagcagagggaagagccctgcgtgcaggtggggcgctcatggcgtcggcctcgcagagcggtgacggacacagagtccgtgtttgggggggtttgggacgtcggcctcgcagagcggtgacggtcgcagagtctgtgttttggggggtttgtgacgagtccgtgtttgggggggtttgtgacgtcggcctcgcagagcggtgacggtcgcagagtctgtgttttggggggtttgtgacgagtctgtgtttgggggggtttgtgacgtcggcctcgcagagcggtgacggtcgcaga

SEQ ID NO: 81396 - DNA, 67 bp, Homo sapiens
  chr11:1433175-1433242
  hypo
cttaacagcagtcctgcggtgggtggagtctcagctgcgccgccccgtcctgcggtgggtggagtct

SEQ ID NO: 81397 - DNA, 132 bp, Homo sapiens
  chr11:1433607-1433739
  hypo
gcgccgccccgtcctgcggtgggtggagtctgagctgcgctgccccgtcctgcggtgggtggagtctcagctgcgccgccccgtcctgtggtgggtggagtctcagctgtgctgccccgtcctgtgattggt

SEQ ID NO: 81398 - DNA, 30 bp, Homo sapiens
  chr11:1435981-1436011
  hypo
tccatccgtgggagcgtggcctgccttccg

SEQ ID NO: 81399 - DNA, 362 bp, Homo sapiens; identical to SEQ ID NO: 24917
  chr11:1446109-1446471
  hypo

SEQ ID NO: 81400 - DNA, 51 bp, Homo sapiens
  chr11:1455551-1455602
  hypo
gtcccctgtgataacctgggccggctctgcgtgtctgggggcacctaggag

SEQ ID NO: 81401 - DNA, 568 bp, Homo sapiens
  chr11:1464369-1464937
  hypo
gtgagtcagcgccgccgcgtgcagctctgtggggcccagggtggcggggacctgaccctggtgggaccccagcctgccgcacccccaggtgctgctaggctgcctgtccccgggccgactccctctgagcccaggccctccaaggcccccgccctgccctgcgccccccaacagcccgggcactgctgtccacagggggagaagtatgacggccggaaggcggacgtgtggagctgcggcgtcatcctgttcgccttgctggtggtgagaccctggccccctcaaccctgccctggcctctccccaaacctgcccccccacgctgacccccacacccggccgcccgcagggggctctgcccttcgacgatgacaacttgcgacagctgctggagaaggtgaagcggggcgtgttccacatgccgcactttatcccgcccgactgccagagtctgctacggggcatgatcgaggtggacgccgcacgccgcctcacggtgcgtgccctcggagcggggcggccccagagcgtggcgggggggcgcgggggcgggcgtgtgcctgtgtgt

SEQ ID NO: 81402 - DNA, 824 bp, Homo sapiens; identical to SEQ ID NO: 24920
  chr11:1466429-1467253
  hypo

SEQ ID NO: 81403 - DNA, 30 bp, Homo sapiens; identical to SEQ ID NO: 24921
  chr11:1469355-1469385
  hypo

SEQ ID NO: 81404 - DNA, 45 bp, Homo sapiens; identical to SEQ ID NO: 24922
  chr11:1471395-1471440
  hypo

SEQ ID NO: 81405 - DNA, 30 bp, Homo sapiens; identical to SEQ ID NO: 24923
  chr11:1471924-1471954
  hypo

SEQ ID NO: 81406 - DNA, 31 bp, Homo sapiens
  chr11:1477649-1477680
  hypo
gccgtgttccagaagccggtcaagttccagg

SEQ ID NO: 81407 - DNA, 247 bp, Homo sapiens
  chr11:1478097-1478344
  hypo
ctggcgggaccacccgcctcgcctctgcacgccagggacatagggcgcagccgcaccacactgaaaggcgcctcttgtccaccgtagaaccccccccaccagcgccaggactaagctggggtgctgggcttaagggccagaaggtggccaccagctacgagagtagcctctgacgctggcaggtaaggcgcccggcctgtgctggggcggggaggggctgcgggcaggtcctcggcggagccaggct

SEQ ID NO: 81408 - DNA, 60 bp, Homo sapiens
  chr11:1482006-1482066
  hypo
gccgcccgccctgccccgagtggacccgcggccgcgccgcccgtccgtccagactgttct

SEQ ID NO: 81409 - DNA, 216 bp, Homo sapiens
  chr11:1483818-1484034
  hypo
tccagcaggcgccacggaaatgggcaagcccctgcagtgtacccctgtcataactgtgagcagctgcagctccggaacaataaatcccttccgcaaagacagcgacgcaggtcttcatctgggcagggcgggcgcgcagggctctgtgacagcccgggacagcttcttgttccccacttgcagcccctgggctgcgccagtgtgaatgcagctacc

SEQ ID NO: 81410 - DNA, 30 bp, Homo sapiens; identical to SEQ ID NO: 24925
  chr11:1486326-1486356
  hypo

SEQ ID NO: 81411 - DNA, 30 bp, Homo sapiens
  chr11:1492528-1492558
  hypo
ttttgtggggaacacgtcctcatccgtcac

SEQ ID NO: 81412 - DNA, 30 bp, Homo sapiens
  chr11:1492930-1492960
  hypo
gaaggggtcatcttcgttttctccgcttct

SEQ ID NO: 81413 - DNA, 162 bp, Homo sapiens; identical to SEQ ID NO: 24926
  chr11:1494353-1494515
  hypo

SEQ ID NO: 81414 - DNA, 30 bp, Homo sapiens
  chr11:1495102-1495132
  hypo
tcagggatgggccgcgggaaggaatcgcac

SEQ ID NO: 81415 - DNA, 284 bp, Homo sapiens
  chr11:1497176-1497460
  hypo
atatctgaattgccagcatcacgctcttgcgctttgggccgcctcatgtcacataagagcaacctgagcacgagcaccctggcactgcggcagtggatccacacgggggccgaggcacagctgggccgagggaggaggaggcacacctggagcaggacggtggagaccgcatcacactgctcagaacagcatgcagttgaaaacttattaactgtttatttcgggaattttccattaactattttcagaccatagttgactgtgggtaacggaaactgtagata

SEQ ID NO: 81416 - DNA, 30 bp, Homo sapiens
  chr11:1501958-1501988
  hypo
gctggccagccactcgttaaggtcaatctc

SEQ ID NO: 81417 - DNA, 163 bp, Homo sapiens
  chr11:1508341-1508504
  hypo
cacaggcagcaactctgctgacgagctccaggtcgatggcactcccctctcccttgtccggcccagcctagcccagtcagtgctcgggccagggacggacagacggacagacagatgggccgccctgccctgcagtgtgtacgcagctggaggcactcaaagt

SEQ ID NO: 81418 - DNA, 71 bp, Homo sapiens
  chr11:1509529-1509600
  hypo
tgacgcagacctgcccactctcgggaggcatggcctggacagagaaggccgtgcagaggcccatgacaggg

SEQ ID NO: 81419 - DNA, 177 bp, Homo sapiens
  chr11:1521235-1521412
  hypo
ccatggggaggtgacacagtgcggcctcagcatccacggaccgcgcctcagccacagacaggagtggcctgggagacacgcggaacacggaagactcctacagcaagtgtgctgagtgacggaggccaggtgaacatcaggttcacactgtgattccgttcacgggaaattccagga

SEQ ID NO: 81420 - DNA, 30 bp, Homo sapiens
  chr11:1526016-1526046
  hypo
tgcctaggctaggccggggacctgctctcc

SEQ ID NO: 81421 - DNA, 442 bp, Homo sapiens
  chr11:1535821-1536263
  hypo
ctcttcagcatcctagtgggacgggagcacccagggaacacaagtgcaccatgacgcggagcccttcatcaccgcaggccacggcgcttgtccttcccagaggcccccaaccacagctgctgagcgacacccacaccgcttctctcttcacacagcggactgatgaggagtcccgccaagcaggagctctgagccacagcacagagtgtgctggcccaagtccacgcctgcatgcaagctcagccatgcgtctaatggcaataaccgtggaatgagctcgtgaggttcggagagtcccaccccgacggggagagccacagggagccccaatctcggcagtgaccggctccaggtccccacgtaccgtgagagtggggacagcggtggacagcagcccttgagcagggcacaaccttcagagagacctcgacaagtgaacact

SEQ ID NO: 81422 - DNA, 30 bp, Homo sapiens
  chr11:1539696-1539726
  hypo
gcgagactggcctgcgcacagggacggctt

SEQ ID NO: 81423 - DNA, 209 bp, Homo sapiens; identical to SEQ ID NO: 24929
  chr11:1552161-1552370
  hypo

SEQ ID NO: 81424 - DNA, 143 bp, Homo sapiens
  chr11:1555963-1556106
  hypo
cagatgcacatctccccaggacggaattgcacttggtgatgaagaggacggagctgcagacacacgcaacgccatggatggacgttcgcaacactgcgccgcataggacaggcacacagcccgtgtactgggattccatttgc

SEQ ID NO: 81425 - DNA, 96 bp, Homo sapiens
  chr11:1560287-1560383
  hypo
gagtatctaggtcctcggctccggggcctgtgaacgtggcatcattcatacgatgtgatatcctaagagacaatcaaaatctgtgtggacgaggcc

SEQ ID NO: 81426 - DNA, 31 bp, Homo sapiens
  chr11:1579098-1579129
  hypo
ccagccagacagtggacgatgacttggcagc

SEQ ID NO: 81427 - DNA, 40 bp, Homo sapiens; identical to SEQ ID NO: 24930
  chr11:1584968-1585008
  hypo

SEQ ID NO: 81428 - DNA, 39 bp, Homo sapiens; identical to SEQ ID NO: 24931
  chr11:1586816-1586855
  hypo

SEQ ID NO: 81429 - DNA, 499 bp, Homo sapiens; identical to SEQ ID NO: 48045
  chr11:1592746-1593245
  hypo

SEQ ID NO: 81430 - DNA, 118 bp, Homo sapiens; identical to SEQ ID NO: 7863
  chr11:1594038-1594156
  hypo

SEQ ID NO: 81431 - DNA, 643 bp, Homo sapiens
  chr11:1602551-1603194
  hypo
ggggggtccatatgtcgggaccgtgggggtgtctatatctcgggaccgtgggggtccatatctaaggactgtgggggtccatatcttgggaccatggggggtctatatgtcaggaccgtgggggtctatatctaaggaccgtggggttctgtatctcaggaccgtgggggtctgtatctagggaccgtggggatctgtatctagggaccgtgcggatctgtatctagggactgtgggagtctatatctaaggaccgtggggtctatatctagggaccgtgggggtccatatctcaggaccgtggggatctgtatctcaggaccgtgggggtctgtatctcgggaccgtgggagtctatatctagggactgtgggagtctatatctaaggaccgtggcgtccatatctagggaccatgggggtccatatgtcgggaccgtggggggtctatatctcgggaccgtgggggtccatatctaaggaccatatgtcgggaccgtggggttctgtatctcaggaccgtgggggtctgtatctagggaccgtagggatctgtgtctagggaccgtgggggtctatatctagggactgtgggagtctatatctaaggactgtggcggtctgtatctcgggaccgtgggggt

SEQ ID NO: 81432 - DNA, 31 bp, Homo sapiens
  chr11:1634888-1634919
  hypo
tccctttctgcctgaccgctccagctggcac

SEQ ID NO: 81433 - DNA, 30 bp, Homo sapiens; identical to SEQ ID NO: 24934
  chr11:1670294-1670324
  hypo

SEQ ID NO: 81434 - DNA, 38 bp, Homo sapiens; identical to SEQ ID NO: 24935
  chr11:1715582-1715620
  hypo

SEQ ID NO: 81435 - DNA, 213 bp, Homo sapiens; identical to SEQ ID NO: 24936
  chr11:1749038-1749251
  hypo

SEQ ID NO: 81436 - DNA, 222 bp, Homo sapiens
  chr11:1759620-1759842
  hypo
tgaaaaagcatacgtcgaaccgtcataagatggggaccgtctgtatatgctgggtggggtaacaggtgcatagacgaacatatgaatatatgtccaagtggacagatggatatgcaagtgtatgccacatgggtggggcatctgggtaagcgggtaagtgaacggctgctggatgggaggtgatgtgtggatatgtaagagcatgttcggtgggcaggacag

SEQ ID NO: 81437 - DNA, 31 bp, Homo sapiens
  chr11:1787100-1787131
  hypo
gtgtcccctgcccaagcgcccactctccacc

SEQ ID NO: 81438 - DNA, 30 bp, Homo sapiens; identical to SEQ ID NO: 24937
  chr11:1795195-1795225
  hypo

SEQ ID NO: 81439 - DNA, 224 bp, Homo sapiens; identical to SEQ ID NO: 24938
  chr11:1795686-1795910
  hypo

SEQ ID NO: 81440 - DNA, 192 bp, Homo sapiens; identical to SEQ ID NO: 24939
  chr11:1800815-1801007
  hypo

SEQ ID NO: 81441 - DNA, 30 bp, Homo sapiens
  chr11:1801368-1801398
  hypo
agccagcctcctgcccggcgggcacaaatg

SEQ ID NO: 81442 - DNA, 223 bp, Homo sapiens
  chr11:1806142-1806365
  hypo
tcaccatggtgcagtcggcagaggtactcgtttaaaggcttgtctgatcccattgctctgccccgggactctctgtgatttccagcgcacttggctacgggaacagagttctggggcccaaggtcccttgtggtcttggtcccctgctgaccttggtggcgcccgctcaccccaggaactcttccccacgtggcctctgcccagcgagcgctgaccctctgcc

SEQ ID NO: 81443 - DNA, 39 bp, Homo sapiens
  chr11:1819537-1819576
  hypo
cttcgaatggcctggtgcgtgtggctcactagatgtgag

SEQ ID NO: 81444 - DNA, 111 bp, Homo sapiens
  chr11:1824187-1824298
  hypo
ctggaaggtggatggcgaggccgggatggagccgctgatccacgcagagtatttgcgctcgggaggagcaatgacgttgatcttcatcgtgccaggcgccagggcggtgat

SEQ ID NO: 81445 - DNA, 442 bp, Homo sapiens; identical to SEQ ID NO: 24941
  chr11:1824637-1825079
  hypo

SEQ ID NO: 81446 - DNA, 142 bp, Homo sapiens; identical to SEQ ID NO: 24942
  chr11:1825138-1825280
  hypo

SEQ ID NO: 81447 - DNA, 30 bp, Homo sapiens; identical to SEQ ID NO: 24943
  chr11:1825539-1825569
  hypo

SEQ ID NO: 81448 - DNA, 118 bp, Homo sapiens
  chr11:1826891-1827009
  hypo
gcggagctcagcctccgagtcacaccagcgtagggaagcgtgatcaccaccttcatcaaggacacgcggagctcagcctccgagtcacaccagtgtagggaggcgtgataaccaccct

SEQ ID NO: 81449 - DNA, 31 bp, Homo sapiens; identical to SEQ ID NO: 24944
  chr11:1829205-1829236
  hypo

SEQ ID NO: 81450 - DNA, 99 bp, Homo sapiens
  chr11:1845603-1845702
  hypo
cgtgcattgtgtgcacaggtgcgtagcagtgtgcccgtgcctggcgtgtgcgtgtgtgtgaggctgtgtgggtcaagcgcccacactcacaggtgaggg

SEQ ID NO: 81451 - DNA, 310 bp, Homo sapiens; identical to SEQ ID NO: 24945
  chr11:1847135-1847445
  hypo

SEQ ID NO: 81452 - DNA, 836 bp, Homo sapiens
  chr11:1857226-1858062
  hypo
gctgcgcaggaccagcggttctgcgagtttccggaaagggtgacgggggaagggcagaccccatgccctgggtggtggggagctgacagggcaggggcccttggctgagcccaccccgctggctcccagatcagggtgggcctgaggcaggcagccgacctgaggcctgggggcaccgtggacccctatgcccgggtcagcgtctccacccaggccggacacagacatgagacaaaagtgcaccgaggcacgctctgccccgtgtttgacgagacctgctgcttccacgtgagtcagggatggtcggctgggtgggcctggacggctggatgggcctgggctgggtgggcctgggcagctgggtgggcctgggcagctgggtgggcctgagctagggcagcagggcctggctcacgccgctgcctcagatcccgcaggcggagctgccaggggccaccctgcaggtgcagcttttcaacttcaagcgcttctcggggcatgagcccctgggtgagctccgtctgccactgggcaccgtggatctgcagcatgttctggagcactggtacctgctgggcccgccggctgccactcaggtgaggtgctggtcaccaggccacagcccaaggcagagctggcagggaccctgccctatgggccatcggaaagacaggcctgatgggcagcattttcgggggtctgagccccaactcggccagaatcaccctcccgggctgaagcccctcttgctgcccacagcccgagcaggtcggggagctgtgcttctctctccggtacgtgcccagctcaggccggctgaccgtggtggtgctgga

SEQ ID NO: 81453 - DNA, 30 bp, Homo sapiens; identical to SEQ ID NO: 48055
  chr11:1874056-1874086
  hypo

SEQ ID NO: 81454 - DNA, 30 bp, Homo sapiens; identical to SEQ ID NO: 48056
  chr11:1908990-1909020
  hypo

SEQ ID NO: 81455 - DNA, 31 bp, Homo sapiens
  chr11:1919471-1919502
  hypo
tttttttttttgagaccgagtctcgctccgt

SEQ ID NO: 81456 - DNA, 129 bp, Homo sapiens
  chr11:1955145-1955274
  hypo
cttctctggctgcaggagaagcgccgtgcagagagagcggagcagcagaggattcgtgcagagaaggagagggagcgccagaacagactggcggtgagggcaccatccgcactgctgcctcatcagaga

SEQ ID NO: 81457 - DNA, 43 bp, Homo sapiens; identical to SEQ ID NO: 24946
  chr11:1956447-1956490
  hypo

SEQ ID NO: 81458 - DNA, 603 bp, Homo sapiens; identical to SEQ ID NO: 24947
  chr11:1957434-1958037
  hypo

SEQ ID NO: 81459 - DNA, 30 bp, Homo sapiens
  chr11:1958301-1958331
  hypo
tccctaacaagggccggtggtggctggcct

SEQ ID NO: 81460 - DNA, 254 bp, Homo sapiens; identical to SEQ ID NO: 24948
  chr11:1958919-1959173
  hypo

SEQ ID NO: 81461 - DNA, 30 bp, Homo sapiens
  chr11:1959856-1959886
  hypo
tcccggggcgtcccccgcgtctgtgtcctt

SEQ ID NO: 81462 - DNA, 30 bp, Homo sapiens; identical to SEQ ID NO: 24949
  chr11:1973530-1973560
  hypo

SEQ ID NO: 81463 - DNA, 166 bp, Homo sapiens
  chr11:1975867-1976033
  hypo
agaccattgactgcccgctgccccgaggcttgtgtggatgctgagcagcgcgggaatgaagggcgcgcaggaatgaagggcgcacgacatgagaggcaactccagaacaaaccgctgccgccagctgggccgagctccgtgctcggggctccggcctccaggtcca

SEQ ID NO: 81464 - DNA, 30 bp, Homo sapiens; identical to SEQ ID NO: 24950
  chr11:1977366-1977396
  hypo

SEQ ID NO: 81465 - DNA, 30 bp, Homo sapiens; identical to SEQ ID NO: 24951
  chr11:1977654-1977684
  hypo

SEQ ID NO: 81466 - DNA, 30 bp, Homo sapiens
  chr11:1977936-1977966
  hypo
gtctgggcagtgggcgcggccggggtctgg

SEQ ID NO: 81467 - DNA, 30 bp, Homo sapiens
  chr11:1979864-1979894
  hypo
ccagatcctcctcccgccctgtctcacccc

SEQ ID NO: 81468 - DNA, 51 bp, Homo sapiens
  chr11:1980679-1980730
  hypo
agcccacagaagggaccggctggacgcgccagctcccgtgacccgctcctg

SEQ ID NO: 81469 - DNA, 30 bp, Homo sapiens
  chr11:1983225-1983255
  hypo
cgcaggtgggctcccgagtggcctggaagc

SEQ ID NO: 81470 - DNA, 30 bp, Homo sapiens; identical to SEQ ID NO: 24952
  chr11:1985747-1985777
  hypo

SEQ ID NO: 81471 - DNA, 30 bp, Homo sapiens; identical to SEQ ID NO: 24953
  chr11:1988743-1988773
  hypo

SEQ ID NO: 81472 - DNA, 30 bp, Homo sapiens
  chr11:1994102-1994132
  hypo
acagagggaacccccggtcatacagtgaag

SEQ ID NO: 81473 - DNA, 30 bp, Homo sapiens
  chr11:2005570-2005600
  hypo
tctcaccctgtcttcgcctgtccccacccc

SEQ ID NO: 81474 - DNA, 30 bp, Homo sapiens
  chr11:2013402-2013432
  hypo
acagcccggaaaggcgggttaactggtcag

SEQ ID NO: 81475 - DNA, 31 bp, Homo sapiens
  chr11:2026840-2026871
  hypo
gggtgggacacgggtacggcacgtcacccgg

SEQ ID NO: 81476 - DNA, 79 bp, Homo sapiens
  chr11:2037109-2037188
  hypo
ccatggcttcctctcgagccttgggtgtccagcagcctgaccagacagaggcctcctcagccccgcaccgaaggaggat

SEQ ID NO: 81477 - DNA, 30 bp, Homo sapiens; identical to SEQ ID NO: 48058
  chr11:2048642-2048672
  hypo

SEQ ID NO: 81478 - DNA, 192 bp, Homo sapiens
  chr11:2051190-2051382
  hypo
tgccaggacggcaagccgggagtatgtgctccttggggagcggggcccaggtctgggctccagggctgcctcttggctggatacccagcttcacatttggctcaacacagcaaggaggggtcaggggtctcaggcagtcaggcctccagtctcagtcctcacaccactgcccccgggcgcaggaccagcaca

SEQ ID NO: 81479 - DNA, 30 bp, Homo sapiens
  chr11:2054705-2054735
  hypo
cagcggggggtgtcacgcatgtgaggccgg

SEQ ID NO: 81480 - DNA, 306 bp, Homo sapiens
  chr11:2055186-2055492
  hypo
agcaggtcctccggacggcactcgggtgccactgctgcagtgatgaggtgggggcagcatggccccagtggcctgggcagggaggctggcgtcagcgggggaatctgttgacctcaggaggtgccagggctggagcggcactggggagtgccatgtgctgtgtgtgctgagccacgtggactcgtgaggctctggccttggagcctgggtggccgacaccgaccctggtgagtctgagagtccatcttgctcggacggtctgtgatccgctaccttactcgtctgtggctgcgccccctccacacc

SEQ ID NO: 81481 - DNA, 30 bp, Homo sapiens
  chr11:2109249-2109279
  hypo
catagagacagaaagcgccaggggtaccag

SEQ ID NO: 81482 - DNA, 293 bp, Homo sapiens
  chr11:2124956-2125249
  hypo
tggactcaaaatgaacgagggccgtcctgtgcgtgctccactccaaatcccatctgctcccacactgctggcccagggaaaatctgggtagtgacagtggccgtccctcacgccctccatggccaggtgccagtagcgtgttccacaagcatcaccttcgaaaccctgaaggagtcaggactgtcgctgttccagacaaggagactgaggatgagtctccattaagtggctttcccgcagacacacagtaagtggcacaagagtcaggagtttgagcccgggtcagcccagct

SEQ ID NO: 81483 - DNA, 30 bp, Homo sapiens
  chr11:2142827-2142857
  hypo
catagccaagtgcgcgaacaaagaatgaag

SEQ ID NO: 81484 - DNA, 179 bp, Homo sapiens
  chr11:2152413-2152592
  hypo
ccccgcccaccctacgggtgtatcccaaatgccgccggccgcacactcaggccgcaccatctgagccccctcctctgagaggcagggcacagacagggccgaggggcagtggagatgggaacaggagcggggctcagaccatgaaaacattggagaatcttagcgggactttggcctga

SEQ ID NO: 81485 - DNA, 146 bp, Homo sapiens
  chr11:2183693-2183839
  hypo
gggggcatgggctccgagccctgctgcctgcagcccctacctgcctcttagcaccaggggcaggatcaggaggtcccagaagcaggaggatgagaccatgggggcaggcaggttggagtatcctgtgccccggcccctcgcatccc

SEQ ID NO: 81486 - DNA, 392 bp, Homo sapiens
  chr11:2209802-2210194
  hypo
gcatcagaggacatcatcaaccgtaaaaaggcaactcccagaacaggagaaaatgccgcaaatcacacacctgatcggggagtagtacccggaacccacagagaacccctaaaacacaaccgccaaacaccagattcaaaagtgggcgaaggacgtagacgggcgcctctccagggaaggtgtatccaggacagcagccgcagggaaaggtgctcaatgccacgaatcattagggcaatgccaatcaaaatcacggcgcgacaggattccacacccgttagggtggccaccgtcaacaaacccaaacaatgcagaacacaaaatagcaagtgctcacgagaatgtggagaaatcagagcccctgcggtgggtcgtgccgcagggcagccgct

SEQ ID NO: 81487 - DNA, 31 bp, Homo sapiens
  chr11:2219692-2219723
  hypo
ccagagacctggcaggcggcacctttctagg

SEQ ID NO: 81488 - DNA, 42 bp, Homo sapiens
  chr11:2221374-2221416
  hypo
ggggctggacagggagcgggcacagaacgaccagggctctgg

SEQ ID NO: 81489 - DNA, 30 bp, Homo sapiens
  chr11:2225672-2225702
  hypo
gactatctgcctggacggcattttctggcc

SEQ ID NO: 81490 - DNA, 126 bp, Homo sapiens
  chr11:2226009-2226135
  hypo
tctcctaggaccctccggagcctgagggtcagaaggtggtgacatccagtcacacggagagggacttggagtgtctgtacggcaccatcctgtcccgctgcctaaagggagcgcctgcttcaattc

SEQ ID NO: 81491 - DNA, 14 bp, Homo sapiens
  chr11:2236826-2236840
  hypo
taggtgacggggga

SEQ ID NO: 81492 - DNA, 31 bp, Homo sapiens
  chr11:2237235-2237266
  hypo
cttgcccccactgccccgggccttctcctgc

SEQ ID NO: 81493 - DNA, 181 bp, Homo sapiens
  chr11:2237499-2237680
  hypo
cctgagcctgggatgcgcaggtcctcacctgaggaaagtaggcaccagccaggtgtaacctgggccagatgggcagccccgagggccgcgccccacctctcaggccccgctcacagccaggccccagggctgctcccaggcccctgggagagcagggtgccgtgggcggtcagcaatgggt

SEQ ID NO: 81494 - DNA, 31 bp, Homo sapiens
  chr11:2257967-2257998
  hypo
cagctgctgggccagacgaggttccatcgct

SEQ ID NO: 81495 - DNA, 47 bp, Homo sapiens
  chr11:2269905-2269952
  hypo
cattcccagagcgggacgcttccaccggaagacgctattaagacagc

SEQ ID NO: 81496 - DNA, 923 bp, Homo sapiens
  chr11:2278016-2278939
  hypo
gcgtgtgcgtttctgcgtgtgtgtgtgtgtgtgtgtccatgcatgtgtctctatgaatatatgtgctgtatttgcatgtgtgtgtgtgtctatgtgtgcatatgtctgtgtctgtgtgtctttctgtgtgtgcggtctgtgtctgtgggtctacacgtgtatatgtgcatgtgtctgtgtgtgtcgcagtgtgttactgtgtctgcgcgtgtgtgcatgcatatgtgcaggagggagggagggctcaggccttagcagagtccctggggctctgggagtggagggcagtgaggctgaggctggtgcaaaggtggtttcaggcgctcaggtgaagtggagcagaaacagaagttggaatccagccccagcgggcgggcggcagcagcagtgccggccctgcccagaacaggttcgacctgagccggcactgcccggctgccctggggctagggaggctgagacagagaagggaagccagagggtgggggtgggggcccggcactggcagagctgcctgccctcaacgaccgcccctgccggagacccccgccccacccgctgtggttctgctggcccaggtttcgctgggcccactcccagggtttggcatcactggagcccagggtcccccccgcaccctccccacagccttggccctgctgctgcctgcctcctccagggtaccccgaggcccacgtcaggagacccgcctcaggcagcagtggcccggtggctgcttctgcctagcccgcagcacgtgccaccctgggcgcactgccttcccgaaggctctcctccctccccggggcgctccctcccactctggaatgcctccctgcctgcacagcaggagtgtttggctgaggtctgcagccccgacacaggtcacctcccacgcctatgggggcttcagaaagtcccgg

SEQ ID NO: 81497 - DNA, 171 bp, Homo sapiens; identical to SEQ ID NO: 7868
  chr11:2290846-2291017
  hypo

SEQ ID NO: 81498 - DNA, 421 bp, Homo sapiens; identical to SEQ ID NO: 7869
  chr11:2291072-2291493
  hypo

SEQ ID NO: 81499 - DNA, 124 bp, Homo sapiens; identical to SEQ ID NO: 7870
  chr11:2291800-2291924
  hypo

SEQ ID NO: 81500 - DNA, 113 bp, Homo sapiens; identical to SEQ ID NO: 7871
  chr11:2291944-2292057
  hypo

SEQ ID NO: 81501 - DNA, 254 bp, Homo sapiens; identical to SEQ ID NO: 7872
  chr11:2292105-2292359
  hypo

SEQ ID NO: 81502 - DNA, 324 bp, Homo sapiens; identical to SEQ ID NO: 7873
  chr11:2292391-2292715
  hypo

SEQ ID NO: 81503 - DNA, 80 bp, Homo sapiens; identical to SEQ ID NO: 24962
  chr11:2294684-2294764
  hypo

SEQ ID NO: 81504 - DNA, 90 bp, Homo sapiens; identical to SEQ ID NO: 24963
  chr11:2328965-2329055
  hypo

SEQ ID NO: 81505 - DNA, 328 bp, Homo sapiens
  chr11:2334668-2334996
  hypo
gtgtgaaggccccatcgttgatgttgggaagcactgtgactggctgcccagggacccaggttccgctttggggagatccacctgctacaaggagggcagtgctgggacgtcactcagcactaagggcccactagcgtttgggatgtcgtggggagggggctgtgtccccggatctcccaccagggccaggacctccctgtggtctctcggtgcaggtggaggacgccatgctggacacctacgacctggtatatgagcaggcgatgaaaggtacgtcccacgtccggcggcaggagctggcggccatccaggacgtggtgagcgtggg

SEQ ID NO: 81506 - DNA, 30 bp, Homo sapiens; identical to SEQ ID NO: 24964
  chr11:2335442-2335472
  hypo

SEQ ID NO: 81507 - DNA, 30 bp, Homo sapiens; identical to SEQ ID NO: 24965
  chr11:2335824-2335854
  hypo

SEQ ID NO: 81508 - DNA, 143 bp, Homo sapiens
  chr11:2348406-2348549
  hypo
aggaacttttcctccacagcacgtgcactccgtgcatctgcagagctggcaccgtgctgacaccatcgaggtttaccgcctgcgccttctgggctggcagcccaaggaacacctgtacccacgtgagcctccatgggggtggg

SEQ ID NO: 81509 - DNA, 30 bp, Homo sapiens; identical to SEQ ID NO: 24966
  chr11:2395933-2395963
  hypo

SEQ ID NO: 81510 - DNA, 22 bp, Homo sapiens
  chr11:2409425-2409447
  hypo
gctaccacgcccagccccctct

SEQ ID NO: 81511 - DNA, 573 bp, Homo sapiens
  chr11:2412912-2413485
  hypo
ggcctctctcggggccgtggtgccctcacaggtggtgtcaggaaggacgggaaaggctgcttgtcccaggggctcatgtggagaccaccccctgcacgcagctggggcgctcctgcctgtgtcctcagaagcactcggcttagctttgcccatgtgcctgggctgtgggtggcagagcccggccagcatcctccgatctccaagggtgcatctctactggaggcccctcctgggcctcttgctccccgcttcccagatcattaggatatttggggtccagaagggcctcccagccatcctgggccttgtcctccggggccaccagtccagccagtgacaaccacagcatccccggcctggaacgaggctgcccccagcacgttcctcgtactcctgtccagggacaggaggggctgcccctgccaccgagtccccttctccaggacctggggcctgtgggtgtgaggcaggtgttcttggaaggggtcactctccaggcacccggcggccaaggcttgtggctggagcagctcccgctgtggggtcggcgtcgggccccgtgtggccggagag

SEQ ID NO: 81512 - DNA, 158 bp, Homo sapiens; identical to SEQ ID NO: 24969
  chr11:2414472-2414630
  hypo

SEQ ID NO: 81513 - DNA, 219 bp, Homo sapiens
  chr11:2423367-2423586
  hypo
attaaatgaggtaacgagtcaaaagtccctaccctgggtcctagcctgtcaggggctccgaaaacccaggctcaggtcggtcctgcccggcacctgtttcacacatgtacactccggtctgaggttggtcctctcccccaccccacccacctgcagttgagcagctgaacagaggccatgccggggcactccgaggcctgagacgaccacgcctgtgcc

SEQ ID NO: 81514 - DNA, 30 bp, Homo sapiens
  chr11:2424000-2424030
  hypo
ggaagcactgtccccgatggggctgcctgg

SEQ ID NO: 81515 - DNA, 31 bp, Homo sapiens; identical to SEQ ID NO: 24970
  chr11:2427869-2427900
  hypo

SEQ ID NO: 81516 - DNA, 948 bp, Homo sapiens; identical to SEQ ID NO: 24971
  chr11:2435820-2436768
  hypo

SEQ ID NO: 81517 - DNA, 223 bp, Homo sapiens
  chr11:2441483-2441706
  hypo
ttctccagcctcagccgcagctccgtcagcccatcgcccttccccggggggcctggctccaccaggatgaagtgggagaggttgctgtccagtgaacagagggggccctggctgccgccgtcatcctcagggtagtggacaggaaaatcctcctgcgcccatgcagggagacgaggctgagccctcgagaggcagcttgggctggtcccgctgcgggatcctc

SEQ ID NO: 81518 - DNA, 30 bp, Homo sapiens; identical to SEQ ID NO: 24972
  chr11:2481626-2481656
  hypo

SEQ ID NO: 81519 - DNA, 30 bp, Homo sapiens
  chr11:2542565-2542595
  hypo
gctctgggcctttgcgcttctgtgactggc

SEQ ID NO: 81520 - DNA, 110 bp, Homo sapiens; identical to SEQ ID NO: 48070
  chr11:2554315-2554425
  hypo

SEQ ID NO: 81521 - DNA, 59 bp, Homo sapiens
  chr11:2560750-2560809
  hypo
agcctgggagccaagccgatggctgtgctggccgaagggaacaccgccatggtgctctg

SEQ ID NO: 81522 - DNA, 39 bp, Homo sapiens; identical to SEQ ID NO: 24974
  chr11:2562213-2562252
  hypo

SEQ ID NO: 81523 - DNA, 354 bp, Homo sapiens
  chr11:2569187-2569541
  hypo
cagagacaggggagcagggagcggtgggggatgaggtcagggaggtggcaggacctggcgtgtgagggcttggggcgactctggggagttagggtttcgctctgcatgacaggagcctggggcctggcatggtgtgactcagacttaacgccgcccctctgactggtagaggccaggcccaggataaggtggcggcaggcaggtctctaagcagtggcagctcagacccgaggtcccagggtcatgcgtgtttgtcctgattgcacgagtcgtgtgagcacagaaacgtaggtggaaagatggtggcttcgtccagggaggtagactgggaacgtcttttgctgcttcccttgg

SEQ ID NO: 81524 - DNA, 42 bp, Homo sapiens
  chr11:2579780-2579822
  hypo
tgtcaggtggctgctgcgccctgtgtccgcctcctgaccttg

SEQ ID NO: 81525 - DNA, 44 bp, Homo sapiens
  chr11:2581753-2581797
  hypo
gttccttctgggggggcgggggggggtgacgtccatcctggggg

SEQ ID NO: 81526 - DNA, 30 bp, Homo sapiens
  chr11:2591917-2591947
  hypo
tgccgcagcaagtacgtgggcctctggggg

SEQ ID NO: 81527 - DNA, 30 bp, Homo sapiens
  chr11:2594084-2594114
  hypo
accaccctgtacatcggcttcctgggcctc

SEQ ID NO: 81528 - DNA, 131 bp, Homo sapiens
  chr11:2594825-2594956
  hypo
gggaagcagggacccggcctgtgggcccagaggctgcccctggctgtgaaggtgggttccggccacctagagcagcccgggagccttggggaagccggtgtgcagcaggcagatcccgcactggaacaccg

SEQ ID NO: 81529 - DNA, 64 bp, Homo sapiens
  chr11:2595669-2595733
  hypo
aggcctgggggccgcacgggggctggaggtgggggcgggcagggcagccgtgggaaacacgtgg

SEQ ID NO: 81530 - DNA, 82 bp, Homo sapiens; identical to SEQ ID NO: 24976
  chr11:2596401-2596483
  hypo

SEQ ID NO: 81531 - DNA, 31 bp, Homo sapiens; identical to SEQ ID NO: 24977
  chr11:2597547-2597578
  hypo

SEQ ID NO: 81532 - DNA, 30 bp, Homo sapiens
  chr11:2598638-2598668
  hypo
cctgggccaccttccggcagggcgctgagc

SEQ ID NO: 81533 - DNA, 30 bp, Homo sapiens; identical to SEQ ID NO: 24978
  chr11:2602156-2602186
  hypo

SEQ ID NO: 81534 - DNA, 30 bp, Homo sapiens
  chr11:2602996-2603026
  hypo
ctctgcatggggcacgcttgtgagtgtgca

SEQ ID NO: 81535 - DNA, 67 bp, Homo sapiens
  chr11:2610096-2610163
  hypo
caggcagttgggggccgcggggccgggaaggtcactgccttttttgggagcccgagcaagccagtga

SEQ ID NO: 81536 - DNA, 30 bp, Homo sapiens; identical to SEQ ID NO: 24979
  chr11:2610580-2610610
  hypo

SEQ ID NO: 81537 - DNA, 30 bp, Homo sapiens
  chr11:2691234-2691264
  hypo
agctgttggggtcccgtggaggtacaggcg

SEQ ID NO: 81538 - DNA, 30 bp, Homo sapiens
  chr11:2741018-2741048
  hypo
tcggagccaaacaccgtgctggtttcagag

SEQ ID NO: 81539 - DNA, 191 bp, Homo sapiens
  chr11:2750148-2750339
  hypo
tgcctgatttggggcagatagcggggtgattaatgctcgtgataaggtgttgattggttctgggagccactgcagacacaggggctgttgtgcatgcagggctggcaactgtagtcacagaacaatagcccgtttatgtagcacactcccaccccccgcctgccccaggcgggcacaaagggcgctcgggc

SEQ ID NO: 81540 - DNA, 197 bp, Homo sapiens
  chr11:2753764-2753961
  hypo
ccgggcagtgaggagcgcaggcgaatgttacagcaggcgcgagcgaaggggcccgaggcaccggtgcttccgacggggcccgagggccgtctgacctttccggccacggggcagcagttgcgtgagcaggaacaatcgccccagtgtgcaaggcacaagcggccttttcttcctcaccgggccggcgcacacagctc

SEQ ID NO: 81541 - DNA, 452 bp, Homo sapiens
  chr11:2757684-2758136
  hypo
gcctctggggttagacggtggcccccgtgcctggagagaaggtgcactttggggatgggaggcgctaggtgccaatggccctaggagggggctttggagctggacccttgagggagtcaatgccagctcatcgccatagcggcttgcttagggccgtccctcccaccccccagttacacagcctgcaaaccccaacctagccccttccaggtgtcccttgtgatcttccgccactgacataggtgtggcccagagcaaagggcggcttcccatttcacctgcgcatctgcagctggtatgcggctgccctggtgggttcctggctggctggcatgcgccctgcgcctctgctgggcctggtggggcctaagggtgaaaactcggtcaagataagatgcccacggctcagggaccccacagtcacaggtggggagtggcgcagagcctgggcc

SEQ ID NO: 81542 - DNA, 386 bp, Homo sapiens; identical to SEQ ID NO: 24981
  chr11:2772655-2773041
  hypo

SEQ ID NO: 81543 - DNA, 331 bp, Homo sapiens
  chr11:2781506-2781837
  hypo
aggcgggcaggcgggcgtggaggagctaatgggtaagttaggcagcacattaacaaatgaaccagcggatgggggtggggagctcatctcattcatctacaaattattaacaataacttgttcattaatgaatgaacaggtgagatacaggtcagtgggtgcatgaatgagtgaggagatgaatgaagcgggtcttttctcagcagctgacccacggccaagcccccgctgggcagcacgtcccttcctcctctcccaagctgggtggtgcgggcagggagagggtccatccgcccttcagtaggtgaggaagccacgggcctggagggtg

SEQ ID NO: 81544 - DNA, 181 bp, Homo sapiens
  chr11:2782399-2782580
  hypo
ttttcccctggcatcaggcggctcagcagcctgggctctcctgcgtccaccccagccaaacccttcatcgttcctccggtcaatggtctgccggcctgtcggtgcctgttggtgcctgtcggtgtgctcctacgctggtgtgttcctctcgacctaccctcaacgtccagccgcttgtgtc

SEQ ID NO: 81545 - DNA, 30 bp, Homo sapiens; identical to SEQ ID NO: 24983
  chr11:2783762-2783792
  hypo

SEQ ID NO: 81546 - DNA, 403 bp, Homo sapiens; identical to SEQ ID NO: 24984
  chr11:2818019-2818422
  hypo

SEQ ID NO: 81547 - DNA, 31 bp, Homo sapiens
  chr11:2832257-2832288
  hypo
ggcttagactcacccccgcccagtcttggca

SEQ ID NO: 81548 - DNA, 31 bp, Homo sapiens
  chr11:2842364-2842395
  hypo
gggtctgtcaagtgttcggtggcccctggct

SEQ ID NO: 81549 - DNA, 93 bp, Homo sapiens
  chr11:2864505-2864598
  hypo
tgcccagctccacacaggagccgggtctgacatccgattgctcagagcctggtatgaaacattctaggtaccgccctgagagtggcttagtaa

SEQ ID NO: 81550 - DNA, 296 bp, Homo sapiens
  chr11:2868804-2869100
  hypo
ttgcacacacacaggcgcgaccgagggccttgcagacatagggtgcacacgtgcgtgccgcctgcatacagcatgcacttgcagagacggttggcaccttcccttctctggccccaaacctgggccctgaggctgtctgcacacctgggtgcttcccaccactgactctctcgtctgcctttgtccccgcaggtgacgcagctggaccagaggctggcactcatcaccgacatgcttcaccagctgctctccttgcacggtggcagcacccccggcagcggcggcccccccagaga

SEQ ID NO: 81551 - DNA, 30 bp, Homo sapiens; identical to SEQ ID NO: 24986
  chr11:2870193-2870223
  hypo

SEQ ID NO: 81552 - DNA, 31 bp, Homo sapiens; identical to SEQ ID NO: 24987
  chr11:2874226-2874257
  hypo

SEQ ID NO: 81553 - DNA, 55 bp, Homo sapiens
  chr11:2885740-2885795
  hypo
atggggggttccagtagacaccgaggccgaggccggagggctcagccacccttgt

SEQ ID NO: 81554 - DNA, 31 bp, Homo sapiens; identical to SEQ ID NO: 24988
  chr11:2896187-2896218
  hypo

SEQ ID NO: 81555 - DNA, 1731 bp, Homo sapiens; identical to SEQ ID NO: 48072
  chr11:2905410-2907141
  hypo

SEQ ID NO: 81556 - DNA, 103 bp, Homo sapiens
  chr11:2910402-2910505
  hypo
agccctcactgctgtgcgttccttctaggaaagacccagaagccagagaagcctaggtcccaatcctggtggatcttcgtgctggaatcgttaagccagctgt

SEQ ID NO: 81557 - DNA, 31 bp, Homo sapiens
  chr11:2934241-2934272
  hypo
tgagcagtgtcccatacgacccagggcaccc

SEQ ID NO: 81558 - DNA, 31 bp, Homo sapiens
  chr11:2938037-2938068
  hypo
ctccagccaaggggtacggggggcctgaggg

SEQ ID NO: 81559 - DNA, 198 bp, Homo sapiens; identical to SEQ ID NO: 24991
  chr11:2939100-2939298
  hypo

SEQ ID NO: 81560 - DNA, 305 bp, Homo sapiens
  chr11:2942533-2942838
  hypo
aaaccatttatggttccggttggaagcagtttctgttctgcctggcaggaatttgggagggtgactggtcccctgcagaggtgctgcaggctgggcctgccctgtgggcagatactgagcccaggggctcctccagccggggccacccctgcactcccaggcgcgttggcccagcacgccctgcttagtggaggagctgagatgaccagatagagagcctcgccctggcctgggagcagcctgcggccaagcctgtcccaccgagcccatccccgggagcagcctgcggccgagcctgtcccacc

SEQ ID NO: 81561 - DNA, 42 bp, Homo sapiens
  chr11:2963521-2963563
  hypo
cgtctcaaaaaaaaaaacaacgctgagcttcattgaggacta

SEQ ID NO: 81562 - DNA, 386 bp, Homo sapiens
  chr11:2965736-2966122
  hypo
aaatgtgttctaaggttaggccgagcactctccacaggcctggtcagtgcggacacggccatccccggctgccggagagcgccgtcacccacttgaaaaccccacccaccagccgccaagcggtcacaccaaacccaggaccttcagacaggatgaatggtggggccccgcaatggggctactgagaaagcaggacttgacgctcatacgctccactgaaacgcaggacttcccagcccagtccctcagtggagaagactgccgaagcccggctccggcagcagggtggcgcctgcgtcatgaggacgggctcgcatcttcagccctggtggcagggagcggcgtttcttccgcacaggccttgcgcctgctaggaagtggcacat

SEQ ID NO: 81563 - DNA, 65 bp, Homo sapiens; identical to SEQ ID NO: 24994
  chr11:2987099-2987164
  hypo

SEQ ID NO: 81564 - DNA, 30 bp, Homo sapiens; identical to SEQ ID NO: 24995
  chr11:2998183-2998213
  hypo

SEQ ID NO: 81565 - DNA, 30 bp, Homo sapiens; identical to SEQ ID NO: 24996
  chr11:2998580-2998610
  hypo

SEQ ID NO: 81566 - DNA, 30 bp, Homo sapiens
  chr11:3003075-3003105
  hypo
cttcaatggtcccccgtcaccttctgcaga

SEQ ID NO: 81567 - DNA, 138 bp, Homo sapiens
  chr11:3021511-3021649
  hypo
accaatgactgtcttttgtcccgatggatatggcctggcaccagcttccgcaggcatgaagcaggctgtggtttctgcttacgccctcctcagccaaggatgggtaagcaccttcgcgtctgggtggtgattcttagt

SEQ ID NO: 81568 - DNA, 30 bp, Homo sapiens
  chr11:3023283-3023313
  hypo
ctagaacacgcaacacggcacagtcactgc

SEQ ID NO: 81569 - DNA, 30 bp, Homo sapiens
  chr11:3027903-3027933
  hypo
agtgggaaggagctacggggtgctcccctg

SEQ ID NO: 81570 - DNA, 78 bp, Homo sapiens
  chr11:3035021-3035099
  hypo
gcagtgaccggagattgcgctactgcactccagctgtggaaagaagagtttttgttcgctgagagctgctcacactcc

SEQ ID NO: 81571 - DNA, 53 bp, Homo sapiens
  chr11:3060354-3060407
  hypo
gtagcctacaaaggaccgagaacagaaagcaaagggctcggtttctagagcag

SEQ ID NO: 81572 - DNA, 21 bp, Homo sapiens
  chr11:3098286-3098307
  hypo
agccaccgtgcctggcctctc

SEQ ID NO: 81573 - DNA, 31 bp, Homo sapiens
  chr11:3102364-3102395
  hypo
aaggttccaaaatttccgttagacaggagga

SEQ ID NO: 81574 - DNA, 30 bp, Homo sapiens
  chr11:3108567-3108597
  hypo
ggactgaggccagacgtgaaggctgactgc

SEQ ID NO: 81575 - DNA, 54 bp, Homo sapiens; identical to SEQ ID NO: 24998
  chr11:3109134-3109188
  hypo

SEQ ID NO: 81576 - DNA, 31 bp, Homo sapiens; identical to SEQ ID NO: 24999
  chr11:3111263-3111294
  hypo

SEQ ID NO: 81577 - DNA, 31 bp, Homo sapiens
  chr11:3111798-3111829
  hypo
tcaccatcctgctcctcgtctgagagctctg

SEQ ID NO: 81578 - DNA, 60 bp, Homo sapiens
  chr11:3122918-3122978
  hypo
tggtgggacacctgcgtgcagggaggcggctctgtaaacagccccggaaacaggtaatcc

SEQ ID NO: 81579 - DNA, 44 bp, Homo sapiens
  chr11:3127000-3127044
  hypo
tccatgccctctgcccggagccccaggctcgcacctgcagcagc

SEQ ID NO: 81580 - DNA, 30 bp, Homo sapiens
  chr11:3127406-3127436
  hypo
aacacaaggatttcacggaccacggaggag

SEQ ID NO: 81581 - DNA, 182 bp, Homo sapiens; identical to SEQ ID NO: 25000
  chr11:3128517-3128699
  hypo

SEQ ID NO: 81582 - DNA, 30 bp, Homo sapiens
  chr11:3129053-3129083
  hypo
cgatgagggtgatgcgtctggcgaggtccc

SEQ ID NO: 81583 - DNA, 30 bp, Homo sapiens
  chr11:3130630-3130660
  hypo
gcctcctggggtcacgtcaggtgggaggat

SEQ ID NO: 81584 - DNA, 426 bp, Homo sapiens; identical to SEQ ID NO: 25001
  chr11:3141592-3142018
  hypo

SEQ ID NO: 81585 - DNA, 174 bp, Homo sapiens; identical to SEQ ID NO: 25002
  chr11:3145231-3145405
  hypo

SEQ ID NO: 81586 - DNA, 403 bp, Homo sapiens
  chr11:3164462-3164865
  hypo
ggggggcagaggaggcaggtgcggagcggggcagaggaggcaggtacagcccagtgcgtggaccagcgaccggctccaggggcccatggggggctgcactgtgggcgaaaacgcacggacgcgacacacccaagagaaacaagcacacgcccccaggtggtccgcgcacgcacgctcccagcagcatggctcagggccatcagagagcggacacagccagacatccacatgggtgaacggataaacatggatcacatctgtgcaacggatggaagaacattcggccttcaggaggcaggaagcacggcactcacacatgcgacgacacggatgagccgcagagatgcaccaagtcaaagaagccagataccaaaggccacatcttgtccgcttccacgcccac

SEQ ID NO: 81587 - DNA, 30 bp, Homo sapiens
  chr11:3165978-3166008
  hypo
ccagtcccccaaggcgtccccacgctcagg

SEQ ID NO: 81588 - DNA, 394 bp, Homo sapiens
  chr11:3167018-3167412
  hypo
agaaccccggcctgtcgccctcagtggttggcaatgggcacctggtagcccagcctgcgttcacttaactttgttacctggaggaaagtcacaactccacgacactcctagatgactctgggtgggctgagggttacagggacactggtacatcctcccggggtcacaatcggcaaatgtgctctgaacaccaccctcagctgccgttccacttgcggatgggaggattcacctgggggcccctccgccctgccgggagcaagccagacccaggggccttggccccaggagcccacagaagccgagtgtcatttctattccaggcccttccatctcaccagatgctaggggtacaaaagaaaaataagccagggtcccgcggccccgtcggagc

SEQ ID NO: 81589 - DNA, 30 bp, Homo sapiens
  chr11:3167812-3167842
  hypo
gtttccatcgcacccggtttcgggcactcc

SEQ ID NO: 81590 - DNA, 64 bp, Homo sapiens
  chr11:3168978-3169042
  hypo
cagggaaggccgggcgtggccctagacagggcacaggggcatgaaaggcgctggggaggaacag

SEQ ID NO: 81591 - DNA, 191 bp, Homo sapiens
  chr11:3169703-3169894
  hypo
aggtcacagaagagagaggaacggaggtgagtgcggagtctctttccagcggctgtccaggtggaggagacggggcgctgtctggaaccggcttccatgacggcagggcgggggcaccgtcctctgcacttttgtacatctttgacattttctatcatacgaagccaaacgggagaggacacagatttctc

SEQ ID NO: 81592 - DNA, 30 bp, Homo sapiens
  chr11:3172122-3172152
  hypo
tcttcccaggagtcacggcgggctgcccgc

SEQ ID NO: 81593 - DNA, 30 bp, Homo sapiens
  chr11:3172354-3172384
  hypo
agatcggagtgatgccgccacgagccaagg

SEQ ID NO: 81594 - DNA, 55 bp, Homo sapiens
  chr11:3179501-3179556
  hypo
aaagtggaaacccagcatgggcgctggagtgggcgagggttcccttcaaagctgg

SEQ ID NO: 81595 - DNA, 749 bp, Homo sapiens; identical to SEQ ID NO: 48080
  chr11:3186007-3186756
  hypo

SEQ ID NO: 81596 - DNA, 296 bp, Homo sapiens; identical to SEQ ID NO: 25005
  chr11:3187735-3188031
  hypo

SEQ ID NO: 81597 - DNA, 47 bp, Homo sapiens
  chr11:3212406-3212453
  hypo
aaagatagagagagggcggggctggatgaactcgcaggtttggggtc

SEQ ID NO: 81598 - DNA, 31 bp, Homo sapiens
  chr11:3219913-3219944
  hypo
agccacccacacaaagcgtcagattatgtgc

SEQ ID NO: 81599 - DNA, 30 bp, Homo sapiens
  chr11:3239494-3239524
  hypo
gacaaagaggaccacgccagccgtccaggc

SEQ ID NO: 81600 - DNA, 758 bp, Homo sapiens; identical to SEQ ID NO: 25006
  chr11:3243292-3244050
  hypo

SEQ ID NO: 81601 - DNA, 273 bp, Homo sapiens
  chr11:3246364-3246637
  hypo
gctgatttacagactcgtacccgggcgctggggaggggatagggaagctggccgcaggcctgtctccgctcctgtcctcacacacacagtcctcacccacagcctccctgggccctgaggacggagcgggttacacaggctccctggaatgttggctgcccccaggagtagccgcctgttcttgggaattctgtgctgaccgcggcagccccgcaggggcccggggttgcgggtggatggggtgggctgggcactgaccgaggagctttgcct

SEQ ID NO: 81602 - DNA, 35 bp, Homo sapiens
  chr11:3247716-3247751
  hypo
ccaggcctgctgggcacgtgcgggagcctgaggtg

SEQ ID NO: 81603 - DNA, 238 bp, Homo sapiens
  chr11:3249613-3249851
  hypo
aggtggcgtgggcggcggcacgagtaccaggctgggaagagggcggccaggcactgctccacgctgacggccgccaggagactcaggcccacgatgtagcagaagaagcgcagcgttgccaggctggtctgcacgaagcccgggaagtccagccggccttgcagcaagtcggggacgatggccaccatgtggcagccaaggaagatgagatccgcgcaggccacgtccaggaggtaga

SEQ ID NO: 81604 - DNA, 30 bp, Homo sapiens; identical to SEQ ID NO: 25007
  chr11:3251745-3251775
  hypo

SEQ ID NO: 81605 - DNA, 238 bp, Homo sapiens
  chr11:3254281-3254519
  hypo
gacctctcctcttgcggaccaagtgagagcaagtttcccgcacgtggcctttgacctgtcactacatcagcaggcatcccccagggcaccggcatcctccatccccaaaacggaggggccgcacacaggtcgtctggcgtctgtgcaatgctggtgtctgatgaatgtgtcgcgctggtgtctgacgtccatgcggggctggtatctgacaggcagcagtgccgcttgctgagttgtg

SEQ ID NO: 81606 - DNA, 30 bp, Homo sapiens; identical to SEQ ID NO: 25009
  chr11:3396222-3396252
  hypo

SEQ ID NO: 81607 - DNA, 30 bp, Homo sapiens; identical to SEQ ID NO: 7885
  chr11:3427830-3427860
  hypo

SEQ ID NO: 81608 - DNA, 243 bp, Homo sapiens; identical to SEQ ID NO: 48083
  chr11:3444552-3444795
  hypo

SEQ ID NO: 81609 - DNA, 87 bp, Homo sapiens
  chr11:3511140-3511227
  hypo
ccacatagtattcttacgggttaaattgagtcctcttcaaaacatgttgaaatcctaaattctaggagctcagaatgtgaccttatt

SEQ ID NO: 81610 - DNA, 27 bp, Homo sapiens
  chr11:3602557-3602584
  hypo
ccgcggacacgccgggccctggcctgc

SEQ ID NO: 81611 - DNA, 30 bp, Homo sapiens; identical to SEQ ID NO: 25013
  chr11:3637412-3637442
  hypo

SEQ ID NO: 81612 - DNA, 31 bp, Homo sapiens
  chr11:3658467-3658498
  hypo
ctggcagagggagggacgccccggcctcccg

SEQ ID NO: 81613 - DNA, 31 bp, Homo sapiens
  chr11:3661448-3661479
  hypo
tgcctcccaggattcccgcagcagggcatgg

SEQ ID NO: 81614 - DNA, 30 bp, Homo sapiens
  chr11:3686877-3686907
  hypo
ctgctctggaaactcgactgagaatccccg

SEQ ID NO: 81615 - DNA, 226 bp, Homo sapiens
  chr11:3688511-3688737
  hypo
tggaagacggtgagcgccagcagcacggtgacgcccagcgacaccttctcgcctgagtcggcaggcaggtggaaggcgagcggcgcaagcagcgagatgagcacgcagggcagcagcaggttgcacacgtaggcggcggcgcggcggcgcagcagcagcgtgaaggtgacgtcggggtagggctcggagcagcagccgtaggtgagcacgcgccgccgcgccggca

SEQ ID NO: 81616 - DNA, 51 bp, Homo sapiens
  chr11:3688970-3689021
  hypo
gaacctggaggctgcgcgtcggctctgggggcaggcggggcagggctcacc

SEQ ID NO: 81617 - DNA, 223 bp, Homo sapiens
  chr11:3697392-3697615
  hypo
aggctcccaacagccagttctcgcagataggactgggtaaggctgcgcagttcgtccatggcatagtcctcaggcatgggaagccggccaatgtggggagccaagaggcgcaaagggactcgctgagggtctggtgttgagtcggaggttctatcaggaggatgatgcagactcagcaccacgcgcagcaggttggctacacgtttggccatgtctagagaga

SEQ ID NO: 81618 - DNA, 31 bp, Homo sapiens; identical to SEQ ID NO: 25016
  chr11:3704649-3704680
  hypo

SEQ ID NO: 81619 - DNA, 40 bp, Homo sapiens; identical to SEQ ID NO: 25017
  chr11:3767211-3767251
  hypo

SEQ ID NO: 81620 - DNA, 29 bp, Homo sapiens
  chr11:3828813-3828842
  hypo
aggcgtgagctaccgcgcctggccctcac

SEQ ID NO: 81621 - DNA, 360 bp, Homo sapiens
  chr11:3845110-3845470
  hypo
aggtgcccaattacctgccctcggtgagctcagccatcggcggggaggtgccccagcgctacgtgtggcgtttctgcatcggcctgcactcggcgcctcgcttcttggtggccttcgcctactggaaccactacctcagctgcacctccccgtgttcctgctatcgcccgctctgccgcctcaacttcggcctcaatgtcgtggagaacctcgcgttgctagtgctcacttatgtctcctcctccgaggacttcagtgggtgcctggatgagggaggagtggggaagtgttccctgaggggacgggcctgcccctaccacattcggaccttcctacttcgtggtgtgggcactccctgca

SEQ ID NO: 81622 - DNA, 31 bp, Homo sapiens; identical to SEQ ID NO: 25018
  chr11:3846725-3846756
  hypo

SEQ ID NO: 81623 - DNA, 28 bp, Homo sapiens
  chr11:4030227-4030255
  hypo
aagttgcattttggctgggtgcggtggc

SEQ ID NO: 81624 - DNA, 100 bp, Homo sapiens
  chr11:4095785-4095885
  hypo
ggaaaagaagctgcgcgatgagatcaaccttgctaagcaggaagcccagcggctgaaggagctgcgggagggtactgagaatgagcggagccgccaaaaa

SEQ ID NO: 81625 - DNA, 38 bp, Homo sapiens
  chr11:4494113-4494151
  hypo
aataaggctctaaataataaacgttaggctgggcgcgg

SEQ ID NO: 81626 - DNA, 153 bp, Homo sapiens
  chr11:4599982-4600135
  hypo
tacttgcacgcatgcgtgtatgcacacacaaacacacatacacacacaagccggacatttgcctttatgctgaggtggcaaataggaacaaagctttggcctaatgaatttcagacttaatccctagttcccctcaacgtaacttctgaggtt

SEQ ID NO: 81627 - DNA, 49 bp, Homo sapiens; identical to SEQ ID NO: 25020
  chr11:5177826-5177875
  hypo

SEQ ID NO: 81628 - DNA, 30 bp, Homo sapiens
  chr11:5474950-5474980
  hypo
tgcccactgtactccgaaccttctgcctca

SEQ ID NO: 81629 - DNA, 92 bp, Homo sapiens
  chr11:5687915-5688007
  hypo
aactattactggcctgaatatcgtgtggttagaaagaacttgataccaccacgtaggtgtgcgaggtgtgcgattttagacacaagaatagc

SEQ ID NO: 81630 - DNA, 31 bp, Homo sapiens; identical to SEQ ID NO: 25021
  chr11:6412882-6412913
  hypo

SEQ ID NO: 81631 - DNA, 35 bp, Homo sapiens
  chr11:6432991-6433026
  hypo
actgactgcccctctccggccgcacttccatccca

SEQ ID NO: 81632 - DNA, 237 bp, Homo sapiens
  chr11:6477623-6477860
  hypo
atggctgccggggccgccaggggacttgacacggcgcttcacatcgtccggggaaggtggcaggtcccccggacgcagggcacgcacgcggaaggggctgccgcgcactggctgtccgtagagcagcaccgagaggagcagctcgccttccgtgcgcgctgtgtacactagctcatatgtgccattcttgtggtccaccactggcaccggaaggcgcgtgccgtccgggccggtgat

SEQ ID NO: 81633 - DNA, 81 bp, Homo sapiens
  chr11:6478111-6478192
  hypo
ccaatgcagccagccgctctcgcatgtgcttgcgcaccagcaacacctccggggccgagcccaggcgcagtgcctgctctg

SEQ ID NO: 81634 - DNA, 21 bp, Homo sapiens
  chr11:6497208-6497229
  hypo
gcacctggccaggtctcagct

SEQ ID NO: 81635 - DNA, 31 bp, Homo sapiens; identical to SEQ ID NO: 7892
  chr11:6502786-6502817
  hypo

SEQ ID NO: 81636 - DNA, 121 bp, Homo sapiens
  chr11:6521105-6521226
  hypo
cttttttaaaatatctggctatcagagctctctacaggatttcagaatgcttacagagaccttctcttctcagcgttctctaactttcgatttttttttttttttctgaaacagagtctca

SEQ ID NO: 81637 - DNA, 30 bp, Homo sapiens
  chr11:6559931-6559961
  hypo
ctgcagcactgcatgcgcatcctgggggag

SEQ ID NO: 81638 - DNA, 114 bp, Homo sapiens
  chr11:6585064-6585178
  hypo
ctgttctgcactatgggctggcgcattgccggggactgcccacggacctgctgctgcagcaagtggaggcaacactcactcgggagcaggcccgcctgggctactaccagtttc

SEQ ID NO: 81639 - DNA, 30 bp, Homo sapiens; identical to SEQ ID NO: 25023
  chr11:6630617-6630647
  hypo

SEQ ID NO: 81640 - DNA, 30 bp, Homo sapiens
  chr11:6631271-6631301
  hypo
tgaagtcatcatgtcgggaggtaaaaaagg

SEQ ID NO: 81641 - DNA, 30 bp, Homo sapiens; identical to SEQ ID NO: 25024
  chr11:6632057-6632087
  hypo

SEQ ID NO: 81642 - DNA, 30 bp, Homo sapiens
  chr11:6642893-6642923
  hypo
ggtggtggcctccccgtagccagtcatagt

SEQ ID NO: 81643 - DNA, 31 bp, Homo sapiens; identical to SEQ ID NO: 25025
  chr11:6651319-6651350
  hypo

SEQ ID NO: 81644 - DNA, 30 bp, Homo sapiens
  chr11:6661953-6661983
  hypo
cctccggttgatctcgtaagtcacagcccc

SEQ ID NO: 81645 - DNA, 30 bp, Homo sapiens; identical to SEQ ID NO: 25026
  chr11:6662309-6662339
  hypo

SEQ ID NO: 81646 - DNA, 461 bp, Homo sapiens; identical to SEQ ID NO: 7893
  chr11:6947597-6948058
  hypo

SEQ ID NO: 81647 - DNA, 31 bp, Homo sapiens; identical to SEQ ID NO: 7899
  chr11:7534832-7534863
  hypo

SEQ ID NO: 81648 - DNA, 30 bp, Homo sapiens; identical to SEQ ID NO: 48112
  chr11:7695172-7695202
  hypo

SEQ ID NO: 81649 - DNA, 135 bp, Homo sapiens; identical to SEQ ID NO: 48113
  chr11:8040428-8040563
  hypo

SEQ ID NO: 81650 - DNA, 194 bp, Homo sapiens; identical to SEQ ID NO: 48114
  chr11:8040581-8040775
  hypo

SEQ ID NO: 81651 - DNA, 611 bp, Homo sapiens; identical to SEQ ID NO: 48115
  chr11:8040960-8041571
  hypo

SEQ ID NO: 81652 - DNA, 114 bp, Homo sapiens; identical to SEQ ID NO: 48116
  chr11:8103002-8103116
  hypo

SEQ ID NO: 81653 - DNA, 30 bp, Homo sapiens
  chr11:8104443-8104473
  hypo
gcaacaccctcacacgtgcgcacatacagg

SEQ ID NO: 81654 - DNA, 708 bp, Homo sapiens; identical to SEQ ID NO: 48117
  chr11:8190058-8190766
  hypo

SEQ ID NO: 81655 - DNA, 95 bp, Homo sapiens; identical to SEQ ID NO: 25032
  chr11:8254113-8254208
  hypo

SEQ ID NO: 81656 - DNA, 43 bp, Homo sapiens
  chr11:8255451-8255494
  hypo
ctttagaaaaaaatggctttgcgctccttcaggaaaggtttta

SEQ ID NO: 81657 - DNA, 203 bp, Homo sapiens
  chr11:8269569-8269772
  hypo
tctgggtcttaacttacgtgaccagggctcagaaaagttaagtggtttgcccaataacacacagcagtgggtggtagagcaagattgcccgtgatctcacagtcagaggaccacagtccatgcttgttacctcccaagtcaaaagacagctacccctgcagcaagcggtcaggccctcatgccgctgccgtcaatttcaaaga

SEQ ID NO: 81658 - DNA, 534 bp, Homo sapiens
  chr11:8336903-8337437
  hypo
agctccagaagccaccgagtagaggctcggggcctgctgccatccatccctggagtcatctctccaggttgagtacggcacgatttaatgctcccatccctccattcctgctctgcatgacaaattgttttaataaacataaaccgggtaataataaagtcataataagcccgcgactcaccttatatcactgcagttaaatcctcccataagccggcactggttacaatgacaattacggccgggccaatccgcaggcaggcctgcgtgcggacagatttaatatcgtttgtaaatatgattagtgggctgtcatgttattgcaggctgctatttacatttctctccggggttatacactccgccaaatcaacattaagtagtgggtctctctttcctccttaaatcatacattccttctgcctgcgccaatcccgcttaatgaagaaagggaacctgacggcaggcgctgggcagaacggagcctggcctcggcatttttctgaagacagatgggcacggggagccccaaga

SEQ ID NO: 81659 - DNA, 30 bp, Homo sapiens
  chr11:8337656-8337686
  hypo
aggaaatattgctggcgcttcccgctctgc

SEQ ID NO: 81660 - DNA, 30 bp, Homo sapiens; identical to SEQ ID NO: 25033
  chr11:8376473-8376503
  hypo

SEQ ID NO: 81661 - DNA, 749 bp, Homo sapiens; identical to SEQ ID NO: 48123
  chr11:8615282-8616031
  hypo

SEQ ID NO: 81662 - DNA, 167 bp, Homo sapiens; identical to SEQ ID NO: 25036
  chr11:8656270-8656437
  hypo

SEQ ID NO: 81663 - DNA, 30 bp, Homo sapiens; identical to SEQ ID NO: 25037
  chr11:8680502-8680532
  hypo

SEQ ID NO: 81664 - DNA, 30 bp, Homo sapiens; identical to SEQ ID NO: 25038
  chr11:8721006-8721036
  hypo

SEQ ID NO: 81665 - DNA, 31 bp, Homo sapiens
  chr11:8724437-8724468
  hypo
ctgctctcgtagcactcgaacacccagcctg

SEQ ID NO: 81666 - DNA, 170 bp, Homo sapiens
  chr11:8725355-8725525
  hypo
tgtccactgtctctcccgcctgatggtgtactcccagaaggcccagtgatccgccagatgctgggtacaccccaaatggtcagtgaacgtggactcacagaaagaagtagcacaatgatgccagagccctttatacctgctccaggccctgtccccgccccaaaattcgc

SEQ ID NO: 81667 - DNA, 32 bp, Homo sapiens
  chr11:8735204-8735236
  hypo
gcatgagccaccgcgcccggctgagatctaca

SEQ ID NO: 81668 - DNA, 42 bp, Homo sapiens
  chr11:8751525-8751567
  hypo
gtccttcttgggtctccgggtgactggcggggctggggtgga

SEQ ID NO: 81669 - DNA, 367 bp, Homo sapiens
  chr11:8752346-8752713
  hypo
tgcccaggctgtgggcgcgggtaccggtacgggtcagcaagacgccccgggggccagctgctggccccgggaatggcgtgctctgggcaagggggaggcaggcagcgacccctgctacatcctgggctgcgccttggacactttccttttgggcgtctctcttgcacgccgaagggcttctgtccaaataaccgaagctggcggtcttgaagggacaggtgggtggggaagtatctggggagggatcttgaggattctggggtgaaggagctggggggtgccggtccttgaggagcacccgggagctggagtggctggggtacctgcaggctgaggtttcactatcactgagcgggtagatgggact

SEQ ID NO: 81670 - DNA, 31 bp, Homo sapiens
  chr11:8756389-8756420
  hypo
agaaatagtacctgtcgcgcattgagcttgg

SEQ ID NO: 81671 - DNA, 180 bp, Homo sapiens
  chr11:8759789-8759969
  hypo
tccctatgctgctttacgcttcagttgatcactccctgtttcttgagcgtctcaggacatcactcttcatggttttcttcttttctcactaaatgctcttctcagtcggtttccttggctagttcttcttcctcgtccagacctcaaaacactggaacgtcccagcgcttggacttctct

SEQ ID NO: 81672 - DNA, 36 bp, Homo sapiens
  chr11:8791119-8791155
  hypo
taaaaactcccataagcgtctcgtcttagaaaaaag

SEQ ID NO: 81673 - DNA, 18 bp, Homo sapiens
  chr11:8801353-8801371
  hypo
gcccggccaaggtttcca

SEQ ID NO: 81674 - DNA, 126 bp, Homo sapiens
  chr11:8829416-8829542
  hypo
gcttcttcccagacaccactccgggatatggctggcaggtcttccccatcctacagtaaagctggggctgtgggtgacgcgctctagtatgccatacgccctttcgactcaatgaggacagacctg

SEQ ID NO: 81675 - DNA, 31 bp, Homo sapiens
  chr11:8958013-8958044
  hypo
ctggtctcgctctgtcgcccaggctggagtg

SEQ ID NO: 81676 - DNA, 30 bp, Homo sapiens
  chr11:8958834-8958864
  hypo
ggtagttagcagtcacgcttcacaagcttc

SEQ ID NO: 81677 - DNA, 31 bp, Homo sapiens; identical to SEQ ID NO: 25041
  chr11:8959627-8959658
  hypo

SEQ ID NO: 81678 - DNA, 17 bp, Homo sapiens
  chr11:9014178-9014195
  hypo
cgggcgcagtggctcac

SEQ ID NO: 81679 - DNA, 1108 bp, Homo sapiens; identical to SEQ ID NO: 48128
  chr11:9025074-9026182
  hypo

SEQ ID NO: 81680 - DNA, 31 bp, Homo sapiens
  chr11:9049167-9049198
  hypo
ctagcttgccgagccccgcagcacccctgtt

SEQ ID NO: 81681 - DNA, 191 bp, Homo sapiens
  chr11:9074511-9074702
  hypo
tggacctctcaaagcacggtggtcggggcatctggcggaggacctggaagccctttgagggaatctaacacctggaggccagagaggcctggccccagtgtgaggacctgccccgggaactgggccccactcacctgaagagaggtgaatgccagagtgacatctgaggaagcacccgtctcctccaccac

SEQ ID NO: 81682 - DNA, 492 bp, Homo sapiens; identical to SEQ ID NO: 48130
  chr11:9112639-9113131
  hypo

SEQ ID NO: 81683 - DNA, 16 bp, Homo sapiens
  chr11:9206714-9206730
  hypo
gcgacagtgtgagact

SEQ ID NO: 81684 - DNA, 78 bp, Homo sapiens; identical to SEQ ID NO: 25045
  chr11:9328212-9328290
  hypo

SEQ ID NO: 81685 - DNA, 21 bp, Homo sapiens
  chr11:9347579-9347600
  hypo
aatatacagccaggcacggtg

SEQ ID NO: 81686 - DNA, 241 bp, Homo sapiens
  chr11:9405262-9405503
  hypo
gtgagccaccgcgcctggcaggaaggtgtattttaatagggattatgcttttactctgcattaagaggtgatttatatgaagtcccaactaaaatttggatactcaataaaaagccatgatttcagtatttggtaattactaatacgtaatgtgataaaaacctttcacacataaagttcatttaatcttccgtgttattgccttaggataaagtctcataagtggaattactgggtcaga

SEQ ID NO: 81687 - DNA, 24 bp, Homo sapiens
  chr11:9405802-9405826
  hypo
caccgcgcccggcagtttaaatat

SEQ ID NO: 81688 - DNA, 26 bp, Homo sapiens
  chr11:9414005-9414031
  hypo
tgcccggcttgtcaaatgctttagta

SEQ ID NO: 81689 - DNA, 37 bp, Homo sapiens; identical to SEQ ID NO: 25047
  chr11:9418900-9418937
  hypo

SEQ ID NO: 81690 - DNA, 37 bp, Homo sapiens; identical to SEQ ID NO: 25048
  chr11:9422431-9422468
  hypo

SEQ ID NO: 81691 - DNA, 30 bp, Homo sapiens
  chr11:9448802-9448832
  hypo
gtcttttatcttttcgttttttggaaatgg

SEQ ID NO: 81692 - DNA, 42 bp, Homo sapiens; identical to SEQ ID NO: 25049
  chr11:9531939-9531981
  hypo

SEQ ID NO: 81693 - DNA, 42 bp, Homo sapiens
  chr11:9540961-9541003
  hypo
ggattacaggcgtgagccaccgcacccagcttggttttgcct

SEQ ID NO: 81694 - DNA, 94 bp, Homo sapiens
  chr11:9548318-9548412
  hypo
aattgcaggccaggcacggcaggctgggagtacaggtgcacgctgccatgcgcagctaatttttgttttttgagacggagtctcgctctgtcac

SEQ ID NO: 81695 - DNA, 152 bp, Homo sapiens
  chr11:9552470-9552622
  hypo
ggcatgaaccactgcgcccgcccggctgcggtcttgatgtctatctttgtgtgtgttttgtaaatgaagtctcatgcatcaacaaagcatgtgctgggggcttagcgcctgagcttacacacagctccaccggctgctgcctccctggaagt

SEQ ID NO: 81696 - DNA, 324 bp, Homo sapiens
  chr11:9554671-9554995
  hypo
gtgcccagccaccattctattttctgtctctataaatttgactgttgtaggcgcctcatattatatttgtctttttgtgtctggctttatgtgtacctttaaaagcaagtttttcctgtcttttgaccaagaggttgcgtattttcatttttgcacggagccgcacagattatgtagcctgtcctgctgaggcgtgcgcttctattagcccttctgtttttgctgcagatgtgtgacctgtgttttgggaatatattatctcttgttagattatgggctcctttaagacagctggggatttaaatttcccggtaactcctggag

SEQ ID NO: 81697 - DNA, 121 bp, Homo sapiens
  chr11:9567889-9568010
  hypo
tcggccatcttggctcctcccgccgaaatttttaagttctaaacaactctttaatcagtgacaaaccaaaactgaattacagacttttattttttttttgagatggagtcttgccctgtcg

SEQ ID NO: 81698 - DNA, 210 bp, Homo sapiens; identical to SEQ ID NO: 7916
  chr11:9596557-9596767
  hypo

SEQ ID NO: 81699 - DNA, 50 bp, Homo sapiens
  chr11:9620657-9620707
  hypo
gtttgtcacacactattgctacgagtatcgaacaacccattcttggggag

SEQ ID NO: 81700 - DNA, 31 bp, Homo sapiens
  chr11:9629900-9629931
  hypo
aaatgttctttattatcgacaccagtttgaa

SEQ ID NO: 81701 - DNA, 535 bp, Homo sapiens; identical to SEQ ID NO: 48144
  chr11:9685506-9686041
  hypo

SEQ ID NO: 81702 - DNA, 18 bp, Homo sapiens
  chr11:9751051-9751069
  hypo
ttttttttttctgagacg

SEQ ID NO: 81703 - DNA, 36 bp, Homo sapiens; identical to SEQ ID NO: 25056
  chr11:9771062-9771098
  hypo

SEQ ID NO: 81704 - DNA, 18 bp, Homo sapiens
  chr11:9863100-9863118
  hypo
agagtcttgctctgtccg

SEQ ID NO: 81705 - DNA, 85 bp, Homo sapiens
  chr11:10004723-10004808
  hypo
tttcaagcccgtctggcagcccgtcttgccctctgcctggaaacagactcagggctactggggggcacagcgggagagaaactgg

SEQ ID NO: 81706 - DNA, 30 bp, Homo sapiens
  chr11:10508886-10508916
  hypo
ccgggacttctataacgtgagaaaggtgcg

SEQ ID NO: 81707 - DNA, 227 bp, Homo sapiens
  chr11:10509587-10509814
  hypo
agtttgtggttttgcatccttcgggatcatgtggatttaaagaaaagcctctgatatgctcagatctctgcctctcttctcccaccaaggggatggcagccttgtccggggctcctggcagtctccgcctgcaggggccgcaactgcggtaggagcgaaggttaaatgatcatggccctagcctttccattctcttttgctgaagcgctgtgcagtgaggcacaggg

SEQ ID NO: 81708 - DNA, 113 bp, Homo sapiens
  chr11:10512605-10512718
  hypo
acttggagatgctcagccagccgtggacagcattccctgccctgaggtcagccgcctcctcaccccagcccgggctgagcgcccagtcggccgcagcagtagctccagagtgt

SEQ ID NO: 81709 - DNA, 193 bp, Homo sapiens; identical to SEQ ID NO: 25058
  chr11:10519311-10519504
  hypo

SEQ ID NO: 81710 - DNA, 211 bp, Homo sapiens
  chr11:10522155-10522366
  hypo
ggacatgctatcacacatgcacggtcacttactgccacaccaacaatgtccacacgtgcatattttcgttcagcaaatcactgcatctggcatgcgataggcattgccctgggcactggacaaataacggggaacaaaacagactaaatccatgcatgcccttacaggcagaggctcctaccaatacgcacacagacgaggcacacgtggc

SEQ ID NO: 81711 - DNA, 22 bp, Homo sapiens
  chr11:10545661-10545683
  hypo
aaaaaaaaagaaaccactggcc

SEQ ID NO: 81712 - DNA, 30 bp, Homo sapiens
  chr11:10672610-10672640
  hypo
tttggatgactgtccgatataacaggacaa

SEQ ID NO: 81713 - DNA, 194 bp, Homo sapiens; identical to SEQ ID NO: 25059
  chr11:10712068-10712262
  hypo

SEQ ID NO: 81714 - DNA, 35 bp, Homo sapiens
  chr11:10811102-10811137
  hypo
ctacagaatctggaactttcccgagtaacgtgctt

SEQ ID NO: 81715 - DNA, 24 bp, Homo sapiens
  chr11:10815861-10815885
  hypo
aaagtgacatttgaagctgggcgc

SEQ ID NO: 81716 - DNA, 152 bp, Homo sapiens
  chr11:10865157-10865309
  hypo
aagtgctgggattacaggcgtgagccaccgcgcgcggctctagtggagtcttgaaatgactgcagctcttgctaacaccttcatcgcagccagtgagagactctgaagctaagctccacctgattcctgacgtatagcaactgtgaggtaat

SEQ ID NO: 81717 - DNA, 30 bp, Homo sapiens; identical to SEQ ID NO: 25061
  chr11:11102824-11102854
  hypo

SEQ ID NO: 81718 - DNA, 31 bp, Homo sapiens
  chr11:11398889-11398920
  hypo
ccggttctccttgatgcgggtgagtacaggt

SEQ ID NO: 81719 - DNA, 207 bp, Homo sapiens
  chr11:11534253-11534460
  hypo
gctacggagagtctggcggcacctgaggcctgggctcgttatgtgccttaacacagtggtattaccatgctctgctactctcctaacccatctatcacatggacaccaggacacacgggtgctgcctagaaaaaggatgcctctcgacaaagtcccataatgacactaactcctctcatcactcaggtggcccgtgtgtgtgatctg

SEQ ID NO: 81720 - DNA, 208 bp, Homo sapiens
  chr11:11601779-11601987
  hypo
ccttggtgaaatacctcggcagactcagggcaaacctcatgtgttctcaatccgacagcaaggaaggtgccatcttattccttctccctcccgccacccccaaagactagccctgggtcctcctcatcaaatttgctttcctaagaccgtccctgagatgtagccatgaacatcccaggcttctcatgtttcccggcttttgcccaga

SEQ ID NO: 81721 - DNA, 31 bp, Homo sapiens; identical to SEQ ID NO: 25063
  chr11:11614845-11614876
  hypo

SEQ ID NO: 81722 - DNA, 438 bp, Homo sapiens
  chr11:11833039-11833477
  hypo
tgctccaggccttccgctgcggcacctaaagaggccgggcggcccagaggcccgcaagccacgcccccttccaggccccgcctccgtttggccactccccttgctgtcagctcttccaccagttcctgcccctgcccctttcctcccacgcatccgcacccgagcagccccacctgctaagccacgccccctgtcctgtgctgtcctgcactcccaggtgccccacgctttcccaccctcccagtcaaccggcgcagggagcctcatcattattagtgcgtggacaatcacatgtaacaaaatgagctaacgtgcagttatctaccaggtgccaggctctgtcctaagtgttctacacataaacgttaagttaccagtattgtgcttattttataattgggagactgagacataggttggttaaaaagtttaagactt

SEQ ID NO: 81723 - DNA, 390 bp, Homo sapiens
  chr11:11862851-11863241
  hypo
gttgcggggggcgggcggtgaggacaccgcttcataagggaaggggtggctgcctccccaagcagggggtggcccctgaggtccctccagctgggggcccttgagagggagggtggggagaggggaaaagaacgtcaggagagtgaacgggagcaaataaaacgctgtccattctgactggaagggccagagccgtgtctaagggcgggggccgggaggtggcccgcggtggtgtctctaccaggacgaggcctggggtatctgaagaggggatgacgtccaggcgctttgctaaagggaagccagaagggtatgagttgctagggtcagagatggggctttcggctcgagtctttccctgcagggcagagagtccgaagagcccgagaa

SEQ ID NO: 81724 - DNA, 31 bp, Homo sapiens
  chr11:11990980-11991011
  hypo
tctctatattgccagccgggaaatggaggca

SEQ ID NO: 81725 - DNA, 246 bp, Homo sapiens
  chr11:11991421-11991667
  hypo
aaatgtcaggcatgataccatcgctgtttttacggataagaaaaccgaggctccgagtagggtgaacggccgcccaagtgaagggactgagtctgagccagagccccagcggccagagaagtcccaacagggctgggaacaaatcacagacgcgctttgtctcagcccagcacacgctcttgtgcacagacacaactcaggctgctcagccggaagcctcccgacgttctttccaaagcagaatgg

SEQ ID NO: 81726 - DNA, 1075 bp, Homo sapiens; identical to SEQ ID NO: 7922
  chr11:12029931-12031006
  hypo

SEQ ID NO: 81727 - DNA, 169 bp, Homo sapiens; identical to SEQ ID NO: 25065
  chr11:12073850-12074019
  hypo

SEQ ID NO: 81728 - DNA, 31 bp, Homo sapiens; identical to SEQ ID NO: 25066
  chr11:12083039-12083070
  hypo

SEQ ID NO: 81729 - DNA, 31 bp, Homo sapiens
  chr11:12091296-12091327
  hypo
gctgaataaaataccccgagtcatttcttat

SEQ ID NO: 81730 - DNA, 44 bp, Homo sapiens
  chr11:12106315-12106359
  hypo
tgatcagatagggccacgcaaggggtttggggtgctggcaatga

SEQ ID NO: 81731 - DNA, 66 bp, Homo sapiens; identical to SEQ ID NO: 25067
  chr11:12115884-12115950
  hypo

SEQ ID NO: 81732 - DNA, 846 bp, Homo sapiens; identical to SEQ ID NO: 7923
  chr11:12131780-12132626
  hypo

SEQ ID NO: 81733 - DNA, 31 bp, Homo sapiens
  chr11:12145917-12145948
  hypo
cttctctgacctaagacgcctttctgaagct

SEQ ID NO: 81734 - DNA, 30 bp, Homo sapiens
  chr11:12181661-12181691
  hypo
ggaaagagggaaggtcgggtagggccctac

SEQ ID NO: 81735 - DNA, 399 bp, Homo sapiens
  chr11:12181999-12182398
  hypo
tggaggggacacctgccaccacgtgcgctggacatccccaccgcacctcctcacgaatcctgaaccttgaacttgctgtcattccaccactgtcccgctctttccacactcacatccctgtgtgggtatttccatggcctggaatgtccactgcccagtcttctagtaaaataaatctcattcctaaaattgaagctttcttgagatttctctcttgtggcccctctggactcctcgaggctctgttggacaccgcctgctctgggcttccatgcccttggttcatattccacaagcacttgcctgtggtcttgtaatccatctgcccctgtgggcggggcctgagcctacgtattcccggccccttgagtggtgcccgactcttgctaatgcaccagt

SEQ ID NO: 81736 - DNA, 354 bp, Homo sapiens
  chr11:12183610-12183964
  hypo
cccctactttcacaggtgtgacgtttctccagatacttcatgctgttcacctgtgtcctcgccgcaccactgccgcacacgactcctgaaccatgggggaaaacgaggatgagaagcaggcccaggcggggcaggtttttgagaactttgtccaggcatccacgtgcaaaggtaccctccaggccttcaacattctcacacgacacctggacctagaccctctggaccacagaaacttttattccaagctcaagtccaaggtgaccacctggaaagccaaagccctgtggtacaaattggataagcgtggttcccacaaagagtataagcgagggaagtcgtgcacgaacacca

SEQ ID NO: 81737 - DNA, 28 bp, Homo sapiens
  chr11:12186385-12186413
  hypo
caacaggtgtccttggctgggcgtcgcg

SEQ ID NO: 81738 - DNA, 134 bp, Homo sapiens
  chr11:12205860-12205994
  hypo
ccctgtcctgcaagccgctccctgttcaccattctcctcctggttaagtacgggcatctgtgtcccaagagagggctccactgcagaccctgaccaccagcatacctgcccacagaggccgaaaatgtggtagt

SEQ ID NO: 81739 - DNA, 428 bp, Homo sapiens; identical to SEQ ID NO: 25069
  chr11:12209617-12210045
  hypo

SEQ ID NO: 81740 - DNA, 42 bp, Homo sapiens; identical to SEQ ID NO: 25070
  chr11:12214007-12214049
  hypo

SEQ ID NO: 81741 - DNA, 31 bp, Homo sapiens
  chr11:12225813-12225844
  hypo
aggaccctgtggcttgcgcactgccattgaa

SEQ ID NO: 81742 - DNA, 31 bp, Homo sapiens; identical to SEQ ID NO: 25071
  chr11:12230961-12230992
  hypo

SEQ ID NO: 81743 - DNA, 31 bp, Homo sapiens
  chr11:12238924-12238955
  hypo
gagcctgagttgtagacggaggctgtgaatg

SEQ ID NO: 81744 - DNA, 288 bp, Homo sapiens
  chr11:12240001-12240289
  hypo
actctcctgcatgaggcgtccacgccaggcactgtcttcactgtgtaatgtcacccactccatcttagggatgcttgggtcatattttgaagggggggtgtttgagacctctcccttctctcttcccccatctcacctccacgccttcggagagagaagtgatcatgtgaccgcggaaacagggatcagaaaggaaatcaaataacaggaattccatcctggacactggggcctgacaaagagctcttggaccagtgctggatgcaatttgggcggtttggtttgaat

SEQ ID NO: 81745 - DNA, 281 bp, Homo sapiens
  chr11:12247646-12247927
  hypo
ctgaaggtgctcagctcgccacacctctgcctcctctccctgaatttctctgctttgttttgattctctagcaactttgactctttgaatgaagatgatgctgtggagaacaaccagctcgcatttgatgtggccgagcgagagtttgggatccctccagtgaccacgggcaaagagatggcatctgcccaggagcctgacaagctcagcatggtcatgtacctctccaagttctacgagctcttccggggcaccccactgaggcccgtgggtaagcacct

SEQ ID NO: 81746 - DNA, 345 bp, Homo sapiens; identical to SEQ ID NO: 25074
  chr11:12248493-12248838
  hypo

SEQ ID NO: 81747 - DNA, 55 bp, Homo sapiens; identical to SEQ ID NO: 25075
  chr11:12253011-12253066
  hypo

SEQ ID NO: 81748 - DNA, 31 bp, Homo sapiens
  chr11:12253366-12253397
  hypo
tatcccctccaggtgcgcgcaggtcatggct

SEQ ID NO: 81749 - DNA, 30 bp, Homo sapiens; identical to SEQ ID NO: 7924
  chr11:12260402-12260432
  hypo

SEQ ID NO: 81750 - DNA, 119 bp, Homo sapiens
  chr11:12260725-12260844
  hypo
gataagaaatgagagtcgggattcaaaccccaaccacctggctcccaagcctagctgtgcccatcctttggaaagacgcatccctcctgtgagcattgcctctgcgggggtggccctgc

SEQ ID NO: 81751 - DNA, 139 bp, Homo sapiens
  chr11:12262548-12262687
  hypo
ctgtggctgcttttttggactcgcctttcttctcccaggaacgccgtgtctcagggataggtaagccggtcctgtgctcttcctccggccctcctgttcactcttgctgccccaagccggaggaggccacacccagccc

SEQ ID NO: 81752 - DNA, 318 bp, Homo sapiens
  chr11:12276762-12277080
  hypo
ccagccttaaccattttttaagggtacggtttagtggtattaaatacatccttcgtgtgcaaccctcaccatcctcccactccagaactcttagttgttgtaaaactggaactctgtacccactaaacaacagcaaccactgttctactgcctgtctctacgattttgactactctaggtaccacatataagtggaatcctagagtacttgtgtttttgcggccacagggttttatttattttcttttctccacctccagaatccccgcgttctgctcctggctggttttgcttctcctgggtcgtggggtgctattt

SEQ ID NO: 81753 - DNA, 382 bp, Homo sapiens
  chr11:12278212-12278594
  hypo
aggaagcagaagcccacgaggtccccagcattcagtgtggaatttctaaaagccttggcctggcatttgaaggctcgggataagccataatacacccactcttctctcccgatccccaggaatctatgcgaaagtcatttccccttaacctgggaggcagcgacacgtgttacttctgtaagaaacgtgtgtacgtgatggaacggctgagcgccgagggccacttcttccaccgggagtgtttccgctgcagcatctgtgccaccaccttgcgcctggccgcctacacctttgactgcgatgaaggtaaccccaggggccagggcagcactgggctctggccttggcctcaggtgtgaccttggctcgggttcctgtccct

SEQ ID NO: 81754 - DNA, 30 bp, Homo sapiens; identical to SEQ ID NO: 25080
  chr11:12279001-12279031
  hypo

SEQ ID NO: 81755 - DNA, 171 bp, Homo sapiens
  chr11:12279380-12279551
  hypo
aggcttgtctggaaggcgcacagtggtcctgggcagtggcagtttcccagtgcgtgccccgtctgggtcttttcctccccatcactgctgccatttgctctcagcatttcccacccgccaggtattccacaaagaaagactgagggtgttcatactcgaagctgtccattt

SEQ ID NO: 81756 - DNA, 321 bp, Homo sapiens; identical to SEQ ID NO: 25082
  chr11:12281097-12281418
  hypo

SEQ ID NO: 81757 - DNA, 470 bp, Homo sapiens; identical to SEQ ID NO: 25083
  chr11:12283306-12283776
  hypo

SEQ ID NO: 81758 - DNA, 370 bp, Homo sapiens; identical to SEQ ID NO: 25084
  chr11:12283995-12284365
  hypo

SEQ ID NO: 81759 - DNA, 30 bp, Homo sapiens
  chr11:12285653-12285683
  hypo
tttacccgtttcccccgcacacccaagcgt

SEQ ID NO: 81760 - DNA, 31 bp, Homo sapiens; identical to SEQ ID NO: 25085
  chr11:12294621-12294652
  hypo

SEQ ID NO: 81761 - DNA, 363 bp, Homo sapiens
  chr11:12298407-12298770
  hypo
aaaagcatcacctatgcgccaggtcgataaataaaatagacacatatgctagagagtggctggtcagctgccttagattgggtggccaggaaaaggcctctgtagcaattattgatgcccacaataatgctgagtgacaaaccagccccaaagcgagtgacttaaaccagccaccgttcattacaccacgattgtgtaaaaaagtagaccggagtaagccaaccctgaccaagtaagccaggtgcagctgggcagttgtggtcttggtgggctcgcctgtgtgtttgggccagtagggttctgctctggagcctgcgtgtcagctggggtgacagagggctattgggccgtgggtctttcatc

SEQ ID NO: 81762 - DNA, 30 bp, Homo sapiens; identical to SEQ ID NO: 25086
  chr11:12301270-12301300
  hypo

SEQ ID NO: 81763 - DNA, 192 bp, Homo sapiens
  chr11:12315586-12315778
  hypo
cctcaaagctggggagcgaatttcccagaaaagtgctgagaatggtagaggaggccgtgtgctaaaaccagtccgccccctgctgctccctagggcagcaggagagcccctgccaacccagagaggggcccaggagaagatggggacccctgcggaacaagctcaaggggagcgaaacgtgcctccacccaa

SEQ ID NO: 81764 - DNA, 31 bp, Homo sapiens
  chr11:12366726-12366757
  hypo
attactagaaaccactcgtgtttcgtgagaa

SEQ ID NO: 81765 - DNA, 27 bp, Homo sapiens
  chr11:12501480-12501507
  hypo
tatattgaggctgggcgcggtggctca

SEQ ID NO: 81766 - DNA, 34 bp, Homo sapiens
  chr11:12554119-12554153
  hypo
aaaaataactatgaatcgacgttagttacaaatt

SEQ ID NO: 81767 - DNA, 1423 bp, Homo sapiens; identical to SEQ ID NO: 48167
  chr11:12695572-12696995
  hypo

SEQ ID NO: 81768 - DNA, 140 bp, Homo sapiens
  chr11:12769803-12769943
  hypo
tggtctaatccctgcaattcttagaaatacctaccaaggacaatatcagcaaaagttttttgagttccaacaatctgtcaggtattgggagagccccaggcacctgaaggagtggagtaggtggccggctgtgtccaggc

SEQ ID NO: 81769 - DNA, 31 bp, Homo sapiens
  chr11:12794317-12794348
  hypo
acacaacccagtgatacgactcagattttcc

SEQ ID NO: 81770 - DNA, 216 bp, Homo sapiens; identical to SEQ ID NO: 25091
  chr11:12823850-12824066
  hypo

SEQ ID NO: 81771 - DNA, 31 bp, Homo sapiens
  chr11:12838688-12838719
  hypo
gaattggattctgccacgctgatattattat

SEQ ID NO: 81772 - DNA, 34 bp, Homo sapiens
  chr11:12841277-12841311
  hypo
gtgaaccaccaagcccggccggtaacaaagtctt

SEQ ID NO: 81773 - DNA, 24 bp, Homo sapiens
  chr11:12943744-12943768
  hypo
tttttttttttttttttgagacgg

SEQ ID NO: 81774 - DNA, 23 bp, Homo sapiens
  chr11:12944007-12944030
  hypo
gcggttctctttatttgtagaca

SEQ ID NO: 81775 - DNA, 30 bp, Homo sapiens
  chr11:12944529-12944559
  hypo
gagtgtcagatccacgtacctctgcttcaa

SEQ ID NO: 81776 - DNA, 130 bp, Homo sapiens; identical to SEQ ID NO: 25092
  chr11:12944976-12945106
  hypo

SEQ ID NO: 81777 - DNA, 87 bp, Homo sapiens
  chr11:13114152-13114239
  hypo
gctatcatgagactctcgtgtcatctttgtgccaggtgtggattttatttttcttttttcttttctttttttttttttttttttttt

SEQ ID NO: 81778 - DNA, 71 bp, Homo sapiens
  chr11:13185769-13185840
  hypo
gaggcatagatgaagccgttgactctatgcgcttcacctactcctccaactcactacgctgttctaaggat

SEQ ID NO: 81779 - DNA, 30 bp, Homo sapiens; identical to SEQ ID NO: 25094
  chr11:13237589-13237619
  hypo

SEQ ID NO: 81780 - DNA, 305 bp, Homo sapiens; identical to SEQ ID NO: 48172
  chr11:13298518-13298823
  hypo

SEQ ID NO: 81781 - DNA, 396 bp, Homo sapiens; identical to SEQ ID NO: 48173
  chr11:13300305-13300701
  hypo

SEQ ID NO: 81782 - DNA, 30 bp, Homo sapiens; identical to SEQ ID NO: 25097
  chr11:13379014-13379044
  hypo

SEQ ID NO: 81783 - DNA, 1091 bp, Homo sapiens; identical to SEQ ID NO: 48174
  chr11:13689626-13690717
  hypo

SEQ ID NO: 81784 - DNA, 30 bp, Homo sapiens; identical to SEQ ID NO: 25099
  chr11:13700083-13700113
  hypo

SEQ ID NO: 81785 - DNA, 30 bp, Homo sapiens; identical to SEQ ID NO: 7935
  chr11:14086442-14086472
  hypo

SEQ ID NO: 81786 - DNA, 148 bp, Homo sapiens; identical to SEQ ID NO: 25101
  chr11:14498536-14498684
  hypo

SEQ ID NO: 81787 - DNA, 13 bp, Homo sapiens
  chr11:14542908-14542921
  hypo
gggcctgtggtcc

SEQ ID NO: 81788 - DNA, 25 bp, Homo sapiens
  chr11:14561086-14561111
  hypo
ggagcttaagaacaggacccacggg

SEQ ID NO: 81789 - DNA, 81 bp, Homo sapiens
  chr11:14564351-14564432
  hypo
gaaaccatctttgcaggttggcgaagctaatggattccttctcagaatgatttttttctttctttcttgagacggagtcta

SEQ ID NO: 81790 - DNA, 46 bp, Homo sapiens
  chr11:14674975-14675021
  hypo
agtacacaacaaaaacacatccgccctcgggaggctgaggcaggag

SEQ ID NO: 81791 - DNA, 252 bp, Homo sapiens; identical to SEQ ID NO: 7939
  chr11:15671675-15671927
  hypo

SEQ ID NO: 81792 - DNA, 31 bp, Homo sapiens
  chr11:15921681-15921712
  hypo
gggctgagactgcctccgcttagtcactgat

SEQ ID NO: 81793 - DNA, 64 bp, Homo sapiens; identical to SEQ ID NO: 25105
  chr11:15959966-15960030
  hypo

SEQ ID NO: 81794 - DNA, 38 bp, Homo sapiens; identical to SEQ ID NO: 25106
  chr11:15962974-15963012
  hypo

SEQ ID NO: 81795 - DNA, 43 bp, Homo sapiens
  chr11:16050845-16050888
  hypo
aagcaggatgtgagaccgagagacagttccttcagtcctaaag

SEQ ID NO: 81796 - DNA, 43 bp, Homo sapiens
  chr11:16051187-16051230
  hypo
aaaaacaaaaaaaaaaccgattgtctaacgagaattaactaaa

SEQ ID NO: 81797 - DNA, 30 bp, Homo sapiens
  chr11:16107917-16107947
  hypo
cttcagtgcactaatcgcttaaagagcagc

SEQ ID NO: 81798 - DNA, 31 bp, Homo sapiens; identical to SEQ ID NO: 25107
  chr11:16828576-16828607
  hypo

SEQ ID NO: 81799 - DNA, 30 bp, Homo sapiens
  chr11:16838600-16838630
  hypo
tggggctgccgtgccggaactgctggcgct

SEQ ID NO: 81800 - DNA, 31 bp, Homo sapiens; identical to SEQ ID NO: 25108
  chr11:16877365-16877396
  hypo

SEQ ID NO: 81801 - DNA, 20 bp, Homo sapiens
  chr11:16880044-16880064
  hypo
ttttttttttttgagacgga

SEQ ID NO: 81802 - DNA, 30 bp, Homo sapiens; identical to SEQ ID NO: 25109
  chr11:16945408-16945438
  hypo

SEQ ID NO: 81803 - DNA, 1554 bp, Homo sapiens; identical to SEQ ID NO: 48193
  chr11:17034984-17036538
  hypo

SEQ ID NO: 81804 - DNA, 41 bp, Homo sapiens
  chr11:17037335-17037376
  hypo
cctgcaacctgtgcaacagcgagactcagtctaaaaaaaaa

SEQ ID NO: 81805 - DNA, 260 bp, Homo sapiens
  chr11:17100560-17100820
  hypo
aagactgactcagtgccggtacacaacaatgcgttgaaagaatgggcaaatgaagcagcttcttaaaattttaaaaagtaagcatagctctaggaaggagggaggtcagtgaaatcaaactcctgtcgacaagcttaaagtaactggcaagacgctgggaaactagatactgaaacatccgctcttaacttttaacctgtcactatttgaaataaagttatcagggatagccgggcgcggtggctcacgcctgtaatccc

SEQ ID NO: 81806 - DNA, 80 bp, Homo sapiens
  chr11:17101059-17101139
  hypo
gactccgtctcaaaaaaaaagtatcagggataaagagagaaccctttataacaacaaacgggtcagttctccaagaaaac

SEQ ID NO: 81807 - DNA, 30 bp, Homo sapiens; identical to SEQ ID NO: 25112
  chr11:17278764-17278794
  hypo

SEQ ID NO: 81808 - DNA, 31 bp, Homo sapiens
  chr11:17285257-17285288
  hypo
gagctaccgtgcacggcgagtagtgctatgt

SEQ ID NO: 81809 - DNA, 335 bp, Homo sapiens; identical to SEQ ID NO: 48202
  chr11:17498221-17498556
  hypo

SEQ ID NO: 81810 - DNA, 28 bp, Homo sapiens
  chr11:17741861-17741889
  hypo
tctatgcgccgggcccgctgcccccggg

SEQ ID NO: 81811 - DNA, 228 bp, Homo sapiens; identical to SEQ ID NO: 48208
  chr11:17741952-17742180
  hypo

SEQ ID NO: 81812 - DNA, 85 bp, Homo sapiens; identical to SEQ ID NO: 48209
  chr11:17742398-17742483
  hypo

SEQ ID NO: 81813 - DNA, 30 bp, Homo sapiens
  chr11:17794463-17794493
  hypo
gtggggcaggagtccggtgtgagtctctga

SEQ ID NO: 81814 - DNA, 30 bp, Homo sapiens
  chr11:17905735-17905765
  hypo
ctatggcaacgaggcgtacgtgcggaaaca

SEQ ID NO: 81815 - DNA, 30 bp, Homo sapiens; identical to SEQ ID NO: 25115
  chr11:18033384-18033414
  hypo

SEQ ID NO: 81816 - DNA, 81 bp, Homo sapiens
  chr11:18100060-18100141
  hypo
acataaggtccttgtgcttcccgttttaaaacacgctctcagaaggctgggcgtggtggctcacgcctgtaatcccagcac

SEQ ID NO: 81817 - DNA, 20 bp, Homo sapiens
  chr11:18100380-18100400
  hypo
tctcaaaaaaaaagaaaaaa

SEQ ID NO: 81818 - DNA, 30 bp, Homo sapiens
  chr11:18357572-18357602
  hypo
tccccacgttttttcggttttggttttggt

SEQ ID NO: 81819 - DNA, 31 bp, Homo sapiens; identical to SEQ ID NO: 25116
  chr11:18419901-18419932
  hypo

SEQ ID NO: 81820 - DNA, 104 bp, Homo sapiens; identical to SEQ ID NO: 25117
  chr11:18512367-18512471
  hypo

SEQ ID NO: 81821 - DNA, 20 bp, Homo sapiens
  chr11:18557638-18557658
  hypo
ccactgcactccagcctggt

SEQ ID NO: 81822 - DNA, 205 bp, Homo sapiens; identical to SEQ ID NO: 48220
  chr11:18610539-18610744
  hypo

SEQ ID NO: 81823 - DNA, 30 bp, Homo sapiens; identical to SEQ ID NO: 25120
  chr11:18617191-18617221
  hypo

SEQ ID NO: 81824 - DNA, 159 bp, Homo sapiens
  chr11:18656774-18656933
  hypo
tactcgggatcttttcggtgggatggaaatgcctccaaactggattgtggggatggttgcactatacatgtactaaaaatcgtacacttaagacgggtgagaatgatacagtatgtaaatatgtcaagctgttaaaacatgctagacaggccgagcgcg

SEQ ID NO: 81825 - DNA, 64 bp, Homo sapiens
  chr11:18657232-18657296
  hypo
aaagctgctggctcttactctttgatggtttaatgctgcgaacgtaattcaaaatcaaagctgt

SEQ ID NO: 81826 - DNA, 22 bp, Homo sapiens
  chr11:18690386-18690408
  hypo
tggctaataaacaagaaaagac

SEQ ID NO: 81827 - DNA, 31 bp, Homo sapiens; identical to SEQ ID NO: 7960
  chr11:18720185-18720216
  hypo

SEQ ID NO: 81828 - DNA, 219 bp, Homo sapiens
  chr11:18978186-18978405
  hypo
aggacgtacaggcagcgctcggtgctcatggcgcttagaaagctcaggcttgcaaggtaggaaaacatcatcacagggctgaggattttgaagatgggatggaggatattgatgaggcttaacggaaaacgtataatgtggcttctgagaaagaggaagtcggccatggacaggttgaagatgtagatggagaaggcgttcctgcgcatgcggaagccc

SEQ ID NO: 81829 - DNA, 40 bp, Homo sapiens; identical to SEQ ID NO: 25122
  chr11:19238181-19238221
  hypo

SEQ ID NO: 81830 - DNA, 118 bp, Homo sapiens
  chr11:19240815-19240933
  hypo
tgcctcaccacagtctgaacacgcatgacgatgccaggcggcccaagctctggagtgcgggcctcagctccaggcacagctgcacgcacacgctggcgctgcacagggtctgtccctc

SEQ ID NO: 81831 - DNA, 94 bp, Homo sapiens
  chr11:19247018-19247112
  hypo
cagggtggcttgaagcgagagccgggctgttcccgacaggtacggctgccacggaagttggtgagaccattagcttcaacggtgttacatgaaa

SEQ ID NO: 81832 - DNA, 230 bp, Homo sapiens; identical to SEQ ID NO: 25123
  chr11:19256430-19256660
  hypo

SEQ ID NO: 81833 - DNA, 30 bp, Homo sapiens
  chr11:19259283-19259313
  hypo
ttaataacagccttcgggtggtgatgcttt

SEQ ID NO: 81834 - DNA, 495 bp, Homo sapiens; identical to SEQ ID NO: 48231
  chr11:19366639-19367134
  hypo

SEQ ID NO: 81835 - DNA, 99 bp, Homo sapiens; identical to SEQ ID NO: 7968
  chr11:19367267-19367366
  hypo

SEQ ID NO: 81836 - DNA, 29 bp, Homo sapiens
  chr11:19367947-19367976
  hypo
gctctcgctctcccacgctccggttagct

SEQ ID NO: 81837 - DNA, 1522 bp, Homo sapiens; identical to SEQ ID NO: 48235
  chr11:19734194-19735716
  hypo

SEQ ID NO: 81838 - DNA, 110 bp, Homo sapiens
  chr11:19913973-19914083
  hypo
ttttagacttccaggtcctaccgcgagggtatccgctgcaggcagcgaggccaaaacacgcggagggtcaactactgctaacaaccgacgcagccagagctttaacaact

SEQ ID NO: 81839 - DNA, 30 bp, Homo sapiens
  chr11:20147563-20147593
  hypo
gactgaacgccacgtcgcccacagtcataa

SEQ ID NO: 81840 - DNA, 1008 bp, Homo sapiens; identical to SEQ ID NO: 48239
  chr11:20178093-20179101
  hypo

SEQ ID NO: 81841 - DNA, 312 bp, Homo sapiens; identical to SEQ ID NO: 48241
  chr11:20181724-20182036
  hypo

SEQ ID NO: 81842 - DNA, 319 bp, Homo sapiens; identical to SEQ ID NO: 7983
  chr11:20690558-20690877
  hypo

SEQ ID NO: 81843 - DNA, 103 bp, Homo sapiens; identical to SEQ ID NO: 7984
  chr11:20690982-20691085
  hypo

SEQ ID NO: 81844 - DNA, 258 bp, Homo sapiens; identical to SEQ ID NO: 7985
  chr11:20691121-20691379
  hypo

SEQ ID NO: 81845 - DNA, 184 bp, Homo sapiens; identical to SEQ ID NO: 7986
  chr11:20691431-20691615
  hypo

SEQ ID NO: 81846 - DNA, 16 bp, Homo sapiens
  chr11:27322426-27322442
  hypo
aaaaaaataaattaaa

SEQ ID NO: 81847 - DNA, 98 bp, Homo sapiens
  chr11:27380959-27381057
  hypo
gagcttagatttgggcgtaaaacagcctggggtgaaatcctatctgcttcttcctagctatgtacattttttttcttttttttttcttttttttgaga

SEQ ID NO: 81848 - DNA, 37 bp, Homo sapiens
  chr11:27381176-27381213
  hypo
agacgcccgccactacgcccagctaagctatgtacat

SEQ ID NO: 81849 - DNA, 100 bp, Homo sapiens
  chr11:27495266-27495366
  hypo
ttacctgtaccaactacggctttaagggtacttcgtttcttgctctctgccatggcgttgagtcgttttactctataatggagacatttttaatgaatac

SEQ ID NO: 81850 - DNA, 35 bp, Homo sapiens
  chr11:27526852-27526887
  hypo
tgggcgacagagcaagactacgtctccaaacagca

SEQ ID NO: 81851 - DNA, 105 bp, Homo sapiens
  chr11:27678523-27678628
  hypo
ctgagcaaacataggtccttccgtcaaaagcagcttactctgaccaacgcccaaagaatgagcggggcctgggaggtgcatcacgggatgtggagtgtgagcatt

SEQ ID NO: 81852 - DNA, 1149 bp, Homo sapiens; identical to SEQ ID NO: 48283
  chr11:27743202-27744351
  hypo

SEQ ID NO: 81853 - DNA, 30 bp, Homo sapiens
  chr11:29955980-29956010
  hypo
gagcctacccccagccgtgggctactgcac

SEQ ID NO: 81854 - DNA, 30 bp, Homo sapiens; identical to SEQ ID NO: 8001
  chr11:30393948-30393978
  hypo

SEQ ID NO: 81855 - DNA, 338 bp, Homo sapiens
  chr11:30445727-30446065
  hypo
ggaagttcagacaagcggttactttgggtccttggaatatttataatagggggtgaagagaggttcaccgaaggaattgacaagctactaattaatgccatcactgctgcctggcacctctattaagcaaaactcagaaaccgggagccaattttcacatacgctttcttttctaaatggtagcccttctgaattgcaaccttcttcacgcctggcactcccagccgccatcggcccctctccgactgcacatcacaccaggtccaagagaagctaatttaaccaccgctggttaaaatcatactgcacttcacagcgcctttcacatgccatgaagc

SEQ ID NO: 81856 - DNA, 1431 bp, Homo sapiens; identical to SEQ ID NO: 48293
  chr11:30606795-30608226
  hypo

SEQ ID NO: 81857 - DNA, 30 bp, Homo sapiens
  chr11:31393770-31393800
  hypo
ctgtaattctataccgacgtccggttaact

SEQ ID NO: 81858 - DNA, 162 bp, Homo sapiens
  chr11:31533739-31533901
  hypo
taggatgttatggtgttagaacggtaaaactatactgtaatattgtgattattgcctgaatatattatgtggttactgtgtaacaagtaaatattatagcttccgtgtagtacggtgacattttactactgccaccgtgacgtcattgtaattttaaacatg

SEQ ID NO: 81859 - DNA, 213 bp, Homo sapiens; identical to SEQ ID NO: 25138
  chr11:31808821-31809034
  hypo

SEQ ID NO: 81860 - DNA, 1548 bp, Homo sapiens; identical to SEQ ID NO: 48298
  chr11:31820460-31822008
  hypo

SEQ ID NO: 81861 - DNA, 126 bp, Homo sapiens; identical to SEQ ID NO: 48327
  chr11:32009000-32009126
  hypo

SEQ ID NO: 81862 - DNA, 459 bp, Homo sapiens; identical to SEQ ID NO: 48331
  chr11:32455986-32456445
  hypo

SEQ ID NO: 81863 - DNA, 440 bp, Homo sapiens; identical to SEQ ID NO: 8035
  chr11:32456758-32457198
  hypo

SEQ ID NO: 81864 - DNA, 30 bp, Homo sapiens
  chr11:32816065-32816095
  hypo
gtgcagggcaaacccgtaagtggaccctgc

SEQ ID NO: 81865 - DNA, 114 bp, Homo sapiens; identical to SEQ ID NO: 25142
  chr11:32851223-32851337
  hypo

SEQ ID NO: 81866 - DNA, 94 bp, Homo sapiens; identical to SEQ ID NO: 8041
  chr11:32851552-32851646
  hypo

SEQ ID NO: 81867 - DNA, 30 bp, Homo sapiens; identical to SEQ ID NO: 8042
  chr11:32851935-32851965
  hypo

SEQ ID NO: 81868 - DNA, 55 bp, Homo sapiens
  chr11:32912158-32912213
  hypo
tgaagcagcttggttacgaatcatttgagagatcccgaaacgttcacagagctgg

SEQ ID NO: 81869 - DNA, 804 bp, Homo sapiens; identical to SEQ ID NO: 8043
  chr11:32915114-32915918
  hypo

SEQ ID NO: 81870 - DNA, 20 bp, Homo sapiens
  chr11:32935046-32935066
  hypo
tccttttaatactcagttgt

SEQ ID NO: 81871 - DNA, 43 bp, Homo sapiens; identical to SEQ ID NO: 25146
  chr11:33183721-33183764
  hypo

SEQ ID NO: 81872 - DNA, 39 bp, Homo sapiens
  chr11:33202742-33202781
  hypo
ataaaggacttttaggctgggcgcagtggctcacacctg

SEQ ID NO: 81873 - DNA, 30 bp, Homo sapiens
  chr11:33262597-33262627
  hypo
aatacgtgaggatctcgtcaggagatcgag

SEQ ID NO: 81874 - DNA, 30 bp, Homo sapiens
  chr11:33276508-33276538
  hypo
agaggagctgatatcgtgcctcaaaaaaag

SEQ ID NO: 81875 - DNA, 11 bp, Homo sapiens
  chr11:33277449-33277460
  hypo
tgagacagagt

SEQ ID NO: 81876 - DNA, 464 bp, Homo sapiens; identical to SEQ ID NO: 48347
  chr11:33397372-33397836
  hypo

SEQ ID NO: 81877 - DNA, 223 bp, Homo sapiens; identical to SEQ ID NO: 48348
  chr11:33398158-33398381
  hypo

SEQ ID NO: 81878 - DNA, 30 bp, Homo sapiens
  chr11:33667477-33667507
  hypo
gaggtggtgaccagcgctccggggaccatg

SEQ ID NO: 81879 - DNA, 30 bp, Homo sapiens
  chr11:33726709-33726739
  hypo
cttgggcaaaataaccgtagctaacactta

SEQ ID NO: 81880 - DNA, 30 bp, Homo sapiens; identical to SEQ ID NO: 48349
  chr11:33758142-33758172
  hypo

SEQ ID NO: 81881 - DNA, 30 bp, Homo sapiens; identical to SEQ ID NO: 48350
  chr11:33888571-33888601
  hypo

SEQ ID NO: 81882 - DNA, 827 bp, Homo sapiens; identical to SEQ ID NO: 48351
  chr11:33890236-33891063
  hypo

SEQ ID NO: 81883 - DNA, 30 bp, Homo sapiens
  chr11:34097834-34097864
  hypo
aagctgaacagaaacgtttaaaaactgtac

SEQ ID NO: 81884 - DNA, 43 bp, Homo sapiens
  chr11:34109546-34109589
  hypo
atttatttgtttatttagagacgcagtctcgctctatcgccag

SEQ ID NO: 81885 - DNA, 31 bp, Homo sapiens
  chr11:34133735-34133766
  hypo
tcctgggcaataccttcggcatgtgtgtgct

SEQ ID NO: 81886 - DNA, 30 bp, Homo sapiens
  chr11:34161034-34161064
  hypo
ccagcctggtgagccgggtggggacaggga

SEQ ID NO: 81887 - DNA, 30 bp, Homo sapiens
  chr11:34173898-34173928
  hypo
acaggccctggcctcggcagcctccgcccc

SEQ ID NO: 81888 - DNA, 31 bp, Homo sapiens
  chr11:34184136-34184167
  hypo
tccatggtgatgtccacgtagccgtgctcag

SEQ ID NO: 81889 - DNA, 31 bp, Homo sapiens; identical to SEQ ID NO: 25150
  chr11:34186712-34186743
  hypo

SEQ ID NO: 81890 - DNA, 39 bp, Homo sapiens; identical to SEQ ID NO: 25151
  chr11:34192313-34192352
  hypo

SEQ ID NO: 81891 - DNA, 31 bp, Homo sapiens
  chr11:34206116-34206147
  hypo
tcctcgctttcccacacggcagggagagctc

SEQ ID NO: 81892 - DNA, 31 bp, Homo sapiens
  chr11:34219692-34219723
  hypo
tgggcacagtggctcacgctgtaatcccaag

SEQ ID NO: 81893 - DNA, 17 bp, Homo sapiens
  chr11:34242794-34242811
  hypo
ggcgtgagccaccacgc

SEQ ID NO: 81894 - DNA, 27 bp, Homo sapiens
  chr11:34258968-34258995
  hypo
cgtgagccactgcgcctggcctttcct

SEQ ID NO: 81895 - DNA, 14 bp, Homo sapiens
  chr11:34264982-34264996
  hypo
ctctggcaaatctc

SEQ ID NO: 81896 - DNA, 30 bp, Homo sapiens; identical to SEQ ID NO: 25152
  chr11:34265346-34265376
  hypo

SEQ ID NO: 81897 - DNA, 76 bp, Homo sapiens
  chr11:34270688-34270764
  hypo
aaaatgaaagacactcgcaacatgaatttgcaagtggtcatgacttgcaccctcgtgaatgcgcagccttgagggg

SEQ ID NO: 81898 - DNA, 31 bp, Homo sapiens; identical to SEQ ID NO: 25153
  chr11:34378939-34378970
  hypo

SEQ ID NO: 81899 - DNA, 102 bp, Homo sapiens
  chr11:34407510-34407612
  hypo
atacccattgttttacaccctcaccaacacttggtatttcagatggtttacattttttttaaatttaatatccaaatttatttttaccgtttttttttattg

SEQ ID NO: 81900 - DNA, 30 bp, Homo sapiens
  chr11:34492969-34492999
  hypo
caaatctgtgaggccggggccctgcacctg

SEQ ID NO: 81901 - DNA, 201 bp, Homo sapiens; identical to SEQ ID NO: 25154
  chr11:34511229-34511430
  hypo

SEQ ID NO: 81902 - DNA, 43 bp, Homo sapiens; identical to SEQ ID NO: 25155
  chr11:34517109-34517152
  hypo

SEQ ID NO: 81903 - DNA, 110 bp, Homo sapiens
  chr11:34517379-34517489
  hypo
acaaggggccattcctgagttcggcctgagctttcatctactgatttctggctttagtaaacctgaggggccttttggactttactggcgtcctgtgagagatgtttatg

SEQ ID NO: 81904 - DNA, 31 bp, Homo sapiens
  chr11:34527363-34527394
  hypo
ggagcccctagcagggcgatacttgtttttt

SEQ ID NO: 81905 - DNA, 303 bp, Homo sapiens
  chr11:34535007-34535310
  hypo
gggctggtggccacacggcctgcggaggcaagcaggtctctctgaggcaagccgtcacatccgtgtcaaacagctcccggaggccctgggactgcacccagcgcaggtgccggccctggagctggagatggacgagcagacccaggccccaggccgagcctctgagccctgacaccccttacgattcatccaaaaaagcaaagaaaaggcgcttacgtgagggcagcggtggctaggtccaaagaggaggctttcaaggcaagagaaggcaggcgctcccagcaccagcgtgcagtggaaata

SEQ ID NO: 81906 - DNA, 45 bp, Homo sapiens
  chr11:34592833-34592878
  hypo
aatggtctcagcctttagaaccgcaggaggccaggcgcggtgact

SEQ ID NO: 81907 - DNA, 25 bp, Homo sapiens
  chr11:34625479-34625504
  hypo
atatcaggcagtgtggctgggcgca

SEQ ID NO: 81908 - DNA, 51 bp, Homo sapiens
  chr11:34631713-34631764
  hypo
aggtgacctatgagccaggcacgtacatacgtgtcatctcaatgaaagctt

SEQ ID NO: 81909 - DNA, 43 bp, Homo sapiens
  chr11:34666541-34666584
  hypo
tgttggaatatccatgtgtcacgttctgttggatttcccctgc

SEQ ID NO: 81910 - DNA, 157 bp, Homo sapiens
  chr11:34897218-34897375
  hypo
taattgtaacacacccctaaacgctactggggctggagcccaaaagcactcgccccgccccagctcttgcccccgcccatccgtgtgctcgccctcccgaaaggagttcgagcctgtagtggctgagcacatgagcgacacctctgtcataagtcct

SEQ ID NO: 81911 - DNA, 30 bp, Homo sapiens; identical to SEQ ID NO: 25156
  chr11:34951009-34951039
  hypo

SEQ ID NO: 81912 - DNA, 46 bp, Homo sapiens
  chr11:35016466-35016512
  hypo
caacttggggatgtttggcatcgacgaatttactgcagtgattaac

SEQ ID NO: 81913 - DNA, 14 bp, Homo sapiens
  chr11:35440083-35440097
  hypo
tcattccttccgag

SEQ ID NO: 81914 - DNA, 237 bp, Homo sapiens; identical to SEQ ID NO: 48361
  chr11:35440137-35440374
  hypo

SEQ ID NO: 81915 - DNA, 415 bp, Homo sapiens; identical to SEQ ID NO: 8052
  chr11:35440469-35440884
  hypo

SEQ ID NO: 81916 - DNA, 345 bp, Homo sapiens; identical to SEQ ID NO: 8053
  chr11:35440936-35441281
  hypo

SEQ ID NO: 81917 - DNA, 38 bp, Homo sapiens; identical to SEQ ID NO: 25160
  chr11:35516159-35516197
  hypo

SEQ ID NO: 81918 - DNA, 760 bp, Homo sapiens; identical to SEQ ID NO: 8057
  chr11:35640493-35641253
  hypo

SEQ ID NO: 81919 - DNA, 311 bp, Homo sapiens; identical to SEQ ID NO: 48368
  chr11:35641291-35641602
  hypo

SEQ ID NO: 81920 - DNA, 30 bp, Homo sapiens; identical to SEQ ID NO: 25163
  chr11:35661155-35661185
  hypo

SEQ ID NO: 81921 - DNA, 195 bp, Homo sapiens
  chr11:35685024-35685219
  hypo
tgaggagagtgaagaagacagcgaggaagaaatggaggatgagcaagaaagcgaggccgaagaagacaaccaagaagaaggggaatccgaggcggagggagaaactgaggcagaaagtgaatttgacccagaaatagaaatggaagcagagagagtggccaagaggaagtgtccggaccatgggcttgatttgag

SEQ ID NO: 81922 - DNA, 30 bp, Homo sapiens
  chr11:35685818-35685848
  hypo
cattttagattcttcgtgtttgaaacttag

SEQ ID NO: 81923 - DNA, 39 bp, Homo sapiens; identical to SEQ ID NO: 25165
  chr11:36060519-36060558
  hypo

SEQ ID NO: 81924 - DNA, 38 bp, Homo sapiens; identical to SEQ ID NO: 25166
  chr11:36060797-36060835
  hypo

SEQ ID NO: 81925 - DNA, 317 bp, Homo sapiens
  chr11:36100375-36100692
  hypo
tggctcccagggtggcgggcaaggtgcaggtggtacggcagccccagtcaaccccacacaaatgaacctgacgcttccagggccagtcccataagtcccagctgtgccatcagctgggtgctcgcaggcccctgggatacagcggagagcgaggttaagactgtggcagaggcttcaggtctgggagcggatcctaccaggccgtgtgagggtggggtttttggctccctcagggacgcagggcacaggggacctactgccgccactgctgctcctgcagccactcctgctgccacagctcacgcttccttactgca

SEQ ID NO: 81926 - DNA, 121 bp, Homo sapiens
  chr11:36245104-36245225
  hypo
tccgtctttacaaaatatgcaaacattagctaggttgtgtgacgcacccttgtagtcccagccactgagacgggaaggtggctcgagcccaggaggttgaagctgttgaaccaagatcgcg

SEQ ID NO: 81927 - DNA, 50 bp, Homo sapiens
  chr11:36248991-36249041
  hypo
atggaagagattgaggcgggagaggtcatccattgcggggaggggaatag

SEQ ID NO: 81928 - DNA, 208 bp, Homo sapiens
  chr11:36277914-36278122
  hypo
catctgaaggctcaagcggggctggagcatccacttccaagttgtctcactcacgtggctgttggccagaggcctcatttcttttccacacaggctgcaccatgggaccgcctaagtgtcctccctgcatgggggcaggcttccctcagagtgagtgatccaagagaccaagggggaagtcacgatgcactggcgtcacacaggtcac

SEQ ID NO: 81929 - DNA, 43 bp, Homo sapiens
  chr11:36292454-36292497
  hypo
tgggactaacctatttctccacggtggtggaatgcccaggatt

SEQ ID NO: 81930 - DNA, 31 bp, Homo sapiens; identical to SEQ ID NO: 25168
  chr11:36297993-36298024
  hypo

SEQ ID NO: 81931 - DNA, 191 bp, Homo sapiens
  chr11:36476160-36476351
  hypo
tgaccagggttttggcgcgtaactcattccatcctccaaggtactgttgtgctttcagtctccaggtcacccgcagggtaggtgaccagagccagagaagcggtttattcccggggctccgcactgcacccacgcgcccgcgcctgtgtttgactgcacgaggattctccggaggtgtcccttcctgccag

SEQ ID NO: 81932 - DNA, 30 bp, Homo sapiens
  chr11:36536828-36536858
  hypo
gcgaaagaggaattcgatatgatgggacct

SEQ ID NO: 81933 - DNA, 17 bp, Homo sapiens
  chr11:36716024-36716041
  hypo
ccctgtgtctcttgggc

SEQ ID NO: 81934 - DNA, 38 bp, Homo sapiens
  chr11:36823632-36823670
  hypo
tgtgagccaccgcgcccggcagatatatcttattttta

SEQ ID NO: 81935 - DNA, 46 bp, Homo sapiens
  chr11:38195081-38195127
  hypo
gatacattctgagaaacgtgttaggtgattttgtttgttacgtgaa

SEQ ID NO: 81936 - DNA, 40 bp, Homo sapiens
  chr11:38358532-38358572
  hypo
gcactattagaaatgtcaggccgggcgccgtggctcacgc

SEQ ID NO: 81937 - DNA, 83 bp, Homo sapiens
  chr11:38525521-38525604
  hypo
ggttggagctgagcttttgctcgccatcccccactgctgattgtggtcttcacagacaccgccgctgacttccacccctctgg

SEQ ID NO: 81938 - DNA, 21 bp, Homo sapiens
  chr11:38526622-38526643
  hypo
tctttttttttttttttgaga

SEQ ID NO: 81939 - DNA, 26 bp, Homo sapiens
  chr11:38655870-38655896
  hypo
tttttttttgagatggagtctcgctg

SEQ ID NO: 81940 - DNA, 160 bp, Homo sapiens
  chr11:39766925-39767085
  hypo
ttatacttcatttgctgaagacgcatgagagctgtcaacatgagagcactgctcgcggcttgcccatatccctggtaacattttagacaggtgcccataagaggaggtgatgctgtctgctttgacttcactatcgcccgcttctgttggctgttcacat

SEQ ID NO: 81941 - DNA, 83 bp, Homo sapiens; identical to SEQ ID NO: 25171
  chr11:40039795-40039878
  hypo

SEQ ID NO: 81942 - DNA, 20 bp, Homo sapiens
  chr11:43402088-43402108
  hypo
gtcaccgtgcccggccaaaa

SEQ ID NO: 81943 - DNA, 313 bp, Homo sapiens
  chr11:43543793-43544106
  hypo
gttcaaggccctgagagtgatcgtgtggatagacagtggcaacgacaacgtggacatcaaggctgccgcgagctcggaattgttgtgtgcaacatcccgtccggagccctggaagagacagccgactccaccgtctgcgacatcctcaatctgtaccggaggaacacgtgggtgtgccaggcactgcgggaagggacgtgggttcagagcatggagcaaatcctcgaggtggccttgggagtggtccgcatccgtgggtagacgctgtgggtctcatgagctttggtcgcacgaggcaggcagttgcatttca

SEQ ID NO: 81944 - DNA, 67 bp, Homo sapiens; identical to SEQ ID NO: 48375
  chr11:43569007-43569074
  hypo

SEQ ID NO: 81945 - DNA, 162 bp, Homo sapiens; identical to SEQ ID NO: 48376
  chr11:43569128-43569290
  hypo

SEQ ID NO: 81946 - DNA, 1464 bp, Homo sapiens; identical to SEQ ID NO: 48379
  chr11:43600010-43601474
  hypo

SEQ ID NO: 81947 - DNA, 610 bp, Homo sapiens; identical to SEQ ID NO: 8067
  chr11:43602426-43603036
  hypo

SEQ ID NO: 81948 - DNA, 159 bp, Homo sapiens; identical to SEQ ID NO: 8068
  chr11:43603076-43603235
  hypo

SEQ ID NO: 81949 - DNA, 30 bp, Homo sapiens
  chr11:43761552-43761582
  hypo
aagaacgggaccaggcgaatgcgttagaag

SEQ ID NO: 81950 - DNA, 2177 bp, Homo sapiens; identical to SEQ ID NO: 48384
  chr11:43963891-43966068
  hypo

SEQ ID NO: 81951 - DNA, 31 bp, Homo sapiens
  chr11:44096836-44096867
  hypo
cctccacaccttcaggcgagaccctctaaat

SEQ ID NO: 81952 - DNA, 30 bp, Homo sapiens; identical to SEQ ID NO: 25177
  chr11:44105474-44105504
  hypo

SEQ ID NO: 81953 - DNA, 30 bp, Homo sapiens; identical to SEQ ID NO: 25178
  chr11:44257653-44257683
  hypo

SEQ ID NO: 81954 - DNA, 562 bp, Homo sapiens; identical to SEQ ID NO: 8072
  chr11:44330877-44331439
  hypo

SEQ ID NO: 81955 - DNA, 299 bp, Homo sapiens; identical to SEQ ID NO: 8073
  chr11:44331482-44331781
  hypo

SEQ ID NO: 81956 - DNA, 141 bp, Homo sapiens
  chr11:44594533-44594674
  hypo
gcccagacagaactctccctgcgggcaatttggctctgcgaggggcggggccccactgagtctgccctatgtgtctctaagacgaaccaatcataagcctcccagggcgtggcgtgaagcggggatttggtaggggagcgc

SEQ ID NO: 81957 - DNA, 167 bp, Homo sapiens
  chr11:44608907-44609074
  hypo
ctggcggggccccgccggccacacggggagcctggatttaaagtgagtatgtcttcagccacattgcctttggagagtcacagacaggagtgacgagatctgggtcgtgtttttcagagtcctccctgctgctgtgtggacgacacgtgggcacaggcagaagtggg

SEQ ID NO: 81958 - DNA, 230 bp, Homo sapiens; identical to SEQ ID NO: 25182
  chr11:44609385-44609615
  hypo

SEQ ID NO: 81959 - DNA, 42 bp, Homo sapiens; identical to SEQ ID NO: 25183
  chr11:44611372-44611414
  hypo

SEQ ID NO: 81960 - DNA, 42 bp, Homo sapiens
  chr11:44611653-44611695
  hypo
attacaggtgtgagccaccgcgcctggcgacccttgctgcct

SEQ ID NO: 81961 - DNA, 31 bp, Homo sapiens; identical to SEQ ID NO: 25185
  chr11:44616400-44616431
  hypo

SEQ ID NO: 81962 - DNA, 181 bp, Homo sapiens; identical to SEQ ID NO: 25186
  chr11:44621699-44621880
  hypo

SEQ ID NO: 81963 - DNA, 30 bp, Homo sapiens
  chr11:44625322-44625352
  hypo
tgacctctacctcccggaatgggcctgtcc

SEQ ID NO: 81964 - DNA, 91 bp, Homo sapiens
  chr11:44637569-44637660
  hypo
tcctttcttgtggtcccggatgctgcatgtgcccttggctgggacctgacatctctgatctgcaatcctgtgagggcgcaggacacagtgg

SEQ ID NO: 81965 - DNA, 69 bp, Homo sapiens; identical to SEQ ID NO: 25187
  chr11:44640083-44640152
  hypo

SEQ ID NO: 81966 - DNA, 520 bp, Homo sapiens; identical to SEQ ID NO: 25188
  chr11:44640524-44641044
  hypo

SEQ ID NO: 81967 - DNA, 207 bp, Homo sapiens
  chr11:44675158-44675365
  hypo
ggagaggccaggaacacggggctgagcctccagggtcaggtcaggtttctgggcccccaagaagaacctggaaagtggggggctcttcgctcttttccctgttgctgctcccctccccctctcaccctagcattctggctggttctctcctctccggcttttccacttatgaaagccggaagccatgggttgcgcacactgtctggg

SEQ ID NO: 81968 - DNA, 1208 bp, Homo sapiens; identical to SEQ ID NO: 48399
  chr11:44748160-44749368
  hypo

SEQ ID NO: 81969 - DNA, 30 bp, Homo sapiens
  chr11:44940982-44941012
  hypo
tggaatcaccatccacgcagcattccaggc

SEQ ID NO: 81970 - DNA, 148 bp, Homo sapiens
  chr11:44941372-44941520
  hypo
ttgctgcggggtcaacgggcctgaagactttaagtttgcatctgtgtttcgactcctgaccctggatagtgaagaggtgccggaggcctgctgccggagggaaccccaaagtcgggacggggtcctgctgagccgggaggagtgcctc

SEQ ID NO: 81971 - DNA, 87 bp, Homo sapiens; identical to SEQ ID NO: 25190
  chr11:44944308-44944395
  hypo

SEQ ID NO: 81972 - DNA, 31 bp, Homo sapiens; identical to SEQ ID NO: 25191
  chr11:44968587-44968618
  hypo

SEQ ID NO: 81973 - DNA, 34 bp, Homo sapiens
  chr11:44993089-44993123
  hypo
ttatgatactgtgtatcggcgagttcagcacaaa

SEQ ID NO: 81974 - DNA, 259 bp, Homo sapiens
  chr11:45011530-45011789
  hypo
atcttgctggagtatgggagtcggtgcaaacatggcttctcgtcagccaggaagacgcccagcctggcacaaccttcggttctgactcccatcacctcctgttgacagcgtctggctggcatcctaatcgctcattggacaaattgccagggcagcggtagacagctggcatgtgttaactcgctcagtcctcacagcgatcccatggggaaggcggttatcatccccgttattgtacggccagagaaacagtggcaca

SEQ ID NO: 81975 - DNA, 80 bp, Homo sapiens
  chr11:45195151-45195231
  hypo
aacaagagagaaacaccgcgtcaaaaaaaaaaaaaaaaaaaagttctgcgggagggaccgccttgggagaatgtgttcca

SEQ ID NO: 81976 - DNA, 30 bp, Homo sapiens; identical to SEQ ID NO: 25192
  chr11:45204451-45204481
  hypo

SEQ ID NO: 81977 - DNA, 103 bp, Homo sapiens
  chr11:45230780-45230883
  hypo
cggcccgtgcagggcgcggcttccccagggcggaactggatggcaccgacagcccttcgaccagctgtgagtatcaccagtcccccccgccacccagccggct

SEQ ID NO: 81978 - DNA, 91 bp, Homo sapiens
  chr11:45234258-45234349
  hypo
tggcagctcctccacgtccatgcccagcagaccgaggtgttccggcagttctgccaggagctggtgaccgtgcaccgggacatggccaaca

SEQ ID NO: 81979 - DNA, 30 bp, Homo sapiens; identical to SEQ ID NO: 25193
  chr11:45234717-45234747
  hypo

SEQ ID NO: 81980 - DNA, 62 bp, Homo sapiens
  chr11:45248079-45248141
  hypo
tcctcatccatcacatcgcccgggccctgcgggaagacctggtggagcgcatccgccagtca

SEQ ID NO: 81981 - DNA, 30 bp, Homo sapiens
  chr11:45254824-45254854
  hypo
gggggcctcctacccggagtgttggagagg

SEQ ID NO: 81982 - DNA, 30 bp, Homo sapiens; identical to SEQ ID NO: 25194
  chr11:45256850-45256880
  hypo

SEQ ID NO: 81983 - DNA, 192 bp, Homo sapiens
  chr11:45417058-45417250
  hypo
gcagttcttgaccatccgcagtaactggcctagtcagtgcctggctgcccagcactgtctggacatcagtgggatgatggtcagtcctggggaggaagcagctgctccatgagaaagagtatgtgtctgcgtgtgtgtgtgtgtgcgtgcgtgtgtctctgtttgtagggagcaggccgggattagccagaa

SEQ ID NO: 81984 - DNA, 97 bp, Homo sapiens; identical to SEQ ID NO: 8079
  chr11:45684298-45684395
  hypo

SEQ ID NO: 81985 - DNA, 30 bp, Homo sapiens
  chr11:45824637-45824667
  hypo
gtgtgggcccggctcgttgtggggcagctg

SEQ ID NO: 81986 - DNA, 233 bp, Homo sapiens; identical to SEQ ID NO: 48408
  chr11:45825484-45825717
  hypo

SEQ ID NO: 81987 - DNA, 21 bp, Homo sapiens
  chr11:45838622-45838643
  hypo
caagtacagtagctcacgcct

SEQ ID NO: 81988 - DNA, 81 bp, Homo sapiens
  chr11:45838882-45838963
  hypo
aaaaaacagtgaaagacatggagaatttaggaacagtgacctaccacacgcctctcctgcgttgccctttcacttctgctt

SEQ ID NO: 81989 - DNA, 30 bp, Homo sapiens; identical to SEQ ID NO: 25198
  chr11:45924176-45924206
  hypo

SEQ ID NO: 81990 - DNA, 30 bp, Homo sapiens
  chr11:45931700-45931730
  hypo
aggcacggagaggccgcacgctgggacgct

SEQ ID NO: 81991 - DNA, 196 bp, Homo sapiens; identical to SEQ ID NO: 25199
  chr11:45951098-45951294
  hypo

SEQ ID NO: 81992 - DNA, 500 bp, Homo sapiens
  chr11:45953588-45954088
  hypo
ctccccaaaggcaagacagagcgaaggccacgctggggctctgtctcagagacgtaccctcaaaacatgtcactcctcctctgttctaagcaccaagggctgatgcagccagcctgtactcccgcaccctcctgtcacggccagggtgcgtgcgcaccacagagctccgctggccagttccctcggaggtgtcccccaggcactcataatgctggtggctgaaagaccaaaagcagcaccaaaggaagggatcttatttaggcaccagccttttgctctagcagaatctgagaagaccacgggtagggccctgataccatccacgcttccatttgggcttcacaacaggagacaagatccctgcaccaagaagagagcacggtcttttctgaggagagagaagggtggggagctccgcctctgtccttcaaggagactggcccaccagtctagagacacacacacggcaaaatgtcatcgtgatcagcagggtctgtgct

SEQ ID NO: 81993 - DNA, 190 bp, Homo sapiens
  chr11:45955788-45955978
  hypo
acaagggcagtggcactgagccgcctggtttctaacaggcctggcagcccctaagagcagagcgccttctctctgcccagggagaagaagctctgctggctgctgtgcagcccctgggccttgctgtgttcctcagtggagtgggcggctaccacctaaggaacagggcgggtggagtgggtaggctggg

SEQ ID NO: 81994 - DNA, 158 bp, Homo sapiens; identical to SEQ ID NO: 25202
  chr11:45956741-45956899
  hypo

SEQ ID NO: 81995 - DNA, 30 bp, Homo sapiens
  chr11:45959585-45959615
  hypo
atgcagcccggagacggactgggagagaga

SEQ ID NO: 81996 - DNA, 30 bp, Homo sapiens; identical to SEQ ID NO: 25203
  chr11:46152535-46152565
  hypo

SEQ ID NO: 81997 - DNA, 63 bp, Homo sapiens; identical to SEQ ID NO: 8082
  chr11:46264957-46265020
  hypo

SEQ ID NO: 81998 - DNA, 31 bp, Homo sapiens; identical to SEQ ID NO: 25205
  chr11:46298482-46298513
  hypo

SEQ ID NO: 81999 - DNA, 30 bp, Homo sapiens; identical to SEQ ID NO: 48415
  chr11:46299153-46299183
  hypo

SEQ ID NO: 82000 - DNA, 45 bp, Homo sapiens; identical to SEQ ID NO: 48416
  chr11:46299546-46299591
  hypo

SEQ ID NO: 82001 - DNA, 148 bp, Homo sapiens
  chr11:46337892-46338040
  hypo
gaccttacaagatggccgccacccagactgggacctgcctcatggtaggtgtggctccctccaccacagacccacaggaggagagttcttcccaaggctggctttttccagggttgggcagagctttaaggatcggtaacatcgtggg

SEQ ID NO: 82002 - DNA, 31 bp, Homo sapiens
  chr11:46343982-46344013
  hypo
acatggaggggacctgcgaagatgagagacc

SEQ ID NO: 82003 - DNA, 42 bp, Homo sapiens
  chr11:46390758-46390800
  hypo
accatggtcccatgttagtgggggagacggacccaaagctcc

SEQ ID NO: 82004 - DNA, 624 bp, Homo sapiens
  chr11:46391519-46392143
  hypo
cagacgacgccaggacggcaagtgtcggcactgtgggaaggtgagaggccctgcccgaggacatcgccacctgcacctgcggtcctgagcccaggccatgtggccggtgtggcctgccgatcactgaccacaccctggtgtgcagagtccggggctgaccctcagcctggctgcagtgccttcagttctcaagcaccctggcctgctcttggtctctgggcttagtaggagagcagggaggaaagttttcttcccatgtggcacacctggcctgctttgaagctgcaagtggccctttggagaatcgtatagacttactcattcggtgactccatggatacttgtgtgccgagcgccaagctgggcagcggtttcccaccctcctgaggacagtgtggcttgaagccaggctttccaggcgaccgcctaacccagtccacagttgtttggttcactttcttgtttgcttcttgcccgcctccctcagtaagtgcaggctctcaaagatggagaggcttgcttcactgattctcagcgcctggcccactgcaggcctttcataacagcctgtgtgatgaacagggaatgaatgtgataggtactcggaagcggcagtaaatttct

SEQ ID NO: 82005 - DNA, 49 bp, Homo sapiens; identical to SEQ ID NO: 8088
  chr11:46413560-46413609
  hypo

SEQ ID NO: 82006 - DNA, 20 bp, Homo sapiens
  chr11:46417129-46417149
  hypo
atatccttttcccacttgag

SEQ ID NO: 82007 - DNA, 19 bp, Homo sapiens
  chr11:46417388-46417407
  hypo
caggcgtgagccaccacgc

SEQ ID NO: 82008 - DNA, 30 bp, Homo sapiens; identical to SEQ ID NO: 25210
  chr11:46426274-46426304
  hypo

SEQ ID NO: 82009 - DNA, 43 bp, Homo sapiens
  chr11:46542428-46542471
  hypo
acaggcgtgagccaccgcgcccggcccctatagcattttgtac

SEQ ID NO: 82010 - DNA, 30 bp, Homo sapiens
  chr11:46558166-46558196
  hypo
cctacaatcagccccgcagacacccattta

SEQ ID NO: 82011 - DNA, 334 bp, Homo sapiens; identical to SEQ ID NO: 48430
  chr11:46564031-46564365
  hypo

SEQ ID NO: 82012 - DNA, 35 bp, Homo sapiens; identical to SEQ ID NO: 25211
  chr11:46589408-46589443
  hypo

SEQ ID NO: 82013 - DNA, 181 bp, Homo sapiens; identical to SEQ ID NO: 25212
  chr11:46617387-46617568
  hypo

SEQ ID NO: 82014 - DNA, 30 bp, Homo sapiens
  chr11:46624852-46624882
  hypo
ggatagtagggagccgctgtcttggtttca

SEQ ID NO: 82015 - DNA, 181 bp, Homo sapiens; identical to SEQ ID NO: 25213
  chr11:46783058-46783239
  hypo

SEQ ID NO: 82016 - DNA, 33 bp, Homo sapiens; identical to SEQ ID NO: 25214
  chr11:46844004-46844037
  hypo

SEQ ID NO: 82017 - DNA, 25 bp, Homo sapiens
  chr11:46844514-46844539
  hypo
atcttcttttttttgagacagcgtc

SEQ ID NO: 82018 - DNA, 25 bp, Homo sapiens
  chr11:46844778-46844803
  hypo
caccgcacccacccctatgctatct

SEQ ID NO: 82019 - DNA, 21 bp, Homo sapiens
  chr11:46866488-46866509
  hypo
gccaccgcgcccagcctaaaa

SEQ ID NO: 82020 - DNA, 31 bp, Homo sapiens
  chr11:46898129-46898160
  hypo
tgtccagtatactttccggccaatggcatca

SEQ ID NO: 82021 - DNA, 31 bp, Homo sapiens; identical to SEQ ID NO: 25215
  chr11:46907965-46907996
  hypo

SEQ ID NO: 82022 - DNA, 31 bp, Homo sapiens; identical to SEQ ID NO: 25216
  chr11:46911489-46911520
  hypo

SEQ ID NO: 82023 - DNA, 139 bp, Homo sapiens
  chr11:46920034-46920173
  hypo
ccggtagtggcctctttggctccacaagccttctccttagttcaagcccaacctaattccatttccccactcactgcagttgcgctcatcagactggtcatcacagtccgcgtcaccatcgcagcgccagcctgcattg

SEQ ID NO: 82024 - DNA, 30 bp, Homo sapiens; identical to SEQ ID NO: 25217
  chr11:46957743-46957773
  hypo

SEQ ID NO: 82025 - DNA, 81 bp, Homo sapiens; identical to SEQ ID NO: 25218
  chr11:46959054-46959135
  hypo

SEQ ID NO: 82026 - DNA, 25 bp, Homo sapiens
  chr11:47029795-47029820
  hypo
gtgagccaccgcgcccagccaactc

SEQ ID NO: 82027 - DNA, 32 bp, Homo sapiens
  chr11:47081352-47081384
  hypo
tatatgttaagacacagagtccgctgggcgcg

SEQ ID NO: 82028 - DNA, 17 bp, Homo sapiens
  chr11:47132457-47132474
  hypo
tgagacagagtctagct

SEQ ID NO: 82029 - DNA, 187 bp, Homo sapiens
  chr11:47169577-47169764
  hypo
tgacctggacaccccacgccacttcaaggccctaggctagaggcagcttgtgcagcacgagtgtgcctccaacacagtccagaagaggagcaaccctcaggaaatggcccaggacaccttcatagcggcctttttcctcccacctggagaaggtaaccagacatcgtgtcatcgctgcttctctcat

SEQ ID NO: 82030 - DNA, 30 bp, Homo sapiens
  chr11:47202079-47202109
  hypo
cgcccagcacaggccggtggaaagcccccc

SEQ ID NO: 82031 - DNA, 17 bp, Homo sapiens
  chr11:47240496-47240513
  hypo
aaaagtgtttttttttt

SEQ ID NO: 82032 - DNA, 241 bp, Homo sapiens
  chr11:47264238-47264479
  hypo
gggcatgactagcaaggaggccggtgacagctcacctgtgtctgcaggaccgcttgccagctggcactcctgctgccaatccttgggcacgacgggctctgtgaggcgaaggaagtcctgcagtgggcagcggtgagggcagccaggcaggctgagcggccagggggccttgtcactctcgttccgaaagtacatctccactgagaaattcctgagggtcgacaggaggcaacatgggagc

SEQ ID NO: 82033 - DNA, 30 bp, Homo sapiens
  chr11:47296530-47296560
  hypo
acgccgggccaaggcggggagccgctcccg

SEQ ID NO: 82034 - DNA, 459 bp, Homo sapiens
  chr11:47358889-47359348
  hypo
ggtttttaactggggagggggcggggggcaggaccaggccaggcaggctcaccgataggcatgaagggctgggaggcagggctgggcctggacatgccgatggcgttgaccgcgtagacgcgcatctcgtacaccacgccctcgatcatgcgccgcgcttcatgactcagctcctgaatcaggtcgaagttcagccgcatccaccggtagctcttcttcttcttgcgctccaggatgtagcctggctcaggggaggtggcagctctggtctggaacccaggcatccccacaccaccttccctcggatctgtttggcgccctcacacctccatccggtgcccttgcactcacccaggatgggctgcccgccatcgtaggcaggcggctcccactgtactgtgcaggagtcctctcccacgttgctgatcttgggggccgcaggtgcgtctggcacgtctg

SEQ ID NO: 82035 - DNA, 30 bp, Homo sapiens
  chr11:47359943-47359973
  hypo
gtcctgttgccgctcggctcagggagcatg

SEQ ID NO: 82036 - DNA, 30 bp, Homo sapiens
  chr11:47436913-47436943
  hypo
actttccctgatgccgacgcccctgccccc

SEQ ID NO: 82037 - DNA, 30 bp, Homo sapiens
  chr11:47439518-47439548
  hypo
ccactggaagaggccgggggccccatttta

SEQ ID NO: 82038 - DNA, 30 bp, Homo sapiens
  chr11:47440333-47440363
  hypo
accatcttttattgcgcacttcagccgtga

SEQ ID NO: 82039 - DNA, 31 bp, Homo sapiens; identical to SEQ ID NO: 25221
  chr11:47440865-47440896
  hypo

SEQ ID NO: 82040 - DNA, 30 bp, Homo sapiens
  chr11:47445627-47445657
  hypo
tcactgtattgctccgtgggcctctcgtct

SEQ ID NO: 82041 - DNA, 181 bp, Homo sapiens
  chr11:47479674-47479855
  hypo
aaatcctggaagcatatgaccccatctgttatcaatgggctgtgggatggggcattcgctcacttttaaccatgacttactgttgttactagcgactttaatgagtgcttgccaggggcagtagcttggctatttgtttgtgcatttattcttttttgagacggagtcttgctctgtcgcc

SEQ ID NO: 82042 - DNA, 115 bp, Homo sapiens
  chr11:47486033-47486148
  hypo
agctggtctcagatctagtgacgtgagagtatggagaggagtgctctttagaagttgcccgtcccccacaggcagcagcgccctgcaggagcccgctgaccaaccagttacaagt

SEQ ID NO: 82043 - DNA, 38 bp, Homo sapiens; identical to SEQ ID NO: 25222
  chr11:47506516-47506554
  hypo

SEQ ID NO: 82044 - DNA, 385 bp, Homo sapiens
  chr11:47599038-47599423
  hypo
cttggcacagtgcttggcagccgtatagagctcaggatcactgtgccgatctgccagccacatcacctgaaggcagtttcccacttgcactgtgcgggccaaaaaccgagagcattcctcaaagagagatgtcagctgatacatgtctgacacctcataaatttcctgcaactcctcagctcgaagtttcacagtcccatggtagatataatcaaccaggagctggaaaacagactcgctgacatcctgcagcacaatcacccggttgtgggcctccttcaggttggaagtgaacatggatcggaagaagcagctctgagctgagaggaccagccgatggagctgaaactcccggccttccaccgaaatggtgacatcagcaaag

SEQ ID NO: 82045 - DNA, 30 bp, Homo sapiens; identical to SEQ ID NO: 25224
  chr11:47608032-47608062
  hypo

SEQ ID NO: 82046 - DNA, 30 bp, Homo sapiens
  chr11:47753811-47753841
  hypo
agcccgccctactccgtgcaacactctgga

SEQ ID NO: 82047 - DNA, 30 bp, Homo sapiens
  chr11:47777881-47777911
  hypo
cgctgacacattctacgctcactaaaaagt

SEQ ID NO: 82048 - DNA, 31 bp, Homo sapiens; identical to SEQ ID NO: 25225
  chr11:48001803-48001834
  hypo

SEQ ID NO: 82049 - DNA, 51 bp, Homo sapiens; identical to SEQ ID NO: 48450
  chr11:48002695-48002746
  hypo

SEQ ID NO: 82050 - DNA, 45 bp, Homo sapiens
  chr11:48008069-48008114
  hypo
caattttttctttttttaagacggagtctcactctgttgcttagg

SEQ ID NO: 82051 - DNA, 21 bp, Homo sapiens
  chr11:48015394-48015415
  hypo
ttttgagaggcagtctcgctc

SEQ ID NO: 82052 - DNA, 75 bp, Homo sapiens
  chr11:48065753-48065828
  hypo
tcacttgtgtttgttttgaggcgtatgtgcttcatatggttgaactcattcctcgcccagctggacatagagttg

SEQ ID NO: 82053 - DNA, 24 bp, Homo sapiens
  chr11:48071241-48071265
  hypo
ggcgacaatagtgaaactctgtct

SEQ ID NO: 82054 - DNA, 30 bp, Homo sapiens; identical to SEQ ID NO: 8097
  chr11:48294280-48294310
  hypo

SEQ ID NO: 82055 - DNA, 32 bp, Homo sapiens
  chr11:48365006-48365038
  hypo
tgtcttgtctgtatgtgtaagcggatgacatt

SEQ ID NO: 82056 - DNA, 30 bp, Homo sapiens; identical to SEQ ID NO: 8098
  chr11:48561464-48561494
  hypo

SEQ ID NO: 82057 - DNA, 30 bp, Homo sapiens
  chr11:49124075-49124105
  hypo
gacccggagggtgccgggtcccaggtctcc

SEQ ID NO: 82058 - DNA, 82 bp, Homo sapiens
  chr11:49212564-49212646
  hypo
tgtatacaaaaacaggttggccgggtgcggaggcaggcagatcacctgaggtcaggaggcgcgatctcggctcactgcaagc

SEQ ID NO: 82059 - DNA, 99 bp, Homo sapiens
  chr11:50258374-50258473
  hypo
ggtttcgaacaactgggtttaagcgatcttctcaccttggccatcagagttgtcgggattacaggcgtgagggaccgcgccctgcttggattaggctat

SEQ ID NO: 82060 - DNA, 26 bp, Homo sapiens
  chr11:55753725-55753751
  hypo
aagtacacattcaaggggtgacggac

SEQ ID NO: 82061 - DNA, 59 bp, Homo sapiens
  chr11:55940875-55940934
  hypo
ttttaatgtgaaaaactgaatcgcagtttttaattgccgctaaaagtaatggcaaaaac

SEQ ID NO: 82062 - DNA, 159 bp, Homo sapiens
  chr11:57010761-57010920
  hypo
gagactccatctcaaaaaaaaaaaaaatttgagcaactactatgtgccaggctctatttgaggcacttgccatacagtgtgagcaattcaaactatgccctcggtttcctgcactttcattctagaggtggaagagagacaaaacgatgaaagttagat

SEQ ID NO: 82063 - DNA, 31 bp, Homo sapiens
  chr11:57058716-57058747
  hypo
ttcaaactgcaagagtcgaaaaaaaaaaaag

SEQ ID NO: 82064 - DNA, 73 bp, Homo sapiens
  chr11:57069625-57069698
  hypo
gggcccggtgcccacgcttgcgccccaagttggcacggctccgatacatggcactgtcgaggatctcggtgtc

SEQ ID NO: 82065 - DNA, 274 bp, Homo sapiens
  chr11:57071396-57071670
  hypo
ctctcactaactcatactgcccgccctgtccagcggccactccccaaaatgacacattcacattcatcaccatcacacacactcaggcagagagcttgtgcgctgtttgtcactcccccagatggacctcgcacccaccacatctacaggcacggcacagagccacacctgacacaaacacacgcatccccgcatccccacacccccaccccacacacacacactcatactacgcacagaggtgtgggaaagcctggcacggcagtgcctggaa

SEQ ID NO: 82066 - DNA, 148 bp, Homo sapiens
  chr11:57072386-57072534
  hypo
aggtggcccaagccactcaggcagaggtcagtgagctctggaggtggccttgaggagcagagagtggcgagtggggaaaacccaagaaagtgcagctacgtccaccccgccggactaaaccccactcgcccttcaccccatcttagaa

SEQ ID NO: 82067 - DNA, 30 bp, Homo sapiens; identical to SEQ ID NO: 25229
  chr11:57105324-57105354
  hypo

SEQ ID NO: 82068 - DNA, 30 bp, Homo sapiens
  chr11:57106078-57106108
  hypo
aagagctggaccatcgggatcatcaaccga

SEQ ID NO: 82069 - DNA, 31 bp, Homo sapiens
  chr11:57115641-57115672
  hypo
agggatcctcactggccgctgcgtgaactac

SEQ ID NO: 82070 - DNA, 31 bp, Homo sapiens; identical to SEQ ID NO: 25230
  chr11:57116315-57116346
  hypo

SEQ ID NO: 82071 - DNA, 43 bp, Homo sapiens; identical to SEQ ID NO: 25231
  chr11:57152966-57153009
  hypo

SEQ ID NO: 82072 - DNA, 391 bp, Homo sapiens; identical to SEQ ID NO: 25232
  chr11:57182503-57182894
  hypo

SEQ ID NO: 82073 - DNA, 243 bp, Homo sapiens
  chr11:57202847-57203090
  hypo
cacccaagatatttacataagcgaaatgagtgcatacgctcaccagaagtagtgtacaagaatatccatagcaactttattcataacagccagaacctggtaacagcccaaatgcccaccgataggaatacggataagcaaattgtcccgtagtcacacgacggaatactgcatcacaacaaaaagaaccaacctttcatacacacagtgtagattaatttcgcagatgtgatattgagcaaa

SEQ ID NO: 82074 - DNA, 166 bp, Homo sapiens
  chr11:57206941-57207107
  hypo
tttttgtcctggccctgactcacttgtcctgatttctcaagagagggactttcagaaaatgaaaaaaaagagaactttactaaagatcttcagtattggtcagaagagaacccatcctctctcagcaaggatgggagacggcgaagagatacgcttcatgggagag

SEQ ID NO: 82075 - DNA, 201 bp, Homo sapiens; identical to SEQ ID NO: 25233
  chr11:57235324-57235525
  hypo

SEQ ID NO: 82076 - DNA, 541 bp, Homo sapiens; identical to SEQ ID NO: 8100
  chr11:57243624-57244165
  hypo

SEQ ID NO: 82077 - DNA, 31 bp, Homo sapiens
  chr11:57254650-57254681
  hypo
actgcaggcctgtcagcgtcccaaagtggtt

SEQ ID NO: 82078 - DNA, 30 bp, Homo sapiens; identical to SEQ ID NO: 25235
  chr11:57308127-57308157
  hypo

SEQ ID NO: 82079 - DNA, 30 bp, Homo sapiens
  chr11:57319857-57319887
  hypo
gagggtgaactcttcggcattctttctgaa

SEQ ID NO: 82080 - DNA, 30 bp, Homo sapiens; identical to SEQ ID NO: 25236
  chr11:57423908-57423938
  hypo

SEQ ID NO: 82081 - DNA, 52 bp, Homo sapiens; identical to SEQ ID NO: 48470
  chr11:57434927-57434979
  hypo

SEQ ID NO: 82082 - DNA, 30 bp, Homo sapiens
  chr11:57470956-57470986
  hypo
ctgagatcaccgaggcgcttggttctcaac

SEQ ID NO: 82083 - DNA, 76 bp, Homo sapiens
  chr11:57500992-57501068
  hypo
tgctgcgattacaggcgtgagtcaccgcgcccagcctatagtgaggaatttacagatgaaacgatatagctggaat

SEQ ID NO: 82084 - DNA, 30 bp, Homo sapiens
  chr11:57520319-57520349
  hypo
agagccctgcaaagcggggtggcccgcacg

SEQ ID NO: 82085 - DNA, 30 bp, Homo sapiens
  chr11:57520653-57520683
  hypo
gggcctacgtcgtccggcatacgtcatccc

SEQ ID NO: 82086 - DNA, 29 bp, Homo sapiens
  chr11:57548700-57548729
  hypo
acctggccgagaagctgctattttaaaaa

SEQ ID NO: 82087 - DNA, 27 bp, Homo sapiens
  chr11:57550844-57550871
  hypo
gaagccatagaaaggccgggctcacgc

SEQ ID NO: 82088 - DNA, 122 bp, Homo sapiens; identical to SEQ ID NO: 25239
  chr11:57580246-57580368
  hypo

SEQ ID NO: 82089 - DNA, 19 bp, Homo sapiens
  chr11:57775182-57775201
  hypo
ctcaaaaaaaaaaaaaaaa

SEQ ID NO: 82090 - DNA, 19 bp, Homo sapiens
  chr11:57996698-57996717
  hypo
cggccgctttatttcttta

SEQ ID NO: 82091 - DNA, 30 bp, Homo sapiens; identical to SEQ ID NO: 25241
  chr11:58275195-58275225
  hypo

SEQ ID NO: 82092 - DNA, 30 bp, Homo sapiens; identical to SEQ ID NO: 25242
  chr11:58390073-58390103
  hypo

SEQ ID NO: 82093 - DNA, 27 bp, Homo sapiens
  chr11:58395624-58395651
  hypo
gcgcgcgtgtgtgactaatgtactgtt

SEQ ID NO: 82094 - DNA, 30 bp, Homo sapiens
  chr11:58437950-58437980
  hypo
gggttagacaccgctcgcgatatggggagt

SEQ ID NO: 82095 - DNA, 31 bp, Homo sapiens
  chr11:58835156-58835187
  hypo
tgtaaatagaggagacgcgtttgccgacttt

SEQ ID NO: 82096 - DNA, 62 bp, Homo sapiens
  chr11:58904854-58904916
  hypo
aggccactgcagaccgcgtgcccctactagtccctgcggccctgggcgctcgaacctcgggc

SEQ ID NO: 82097 - DNA, 30 bp, Homo sapiens
  chr11:58907364-58907394
  hypo
aaaagtgtgtcccccgtagatttagtctaa

SEQ ID NO: 82098 - DNA, 43 bp, Homo sapiens
  chr11:58949203-58949246
  hypo
cctggcaggaactctccgcccagttcgccgcaactactacgac

SEQ ID NO: 82099 - DNA, 31 bp, Homo sapiens
  chr11:58949531-58949562
  hypo
cctgggccagccacctcgccccccatgtccc

SEQ ID NO: 82100 - DNA, 30 bp, Homo sapiens
  chr11:58956702-58956732
  hypo
ctacacccaccccccgtcagcaagagtgaa

SEQ ID NO: 82101 - DNA, 43 bp, Homo sapiens
  chr11:59031093-59031136
  hypo
aaaggccccgaggccaagggccgcaactgctgcatctgtgtct

SEQ ID NO: 82102 - DNA, 31 bp, Homo sapiens
  chr11:59031571-59031602
  hypo
gccattgggaggacagcggagtcagcagata

SEQ ID NO: 82103 - DNA, 102 bp, Homo sapiens
  chr11:59312645-59312747
  hypo
cttggtattccaggacagagacgacagaaacctgaactaagtagcaaaatggaggagaagtcgttgtgaaaccgcccaatgggctcaccttacccactgcct

SEQ ID NO: 82104 - DNA, 31 bp, Homo sapiens; identical to SEQ ID NO: 25244
  chr11:59329209-59329240
  hypo

SEQ ID NO: 82105 - DNA, 177 bp, Homo sapiens; identical to SEQ ID NO: 25245
  chr11:59423037-59423214
  hypo

SEQ ID NO: 82106 - DNA, 31 bp, Homo sapiens
  chr11:59443884-59443915
  hypo
acaaatgttctttttgcgggcagggggcaaa

SEQ ID NO: 82107 - DNA, 131 bp, Homo sapiens; identical to SEQ ID NO: 8116
  chr11:59523185-59523316
  hypo

SEQ ID NO: 82108 - DNA, 168 bp, Homo sapiens
  chr11:59665633-59665801
  hypo
gcgcggaacgcgggcgcctaagccatggcttcctcagggagagctgagctctgggcgctgaacccgctgcgcttgctgtggctcacgccggccgccgccttcctgctgaccctgctgttgcagcttctgccgctcggcctgctcctgggccgcgcattcttccaggac

SEQ ID NO: 82109 - DNA, 38 bp, Homo sapiens; identical to SEQ ID NO: 25248
  chr11:59809608-59809646
  hypo

SEQ ID NO: 82110 - DNA, 24 bp, Homo sapiens
  chr11:60066953-60066977
  hypo
tggttttttgagacagagtttcgc

SEQ ID NO: 82111 - DNA, 41 bp, Homo sapiens
  chr11:60143548-60143589
  hypo
aaaaaaaaaaaaaaaaaaacgatcacagagcacagtccctg

SEQ ID NO: 82112 - DNA, 30 bp, Homo sapiens; identical to SEQ ID NO: 25249
  chr11:60260922-60260952
  hypo

SEQ ID NO: 82113 - DNA, 368 bp, Homo sapiens; identical to SEQ ID NO: 25250
  chr11:60282697-60283065
  hypo

SEQ ID NO: 82114 - DNA, 30 bp, Homo sapiens
  chr11:60468413-60468443
  hypo
aggaattatgtctcacgtgcccctgtatcc

SEQ ID NO: 82115 - DNA, 30 bp, Homo sapiens
  chr11:60468706-60468736
  hypo
gcacaacatcacaggcggcctctgctcaga

SEQ ID NO: 82116 - DNA, 322 bp, Homo sapiens; identical to SEQ ID NO: 25251
  chr11:60514865-60515187
  hypo

SEQ ID NO: 82117 - DNA, 31 bp, Homo sapiens
  chr11:60515940-60515971
  hypo
caaggccgcccagccccgaggtgtagcaggg

SEQ ID NO: 82118 - DNA, 202 bp, Homo sapiens
  chr11:60524469-60524671
  hypo
gacgtgatcgccttgaagttacgcttgaaggaggaaaactcatcaattttcggggaatcccggtaagggacagtcctgactcccgtcaggaggatgggacccacgcgtaaaatatcaggggttggattatcatgggtcaagaaatgaccaaagaacagaaagtgttttttaaaaacagtgcgacagctacttaaggctaacc

SEQ ID NO: 82119 - DNA, 30 bp, Homo sapiens; identical to SEQ ID NO: 25252
  chr11:60608619-60608649
  hypo

SEQ ID NO: 82120 - DNA, 30 bp, Homo sapiens
  chr11:60608936-60608966
  hypo
acaaacgttgaaaacgctgaaaagggaggg

SEQ ID NO: 82121 - DNA, 43 bp, Homo sapiens
  chr11:60640962-60641005
  hypo
gctgctgcaccagtgctggggcgctcccagtgccaaccccttc

SEQ ID NO: 82122 - DNA, 30 bp, Homo sapiens
  chr11:60648546-60648576
  hypo
ggattatgttccagccgctttgtgtcaaca

SEQ ID NO: 82123 - DNA, 2 bp, Homo sapiens
  chr11:60648814-60648816
  hypo
ag

SEQ ID NO: 82124 - DNA, 34 bp, Homo sapiens
  chr11:60660675-60660709
  hypo
taatatagctaggcgcggtggctcacgcctgtaa

SEQ ID NO: 82125 - DNA, 57 bp, Homo sapiens
  chr11:60680245-60680302
  hypo
ctggaacaagccagccgtttttcagcaccagtgggatcacactccactcactcaaga

SEQ ID NO: 82126 - DNA, 34 bp, Homo sapiens
  chr11:60680361-60680395
  hypo
agcgtgcgcttttggacaccggcaggagcgaact

SEQ ID NO: 82127 - DNA, 231 bp, Homo sapiens; identical to SEQ ID NO: 25253
  chr11:60689400-60689631
  hypo

SEQ ID NO: 82128 - DNA, 50 bp, Homo sapiens; identical to SEQ ID NO: 8117
  chr11:60692120-60692170
  hypo

SEQ ID NO: 82129 - DNA, 133 bp, Homo sapiens
  chr11:60695103-60695236
  hypo
tccctccaggtggtcccccctcgagtcactgagccccaccaacggccagtcccatgggacgtgcgggccgtttcagtggaagcggctgtgactccagcagagccctacgcccgggttctcttccacctcaaag

SEQ ID NO: 82130 - DNA, 160 bp, Homo sapiens
  chr11:60696095-60696255
  hypo
cacagccatccctgggcgcctgcgtggtggagctggagcttccctcgcactggttctcacaggcctccaccacacgggccgagctggcctacacgcttgagcctgcagctgagggccctgggggctgtggctccggcgaggagaacgaccctggggagca

SEQ ID NO: 82131 - DNA, 165 bp, Homo sapiens
  chr11:60703903-60704068
  hypo
tcaatggtgtggtcttcgtcctgcgctatcagcgcaaagaacctcccgacagtgccactgaccccacctccccccagccccacaactgggtctggctgggcactgaccaggaggaactgagccgccagctggaccggcagtcccctggcccgcccaagggggagg

SEQ ID NO: 82132 - DNA, 30 bp, Homo sapiens
  chr11:60714256-60714286
  hypo
agaagcggcgggtggcgtcgcggccgagat

SEQ ID NO: 82133 - DNA, 33 bp, Homo sapiens
  chr11:60754317-60754350
  hypo
tccctggcgccgtggcgcacagctgtaatccct

SEQ ID NO: 82134 - DNA, 155 bp, Homo sapiens; identical to SEQ ID NO: 48499
  chr11:60775226-60775381
  hypo

SEQ ID NO: 82135 - DNA, 174 bp, Homo sapiens; identical to SEQ ID NO: 25256
  chr11:60880737-60880911
  hypo

SEQ ID NO: 82136 - DNA, 190 bp, Homo sapiens; identical to SEQ ID NO: 25257
  chr11:60897021-60897211
  hypo

SEQ ID NO: 82137 - DNA, 53 bp, Homo sapiens
  chr11:60897861-60897914
  hypo
acatttggtaaagaaccggcagcgctgacctagcgtcacgcggatggcacata

SEQ ID NO: 82138 - DNA, 33 bp, Homo sapiens
  chr11:60926975-60927008
  hypo
ctcacttgtggccagacgcagtggctcacacct

SEQ ID NO: 82139 - DNA, 126 bp, Homo sapiens; identical to SEQ ID NO: 25259
  chr11:60927367-60927493
  hypo

SEQ ID NO: 82140 - DNA, 30 bp, Homo sapiens
  chr11:61030494-61030524
  hypo
aagaaggaaattacaggctcacgcctgtaa

SEQ ID NO: 82141 - DNA, 154 bp, Homo sapiens
  chr11:61036508-61036662
  hypo
tcaccaagaccccaccggtgacaccggcccctgcctccccgccctgcaaaagaaacagcaacgctgcaaactggccaaggcttgccctgaaaggcaacatgacgcggctggaagatggcaggtctcccctaaagaggatcggctacttgagaaa

SEQ ID NO: 82142 - DNA, 296 bp, Homo sapiens
  chr11:61049428-61049724
  hypo
acggagcccttcttccgcccatcccttagctcaaaacacttggggagtttctctgccatgttcttacagggtccatgcctgccccgaggtgcgggatgtgactcagacagctgggagcggggctgaaatctagtgcttgtcttgttaataggttcacacatcgagcaggtatttaatgcgagtatcagagactcagccccagcactatgcagcggtaattaattgctgcgtggtaggggtaagccccaatgagaagctcatctccaaaccttccaccctcccgtttttctttccga

SEQ ID NO: 82143 - DNA, 38 bp, Homo sapiens
  chr11:61056996-61057034
  hypo
caggcgtgagccaccaagcctagcgaaaaaaaaaatta

SEQ ID NO: 82144 - DNA, 568 bp, Homo sapiens; identical to SEQ ID NO: 48500
  chr11:61062455-61063023
  hypo

SEQ ID NO: 82145 - DNA, 22 bp, Homo sapiens
  chr11:61063061-61063083
  hypo
cgctgagcagttctaggcctgc

SEQ ID NO: 82146 - DNA, 352 bp, Homo sapiens; identical to SEQ ID NO: 25263
  chr11:61076170-61076522
  hypo

SEQ ID NO: 82147 - DNA, 170 bp, Homo sapiens
  chr11:61094129-61094299
  hypo
aatgcacaccttcaataataccgagcgccaaaacgaagggcagagaaggtgagggagcgaacaagaacagggaactagcctagacccaggtggaggcacatttcctaaaccccctaccaacctgcgatcaccatggaagcttcagcttcgacattttcctgtttccaagg

SEQ ID NO: 82148 - DNA, 355 bp, Homo sapiens
  chr11:61106580-61106935
  hypo
tgtgttcacctccccggcagtgggcagcatcctggcagccatcagggccgtggcccaggccggcacaggtaagcctggcatgcaggaggggctgcggcagggagggcacagtaagcacactgagcccttccggctgctcccgcagtggggacgctccttatcgtgaagaactacactggggatcggctcaacttcggcctggcccgggagcaggcccgggctgaaggcatcccggtggagatggtggtgattggggacgacagcgccttcactgtcctgaagaaggcaggccggcgggggctgtgcggcacggtgcttatacacaaggtgggcttccaccggggacgtggagact

SEQ ID NO: 82149 - DNA, 152 bp, Homo sapiens; identical to SEQ ID NO: 25265
  chr11:61108935-61109087
  hypo

SEQ ID NO: 82150 - DNA, 54 bp, Homo sapiens
  chr11:61118454-61118508
  hypo
acccatacctgtctgtcggtcaggatccccggctctgggcgcttccaagatgaa

SEQ ID NO: 82151 - DNA, 44 bp, Homo sapiens; identical to SEQ ID NO: 25266
  chr11:61122608-61122652
  hypo

SEQ ID NO: 82152 - DNA, 31 bp, Homo sapiens; identical to SEQ ID NO: 8124
  chr11:61160872-61160903
  hypo

SEQ ID NO: 82153 - DNA, 121 bp, Homo sapiens
  chr11:61263502-61263623
  hypo
ggacacaggtgggtgcggcgctgacggctttggtgtgggggtgtggagcctagagggctgacgggacagcaggtggggtggctgctgggcgccgtgagatcagacacggcttgtgacgcgt

SEQ ID NO: 82154 - DNA, 692 bp, Homo sapiens; identical to SEQ ID NO: 48508
  chr11:61275811-61276503
  hypo

SEQ ID NO: 82155 - DNA, 584 bp, Homo sapiens; identical to SEQ ID NO: 8127
  chr11:61276535-61277119
  hypo

SEQ ID NO: 82156 - DNA, 31 bp, Homo sapiens
  chr11:61292903-61292934
  hypo
tggcccttcaacaccccgactcctcccgcct

SEQ ID NO: 82157 - DNA, 30 bp, Homo sapiens
  chr11:61302244-61302274
  hypo
ccagcgacacgcgggcgcccctcccagagg

SEQ ID NO: 82158 - DNA, 261 bp, Homo sapiens; identical to SEQ ID NO: 25271
  chr11:61305392-61305653
  hypo

SEQ ID NO: 82159 - DNA, 30 bp, Homo sapiens
  chr11:61310180-61310210
  hypo
tccatcggagctgtcgccaccgccgtcgcc

SEQ ID NO: 82160 - DNA, 30 bp, Homo sapiens; identical to SEQ ID NO: 48511
  chr11:61348069-61348099
  hypo

SEQ ID NO: 82161 - DNA, 99 bp, Homo sapiens; identical to SEQ ID NO: 48512
  chr11:61348493-61348592
  hypo

SEQ ID NO: 82162 - DNA, 31 bp, Homo sapiens
  chr11:61416205-61416236
  hypo
ctgagctttggggtgacgtacagcattatca

SEQ ID NO: 82163 - DNA, 31 bp, Homo sapiens
  chr11:61423922-61423953
  hypo
tgagggtgcaggggtgcggggtggtgagagt

SEQ ID NO: 82164 - DNA, 31 bp, Homo sapiens; identical to SEQ ID NO: 25272
  chr11:61458298-61458329
  hypo

SEQ ID NO: 82165 - DNA, 80 bp, Homo sapiens
  chr11:61464742-61464822
  hypo
cccagcctcctgagcttggcccgctgctgtggtcaggagcatagaagccgggccagggcgagggaaggcctggcctaaac

SEQ ID NO: 82166 - DNA, 30 bp, Homo sapiens; identical to SEQ ID NO: 25273
  chr11:61467271-61467301
  hypo

SEQ ID NO: 82167 - DNA, 14 bp, Homo sapiens
  chr11:61467503-61467517
  hypo
tgccccagcagtgc

SEQ ID NO: 82168 - DNA, 1 bp, Homo sapiens
  chr11:61467601-61467602
  hypo
g

SEQ ID NO: 82169 - DNA, 31 bp, Homo sapiens
  chr11:61473668-61473699
  hypo
actgagaagttgggggcggggaagggactca

SEQ ID NO: 82170 - DNA, 51 bp, Homo sapiens; identical to SEQ ID NO: 25274
  chr11:61474396-61474447
  hypo

SEQ ID NO: 82171 - DNA, 121 bp, Homo sapiens
  chr11:61475742-61475863
  hypo
gtgttgggattacaggcgtgagccaccgcgcccgacttgggggttgatttaattaaagctctatgtcaccaatctcctcctctgagccagagcctgctttcaacactttacaacttttttt

SEQ ID NO: 82172 - DNA, 45 bp, Homo sapiens
  chr11:61476224-61476269
  hypo
catcctattttatagacgaggagagggctgcgttgtatattgaag

SEQ ID NO: 82173 - DNA, 57 bp, Homo sapiens; identical to SEQ ID NO: 25276
  chr11:61478511-61478568
  hypo

SEQ ID NO: 82174 - DNA, 190 bp, Homo sapiens; identical to SEQ ID NO: 25277
  chr11:61479891-61480081
  hypo

SEQ ID NO: 82175 - DNA, 371 bp, Homo sapiens
  chr11:61488079-61488450
  hypo
gcctgcctgctagtagcatctcgaggtacaggggccacctggccttgctcacacgggcgttcctgtgacaggtttgtgatcctgtccgtggtgctcttcggcctggtctataacccgcacgaggcctgctccctgaacctggtggaccacggccgcggctacctgggcatcctgctgagctgcatgatcgctgagatggccatcatctggctgagcatgcgcgggggcatcctctacacggagccccgtgactccatgcagtacgtgctctacgtgcgcctgggtaagggccacccaccctggggtgctgccccagacaactcccacctctccattcactcagccagtatttactgcgcacatgttgcgag

SEQ ID NO: 82176 - DNA, 190 bp, Homo sapiens
  chr11:61490186-61490376
  hypo
gggtctgctaatggcccgctgcctctgcctttgctactgagctggctgaaagcccagcgataggaaaggccaggccggggttctaggcccttccctggcatgcaagtggcagccatccttcagccaggcctgctctccttgcagccatcctggtgatcgagttcatctacgccatcgtgggcatcgtctg

SEQ ID NO: 82177 - DNA, 31 bp, Homo sapiens; identical to SEQ ID NO: 25279
  chr11:61490854-61490885
  hypo

SEQ ID NO: 82178 - DNA, 36 bp, Homo sapiens
  chr11:61494079-61494115
  hypo
tcatccaggggtgccccgcagcgggcagggacctta

SEQ ID NO: 82179 - DNA, 131 bp, Homo sapiens
  chr11:61495639-61495770
  hypo
atcgcctacctctttgcggagttcttccgggaccttgacattgtgccatccgacatcattgctggcctggtgctgctccggcagcggcagcgggccaagcgcaacgccgtgctggacgaggtgagcaccac

SEQ ID NO: 82180 - DNA, 31 bp, Homo sapiens
  chr11:61498683-61498714
  hypo
tgccaggggttgggtccgcaggctcccaccc

SEQ ID NO: 82181 - DNA, 175 bp, Homo sapiens
  chr11:61502321-61502496
  hypo
tgttgcctgtgtcctgcgaggccgcggttcgcccctggagtcaccatcgaggaagacaactgctgtggctgtaatgccattgccatccggcgccacttcctggacgagaacatgactgcggtggacatcgtctatacctcctgccatgatgcggtgaggccgggcagggctgggg

SEQ ID NO: 82182 - DNA, 31 bp, Homo sapiens; identical to SEQ ID NO: 25280
  chr11:61508799-61508830
  hypo

SEQ ID NO: 82183 - DNA, 607 bp, Homo sapiens
  chr11:61511516-61512123
  hypo
ggcgctgcacaatgggcgcctgggggactcgcccagtcctcaggtgctggaattcgccgagttcatcgacagcctcttcaacctggacagcaagagcagctccttccaagacctctactgcatggtggtgcccgagagccccaccagtgactacgctgagggccccaagtcccccagccagcaagagatcctgctccgtgcccagttcgagcccaacctggtgcccaagcccccacggctctttgccggctcagccgacccctcctcgggcatctcactctcgccctccttcccgctcagctcctcgggtgagctcatggacctgacgcccacgggcctcagtagccaggaatgcctggcggctgacaagatccggacttctacccccactggccacggagccagccccgccaagcaagatgagctggtcatctcagcacgctagcaccccagttgcgtggccagccgggcccaggcaggagcaggtggccctgtgggcacctggtgcctgccccctgccgggcagctttaaggacagacccccaggggcagtttagcctcaggcacaggcatcgctgctgagctgggggtccgcatccctacctca

SEQ ID NO: 82184 - DNA, 520 bp, Homo sapiens; identical to SEQ ID NO: 48515
  chr11:61519847-61520367
  hypo

SEQ ID NO: 82185 - DNA, 459 bp, Homo sapiens; identical to SEQ ID NO: 25283
  chr11:61522482-61522941
  hypo

SEQ ID NO: 82186 - DNA, 100 bp, Homo sapiens
  chr11:61525592-61525692
  hypo
ggagtacagttgggtccggagccccctgccggcctagagtatggagggggctcccggacattctgtcctccctgtgccccaggtcgcatcagtgagggaa

SEQ ID NO: 82187 - DNA, 30 bp, Homo sapiens; identical to SEQ ID NO: 25285
  chr11:61525907-61525937
  hypo

SEQ ID NO: 82188 - DNA, 31 bp, Homo sapiens
  chr11:61533319-61533350
  hypo
cagccactgactcctccgaaatctccatagt

SEQ ID NO: 82189 - DNA, 412 bp, Homo sapiens
  chr11:61536685-61537097
  hypo
gaagctcagctgctcaccccccggccccttcccctggctctcgcagcacactgccggactctcccccagactcgggctccgaggcctactccccccagcaggtgaatggtgagtccagcgggcaccgccctcctgctccagggtttgggcaagtagttggggcggccttatcagggaggtaggggaggagggagggggccagcggctgcccaacgggctgagattatcgctggtcaaatactccctggcgcttggctattgtttccccacgggcgggtggggagcctggccctgcctctgagcaagtatccccgcggtgatgccacccgcctgcccgcctgcgccatcatggacgcacccttcggcggtaagtgggtggctggggaaggccgtgggtgcagcctgggtgcag

SEQ ID NO: 82190 - DNA, 30 bp, Homo sapiens; identical to SEQ ID NO: 48516
  chr11:61552664-61552694
  hypo

SEQ ID NO: 82191 - DNA, 31 bp, Homo sapiens
  chr11:61592290-61592321
  hypo
gaattatttctgctagcgtagcttagcaaat

SEQ ID NO: 82192 - DNA, 408 bp, Homo sapiens; identical to SEQ ID NO: 48519
  chr11:61595059-61595467
  hypo

SEQ ID NO: 82193 - DNA, 1061 bp, Homo sapiens; identical to SEQ ID NO: 48520
  chr11:61595682-61596743
  hypo

SEQ ID NO: 82194 - DNA, 47 bp, Homo sapiens
  chr11:61615509-61615556
  hypo
cctgaagtgctatccccgagggttgaaggttccgggaactgctccta

SEQ ID NO: 82195 - DNA, 31 bp, Homo sapiens
  chr11:61619675-61619706
  hypo
taactcattggaagctcgtagtggggtgcct

SEQ ID NO: 82196 - DNA, 31 bp, Homo sapiens
  chr11:61621920-61621951
  hypo
aggcaacaccactgtccgaacccaaaccatc

SEQ ID NO: 82197 - DNA, 31 bp, Homo sapiens
  chr11:61624801-61624832
  hypo
tggctgcttctgcccacgtctgcagggctgg

SEQ ID NO: 82198 - DNA, 408 bp, Homo sapiens
  chr11:61632398-61632806
  hypo
ctccatagagcacaaacgccctcctgctcacggagggctgcaccctcccctccacacacgtggcaccccactgggcacacacgaggagccacactttgagactggtcctggctgtggacagggtctctgagggccccagccagcctctgcccaggtggtgggaggaagcgggagcagcatggccctctgagtcctcacgctctgcccaccctacacactcctcagcctcttccccaccatgccccggcacaacttacacaagatcgccccgctggtgaagtctctatgtgccaagcatggcattgaataccaggagaagccgctactgagggccctgctggacatcatcaggtgaggggtggaggtccacaggcgctgggccctgggatcacccgtggtgcagacagt

SEQ ID NO: 82199 - DNA, 177 bp, Homo sapiens; identical to SEQ ID NO: 25290
  chr11:61634596-61634773
  hypo

SEQ ID NO: 82200 - DNA, 43 bp, Homo sapiens
  chr11:61635270-61635313
  hypo
aggggctggagaaggccgggagcggtggctcatgcctgtaatc

SEQ ID NO: 82201 - DNA, 61 bp, Homo sapiens
  chr11:61640642-61640703
  hypo
ggtcaagaggcacaaccgtctttcccagtccatgtccagaagcgtccgcagacatggcccc

SEQ ID NO: 82202 - DNA, 177 bp, Homo sapiens; identical to SEQ ID NO: 25291
  chr11:61644901-61645078
  hypo

SEQ ID NO: 82203 - DNA, 112 bp, Homo sapiens
  chr11:61646080-61646192
  hypo
aagttccaccagtgggcggagaagccctgtggaggaggagggggctctcagggcaggctgtgcccccgactgtgcccacacacttgggcagacccagcgccacccagcacct

SEQ ID NO: 82204 - DNA, 31 bp, Homo sapiens; identical to SEQ ID NO: 25292
  chr11:61647048-61647079
  hypo

SEQ ID NO: 82205 - DNA, 43 bp, Homo sapiens
  chr11:61653515-61653558
  hypo
aatttggcctgtgtagcggagcccaagtcgaaggcagacaccc

SEQ ID NO: 82206 - DNA, 45 bp, Homo sapiens; identical to SEQ ID NO: 48521
  chr11:61659435-61659480
  hypo

SEQ ID NO: 82207 - DNA, 30 bp, Homo sapiens; identical to SEQ ID NO: 25294
  chr11:61663016-61663046
  hypo

SEQ ID NO: 82208 - DNA, 158 bp, Homo sapiens
  chr11:61664738-61664896
  hypo
gtgcaggagtgagggcgcgtggccacccagcctgtaccaacaaagcctgcctttattaaatagagatcgcgttacattccatccaaagaaggaaatccggacgtggtgagggatgcgtccaggtgggagctccgaacgctggtcctgagtgggctctg

SEQ ID NO: 82209 - DNA, 142 bp, Homo sapiens
  chr11:61665671-61665813
  hypo
cgtctccctgtgtgtcggcttgttctggggtgggtgtttgctctgtctcagagctccccttcaggcctgggccgcgccctaagcctcctgggggaagaagccgagcttggccagtgacatctccttccgcaacctcatgatc

SEQ ID NO: 82210 - DNA, 182 bp, Homo sapiens
  chr11:61666024-61666206
  hypo
agtgccgaccacacccgagggatctgtttgcactacactgacggccacccccacagcccgacgcagacaagcaggtacacgctgtcacatgccacagcggtggtccagacctgggaactacattagacaaggcacagatgcctccctggggtctcacaaggaccctgcgcagtgaggcgggg

SEQ ID NO: 82211 - DNA, 31 bp, Homo sapiens; identical to SEQ ID NO: 25296
  chr11:61667862-61667893
  hypo

SEQ ID NO: 82212 - DNA, 30 bp, Homo sapiens; identical to SEQ ID NO: 25297
  chr11:61668543-61668573
  hypo

SEQ ID NO: 82213 - DNA, 230 bp, Homo sapiens
  chr11:61668804-61669034
  hypo
cctggtctgggtcactcggcaggggagggtgggagctgggattcctagaggccccttggcactcacggccgacttaaggctggtgcaccagacgcaccgctgaaccttttccaaagcttcggccagcacctgagtctgggcgtcaggagccccgcactctaactggaactctagcatcactcctggattaggtgacattgaatgacagaggggggcgatgtcatcccatg

SEQ ID NO: 82214 - DNA, 30 bp, Homo sapiens; identical to SEQ ID NO: 25299
  chr11:61669446-61669476
  hypo

SEQ ID NO: 82215 - DNA, 249 bp, Homo sapiens; identical to SEQ ID NO: 25300
  chr11:61672903-61673152
  hypo

SEQ ID NO: 82216 - DNA, 397 bp, Homo sapiens
  chr11:61673893-61674290
  hypo
actgccacccttccccgtgcccagagcccgcttcccaccctcacctccttgccctctctgtctggggtgagggtgtgtcccgcagcgggacacacggcggggcagagggtgctgctggtgctcttgtggcgagagtggccctttcggggcccggccttggtggggctcagcagctgggggtgaagctcgcggttgggagaggctggtgtggacgtgatgaccagcgtcttcaaggctgtcacctctgcctgcagcatgtcgatctgcatgggatgggatggctgtcaaccctcacccagactggatgccatcctggctgccaccgcctatcagcctaactcaggacaatgcacccctgcagtgacaggcacttagtcccacccgacgccctcagaac

SEQ ID NO: 82217 - DNA, 460 bp, Homo sapiens; identical to SEQ ID NO: 25302
  chr11:61674739-61675199
  hypo

SEQ ID NO: 82218 - DNA, 30 bp, Homo sapiens; identical to SEQ ID NO: 25303
  chr11:61675593-61675623
  hypo

SEQ ID NO: 82219 - DNA, 155 bp, Homo sapiens; identical to SEQ ID NO: 25304
  chr11:61679897-61680052
  hypo

SEQ ID NO: 82220 - DNA, 67 bp, Homo sapiens; identical to SEQ ID NO: 25305
  chr11:61688730-61688797
  hypo

SEQ ID NO: 82221 - DNA, 30 bp, Homo sapiens; identical to SEQ ID NO: 25306
  chr11:61689492-61689522
  hypo

SEQ ID NO: 82222 - DNA, 95 bp, Homo sapiens
  chr11:61713859-61713954
  hypo
tgtgtctggcacccccgcgcatctccccagctctgccctgctgccccaagagatggctctctgctggggagctcgagagcttggaatctgctgca

SEQ ID NO: 82223 - DNA, 126 bp, Homo sapiens; identical to SEQ ID NO: 25307
  chr11:61717669-61717795
  hypo

SEQ ID NO: 82224 - DNA, 31 bp, Homo sapiens
  chr11:61727795-61727826
  hypo
cagtgatgcagtggaacgttaggacctggct

SEQ ID NO: 82225 - DNA, 137 bp, Homo sapiens; identical to SEQ ID NO: 25308
  chr11:61736212-61736349
  hypo

SEQ ID NO: 82226 - DNA, 38 bp, Homo sapiens; identical to SEQ ID NO: 25309
  chr11:61736664-61736702
  hypo

SEQ ID NO: 82227 - DNA, 31 bp, Homo sapiens
  chr11:61747021-61747052
  hypo
tgagccagtactgccccgtgagagatggttc

SEQ ID NO: 82228 - DNA, 31 bp, Homo sapiens; identical to SEQ ID NO: 25310
  chr11:61765125-61765156
  hypo

SEQ ID NO: 82229 - DNA, 77 bp, Homo sapiens; identical to SEQ ID NO: 25311
  chr11:61770025-61770102
  hypo

SEQ ID NO: 82230 - DNA, 149 bp, Homo sapiens; identical to SEQ ID NO: 25312
  chr11:61770720-61770869
  hypo

SEQ ID NO: 82231 - DNA, 31 bp, Homo sapiens
  chr11:61779428-61779459
  hypo
aaggtgtagcagtcatcgataccagctatca

SEQ ID NO: 82232 - DNA, 38 bp, Homo sapiens
  chr11:61784771-61784809
  hypo
cctacaatttcccagacggatgattcattcccttcacc

SEQ ID NO: 82233 - DNA, 34 bp, Homo sapiens
  chr11:61795461-61795495
  hypo
aagcaaggggtccaggcgaggcgtggtggctcac

SEQ ID NO: 82234 - DNA, 32 bp, Homo sapiens
  chr11:61811794-61811826
  hypo
ttttttgttttttttttgagacggagtctctc

SEQ ID NO: 82235 - DNA, 19 bp, Homo sapiens
  chr11:61819621-61819640
  hypo
agctggctcacggctcgta

SEQ ID NO: 82236 - DNA, 45 bp, Homo sapiens; identical to SEQ ID NO: 25313
  chr11:61825692-61825737
  hypo

SEQ ID NO: 82237 - DNA, 31 bp, Homo sapiens
  chr11:61826063-61826094
  hypo
accgcgagggtgcgaccggccaaatccagat

SEQ ID NO: 82238 - DNA, 18 bp, Homo sapiens
  chr11:61880293-61880311
  hypo
tcttttttttttttcccg

SEQ ID NO: 82239 - DNA, 30 bp, Homo sapiens
  chr11:61889964-61889994
  hypo
tgccattcacaaggcgttttgtttttactt

SEQ ID NO: 82240 - DNA, 30 bp, Homo sapiens
  chr11:61897497-61897527
  hypo
cctgtggtggagatcggcatcagtgagcgc

SEQ ID NO: 82241 - DNA, 30 bp, Homo sapiens
  chr11:61911139-61911169
  hypo
gccagatttctaggcgagagtgctcctcca

SEQ ID NO: 82242 - DNA, 165 bp, Homo sapiens; identical to SEQ ID NO: 48525
  chr11:62192261-62192426
  hypo

SEQ ID NO: 82243 - DNA, 31 bp, Homo sapiens
  chr11:62242405-62242436
  hypo
gggacccaggagaagccgctgcactggcagg

SEQ ID NO: 82244 - DNA, 89 bp, Homo sapiens
  chr11:62257977-62258066
  hypo
gctttctttaaaggaggtggagtatgtccctgtttatatgctgaacggacattcaccccaggctatgggtggagcgctgggcaaggaag

SEQ ID NO: 82245 - DNA, 469 bp, Homo sapiens; identical to SEQ ID NO: 48527
  chr11:62313645-62314114
  hypo

SEQ ID NO: 82246 - DNA, 188 bp, Homo sapiens
  chr11:62361979-62362167
  hypo
caactcacagtctcataggcccgtttcaccataatgccccccagtccccggttctgggacagctggtttctgttgatcggtgtcttggtaccccgaggtgtttttggtttcaggggtgcctgggccactggaaaaaaacagaaaactttcgcaccttttcttcccacgcagttcccctttgttacttc

SEQ ID NO: 82247 - DNA, 209 bp, Homo sapiens; identical to SEQ ID NO: 8138
  chr11:62369473-62369682
  hypo

SEQ ID NO: 82248 - DNA, 31 bp, Homo sapiens
  chr11:62370822-62370853
  hypo
catgtgatctggtcaccgtagtagcatcacc

SEQ ID NO: 82249 - DNA, 30 bp, Homo sapiens
  chr11:62376459-62376489
  hypo
gtaatgtctctggccgccacctccaggacc

SEQ ID NO: 82250 - DNA, 30 bp, Homo sapiens; identical to SEQ ID NO: 25317
  chr11:62381716-62381746
  hypo

SEQ ID NO: 82251 - DNA, 106 bp, Homo sapiens
  chr11:62387276-62387382
  hypo
aagtgctgggattacaggcgtgagccactgcgcccagacaagccctttcaactttaatcagggggttttaactttcttgccaaacggtccctaaggagagagagtt

SEQ ID NO: 82252 - DNA, 30 bp, Homo sapiens
  chr11:62415009-62415039
  hypo
caatgcggagatcccgctccacggtggccc

SEQ ID NO: 82253 - DNA, 39 bp, Homo sapiens
  chr11:62418573-62418612
  hypo
agctatgtttctttctccccccgccccgagagggagtct

SEQ ID NO: 82254 - DNA, 29 bp, Homo sapiens
  chr11:62421696-62421725
  hypo
ccgcgcccggcctcaactcaggactttaa

SEQ ID NO: 82255 - DNA, 25 bp, Homo sapiens
  chr11:62423253-62423278
  hypo
aaaagctatatcctcgggctgggcg

SEQ ID NO: 82256 - DNA, 78 bp, Homo sapiens
  chr11:62440581-62440659
  hypo
cacattttcaaaacaggtcatgtggtgtcaggttggagtgtacttccagggataaccgtgggacattcttgaaatctg

SEQ ID NO: 82257 - DNA, 31 bp, Homo sapiens
  chr11:62450196-62450227
  hypo
gtgctggaattacaggcgtgagtgctggaat

SEQ ID NO: 82258 - DNA, 30 bp, Homo sapiens
  chr11:62470803-62470833
  hypo
tgggcatgcatatacgtttttttttttttt

SEQ ID NO: 82259 - DNA, 198 bp, Homo sapiens; identical to SEQ ID NO: 25320
  chr11:62474895-62475093
  hypo

SEQ ID NO: 82260 - DNA, 30 bp, Homo sapiens
  chr11:62482693-62482723
  hypo
ttggttgtgttttgcgggggtgcctggcac

SEQ ID NO: 82261 - DNA, 184 bp, Homo sapiens
  chr11:62484465-62484649
  hypo
ccttggccccggcttcggttctgccggttacgcttgtttcggttgtttcggcgatttgtccgcttctcggaggggggcagaagcttccttgcctcctccttgtacttagtgacaatgggctgagcttcctccttctccagctccccatatgtcacctcatccatatagtcgcatttttcaggca

SEQ ID NO: 82262 - DNA, 18 bp, Homo sapiens
  chr11:62485882-62485900
  hypo
ctccctgcggccaggcgc

SEQ ID NO: 82263 - DNA, 30 bp, Homo sapiens
  chr11:62490137-62490167
  hypo
ctgccttgagtcctcgtccatcgaaaccgt

SEQ ID NO: 82264 - DNA, 43 bp, Homo sapiens
  chr11:62527855-62527898
  hypo
ttttttttttttttgagactccgtcttgctttgtcgccaggct

SEQ ID NO: 82265 - DNA, 67 bp, Homo sapiens; identical to SEQ ID NO: 25321
  chr11:62532993-62533060
  hypo

SEQ ID NO: 82266 - DNA, 214 bp, Homo sapiens
  chr11:62541856-62542070
  hypo
tctttatttcaaagacaatggggagccattgggaggagtgctgcacagaagccacatagctgtccattggatgtagggacctggacgtcactggtgacccattgatcccctgccagaggagtagtgggggcaatgcctgggtgggtcatcctggatctgggccttcctgtctgaggtgtggatgcatcactttggcgcacgggagcctaccttc

SEQ ID NO: 82267 - DNA, 30 bp, Homo sapiens; identical to SEQ ID NO: 25322
  chr11:62562459-62562489
  hypo

SEQ ID NO: 82268 - DNA, 30 bp, Homo sapiens; identical to SEQ ID NO: 25323
  chr11:62652970-62653000
  hypo

SEQ ID NO: 82269 - DNA, 30 bp, Homo sapiens
  chr11:62655827-62655857
  hypo
tcctttccttgttccggcggctgagtgacc

SEQ ID NO: 82270 - DNA, 31 bp, Homo sapiens; identical to SEQ ID NO: 25324
  chr11:62700323-62700354
  hypo

SEQ ID NO: 82271 - DNA, 330 bp, Homo sapiens; identical to SEQ ID NO: 48557
  chr11:63258494-63258824
  hypo

SEQ ID NO: 82272 - DNA, 30 bp, Homo sapiens; identical to SEQ ID NO: 25327
  chr11:63320384-63320414
  hypo

SEQ ID NO: 82273 - DNA, 179 bp, Homo sapiens
  chr11:63325852-63326031
  hypo
tgaagatgcacctggtcactgcgggagacgccatagcgcagatggttcacgaagtgctcgcagttgtcactggtcagcgaataaggcaactcctgccccaccaactcctctgcccgcttgacgattttgttggaaggcagtggtgtgtatctgtcatcgtgcttgttattgaccctgta

SEQ ID NO: 82274 - DNA, 250 bp, Homo sapiens
  chr11:63377495-63377745
  hypo
gaattaacttccctaaggtctcggagctccccgaaaagtagcaccaggattccgcagcagatctgcctgagcttaaaggtgaggttcttcccaccacaccaagtaattcactccaaggtactgacgttcaacaactgtgctcccatggcaaaactggcctctgcctcaccgcactctcggcctgaaatgcccttttgccgttcacctggaagattcctactcatccctcgagatgggctcaacatgtcca

SEQ ID NO: 82275 - DNA, 41 bp, Homo sapiens
  chr11:63389634-63389675
  hypo
cactgcactccagccttgacgacagagcaagactcagtctc

SEQ ID NO: 82276 - DNA, 30 bp, Homo sapiens; identical to SEQ ID NO: 25328
  chr11:63398535-63398565
  hypo

SEQ ID NO: 82277 - DNA, 153 bp, Homo sapiens
  chr11:63399449-63399602
  hypo
tctctaaaaaacaaaagcaaacggtcgacttctgcagggcccaggtgagaaaggcccacctgtgtcctggttgagggtcctcagggttctttgggacccgaggattcctgaaatcatggatcacccacatacgctttgagacatgctttaatt

SEQ ID NO: 82278 - DNA, 121 bp, Homo sapiens; identical to SEQ ID NO: 25330
  chr11:63431995-63432116
  hypo

SEQ ID NO: 82279 - DNA, 89 bp, Homo sapiens
  chr11:63434152-63434241
  hypo
attacaggcatgagccaccgtgcccggtccacttgtcaggaatcttaaactctggagatctagtctccggggagggtactaaaaatatc

SEQ ID NO: 82280 - DNA, 22 bp, Homo sapiens
  chr11:63437114-63437136
  hypo
gtagctaatacaataatgggcc

SEQ ID NO: 82281 - DNA, 30 bp, Homo sapiens
  chr11:63442644-63442674
  hypo
taatagtggccaggctcggtggctcacgcc

SEQ ID NO: 82282 - DNA, 31 bp, Homo sapiens
  chr11:63444189-63444220
  hypo
aagagacctagcacagcgcctcaggtgttca

SEQ ID NO: 82283 - DNA, 30 bp, Homo sapiens
  chr11:63528996-63529026
  hypo
taataactgaccagcgaattgggaagcagt

SEQ ID NO: 82284 - DNA, 97 bp, Homo sapiens
  chr11:63609979-63610076
  hypo
attcctgtattctttaaaacgggaaaaaagacaagcagcagctcctcaggtcacaaggccaggtatatcaaacactggcctccgagaatagatcatg

SEQ ID NO: 82285 - DNA, 32 bp, Homo sapiens; identical to SEQ ID NO: 25334
  chr11:63641118-63641150
  hypo

SEQ ID NO: 82286 - DNA, 227 bp, Homo sapiens
  chr11:63675217-63675444
  hypo
tcctgacaggcccttgcgtagccacggcccctcctcctacagagattcaaagcattgcagcccctttcctccaaaaggactgcagtcctgagaccctagcgtgtggctccaaaaacgcactcacacctgcaacccccagaacagcgcgtgagccctggctgtgggggagcagcctcgtgccgggccgtgtgctcagtgtgctcagtgaagtgcgtgcacagccactc

SEQ ID NO: 82287 - DNA, 111 bp, Homo sapiens; identical to SEQ ID NO: 25336
  chr11:63675663-63675774
  hypo

SEQ ID NO: 82288 - DNA, 501 bp, Homo sapiens
  chr11:63676298-63676799
  hypo
ggtggggtgcctcagcccccccgtgacgcccgcctctgccctctccacagacctcacgtggtgggcagtggcggcaacgacaaagaaaaggaagaatttcgggaggccaagccccgctccctccgcttcacgtggagtatgaagaccacgagctccatggagcccaacgagatgatgcgggagatccgcaaggtgctggacgcgaacagctgccagagcgagctgcatgagaagtacatgctgctgtgcatgcacggcacgccgggccacgaggacttcgtgcagtgggagatggaggtgtgcaaactgccgcggctctctctcaacggggttcgatttaagcggatatcgggcacctccatggccttcaaaaacattgcctccaaaatagccaacgagctgaagctttaacaggctgccaggagcgggggcggcgggggcgggccagctggacgggctgccggccgctgcgccgccccacctgggcgagactgcagcgat

SEQ ID NO: 82289 - DNA, 28 bp, Homo sapiens
  chr11:63707793-63707821
  hypo
tacaggcgtgagccaccacacaggccta

SEQ ID NO: 82290 - DNA, 30 bp, Homo sapiens
  chr11:63710279-63710309
  hypo
ttcttgagttattgcggtctcaggccatgg

SEQ ID NO: 82291 - DNA, 31 bp, Homo sapiens
  chr11:63714456-63714487
  hypo
agaaatatgatagaaacgggtgagtcacatt

SEQ ID NO: 82292 - DNA, 32 bp, Homo sapiens
  chr11:63743820-63743852
  hypo
acctgaccagccccaccggcccatcctggtca

SEQ ID NO: 82293 - DNA, 30 bp, Homo sapiens; identical to SEQ ID NO: 25339
  chr11:63764202-63764232
  hypo

SEQ ID NO: 82294 - DNA, 30 bp, Homo sapiens
  chr11:63764910-63764940
  hypo
gaccgcggcgagggcggcaccaccaatccg

SEQ ID NO: 82295 - DNA, 31 bp, Homo sapiens
  chr11:63776021-63776052
  hypo
gaggagcgctcgggcccgggagcagcatgtg

SEQ ID NO: 82296 - DNA, 30 bp, Homo sapiens; identical to SEQ ID NO: 25340
  chr11:63776404-63776434
  hypo

SEQ ID NO: 82297 - DNA, 282 bp, Homo sapiens
  chr11:63779083-63779365
  hypo
caatgaagaacaaacacaaaacgcaagcagggaatcagggctgcgggacgaagacatggagcagggcagtgcatcagggttctgggcagagtggccagggcaggcaggatggcccttgtgcgtgttcgaacaatgggtggctggtcatgggaggggcgcgggtagaggcctgaactcctgtaggagggatgtccagggaccccacgggaagatgggtgtgtctgggcagagtcagatggggtctaacttgggcaggtaggcgattaggactggatgaactca

SEQ ID NO: 82298 - DNA, 82 bp, Homo sapiens; identical to SEQ ID NO: 25342
  chr11:63783734-63783816
  hypo

SEQ ID NO: 82299 - DNA, 169 bp, Homo sapiens; identical to SEQ ID NO: 25343
  chr11:63784053-63784222
  hypo

SEQ ID NO: 82300 - DNA, 43 bp, Homo sapiens
  chr11:63786386-63786429
  hypo
tgggggatgggcactggactgcgagtccaagctggggctcatg

SEQ ID NO: 82301 - DNA, 30 bp, Homo sapiens; identical to SEQ ID NO: 25344
  chr11:63808025-63808055
  hypo

SEQ ID NO: 82302 - DNA, 22 bp, Homo sapiens
  chr11:63811296-63811318
  hypo
ttttatgacggagtttcgctct

SEQ ID NO: 82303 - DNA, 32 bp, Homo sapiens
  chr11:63814028-63814060
  hypo
ttttttctttttgagacggagttttgttctcg

SEQ ID NO: 82304 - DNA, 32 bp, Homo sapiens
  chr11:63814239-63814271
  hypo
ggattacaggcgtgagccgctgcgcctggcct

SEQ ID NO: 82305 - DNA, 31 bp, Homo sapiens
  chr11:63818820-63818851
  hypo
tgggtgcgtgtggtcacgagctagagaggca

SEQ ID NO: 82306 - DNA, 31 bp, Homo sapiens
  chr11:63830016-63830047
  hypo
gactcttgtacaagctcggtctctgtttcct

SEQ ID NO: 82307 - DNA, 332 bp, Homo sapiens; identical to SEQ ID NO: 25345
  chr11:63832548-63832880
  hypo

SEQ ID NO: 82308 - DNA, 525 bp, Homo sapiens
  chr11:63849154-63849679
  hypo
accatgcaggtgagggcgtgtggctgaagcctgttcctgcttgggggttggccacacagcatcccaactccaggtccagagccgagcctgacagccctcctccactgcctcctggagctgccggagagaggtccgggtccgttctccccaattcacagacatgaagactgaggccgtggttccagtggctgctcggtggtggggctggagcttggcagcatcctgcagccctctggactcccggctctcgagtgccgcgttctacctgctgtgttctaaatggacatgccatccccacagctgtgtcaataaagcagccatttacagagcgggcgccggatcccgtgacaggttgaaaagtgtgtgagctgcagcgtcctgggctggggcagaggggccgtggcgagaacagatggggctgtgcccatctccccaggccctcctgtggctgcgcctggagcctcccgggagggaggccagagccaggagcaggccagagccaggagcaggcgcgaaacatccctt

SEQ ID NO: 82309 - DNA, 30 bp, Homo sapiens; identical to SEQ ID NO: 25347
  chr11:63856697-63856727
  hypo

SEQ ID NO: 82310 - DNA, 30 bp, Homo sapiens; identical to SEQ ID NO: 25348
  chr11:63870604-63870634
  hypo

SEQ ID NO: 82311 - DNA, 78 bp, Homo sapiens
  chr11:63871582-63871660
  hypo
ctttggcaggggcctccggaccagtgaccccagtcaaacccagagggtcttgggcggcagcgacgaaggaggtaaggc

SEQ ID NO: 82312 - DNA, 30 bp, Homo sapiens
  chr11:63883569-63883599
  hypo
gcaggaccggacttcggtcaccccttggta

SEQ ID NO: 82313 - DNA, 30 bp, Homo sapiens
  chr11:63883932-63883962
  hypo
tctactgcaacgaccggggactcacatcca

SEQ ID NO: 82314 - DNA, 331 bp, Homo sapiens
  chr11:63885569-63885900
  hypo
atcctggaaatccgcggccctgggctgcagatgctgcccatcaacccgtaccgcgccaaagaagagtacgtggtccacactatcttcccctccaacggcagcagcctctgcaaggccacacacaccattggctacggcaccacgcggggctaccgggacggcggcatccccgacatagactactcctacacatgatgcccgcccacccgggctgccccgcctcagccccagctgccctggcgtggccatgtggctttgcccagcctgctgcaatccaagagagcaaggaagagaaattccatgggtgactttcctccgcagaaagcaaagt

SEQ ID NO: 82315 - DNA, 30 bp, Homo sapiens
  chr11:63887422-63887452
  hypo
tgccgcttgttctgcgccaaggaaaaggaa

SEQ ID NO: 82316 - DNA, 145 bp, Homo sapiens
  chr11:63892467-63892612
  hypo
tccacgtctcccccggagacccctgcctgggacagctcctgcttctggtacctgctggagaccctggccagggcctggctctttgagaccactgtcactgtcccctcccgccccttgtcactgaaatgcccggcctgtgccagga

SEQ ID NO: 82317 - DNA, 30 bp, Homo sapiens
  chr11:63894438-63894468
  hypo
ccagatggctgacccggcccggcttctcag

SEQ ID NO: 82318 - DNA, 188 bp, Homo sapiens
  chr11:63905994-63906182
  hypo
ttgatgatgtttaaaccgtacctgaaatacagccaggcggcaataataaaacagccgcgggccctgctggcagaggaatggctgacagccgggcctctctccccaactgcgatgccgctcggctctggtttttaccgcaattacaatgtccgaagacagggaggaggcagcagcggggaggaggagag

SEQ ID NO: 82319 - DNA, 403 bp, Homo sapiens
  chr11:63908845-63909248
  hypo
ccatctgcacagagccggggagcgggggcactgtggccaccacgtgctgctgcagccagaccccttcatatcctaggcacacagagtacccatccgttaaacgggcaggcaagccacggcctcctggggagccctgaaaccagctcggctgtgccttgccaaggaactggcggatcattccaggagagcgagccaagggctgcagatccagcccttttcatgcttggccaatttaatggtccccattaatttcaaaacacacacattcccacaagctccggcctcctcggctcagtgctcgggtggacagcacaccggggacgcaagcaggggcacaggtgcaggcgctgaggcctcaaggacaggaaggagccacagaggatgtgctcgggacactgggcac

SEQ ID NO: 82320 - DNA, 145 bp, Homo sapiens
  chr11:63912568-63912713
  hypo
agggcggtgataagcggccagcagattctcacaaatcaaagccccaagacttaaggagatagagcgccacttcatgacttattttaaataaataagcggcttaaaaatctccctgcgaggtcggcttgtcgctgtgaaacatggc

SEQ ID NO: 82321 - DNA, 221 bp, Homo sapiens
  chr11:63916438-63916659
  hypo
gttcagaccctgcctccgtcattccctgggattccaggcgggtaccgggtcctcctggctgtgagagtctagaacaaaaagatcccaggagaacacaccaagaggtgtatgggtaaactgaggcaagcagggggaggtgaaagctgatcatttgcaggaggtaccatgtccctcggcaccgctgggacaggggtgatgcccagaacggcgctgatgacacc

SEQ ID NO: 82322 - DNA, 31 bp, Homo sapiens
  chr11:63917114-63917145
  hypo
tgcctcattttccctccggccactttgcagc

SEQ ID NO: 82323 - DNA, 31 bp, Homo sapiens
  chr11:63917484-63917515
  hypo
cagaaactcctgcctacgtgtaacctgtcac

SEQ ID NO: 82324 - DNA, 31 bp, Homo sapiens
  chr11:63923020-63923051
  hypo
tgtgtgctgcaaagtgcggtctacacgccag

SEQ ID NO: 82325 - DNA, 85 bp, Homo sapiens
  chr11:63934614-63934699
  hypo
tttttaagtacttttatatatttttatgtactattaatattactttatgataaatataatgaatacaggccgggccattataata

SEQ ID NO: 82326 - DNA, 272 bp, Homo sapiens; identical to SEQ ID NO: 25354
  chr11:63963858-63964130
  hypo

SEQ ID NO: 82327 - DNA, 30 bp, Homo sapiens
  chr11:63971381-63971411
  hypo
cctctgcagctcggcgccccgggcctcgcc

SEQ ID NO: 82328 - DNA, 30 bp, Homo sapiens; identical to SEQ ID NO: 25355
  chr11:63971751-63971781
  hypo

SEQ ID NO: 82329 - DNA, 72 bp, Homo sapiens
  chr11:63978772-63978844
  hypo
atgccagctcacttctcggacagcgcccagactgaggcctgctaccacatgctgagccggccccagccgcca

SEQ ID NO: 82330 - DNA, 216 bp, Homo sapiens
  chr11:63988353-63988569
  hypo
caccttggcggccccacgtgggcactgccccttcccaggctcacatgctgtcaccctgatggggaggtgggggctcggtgactctggaggaggggaatagtgcctggcagcccgtcaccagtatggtcccgcagctcaccccacggatcctggaagcccaccagaatgtggcccagttgtcgctggcagaggcccagctgcgcttcatccaggcct

SEQ ID NO: 82331 - DNA, 162 bp, Homo sapiens
  chr11:63990014-63990176
  hypo
aacaaagcgacactccgtctcaaaaaaaaaaaaaaaaaaaaaagagatttcaggtcaggagagcagaagaaccagttcttgctccagctctgctgtggacagttcactgtctgggcctgggttcgccggtccgcaagacagggctagcggtggatgctgtta

SEQ ID NO: 82332 - DNA, 31 bp, Homo sapiens; identical to SEQ ID NO: 25358
  chr11:63996887-63996918
  hypo

SEQ ID NO: 82333 - DNA, 31 bp, Homo sapiens; identical to SEQ ID NO: 25359
  chr11:64019237-64019268
  hypo

SEQ ID NO: 82334 - DNA, 30 bp, Homo sapiens
  chr11:64026526-64026556
  hypo
cagctggccccaggcgttcccctgcccagc

SEQ ID NO: 82335 - DNA, 30 bp, Homo sapiens
  chr11:64029908-64029938
  hypo
ttgagtacaacgggcgcagcgggtacctgc

SEQ ID NO: 82336 - DNA, 59 bp, Homo sapiens; identical to SEQ ID NO: 25360
  chr11:64032944-64033003
  hypo

SEQ ID NO: 82337 - DNA, 27 bp, Homo sapiens
  chr11:64041564-64041591
  hypo
ctaagaaagcaagtaggtggccgggtg

SEQ ID NO: 82338 - DNA, 355 bp, Homo sapiens
  chr11:64044374-64044729
  hypo
cctctagctttacattctctgcgtgttgggcttctgagtcagcggctggggcggacatccctgctgatgcttccgcgagcatccctgcactgggattttcagagtcctcagattcccaagaaggagaatacgaagttctccctgttttatagatgaggaaacagaggcacacttaattacaagacacttgcacactgaattgcacacttaattaaaacagtggtgttccagaccgtttggagcagtgaagctctgccatcaggcaagggctgggtttggatcctgcccctaccacatgccgaccacacacaatctgctgccgggggaggctgacgtcagtggccagcacagtggc

SEQ ID NO: 82339 - DNA, 95 bp, Homo sapiens
  chr11:64055230-64055325
  hypo
tctttctgctggtgaacgtgctgtgtgctgtgctctcccatcggcgccgggcacagccctgggccctgctgcttgtccgcgtcctggtgagcgac

SEQ ID NO: 82340 - DNA, 180 bp, Homo sapiens
  chr11:64056036-64056216
  hypo
ggacaggagtaagtatcgatgatggcttcctcccccagagcaccagccacatcctcaatgggcaggtctttgcctctcggtcctacttctttgaccgggctgggcactgtgaagatgagggctgctcctgggagcacagccggggtgagagcaccaggtaggagccgtggcactgcctca

SEQ ID NO: 82341 - DNA, 369 bp, Homo sapiens; identical to SEQ ID NO: 48579
  chr11:64059292-64059661
  hypo

SEQ ID NO: 82342 - DNA, 209 bp, Homo sapiens; identical to SEQ ID NO: 48580
  chr11:64059901-64060110
  hypo

SEQ ID NO: 82343 - DNA, 15 bp, Homo sapiens
  chr11:64060160-64060175
  hypo
cgccttcctttccct

SEQ ID NO: 82344 - DNA, 79 bp, Homo sapiens
  chr11:64069274-64069353
  hypo
agctgggaggacaggccggcaccatcctgctcagctaattttttattttttgtagagaaaatttcgacatgttgcccca

SEQ ID NO: 82345 - DNA, 40 bp, Homo sapiens
  chr11:64078888-64078928
  hypo
tttttttttttttttttgagacggagtctcgctttgttgc

SEQ ID NO: 82346 - DNA, 116 bp, Homo sapiens
  chr11:64081530-64081646
  hypo
tcaaggagggtgagcgctgggcaggggctgggcgagggctgggggagtcggggacccgggccaggtgggggtgaggcctgggagttctggtgagtggactcggggaggacagctct

SEQ ID NO: 82347 - DNA, 330 bp, Homo sapiens; identical to SEQ ID NO: 25364
  chr11:64088214-64088544
  hypo

SEQ ID NO: 82348 - DNA, 1 bp, Homo sapiens
  chr11:64089707-64089708
  hypo
t

SEQ ID NO: 82349 - DNA, 31 bp, Homo sapiens
  chr11:64105953-64105984
  hypo
ccataaaacagccaggcgctcttaagccagc

SEQ ID NO: 82350 - DNA, 189 bp, Homo sapiens
  chr11:64112372-64112561
  hypo
cctgggagcaagcccggctgcgggaggcagtggaggctgctggccaggagctggagtctgcgtcccaggaacgggaggcgctggtggaggcgctggcagcagcgggccgggagcggaggcagtgggagcgtgaggggtccaggctgcgggcccagtcggaggccgccgaggaacggatgcaggtgctgg

SEQ ID NO: 82351 - DNA, 159 bp, Homo sapiens; identical to SEQ ID NO: 25366
  chr11:64118935-64119094
  hypo

SEQ ID NO: 82352 - DNA, 30 bp, Homo sapiens
  chr11:64120021-64120051
  hypo
tgggttgggctccccgtggggctcacctat

SEQ ID NO: 82353 - DNA, 527 bp, Homo sapiens
  chr11:64120592-64121119
  hypo
cggggccggctggcgcggctggagctggagcgggcacagctggagatgcagagccagcagctgcgcgagtccaaccagcagctggacctgagcgcctgccggctgaccacgcagtgtgaggtgtggctggagggccggtgggggtatgggcgtgtggtggggcagaaagcctagacccaggtggtcctgagctgggtcccaccctccgagccatggtgcccccctgccagctattgacacagctgcgaagtgcccaggaagaggagaaccggcagctgctggctgaagttcaggccctgagccgggagaacagggagctcctggagcgcagcctggagagtcgggaccacctgcaccgcgaacagcgggagtacctgtgagtgggccgcctgggagcggggtggggcctgcatcccctttgggcgttcctggggagagcccttagtgagggcctagggacagggttggagctgaccttccaggtcagtccaatctgcggcacgggaccagtgcgtcctcgctgcagc

SEQ ID NO: 82354 - DNA, 30 bp, Homo sapiens; identical to SEQ ID NO: 25369
  chr11:64124763-64124793
  hypo

SEQ ID NO: 82355 - DNA, 602 bp, Homo sapiens
  chr11:64135676-64136278
  hypo
ctggtgctggagaccggccaggtcgggcagcggtggccaggagcgctatgatgcaggtgggctgggctgggctgggttggggggaaattggttttaggagaggcctaggcccggggactctaggcctagatccaactggcgcccgcagcgtgagctcagcaaggtcctaagcctctccgacatggggcgtggcggggccgcggggctaccaggtgggacctctgacgcgccgccttcgccttcgccttcgccttcgcctccaggactcgcccttcttccagcagtacgagctggacctgcgggagcctgcgctgggccagggcagcttttctgtgtgtcgccgctgccgccagcgccagagcggccaggagttcgcagtcaagatcctcagtcgcaggtgggagggcccaggcgcgggcaggggtgggggtggcagagcgctgtcccgggggcggggccgaagcgcggcgaccgtaactccttctgctccgtcccccaggctggaggcgaacacgcagcgcgaagtggctgccctgcgcctgtgccagtcacaccccaacgtggtgaatctgcacgaggtgcatcacgaccaggtgatggct

SEQ ID NO: 82356 - DNA, 30 bp, Homo sapiens
  chr11:64136960-64136990
  hypo
tgctggagcacatccgcaagaagcggcact

SEQ ID NO: 82357 - DNA, 83 bp, Homo sapiens
  chr11:64143180-64143263
  hypo
tttgactctaagcaagttacttctccctaaggtactttgggagtgtaaacaaaaatattccatatgaacgtagagattgcaaa

SEQ ID NO: 82358 - DNA, 30 bp, Homo sapiens
  chr11:64150548-64150578
  hypo
tcccaccgaagcagccgtccctgtgtgttg

SEQ ID NO: 82359 - DNA, 231 bp, Homo sapiens
  chr11:64168610-64168841
  hypo
ccaatgcggatgccccgcagagggcacccccggcagaggagctcttcagagccaggtggacacaatgatgagagcgtgagggagaatttctctgtggatgtcagttatcctctttccccagccagcccagtgcttgcccattgtgtccatgttcaacgtggccatggtggcagagatggaggttatgcaggggttcagcggcgaatgtgtacttctcggcaccagggcttc

SEQ ID NO: 82360 - DNA, 66 bp, Homo sapiens
  chr11:64310456-64310522
  hypo
ttcacatgcaccgggcggacagcggaggccccgggcccggggaggcggcagcggccgctcaagtga

SEQ ID NO: 82361 - DNA, 199 bp, Homo sapiens
  chr11:64313081-64313280
  hypo
aagggtctgaagtctacctgccgccagggcaagggcgcatatgtcaggaagagtgggaaggggggctggggagaacgtatgcccccaggcttctgcctctccagttgtctgcgcaaagaacaaatcctagtgcgctgtggcaggggcggcacgtctgtttgctctcacgtgccactccgttccttgctccattgcctga

SEQ ID NO: 82362 - DNA, 53 bp, Homo sapiens
  chr11:64319241-64319294
  hypo
acagtccaagtggccacgaacgggagggcggttaaatgcgtgatggtaaatcc

SEQ ID NO: 82363 - DNA, 243 bp, Homo sapiens; identical to SEQ ID NO: 25372
  chr11:64323673-64323916
  hypo

SEQ ID NO: 82364 - DNA, 31 bp, Homo sapiens
  chr11:64324827-64324858
  hypo
gacaaaagcaaggttgcgaggggtgaggagc

SEQ ID NO: 82365 - DNA, 30 bp, Homo sapiens
  chr11:64329587-64329617
  hypo
gcttttgggatggccggcatctttctgagt

SEQ ID NO: 82366 - DNA, 43 bp, Homo sapiens; identical to SEQ ID NO: 25373
  chr11:64335473-64335516
  hypo

SEQ ID NO: 82367 - DNA, 88 bp, Homo sapiens; identical to SEQ ID NO: 25374
  chr11:64347187-64347275
  hypo

SEQ ID NO: 82368 - DNA, 102 bp, Homo sapiens
  chr11:64367836-64367938
  hypo
agaaatgggggctctgcgctcagccttggccgtgctggggctgggcggggtgggggctgccttcacctgcatcaccatctacagcagcgagctcttccccac

SEQ ID NO: 82369 - DNA, 50 bp, Homo sapiens
  chr11:64390386-64390436
  hypo
caggtgaccctcagtccgcacattggggtcgctctcggcggccagcgcca

SEQ ID NO: 82370 - DNA, 202 bp, Homo sapiens; identical to SEQ ID NO: 48587
  chr11:64410377-64410579
  hypo

SEQ ID NO: 82371 - DNA, 59 bp, Homo sapiens
  chr11:64418854-64418913
  hypo
tgccaggtagctgctgcgactcttgaaggtgacgggatcggccacgatggcacgcaggc

SEQ ID NO: 82372 - DNA, 31 bp, Homo sapiens; identical to SEQ ID NO: 25377
  chr11:64434773-64434804
  hypo

SEQ ID NO: 82373 - DNA, 30 bp, Homo sapiens
  chr11:64435051-64435081
  hypo
ccacatcctcacagcggaatgacaagtccc

SEQ ID NO: 82374 - DNA, 33 bp, Homo sapiens; identical to SEQ ID NO: 8160
  chr11:64480297-64480330
  hypo

SEQ ID NO: 82375 - DNA, 893 bp, Homo sapiens; identical to SEQ ID NO: 8161
  chr11:64480379-64481272
  hypo

SEQ ID NO: 82376 - DNA, 1421 bp, Homo sapiens; identical to SEQ ID NO: 48596
  chr11:64512373-64513794
  hypo

SEQ ID NO: 82377 - DNA, 66 bp, Homo sapiens
  chr11:64521037-64521103
  hypo
ggcgtgcgaccccgcgatgcacaggtgtgccatgttgatgcgcttcactgcgccctcctccaccag

SEQ ID NO: 82378 - DNA, 30 bp, Homo sapiens
  chr11:64532956-64532986
  hypo
atggctcgggccatcgccgccgcggggagg

SEQ ID NO: 82379 - DNA, 30 bp, Homo sapiens
  chr11:64537362-64537392
  hypo
aattaggcacaaaacggacacatctcacag

SEQ ID NO: 82380 - DNA, 24 bp, Homo sapiens
  chr11:64578576-64578600
  hypo
tgtttgttttgagacacggtcttt

SEQ ID NO: 82381 - DNA, 30 bp, Homo sapiens
  chr11:64595087-64595117
  hypo
ggcagcaggcacagcggtcaggccacgcct

SEQ ID NO: 82382 - DNA, 30 bp, Homo sapiens
  chr11:64597372-64597402
  hypo
gcagcctcgagactcggggatcttggcacc

SEQ ID NO: 82383 - DNA, 31 bp, Homo sapiens
  chr11:64597831-64597862
  hypo
ggggtggcaataatcccgctgtccctgcctc

SEQ ID NO: 82384 - DNA, 301 bp, Homo sapiens
  chr11:64599004-64599305
  hypo
cagcagcggcagcccgttgtcgtaagcctccttgagtgtgtacacgggccggggtcttggccgcgcgtccagcagcagccgctgcagctcacccagcacctgcagccagcgttcccgctccccctcgctctctgccagcagcagcacagtgcacgtggtgggcggcactgccagctgggaggttgtcacctgtgggcaaggaccccagctggagggccgtggaccagagccatctgtcctccctcccttcctgcctccagcagccgctgtgccccgggggcctagcgtgcactgtcagcag

SEQ ID NO: 82385 - DNA, 178 bp, Homo sapiens
  chr11:64600134-64600312
  hypo
gtcaaacagcagcaggcgtgagtcactcagggcagcaaacacgcgctgccagccccgccggacacctgagggccgcggcacctggcggaaaggcaagcatgggagggctgcagggaccctcagccccccatgcccatcttcccctccctcggcccccactcaccgacagaaagccctc

SEQ ID NO: 82386 - DNA, 31 bp, Homo sapiens
  chr11:64600772-64600803
  hypo
tgggaagctccgggggcgcagcgtgtgtgag

SEQ ID NO: 82387 - DNA, 31 bp, Homo sapiens
  chr11:64601738-64601769
  hypo
cactggccctcgggcccgcagctcctcccgc

SEQ ID NO: 82388 - DNA, 196 bp, Homo sapiens
  chr11:64602458-64602654
  hypo
catgggctgggccctcagtctcgcctgcgttccccaccccgacccacccctggcacccaccagctgaggatgtcggcgagctgggcctcccagttgctctccgtctcccgccgctcaccctccagccgctgcttgctctcctgctcctgggccagctctgcttctagctggggccggccagaggaaaggtcagccc

SEQ ID NO: 82389 - DNA, 84 bp, Homo sapiens; identical to SEQ ID NO: 25381
  chr11:64607056-64607140
  hypo
